United States Patent Application Publication US 2022/0213167 A1 - sequence listing, part 27

SEQ ID NO: 568299 - protein, 14 aa, Homo sapiens
  CDR3 for alpha chain variable domain of TCR clone 284150 (TRAV13-1, TRAJ9)
CAASALTGGFKTIF

SEQ ID NO: 568300 - protein, 15 aa, Homo sapiens
  CDR3 for beta chain variable domain of TCR clone 284150 (TRBV6-1, TRBJ2-6)
CASSSRPSGANVLTF

SEQ ID NO: 568301 - protein, 14 aa, Homo sapiens
  CDR3 for alpha chain variable domain of TCR clone 284151 (TRAV4, TRAJ17)
CLVGDMAAGHKLTF

SEQ ID NO: 568302 - protein, 14 aa, Homo sapiens
  CDR3 for beta chain variable domain of TCR clone 284151 (TRBV4-1, TRBJ2-7)
CASSPVAGGDEQYF

SEQ ID NO: 568303 - protein, 18 aa, Homo sapiens
  CDR3 for alpha chain variable domain of TCR clone 284152 (TRAV17, TRAJ45)
CATSLDLYSGGGADGLTF

SEQ ID NO: 568304 - protein, 16 aa, Homo sapiens
  CDR3 for beta chain variable domain of TCR clone 284152 (TRBV9, TRBJ2-1)
CASSVGGGGNYNEQFF

SEQ ID NO: 568305 - protein, 16 aa, Homo sapiens
  CDR3 for alpha chain variable domain of TCR clone 284153 (TRAV30, TRAJ24)
CGTEIVDADSWGKFQF

SEQ ID NO: 568306 - protein, 17 aa, Homo sapiens
  CDR3 for beta chain variable domain of TCR clone 284153 (TRBV20-1, TRBJ2-1)
CSAPPRLAGTRSNEQFF

SEQ ID NO: 568307 - protein, 15 aa, Homo sapiens
  CDR3 for alpha chain variable domain of TCR clone 284154 (TRAV12-3, TRAJ27)
CAMRAYNTNAGKSTF

SEQ ID NO: 568308 - protein, 13 aa, Homo sapiens
  CDR3 for beta chain variable domain of TCR clone 284154 (TRBV7-9, TRBJ1-2)
CASSLKKNYGYTF

SEQ ID NO: 568309 - protein, 16 aa, Homo sapiens
  CDR3 for alpha chain variable domain of TCR clone 284155 (TRAV12-1, TRAJ53)
CVVTSVAGGSNYKLTF

SEQ ID NO: 568310 - protein, 16 aa, Homo sapiens
  CDR3 for beta chain variable domain of TCR clone 284155 (TRBV6-6, TRBJ2-3)
CASSNSHAGSTDTQYF

SEQ ID NO: 568311 - protein, 14 aa, Homo sapiens
  CDR3 for alpha chain variable domain of TCR clone 284156 (TRAV1-1, TRAJ27)
CAVIYNTNAGKSTF

SEQ ID NO: 568312 - protein, 17 aa, Homo sapiens
  CDR3 for beta chain variable domain of TCR clone 284156 (TRBV28, TRBJ2-2)
CASSLATGMGDAGELFF

SEQ ID NO: 568313 - protein, 17 aa, Homo sapiens
  CDR3 for alpha chain variable domain of TCR clone 284157 (TRAV8-6, TRAJ58)
CAVSSWVGETSGSWLTF

SEQ ID NO: 568314 - protein, 17 aa, Homo sapiens
  CDR3 for beta chain variable domain of TCR clone 284157 (TRBV4-3, TRBJ1-2)
CASSSRLQAGGSVGYTF

SEQ ID NO: 568315 - protein, 13 aa, Homo sapiens
  CDR3 for alpha chain variable domain of TCR clone 284158 (TRAV17, TRAJ40)
CSTAPGGTYKYIF

SEQ ID NO: 568316 - protein, 12 aa, Homo sapiens
  CDR3 for beta chain variable domain of TCR clone 284158 (TRBV2, TRBJ1-5)
CASSENRTPQHF

SEQ ID NO: 568317 - protein, 13 aa, Homo sapiens
  CDR3 for alpha chain variable domain of TCR clone 284159 (TRAV27, TRAJ3)
ASLRGSSASKIIF

SEQ ID NO: 568318 - protein, 15 aa, Homo sapiens
  CDR3 for beta chain variable domain of TCR clone 284159 (TRBV28, TRBJ1-3)
CASSMGWASGNTINF

SEQ ID NO: 568319 - protein, 13 aa, Homo sapiens
  CDR3 for alpha chain variable domain of TCR clone 284160 (TRAV2, TRAJ40)
CAVVTAGTYKYSF

SEQ ID NO: 568320 - protein, 15 aa, Homo sapiens
  CDR3 for beta chain variable domain of TCR clone 284160 (TRBV11-3, TRBJ2-3)
CASLKDGREGDTQYF

SEQ ID NO: 568321 - protein, 13 aa, Homo sapiens
  CDR3 for alpha chain variable domain of TCR clone 284161 (TRAV16, TRAJ28)
CAPTGAGSYQLTF

SEQ ID NO: 568322 - protein, 16 aa, Homo sapiens
  CDR3 for beta chain variable domain of TCR clone 284161 (TRBV28, TRBJ1-5)
CASSLTGQGWNQHQHF

SEQ ID NO: 568323 - protein, 13 aa, Homo sapiens
  CDR3 for alpha chain variable domain of TCR clone 284162 (TRAV30, TRAJ24)
CGIVTDSWGKLQF

SEQ ID NO: 568324 - protein, 16 aa, Homo sapiens
  CDR3 for beta chain variable domain of TCR clone 284162 (TRBV19, TRBJ2-1)
CASSKAGPSSYNEQFF

SEQ ID NO: 568325 - protein, 12 aa, Homo sapiens
  CDR3 for alpha chain variable domain of TCR clone 284163 (TRAV3, TRAJ27)
CAVRDGAGKSTF

SEQ ID NO: 568326 - protein, 14 aa, Homo sapiens
  CDR3 for beta chain variable domain of TCR clone 284163 (TRBV7-2, TRBJ1-2)
CASSQTGSTYGYTF

SEQ ID NO: 568327 - protein, 14 aa, Homo sapiens
  CDR3 for alpha chain variable domain of TCR clone 284164 (TRAV26-1, TRAJ26)
CIVRATFLGQNFVF

SEQ ID NO: 568328 - protein, 16 aa, Homo sapiens
  CDR3 for beta chain variable domain of TCR clone 284164 (TRBV7-2, TRBJ2-5)
CASSLVLWTKQETQYF

SEQ ID NO: 568329 - protein, 15 aa, Homo sapiens
  CDR3 for alpha chain variable domain of TCR clone 284165 (TRAV3, TRAJ9)
CAVRARNTGGFKTIL

SEQ ID NO: 568330 - protein, 15 aa, Homo sapiens
  CDR3 for beta chain variable domain of TCR clone 284165 (TRBV27, TRBJ1-1)
CASSPYADPYTEAFF

SEQ ID NO: 568331 - protein, 14 aa, Homo sapiens
  CDR3 for alpha chain variable domain of TCR clone 284166 (TRAV13-1, TRAJ35)
CAASKGGFGNMLHC

SEQ ID NO: 568332 - protein, 12 aa, Homo sapiens
  CDR3 for beta chain variable domain of TCR clone 284166 (TRBV7-3, TRBJ1-1)
CQQPGLGSEAFF

SEQ ID NO: 568333 - protein, 15 aa, Homo sapiens
  CDR3 for alpha chain variable domain of TCR clone 284167 (TRAV29/DV5, TRAJ24)
CAASGATDSWGKFPF

SEQ ID NO: 568334 - protein, 13 aa, Homo sapiens
  CDR3 for beta chain variable domain of TCR clone 284167 (TRBV19, TRBJ1-2)
CASSVPGQDGYTF

SEQ ID NO: 568335 - protein, 11 aa, Homo sapiens
  CDR3 for alpha chain variable domain of TCR clone 284168 (TRAV1-2, TRAJ20)
CAVSNDYKLSL

SEQ ID NO: 568336 - protein, 15 aa, Homo sapiens
  CDR3 for beta chain variable domain of TCR clone 284168 (TRBV5-1, TRBJ2-2)
CASSSQGGNTGELFF

SEQ ID NO: 568337 - protein, 15 aa, Homo sapiens
  CDR3 for alpha chain variable domain of TCR clone 284169 (TRAV3, TRAJ22)
CAVRDRGGSAWQLTF

SEQ ID NO: 568338 - protein, 13 aa, Homo sapiens
  CDR3 for beta chain variable domain of TCR clone 284169 (TRBV7-3, TRBJ2-1)
CASSPVAYNEQFF

SEQ ID NO: 568339 - protein, 11 aa, Homo sapiens
  CDR3 for alpha chain variable domain of TCR clone 284170 (TRAV1-1, TRAJ23)
CAVRQGGKLIF

SEQ ID NO: 568340 - protein, 12 aa, Homo sapiens
  CDR3 for beta chain variable domain of TCR clone 284170 (TRBV19, TRBJ1-5)
FASSIAQQPQHF

SEQ ID NO: 568341 - protein, 14 aa, Homo sapiens
  CDR3 for alpha chain variable domain of TCR clone 284171 (TRAV12-3, TRAJ10)
SHLPLTGGGNKLTF

SEQ ID NO: 568342 - protein, 13 aa, Homo sapiens
  CDR3 for beta chain variable domain of TCR clone 284171 (TRBV4-2, TRBJ2-2)
CASEDRGTGELFF

SEQ ID NO: 568343 - protein, 11 aa, Homo sapiens
  CDR3 for alpha chain variable domain of TCR clone 284172 (TRAV4, TRAJ31)
CLVGDNARLMF

SEQ ID NO: 568344 - protein, 16 aa, Homo sapiens
  CDR3 for beta chain variable domain of TCR clone 284172 (TRBV7-2, TRBJ2-5)
CATSSKWLSGQETQYF

SEQ ID NO: 568345 - protein, 14 aa, Homo sapiens
  CDR3 for alpha chain variable domain of TCR clone 284173 (TRAV12-2, TRAJ45)
CAVYSGGGVDGLTF

SEQ ID NO: 568346 - protein, 12 aa, Homo sapiens
  CDR3 for beta chain variable domain of TCR clone 284173 (TRBV7-7, TRBJ2-5)
CASSLRGETQYF

SEQ ID NO: 568347 - protein, 14 aa, Homo sapiens
  CDR3 for alpha chain variable domain of TCR clone 284174 (TRAV13-1, TRAJ48)
CAASTDFGNEKLTY

SEQ ID NO: 568348 - protein, 15 aa, Homo sapiens
  CDR3 for beta chain variable domain of TCR clone 284174 (TRBV10-2, TRBJ2-5)
CASKPEDRRQETQYF

SEQ ID NO: 568349 - protein, 12 aa, Homo sapiens
  CDR3 for alpha chain variable domain of TCR clone 284175 (TRAV12-3, TRAJ17)
CAMTLTGNELTF

SEQ ID NO: 568350 - protein, 15 aa, Homo sapiens
  CDR3 for beta chain variable domain of TCR clone 284175 (TRBV19, TRBJ2-5)
CASHGLAGAQETQYF

SEQ ID NO: 568351 - protein, 11 aa, Homo sapiens
  CDR3 for alpha chain variable domain of TCR clone 284176 (TRAV21, TRAJ31)
CAVRNNARLMF

SEQ ID NO: 568352 - protein, 13 aa, Homo sapiens
  CDR3 for beta chain variable domain of TCR clone 284176 (TRBV7-7, TRBJ2-3)
CASSLSRADTQYF

SEQ ID NO: 568353 - protein, 15 aa, Homo sapiens
  CDR3 for alpha chain variable domain of TCR clone 284177 (TRAV12-2, TRAJ43)
CAFDMRFGAGTRLIV

SEQ ID NO: 568354 - protein, 18 aa, Homo sapiens
  CDR3 for beta chain variable domain of TCR clone 284177 (TRBV20-1, TRBJ2-3)
CSASGLAGGPGTTDTQYV

SEQ ID NO: 568355 - protein, 15 aa, Homo sapiens
  CDR3 for alpha chain variable domain of TCR clone 284178 (TRAV1-1, TRAJ32)
CAVRVDELWWCYKQA

SEQ ID NO: 568356 - protein, 12 aa, Homo sapiens
  CDR3 for beta chain variable domain of TCR clone 284178 (TRBV7-8, TRBJ2-1)
CASSLGHNEQFF

SEQ ID NO: 568357 - protein, 14 aa, Homo sapiens
  CDR3 for alpha chain variable domain of TCR clone 284179 (TRAV8-1, TRAJ23)
CSVGTYNQGGKLIF

SEQ ID NO: 568358 - protein, 16 aa, Homo sapiens
  CDR3 for beta chain variable domain of TCR clone 284179 (TRBV18, TRBJ1-5)
CASSPSTGNSNQPQHF

SEQ ID NO: 568359 - protein, 14 aa, Homo sapiens
  CDR3 for alpha chain variable domain of TCR clone 284180 (TRAV1-2, TRAJ16)
CAVNRFSDGQKLLF

SEQ ID NO: 568360 - protein, 13 aa, Homo sapiens
  CDR3 for beta chain variable domain of TCR clone 284180 (TRBV4-1, TRBJ2-1)
CASSQAGGDEQFI

SEQ ID NO: 568361 - protein, 16 aa, Homo sapiens
  CDR3 for alpha chain variable domain of TCR clone 284181 (TRAV12-1, TRAJ22)
CVVNLFLDRSARQLTF

SEQ ID NO: 568362 - protein, 15 aa, Homo sapiens
  CDR3 for beta chain variable domain of TCR clone 284181 (TRBV27, TRBJ2-1)
CGSSNGGGSSNEQFF

SEQ ID NO: 568363 - protein, 12 aa, Homo sapiens
  CDR3 for alpha chain variable domain of TCR clone 284182 (TRAV8-2, TRAJ45)
YVQGGGADGLTF

SEQ ID NO: 568364 - protein, 15 aa, Homo sapiens
  CDR3 for beta chain variable domain of TCR clone 284182 (TRBV19, TRBJ1-1)
CASSIRRQMNTEAFF

SEQ ID NO: 568365 - protein, 15 aa, Homo sapiens
  CDR3 for alpha chain variable domain of TCR clone 284183 (TRAV12-1, TRAJ5)
CVVNMLETGRRAITF

SEQ ID NO: 568366 - protein, 12 aa, Homo sapiens
  CDR3 for beta chain variable domain of TCR clone 284183 (TRBV11-2, TRBJ2-2)
CASSLGGGELFF

SEQ ID NO: 568367 - protein, 13 aa, Homo sapiens
  CDR3 for alpha chain variable domain of TCR clone 284184 (TRAV1-2, TRAJ20)
CAVPRSNDYKLSF

SEQ ID NO: 568368 - protein, 14 aa, Homo sapiens
  CDR3 for beta chain variable domain of TCR clone 284184 (TRBV20-1, TRBJ2-7)
CSARYVTTYYEQYF

SEQ ID NO: 568369 - protein, 13 aa, Homo sapiens
  CDR3 for alpha chain variable domain of TCR clone 284185 (TRAV16, TRAJ29)
CALSRRVNTPLVF

SEQ ID NO: 568370 - protein, 15 aa, Homo sapiens
  CDR3 for beta chain variable domain of TCR clone 284185 (TRBV4-1, TRBJ2-3)
CASSWGQGIPDTQYF

SEQ ID NO: 568371 - protein, 16 aa, Homo sapiens
  CDR3 for alpha chain variable domain of TCR clone 284186 (TRAV3, TRAJ4)
CAVRAFFSVGYNKLIF

SEQ ID NO: 568372 - protein, 16 aa, Homo sapiens
  CDR3 for beta chain variable domain of TCR clone 284186 (TRBV6-1, TRBJ1-6)
CASSERGGSGNSPLHF

SEQ ID NO: 568373 - protein, 16 aa, Homo sapiens
  CDR3 for alpha chain variable domain of TCR clone 284187 (TRAV8-6, TRAJ36)
CAVSDWLGQTTSSLEL

SEQ ID NO: 568374 - protein, 15 aa, Homo sapiens
  CDR3 for beta chain variable domain of TCR clone 284187 (TRBV6-1, TRBJ2-3)
CASSERGGITDTQYF

SEQ ID NO: 568375 - protein, 13 aa, Homo sapiens
  CDR3 for alpha chain variable domain of TCR clone 284188 (TRAV17, TRAJ5)
CAPMDTGRRALTF

SEQ ID NO: 568376 - protein, 13 aa, Homo sapiens
  CDR3 for beta chain variable domain of TCR clone 284188 (TRBV7-9, TRBJ1-2)
CASSLKQNYGYTC

SEQ ID NO: 568377 - protein, 11 aa, Homo sapiens
  CDR3 for alpha chain variable domain of TCR clone 284189 (TRAV2, TRAJ13)
CASGGYQKVTF

SEQ ID NO: 568378 - protein, 14 aa, Homo sapiens
  CDR3 for beta chain variable domain of TCR clone 284189 (TRBV4-2, TRBJ2-1)
CVSGLDRAYNEQFF

SEQ ID NO: 568379 - protein, 13 aa, Homo sapiens
  CDR3 for alpha chain variable domain of TCR clone 284190 (TRAV27, TRAJ41)
CAGEGNSGYALNF

SEQ ID NO: 568380 - protein, 14 aa, Homo sapiens
  CDR3 for beta chain variable domain of TCR clone 284190 (TRBV18, TRBJ2-3)
CASSGLADTDTQYF

SEQ ID NO: 568381 - protein, 14 aa, Homo sapiens
  CDR3 for alpha chain variable domain of TCR clone 284191 (TRAV12-3, TRAJ58)
CAMSTETGGSRLTF

SEQ ID NO: 568382 - protein, 12 aa, Homo sapiens
  CDR3 for beta chain variable domain of TCR clone 284191 (TRBV7-8, TRBJ2-7)
CASSLGDREQYF

SEQ ID NO: 568383 - protein, 15 aa, Homo sapiens
  CDR3 for alpha chain variable domain of TCR clone 284192 (TRAV3, TRAJ36)
CAMRASQTGANNLFF

SEQ ID NO: 568384 - protein, 15 aa, Homo sapiens
  CDR3 for beta chain variable domain of TCR clone 284192 (TRBV3-1, TRBJ2-1)
CASSQDYTPRGEQFF

SEQ ID NO: 568385 - protein, 13 aa, Homo sapiens
  CDR3 for alpha chain variable domain of TCR clone 284193 (TRAV13-2, TRAJ48)
CAEMDFGNEELTF

SEQ ID NO: 568386 - protein, 12 aa, Homo sapiens
  CDR3 for beta chain variable domain of TCR clone 284193 (TRBV11-2, TRBJ2-2)
CASSLGGGELFF

SEQ ID NO: 568387 - protein, 13 aa, Homo sapiens
  CDR3 for alpha chain variable domain of TCR clone 284194 (TRAV17, TRAJ40)
CAGALGGTYKYIL

SEQ ID NO: 568388 - protein, 16 aa, Homo sapiens
  CDR3 for beta chain variable domain of TCR clone 284194 (TRBV7-2, TRBJ1-4)
CASSLAPGRRDEKLFF

SEQ ID NO: 568389 - protein, 17 aa, Homo sapiens
  CDR3 for alpha chain variable domain of TCR clone 284195 (TRAV3, TRAJ38)
CAVIDCLNAGNNRKLIW

SEQ ID NO: 568390 - protein, 14 aa, Homo sapiens
  CDR3 for beta chain variable domain of TCR clone 284195 (TRBV5-5, TRBJ1-5)
CASSGQGVDQPQHF

SEQ ID NO: 568391 - protein, 13 aa, Homo sapiens
  CDR3 for alpha chain variable domain of TCR clone 284196 (TRAV16, TRAJ10)
CAPAREEETNSPF

SEQ ID NO: 568392 - protein, 15 aa, Homo sapiens
  CDR3 for beta chain variable domain of TCR clone 284196 (TRBV6-3, TRBJ2-7)
CASSSPGTVFYEQYF

SEQ ID NO: 568393 - protein, 13 aa, Homo sapiens
  CDR3 for alpha chain variable domain of TCR clone 284197 (TRAV12-3, TRAJ35)
CAMAIGFGTVLHC

SEQ ID NO: 568394 - protein, 15 aa, Homo sapiens
  CDR3 for beta chain variable domain of TCR clone 284197 (TRBV20-1, TRBJ2-1)
CSARGSGTYYNEQFF

SEQ ID NO: 568395 - protein, 14 aa, Homo sapiens
  CDR3 for alpha chain variable domain of TCR clone 284198 (TRAV1-2, TRAJ16)
CAVNRFSDGQQLLF

SEQ ID NO: 568396 - protein, 16 aa, Homo sapiens
  CDR3 for beta chain variable domain of TCR clone 284198 (TRBV7-2, TRBJ2-7)
CASSLDLSGGAYEQYF

SEQ ID NO: 568397 - protein, 13 aa, Homo sapiens
  CDR3 for alpha chain variable domain of TCR clone 284199 (TRAV21, TRAJ42)
CAVGGGSQGNLIF

SEQ ID NO: 568398 - protein, 15 aa, Homo sapiens
  CDR3 for beta chain variable domain of TCR clone 284199 (TRBV20-1, TRBJ2-7)
CCARDRVSGMDEQYF

SEQ ID NO: 568399 - protein, 16 aa, Homo sapiens
  CDR3 for alpha chain variable domain of TCR clone 284200 (TRAV12-2, TRAJ10)
CAVNRVLTGGGNKRTF

SEQ ID NO: 568400 - protein, 14 aa, Homo sapiens
  CDR3 for beta chain variable domain of TCR clone 284200 (TRBV9, TRBJ2-1)
CASSVALAVNEQFF

SEQ ID NO: 568401 - protein, 12 aa, Homo sapiens
  CDR3 for alpha chain variable domain of TCR clone 284201 (TRAV1-1, TRAJ8)
CAGVTGFQKLVF

SEQ ID NO: 568402 - protein, 15 aa, Homo sapiens
  CDR3 for beta chain variable domain of TCR clone 284201 (TRBV7-9, TRBJ1-4)
CACSRTGGFNEKLFF

SEQ ID NO: 568403 - protein, 11 aa, Homo sapiens
  CDR3 for alpha chain variable domain of TCR clone 284202 (TRAV1-1, TRAJ16)
CAAGDGQQLLF

SEQ ID NO: 568404 - protein, 16 aa, Homo sapiens
  CDR3 for beta chain variable domain of TCR clone 284202 (TRBV7-3, TRBJ2-2)
CASSLKRGTLSGELFF

SEQ ID NO: 568405 - protein, 14 aa, Homo sapiens
  CDR3 for alpha chain variable domain of TCR clone 284203 (TRAV13-2, TRAJ17)
CAEDSKAAGNKLTF

SEQ ID NO: 568406 - protein, 14 aa, Homo sapiens
  CDR3 for beta chain variable domain of TCR clone 284203 (TRBV11-2, TRBJ2-1)
CASTTGQGNNEQFF

SEQ ID NO: 568407 - protein, 12 aa, Homo sapiens
  CDR3 for alpha chain variable domain of TCR clone 284204 (TRAV13-1, TRAJ22)
DLSPGSARQLTF

SEQ ID NO: 568408 - protein, 13 aa, Homo sapiens
  CDR3 for beta chain variable domain of TCR clone 284204 (TRBV7-7, TRBJ1-5)
CASSPGKNQPQHF

SEQ ID NO: 568409 - protein, 21 aa, Homo sapiens
  CDR3 for alpha chain variable domain of TCR clone 284205 (TRAV12-3, TRAJ35)
CAMAIGFGNVLHCGSGPQVIF

SEQ ID NO: 568410 - protein, 15 aa, Homo sapiens
  CDR3 for beta chain variable domain of TCR clone 284205 (TRBV20-1, TRBJ2-1)
CSARGSGTYYNEQFF

SEQ ID NO: 568411 - protein, 16 aa, Homo sapiens
  CDR3 for alpha chain variable domain of TCR clone 284206 (TRAV1-2, TRAJ6)
CAVRDQGTGGSYIPTF

SEQ ID NO: 568412 - protein, 15 aa, Homo sapiens
  CDR3 for beta chain variable domain of TCR clone 284206 (TRBV27, TRBJ2-5)
CASSLIPSGGETQYF

SEQ ID NO: 568413 - protein, 15 aa, Homo sapiens
  CDR3 for alpha chain variable domain of TCR clone 284207 (TRAV12-2, TRAJ43)
CAFDMRFGAGTRLTV

SEQ ID NO: 568414 - protein, 14 aa, Homo sapiens
  CDR3 for beta chain variable domain of TCR clone 284207 (TRBV20-1, TRBJ1-1)
CSAQTRIGGTEAFF

SEQ ID NO: 568415 - protein, 15 aa, Homo sapiens
  CDR3 for alpha chain variable domain of TCR clone 284208 (TRAV3, TRAJ5)
CAVGDLDTGRRALTF

SEQ ID NO: 568416 - protein, 13 aa, Homo sapiens
  CDR3 for beta chain variable domain of TCR clone 284208 (TRBV12-4, TRBJ2-7)
CASSPTETYELYF

SEQ ID NO: 568417 - protein, 13 aa, Homo sapiens
  CDR3 for alpha chain variable domain of TCR clone 284209 (TRAV21, TRAJ20)
CAVGLRVDYKLSF

SEQ ID NO: 568418 - protein, 16 aa, Homo sapiens
  CDR3 for beta chain variable domain of TCR clone 284209 (TRBV11-2, TRBJ2-3)
SASSSELGSSTDTQYF

SEQ ID NO: 568419 - protein, 14 aa, Homo sapiens
  CDR3 for alpha chain variable domain of TCR clone 284210 (TRAV12-3, TRAJ10)
SHLPLTGGGNKLTF

SEQ ID NO: 568420 - protein, 14 aa, Homo sapiens
  CDR3 for beta chain variable domain of TCR clone 284210 (TRBV27, TRBJ2-2)
CASRPGVNTGELFF

SEQ ID NO: 568421 - protein, 16 aa, Homo sapiens
  CDR3 for alpha chain variable domain of TCR clone 284211 (TRAV4, TRAJ9)
CLVGDPTRPGGFKTIF

SEQ ID NO: 568422 - protein, 14 aa, Homo sapiens
  CDR3 for beta chain variable domain of TCR clone 284211 (TRBV20-1, TRBJ1-1)
CSAQTRIGGTEAFF

SEQ ID NO: 568423 - protein, 14 aa, Homo sapiens
  CDR3 for alpha chain variable domain of TCR clone 284212 (TRAV38-1, TRAJ45)
CAYYSGGGADGLTL

SEQ ID NO: 568424 - protein, 20 aa, Homo sapiens
  CDR3 for beta chain variable domain of TCR clone 284212 (TRBV28, TRBJ2-1)
CASTPIERSPGLAGGNEQFF

SEQ ID NO: 568425 - protein, 16 aa, Homo sapiens
  CDR3 for alpha chain variable domain of TCR clone 284213 (TRAV30, TRAJ24)
CGTEIVDADSWGKFQF

SEQ ID NO: 568426 - protein, 17 aa, Homo sapiens
  CDR3 for beta chain variable domain of TCR clone 284213 (TRBV7-2, TRBJ2-7)
CASSPFGSSGPAPEQYF

SEQ ID NO: 568427 - protein, 15 aa, Homo sapiens
  CDR3 for alpha chain variable domain of TCR clone 284214 (TRAV13-1, TRAJ6)
CAAIHPSGGRYIPTF

SEQ ID NO: 568428 - protein, 14 aa, Homo sapiens
  CDR3 for beta chain variable domain of TCR clone 284214 (TRBV7-9, TRBJ2-2)
CASGLAINTGELFC

SEQ ID NO: 568429 - protein, 17 aa, Homo sapiens
  CDR3 for alpha chain variable domain of TCR clone 284215 (TRAV3, TRAJ6)
CAVRDGPRAGGSYIPTF

SEQ ID NO: 568430 - protein, 13 aa, Homo sapiens
  CDR3 for beta chain variable domain of TCR clone 284215 (TRBV27, TRBJ1-1)
CASSLSIGAESFF

SEQ ID NO: 568431 - protein, 13 aa, Homo sapiens
  CDR3 for alpha chain variable domain of TCR clone 284216 (TRAV38-2/DV8, TRAJ34)
CAYRTWNTDKLIF

SEQ ID NO: 568432 - protein, 16 aa, Homo sapiens
  CDR3 for beta chain variable domain of TCR clone 284216 (TRBV19, TRBJ2-1)
CAGSKAGPSSYNEQFF

SEQ ID NO: 568433 - protein, 13 aa, Homo sapiens
  CDR3 for alpha chain variable domain of TCR clone 284217 (TRAV1-2, TRAJ24)
CAVTTDSWGKLPF

SEQ ID NO: 568434 - protein, 14 aa, Homo sapiens
  CDR3 for beta chain variable domain of TCR clone 284217 (TRBV7-2, TRBJ1-2)
CASSQTGSTYGYTF

SEQ ID NO: 568435 - protein, 14 aa, Homo sapiens
  CDR3 for alpha chain variable domain of TCR clone 284218 (TRAV17, TRAJ11)
CATDARSGYSTLPF

SEQ ID NO: 568436 - protein, 15 aa, Homo sapiens
  CDR3 for beta chain variable domain of TCR clone 284218 (TRBV10-2, TRBJ2-6)
CASSEQGTGANVLTF

SEQ ID NO: 568437 - protein, 12 aa, Homo sapiens
  CDR3 for alpha chain variable domain of TCR clone 284219 (TRAV20, TRAJ23)
CAVHNQGGKLIF

SEQ ID NO: 568438 - protein, 15 aa, Homo sapiens
  CDR3 for beta chain variable domain of TCR clone 284219 (TRBV7-2, TRBJ2-1)
CASSSGLAGGNEQFF

SEQ ID NO: 568439 - protein, 16 aa, Homo sapiens
  CDR3 for alpha chain variable domain of TCR clone 284220 (TRAV13-2, TRAJ32)
CAENMNYGGATNKLIF

SEQ ID NO: 568440 - protein, 14 aa, Homo sapiens
  CDR3 for beta chain variable domain of TCR clone 284220 (TRBV15, TRBJ2-5)
CATSSTGYQGTQYF

SEQ ID NO: 568441 - protein, 18 aa, Homo sapiens
  CDR3 for alpha chain variable domain of TCR clone 284221 (TRAV8-3, TRAJ23)
LSTSAVGDRYNQGGKLIF

SEQ ID NO: 568442 - protein, 22 aa, Homo sapiens
  CDR3 for beta chain variable domain of TCR clone 284221 (TRBV29-1, TRBJ2-5)
TVSNMSPEDSSIYLCSAGTQYF

SEQ ID NO: 568443 - protein, 13 aa, Homo sapiens
  CDR3 for alpha chain variable domain of TCR clone 284222 (TRAV27, TRAJ41)
CAGEGNSEYALNF

SEQ ID NO: 568444 - protein, 13 aa, Homo sapiens
  CDR3 for beta chain variable domain of TCR clone 284222 (TRBV7-9, TRBJ2-5)
CASTPVGQETRYF

SEQ ID NO: 568445 - protein, 14 aa, Homo sapiens
  CDR3 for alpha chain variable domain of TCR clone 284223 (TRAV1-2, TRAJ8)
CAVREDTGFQKLEF

SEQ ID NO: 568446 - protein, 15 aa, Homo sapiens
  CDR3 for beta chain variable domain of TCR clone 284223 (TRBV29-1, TRBJ2-1)
CSVPTGLALYNEQFF

SEQ ID NO: 568447 - protein, 11 aa, Homo sapiens
  CDR3 for alpha chain variable domain of TCR clone 284224 (TRAV3, TRAJ17)
CADAAGNKLTF

SEQ ID NO: 568448 - protein, 15 aa, Homo sapiens
  CDR3 for beta chain variable domain of TCR clone 284224 (TRBV12-4, TRBJ2-7)
CASSLGSGGPYEQYF

SEQ ID NO: 568449 - protein, 11 aa, Homo sapiens
  CDR3 for alpha chain variable domain of TCR clone 284225 (TRAV17, TRAJ31)
CATSNNARLMF

SEQ ID NO: 568450 - protein, 15 aa, Homo sapiens
  CDR3 for beta chain variable domain of TCR clone 284225 (TRBV7-8, TRBJ2-7)
CASSLERAGSYEQYF

SEQ ID NO: 568451 - protein, 16 aa, Homo sapiens
  CDR3 for alpha chain variable domain of TCR clone 284226 (TRAV12-3, TRAJ58)
CAMTDTEETSGSRLTF

SEQ ID NO: 568452 - protein, 22 aa, Homo sapiens
  CDR3 for beta chain variable domain of TCR clone 284226 (TRBV23-1, TRBJ2-7)
CASSRRLDSGQGYVGGGYGQYF

SEQ ID NO: 568453 - protein, 14 aa, Homo sapiens
  CDR3 for alpha chain variable domain of TCR clone 284227 (TRAV3, TRAJ7)
CAVREEEREQQTRF

SEQ ID NO: 568454 - protein, 12 aa, Homo sapiens
  CDR3 for beta chain variable domain of TCR clone 284227 (TRBV7-8, TRBJ2-7)
CASSLVDREQYF

SEQ ID NO: 568455 - protein, 15 aa, Homo sapiens
  CDR3 for alpha chain variable domain of TCR clone 284228 (TRAV29/DV5, TRAJ29)
CAASERSSGNTPLVF

SEQ ID NO: 568456 - protein, 13 aa, Homo sapiens
  CDR3 for beta chain variable domain of TCR clone 284228 (TRBV11-2, TRBJ2-5)
CVSSSTGEETQYF

SEQ ID NO: 568457 - protein, 15 aa, Homo sapiens
  CDR3 for alpha chain variable domain of TCR clone 284229 (TRAV2, TRAJ9)
CAVEDRGTGGFKTIF

SEQ ID NO: 568458 - protein, 11 aa, Homo sapiens
  CDR3 for beta chain variable domain of TCR clone 284229 (TRBV11-2, TRBJ1-1)
CASSINTEAFF

SEQ ID NO: 568459 - protein, 20 aa, Homo sapiens
  CDR3 for alpha chain variable domain of TCR clone 284230 (TRAV1-1, TRAJ4)
CLLLLRCEGFLSGGYNMLIF

SEQ ID NO: 568460 - protein, 16 aa, Homo sapiens
  CDR3 for beta chain variable domain of TCR clone 284230 (TRBV28, TRBJ1-4)
CASSPPYRGRSEKLFF

SEQ ID NO: 568461 - protein, 14 aa, Homo sapiens
  CDR3 for alpha chain variable domain of TCR clone 284231 (TRAV26-2, TRAJ38)
CILYNAGNNRKLIW

SEQ ID NO: 568462 - protein, 14 aa, Homo sapiens
  CDR3 for beta chain variable domain of TCR clone 284231 (TRBV19, TRBJ2-1)
CASPTFALSGEQFF

SEQ ID NO: 568463 - protein, 12 aa, Homo sapiens
  CDR3 for alpha chain variable domain of TCR clone 284232 (TRAV12-1, TRAJ34)
CVVAGATDQLIF

SEQ ID NO: 568464 - protein, 16 aa, Homo sapiens
  CDR3 for beta chain variable domain of TCR clone 284232 (TRBV7-2, TRBJ1-2)
CASSSNQDRRGHGYTF

SEQ ID NO: 568465 - protein, 13 aa, Homo sapiens
  CDR3 for alpha chain variable domain of TCR clone 284233 (TRAV16, TRAJ31)
CALSAHNNARLMF

SEQ ID NO: 568466 - protein, 17 aa, Homo sapiens
  CDR3 for beta chain variable domain of TCR clone 284233 (TRBV12-4, TRBJ2-1)
CASSAGLAGGRINEQFF

SEQ ID NO: 568467 - protein, 14 aa, Homo sapiens
  CDR3 for alpha chain variable domain of TCR clone 284234 (TRAV4, TRAJ17)
CLVGDMAAGDKLTF

SEQ ID NO: 568468 - protein, 14 aa, Homo sapiens
  CDR3 for beta chain variable domain of TCR clone 284234 (TRBV7-6, TRBJ2-3)
CASSLGTVTDTQYF

SEQ ID NO: 568469 - protein, 16 aa, Homo sapiens
  CDR3 for alpha chain variable domain of TCR clone 284235 (TRAV13-1, TRAJ10)
CAAGYILTGGGNKPTF

SEQ ID NO: 568470 - protein, 15 aa, Homo sapiens
  CDR3 for beta chain variable domain of TCR clone 284235 (TRBV12-4, TRBJ2-7)
CASSQTGAISYEQYF

SEQ ID NO: 568471 - protein, 15 aa, Homo sapiens
  CDR3 for alpha chain variable domain of TCR clone 284236 (TRAV21, TRAJ53)
CATLNSGGSNSKLTF

SEQ ID NO: 568472 - protein, 14 aa, Homo sapiens
  CDR3 for beta chain variable domain of TCR clone 284236 (TRBV7-2, TRBJ2-7)
CASSLPPGQGPQYF

SEQ ID NO: 568473 - protein, 18 aa, Homo sapiens
  CDR3 for alpha chain variable domain of TCR clone 284237 (TRAV17, TRAJ57)
CFLLLCYGPPGGSEKLVF

SEQ ID NO: 568474 - protein, 14 aa, Homo sapiens
  CDR3 for beta chain variable domain of TCR clone 284237 (TRBV7-8, TRBJ2-7)
CASSPRDRVYEQYF

SEQ ID NO: 568475 - protein, 17 aa, Homo sapiens
  CDR3 for alpha chain variable domain of TCR clone 284238 (TRAV39, TRAJ43)
CAGANDMRFGAGTRLTV

SEQ ID NO: 568476 - protein, 15 aa, Homo sapiens
  CDR3 for beta chain variable domain of TCR clone 284238 (TRBV12-4, TRBJ2-5)
CASSPPTGLQETQYF

SEQ ID NO: 568477 - protein, 14 aa, Homo sapiens
  CDR3 for alpha chain variable domain of TCR clone 284239 (TRAV3, TRAJ22)
CCERPGRFCKATTF

SEQ ID NO: 568478 - protein, 16 aa, Homo sapiens
  CDR3 for beta chain variable domain of TCR clone 284239 (TRBV5-4, TRBJ2-3)
CASQQPGAGGADTQYF

SEQ ID NO: 568479 - protein, 11 aa, Homo sapiens
  CDR3 for alpha chain variable domain of TCR clone 284240 (TRAV29/DV5, TRAJ47)
CAATYGNKLVF

SEQ ID NO: 568480 - protein, 15 aa, Homo sapiens
  CDR3 for beta chain variable domain of TCR clone 284240 (TRBV19, TRBJ1-1)
CASTSGQIQNTEAFF

SEQ ID NO: 568481 - protein, 14 aa, Homo sapiens
  CDR3 for alpha chain variable domain of TCR clone 284241 (TRAV17, TRAJ57)
CTTDPQGGSEKLVF

SEQ ID NO: 568482 - protein, 17 aa, Homo sapiens
  CDR3 for beta chain variable domain of TCR clone 284241 (TRBV5-1, TRBJ2-2)
CASSLAGLSGGTGELFF

SEQ ID NO: 568483 - protein, 13 aa, Homo sapiens
  CDR3 for alpha chain variable domain of TCR clone 284242 (TRAV13-1, TRAJ20)
CAARVSNDYKLSF

SEQ ID NO: 568484 - protein, 15 aa, Homo sapiens
  CDR3 for beta chain variable domain of TCR clone 284242 (TRBV12-4, TRBJ2-5)
CASSPPTGLQETQYF

SEQ ID NO: 568485 - protein, 12 aa, Homo sapiens
  CDR3 for alpha chain variable domain of TCR clone 284243 (TRAV27, TRAJ41)
CAGRNSGYALNF

SEQ ID NO: 568486 - protein, 18 aa, Homo sapiens
  CDR3 for beta chain variable domain of TCR clone 284243 (TRBV20-1, TRBJ2-5)
CSAKTGTTTNLYQETQYF

SEQ ID NO: 568487 - protein, 13 aa, Homo sapiens
  CDR3 for alpha chain variable domain of TCR clone 284244 (TRAV3, TRAJ3)
CAVRALGASKIIF

SEQ ID NO: 568488 - protein, 13 aa, Homo sapiens
  CDR3 for beta chain variable domain of TCR clone 284244 (TRBV7-9, TRBJ1-2)
CASSLKQNYGYTF

SEQ ID NO: 568489 - protein, 15 aa, Homo sapiens
  CDR3 for alpha chain variable domain of TCR clone 284245 (TRAV12-1, TRAJ52)
CVGNAGCTSYGKLTF

SEQ ID NO: 568490 - protein, 21 aa, Homo sapiens
  CDR3 for beta chain variable domain of TCR clone 284245 (TRBV7-3, TRBJ2-2)
GGTQPCISVPAAQTLARELFF

SEQ ID NO: 568491 - protein, 14 aa, Homo sapiens
  CDR3 for alpha chain variable domain of TCR clone 284246 (TRAV1-2, TRAJ8)
CAVRDDTGFQKLVF

SEQ ID NO: 568492 - protein, 17 aa, Homo sapiens
  CDR3 for beta chain variable domain of TCR clone 284246 (TRBV13, TRBJ2-3)
CASSLSRVAGGRNTQYF

SEQ ID NO: 568493 - protein, 12 aa, Homo sapiens
  CDR3 for alpha chain variable domain of TCR clone 284247 (TRAV17, TRAJ39)
CATGPAGNMLTF

SEQ ID NO: 568494 - protein, 14 aa, Homo sapiens
  CDR3 for beta chain variable domain of TCR clone 284247 (TRBV7-9, TRBJ1-2)
CASSRQGANYGYTF

SEQ ID NO: 568495 - protein, 12 aa, Homo sapiens
  CDR3 for alpha chain variable domain of TCR clone 284248 (TRAV12-2, TRAJ31)
CAVNTPDARLMF

SEQ ID NO: 568496 - protein, 19 aa, Homo sapiens
  CDR3 for beta chain variable domain of TCR clone 284248 (TRBV20-1, TRBJ1-6)
CSARGGTPSPIIHPSTLGM

SEQ ID NO: 568497 - protein, 12 aa, Homo sapiens
  CDR3 for alpha chain variable domain of TCR clone 284249 (TRAV23/DV6, TRAJ49)
CAAEAPGNKFYF

SEQ ID NO: 568498 - protein, 17 aa, Homo sapiens
  CDR3 for beta chain variable domain of TCR clone 284249 (TRBV11-2, TRBJ2-1)
CASSLYPPGVEYNEQFF

SEQ ID NO: 568499 - protein, 16 aa, Homo sapiens
  CDR3 for alpha chain variable domain of TCR clone 284250 (TRAV30, TRAJ49)
SAAQRVGPNTGNQFYF

SEQ ID NO: 568500 - protein, 13 aa, Homo sapiens
  CDR3 for beta chain variable domain of TCR clone 284250 (TRBV7-6, TRBJ1-2)
CASSLKQNYGYTF

SEQ ID NO: 568501 - protein, 13 aa, Homo sapiens
  CDR3 for alpha chain variable domain of TCR clone 284251 (TRAV3, TRAJ27)
CAVRPLGAGKSTF

SEQ ID NO: 568502 - protein, 13 aa, Homo sapiens
  CDR3 for beta chain variable domain of TCR clone 284251 (TRBV12-4, TRBJ2-5)
CASRLAVQETQYF

SEQ ID NO: 568503 - protein, 15 aa, Homo sapiens
  CDR3 for alpha chain variable domain of TCR clone 284252 (TRAV25, TRAJ52)
CAGRPGGTSYGKLTF

SEQ ID NO: 568504 - protein, 13 aa, Homo sapiens
  CDR3 for beta chain variable domain of TCR clone 284252 (TRBV24-1, TRBJ2-2)
CATSDWSTGELFF

SEQ ID NO: 568505 - protein, 14 aa, Homo sapiens
  CDR3 for alpha chain variable domain of TCR clone 284253 (TRAV27, TRAJ13)
CRSSNSWGYQKVTF

SEQ ID NO: 568506 - protein, 10 aa, Homo sapiens
  CDR3 for beta chain variable domain of TCR clone 284253 (TRBV2, TRBJ2-5)
CASSAATQYF

SEQ ID NO: 568507 - protein, 13 aa, Homo sapiens
  CDR3 for alpha chain variable domain of TCR clone 284254 (TRAV8-3, TRAJ28)
CAGGVVGSYQLTF

SEQ ID NO: 568508 - protein, 14 aa, Homo sapiens
  CDR3 for beta chain variable domain of TCR clone 284254 (TRBV7-2, TRBJ2-7)
CASRSQGAAYEQYF

SEQ ID NO: 568509 - protein, 18 aa, Homo sapiens
  CDR3 for alpha chain variable domain of TCR clone 284255 (TRAV26-2, TRAJ33)
CCVLLHPEEPASNYQLIW

SEQ ID NO: 568510 - protein, 13 aa, Homo sapiens
  CDR3 for beta chain variable domain of TCR clone 284255 (TRBV24-1, TRBJ2-2)
CATSYWSTGELFF

SEQ ID NO: 568511 - protein, 10 aa, Homo sapiens
  CDR3 for alpha chain variable domain of TCR clone 284256 (TRAV12-2, TRAJ48)
CAVPSEKLTF

SEQ ID NO: 568512 - protein, 17 aa, Homo sapiens
  CDR3 for beta chain variable domain of TCR clone 284256 (TRBV11-1, TRBJ2-7)
CASSLTGSFGLDYEQYF

SEQ ID NO: 568513 - protein, 15 aa, Homo sapiens
  CDR3 for alpha chain variable domain of TCR clone 284257 (TRAV21, TRAJ53)
FATFNSGGSNYKLTF

SEQ ID NO: 568514 - protein, 13 aa, Homo sapiens
  CDR3 for beta chain variable domain of TCR clone 284257 (TRBV7-9, TRBJ2-3)
CASSPGSTDTQYF

SEQ ID NO: 568515 - protein, 14 aa, Homo sapiens
  CDR3 for alpha chain variable domain of TCR clone 284258 (TRAV8-1, TRAJ24)
CAVNAADSWGKLQF

SEQ ID NO: 568516 - protein, 16 aa, Homo sapiens
  CDR3 for beta chain variable domain of TCR clone 284258 (TRBV4-3, TRBJ2-1)
CASSPALDRGVNERFF

SEQ ID NO: 568517 - protein, 12 aa, Homo sapiens
  CDR3 for alpha chain variable domain of TCR clone 284259 (TRAV1-1, TRAJ39)
CAVPVLGHMLTF

SEQ ID NO: 568518 - protein, 15 aa, Homo sapiens
  CDR3 for beta chain variable domain of TCR clone 284259 (TRBV19, TRBJ1-6)
CASSTQGAVGSPLHF

SEQ ID NO: 568519 - protein, 15 aa, Homo sapiens
  CDR3 for alpha chain variable domain of TCR clone 284260 (TRAV26-1, TRAJ42)
CIVRVKGGSQGNLIF

SEQ ID NO: 568520 - protein, 14 aa, Homo sapiens
  CDR3 for beta chain variable domain of TCR clone 284260 (TRBV19, TRBJ2-2)
CSTTGHANTGELFF

SEQ ID NO: 568521 - protein, 12 aa, Homo sapiens
  CDR3 for alpha chain variable domain of TCR clone 284261 (TRAV13-2, TRAJ23)
CAERHRGGKLIF

SEQ ID NO: 568522 - protein, 15 aa, Homo sapiens
  CDR3 for beta chain variable domain of TCR clone 284261 (TRBV7-9, TRBJ1-6)
CASSSPGSGNSPLHF

SEQ ID NO: 568523 - protein, 12 aa, Homo sapiens
  CDR3 for alpha chain variable domain of TCR clone 284262 (TRAV12-3, TRAJ32)
CAGCGATNKLIF

SEQ ID NO: 568524 - protein, 15 aa, Homo sapiens
  CDR3 for beta chain variable domain of TCR clone 284262 (TRBV4-3, TRBJ2-1)
CASSQESAIYNEQFF

SEQ ID NO: 568525 - protein, 14 aa, Homo sapiens
  CDR3 for alpha chain variable domain of TCR clone 284263 (TRAV1-2, TRAJ16)
CAVRGFSDGQKRLF

SEQ ID NO: 568526 - protein, 12 aa, Homo sapiens
  CDR3 for beta chain variable domain of TCR clone 284263 (TRBV14, TRBJ2-7)
CASSRLKGEQYF

SEQ ID NO: 568527 - protein, 13 aa, Homo sapiens
  CDR3 for alpha chain variable domain of TCR clone 284264 (TRAV26-2, TRAJ43)
CILRAVNNNDMRF

SEQ ID NO: 568528 - protein, 15 aa, Homo sapiens
  CDR3 for beta chain variable domain of TCR clone 284264 (TRBV5-8, TRBJ2-3)
CASSPVAGLTDTQYF

SEQ ID NO: 568529 - protein, 18 aa, Homo sapiens
  CDR3 for alpha chain variable domain of TCR clone 284265 (TRAV13-1, TRAJ52)
CEAKNPNAGCTSYGKLTF

SEQ ID NO: 568530 - protein, 15 aa, Homo sapiens
  CDR3 for beta chain variable domain of TCR clone 284265 (TRBV6-1, TRBJ2-3)
CASSERGGITDTQYF

SEQ ID NO: 568531 - protein, 10 aa, Homo sapiens
  CDR3 for alpha chain variable domain of TCR clone 284266 (TRAV12-2, TRAJ10)
CAAWTGVETH

SEQ ID NO: 568532 - protein, 11 aa, Homo sapiens
  CDR3 for beta chain variable domain of TCR clone 284266 (TRBV28, TRBJ2-3)
CASSSDPPQYF

SEQ ID NO: 568533 - protein, 14 aa, Homo sapiens
  CDR3 for alpha chain variable domain of TCR clone 284267 (TRAV8-4, TRAJ48)
CAVSETFGNEKLTF

SEQ ID NO: 568534 - protein, 19 aa, Homo sapiens
  CDR3 for beta chain variable domain of TCR clone 284267 (TRBV25-1, TRBJ2-2)
CAILVYRVDRGRKTGELFF

SEQ ID NO: 568535 - protein, 12 aa, Homo sapiens
  CDR3 for alpha chain variable domain of TCR clone 284268 (TRAV13-2, TRAJ23)
CAERHRGGKLIF

SEQ ID NO: 568536 - protein, 15 aa, Homo sapiens
  CDR3 for beta chain variable domain of TCR clone 284268 (TRBV7-9, TRBJ1-6)
CTSSSPGRGNSPLHF

SEQ ID NO: 568537 - protein, 10 aa, Homo sapiens
  CDR3 for alpha chain variable domain of TCR clone 284269 (TRAV2, TRAJ34)
CAVVNDKLIF

SEQ ID NO: 568538 - protein, 15 aa, Homo sapiens
  CDR3 for beta chain variable domain of TCR clone 284269 (TRBV3-1, TRBJ2-2)
CASSQDWTRAGEMFF

SEQ ID NO: 568539 - protein, 15 aa, Homo sapiens
  CDR3 for alpha chain variable domain of TCR clone 284270 (TRAV17, TRAJ13)
CATVPNSGGYQKVTF

SEQ ID NO: 568540 - protein, 14 aa, Homo sapiens
  CDR3 for beta chain variable domain of TCR clone 284270 (TRBV11-2, TRBJ2-3)
CASSRLARTDTQYF

SEQ ID NO: 568541 - protein, 17 aa, Homo sapiens
  CDR3 for alpha chain variable domain of TCR clone 284271 (TRAV3, TRAJ13)
CAVRDMRRTGGYQKVTF

SEQ ID NO: 568542 - protein, 14 aa, Homo sapiens
  CDR3 for beta chain variable domain of TCR clone 284271 (TRBV5-1, TRBJ2-7)
CASSLTGSGYEQYV

SEQ ID NO: 568543 - protein, 13 aa, Homo sapiens
  CDR3 for alpha chain variable domain of TCR clone 284272 (TRAV21, TRAJ20)
CAVGLRVDYKLSF

SEQ ID NO: 568544 - protein, 11 aa, Homo sapiens
  CDR3 for beta chain variable domain of TCR clone 284272 (TRBV29-1, TRBJ2-5)
CSEGRTGTQYF

SEQ ID NO: 568545 - protein, 11 aa, Homo sapiens
  CDR3 for alpha chain variable domain of TCR clone 284273 (TRAV38-1, TRAJ35)
CAFMSLDRLWE

SEQ ID NO: 568546 - protein, 13 aa, Homo sapiens
  CDR3 for beta chain variable domain of TCR clone 284273 (TRBV7-3, TRBJ1-1)
CASSQDWGAEAFF

SEQ ID NO: 568547 - protein, 14 aa, Homo sapiens
  CDR3 for alpha chain variable domain of TCR clone 284274 (TRAV12-2, TRAJ44)
CAVNKAGTASNLTF

SEQ ID NO: 568548 - protein, 12 aa, Homo sapiens
  CDR3 for beta chain variable domain of TCR clone 284274 (TRBV12-4, TRBJ2-7)
CASSLGGYEQYF

SEQ ID NO: 568549 - protein, 13 aa, Homo sapiens
  CDR3 for alpha chain variable domain of TCR clone 284275 (TRAV21, TRAJ27)
CAERPGNAGKSTF

SEQ ID NO: 568550 - protein, 13 aa, Homo sapiens
  CDR3 for beta chain variable domain of TCR clone 284275 (TRBV7-2, TRBJ2-2)
CASSLAVTGELFF

SEQ ID NO: 568551 - protein, 14 aa, Homo sapiens
  CDR3 for alpha chain variable domain of TCR clone 284276 (TRAV17, TRAJ5)
CATVALTGRRAHTF

SEQ ID NO: 568552 - protein, 14 aa, Homo sapiens
  CDR3 for beta chain variable domain of TCR clone 284276 (TRBV28, TRBJ2-7)
CASSPYGMAYEQYF

SEQ ID NO: 568553 - protein, 12 aa, Homo sapiens
  CDR3 for alpha chain variable domain of TCR clone 284277 (TRAV26-1, TRAJ36)
CIVRVRADNLFF

SEQ ID NO: 568554 - protein, 14 aa, Homo sapiens
  CDR3 for beta chain variable domain of TCR clone 284277 (TRBV14, TRBJ2-3)
CACSRKLAADTQYF

SEQ ID NO: 568555 - protein, 14 aa, Homo sapiens
  CDR3 for alpha chain variable domain of TCR clone 284278 (TRAV1-2, TRAJ8)
CAVRDPPGFQKLVF

SEQ ID NO: 568556 - protein, 14 aa, Homo sapiens
  CDR3 for beta chain variable domain of TCR clone 284278 (TRBV4-2, TRBJ2-7)
CASSNRTGEYEQYF

SEQ ID NO: 568557 - protein, 13 aa, Homo sapiens
  CDR3 for alpha chain variable domain of TCR clone 284279 (TRAV17, TRAJ40)
CAGALGGTYEYIF

SEQ ID NO: 568558 - protein, 16 aa, Homo sapiens
  CDR3 for beta chain variable domain of TCR clone 284279 (TRBV7-2, TRBJ1-4)
CASSLAPGRRDEKLFF

SEQ ID NO: 568559 - protein, 16 aa, Homo sapiens
  CDR3 for alpha chain variable domain of TCR clone 284280 (TRAV12-3, TRAJ53)
CAMSVGSGGSIYKLTF

SEQ ID NO: 568560 - protein, 11 aa, Homo sapiens
  CDR3 for beta chain variable domain of TCR clone 284280 (TRBV29-1, TRBJ2-5)
CSVASGETQYF

SEQ ID NO: 568561 - protein, 12 aa, Homo sapiens
  CDR3 for alpha chain variable domain of TCR clone 284281 (TRAV12-2, TRAJ8)
CAVNTGFQKLVF

SEQ ID NO: 568562 - protein, 17 aa, Homo sapiens
  CDR3 for beta chain variable domain of TCR clone 284281 (TRBV7-8, TRBJ2-6)
CASSAGTGGAGANVLTF

SEQ ID NO: 568563 - protein, 14 aa, Homo sapiens
  CDR3 for alpha chain variable domain of TCR clone 284282 (TRAV1-2, TRAJ8)
CAVREDTGFQKLVF

SEQ ID NO: 568564 - protein, 14 aa, Homo sapiens
  CDR3 for beta chain variable domain of TCR clone 284282 (TRBV13, TRBJ2-5)
CASSLGPRGETQFF

SEQ ID NO: 568565 - protein, 13 aa, Homo sapiens
  CDR3 for alpha chain variable domain of TCR clone 284283 (TRAV17, TRAJ34)
CATDLYNTDKLIF

SEQ ID NO: 568566 - protein, 12 aa, Homo sapiens
  CDR3 for beta chain variable domain of TCR clone 284283 (TRBV11-2, TRBJ2-2)
CASSLGGVELFF

SEQ ID NO: 568567 - protein, 14 aa, Homo sapiens
  CDR3 for alpha chain variable domain of TCR clone 284284 (TRAV13-2, TRAJ16)
FAENNWEDGQKLPF

SEQ ID NO: 568568 - protein, 14 aa, Homo sapiens
  CDR3 for beta chain variable domain of TCR clone 284284 (TRBV7-9, TRBJ1-1)
CASSLGGLKTEAFF

SEQ ID NO: 568569 - protein, 13 aa, Homo sapiens
  CDR3 for alpha chain variable domain of TCR clone 284285 (TRAV13-2, TRAJ16)
CADARTDGQKLLF

SEQ ID NO: 568570 - protein, 15 aa, Homo sapiens
  CDR3 for beta chain variable domain of TCR clone 284285 (TRBV10-3, TRBJ2-2)
CAISVATSNTGELFF

SEQ ID NO: 568571 - protein, 11 aa, Homo sapiens
  CDR3 for alpha chain variable domain of TCR clone 284286 (TRAV2, TRAJ13)
CASGGYQKVTF

SEQ ID NO: 568572 - protein, 16 aa, Homo sapiens
  CDR3 for beta chain variable domain of TCR clone 284286 (TRBV19, TRBJ2-1)
CASSMGGGSSYNEQFL

SEQ ID NO: 568573 - protein, 12 aa, Homo sapiens
  CDR3 for alpha chain variable domain of TCR clone 284287 (TRAV1-2, TRAJ33)
CAALDSNYQLTW

SEQ ID NO: 568574 - protein, 18 aa, Homo sapiens
  CDR3 for beta chain variable domain of TCR clone 284287 (TRBV28, TRBJ2-1)
CASSSTSGRANSYNEQFF

SEQ ID NO: 568575 - protein, 15 aa, Homo sapiens
  CDR3 for alpha chain variable domain of TCR clone 284288 (TRAV8-4, TRAJ10)
CAVSDQMGGGNKFTF

SEQ ID NO: 568576 - protein, 16 aa, Homo sapiens
  CDR3 for beta chain variable domain of TCR clone 284288 (TRBV20-1, TRBJ2-1)
CSARDVTPPPYNEQFF

SEQ ID NO: 568577 - protein, 14 aa, Homo sapiens
  CDR3 for alpha chain variable domain of TCR clone 284289 (TRAV17, TRAJ57)
CATDPQGGSDKLVF

SEQ ID NO: 568578 - protein, 13 aa, Homo sapiens
  CDR3 for beta chain variable domain of TCR clone 284289 (TRBV19, TRBJ2-7)
CASSPRQSYEQYF

SEQ ID NO: 568579 - protein, 14 aa, Homo sapiens
  CDR3 for alpha chain variable domain of TCR clone 284290 (TRAV1-2, TRAJ8)
CAVREDTGFPKLVF

SEQ ID NO: 568580 - protein, 12 aa, Homo sapiens
  CDR3 for beta chain variable domain of TCR clone 284290 (TRBV7-9, TRBJ2-7)
CASSFGSYEQYF

SEQ ID NO: 568581 - protein, 17 aa, Homo sapiens
  CDR3 for alpha chain variable domain of TCR clone 284291 (TRAV26-2, TRAJ42)
CILRDGGYGGSQGNLIF

SEQ ID NO: 568582 - protein, 16 aa, Homo sapiens
  CDR3 for beta chain variable domain of TCR clone 284291 (TRBV12-4, TRBJ1-5)
CASSRPVGGSNQPQHF

SEQ ID NO: 568583 - protein, 16 aa, Homo sapiens
  CDR3 for alpha chain variable domain of TCR clone 284292 (TRAV30, TRAJ24)
CGTEIVDADSWGKFQF

SEQ ID NO: 568584 - protein, 17 aa, Homo sapiens
  CDR3 for beta chain variable domain of TCR clone 284292 (TRBV20-1, TRBJ2-1)
CSAPPRLAGTRYNKQFF

SEQ ID NO: 568585 - protein, 15 aa, Homo sapiens
  CDR3 for alpha chain variable domain of TCR clone 284293 (TRAV29/DV5, TRAJ24)
CAASGATDSWGKIQL

SEQ ID NO: 568586 - protein, 13 aa, Homo sapiens
  CDR3 for beta chain variable domain of TCR clone 284293 (TRBV19, TRBJ1-2)
CASSVPGQDGYTF

SEQ ID NO: 568587 - protein, 12 aa, Homo sapiens
  CDR3 for alpha chain variable domain of TCR clone 284294 (TRAV12-2, TRAJ10)
WRVTGGGNKLTF

SEQ ID NO: 568588 - protein, 16 aa, Homo sapiens
  CDR3 for beta chain variable domain of TCR clone 284294 (TRBV6-4, TRBJ1-2)
CASSEAVGDPNYGYTF

SEQ ID NO: 568589 - protein, 16 aa, Homo sapiens
  CDR3 for alpha chain variable domain of TCR clone 284295 (TRAV20, TRAJ22)
CAVQASSSGSARQLTF

SEQ ID NO: 568590 - protein, 14 aa, Homo sapiens
  CDR3 for beta chain variable domain of TCR clone 284295 (TRBV6-1, TRBJ2-7)
CASSEGGALGEQYF

SEQ ID NO: 568591 - protein, 11 aa, Homo sapiens
  CDR3 for alpha chain variable domain of TCR clone 284296 (TRAV1-2, TRAJ31)
CAVNNNARLMF

SEQ ID NO: 568592 - protein, 15 aa, Homo sapiens
  CDR3 for beta chain variable domain of TCR clone 284296 (TRBV10-3, TRBJ2-3)
CAISLTSGGTDTQYF

SEQ ID NO: 568593 - protein, 14 aa, Homo sapiens
  CDR3 for alpha chain variable domain of TCR clone 284297 (TRAV1-2, TRAJ27)
CAVRSGTNAGKSTF

SEQ ID NO: 568594 - protein, 12 aa, Homo sapiens
  CDR3 for beta chain variable domain of TCR clone 284297 (TRBV11-2, TRBJ2-1)
CASSPGNNEQFF

SEQ ID NO: 568595 - protein, 10 aa, Homo sapiens
  CDR3 for alpha chain variable domain of TCR clone 284298 (TRAV5, TRAJ34)
CAEDNDKLIL

SEQ ID NO: 568596 - protein, 12 aa, Homo sapiens
  CDR3 for beta chain variable domain of TCR clone 284298 (TRBV11-2, TRBJ2-2)
CASSLGGGELFF

SEQ ID NO: 568597 - protein, 13 aa, Homo sapiens
  CDR3 for alpha chain variable domain of TCR clone 284299 (TRAV21, TRAJ40)
CAVRPSRDYKYIF

SEQ ID NO: 568598 - protein, 12 aa, Homo sapiens
  CDR3 for beta chain variable domain of TCR clone 284299 (TRBV14, TRBJ2-5)
CASSQLKETQYF

SEQ ID NO: 568599 - protein, 14 aa, Homo sapiens
  CDR3 for alpha chain variable domain of TCR clone 284300 (TRAV1-2, TRAJ24)
CAVLTTDSWGKFHF

SEQ ID NO: 568600 - protein, 15 aa, Homo sapiens
  CDR3 for beta chain variable domain of TCR clone 284300 (TRBV6-6, TRBJ2-7)
CASSYSYGGSYEQYF

SEQ ID NO: 568601 - protein, 11 aa, Homo sapiens
  CDR3 for alpha chain variable domain of TCR clone 284301 (TRAV26-1, TRAJ37)
CIVRVGRKLIL

SEQ ID NO: 568602 - protein, 16 aa, Homo sapiens
  CDR3 for beta chain variable domain of TCR clone 284301 (TRBV18, TRBJ2-3)
CASSPLDGLVSDTQYF

SEQ ID NO: 568603 - protein, 16 aa, Homo sapiens
  CDR3 for alpha chain variable domain of TCR clone 284302 (TRAV4, TRAJ18)
CGVLLIGGSTLGRLYF

SEQ ID NO: 568604 - protein, 12 aa, Homo sapiens
  CDR3 for beta chain variable domain of TCR clone 284302 (TRBV6-3, TRBJ2-7)
CASSLTPYEQYF

SEQ ID NO: 568605 - protein, 14 aa, Homo sapiens
  CDR3 for alpha chain variable domain of TCR clone 284303 (TRAV17, TRAJ48)
CATEGDFGNEKLTF

SEQ ID NO: 568606 - protein, 13 aa, Homo sapiens
  CDR3 for beta chain variable domain of TCR clone 284303 (TRBV15, TRBJ2-5)
CATSRVAGETQYF

SEQ ID NO: 568607 - protein, 14 aa, Homo sapiens
  CDR3 for alpha chain variable domain of TCR clone 284304 (TRAV22, TRAJ40)
CAVESTPGTYEYIF

SEQ ID NO: 568608 - protein, 17 aa, Homo sapiens
  CDR3 for beta chain variable domain of TCR clone 284304 (TRBV7-9, TRBJ2-2)
CASSLGVAGMNTGELFF

SEQ ID NO: 568609 - protein, 16 aa, Homo sapiens
  CDR3 for alpha chain variable domain of TCR clone 284305 (TRAV38-2/DV8, TRAJ33)
CAYRTGRFDSNYQLIW

SEQ ID NO: 568610 - protein, 13 aa, Homo sapiens
  CDR3 for beta chain variable domain of TCR clone 284305 (TRBV27, TRBJ1-4)
CASSLMGDEKLFF

SEQ ID NO: 568611 - protein, 18 aa, Homo sapiens
  CDR3 for alpha chain variable domain of TCR clone 284306 (TRAV21, TRAJ52)
CAVRPSPAGGTSYGKLTF

SEQ ID NO: 568612 - protein, 16 aa, Homo sapiens
  CDR3 for beta chain variable domain of TCR clone 284306 (TRBV7-3, TRBJ2-1)
CASSLEGYRSYNEQYF

SEQ ID NO: 568613 - protein, 14 aa, Homo sapiens
  CDR3 for alpha chain variable domain of TCR clone 284307 (TRAV26-1, TRAJ38)
CIADNAGNNRKRVG

SEQ ID NO: 568614 - protein, 13 aa, Homo sapiens
  CDR3 for beta chain variable domain of TCR clone 284307 (TRBV20-1, TRBJ1-1)
CSARGGGNTEAFF

SEQ ID NO: 568615 - protein, 13 aa, Homo sapiens
  CDR3 for alpha chain variable domain of TCR clone 284308 (TRAV1-2, TRAJ9)
CAALNTGGFKTIF

SEQ ID NO: 568616 - protein, 16 aa, Homo sapiens
  CDR3 for beta chain variable domain of TCR clone 284308 (TRBV2, TRBJ2-3)
CASSTSVEGVTDTQYF

SEQ ID NO: 568617 - protein, 14 aa, Homo sapiens
  CDR3 for alpha chain variable domain of TCR clone 284309 (TRAV12-2, TRAJ44)
CAVNNAGTASKLTF

SEQ ID NO: 568618 - protein, 12 aa, Homo sapiens
  CDR3 for beta chain variable domain of TCR clone 284309 (TRBV19, TRBJ1-4)
CASKDWPGGLFF

SEQ ID NO: 568619 - protein, 12 aa, Homo sapiens
  CDR3 for alpha chain variable domain of TCR clone 284310 (TRAV27, TRAJ22)
CAGDGAGVEILF

SEQ ID NO: 568620 - protein, 17 aa, Homo sapiens
  CDR3 for beta chain variable domain of TCR clone 284310 (TRBV5-5, TRBJ1-1)
CASSLRFRGLMNTEAFF

SEQ ID NO: 568621 - protein, 16 aa, Homo sapiens
  CDR3 for alpha chain variable domain of TCR clone 284311 (TRAV30, TRAJ24)
CGTEIVDADSWGKFQF

SEQ ID NO: 568622 - protein, 14 aa, Homo sapiens
  CDR3 for beta chain variable domain of TCR clone 284311 (TRBV7-2, TRBJ1-2)
RASSQTGSTYGYTF

SEQ ID NO: 568623 - protein, 14 aa, Homo sapiens
  CDR3 for alpha chain variable domain of TCR clone 284312 (TRAV8-3, TRAJ39)
CAVGANNAGNMLTF

SEQ ID NO: 568624 - protein, 12 aa, Homo sapiens
  CDR3 for beta chain variable domain of TCR clone 284312 (TRBV11-3, TRBJ1-1)
CASNHRQGEAFF

SEQ ID NO: 568625 - protein, 13 aa, Homo sapiens
  CDR3 for alpha chain variable domain of TCR clone 284313 (TRAV26-1, TRAJ35)
CIVSRRGGEMLHF

SEQ ID NO: 568626 - protein, 17 aa, Homo sapiens
  CDR3 for beta chain variable domain of TCR clone 284313 (TRBV7-9, TRBJ2-7)
CASSFDGSRGGAYEQYF

SEQ ID NO: 568627 - protein, 17 aa, Homo sapiens
  CDR3 for alpha chain variable domain of TCR clone 284314 (TRAV23/DV6, TRAJ57)
CAASSTLSQGGSEKLVF

SEQ ID NO: 568628 - protein, 16 aa, Homo sapiens
  CDR3 for beta chain variable domain of TCR clone 284314 (TRBV7-3, TRBJ2-2)
CASSLKRGTLSGELFF

SEQ ID NO: 568629 - protein, 13 aa, Homo sapiens
  CDR3 for alpha chain variable domain of TCR clone 284315 (TRAV21, TRAJ15)
CAVANQAGTALIF

SEQ ID NO: 568630 - protein, 15 aa, Homo sapiens
  CDR3 for beta chain variable domain of TCR clone 284315 (TRBV27, TRBJ2-7)
CASSLGSSVSAEQYF

SEQ ID NO: 568631 - protein, 14 aa, Homo sapiens
  CDR3 for alpha chain variable domain of TCR clone 284316 (TRAV8-4, TRAJ54)
CAVREVLGAQKLVF

SEQ ID NO: 568632 - protein, 15 aa, Homo sapiens
  CDR3 for beta chain variable domain of TCR clone 284316 (TRBV6-1, TRBJ2-6)
CASSSRPSGANVLTF

SEQ ID NO: 568633 - protein, 16 aa, Homo sapiens
  CDR3 for alpha chain variable domain of TCR clone 284317 (TRAV4, TRAJ22)
CLVGDLYSGSARQLTL

SEQ ID NO: 568634 - protein, 13 aa, Homo sapiens
  CDR3 for beta chain variable domain of TCR clone 284317 (TRBV11-3, TRBJ2-3)
CASSHDTKDTQYF

SEQ ID NO: 568635 - protein, 14 aa, Homo sapiens
  CDR3 for alpha chain variable domain of TCR clone 284318 (TRAV17, TRAJ57)
CATDPQGGSEKLVF

SEQ ID NO: 568636 - protein, 13 aa, Homo sapiens
  CDR3 for beta chain variable domain of TCR clone 284318 (TRBV11-2, TRBJ2-5)
CASSFSSQETQYF

SEQ ID NO: 568637 - protein, 12 aa, Homo sapiens
  CDR3 for alpha chain variable domain of TCR clone 284319 (TRAV16, TRAJ49)
CALNEGGDQFYF

SEQ ID NO: 568638 - protein, 14 aa, Homo sapiens
  CDR3 for beta chain variable domain of TCR clone 284319 (TRBV7-9, TRBJ2-1)
CASRPTGLRNEQFF

SEQ ID NO: 568639 - protein, 15 aa, Homo sapiens
  CDR3 for alpha chain variable domain of TCR clone 284320 (TRAV26-1, TRAJ28)
CIVRVTGAGSYQLTF

SEQ ID NO: 568640 - protein, 19 aa, Homo sapiens
  CDR3 for beta chain variable domain of TCR clone 284320 (TRBV7-3, TRBJ2-7)
CASSLTGVAGGWPSYEQYF

SEQ ID NO: 568641 - protein, 15 aa, Homo sapiens
  CDR3 for alpha chain variable domain of TCR clone 284321 (TRAV34, TRAJ38)
CGADFTPGNNRQLIW

SEQ ID NO: 568642 - protein, 12 aa, Homo sapiens
  CDR3 for beta chain variable domain of TCR clone 284321 (TRBV7-9, TRBJ2-7)
CATRTDAYEQYF

SEQ ID NO: 568643 - protein, 11 aa, Homo sapiens
  CDR3 for alpha chain variable domain of TCR clone 284322 (TRAV13-2, TRAJ31)
CAENMDARLMF

SEQ ID NO: 568644 - protein, 15 aa, Homo sapiens
  CDR3 for beta chain variable domain of TCR clone 284322 (TRBV7-8, TRBJ1-2)
CASSLVRDGGIGYTF

SEQ ID NO: 568645 - protein, 14 aa, Homo sapiens
  CDR3 for alpha chain variable domain of TCR clone 284323 (TRAV26-1, TRAJ34)
CIVRVADNTDKLIF

SEQ ID NO: 568646 - protein, 16 aa, Homo sapiens
  CDR3 for beta chain variable domain of TCR clone 284323 (TRBV7-3, TRBJ2-2)
CASSLKRGTLSGELFF

SEQ ID NO: 568647 - protein, 14 aa, Homo sapiens
  CDR3 for alpha chain variable domain of TCR clone 284324 (TRAV8-3, TRAJ20)
CAVGSSSNDYKLSF

SEQ ID NO: 568648 - protein, 15 aa, Homo sapiens
  CDR3 for beta chain variable domain of TCR clone 284324 (TRBV7-9, TRBJ1-5)
CASSQGHQPNQPQHF

SEQ ID NO: 568649 - protein, 18 aa, Homo sapiens
  CDR3 for alpha chain variable domain of TCR clone 284325 (TRAV21, TRAJ52)
CAVRPSPAGGTSYGKLTF

SEQ ID NO: 568650 - protein, 15 aa, Homo sapiens
  CDR3 for beta chain variable domain of TCR clone 284325 (TRBV11-3, TRBJ2-2)
CASSYFSTGTGELFF

SEQ ID NO: 568651 - protein, 16 aa, Homo sapiens
  CDR3 for alpha chain variable domain of TCR clone 284326 (TRAV3, TRAJ37)
CAVRPHGPGNTGKLIF

SEQ ID NO: 568652 - protein, 14 aa, Homo sapiens
  CDR3 for beta chain variable domain of TCR clone 284326 (TRBV23-1, TRBJ2-5)
CASSFLRSQETQYF

SEQ ID NO: 568653 - protein, 16 aa, Homo sapiens
  CDR3 for alpha chain variable domain of TCR clone 284327 (TRAV12-3, TRAJ53)
CAISPGSGGSNYKLTC

SEQ ID NO: 568654 - protein, 11 aa, Homo sapiens
  CDR3 for beta chain variable domain of TCR clone 284327 (TRBV29-1, TRBJ2-5)
CSEDRTGTQYF

SEQ ID NO: 568655 - protein, 15 aa, Homo sapiens
  CDR3 for alpha chain variable domain of TCR clone 284328 (TRAV3, TRAJ4)
CAVRDGTGGYNKLMF

SEQ ID NO: 568656 - protein, 13 aa, Homo sapiens
  CDR3 for beta chain variable domain of TCR clone 284328 (TRBV10-3, TRBJ2-7)
CASKLAVNYEQYF

SEQ ID NO: 568657 - protein, 14 aa, Homo sapiens
  CDR3 for alpha chain variable domain of TCR clone 284329 (TRAV1-2, TRAJ33)
CAVRAPDSNYQLIW

SEQ ID NO: 568658 - protein, 15 aa, Homo sapiens
  CDR3 for beta chain variable domain of TCR clone 284329 (TRBV7-2, TRBJ2-2)
CASRRPGQNTGELFF

SEQ ID NO: 568659 - protein, 13 aa, Homo sapiens
  CDR3 for alpha chain variable domain of TCR clone 284330 (TRAV1-1, TRAJ9)
CAAKNTGGFKTIF

SEQ ID NO: 568660 - protein, 19 aa, Homo sapiens
  CDR3 for beta chain variable domain of TCR clone 284330 (TRBV19, TRBJ2-5)
CASSIGQVTDFFLGETQYF

SEQ ID NO: 568661 - protein, 14 aa, Homo sapiens
  CDR3 for alpha chain variable domain of TCR clone 284331 (TRAV24, TRAJ37)
CASGGSSNTGKLIF

SEQ ID NO: 568662 - protein, 15 aa, Homo sapiens
  CDR3 for beta chain variable domain of TCR clone 284331 (TRBV7-3, TRBJ2-2)
CASKANGANTGELFF

SEQ ID NO: 568663 - protein, 14 aa, Homo sapiens
  CDR3 for alpha chain variable domain of TCR clone 284332 (TRAV8-4, TRAJ54)
CAVSEVLGAQKLVF

SEQ ID NO: 568664 - protein, 14 aa, Homo sapiens
  CDR3 for beta chain variable domain of TCR clone 284332 (TRBV6-3, TRBJ1-1)
CASSYQRRDTEAFF

SEQ ID NO: 568665 - protein, 14 aa, Homo sapiens
  CDR3 for alpha chain variable domain of TCR clone 284333 (TRAV8-4, TRAJ34)
CAVSDPGDTDKLIF

SEQ ID NO: 568666 - protein, 14 aa, Homo sapiens
  CDR3 for beta chain variable domain of TCR clone 284333 (TRBV20-1, TRBJ1-1)
CSAQTRIGGTEAFF

SEQ ID NO: 568667 - protein, 16 aa, Homo sapiens
  CDR3 for alpha chain variable domain of TCR clone 284334 (TRAV14/DV4, TRAJ54)
CAMREGRIQGAQKLVF

SEQ ID NO: 568668 - protein, 14 aa, Homo sapiens
  CDR3 for beta chain variable domain of TCR clone 284334 (TRBV4-2, TRBJ2-1)
CASGLDRAYNEQFF

SEQ ID NO: 568669 - protein, 12 aa, Homo sapiens
  CDR3 for alpha chain variable domain of TCR clone 284335 (TRAV4, TRAJ6)
CLAPGGSYIPTF

SEQ ID NO: 568670 - protein, 18 aa, Homo sapiens
  CDR3 for beta chain variable domain of TCR clone 284335 (TRBV20-1, TRBJ2-3)
GSASGLAGGPGTTDTQYF

SEQ ID NO: 568671 - protein, 12 aa, Homo sapiens
  CDR3 for alpha chain variable domain of TCR clone 284336 (TRAV8-3, TRAJ34)
WASGYNTDKLIF

SEQ ID NO: 568672 - protein, 13 aa, Homo sapiens
  CDR3 for beta chain variable domain of TCR clone 284336 (TRBV6-4, TRBJ2-3)
CASSVSWAETQYF

SEQ ID NO: 568673 - protein, 15 aa, Homo sapiens
  CDR3 for alpha chain variable domain of TCR clone 284337 (TRAV17, TRAJ35)
CATALVIGFGNVLHF

SEQ ID NO: 568674 - protein, 15 aa, Homo sapiens
  CDR3 for beta chain variable domain of TCR clone 284337 (TRBV7-9, TRBJ2-7)
CASSLALAEAYEQYF

SEQ ID NO: 568675 - protein, 10 aa, Homo sapiens
  CDR3 for alpha chain variable domain of TCR clone 284338 (TRAV25, TRAJ53)
CAGSNYKLTF

SEQ ID NO: 568676 - protein, 13 aa, Homo sapiens
  CDR3 for beta chain variable domain of TCR clone 284338 (TRBV11-3, TRBJ2-3)
CASSHDTKDTQYF

SEQ ID NO: 568677 - protein, 14 aa, Homo sapiens
  CDR3 for alpha chain variable domain of TCR clone 284339 (TRAV8-4, TRAJ17)
CAVSDQAAGNKLPF

SEQ ID NO: 568678 - protein, 15 aa, Homo sapiens
  CDR3 for beta chain variable domain of TCR clone 284339 (TRBV7-2, TRBJ1-2)
CASSLAPDRGLGYTF

SEQ ID NO: 568679 - protein, 18 aa, Homo sapiens
  CDR3 for alpha chain variable domain of TCR clone 284340 (TRAV13-1, TRAJ52)
CSAKNPNAGGTSYGKLTF

SEQ ID NO: 568680 - protein, 12 aa, Homo sapiens
  CDR3 for beta chain variable domain of TCR clone 284340 (TRBV11-2, TRBJ2-1)
CASSPGNNEQFF

SEQ ID NO: 568681 - protein, 12 aa, Homo sapiens
  CDR3 for alpha chain variable domain of TCR clone 284341 (TRAV21, TRAJ11)
CAATSGYTTLTF

SEQ ID NO: 568682 - protein, 13 aa, Homo sapiens
  CDR3 for beta chain variable domain of TCR clone 284341 (TRBV20-1, TRBJ1-1)
CSARGGGNTEAFF

SEQ ID NO: 568683 - protein, 14 aa, Homo sapiens
  CDR3 for alpha chain variable domain of TCR clone 284342 (TRAV1-2, TRAJ16)
CAVNRFSDGQTLLF

SEQ ID NO: 568684 - protein, 14 aa, Homo sapiens
  CDR3 for beta chain variable domain of TCR clone 284342 (TRBV7-3, TRBJ1-1)
CASSLGTGYTEAFF

SEQ ID NO: 568685 - protein, 16 aa, Homo sapiens
  CDR3 for alpha chain variable domain of TCR clone 284343 (TRAV8-4, TRAJ27)
CAVKEGGFTNAGKSTF

SEQ ID NO: 568686 - protein, 13 aa, Homo sapiens
  CDR3 for beta chain variable domain of TCR clone 284343 (TRBV19, TRBJ2-7)
CASSRDRSYEQYF

SEQ ID NO: 568687 - protein, 16 aa, Homo sapiens
  CDR3 for alpha chain variable domain of TCR clone 284344 (TRAV17, TRAJ52)
CATSNAGGTSYGKLTF

SEQ ID NO: 568688 - protein, 17 aa, Homo sapiens
  CDR3 for beta chain variable domain of TCR clone 284344 (TRBV14, TRBJ2-1)
CASSQDRRVTSYNEQFF

SEQ ID NO: 568689 - protein, 14 aa, Homo sapiens
  CDR3 for alpha chain variable domain of TCR clone 284345 (TRAV36/DV7, TRAJ44)
CRGANTGTASKLTF

SEQ ID NO: 568690 - protein, 12 aa, Homo sapiens
  CDR3 for beta chain variable domain of TCR clone 284345 (TRBV12-4, TRBJ2-3)
CASSTLPDTQYF

SEQ ID NO: 568691 - protein, 17 aa, Homo sapiens
  CDR3 for alpha chain variable domain of TCR clone 284346 (TRAV3, TRAJ42)
CAVRDRDYGGSQGNLIF

SEQ ID NO: 568692 - protein, 12 aa, Homo sapiens
  CDR3 for beta chain variable domain of TCR clone 284346 (TRBV11-2, TRBJ2-1)
CASSPGNNEQSF

SEQ ID NO: 568693 - protein, 15 aa, Homo sapiens
  CDR3 for alpha chain variable domain of TCR clone 284347 (TRAV29/DV5, TRAJ57)
CAASLLRGGSEKLVF

SEQ ID NO: 568694 - protein, 15 aa, Homo sapiens
  CDR3 for beta chain variable domain of TCR clone 284347 (TRBV5-1, TRBJ1-3)
CTSSLEGGSGNTIYF

SEQ ID NO: 568695 - protein, 14 aa, Homo sapiens
  CDR3 for alpha chain variable domain of TCR clone 284348 (TRAV23/DV6, TRAJ3)
CAASMASSASTIIF

SEQ ID NO: 568696 - protein, 13 aa, Homo sapiens
  CDR3 for beta chain variable domain of TCR clone 284348 (TRBV27, TRBJ2-5)
CASFSRGLETQYF

SEQ ID NO: 568697 - protein, 13 aa, Homo sapiens
  CDR3 for alpha chain variable domain of TCR clone 284349 (TRAV3, TRAJ21)
CAVGNFNKFYFDV

SEQ ID NO: 568698 - protein, 17 aa, Homo sapiens
  CDR3 for beta chain variable domain of TCR clone 284349 (TRBV24-1, TRBJ2-1)
CATSDVSTSGTYNEQFF

SEQ ID NO: 568699 - protein, 14 aa, Homo sapiens
  CDR3 for alpha chain variable domain of TCR clone 284350 (TRAV8-3, TRAJ15)
CAVGRHQAGTALIF

SEQ ID NO: 568700 - protein, 14 aa, Homo sapiens
  CDR3 for beta chain variable domain of TCR clone 284350 (TRBV7-8, TRBJ1-5)
CASSTGTVGGPQHF

SEQ ID NO: 568701 - protein, 12 aa, Homo sapiens
  CDR3 for alpha chain variable domain of TCR clone 284351 (TRAV23/DV6, TRAJ53)
CAASKLGSGGSN

SEQ ID NO: 568702 - protein, 12 aa, Homo sapiens
  CDR3 for beta chain variable domain of TCR clone 284351 (TRBV11-2, TRBJ2-1)
CASSPGNNEQFF

SEQ ID NO: 568703 - protein, 15 aa, Homo sapiens
  CDR3 for alpha chain variable domain of TCR clone 284352 (TRAV20, TRAJ50)
CAVRQMKTSYDKVIF

SEQ ID NO: 568704 - protein, 17 aa, Homo sapiens
  CDR3 for beta chain variable domain of TCR clone 284352 (TRBV28, TRBJ2-7)
CASSPLRRASGVYEQYF

SEQ ID NO: 568705 - protein, 13 aa, Homo sapiens
  CDR3 for alpha chain variable domain of TCR clone 284353 (TRAV26-1, TRAJ40)
CIVRGTGTYKYIF

SEQ ID NO: 568706 - protein, 16 aa, Homo sapiens
  CDR3 for beta chain variable domain of TCR clone 284353 (TRBV20-1, TRBJ1-1)
CSARARTLSMNTEAFF

SEQ ID NO: 568707 - protein, 16 aa, Homo sapiens
  CDR3 for alpha chain variable domain of TCR clone 284354 (TRAV27, TRAJ13)
CAGAKSDSGGYQKVTF

SEQ ID NO: 568708 - protein, 16 aa, Homo sapiens
  CDR3 for beta chain variable domain of TCR clone 284354 (TRBV28, TRBJ2-6)
CASSFRTYSGANVLTF

SEQ ID NO: 568709 - protein, 15 aa, Homo sapiens
  CDR3 for alpha chain variable domain of TCR clone 284355 (TRAV3, TRAJ5)
CAVRDLDTGRRALTF

SEQ ID NO: 568710 - protein, 14 aa, Homo sapiens
  CDR3 for beta chain variable domain of TCR clone 284355 (TRBV18, TRBJ2-5)
RASSPGVSQETQYF

SEQ ID NO: 568711 - protein, 10 aa, Homo sapiens
  CDR3 for alpha chain variable domain of TCR clone 284356 (TRAV38-2/DV8, TRAJ40)
CASGTYKYIF

SEQ ID NO: 568712 - protein, 12 aa, Homo sapiens
  CDR3 for beta chain variable domain of TCR clone 284356 (TRBV7-8, TRBJ2-7)
CASSLGDREQYF

SEQ ID NO: 568713 - protein, 14 aa, Homo sapiens
  CDR3 for alpha chain variable domain of TCR clone 284357 (TRAV23/DV6, TRAJ13)
CAAIYSGGYQKVTF

SEQ ID NO: 568714 - protein, 14 aa, Homo sapiens
  CDR3 for beta chain variable domain of TCR clone 284357 (TRBV7-9, TRBJ2-1)
CASSPRDSLYEQFF

SEQ ID NO: 568715 - protein, 15 aa, Homo sapiens
  CDR3 for alpha chain variable domain of TCR clone 284358 (TRAV17, TRAJ54)
CATTRSEQGAQKPVF

SEQ ID NO: 568716 - protein, 16 aa, Homo sapiens
  CDR3 for beta chain variable domain of TCR clone 284358 (TRBV12-4, TRBJ2-3)
CASSLRLAETTDTQYF

SEQ ID NO: 568717 - protein, 15 aa, Homo sapiens
  CDR3 for alpha chain variable domain of TCR clone 284359 (TRAV27, TRAJ38)
CAARRNAGNNRKLIW

SEQ ID NO: 568718 - protein, 15 aa, Homo sapiens
  CDR3 for beta chain variable domain of TCR clone 284359 (TRBV7-2, TRBJ2-2)
CASRRPGQNTGELFF

SEQ ID NO: 568719 - protein, 13 aa, Homo sapiens
  CDR3 for alpha chain variable domain of TCR clone 284360 (TRAV13-1, TRAJ5)
CAASETGRRALTF

SEQ ID NO: 568720 - protein, 12 aa, Homo sapiens
  CDR3 for beta chain variable domain of TCR clone 284360 (TRBV28, TRBJ2-3)
CASSLYRDRQYF

SEQ ID NO: 568721 - protein, 13 aa, Homo sapiens
  CDR3 for alpha chain variable domain of TCR clone 284361 (TRAV12-2, TRAJ13)
CREEDWGYQKVTF

SEQ ID NO: 568722 - protein, 13 aa, Homo sapiens
  CDR3 for beta chain variable domain of TCR clone 284361 (TRBV20-1, TRBJ2-2)
CSASAAGTGELFF

SEQ ID NO: 568723 - protein, 10 aa, Homo sapiens
  CDR3 for alpha chain variable domain of TCR clone 284362 (TRAV13-2, TRAJ49)
CADTGNQFYF

SEQ ID NO: 568724 - protein, 16 aa, Homo sapiens
  CDR3 for beta chain variable domain of TCR clone 284362 (TRBV12-4, TRBJ1-5)
CASSRPVGGSNQPQHF

SEQ ID NO: 568725 - protein, 13 aa, Homo sapiens
  CDR3 for alpha chain variable domain of TCR clone 284363 (TRAV27, TRAJ41)
CAGEGNSGYALNF

SEQ ID NO: 568726 - protein, 14 aa, Homo sapiens
  CDR3 for beta chain variable domain of TCR clone 284363 (TRBV25-1, TRBJ1-1)
GASTHLGGNTEAFF

SEQ ID NO: 568727 - protein, 14 aa, Homo sapiens
  CDR3 for alpha chain variable domain of TCR clone 284364 (TRAV23/DV6, TRAJ13)
CAAWPGGGGYKSYL

SEQ ID NO: 568728 - protein, 14 aa, Homo sapiens
  CDR3 for beta chain variable domain of TCR clone 284364 (TRBV6-1, TRBJ2-1)
CASAGGAIKNEQFF

SEQ ID NO: 568729 - protein, 15 aa, Homo sapiens
  CDR3 for alpha chain variable domain of TCR clone 284365 (TRAV1-2, TRAJ15)
CAVEAANQAGTALIF

SEQ ID NO: 568730 - protein, 15 aa, Homo sapiens
  CDR3 for beta chain variable domain of TCR clone 284365 (TRBV27, TRBJ2-7)
CASSGPGQGPYEQYF

SEQ ID NO: 568731 - protein, 13 aa, Homo sapiens
  CDR3 for alpha chain variable domain of TCR clone 284366 (TRAV12-2, TRAJ39)
CAVNNNAGNMLAF

SEQ ID NO: 568732 - protein, 13 aa, Homo sapiens
  CDR3 for beta chain variable domain of TCR clone 284366 (TRBV2, TRBJ1-5)
CATAGPGNQPQHF

SEQ ID NO: 568733 - protein, 11 aa, Homo sapiens
  CDR3 for alpha chain variable domain of TCR clone 284367 (TRAV1-2, TRAJ11)
CAVRGYSTLTF

SEQ ID NO: 568734 - protein, 15 aa, Homo sapiens
  CDR3 for beta chain variable domain of TCR clone 284367 (TRBV6-3, TRBJ2-7)
CASSSPGTVFYEQYF

SEQ ID NO: 568735 - protein, 11 aa, Homo sapiens
  CDR3 for alpha chain variable domain of TCR clone 284368 (TRAV2, TRAJ33)
CAVDSNYQLIW

SEQ ID NO: 568736 - protein, 14 aa, Homo sapiens
  CDR3 for beta chain variable domain of TCR clone 284368 (TRBV28, TRBJ2-7)
CASPGLAEPAEQFF

SEQ ID NO: 568737 - protein, 14 aa, Homo sapiens
  CDR3 for alpha chain variable domain of TCR clone 284369 (TRAV12-3, TRAJ10)
SHLPLPGGGNKLTF

SEQ ID NO: 568738 - protein, 16 aa, Homo sapiens
  CDR3 for beta chain variable domain of TCR clone 284369 (TRBV10-3, TRBJ2-1)
CAISGVGDGGGGEQFF

SEQ ID NO: 568739 - protein, 15 aa, Homo sapiens
  CDR3 for alpha chain variable domain of TCR clone 284370 (TRAV27, TRAJ38)
CAGRFNAGINRKLIW

SEQ ID NO: 568740 - protein, 13 aa, Homo sapiens
  CDR3 for beta chain variable domain of TCR clone 284370 (TRBV12-5, TRBJ2-3)
CASQNRGTDTQYF

SEQ ID NO: 568741 - protein, 14 aa, Homo sapiens
  CDR3 for alpha chain variable domain of TCR clone 284371 (TRAV8-3, TRAJ10)
CAVGNGGGGNKLTF

SEQ ID NO: 568742 - protein, 16 aa, Homo sapiens
  CDR3 for beta chain variable domain of TCR clone 284371 (TRBV11-2, TRBJ1-2)
CASSLDTGGADYGYTF

SEQ ID NO: 568743 - protein, 14 aa, Homo sapiens
  CDR3 for alpha chain variable domain of TCR clone 284372 (TRAV12-2, TRAJ17)
CAVLFKAAGNKLTF

SEQ ID NO: 568744 - protein, 15 aa, Homo sapiens
  CDR3 for beta chain variable domain of TCR clone 284372 (TRBV7-9, TRBJ1-4)
CASSARTGGNEKLFF

SEQ ID NO: 568745 - protein, 12 aa, Homo sapiens
  CDR3 for alpha chain variable domain of TCR clone 284373 (TRAV12-2, TRAJ16)
CAVNLDGQTLLF

SEQ ID NO: 568746 - protein, 12 aa, Homo sapiens
  CDR3 for beta chain variable domain of TCR clone 284373 (TRBV5-7, TRBJ2-7)
CASSVQGGEQYF

SEQ ID NO: 568747 - protein, 13 aa, Homo sapiens
  CDR3 for alpha chain variable domain of TCR clone 284374 (TRAV1-2, TRAJ9)
CAALNTGGFKTIF

SEQ ID NO: 568748 - protein, 13 aa, Homo sapiens
  CDR3 for beta chain variable domain of TCR clone 284374 (TRBV2, TRBJ1-5)
CASSVGWDQPQHF

SEQ ID NO: 568749 - protein, 15 aa, Homo sapiens
  CDR3 for alpha chain variable domain of TCR clone 284375 (TRAV27, TRAJ38)
CAARRNAGNNRKLIW

SEQ ID NO: 568750 - protein, 12 aa, Homo sapiens
  CDR3 for beta chain variable domain of TCR clone 284375 (TRBV5-1, TRBJ2-7)
CASSFRGYEQYF

SEQ ID NO: 568751 - protein, 16 aa, Homo sapiens
  CDR3 for alpha chain variable domain of TCR clone 284376 (TRAV21, TRAJ52)
CAVTNGGGTSYGKLTF

SEQ ID NO: 568752 - protein, 11 aa, Homo sapiens
  CDR3 for beta chain variable domain of TCR clone 284376 (TRBV2, TRBJ1-1)
CASREGSEAFF

SEQ ID NO: 568753 - protein, 11 aa, Homo sapiens
  CDR3 for alpha chain variable domain of TCR clone 284377 (TRAV2, TRAJ33)
CAVDSNYQLIW

SEQ ID NO: 568754 - protein, 13 aa, Homo sapiens
  CDR3 for beta chain variable domain of TCR clone 284377 (TRBV7-2, TRBJ2-7)
CASSSPSGSEKYF

SEQ ID NO: 568755 - protein, 12 aa, Homo sapiens
  CDR3 for alpha chain variable domain of TCR clone 284378 (TRAV21, TRAJ3)
CCFYSSASKIIF

SEQ ID NO: 568756 - protein, 15 aa, Homo sapiens
  CDR3 for beta chain variable domain of TCR clone 284378 (TRBV9, TRBJ2-1)
CASSLAGSSYNEQFF

SEQ ID NO: 568757 - protein, 14 aa, Homo sapiens
  CDR3 for alpha chain variable domain of TCR clone 284379 (TRAV13-1, TRAJ44)
CAAKATGTASKLTF

SEQ ID NO: 568758 - protein, 11 aa, Homo sapiens
  CDR3 for beta chain variable domain of TCR clone 284379 (TRBV19, TRBJ2-7)
CASSILGEQYF

SEQ ID NO: 568759 - protein, 15 aa, Homo sapiens
  CDR3 for alpha chain variable domain of TCR clone 284380 (TRAV12-1, TRAJ44)
CVVFVNTGTASKLTF

SEQ ID NO: 568760 - protein, 15 aa, Homo sapiens
  CDR3 for beta chain variable domain of TCR clone 284380 (TRBV10-1, TRBJ2-3)
CASSATSGGFDTQYF

SEQ ID NO: 568761 - protein, 12 aa, Homo sapiens
  CDR3 for alpha chain variable domain of TCR clone 284381 (TRAV19, TRAJ23)
CALRAGGGKLIF

SEQ ID NO: 568762 - protein, 13 aa, Homo sapiens
  CDR3 for beta chain variable domain of TCR clone 284381 (TRBV20-1, TRBJ1-1)
CSARGGGNTEAFF

SEQ ID NO: 568763 - protein, 16 aa, Homo sapiens
  CDR3 for alpha chain variable domain of TCR clone 284382 (TRAV20, TRAJ26)
CAVQHRRDNYGQNFVF

SEQ ID NO: 568764 - protein, 15 aa, Homo sapiens
  CDR3 for beta chain variable domain of TCR clone 284382 (TRBV7-2, TRBJ2-7)
CASSWGQGASYEQYF

SEQ ID NO: 568765 - protein, 13 aa, Homo sapiens
  CDR3 for alpha chain variable domain of TCR clone 284383 (TRAV36/DV7, TRAJ49)
CAGDSNTGNQCYF

SEQ ID NO: 568766 - protein, 12 aa, Homo sapiens
  CDR3 for beta chain variable domain of TCR clone 284383 (TRBV11-2, TRBJ2-2)
CASSLGGGELFF

SEQ ID NO: 568767 - protein, 11 aa, Homo sapiens
  CDR3 for alpha chain variable domain of TCR clone 284384 (TRAV21, TRAJ11)
CAVNGYSTLTF

SEQ ID NO: 568768 - protein, 16 aa, Homo sapiens
  CDR3 for beta chain variable domain of TCR clone 284384 (TRBV4-3, TRBJ2-2)
CASSHLQGSGNGELFF

SEQ ID NO: 568769 - protein, 14 aa, Homo sapiens
  CDR3 for alpha chain variable domain of TCR clone 284385 (TRAV3, TRAJ9)
CAVRLNTGGFKTIF

SEQ ID NO: 568770 - protein, 15 aa, Homo sapiens
  CDR3 for beta chain variable domain of TCR clone 284385 (TRBV19, TRBJ1-1)
CASTSGQIQNTEAFF

SEQ ID NO: 568771 - protein, 16 aa, Homo sapiens
  CDR3 for alpha chain variable domain of TCR clone 284386 (TRAV21, TRAJ52)
CAVTNAGGTSYGKLTF

SEQ ID NO: 568772 - protein, 17 aa, Homo sapiens
  CDR3 for beta chain variable domain of TCR clone 284386 (TRBV28, TRBJ2-5)
CARSRQGGLAGAETQYF

SEQ ID NO: 568773 - protein, 14 aa, Homo sapiens
  CDR3 for alpha chain variable domain of TCR clone 284387 (TRAV8-3, TRAJ4)
CAVGAAGGYNKLIF

SEQ ID NO: 568774 - protein, 12 aa, Homo sapiens
  CDR3 for beta chain variable domain of TCR clone 284387 (TRBV5-5, TRBJ2-5)
CASSYFGETQYF

SEQ ID NO: 568775 - protein, 11 aa, Homo sapiens
  CDR3 for alpha chain variable domain of TCR clone 284388 (TRAV12-3, TRAJ49)
CAMSSGNQCYF

SEQ ID NO: 568776 - protein, 17 aa, Homo sapiens
  CDR3 for beta chain variable domain of TCR clone 284388 (TRBV5-7, TRBJ2-7)
CASSLWRVLAGSYEQYF

SEQ ID NO: 568777 - protein, 14 aa, Homo sapiens
  CDR3 for alpha chain variable domain of TCR clone 284389 (TRAV17, TRAJ4)
CATAPLGGDNKLTF

SEQ ID NO: 568778 - protein, 13 aa, Homo sapiens
  CDR3 for beta chain variable domain of TCR clone 284389 (TRBV12-4, TRBJ1-3)
CASSLASGNTIYF

SEQ ID NO: 568779 - protein, 12 aa, Homo sapiens
  CDR3 for alpha chain variable domain of TCR clone 284390 (TRAV35, TRAJ30)
CAGQLADDRIIF

SEQ ID NO: 568780 - protein, 17 aa, Homo sapiens
  CDR3 for beta chain variable domain of TCR clone 284390 (TRBV4-2, TRBJ2-5)
CASSPGRWRNFQETQYF

SEQ ID NO: 568781 - protein, 12 aa, Homo sapiens
  CDR3 for alpha chain variable domain of TCR clone 284391 (TRAV13-1, TRAJ15)
CAASQAGTALIF

SEQ ID NO: 568782 - protein, 14 aa, Homo sapiens
  CDR3 for beta chain variable domain of TCR clone 284391 (TRBV19, TRBJ2-2)
CASGTLHRSGELFF

SEQ ID NO: 568783 - protein, 15 aa, Homo sapiens
  CDR3 for alpha chain variable domain of TCR clone 284392 (TRAV8-3, TRAJ11)
CAVGLLNSGYSTRTF

SEQ ID NO: 568784 - protein, 15 aa, Homo sapiens
  CDR3 for beta chain variable domain of TCR clone 284392 (TRBV13, TRBJ2-1)
CASSLLSGLNNEQFF

SEQ ID NO: 568785 - protein, 15 aa, Homo sapiens
  CDR3 for alpha chain variable domain of TCR clone 284393 (TRAV25, TRAJ52)
CAGTSGGTSYGKLTF

SEQ ID NO: 568786 - protein, 14 aa, Homo sapiens
  CDR3 for beta chain variable domain of TCR clone 284393 (TRBV18, TRBJ2-5)
CASSPGVSQETQYF

SEQ ID NO: 568787 - protein, 14 aa, Homo sapiens
  CDR3 for alpha chain variable domain of TCR clone 284394 (TRAV26-1, TRAJ5)
CIVRVRFIRRALTF

SEQ ID NO: 568788 - protein, 17 aa, Homo sapiens
  CDR3 for beta chain variable domain of TCR clone 284394 (TRBV29-1, TRBJ2-3)
CSVEVLAGETSTDTQYF

SEQ ID NO: 568789 - protein, 13 aa, Homo sapiens
  CDR3 for alpha chain variable domain of TCR clone 284395 (TRAV17, TRAJ4)
CATKSGGYNKLIF

SEQ ID NO: 568790 - protein, 14 aa, Homo sapiens
  CDR3 for beta chain variable domain of TCR clone 284395 (TRBV20-1, TRBJ1-5)
RSARDDRGNQPQHF

SEQ ID NO: 568791 - protein, 12 aa, Homo sapiens
  CDR3 for alpha chain variable domain of TCR clone 284396 (TRAV8-3, TRAJ5)
CAVGGGLRALTF

SEQ ID NO: 568792 - protein, 13 aa, Homo sapiens
  CDR3 for beta chain variable domain of TCR clone 284396 (TRBV7-9, TRBJ2-1)
CASSWESYNEQFF

SEQ ID NO: 568793 - protein, 13 aa, Homo sapiens
  CDR3 for alpha chain variable domain of TCR clone 284397 (TRAV27, TRAJ54)
CAGAGQGAQKLVF

SEQ ID NO: 568794 - protein, 15 aa, Homo sapiens
  CDR3 for beta chain variable domain of TCR clone 284397 (TRBV18, TRBJ2-6)
CAGSPSYAGAKVLTF

SEQ ID NO: 568795 - protein, 13 aa, Homo sapiens
  CDR3 for alpha chain variable domain of TCR clone 284398 (TRAV13-2, TRAJ48)
CAEMDFGNEKLTF

SEQ ID NO: 568796 - protein, 15 aa, Homo sapiens
  CDR3 for beta chain variable domain of TCR clone 284398 (TRBV5-1, TRBJ1-1)
CASSSTTGTNTETFF

SEQ ID NO: 568797 - protein, 15 aa, Homo sapiens
  CDR3 for alpha chain variable domain of TCR clone 284399 (TRAV20, TRAJ58)
CAVQDLETSGSRLTF

SEQ ID NO: 568798 - protein, 16 aa, Homo sapiens
  CDR3 for beta chain variable domain of TCR clone 284399 (TRBV6-1, TRBJ2-2)
CASSAFRGGDTGELFF

SEQ ID NO: 568799 - protein, 16 aa, Homo sapiens
  CDR3 for alpha chain variable domain of TCR clone 284400 (TRAV3, TRAJ18)
CAVRDGRGSTLGRLYF

SEQ ID NO: 568800 - protein, 18 aa, Homo sapiens
  CDR3 for beta chain variable domain of TCR clone 284400 (TRBV7-3, TRBJ2-3)
CASSSTGTYPGSTDTQYF

SEQ ID NO: 568801 - protein, 13 aa, Homo sapiens
  CDR3 for alpha chain variable domain of TCR clone 284401 (TRAV13-1, TRAJ39)
CSKYSNAGNMLTF

SEQ ID NO: 568802 - protein, 17 aa, Homo sapiens
  CDR3 for beta chain variable domain of TCR clone 284401 (TRBV20-1, TRBJ2-1)
CSARDPRQGVSYNEQFF

SEQ ID NO: 568803 - protein, 13 aa, Homo sapiens
  CDR3 for alpha chain variable domain of TCR clone 284402 (TRAV13-2, TRAJ48)
CAEMDFGNEKLTF

SEQ ID NO: 568804 - protein, 15 aa, Homo sapiens
  CDR3 for beta chain variable domain of TCR clone 284402 (TRBV7-9, TRBJ1-6)
CASSAPGRGNSPLHL

SEQ ID NO: 568805 - protein, 11 aa, Homo sapiens
  CDR3 for alpha chain variable domain of TCR clone 284403 (TRAV25, TRAJ23)
CGSNQGGKLIF

SEQ ID NO: 568806 - protein, 15 aa, Homo sapiens
  CDR3 for beta chain variable domain of TCR clone 284403 (TRBV6-3, TRBJ2-7)
CASSSPGTVFYEQYF

SEQ ID NO: 568807 - protein, 14 aa, Homo sapiens
  CDR3 for alpha chain variable domain of TCR clone 284404 (TRAV21, TRAJ37)
CAVKGSSNTGKLIF

SEQ ID NO: 568808 - protein, 13 aa, Homo sapiens
  CDR3 for beta chain variable domain of TCR clone 284404 (TRBV7-3, TRBJ1-1)
CASSQDWGAEAFF

SEQ ID NO: 568809 - protein, 12 aa, Homo sapiens
  CDR3 for alpha chain variable domain of TCR clone 284405 (TRAV13-2, TRAJ8)
CAPWLGFQKLVF

SEQ ID NO: 568810 - protein, 16 aa, Homo sapiens
  CDR3 for beta chain variable domain of TCR clone 284405 (TRBV11-2, TRBJ2-7)
CASSPTAGGVSYEQYF

SEQ ID NO: 568811 - protein, 15 aa, Homo sapiens
  CDR3 for alpha chain variable domain of TCR clone 284406 (TRAV23/DV6, TRAJ3)
CAASTADSSASKIIF

SEQ ID NO: 568812 - protein, 14 aa, Homo sapiens
  CDR3 for beta chain variable domain of TCR clone 284406 (TRBV19, TRBJ2-1)
CASPTFVLSGEQFF

SEQ ID NO: 568813 - protein, 15 aa, Homo sapiens
  CDR3 for alpha chain variable domain of TCR clone 284407 (TRAV26-2, TRAJ28)
CILVESGAGSYQLTF

SEQ ID NO: 568814 - protein, 14 aa, Homo sapiens
  CDR3 for beta chain variable domain of TCR clone 284407 (TRBV10-2, TRBJ1-5)
CASSSTGRNQPQHF

SEQ ID NO: 568815 - protein, 19 aa, Homo sapiens
  CDR3 for alpha chain variable domain of TCR clone 284408 (TRAV1-2, TRAJ26)
CLLPLCCERPDNYGQNFVF

SEQ ID NO: 568816 - protein, 17 aa, Homo sapiens
  CDR3 for beta chain variable domain of TCR clone 284408 (TRBV13, TRBJ2-3)
CASSRSRVAGGRNTQYF

SEQ ID NO: 568817 - protein, 16 aa, Homo sapiens
  CDR3 for alpha chain variable domain of TCR clone 284409 (TRAV8-2, TRAJ45)
CVVGEGTGGGADGLTF

SEQ ID NO: 568818 - protein, 15 aa, Homo sapiens
  CDR3 for beta chain variable domain of TCR clone 284409 (TRBV7-9, TRBJ2-5)
CASSLVAGGLETQYF

SEQ ID NO: 568819 - protein, 11 aa, Homo sapiens
  CDR3 for alpha chain variable domain of TCR clone 284410 (TRAV1-1, TRAJ20)
CAVFNDYKLRF

SEQ ID NO: 568820 - protein, 16 aa, Homo sapiens
  CDR3 for beta chain variable domain of TCR clone 284410 (TRBV29-1, TRBJ2-2)
CSVEKTSEGNTGELFF

SEQ ID NO: 568821 - protein, 11 aa, Homo sapiens
  CDR3 for alpha chain variable domain of TCR clone 284411 (TRAV35, TRAJ12)
RRMDSSYKLIF

SEQ ID NO: 568822 - protein, 20 aa, Homo sapiens
  CDR3 for beta chain variable domain of TCR clone 284411 (TRBV7-8, TRBJ2-2)
CASSHLFPGPTIHITGELFF

SEQ ID NO: 568823 - protein, 14 aa, Homo sapiens
  CDR3 for alpha chain variable domain of TCR clone 284412 (TRAV17, TRAJ31)
CAPVLRNNNARLMF

SEQ ID NO: 568824 - protein, 13 aa, Homo sapiens
  CDR3 for beta chain variable domain of TCR clone 284412 (TRBV7-3, TRBJ1-2)
CASSLKRGYGYTF

SEQ ID NO: 568825 - protein, 14 aa, Homo sapiens
  CDR3 for alpha chain variable domain of TCR clone 284413 (TRAV23/DV6, TRAJ58)
CAGMRETSGSRLSV

SEQ ID NO: 568826 - protein, 13 aa, Homo sapiens
  CDR3 for beta chain variable domain of TCR clone 284413 (TRBV28, TRBJ2-7)
CASRSSGVYEQYF

SEQ ID NO: 568827 - protein, 14 aa, Homo sapiens
  CDR3 for alpha chain variable domain of TCR clone 284414 (TRAV12-3, TRAJ22)
CAMSWFGSARQLTF

SEQ ID NO: 568828 - protein, 12 aa, Homo sapiens
  CDR3 for beta chain variable domain of TCR clone 284414 (TRBV11-2, TRBJ2-2)
CASSLGGGELFF

SEQ ID NO: 568829 - protein, 14 aa, Homo sapiens
  CDR3 for alpha chain variable domain of TCR clone 284415 (TRAV13-2, TRAJ57)
CAESTQGGSEKLGF

SEQ ID NO: 568830 - protein, 14 aa, Homo sapiens
  CDR3 for beta chain variable domain of TCR clone 284415 (TRBV10-3, TRBJ2-2)
CAISEVSRSGELFF

SEQ ID NO: 568831 - protein, 14 aa, Homo sapiens
  CDR3 for alpha chain variable domain of TCR clone 284416 (TRAV30, TRAJ26)
CGTEIVIYGQNFVF

SEQ ID NO: 568832 - protein, 13 aa, Homo sapiens
  CDR3 for beta chain variable domain of TCR clone 284416 (TRBV19, TRBJ1-3)
CASRLSLGNTMYF

SEQ ID NO: 568833 - protein, 15 aa, Homo sapiens
  CDR3 for alpha chain variable domain of TCR clone 284417 (TRAV8-3, TRAJ45)
CASSYSGGGADGLTF

SEQ ID NO: 568834 - protein, 13 aa, Homo sapiens
  CDR3 for beta chain variable domain of TCR clone 284417 (TRBV10-3, TRBJ2-7)
CAPKLTVNYEQYF

SEQ ID NO: 568835 - protein, 15 aa, Homo sapiens
  CDR3 for alpha chain variable domain of TCR clone 284418 (TRAV14/DV4, TRAJ26)
CAMREGQNYGQNFVS

SEQ ID NO: 568836 - protein, 13 aa, Homo sapiens
  CDR3 for beta chain variable domain of TCR clone 284418 (TRBV24-1, TRBJ2-2)
CATSDWSTGELFF

SEQ ID NO: 568837 - protein, 17 aa, Homo sapiens
  CDR3 for alpha chain variable domain of TCR clone 284419 (TRAV8-2, TRAJ17)
CVVSDRRFKAAGNKLTF

SEQ ID NO: 568838 - protein, 18 aa, Homo sapiens
  CDR3 for beta chain variable domain of TCR clone 284419 (TRBV7-9, TRBJ2-7)
CASSLTASGSRTWYEQYF

SEQ ID NO: 568839 - protein, 15 aa, Homo sapiens
  CDR3 for alpha chain variable domain of TCR clone 284420 (TRAV8-3, TRAJ23)
CAVGDRYNQGGKLIF

SEQ ID NO: 568840 - protein, 15 aa, Homo sapiens
  CDR3 for beta chain variable domain of TCR clone 284420 (TRBV13, TRBJ1-2)
CASSLGRQPGYGYTF

SEQ ID NO: 568841 - protein, 20 aa, Homo sapiens
  CDR3 for alpha chain variable domain of TCR clone 284421 (TRAV26-1, TRAJ42)
CCVQLHRQTYYGGSQGNLIF

SEQ ID NO: 568842 - protein, 16 aa, Homo sapiens
  CDR3 for beta chain variable domain of TCR clone 284421 (TRBV7-3, TRBJ2-2)
CASSLKRGTLSGELFF

SEQ ID NO: 568843 - protein, 14 aa, Homo sapiens
  CDR3 for alpha chain variable domain of TCR clone 284422 (TRAV12-1, TRAJ17)
CVVNYKAACNTLTF

SEQ ID NO: 568844 - protein, 17 aa, Homo sapiens
  CDR3 for beta chain variable domain of TCR clone 284422 (TRBV20-1, TRBJ2-1)
CSASSSGLAGSYNEQFF

SEQ ID NO: 568845 - protein, 19 aa, Homo sapiens
  CDR3 for alpha chain variable domain of TCR clone 284423 (TRAV1-2, TRAJ26)
CLLPLCCERPDNYGQNFVF

SEQ ID NO: 568846 - protein, 15 aa, Homo sapiens
  CDR3 for beta chain variable domain of TCR clone 284423 (TRBV9, TRBJ1-6)
CASSVAGTGDPPLHF

SEQ ID NO: 568847 - protein, 22 aa, Homo sapiens
  CDR3 for alpha chain variable domain of TCR clone 284424 (TRAV21, TRAJ39)
AASQPGDSATPKVAKAGNMLTF

SEQ ID NO: 568848 - protein, 14 aa, Homo sapiens
  CDR3 for beta chain variable domain of TCR clone 284424 (TRBV11-2, TRBJ2-7)
CASSLGAGAYEQYF

SEQ ID NO: 568849 - protein, 13 aa, Homo sapiens
  CDR3 for alpha chain variable domain of TCR clone 284425 (TRAV12-1, TRAJ9)
CVVLNTGGFKTIF

SEQ ID NO: 568850 - protein, 17 aa, Homo sapiens
  CDR3 for beta chain variable domain of TCR clone 284425 (TRBV7-8, TRBJ2-6)
CASSAGTGGAGANVLTF

SEQ ID NO: 568851 - protein, 14 aa, Homo sapiens
  CDR3 for alpha chain variable domain of TCR clone 284426 (TRAV20, TRAJ56)
CAVQFGGANSKLTF

SEQ ID NO: 568852 - protein, 17 aa, Homo sapiens
  CDR3 for beta chain variable domain of TCR clone 284426 (TRBV4-1, TRBJ2-5)
CASSQDQTGGPQETQYF

SEQ ID NO: 568853 - protein, 14 aa, Homo sapiens
  CDR3 for alpha chain variable domain of TCR clone 284427 (TRAV1-2, TRAJ16)
CAVNRVSDGQKLLF

SEQ ID NO: 568854 - protein, 13 aa, Homo sapiens
  CDR3 for beta chain variable domain of TCR clone 284427 (TRBV7-2, TRBJ2-2)
CASSLAVTGELFF

SEQ ID NO: 568855 - protein, 11 aa, Homo sapiens
  CDR3 for alpha chain variable domain of TCR clone 284428 (TRAV3, TRAJ31)
CAVRPDARLMF

SEQ ID NO: 568856 - protein, 12 aa, Homo sapiens
  CDR3 for beta chain variable domain of TCR clone 284428 (TRBV7-9, TRBJ2-2)
RASSLDTGELFF

SEQ ID NO: 568857 - protein, 14 aa, Homo sapiens
  CDR3 for alpha chain variable domain of TCR clone 284429 (TRAV35, TRAJ13)
CAGQGSGGYQKVTF

SEQ ID NO: 568858 - protein, 11 aa, Homo sapiens
  CDR3 for beta chain variable domain of TCR clone 284429 (TRBV7-6, TRBJ2-5)
CASSLQETQYF

SEQ ID NO: 568859 - protein, 15 aa, Homo sapiens
  CDR3 for alpha chain variable domain of TCR clone 284430 (TRAV12-3, TRAJ11)
CAMSEENSGYSTLTF

SEQ ID NO: 568860 - protein, 15 aa, Homo sapiens
  CDR3 for beta chain variable domain of TCR clone 284430 (TRBV27, TRBJ2-7)
CASSLSVQGGYEQYF

SEQ ID NO: 568861 - protein, 15 aa, Homo sapiens
  CDR3 for alpha chain variable domain of TCR clone 284431 (TRAV2, TRAJ28)
CAVPYSGAGSYQLTF

SEQ ID NO: 568862 - protein, 17 aa, Homo sapiens
  CDR3 for beta chain variable domain of TCR clone 284431 (TRBV23-1, TRBJ2-1)
CISAPAVKWRSYNEQFF

SEQ ID NO: 568863 - protein, 12 aa, Homo sapiens
  CDR3 for alpha chain variable domain of TCR clone 284432 (TRAV8-6, TRAJ31)
CAVSPNNARLMF

SEQ ID NO: 568864 - protein, 15 aa, Homo sapiens
  CDR3 for beta chain variable domain of TCR clone 284432 (TRBV19, TRBJ1-2)
CASNDGTGKDYGDTF

SEQ ID NO: 568865 - protein, 15 aa, Homo sapiens
  CDR3 for alpha chain variable domain of TCR clone 284433 (TRAV27, TRAJ38)
CAARRNAGNNRKLIW

SEQ ID NO: 568866 - protein, 15 aa, Homo sapiens
  CDR3 for beta chain variable domain of TCR clone 284433 (TRBV2, TRBJ2-1)
CASSKLAGSYNEQFF

SEQ ID NO: 568867 - protein, 13 aa, Homo sapiens
  CDR3 for alpha chain variable domain of TCR clone 284434 (TRAV29/DV5, TRAJ31)
CEASRNNNARLMF

SEQ ID NO: 568868 - protein, 12 aa, Homo sapiens
  CDR3 for beta chain variable domain of TCR clone 284434 (TRBV14, TRBJ2-7)
CASSRLKGEQYF

SEQ ID NO: 568869 - protein, 13 aa, Homo sapiens
  CDR3 for alpha chain variable domain of TCR clone 284435 (TRAV21, TRAJ48)
CAEMDFGHEHLTF

SEQ ID NO: 568870 - protein, 12 aa, Homo sapiens
  CDR3 for beta chain variable domain of TCR clone 284435 (TRBV5-1, TRBJ1-2)
CASSQDTYGYTV

SEQ ID NO: 568871 - protein, 15 aa, Homo sapiens
  CDR3 for alpha chain variable domain of TCR clone 284436 (TRAV13-1, TRAJ32)
CAASNGWWCYKQAHL

SEQ ID NO: 568872 - protein, 16 aa, Homo sapiens
  CDR3 for beta chain variable domain of TCR clone 284436 (TRBV7-3, TRBJ2-2)
CASSLKRGTLSGELFF

SEQ ID NO: 568873 - protein, 15 aa, Homo sapiens
  CDR3 for alpha chain variable domain of TCR clone 284437 (TRAV13-1, TRAJ36)
CAASIRQTGANKLFF

SEQ ID NO: 568874 - protein, 14 aa, Homo sapiens
  CDR3 for beta chain variable domain of TCR clone 284437 (TRBV6-1, TRBJ1-3)
CASVQGGGGNTMYF

SEQ ID NO: 568875 - protein, 14 aa, Homo sapiens
  CDR3 for alpha chain variable domain of TCR clone 284438 (TRAV17, TRAJ22)
FATSPSGSARQLTF

SEQ ID NO: 568876 - protein, 15 aa, Homo sapiens
  CDR3 for beta chain variable domain of TCR clone 284438 (TRBV4-1, TRBJ2-5)
CASSRWDLYQETQYF

SEQ ID NO: 568877 - protein, 12 aa, Homo sapiens
  CDR3 for alpha chain variable domain of TCR clone 284439 (TRAV2, TRAJ15)
CAVAQAGTALIF

SEQ ID NO: 568878 - protein, 15 aa, Homo sapiens
  CDR3 for beta chain variable domain of TCR clone 284439 (TRBV28, TRBJ2-1)
CASSIIAGGRSEQFF

SEQ ID NO: 568879 - protein, 14 aa, Homo sapiens
  CDR3 for alpha chain variable domain of TCR clone 284440 (TRAV3, TRAJ22)
CAVRDYGSARQLTF

SEQ ID NO: 568880 - protein, 13 aa, Homo sapiens
  CDR3 for beta chain variable domain of TCR clone 284440 (TRBV11-2, TRBJ2-5)
CASGNGAKETQYF

SEQ ID NO: 568881 - protein, 13 aa, Homo sapiens
  CDR3 for alpha chain variable domain of TCR clone 284441 (TRAV8-2, TRAJ11)
CVVSDLGYSTLTF

SEQ ID NO: 568882 - protein, 14 aa, Homo sapiens
  CDR3 for beta chain variable domain of TCR clone 284441 (TRBV7-3, TRBJ1-1)
CASSLKGGNTEAFF

SEQ ID NO: 568883 - protein, 16 aa, Homo sapiens
  CDR3 for alpha chain variable domain of TCR clone 284442 (TRAV12-3, TRAJ53)
CAMSPGSGGSNYKLTF

SEQ ID NO: 568884 - protein, 13 aa, Homo sapiens
  CDR3 for beta chain variable domain of TCR clone 284442 (TRBV20-1, TRBJ1-1)
CSAFDRENTEAFF

SEQ ID NO: 568885 - protein, 13 aa, Homo sapiens
  CDR3 for alpha chain variable domain of TCR clone 284443 (TRAV13-2, TRAJ13)
CAERPGGYQKVTF

SEQ ID NO: 568886 - protein, 18 aa, Homo sapiens
  CDR3 for beta chain variable domain of TCR clone 284443 (TRBV7-6, TRBJ2-1)
CASSPRTSGMSSCNEQFF

SEQ ID NO: 568887 - protein, 12 aa, Homo sapiens
  CDR3 for alpha chain variable domain of TCR clone 284444 (TRAV8-3, TRAJ26)
CAGDNYGQNFVF

SEQ ID NO: 568888 - protein, 16 aa, Homo sapiens
  CDR3 for beta chain variable domain of TCR clone 284444 (TRBV19, TRBJ2-2)
CASSFPGQGLAGELFF

SEQ ID NO: 568889 - protein, 14 aa, Homo sapiens
  CDR3 for alpha chain variable domain of TCR clone 284445 (TRAV17, TRAJ57)
CATDPQGGSEKLVF

SEQ ID NO: 568890 - protein, 16 aa, Homo sapiens
  CDR3 for beta chain variable domain of TCR clone 284445 (TRBV27, TRBJ2-2)
CASSSSGVSNSGELFF

SEQ ID NO: 568891 - protein, 13 aa, Homo sapiens
  CDR3 for alpha chain variable domain of TCR clone 284446 (TRAV20, TRAJ49)
CAVQARTGNQFYF

SEQ ID NO: 568892 - protein, 12 aa, Homo sapiens
  CDR3 for beta chain variable domain of TCR clone 284446 (TRBV28, TRBJ2-6)
CAIQAGANVLTF

SEQ ID NO: 568893 - protein, 12 aa, Homo sapiens
  CDR3 for alpha chain variable domain of TCR clone 284447 (TRAV12-3, TRAJ17)
FAMTLTGTKLTF

SEQ ID NO: 568894 - protein, 13 aa, Homo sapiens
  CDR3 for beta chain variable domain of TCR clone 284447 (TRBV27, TRBJ2-1)
CASRTLGVGEQFF

SEQ ID NO: 568895 - protein, 13 aa, Homo sapiens
  CDR3 for alpha chain variable domain of TCR clone 284448 (TRAV35, TRAJ13)
CAGRAGGCQKVTF

SEQ ID NO: 568896 - protein, 13 aa, Homo sapiens
  CDR3 for beta chain variable domain of TCR clone 284448 (TRBV12-4, TRBJ1-1)
CASTPRMNTEAFF

SEQ ID NO: 568897 - protein, 14 aa, Homo sapiens
  CDR3 for alpha chain variable domain of TCR clone 284449 (TRAV1-2, TRAJ8)
CAVREDTGFQNLVF

SEQ ID NO: 568898 - protein, 17 aa, Homo sapiens
  CDR3 for beta chain variable domain of TCR clone 284449 (TRBV11-2, TRBJ2-1)
CASSLYPPGVEYNEQFF

SEQ ID NO: 568899 - protein, 13 aa, Homo sapiens
  CDR3 for alpha chain variable domain of TCR clone 284450 (TRAV21, TRAJ27)
CPARPGNAGKSTF

SEQ ID NO: 568900 - protein, 14 aa, Homo sapiens
  CDR3 for beta chain variable domain of TCR clone 284450 (TRBV7-6, TRBJ2-3)
CASSLGTGTDTQYF

SEQ ID NO: 568901 - protein, 17 aa, Homo sapiens
  CDR3 for alpha chain variable domain of TCR clone 284451 (TRAV13-1, TRAJ52)
CAAGRNAGGTSYGKLTF

SEQ ID NO: 568902 - protein, 15 aa, Homo sapiens
  CDR3 for beta chain variable domain of TCR clone 284451 (TRBV6-3, TRBJ2-7)
CASSSPGTAFYEQYF

SEQ ID NO: 568903 - protein, 16 aa, Homo sapiens
  CDR3 for alpha chain variable domain of TCR clone 284452 (TRAV3, TRAJ10)
CAVRDMRAGGGNKLTF

SEQ ID NO: 568904 - protein, 14 aa, Homo sapiens
  CDR3 for beta chain variable domain of TCR clone 284452 (TRBV25-1, TRBJ1-1)
CASTHLGGNTEAFC

SEQ ID NO: 568905 - protein, 16 aa, Homo sapiens
  CDR3 for alpha chain variable domain of TCR clone 284453 (TRAV20, TRAJ53)
CAVQAESGGSNYKLTF

SEQ ID NO: 568906 - protein, 14 aa, Homo sapiens
  CDR3 for beta chain variable domain of TCR clone 284453 (TRBV27, TRBJ2-5)
FASSRTFLVDTQYF

SEQ ID NO: 568907 - protein, 17 aa, Homo sapiens
  CDR3 for alpha chain variable domain of TCR clone 284454 (TRAV38-2/DV8, TRAJ57)
CAYRSVLTQGGSEKLVF

SEQ ID NO: 568908 - protein, 16 aa, Homo sapiens
  CDR3 for beta chain variable domain of TCR clone 284454 (TRBV7-3, TRBJ2-2)
CDSSLKRGTLSGELFF

SEQ ID NO: 568909 - protein, 14 aa, Homo sapiens
  CDR3 for alpha chain variable domain of TCR clone 284455 (TRAV26-1, TRAJ39)
CIARGSRAGNMLPF

SEQ ID NO: 568910 - protein, 15 aa, Homo sapiens
  CDR3 for beta chain variable domain of TCR clone 284455 (TRBV7-9, TRBJ1-5)
CASSQGHQPNQPQHF

SEQ ID NO: 568911 - protein, 17 aa, Homo sapiens
  CDR3 for alpha chain variable domain of TCR clone 284456 (TRAV12-2, TRAJ6)
CAPQGPPRAGGSYIPTF

SEQ ID NO: 568912 - protein, 17 aa, Homo sapiens
  CDR3 for beta chain variable domain of TCR clone 284456 (TRBV11-2, TRBJ2-1)
CASSLYPPGVEYNEQFF

SEQ ID NO: 568913 - protein, 14 aa, Homo sapiens
  CDR3 for alpha chain variable domain of TCR clone 284457 (TRAV8-4, TRAJ5)
CALSTDPGRRALTF

SEQ ID NO: 568914 - protein, 14 aa, Homo sapiens
  CDR3 for beta chain variable domain of TCR clone 284457 (TRBV5-1, TRBJ2-2)
CASSLGGGSGELFF

SEQ ID NO: 568915 - protein, 13 aa, Homo sapiens
  CDR3 for alpha chain variable domain of TCR clone 284458 (TRAV2, TRAJ15)
CAVASQAGTALIF

SEQ ID NO: 568916 - protein, 15 aa, Homo sapiens
  CDR3 for beta chain variable domain of TCR clone 284458 (TRBV2, TRBJ1-1)
CASSEAQTMNTEAFF

SEQ ID NO: 568917 - protein, 20 aa, Homo sapiens
  CDR3 for alpha chain variable domain of TCR clone 284459 (TRAV21, TRAJ4)
AASQPGDSATLTGGYNKLIF

SEQ ID NO: 568918 - protein, 19 aa, Homo sapiens
  CDR3 for beta chain variable domain of TCR clone 284459 (TRBV18, TRBJ1-3)
CASSPLSRTGMSSGNTIYF

SEQ ID NO: 568919 - protein, 14 aa, Homo sapiens
  CDR3 for alpha chain variable domain of TCR clone 284460 (TRAV2, TRAJ37)
CAVDFTSNTGKLIF

SEQ ID NO: 568920 - protein, 16 aa, Homo sapiens
  CDR3 for beta chain variable domain of TCR clone 284460 (TRBV6-4, TRBJ1-2)
CASSEAVGDPNYGYTF

SEQ ID NO: 568921 - protein, 13 aa, Homo sapiens
  CDR3 for alpha chain variable domain of TCR clone 284461 (TRAV2, TRAJ40)
CAVVTSGTYKYIF

SEQ ID NO: 568922 - protein, 15 aa, Homo sapiens
  CDR3 for beta chain variable domain of TCR clone 284461 (TRBV19, TRBJ2-1)
CASSIQATSYNEQFF

SEQ ID NO: 568923 - protein, 16 aa, Homo sapiens
  CDR3 for alpha chain variable domain of TCR clone 284462 (TRAV16, TRAJ52)
CALRGVGGTSYGKLTF

SEQ ID NO: 568924 - protein, 14 aa, Homo sapiens
  CDR3 for beta chain variable domain of TCR clone 284462 (TRBV19, TRBJ1-2)
CASSLQGQAYGYSF

SEQ ID NO: 568925 - protein, 16 aa, Homo sapiens
  CDR3 for alpha chain variable domain of TCR clone 284463 (TRAV8-3, TRAJ10)
CAVGPILTGGGNKLTF

SEQ ID NO: 568926 - protein, 13 aa, Homo sapiens
  CDR3 for beta chain variable domain of TCR clone 284463 (TRBV29-1, TRBJ2-1)
CSVEGGRVNEQFF

SEQ ID NO: 568927 - protein, 13 aa, Homo sapiens
  CDR3 for alpha chain variable domain of TCR clone 284464 (TRAV13-1, TRAJ39)
CSKYSNAGNMLTF

SEQ ID NO: 568928 - protein, 16 aa, Homo sapiens
  CDR3 for beta chain variable domain of TCR clone 284464 (TRBV4-3, TRBJ2-2)
CASSHLQGSGTGELFF

SEQ ID NO: 568929 - protein, 14 aa, Homo sapiens
  CDR3 for alpha chain variable domain of TCR clone 284465 (TRAV12-2, TRAJ40)
CAGKIPSGTYKYIF

SEQ ID NO: 568930 - protein, 17 aa, Homo sapiens
  CDR3 for beta chain variable domain of TCR clone 284465 (TRBV11-2, TRBJ2-1)
CASSLYPPGVEYNEQLF

SEQ ID NO: 568931 - protein, 11 aa, Homo sapiens
  CDR3 for alpha chain variable domain of TCR clone 284466 (TRAV21, TRAJ34)
CAVTNTDKLIF

SEQ ID NO: 568932 - protein, 13 aa, Homo sapiens
  CDR3 for beta chain variable domain of TCR clone 284466 (TRBV12-4, TRBJ2-5)
CASSPGTEETQYF

SEQ ID NO: 568933 - protein, 14 aa, Homo sapiens
  CDR3 for alpha chain variable domain of TCR clone 284467 (TRAV1-2, TRAJ8)
CAVREDIGFQKLVF

SEQ ID NO: 568934 - protein, 15 aa, Homo sapiens
  CDR3 for beta chain variable domain of TCR clone 284467 (TRBV12-4, TRBJ2-5)
CASSPTTGLQETQYF

SEQ ID NO: 568935 - protein, 16 aa, Homo sapiens
  CDR3 for alpha chain variable domain of TCR clone 284468 (TRAV3, TRAJ10)
CAVRDMRTGGGNKLTF

SEQ ID NO: 568936 - protein, 17 aa, Homo sapiens
  CDR3 for beta chain variable domain of TCR clone 284468 (TRBV28, TRBJ2-5)
CASSTPEGDALQETQYF

SEQ ID NO: 568937 - protein, 14 aa, Homo sapiens
  CDR3 for alpha chain variable domain of TCR clone 284469 (TRAV1-2, TRAJ8)
FAVREDTGFQKLVF

SEQ ID NO: 568938 - protein, 13 aa, Homo sapiens
  CDR3 for beta chain variable domain of TCR clone 284469 (TRBV4-2, TRBJ2-2)
CASEDRGTGELFF

SEQ ID NO: 568939 - protein, 16 aa, Homo sapiens
  CDR3 for alpha chain variable domain of TCR clone 284470 (TRAV26-2, TRAJ45)
CTTASPIVGGADGLTF

SEQ ID NO: 568940 - protein, 20 aa, Homo sapiens
  CDR3 for beta chain variable domain of TCR clone 284470 (TRBV28, TRBJ2-1)
CASTPIGRSPGLAGGNEQFF

SEQ ID NO: 568941 - protein, 13 aa, Homo sapiens
  CDR3 for alpha chain variable domain of TCR clone 284471 (TRAV30, TRAJ24)
CGTVTDSWGKLQF

SEQ ID NO: 568942 - protein, 15 aa, Homo sapiens
  CDR3 for beta chain variable domain of TCR clone 284471 (TRBV25-1, TRBJ1-4)
CASSPGDSTNEKLFC

SEQ ID NO: 568943 - protein, 15 aa, Homo sapiens
  CDR3 for alpha chain variable domain of TCR clone 284472 (TRAV20, TRAJ50)
CAVRQMKTSYDKVLF

SEQ ID NO: 568944 - protein, 16 aa, Homo sapiens
  CDR3 for beta chain variable domain of TCR clone 284472 (TRBV15, TRBJ1-2)
CATSRGPRTGGDGYTF

SEQ ID NO: 568945 - protein, 22 aa, Homo sapiens
  CDR3 for alpha chain variable domain of TCR clone 284473 (TRAV1-1, TRAJ30)
CAVRDQTEMTRSSLEKGHDFIF

SEQ ID NO: 568946 - protein, 12 aa, Homo sapiens
  CDR3 for beta chain variable domain of TCR clone 284473 (TRBV28, TRBJ2-6)
CAIQAGADVLTF

SEQ ID NO: 568947 - protein, 12 aa, Homo sapiens
  CDR3 for alpha chain variable domain of TCR clone 284474 (TRAV29/DV5, TRAJ49)
CAATDTGNQSYF

SEQ ID NO: 568948 - protein, 14 aa, Homo sapiens
  CDR3 for beta chain variable domain of TCR clone 284474 (TRBV25-1, TRBJ1-1)
CASTHLGGNTEAFF

SEQ ID NO: 568949 - protein, 17 aa, Homo sapiens
  CDR3 for alpha chain variable domain of TCR clone 284475 (TRAV3, TRAJ6)
CAVRDGPRAGGSYIPTV

SEQ ID NO: 568950 - protein, 13 aa, Homo sapiens
  CDR3 for beta chain variable domain of TCR clone 284475 (TRBV19, TRBJ2-7)
CASSIDRTYEQYF

SEQ ID NO: 568951 - protein, 14 aa, Homo sapiens
  CDR3 for alpha chain variable domain of TCR clone 284476 (TRAV8-1, TRAJ34)
CAVNPSYNTDKLIF

SEQ ID NO: 568952 - protein, 16 aa, Homo sapiens
  CDR3 for beta chain variable domain of TCR clone 284476 (TRBV7-2, TRBJ2-6)
CTSSLAGRSGANVLTF

SEQ ID NO: 568953 - protein, 23 aa, Homo sapiens
  CDR3 for alpha chain variable domain of TCR clone 284477 (TRAV26-1, TRAJ38)
CIADNAGNNHIQNPEPALYQLRD

SEQ ID NO: 568954 - protein, 12 aa, Homo sapiens
  CDR3 for beta chain variable domain of TCR clone 284477 (TRBV11-2, TRBJ2-2)
CASSLGGGELFF

SEQ ID NO: 568955 - protein, 14 aa, Homo sapiens
  CDR3 for alpha chain variable domain of TCR clone 284478 (TRAV12-1, TRAJ26)
CVVKGSNYGQNFVF

SEQ ID NO: 568956 - protein, 13 aa, Homo sapiens
  CDR3 for beta chain variable domain of TCR clone 284478 (TRBV12-4, TRBJ1-1)
CASSPGTGFEAFF

SEQ ID NO: 568957 - protein, 15 aa, Homo sapiens
  CDR3 for alpha chain variable domain of TCR clone 284479 (TRAV29/DV5, TRAJ57)
CAASLLRGGSDTLVF

SEQ ID NO: 568958 - protein, 15 aa, Homo sapiens
  CDR3 for beta chain variable domain of TCR clone 284479 (TRBV5-1, TRBJ1-3)
CASSLEGGSGNTIYF

SEQ ID NO: 568959 - protein, 18 aa, Homo sapiens
  CDR3 for alpha chain variable domain of TCR clone 284480 (TRAV21, TRAJ52)
CAVRPSPAGGTSHGKLTF

SEQ ID NO: 568960 - protein, 16 aa, Homo sapiens
  CDR3 for beta chain variable domain of TCR clone 284480 (TRBV13, TRBJ2-3)
CQQPLQGSGGRNTQYF

SEQ ID NO: 568961 - protein, 14 aa, Homo sapiens
  CDR3 for alpha chain variable domain of TCR clone 284481 (TRAV1-2, TRAJ8)
CAVREDTGCQKLVF

SEQ ID NO: 568962 - protein, 17 aa, Homo sapiens
  CDR3 for beta chain variable domain of TCR clone 284481 (TRBV11-2, TRBJ2-1)
CASSLYPPGVEYNEQFF

SEQ ID NO: 568963 - protein, 18 aa, Homo sapiens
  CDR3 for alpha chain variable domain of TCR clone 284482 (TRAV14/DV4, TRAJ3)
CAMREGSGGYSSASKIIF

SEQ ID NO: 568964 - protein, 14 aa, Homo sapiens
  CDR3 for beta chain variable domain of TCR clone 284482 (TRBV4-2, TRBJ2-1)
CASGLDRAYNEQFF

SEQ ID NO: 568965 - protein, 11 aa, Homo sapiens
  CDR3 for alpha chain variable domain of TCR clone 284483 (TRAV8-4, TRAJ34)
GAVSWTDKLIF

SEQ ID NO: 568966 - protein, 14 aa, Homo sapiens
  CDR3 for beta chain variable domain of TCR clone 284483 (TRBV7-9, TRBJ2-3)
CASSLEDGTDTQYF

SEQ ID NO: 568967 - protein, 11 aa, Homo sapiens
  CDR3 for alpha chain variable domain of TCR clone 284484 (TRAV3, TRAJ21)
CAVGSFNKFYF

SEQ ID NO: 568968 - protein, 16 aa, Homo sapiens
  CDR3 for beta chain variable domain of TCR clone 284484 (TRBV19, TRBJ2-1)
CASSKAGPSSYDEQFF

SEQ ID NO: 568969 - protein, 16 aa, Homo sapiens
  CDR3 for alpha chain variable domain of TCR clone 284485 (TRAV8-1, TRAJ42)
CAVTSRYGGSQGNLIF

SEQ ID NO: 568970 - protein, 12 aa, Homo sapiens
  CDR3 for beta chain variable domain of TCR clone 284485 (TRBV6-3, TRBJ2-7)
CASSLGRRGLYV

SEQ ID NO: 568971 - protein, 16 aa, Homo sapiens
  CDR3 for alpha chain variable domain of TCR clone 284486 (TRAV26-1, )
CIDIQNPDPAVYQLRD

SEQ ID NO: 568972 - protein, 19 aa, Homo sapiens
  CDR3 for beta chain variable domain of TCR clone 284486 (TRBV19, TRBJ2-5)
CASSIGQVTDFFLGDTQYF

SEQ ID NO: 568973 - protein, 14 aa, Homo sapiens
  CDR3 for alpha chain variable domain of TCR clone 284487 (TRAV16, TRAJ39)
CALSKNNAGNMLTF

SEQ ID NO: 568974 - protein, 17 aa, Homo sapiens
  CDR3 for beta chain variable domain of TCR clone 284487 (TRBV23-1, TRBJ1-2)
CASSNTVGGLLWLHLRF

SEQ ID NO: 568975 - protein, 15 aa, Homo sapiens
  CDR3 for alpha chain variable domain of TCR clone 284488 (TRAV3, TRAJ40)
CAVRDVTSGTYKYIF

SEQ ID NO: 568976 - protein, 13 aa, Homo sapiens
  CDR3 for beta chain variable domain of TCR clone 284488 (TRBV7-9, TRBJ1-2)
CASSLKKNYGYTF

SEQ ID NO: 568977 - protein, 20 aa, Homo sapiens
  CDR3 for alpha chain variable domain of TCR clone 284489 (TRAV21, TRAJ30)
CAVRRRMTRSSLEKGHDFIF

SEQ ID NO: 568978 - protein, 15 aa, Homo sapiens
  CDR3 for beta chain variable domain of TCR clone 284489 (TRBV6-6, TRBJ2-7)
CASSYSYGGSYEQYF

SEQ ID NO: 568979 - protein, 15 aa, Homo sapiens
  CDR3 for alpha chain variable domain of TCR clone 284490 (TRAV12-1, TRAJ40)
CVVTPSTSGTYKYIF

SEQ ID NO: 568980 - protein, 13 aa, Homo sapiens
  CDR3 for beta chain variable domain of TCR clone 284490 (TRBV7-3, TRBJ2-2)
CASSHDSTGELFF

SEQ ID NO: 568981 - protein, 13 aa, Homo sapiens
  CDR3 for alpha chain variable domain of TCR clone 284491 (TRAV27, TRAJ57)
CAGFQGGSKKLVF

SEQ ID NO: 568982 - protein, 14 aa, Homo sapiens
  CDR3 for beta chain variable domain of TCR clone 284491 (TRBV20-1, TRBJ1-2)
CSGRKDGRAYGYTF

SEQ ID NO: 568983 - protein, 14 aa, Homo sapiens
  CDR3 for alpha chain variable domain of TCR clone 284492 (TRAV26-1, TRAJ39)
CIVRGSRAGNMLTF

SEQ ID NO: 568984 - protein, 14 aa, Homo sapiens
  CDR3 for beta chain variable domain of TCR clone 284492 (TRBV12-4, TRBJ2-5)
CQQSPTGLQETQYF

SEQ ID NO: 568985 - protein, 19 aa, Homo sapiens
  CDR3 for alpha chain variable domain of TCR clone 284493 (TRAV21, TRAJ20)
SLVTQPPTSVLPNDYKLSF

SEQ ID NO: 568986 - protein, 20 aa, Homo sapiens
  CDR3 for beta chain variable domain of TCR clone 284493 (TRBV12-5, TRBJ2-5)
CASGPRTSGNQETSTSGQAR

SEQ ID NO: 568987 - protein, 14 aa, Homo sapiens
  CDR3 for alpha chain variable domain of TCR clone 284494 (TRAV29/DV5, TRAJ57)
CAARSQGGSEKLVV

SEQ ID NO: 568988 - protein, 15 aa, Homo sapiens
  CDR3 for beta chain variable domain of TCR clone 284494 (TRBV28, TRBJ2-4)
CAAGSGTLLMGIQYF

SEQ ID NO: 568989 - protein, 15 aa, Homo sapiens
  CDR3 for alpha chain variable domain of TCR clone 284495 (TRAV30, TRAJ32)
CGTEILGGATNKLIF

SEQ ID NO: 568990 - protein, 15 aa, Homo sapiens
  CDR3 for beta chain variable domain of TCR clone 284495 (TRBV27, TRBJ1-6)
CASSFDRGLGSPLHF

SEQ ID NO: 568991 - protein, 14 aa, Homo sapiens
  CDR3 for alpha chain variable domain of TCR clone 284496 (TRAV8-6, TRAJ12)
CAVKAADSSYKLIF

SEQ ID NO: 568992 - protein, 15 aa, Homo sapiens
  CDR3 for beta chain variable domain of TCR clone 284496 (TRBV5-1, TRBJ2-5)
CTSSLGLAEQETQYF

SEQ ID NO: 568993 - protein, 16 aa, Homo sapiens
  CDR3 for alpha chain variable domain of TCR clone 284497 (TRAV26-1, TRAJ48)
IASSDLSNFGNEKLTF

SEQ ID NO: 568994 - protein, 15 aa, Homo sapiens
  CDR3 for beta chain variable domain of TCR clone 284497 (TRBV6-1, TRBJ2-3)
CASSERGGITDTQYF

SEQ ID NO: 568995 - protein, 14 aa, Homo sapiens
  CDR3 for alpha chain variable domain of TCR clone 284498 (TRAV12-3, TRAJ9)
CAMSPNTGGFKTIF

SEQ ID NO: 568996 - protein, 16 aa, Homo sapiens
  CDR3 for beta chain variable domain of TCR clone 284498 (TRBV12-4, TRBJ2-7)
CASSLIGGTGTYEQYF

SEQ ID NO: 568997 - protein, 14 aa, Homo sapiens
  CDR3 for alpha chain variable domain of TCR clone 284499 (TRAV1-2, TRAJ16)
YAVNRFSDGQKLLF

SEQ ID NO: 568998 - protein, 11 aa, Homo sapiens
  CDR3 for beta chain variable domain of TCR clone 284499 (TRBV7-8, TRBJ2-7)
CASSLSLEQYF

SEQ ID NO: 568999 - protein, 12 aa, Homo sapiens
  CDR3 for alpha chain variable domain of TCR clone 284500 (TRAV8-3, TRAJ26)
CAGDNYGQNFVF

SEQ ID NO: 569000 - protein, 13 aa, Homo sapiens
  CDR3 for beta chain variable domain of TCR clone 284500 (TRBV20-1, TRBJ1-1)
CSPPLGGGTEAFF

SEQ ID NO: 569001 - protein, 14 aa, Homo sapiens
  CDR3 for alpha chain variable domain of TCR clone 284501 (TRAV12-1, TRAJ30)
CVANIGGRDDKTIF

SEQ ID NO: 569002 - protein, 14 aa, Homo sapiens
  CDR3 for beta chain variable domain of TCR clone 284501 (TRBV20-1, TRBJ2-1)
CSAQIGGSANEQFF

SEQ ID NO: 569003 - protein, 13 aa, Homo sapiens
  CDR3 for alpha chain variable domain of TCR clone 284502 (TRAV21, TRAJ27)
CAARPGNAGKSTL

SEQ ID NO: 569004 - protein, 14 aa, Homo sapiens
  CDR3 for beta chain variable domain of TCR clone 284502 (TRBV7-6, TRBJ2-3)
CACSLGTVTDTQYF

SEQ ID NO: 569005 - protein, 16 aa, Homo sapiens
  CDR3 for alpha chain variable domain of TCR clone 284503 (TRAV13-1, TRAJ48)
CAASIFGNFGNEKLTF

SEQ ID NO: 569006 - protein, 16 aa, Homo sapiens
  CDR3 for beta chain variable domain of TCR clone 284503 (TRBV18, TRBJ1-5)
CASSPYSVEGNQPQHF

SEQ ID NO: 569007 - protein, 14 aa, Homo sapiens
  CDR3 for alpha chain variable domain of TCR clone 284504 (TRAV13-1, TRAJ6)
CAASGPGGSYIPKF

SEQ ID NO: 569008 - protein, 15 aa, Homo sapiens
  CDR3 for beta chain variable domain of TCR clone 284504 (TRBV27, TRBJ2-1)
CASSPLAGGANEQFF

SEQ ID NO: 569009 - protein, 18 aa, Homo sapiens
  CDR3 for alpha chain variable domain of TCR clone 284505 (TRAV21, TRAJ52)
CAVRSSPAGGTSCGKLTF

SEQ ID NO: 569010 - protein, 17 aa, Homo sapiens
  CDR3 for beta chain variable domain of TCR clone 284505 (TRBV13, TRBJ2-3)
CASSLSRVAGGRNTQYF

SEQ ID NO: 569011 - protein, 10 aa, Homo sapiens
  CDR3 for alpha chain variable domain of TCR clone 284506 (TRAV26-1, TRAJ22)
RSGSARQLTF

SEQ ID NO: 569012 - protein, 17 aa, Homo sapiens
  CDR3 for beta chain variable domain of TCR clone 284506 (TRBV13, TRBJ2-3)
CASSLSRVAGGRNTQYF

SEQ ID NO: 569013 - protein, 14 aa, Homo sapiens
  CDR3 for alpha chain variable domain of TCR clone 284507 (TRAV3, TRAJ34)
FAVRDINNTDKLIF

SEQ ID NO: 569014 - protein, 14 aa, Homo sapiens
  CDR3 for beta chain variable domain of TCR clone 284507 (TRBV7-2, TRBJ2-2)
CASSLGQNTGELFF

SEQ ID NO: 569015 - protein, 16 aa, Homo sapiens
  CDR3 for alpha chain variable domain of TCR clone 284508 (TRAV3, TRAJ37)
CAVRGKGSGNTGKLIF

SEQ ID NO: 569016 - protein, 15 aa, Homo sapiens
  CDR3 for beta chain variable domain of TCR clone 284508 (TRBV11-2, TRBJ2-2)
CASRGLAANTGELFF

SEQ ID NO: 569017 - protein, 14 aa, Homo sapiens
  CDR3 for alpha chain variable domain of TCR clone 284509 (TRAV17, TRAJ22)
CATVLSGSARQLTF

SEQ ID NO: 569018 - protein, 13 aa, Homo sapiens
  CDR3 for beta chain variable domain of TCR clone 284509 (TRBV15, TRBJ1-6)
CATSGGLTSPLHF

SEQ ID NO: 569019 - protein, 13 aa, Homo sapiens
  CDR3 for alpha chain variable domain of TCR clone 284510 (TRAV1-2, TRAJ9)
CAVLNTGGFKTIF

SEQ ID NO: 569020 - protein, 14 aa, Homo sapiens
  CDR3 for beta chain variable domain of TCR clone 284510 (TRBV19, TRBJ2-1)
CASPTFVVSGEQFF

SEQ ID NO: 569021 - protein, 18 aa, Homo sapiens
  CDR3 for alpha chain variable domain of TCR clone 284511 (TRAV13-1, TRAJ52)
CAAKNPNAGGTSYGKLTF

SEQ ID NO: 569022 - protein, 16 aa, Homo sapiens
  CDR3 for beta chain variable domain of TCR clone 284511 (TRBV3-1, TRBJ2-7)
CASSQGATGVAYEQYF

SEQ ID NO: 569023 - protein, 15 aa, Homo sapiens
  CDR3 for alpha chain variable domain of TCR clone 284512 (TRAV21, TRAJ53)
CATLNSGGSNYKLTF

SEQ ID NO: 569024 - protein, 14 aa, Homo sapiens
  CDR3 for beta chain variable domain of TCR clone 284512 (TRBV9, TRBJ1-2)
CASSVSTRSYGDTF

SEQ ID NO: 569025 - protein, 15 aa, Homo sapiens
  CDR3 for alpha chain variable domain of TCR clone 284513 (TRAV12-3, TRAJ6)
CAMSATTGGSYIPTF

SEQ ID NO: 569026 - protein, 12 aa, Homo sapiens
  CDR3 for beta chain variable domain of TCR clone 284513 (TRBV5-1, TRBJ2-3)
CASSLAADTQYF

SEQ ID NO: 569027 - protein, 15 aa, Homo sapiens
  CDR3 for alpha chain variable domain of TCR clone 284514 (TRAV38-2/DV8, TRAJ28)
CAYRSRGAGRYQLAF

SEQ ID NO: 569028 - protein, 14 aa, Homo sapiens
  CDR3 for beta chain variable domain of TCR clone 284514 (TRBV7-9, TRBJ2-7)
CASSLSQGSYEQYF

SEQ ID NO: 569029 - protein, 13 aa, Homo sapiens
  CDR3 for alpha chain variable domain of TCR clone 284515 (TRAV23/DV6, TRAJ27)
CAASKPMQANQPL

SEQ ID NO: 569030 - protein, 18 aa, Homo sapiens
  CDR3 for beta chain variable domain of TCR clone 284515 (TRBV13, TRBJ2-6)
CASSPMTSGGSGANVLTF

SEQ ID NO: 569031 - protein, 14 aa, Homo sapiens
  CDR3 for alpha chain variable domain of TCR clone 284516 (TRAV14/DV4, TRAJ7)
CAMREAYGNNRLAF

SEQ ID NO: 569032 - protein, 15 aa, Homo sapiens
  CDR3 for beta chain variable domain of TCR clone 284516 (TRBV19, TRBJ2-1)
CVSSINREPSHEQFF

SEQ ID NO: 569033 - protein, 13 aa, Homo sapiens
  CDR3 for alpha chain variable domain of TCR clone 284517 (TRAV21, TRAJ26)
CPVLDNYGQNFVF

SEQ ID NO: 569034 - protein, 16 aa, Homo sapiens
  CDR3 for beta chain variable domain of TCR clone 284517 (TRBV29-1, TRBJ2-2)
CSVETRASGNTGELFF

SEQ ID NO: 569035 - protein, 14 aa, Homo sapiens
  CDR3 for alpha chain variable domain of TCR clone 284518 (TRAV1-2, TRAJ16)
CAVNRFSDGQKMLF

SEQ ID NO: 569036 - protein, 15 aa, Homo sapiens
  CDR3 for beta chain variable domain of TCR clone 284518 (TRBV5-5, TRBJ1-5)
CASSSTPGSNQPQHF

SEQ ID NO: 569037 - protein, 14 aa, Homo sapiens
  CDR3 for alpha chain variable domain of TCR clone 284519 (TRAV29/DV5, TRAJ48)
CAAMALFGTEKLTF

SEQ ID NO: 569038 - protein, 17 aa, Homo sapiens
  CDR3 for beta chain variable domain of TCR clone 284519 (TRBV20-1, TRBJ2-1)
CSASSSGLAGSYNEQFF

SEQ ID NO: 569039 - protein, 13 aa, Homo sapiens
  CDR3 for alpha chain variable domain of TCR clone 284520 (TRAV8-3, TRAJ48)
CAVVPFGNEILTF

SEQ ID NO: 569040 - protein, 13 aa, Homo sapiens
  CDR3 for beta chain variable domain of TCR clone 284520 (TRBV20-1, TRBJ1-1)
CSARVGGNTEAFF

SEQ ID NO: 569041 - protein, 14 aa, Homo sapiens
  CDR3 for alpha chain variable domain of TCR clone 284521 (TRAV17, TRAJ57)
CSTDPQGGSEKLVF

SEQ ID NO: 569042 - protein, 11 aa, Homo sapiens
  CDR3 for beta chain variable domain of TCR clone 284521 (TRBV29-1, TRBJ2-5)
CSEDRTGTQYF

SEQ ID NO: 569043 - protein, 13 aa, Homo sapiens
  CDR3 for alpha chain variable domain of TCR clone 284522 (TRAV8-3, TRAJ28)
CAVGAVVCYQLTF

SEQ ID NO: 569044 - protein, 14 aa, Homo sapiens
  CDR3 for beta chain variable domain of TCR clone 284522 (TRBV7-2, TRBJ2-7)
CASRSQGAAYEQYF

SEQ ID NO: 569045 - protein, 17 aa, Homo sapiens
  CDR3 for alpha chain variable domain of TCR clone 284523 (TRAV16, TRAJ58)
CITVLSNGETSGSRLTF

SEQ ID NO: 569046 - protein, 17 aa, Homo sapiens
  CDR3 for beta chain variable domain of TCR clone 284523 (TRBV18, TRBJ2-1)
CASSKGLSGGAGNEQFF

SEQ ID NO: 569047 - protein, 13 aa, Homo sapiens
  CDR3 for alpha chain variable domain of TCR clone 284524 (TRAV12-2, TRAJ52)
CAVSGTSYGKLIF

SEQ ID NO: 569048 - protein, 14 aa, Homo sapiens
  CDR3 for beta chain variable domain of TCR clone 284524 (TRBV19, TRBJ2-5)
CASSMTGQQETQYF

SEQ ID NO: 569049 - protein, 13 aa, Homo sapiens
  CDR3 for alpha chain variable domain of TCR clone 284525 (TRAV8-3, TRAJ12)
CAVGPGSSYKLIF

SEQ ID NO: 569050 - protein, 17 aa, Homo sapiens
  CDR3 for beta chain variable domain of TCR clone 284525 (TRBV28, TRBJ2-5)
CASSTPEGDALQETQYF

SEQ ID NO: 569051 - protein, 14 aa, Homo sapiens
  CDR3 for alpha chain variable domain of TCR clone 284526 (TRAV1-2, TRAJ16)
CAVRSASDGQKLLF

SEQ ID NO: 569052 - protein, 17 aa, Homo sapiens
  CDR3 for beta chain variable domain of TCR clone 284526 (TRBV7-3, TRBJ2-3)
CDSSLMKRMRGADTQYF

SEQ ID NO: 569053 - protein, 14 aa, Homo sapiens
  CDR3 for alpha chain variable domain of TCR clone 284527 (TRAV35, TRAJ22)
CAGIRPGSARQLTF

SEQ ID NO: 569054 - protein, 13 aa, Homo sapiens
  CDR3 for beta chain variable domain of TCR clone 284527 (TRBV12-4, TRBJ1-2)
CASSLRQGKGYTF

SEQ ID NO: 569055 - protein, 14 aa, Homo sapiens
  CDR3 for alpha chain variable domain of TCR clone 284528 (TRAV12-3, TRAJ10)
SHLPLTGGGNKLTF

SEQ ID NO: 569056 - protein, 15 aa, Homo sapiens
  CDR3 for beta chain variable domain of TCR clone 284528 (TRBV9, TRBJ1-6)
CASSVAGTGDSPLRF

SEQ ID NO: 569057 - protein, 12 aa, Homo sapiens
  CDR3 for alpha chain variable domain of TCR clone 284529 (TRAV23/DV6, TRAJ31)
CAARRIGARIMF

SEQ ID NO: 569058 - protein, 13 aa, Homo sapiens
  CDR3 for beta chain variable domain of TCR clone 284529 (TRBV28, TRBJ2-7)
CASKAGGVYEQYF

SEQ ID NO: 569059 - protein, 14 aa, Homo sapiens
  CDR3 for alpha chain variable domain of TCR clone 284530 (TRAV8-2, TRAJ11)
CVVSESQDTAPSPL

SEQ ID NO: 569060 - protein, 16 aa, Homo sapiens
  CDR3 for beta chain variable domain of TCR clone 284530 (TRBV28, TRBJ2-1)
CASSSPEYPRDNEQFF

SEQ ID NO: 569061 - protein, 15 aa, Homo sapiens
  CDR3 for alpha chain variable domain of TCR clone 284531 (TRAV21, TRAJ22)
CAVRLFFWFCKATDF

SEQ ID NO: 569062 - protein, 17 aa, Homo sapiens
  CDR3 for beta chain variable domain of TCR clone 284531 (TRBV20-1, TRBJ2-1)
CSASSSGLAGSYNEQFF

SEQ ID NO: 569063 - protein, 16 aa, Homo sapiens
  CDR3 for alpha chain variable domain of TCR clone 284532 (TRAV1-2, TRAJ10)
CAVRGVLTGGGNKLTF

SEQ ID NO: 569064 - protein, 17 aa, Homo sapiens
  CDR3 for beta chain variable domain of TCR clone 284532 (TRBV19, TRBJ1-1)
CASSIAGRGLMNTEAFF

SEQ ID NO: 569065 - protein, 12 aa, Homo sapiens
  CDR3 for alpha chain variable domain of TCR clone 284533 (TRAV3, TRAJ26)
CAVIDYGHNFVF

SEQ ID NO: 569066 - protein, 16 aa, Homo sapiens
  CDR3 for beta chain variable domain of TCR clone 284533 (TRBV11-2, TRBJ1-2)
CASSPSGREANYGYTF

SEQ ID NO: 569067 - protein, 16 aa, Homo sapiens
  CDR3 for alpha chain variable domain of TCR clone 284534 (TRAV13-1, TRAJ48)
CAASIFGNFGNAKLTF

SEQ ID NO: 569068 - protein, 12 aa, Homo sapiens
  CDR3 for beta chain variable domain of TCR clone 284534 (TRBV14, TRBJ2-4)
CASSNLKSMQYF

SEQ ID NO: 569069 - protein, 15 aa, Homo sapiens
  CDR3 for alpha chain variable domain of TCR clone 284535 (TRAV3, TRAJ3)
CCERPRYSSASKISF

SEQ ID NO: 569070 - protein, 16 aa, Homo sapiens
  CDR3 for beta chain variable domain of TCR clone 284535 (TRBV19, TRBJ1-5)
CASSIDRGGPRQPQHF

SEQ ID NO: 569071 - protein, 12 aa, Homo sapiens
  CDR3 for alpha chain variable domain of TCR clone 284536 (TRAV26-2, TRAJ48)
CILRKGNEKLTF

SEQ ID NO: 569072 - protein, 14 aa, Homo sapiens
  CDR3 for beta chain variable domain of TCR clone 284536 (TRBV28, TRBJ2-7)
CASSTLRGSFEQYF

SEQ ID NO: 569073 - protein, 14 aa, Homo sapiens
  CDR3 for alpha chain variable domain of TCR clone 284537 (TRAV4, TRAJ17)
CLVGDPLVGNKLTF

SEQ ID NO: 569074 - protein, 20 aa, Homo sapiens
  CDR3 for beta chain variable domain of TCR clone 284537 (TRBV20-1, TRBJ2-1)
CSARPSSVAGGPSYYNEQFF

SEQ ID NO: 569075 - protein, 12 aa, Homo sapiens
  CDR3 for alpha chain variable domain of TCR clone 284538 (TRAV2, TRAJ9)
CAVGAGGFKTIF

SEQ ID NO: 569076 - protein, 12 aa, Homo sapiens
  CDR3 for beta chain variable domain of TCR clone 284538 (TRBV7-9, TRBJ2-7)
CASSLEGYEQYF

SEQ ID NO: 569077 - protein, 14 aa, Homo sapiens
  CDR3 for alpha chain variable domain of TCR clone 284539 (TRAV13-2, TRAJ15)
CAENPNQAGTALIF

SEQ ID NO: 569078 - protein, 16 aa, Homo sapiens
  CDR3 for beta chain variable domain of TCR clone 284539 (TRBV12-4, TRBJ1-2)
CASSPTATGKTRAYTF

SEQ ID NO: 569079 - protein, 14 aa, Homo sapiens
  CDR3 for alpha chain variable domain of TCR clone 284540 (TRAV12-2, TRAJ4)
YAEDLSGGYNKLIF

SEQ ID NO: 569080 - protein, 13 aa, Homo sapiens
  CDR3 for beta chain variable domain of TCR clone 284540 (TRBV7-9, TRBJ1-2)
CASSLKQNYGYTF

SEQ ID NO: 569081 - protein, 14 aa, Homo sapiens
  CDR3 for alpha chain variable domain of TCR clone 284541 (TRAV12-2, TRAJ11)
YAVRKNSGYSTLTF

SEQ ID NO: 569082 - protein, 14 aa, Homo sapiens
  CDR3 for beta chain variable domain of TCR clone 284541 (TRBV7-6, TRBJ2-3)
CASSLGTVTDTQYF

SEQ ID NO: 569083 - protein, 15 aa, Homo sapiens
  CDR3 for alpha chain variable domain of TCR clone 284542 (TRAV8-3, TRAJ45)
CASSSSGGGAAGLTF

SEQ ID NO: 569084 - protein, 13 aa, Homo sapiens
  CDR3 for beta chain variable domain of TCR clone 284542 (TRBV10-3, TRBJ2-7)
CASKLAVNYEQYF

SEQ ID NO: 569085 - protein, 16 aa, Homo sapiens
  CDR3 for alpha chain variable domain of TCR clone 284543 (TRAV20, TRAJ26)
CAVQHRRDNYGQNFVF

SEQ ID NO: 569086 - protein, 14 aa, Homo sapiens
  CDR3 for beta chain variable domain of TCR clone 284543 (TRBV25-1, TRBJ1-1)
CASTHLGGNTEAFF

SEQ ID NO: 569087 - protein, 15 aa, Homo sapiens
  CDR3 for alpha chain variable domain of TCR clone 284544 (TRAV2, TRAJ15)
CAVEDRGQAGTALIF

SEQ ID NO: 569088 - protein, 15 aa, Homo sapiens
  CDR3 for beta chain variable domain of TCR clone 284544 (TRBV20-1, TRBJ1-5)
CSATSGRGLGQPQHF

SEQ ID NO: 569089 - protein, 15 aa, Homo sapiens
  CDR3 for alpha chain variable domain of TCR clone 284545 (TRAV8-6, TRAJ6)
CAVSFTSGGSYIPTF

SEQ ID NO: 569090 - protein, 14 aa, Homo sapiens
  CDR3 for beta chain variable domain of TCR clone 284545 (TRBV19, TRBJ1-3)
CASNRGNSGNTIYF

SEQ ID NO: 569091 - protein, 10 aa, Homo sapiens
  CDR3 for alpha chain variable domain of TCR clone 284546 (TRAV21, TRAJ43)
CAVRIGDMRF

SEQ ID NO: 569092 - protein, 13 aa, Homo sapiens
  CDR3 for beta chain variable domain of TCR clone 284546 (TRBV20-1, TRBJ2-7)
CSATHTSGYEQYF

SEQ ID NO: 569093 - protein, 14 aa, Homo sapiens
  CDR3 for alpha chain variable domain of TCR clone 284547 (TRAV12-2, TRAJ44)
CAVNPAGTASKLTF

SEQ ID NO: 569094 - protein, 13 aa, Homo sapiens
  CDR3 for beta chain variable domain of TCR clone 284547 (TRBV19, TRBJ2-1)
CASSMYRVNEQFF

SEQ ID NO: 569095 - protein, 16 aa, Homo sapiens
  CDR3 for alpha chain variable domain of TCR clone 284548 (TRAV30, TRAJ24)
CGTEIVDADSWGKLQF

SEQ ID NO: 569096 - protein, 15 aa, Homo sapiens
  CDR3 for beta chain variable domain of TCR clone 284548 (TRBV20-1, TRBJ2-4)
CSARDHTGGPNIQYF

SEQ ID NO: 569097 - protein, 14 aa, Homo sapiens
  CDR3 for alpha chain variable domain of TCR clone 284549 (TRAV8-4, TRAJ40)
CAVLSTSGTYKYIF

SEQ ID NO: 569098 - protein, 16 aa, Homo sapiens
  CDR3 for beta chain variable domain of TCR clone 284549 (TRBV19, TRBJ2-1)
CASSKAGPSSYNEQFF

SEQ ID NO: 569099 - protein, 13 aa, Homo sapiens
  CDR3 for alpha chain variable domain of TCR clone 284550 (TRAV20, TRAJ26)
CAVPTSYGQNFVF

SEQ ID NO: 569100 - protein, 16 aa, Homo sapiens
  CDR3 for beta chain variable domain of TCR clone 284550 (TRBV28, TRBJ2-7)
CASSSPHGRDVYEQYF

SEQ ID NO: 569101 - protein, 14 aa, Homo sapiens
  CDR3 for alpha chain variable domain of TCR clone 284551 (TRAV23/DV6, TRAJ11)
CAALIGGGYSTLTF

SEQ ID NO: 569102 - protein, 14 aa, Homo sapiens
  CDR3 for beta chain variable domain of TCR clone 284551 (TRBV7-9, TRBJ2-2)
CASSGLADTGELFF

SEQ ID NO: 569103 - protein, 16 aa, Homo sapiens
  CDR3 for alpha chain variable domain of TCR clone 284552 (TRAV12-1, TRAJ13)
CVVNLEVSVGYQKVTF

SEQ ID NO: 569104 - protein, 16 aa, Homo sapiens
  CDR3 for beta chain variable domain of TCR clone 284552 (TRBV24-1, TRBJ2-6)
CATSDRRASGANVLTF

SEQ ID NO: 569105 - protein, 12 aa, Homo sapiens
  CDR3 for alpha chain variable domain of TCR clone 284553 (TRAV1-2, TRAJ26)
CAVRYYGQNFVF

SEQ ID NO: 569106 - protein, 15 aa, Homo sapiens
  CDR3 for beta chain variable domain of TCR clone 284553 (TRBV2, TRBJ2-7)
CASSEGLARSYEQYF

SEQ ID NO: 569107 - protein, 13 aa, Homo sapiens
  CDR3 for alpha chain variable domain of TCR clone 284554 (TRAV26-1, TRAJ34)
CIVRGHNTDKLIF

SEQ ID NO: 569108 - protein, 15 aa, Homo sapiens
  CDR3 for beta chain variable domain of TCR clone 284554 (TRBV4-2, TRBJ1-2)
CASSQRTGGRDGYTF

SEQ ID NO: 569109 - protein, 14 aa, Homo sapiens
  CDR3 for alpha chain variable domain of TCR clone 284555 (TRAV16, TRAJ15)
CTLSGPQAGAALIF

SEQ ID NO: 569110 - protein, 12 aa, Homo sapiens
  CDR3 for beta chain variable domain of TCR clone 284555 (TRBV18, TRBJ2-5)
CASSPSKETQYF

SEQ ID NO: 569111 - protein, 13 aa, Homo sapiens
  CDR3 for alpha chain variable domain of TCR clone 284556 (TRAV12-2, TRAJ17)
CRLFKAAGNKLTF

SEQ ID NO: 569112 - protein, 17 aa, Homo sapiens
  CDR3 for beta chain variable domain of TCR clone 284556 (TRBV20-1, TRBJ2-2)
CSASGSGQGGLTGELFF

SEQ ID NO: 569113 - protein, 12 aa, Homo sapiens
  CDR3 for alpha chain variable domain of TCR clone 284557 (TRAV21, TRAJ49)
CAVRNTGNQFYF

SEQ ID NO: 569114 - protein, 14 aa, Homo sapiens
  CDR3 for beta chain variable domain of TCR clone 284557 (TRBV19, TRBJ1-2)
CASSLQGQTYGYTF

SEQ ID NO: 569115 - protein, 19 aa, Homo sapiens
  CDR3 for alpha chain variable domain of TCR clone 284558 (TRAV26-1, TRAJ52)
CIVRVANNAGGTSYGKLTF

SEQ ID NO: 569116 - protein, 14 aa, Homo sapiens
  CDR3 for beta chain variable domain of TCR clone 284558 (TRBV19, TRBJ1-2)
CASSIGAGSYRYTF

SEQ ID NO: 569117 - protein, 14 aa, Homo sapiens
  CDR3 for alpha chain variable domain of TCR clone 284559 (TRAV2, TRAJ37)
CAVDFSSNTGKLIF

SEQ ID NO: 569118 - protein, 13 aa, Homo sapiens
  CDR3 for beta chain variable domain of TCR clone 284559 (TRBV7-3, TRBJ1-1)
CASSQDWGAEAFF

SEQ ID NO: 569119 - protein, 15 aa, Homo sapiens
  CDR3 for alpha chain variable domain of TCR clone 284560 (TRAV8-3, TRAJ45)
CATSYSGGCADGLTF

SEQ ID NO: 569120 - protein, 13 aa, Homo sapiens
  CDR3 for beta chain variable domain of TCR clone 284560 (TRBV10-3, TRBJ2-7)
CASKLAVNYEQYF

SEQ ID NO: 569121 - protein, 16 aa, Homo sapiens
  CDR3 for alpha chain variable domain of TCR clone 284561 (TRAV27, TRAJ13)
CAGAKSDSGGYQKVTL

SEQ ID NO: 569122 - protein, 15 aa, Homo sapiens
  CDR3 for beta chain variable domain of TCR clone 284561 (TRBV29-1, TRBJ2-1)
CSVGRHALFYNEQLF

SEQ ID NO: 569123 - protein, 14 aa, Homo sapiens
  CDR3 for alpha chain variable domain of TCR clone 284562 (TRAV1-2, TRAJ16)
CAVNRFSDGQKLLF

SEQ ID NO: 569124 - protein, 14 aa, Homo sapiens
  CDR3 for beta chain variable domain of TCR clone 284562 (TRBV7-9, TRBJ2-1)
CASSPRDSLYEQVF

SEQ ID NO: 569125 - protein, 14 aa, Homo sapiens
  CDR3 for alpha chain variable domain of TCR clone 284563 (TRAV9-2, TRAJ39)
CALYIYNAGNMLTF

SEQ ID NO: 569126 - protein, 12 aa, Homo sapiens
  CDR3 for beta chain variable domain of TCR clone 284563 (TRBV12-5, TRBJ2-3)
CASGGAADTQYF

SEQ ID NO: 569127 - protein, 15 aa, Homo sapiens
  CDR3 for alpha chain variable domain of TCR clone 284564 (TRAV8-4, TRAJ9)
CAVSDLEGGGFTTIF

SEQ ID NO: 569128 - protein, 12 aa, Homo sapiens
  CDR3 for beta chain variable domain of TCR clone 284564 (TRBV29-1, TRBJ2-3)
CSVTGGADTQYF

SEQ ID NO: 569129 - protein, 14 aa, Homo sapiens
  CDR3 for alpha chain variable domain of TCR clone 284565 (TRAV26-1, TRAJ38)
CIADNAGNNRTLIW

SEQ ID NO: 569130 - protein, 17 aa, Homo sapiens
  CDR3 for beta chain variable domain of TCR clone 284565 (TRBV15, TRBJ1-1)
CATSRVGGADGDTEAFF

SEQ ID NO: 569131 - protein, 14 aa, Homo sapiens
  CDR3 for alpha chain variable domain of TCR clone 284566 (TRAV21, TRAJ58)
CAVRRGRSGSRLTF

SEQ ID NO: 569132 - protein, 13 aa, Homo sapiens
  CDR3 for beta chain variable domain of TCR clone 284566 (TRBV7-2, TRBJ1-6)
CSSSLKFDSPLHF

SEQ ID NO: 569133 - protein, 16 aa, Homo sapiens
  CDR3 for alpha chain variable domain of TCR clone 284567 (TRAV8-1, TRAJ52)
CRDLPAGGTSYGKLTF

SEQ ID NO: 569134 - protein, 12 aa, Homo sapiens
  CDR3 for beta chain variable domain of TCR clone 284567 (TRBV11-2, TRBJ2-2)
CASSLGGGELFF

SEQ ID NO: 569135 - protein, 12 aa, Homo sapiens
  CDR3 for alpha chain variable domain of TCR clone 284568 (TRAV38-1, TRAJ34)
CAFMKETAKLIF

SEQ ID NO: 569136 - protein, 17 aa, Homo sapiens
  CDR3 for beta chain variable domain of TCR clone 284568 (TRBV7-8, TRBJ2-6)
CASSAGTGGAGANVLTF

SEQ ID NO: 569137 - protein, 18 aa, Homo sapiens
  CDR3 for alpha chain variable domain of TCR clone 284569 (TRAV21, TRAJ45)
CCGGPQGGSGGGADGLTF

SEQ ID NO: 569138 - protein, 12 aa, Homo sapiens
  CDR3 for beta chain variable domain of TCR clone 284569 (TRBV29-1, TRBJ1-3)
CSTRDSGNTVYF

SEQ ID NO: 569139 - protein, 13 aa, Homo sapiens
  CDR3 for alpha chain variable domain of TCR clone 284570 (TRAV8-3, TRAJ15)
CAVGIQAGTALIF

SEQ ID NO: 569140 - protein, 17 aa, Homo sapiens
  CDR3 for beta chain variable domain of TCR clone 284570 (TRBV20-1, TRBJ2-1)
CSARDPLAGVAYNEQFF

SEQ ID NO: 569141 - protein, 17 aa, Homo sapiens
  CDR3 for alpha chain variable domain of TCR clone 284571 (TRAV23/DV6, TRAJ57)
CAASSTLSQGGSEKLVF

SEQ ID NO: 569142 - protein, 13 aa, Homo sapiens
  CDR3 for beta chain variable domain of TCR clone 284571 (TRBV25-1, TRBJ1-1)
CASTHLGNTEAFF

SEQ ID NO: 569143 - protein, 15 aa, Homo sapiens
  CDR3 for alpha chain variable domain of TCR clone 284572 (TRAV29/DV5, TRAJ42)
CAAKTDGGSQGILIF

SEQ ID NO: 569144 - protein, 15 aa, Homo sapiens
  CDR3 for beta chain variable domain of TCR clone 284572 (TRBV7-9, TRBJ1-5)
CASSQGHQPNQPQHF

SEQ ID NO: 569145 - protein, 14 aa, Homo sapiens
  CDR3 for alpha chain variable domain of TCR clone 284573 (TRAV21, TRAJ37)
CAVKGSSNTGKLIF

SEQ ID NO: 569146 - protein, 14 aa, Homo sapiens
  CDR3 for beta chain variable domain of TCR clone 284573 (TRBV19, TRBJ2-1)
CARGARSFQWEQFF

SEQ ID NO: 569147 - protein, 12 aa, Homo sapiens
  CDR3 for alpha chain variable domain of TCR clone 284574 (TRAV29/DV5, TRAJ15)
CASNQAGTALIF

SEQ ID NO: 569148 - protein, 13 aa, Homo sapiens
  CDR3 for beta chain variable domain of TCR clone 284574 (TRBV7-7, TRBJ2-3)
CASSLSRADTQYF

SEQ ID NO: 569149 - protein, 14 aa, Homo sapiens
  CDR3 for alpha chain variable domain of TCR clone 284575 (TRAV1-1, TRAJ28)
CAAPSGAGSYQLTF

SEQ ID NO: 569150 - protein, 16 aa, Homo sapiens
  CDR3 for beta chain variable domain of TCR clone 284575 (TRBV2, TRBJ2-7)
CASSEPWTGPSYEQYF

SEQ ID NO: 569151 - protein, 13 aa, Homo sapiens
  CDR3 for alpha chain variable domain of TCR clone 284576 (TRAV35, TRAJ57)
CAGSQGGSEKLVF

SEQ ID NO: 569152 - protein, 14 aa, Homo sapiens
  CDR3 for beta chain variable domain of TCR clone 284576 (TRBV25-1, TRBJ1-1)
CASTGLGGNTEAFF

SEQ ID NO: 569153 - protein, 13 aa, Homo sapiens
  CDR3 for alpha chain variable domain of TCR clone 284577 (TRAV16, TRAJ37)
CALRGSNTGKRIF

SEQ ID NO: 569154 - protein, 15 aa, Homo sapiens
  CDR3 for beta chain variable domain of TCR clone 284577 (TRBV20-1, TRBJ2-1)
CSARGRGLSYNEQFF

SEQ ID NO: 569155 - protein, 22 aa, Homo sapiens
  CDR3 for alpha chain variable domain of TCR clone 284578 (TRAV3, )
CAVRDCLNSGNNHIQNPDPAVY

SEQ ID NO: 569156 - protein, 13 aa, Homo sapiens
  CDR3 for beta chain variable domain of TCR clone 284578 (TRBV23-1, TRBJ1-4)
CASRGKFNEKLFF

SEQ ID NO: 569157 - protein, 17 aa, Homo sapiens
  CDR3 for alpha chain variable domain of TCR clone 284579 (TRAV3, TRAJ12)
CAERDGGRMDSSYKLIF

SEQ ID NO: 569158 - protein, 14 aa, Homo sapiens
  CDR3 for beta chain variable domain of TCR clone 284579 (TRBV7-9, TRBJ1-2)
CASSRQGANYGYTF

SEQ ID NO: 569159 - protein, 17 aa, Homo sapiens
  CDR3 for alpha chain variable domain of TCR clone 284580 (TRAV1-2, TRAJ8)
CAVRDPDENTGFQKLVF

SEQ ID NO: 569160 - protein, 15 aa, Homo sapiens
  CDR3 for beta chain variable domain of TCR clone 284580 (TRBV29-1, TRBJ2-1)
YSAAPLAGGRNEQFF

SEQ ID NO: 569161 - protein, 14 aa, Homo sapiens
  CDR3 for alpha chain variable domain of TCR clone 284581 (TRAV12-2, TRAJ36)
CAVEISTGANNLFF

SEQ ID NO: 569162 - protein, 14 aa, Homo sapiens
  CDR3 for beta chain variable domain of TCR clone 284581 (TRBV25-1, TRBJ1-2)
CASSDTTGVVGYTF

SEQ ID NO: 569163 - protein, 14 aa, Homo sapiens
  CDR3 for alpha chain variable domain of TCR clone 284582 (TRAV14/DV4, TRAJ15)
CAMRRDRAGTALIF

SEQ ID NO: 569164 - protein, 11 aa, Homo sapiens
  CDR3 for beta chain variable domain of TCR clone 284582 (TRBV7-2, TRBJ2-7)
CASSSGLWQYF

SEQ ID NO: 569165 - protein, 12 aa, Homo sapiens
  CDR3 for alpha chain variable domain of TCR clone 284583 (TRAV12-3, TRAJ17)
CAMTLTGNKLTF

SEQ ID NO: 569166 - protein, 16 aa, Homo sapiens
  CDR3 for beta chain variable domain of TCR clone 284583 (TRBV6-4, TRBJ1-2)
CASSEAVGDPNYGYIF

SEQ ID NO: 569167 - protein, 15 aa, Homo sapiens
  CDR3 for alpha chain variable domain of TCR clone 284584 (TRAV12-3, TRAJ49)
CAMAVTPNTGNQYYF

SEQ ID NO: 569168 - protein, 18 aa, Homo sapiens
  CDR3 for beta chain variable domain of TCR clone 284584 (TRBV4-1, TRBJ1-5)
CASSQDPRGQGLNQPQHF

SEQ ID NO: 569169 - protein, 12 aa, Homo sapiens
  CDR3 for alpha chain variable domain of TCR clone 284585 (TRAV8-3, TRAJ20)
CAVDFNDYKLSF

SEQ ID NO: 569170 - protein, 12 aa, Homo sapiens
  CDR3 for beta chain variable domain of TCR clone 284585 (TRBV7-8, TRBJ2-7)
CASEGGPHGQYF

SEQ ID NO: 569171 - protein, 11 aa, Homo sapiens
  CDR3 for alpha chain variable domain of TCR clone 284586 (TRAV21, TRAJ9)
CAVPGGFKTTF

SEQ ID NO: 569172 - protein, 12 aa, Homo sapiens
  CDR3 for beta chain variable domain of TCR clone 284586 (TRBV20-1, TRBJ2-3)
CSAGVGTDTQYF

SEQ ID NO: 569173 - protein, 12 aa, Homo sapiens
  CDR3 for alpha chain variable domain of TCR clone 284587 (TRAV1-2, TRAJ33)
CAALASNYQLIW

SEQ ID NO: 569174 - protein, 14 aa, Homo sapiens
  CDR3 for beta chain variable domain of TCR clone 284587 (TRBV20-1, TRBJ2-1)
CSAQIGGSANEQFF

SEQ ID NO: 569175 - protein, 15 aa, Homo sapiens
  CDR3 for alpha chain variable domain of TCR clone 284588 (TRAV8-4, TRAJ6)
CAVTHASGGSYIPTF

SEQ ID NO: 569176 - protein, 15 aa, Homo sapiens
  CDR3 for beta chain variable domain of TCR clone 284588 (TRBV7-2, TRBJ2-3)
CASSLNGGCTDTQYF

SEQ ID NO: 569177 - protein, 19 aa, Homo sapiens
  CDR3 for alpha chain variable domain of TCR clone 284589 (TRAV26-1, TRAJ52)
CIVRAHRNAGCTSYGKLTF

SEQ ID NO: 569178 - protein, 14 aa, Homo sapiens
  CDR3 for beta chain variable domain of TCR clone 284589 (TRBV4-1, TRBJ2-2)
CASSQAVNTGELFF

SEQ ID NO: 569179 - protein, 13 aa, Homo sapiens
  CDR3 for alpha chain variable domain of TCR clone 284590 (TRAV9-2, TRAJ49)
CALIQIGGNQFYF

SEQ ID NO: 569180 - protein, 15 aa, Homo sapiens
  CDR3 for beta chain variable domain of TCR clone 284590 (TRBV9, TRBJ1-6)
CASSVSGTGDSPLHF

SEQ ID NO: 569181 - protein, 12 aa, Homo sapiens
  CDR3 for alpha chain variable domain of TCR clone 284591 (TRAV3, TRAJ20)
CAVRDPDYKLSF

SEQ ID NO: 569182 - protein, 15 aa, Homo sapiens
  CDR3 for beta chain variable domain of TCR clone 284591 (TRBV28, TRBJ1-3)
CASSMGWASGNTIYF

SEQ ID NO: 569183 - protein, 16 aa, Homo sapiens
  CDR3 for alpha chain variable domain of TCR clone 284592 (TRAV3, TRAJ27)
CAVRDPQGTNAGKSTL

SEQ ID NO: 569184 - protein, 14 aa, Homo sapiens
  CDR3 for beta chain variable domain of TCR clone 284592 (TRBV7-2, TRBJ2-7)
CASRSQGAAYEQYF

SEQ ID NO: 569185 - protein, 16 aa, Homo sapiens
  CDR3 for alpha chain variable domain of TCR clone 284593 (TRAV30, TRAJ24)
CGTEIVDADSWGKFQF

SEQ ID NO: 569186 - protein, 13 aa, Homo sapiens
  CDR3 for beta chain variable domain of TCR clone 284593 (TRBV24-1, TRBJ2-2)
CATSDWPTGELFF

SEQ ID NO: 569187 - protein, 16 aa, Homo sapiens
  CDR3 for alpha chain variable domain of TCR clone 284594 (TRAV12-3, TRAJ53)
CAMSPGSGGSNYKLTF

SEQ ID NO: 569188 - protein, 13 aa, Homo sapiens
  CDR3 for beta chain variable domain of TCR clone 284594 (TRBV7-3, TRBJ2-3)
CASSSWSTDTQYF

SEQ ID NO: 569189 - protein, 22 aa, Homo sapiens
  CDR3 for alpha chain variable domain of TCR clone 284595 (TRAV34, TRAJ52)
STSVEQTRRSNAGGTSYGKLTF

SEQ ID NO: 569190 - protein, 15 aa, Homo sapiens
  CDR3 for beta chain variable domain of TCR clone 284595 (TRBV5-1, TRBJ2-7)
CASSLNGGPAREQCF

SEQ ID NO: 569191 - protein, 13 aa, Homo sapiens
  CDR3 for alpha chain variable domain of TCR clone 284596 (TRAV16, TRAJ31)
CALSAHTNARLIF

SEQ ID NO: 569192 - protein, 17 aa, Homo sapiens
  CDR3 for beta chain variable domain of TCR clone 284596 (TRBV12-4, TRBJ2-1)
CASSPGLAGGRINEQFF

SEQ ID NO: 569193 - protein, 14 aa, Homo sapiens
  CDR3 for alpha chain variable domain of TCR clone 284597 (TRAV12-3, TRAJ9)
CAMSVETGGFKTIF

SEQ ID NO: 569194 - protein, 13 aa, Homo sapiens
  CDR3 for beta chain variable domain of TCR clone 284597 (TRBV10-3, TRBJ2-7)
CASKLAVNYEQYF

SEQ ID NO: 569195 - protein, 12 aa, Homo sapiens
  CDR3 for alpha chain variable domain of TCR clone 284598 (TRAV3, TRAJ20)
CAVRDGDYKLSF

SEQ ID NO: 569196 - protein, 14 aa, Homo sapiens
  CDR3 for beta chain variable domain of TCR clone 284598 (TRBV6-1, TRBJ2-2)
CASTWQGNTGELFF

SEQ ID NO: 569197 - protein, 14 aa, Homo sapiens
  CDR3 for alpha chain variable domain of TCR clone 284599 (TRAV21, TRAJ32)
CCGDYGGATNKLIF

SEQ ID NO: 569198 - protein, 13 aa, Homo sapiens
  CDR3 for beta chain variable domain of TCR clone 284599 (TRBV2, TRBJ1-6)
CASGRGGISHLHF

SEQ ID NO: 569199 - protein, 14 aa, Homo sapiens
  CDR3 for alpha chain variable domain of TCR clone 284600 (TRAV8-1, TRAJ15)
CAVNGQQAGTALIF

SEQ ID NO: 569200 - protein, 20 aa, Homo sapiens
  CDR3 for beta chain variable domain of TCR clone 284600 (TRBV7-8, TRBJ2-2)
CASSHLFPGPTIHITGELFF

SEQ ID NO: 569201 - protein, 11 aa, Homo sapiens
  CDR3 for alpha chain variable domain of TCR clone 284601 (TRAV27, TRAJ45)
CAGAQEEVLTD

SEQ ID NO: 569202 - protein, 17 aa, Homo sapiens
  CDR3 for beta chain variable domain of TCR clone 284601 (TRBV11-2, TRBJ2-1)
RASSLYPPGVEYNEQFF

SEQ ID NO: 569203 - protein, 18 aa, Homo sapiens
  CDR3 for alpha chain variable domain of TCR clone 284602 (TRAV21, TRAJ52)
FAVRPSPAGGTSSGKLTF

SEQ ID NO: 569204 - protein, 17 aa, Homo sapiens
  CDR3 for beta chain variable domain of TCR clone 284602 (TRBV13, TRBJ2-3)
CASSLSRVAGGRNTQYF

SEQ ID NO: 569205 - protein, 15 aa, Homo sapiens
  CDR3 for alpha chain variable domain of TCR clone 284603 (TRAV26-1, TRAJ29)
CIVRVEGSGNTPLVF

SEQ ID NO: 569206 - protein, 14 aa, Homo sapiens
  CDR3 for beta chain variable domain of TCR clone 284603 (TRBV4-1, TRBJ2-7)
CASSPVAGGDEQYF

SEQ ID NO: 569207 - protein, 14 aa, Homo sapiens
  CDR3 for alpha chain variable domain of TCR clone 284604 (TRAV35, TRAJ42)
CAGCYGGSQGNLIF

SEQ ID NO: 569208 - protein, 15 aa, Homo sapiens
  CDR3 for beta chain variable domain of TCR clone 284604 (TRBV7-9, TRBJ2-1)
CASSLGRGRANEQFF

SEQ ID NO: 569209 - protein, 11 aa, Homo sapiens
  CDR3 for alpha chain variable domain of TCR clone 284605 (TRAV35, TRAJ30)
CAGPGDDKIIF

SEQ ID NO: 569210 - protein, 13 aa, Homo sapiens
  CDR3 for beta chain variable domain of TCR clone 284605 (TRBV13, TRBJ2-2)
CASSPGLTGELFF

SEQ ID NO: 569211 - protein, 15 aa, Homo sapiens
  CDR3 for alpha chain variable domain of TCR clone 284606 (TRAV3, TRAJ5)
CAVRDLDTGRRARTF

SEQ ID NO: 569212 - protein, 13 aa, Homo sapiens
  CDR3 for beta chain variable domain of TCR clone 284606 (TRBV12-4, TRBJ2-7)
CASSPTETYDQYF

SEQ ID NO: 569213 - protein, 10 aa, Homo sapiens
  CDR3 for alpha chain variable domain of TCR clone 284607 (TRAV12-2, TRAJ22)
CAVNETQLTF

SEQ ID NO: 569214 - protein, 15 aa, Homo sapiens
  CDR3 for beta chain variable domain of TCR clone 284607 (TRBV27, TRBJ2-1)
CASSNGGGSSNKQFF

SEQ ID NO: 569215 - protein, 11 aa, Homo sapiens
  CDR3 for alpha chain variable domain of TCR clone 284608 (TRAV2, TRAJ13)
CASGGYQKVTF

SEQ ID NO: 569216 - protein, 13 aa, Homo sapiens
  CDR3 for beta chain variable domain of TCR clone 284608 (TRBV24-1, TRBJ2-3)
CATSTGGTDTLYF

SEQ ID NO: 569217 - protein, 11 aa, Homo sapiens
  CDR3 for alpha chain variable domain of TCR clone 284609 (TRAV12-1, TRAJ21)
CVVYNFDKFYF

SEQ ID NO: 569218 - protein, 14 aa, Homo sapiens
  CDR3 for beta chain variable domain of TCR clone 284609 (TRBV19, TRBJ2-7)
CASSMGQGAIEQYF

SEQ ID NO: 569219 - protein, 13 aa, Homo sapiens
  CDR3 for alpha chain variable domain of TCR clone 284610 (TRAV36/DV7, TRAJ40)
CAVEASGTYKYIF

SEQ ID NO: 569220 - protein, 16 aa, Homo sapiens
  CDR3 for beta chain variable domain of TCR clone 284610 (TRBV25-1, TRBJ1-1)
CASSGDRDRGRIEAFF

SEQ ID NO: 569221 - protein, 14 aa, Homo sapiens
  CDR3 for alpha chain variable domain of TCR clone 284611 (TRAV12-3, TRAJ9)
CAMSPNTGGFKTIF

SEQ ID NO: 569222 - protein, 13 aa, Homo sapiens
  CDR3 for beta chain variable domain of TCR clone 284611 (TRBV7-9, TRBJ1-2)
CASSVKQNYGYTF

SEQ ID NO: 569223 - protein, 17 aa, Homo sapiens
  CDR3 for alpha chain variable domain of TCR clone 284612 (TRAV3, TRAJ6)
CAVRGGPRAGGSYIPTF

SEQ ID NO: 569224 - protein, 14 aa, Homo sapiens
  CDR3 for beta chain variable domain of TCR clone 284612 (TRBV7-2, TRBJ2-7)
YASSPKTSFYEQYF

SEQ ID NO: 569225 - protein, 11 aa, Homo sapiens
  CDR3 for alpha chain variable domain of TCR clone 284613 (TRAV4, TRAJ23)
CLVAPGGKLIF

SEQ ID NO: 569226 - protein, 13 aa, Homo sapiens
  CDR3 for beta chain variable domain of TCR clone 284613 (TRBV7-9, TRBJ1-2)
CASSLKQKYGYTF

SEQ ID NO: 569227 - protein, 14 aa, Homo sapiens
  CDR3 for alpha chain variable domain of TCR clone 284614 (TRAV1-2, TRAJ16)
CAVNRFSDGQKLLF

SEQ ID NO: 569228 - protein, 12 aa, Homo sapiens
  CDR3 for beta chain variable domain of TCR clone 284614 (TRBV11-2, TRBJ2-2)
CASSLPTGGLFF

SEQ ID NO: 569229 - protein, 14 aa, Homo sapiens
  CDR3 for alpha chain variable domain of TCR clone 284615 (TRAV1-2, TRAJ29)
CAVRTDSGNTPLVF

SEQ ID NO: 569230 - protein, 14 aa, Homo sapiens
  CDR3 for beta chain variable domain of TCR clone 284615 (TRBV7-2, TRBJ2-7)
CAGSPKTSFYEQYF

SEQ ID NO: 569231 - protein, 15 aa, Homo sapiens
  CDR3 for alpha chain variable domain of TCR clone 284616 (TRAV13-1, TRAJ44)
CAASRNTGTASKLTF

SEQ ID NO: 569232 - protein, 14 aa, Homo sapiens
  CDR3 for beta chain variable domain of TCR clone 284616 (TRBV2, TRBJ2-7)
CASSLTAGGYEQYF

SEQ ID NO: 569233 - protein, 14 aa, Homo sapiens
  CDR3 for alpha chain variable domain of TCR clone 284617 (TRAV12-2, TRAJ17)
CAVLFKAAGNKLTF

SEQ ID NO: 569234 - protein, 16 aa, Homo sapiens
  CDR3 for beta chain variable domain of TCR clone 284617 (TRBV4-3, TRBJ2-7)
CASSPRTSGRSYEQYF

SEQ ID NO: 569235 - protein, 16 aa, Homo sapiens
  CDR3 for alpha chain variable domain of TCR clone 284618 (TRAV8-3, TRAJ44)
CAVGASNNVTASRLTF

SEQ ID NO: 569236 - protein, 15 aa, Homo sapiens
  CDR3 for beta chain variable domain of TCR clone 284618 (TRBV27, TRBJ1-5)
CASTFNRGSNQPQHF

SEQ ID NO: 569237 - protein, 14 aa, Homo sapiens
  CDR3 for alpha chain variable domain of TCR clone 284619 (TRAV8-4, TRAJ43)
CAVSDQGITMTCAL

SEQ ID NO: 569238 - protein, 15 aa, Homo sapiens
  CDR3 for beta chain variable domain of TCR clone 284619 (TRBV4-2, TRBJ1-2)
CASSQRTGGRDGYTF

SEQ ID NO: 569239 - protein, 11 aa, Homo sapiens
  CDR3 for alpha chain variable domain of TCR clone 284620 (TRAV35, TRAJ30)
CAGERDDKIIF

SEQ ID NO: 569240 - protein, 16 aa, Homo sapiens
  CDR3 for beta chain variable domain of TCR clone 284620 (TRBV4-3, TRBJ2-1)
CASSPALDRGVNEQFF

SEQ ID NO: 569241 - protein, 16 aa, Homo sapiens
  CDR3 for alpha chain variable domain of TCR clone 284621 (TRAV3, TRAJ37)
CAVRGKGSGNTGKRIF

SEQ ID NO: 569242 - protein, 13 aa, Homo sapiens
  CDR3 for beta chain variable domain of TCR clone 284621 (TRBV19, TRBJ1-2)
CASSVPGQDGYTF

SEQ ID NO: 569243 - protein, 11 aa, Homo sapiens
  CDR3 for alpha chain variable domain of TCR clone 284622 (TRAV3, TRAJ21)
CAVGNFNKFYF

SEQ ID NO: 569244 - protein, 16 aa, Homo sapiens
  CDR3 for beta chain variable domain of TCR clone 284622 (TRBV19, TRBJ2-1)
CASSKAGPSAYNGQFF

SEQ ID NO: 569245 - protein, 14 aa, Homo sapiens
  CDR3 for alpha chain variable domain of TCR clone 284623 (TRAV8-3, TRAJ4)
CAVGAAGGYTKLIF

SEQ ID NO: 569246 - protein, 15 aa, Homo sapiens
  CDR3 for beta chain variable domain of TCR clone 284623 (TRBV20-1, TRBJ2-7)
CSARDRVSGMDEQYF

SEQ ID NO: 569247 - protein, 17 aa, Homo sapiens
  CDR3 for alpha chain variable domain of TCR clone 284624 (TRAV3, TRAJ42)
CAVRYRDYGGSQGNLIF

SEQ ID NO: 569248 - protein, 15 aa, Homo sapiens
  CDR3 for beta chain variable domain of TCR clone 284624 (TRBV6-6, TRBJ2-7)
CAGSYSYGGSYEQYF

SEQ ID NO: 569249 - protein, 14 aa, Homo sapiens
  CDR3 for alpha chain variable domain of TCR clone 284625 (TRAV8-1, TRAJ48)
CAVNAGFGNEKLTF

SEQ ID NO: 569250 - protein, 13 aa, Homo sapiens
  CDR3 for beta chain variable domain of TCR clone 284625 (TRBV4-2, TRBJ1-1)
CASSQAGNTEAFF

SEQ ID NO: 569251 - protein, 16 aa, Homo sapiens
  CDR3 for alpha chain variable domain of TCR clone 284626 (TRAV12-2, TRAJ40)
CAVIRGGTSGTYKYIF

SEQ ID NO: 569252 - protein, 13 aa, Homo sapiens
  CDR3 for beta chain variable domain of TCR clone 284626 (TRBV20-1, TRBJ1-1)
CSARAGGNTEAFF

SEQ ID NO: 569253 - protein, 14 aa, Homo sapiens
  CDR3 for alpha chain variable domain of TCR clone 284627 (TRAV35, TRAJ50)
CAGHRKTSYDKVIF

SEQ ID NO: 569254 - protein, 18 aa, Homo sapiens
  CDR3 for beta chain variable domain of TCR clone 284627 (TRBV7-6, TRBJ2-1)
CASSPRTSGMSSYNEQFF

SEQ ID NO: 569255 - protein, 16 aa, Homo sapiens
  CDR3 for alpha chain variable domain of TCR clone 284628 (TRAV3, TRAJ27)
CAVRDPQGTNAGKSTF

SEQ ID NO: 569256 - protein, 17 aa, Homo sapiens
  CDR3 for beta chain variable domain of TCR clone 284628 (TRBV4-1, TRBJ2-7)
CASNQGRGLQTSYEQYF

SEQ ID NO: 569257 - protein, 14 aa, Homo sapiens
  CDR3 for alpha chain variable domain of TCR clone 284629 (TRAV13-1, TRAJ15)
CAASTNQAGTALIF

SEQ ID NO: 569258 - protein, 15 aa, Homo sapiens
  CDR3 for beta chain variable domain of TCR clone 284629 (TRBV7-2, TRBJ2-2)
CASSPTGANTGELFF

SEQ ID NO: 569259 - protein, 15 aa, Homo sapiens
  CDR3 for alpha chain variable domain of TCR clone 284630 (TRAV38-1, TRAJ45)
CAFMKCGGGADGLTF

SEQ ID NO: 569260 - protein, 13 aa, Homo sapiens
  CDR3 for beta chain variable domain of TCR clone 284630 (TRBV7-9, TRBJ1-2)
CASSLKQNYGYTF

SEQ ID NO: 569261 - protein, 14 aa, Homo sapiens
  CDR3 for alpha chain variable domain of TCR clone 284631 (TRAV8-1, TRAJ34)
CAVNPSHNTDKLIF

SEQ ID NO: 569262 - protein, 16 aa, Homo sapiens
  CDR3 for beta chain variable domain of TCR clone 284631 (TRBV7-2, TRBJ2-6)
CASSLAGRAGANVLTF

SEQ ID NO: 569263 - protein, 16 aa, Homo sapiens
  CDR3 for alpha chain variable domain of TCR clone 284632 (TRAV38-2/DV8, TRAJ45)
CAYRGNSGGGADGLTF

SEQ ID NO: 569264 - protein, 14 aa, Homo sapiens
  CDR3 for beta chain variable domain of TCR clone 284632 (TRBV12-5, TRBJ2-5)
CASGSRTHQETQYF

SEQ ID NO: 569265 - protein, 13 aa, Homo sapiens
  CDR3 for alpha chain variable domain of TCR clone 284633 (TRAV8-3, TRAJ48)
CAVVPFGNEKLTF

SEQ ID NO: 569266 - protein, 15 aa, Homo sapiens
  CDR3 for beta chain variable domain of TCR clone 284633 (TRBV4-1, TRBJ2-7)
CASSQNTGRLYEQYF

SEQ ID NO: 569267 - protein, 15 aa, Homo sapiens
  CDR3 for alpha chain variable domain of TCR clone 284634 (TRAV4, TRAJ39)
CLVGPNNNAGNMLTF

SEQ ID NO: 569268 - protein, 14 aa, Homo sapiens
  CDR3 for beta chain variable domain of TCR clone 284634 (TRBV19, TRBJ2-1)
CASPTFVLSGDQFF

SEQ ID NO: 569269 - protein, 13 aa, Homo sapiens
  CDR3 for alpha chain variable domain of TCR clone 284635 (TRAV17, TRAJ44)
CATVLGTASKLTF

SEQ ID NO: 569270 - protein, 12 aa, Homo sapiens
  CDR3 for beta chain variable domain of TCR clone 284635 (TRBV6-3, TRBJ2-1)
CASRGLNNEQFF

SEQ ID NO: 569271 - protein, 20 aa, Homo sapiens
  CDR3 for alpha chain variable domain of TCR clone 284636 (TRAV12-3, TRAJ41)
SLFIRDSQPSDSATPEALNF

SEQ ID NO: 569272 - protein, 13 aa, Homo sapiens
  CDR3 for beta chain variable domain of TCR clone 284636 (TRBV5-5, TRBJ1-2)
CASSFWRGEDYTF

SEQ ID NO: 569273 - protein, 23 aa, Homo sapiens
  CDR3 for alpha chain variable domain of TCR clone 284637 (TRAV9-2, TRAJ4)
CQTQRCTSVLWVIRSGVYNKLIF

SEQ ID NO: 569274 - protein, 12 aa, Homo sapiens
  CDR3 for beta chain variable domain of TCR clone 284637 (TRBV11-2, TRBJ2-2)
CASSLGGGELFF

SEQ ID NO: 569275 - protein, 14 aa, Homo sapiens
  CDR3 for alpha chain variable domain of TCR clone 284638 (TRAV35, TRAJ34)
CAGRGTPTSSSLGL

SEQ ID NO: 569276 - protein, 16 aa, Homo sapiens
  CDR3 for beta chain variable domain of TCR clone 284638 (TRBV12-5, TRBJ2-5)
CASGPRTSGNQETQYF

SEQ ID NO: 569277 - protein, 15 aa, Homo sapiens
  CDR3 for alpha chain variable domain of TCR clone 284639 (TRAV4, TRAJ39)
CLVGPNNNAGNMLTF

SEQ ID NO: 569278 - protein, 15 aa, Homo sapiens
  CDR3 for beta chain variable domain of TCR clone 284639 (TRBV18, TRBJ2-1)
CASSPPSASYNEQFF

SEQ ID NO: 569279 - protein, 18 aa, Homo sapiens
  CDR3 for alpha chain variable domain of TCR clone 284640 (TRAV12-3, TRAJ52)
CAMSVGGAGGTSYGKLTF

SEQ ID NO: 569280 - protein, 16 aa, Homo sapiens
  CDR3 for beta chain variable domain of TCR clone 284640 (TRBV19, TRBJ2-2)
CASRSPGTGATGELFF

SEQ ID NO: 569281 - protein, 15 aa, Homo sapiens
  CDR3 for alpha chain variable domain of TCR clone 284641 (TRAV12-3, TRAJ6)
CAKSATTGGSYIPTF

SEQ ID NO: 569282 - protein, 13 aa, Homo sapiens
  CDR3 for beta chain variable domain of TCR clone 284641 (TRBV6-3, TRBJ2-7)
CASSFSGGYEQYF

SEQ ID NO: 569283 - protein, 18 aa, Homo sapiens
  CDR3 for alpha chain variable domain of TCR clone 284642 (TRAV21, TRAJ36)
CAVRPIQSTRGGANNLFF

SEQ ID NO: 569284 - protein, 14 aa, Homo sapiens
  CDR3 for beta chain variable domain of TCR clone 284642 (TRBV7-6, TRBJ2-3)
CASSLGTVTDTQYF

SEQ ID NO: 569285 - protein, 17 aa, Homo sapiens
  CDR3 for alpha chain variable domain of TCR clone 284643 (TRAV13-1, TRAJ53)
CAASWKSSGGSNYKLTF

SEQ ID NO: 569286 - protein, 12 aa, Homo sapiens
  CDR3 for beta chain variable domain of TCR clone 284643 (TRBV12-4, TRBJ2-7)
CASSLGGYEQYF

SEQ ID NO: 569287 - protein, 14 aa, Homo sapiens
  CDR3 for alpha chain variable domain of TCR clone 284644 (TRAV12-1, TRAJ17)
CVVNYKAAGNKLTF

SEQ ID NO: 569288 - protein, 17 aa, Homo sapiens
  CDR3 for beta chain variable domain of TCR clone 284644 (TRBV20-1, TRBJ2-1)
CSASSSGLARSYNEQSF

SEQ ID NO: 569289 - protein, 14 aa, Homo sapiens
  CDR3 for alpha chain variable domain of TCR clone 284645 (TRAV13-1, TRAJ20)
CAARPGSNDYKLSS

SEQ ID NO: 569290 - protein, 13 aa, Homo sapiens
  CDR3 for beta chain variable domain of TCR clone 284645 (TRBV20-1, TRBJ1-1)
CSAPPGGHTEAFF

SEQ ID NO: 569291 - protein, 19 aa, Homo sapiens
  CDR3 for alpha chain variable domain of TCR clone 284646 (TRAV29/DV5, TRAJ49)
CSVLLCSKLTVDTGNQFYF

SEQ ID NO: 569292 - protein, 17 aa, Homo sapiens
  CDR3 for beta chain variable domain of TCR clone 284646 (TRBV13, TRBJ2-3)
CASSLSRVVGGRNTQYF

SEQ ID NO: 569293 - protein, 11 aa, Homo sapiens
  CDR3 for alpha chain variable domain of TCR clone 284647 (TRAV21, TRAJ33)
CTLDSNYQLIW

SEQ ID NO: 569294 - protein, 12 aa, Homo sapiens
  CDR3 for beta chain variable domain of TCR clone 284647 (TRBV11-2, TRBJ2-2)
CASSLGGGELFF

SEQ ID NO: 569295 - protein, 16 aa, Homo sapiens
  CDR3 for alpha chain variable domain of TCR clone 284648 (TRAV3, TRAJ23)
CAVKIGIYNQGGKLIF

SEQ ID NO: 569296 - protein, 20 aa, Homo sapiens
  CDR3 for beta chain variable domain of TCR clone 284648 (TRBV7-8, TRBJ2-1)
CASSLAHRLAGVRSYNEQFF

SEQ ID NO: 569297 - protein, 15 aa, Homo sapiens
  CDR3 for alpha chain variable domain of TCR clone 284649 (TRAV23/DV6, TRAJ4)
CAASPLRGGYNKLTF

SEQ ID NO: 569298 - protein, 15 aa, Homo sapiens
  CDR3 for beta chain variable domain of TCR clone 284649 (TRBV7-9, TRBJ1-6)
CASSSPGRGNSPLHF

SEQ ID NO: 569299 - protein, 15 aa, Homo sapiens
  CDR3 for alpha chain variable domain of TCR clone 284650 (TRAV8-3, TRAJ45)
CASSYSGGGADGLTF

SEQ ID NO: 569300 - protein, 14 aa, Homo sapiens
  CDR3 for beta chain variable domain of TCR clone 284650 (TRBV10-3, TRBJ2-1)
CASSEALIYNEQFF

SEQ ID NO: 569301 - protein, 12 aa, Homo sapiens
  CDR3 for alpha chain variable domain of TCR clone 284651 (TRAV27, TRAJ9)
CAGEAGGVKTIF

SEQ ID NO: 569302 - protein, 18 aa, Homo sapiens
  CDR3 for beta chain variable domain of TCR clone 284651 (TRBV10-2, TRBJ2-2)
CISAPAVHRQADAGELFF

SEQ ID NO: 569303 - protein, 15 aa, Homo sapiens
  CDR3 for alpha chain variable domain of TCR clone 284652 (TRAV23/DV6, TRAJ30)
CAASSQESRDDKIIF

SEQ ID NO: 569304 - protein, 16 aa, Homo sapiens
  CDR3 for beta chain variable domain of TCR clone 284652 (TRBV4-3, TRBJ2-2)
CASSHLQGSGTGELFF

SEQ ID NO: 569305 - protein, 18 aa, Homo sapiens
  CDR3 for alpha chain variable domain of TCR clone 284653 (TRAV13-1, TRAJ52)
CAASKRSAGGTSYGKLTF

SEQ ID NO: 569306 - protein, 13 aa, Homo sapiens
  CDR3 for beta chain variable domain of TCR clone 284653 (TRBV12-4, TRBJ1-2)
CASSLRQGKGYHF

SEQ ID NO: 569307 - protein, 11 aa, Homo sapiens
  CDR3 for alpha chain variable domain of TCR clone 284654 (TRAV20, TRAJ34)
CMRDNTDKLIF

SEQ ID NO: 569308 - protein, 15 aa, Homo sapiens
  CDR3 for beta chain variable domain of TCR clone 284654 (TRBV2, TRBJ2-1)
CASSVTSEGTDEQFF

SEQ ID NO: 569309 - protein, 11 aa, Homo sapiens
  CDR3 for alpha chain variable domain of TCR clone 284655 (TRAV27, TRAJ40)
SLTSGTYKHIF

SEQ ID NO: 569310 - protein, 12 aa, Homo sapiens
  CDR3 for beta chain variable domain of TCR clone 284655 (TRBV18, TRBJ2-3)
CQLNQNTDTQYF

SEQ ID NO: 569311 - protein, 14 aa, Homo sapiens
  CDR3 for alpha chain variable domain of TCR clone 284656 (TRAV13-2, TRAJ22)
CADGTLGSARQRTF

SEQ ID NO: 569312 - protein, 15 aa, Homo sapiens
  CDR3 for beta chain variable domain of TCR clone 284656 (TRBV6-3, TRBJ2-7)
CASSSTGTVFYEQYF

SEQ ID NO: 569313 - protein, 12 aa, Homo sapiens
  CDR3 for alpha chain variable domain of TCR clone 284657 (TRAV9-2, TRAJ36)
CALKKGANNLFF

SEQ ID NO: 569314 - protein, 12 aa, Homo sapiens
  CDR3 for beta chain variable domain of TCR clone 284657 (TRBV29-1, TRBJ1-1)
CSESDGNTEAFF

SEQ ID NO: 569315 - protein, 15 aa, Homo sapiens
  CDR3 for alpha chain variable domain of TCR clone 284658 (TRAV38-1, TRAJ37)
CAFIHGSGNTGKLIF

SEQ ID NO: 569316 - protein, 12 aa, Homo sapiens
  CDR3 for beta chain variable domain of TCR clone 284658 (TRBV7-9, TRBJ2-7)
CASSFGSYEQYF

SEQ ID NO: 569317 - protein, 13 aa, Homo sapiens
  CDR3 for alpha chain variable domain of TCR clone 284659 (TRAV16, TRAJ58)
CALSIPSCSRLTF

SEQ ID NO: 569318 - protein, 14 aa, Homo sapiens
  CDR3 for beta chain variable domain of TCR clone 284659 (TRBV6-5, TRBJ2-7)
CASSPHRGLREQYF

SEQ ID NO: 569319 - protein, 14 aa, Homo sapiens
  CDR3 for alpha chain variable domain of TCR clone 284660 (TRAV12-3, TRAJ21)
CAATDLYNFNKFYF

SEQ ID NO: 569320 - protein, 15 aa, Homo sapiens
  CDR3 for beta chain variable domain of TCR clone 284660 (TRBV6-4, TRBJ2-1)
CASSDSTGGYNEQFF

SEQ ID NO: 569321 - protein, 14 aa, Homo sapiens
  CDR3 for alpha chain variable domain of TCR clone 284661 (TRAV17, TRAJ37)
CATDGSSNTGKLIF

SEQ ID NO: 569322 - protein, 15 aa, Homo sapiens
  CDR3 for beta chain variable domain of TCR clone 284661 (TRBV10-2, TRBJ2-6)
CASSEQGTGANVLTF

SEQ ID NO: 569323 - protein, 21 aa, Homo sapiens
  CDR3 for alpha chain variable domain of TCR clone 284662 (TRAV30, TRAJ43)
GLPAQLLRNLLPIIELNDMRF

SEQ ID NO: 569324 - protein, 14 aa, Homo sapiens
  CDR3 for beta chain variable domain of TCR clone 284662 (TRBV27, TRBJ2-1)
CAIRHLGGGKEQFF

SEQ ID NO: 569325 - protein, 15 aa, Homo sapiens
  CDR3 for alpha chain variable domain of TCR clone 284663 (TRAV13-1, TRAJ42)
CAARIAGGSQGNLIF

SEQ ID NO: 569326 - protein, 15 aa, Homo sapiens
  CDR3 for beta chain variable domain of TCR clone 284663 (TRBV19, TRBJ2-1)
CASSIVRGEGREQFF

SEQ ID NO: 569327 - protein, 12 aa, Homo sapiens
  CDR3 for alpha chain variable domain of TCR clone 284664 (TRAV13-1, TRAJ21)
CAAKEGFNKFYF

SEQ ID NO: 569328 - protein, 18 aa, Homo sapiens
  CDR3 for beta chain variable domain of TCR clone 284664 (TRBV20-1, TRBJ2-6)
CSAETTPTHGSGANVLTF

SEQ ID NO: 569329 - protein, 13 aa, Homo sapiens
  CDR3 for alpha chain variable domain of TCR clone 284665 (TRAV12-2, TRAJ50)
CAVIVTSYDKVIF

SEQ ID NO: 569330 - protein, 15 aa, Homo sapiens
  CDR3 for beta chain variable domain of TCR clone 284665 (TRBV11-3, TRBJ2-3)
CASLKDGREGDTQYF

SEQ ID NO: 569331 - protein, 13 aa, Homo sapiens
  CDR3 for alpha chain variable domain of TCR clone 284666 (TRAV12-2, TRAJ20)
CAVYPSNDYKLSF

SEQ ID NO: 569332 - protein, 13 aa, Homo sapiens
  CDR3 for beta chain variable domain of TCR clone 284666 (TRBV12-4, TRBJ1-1)
CASSPGTGFEAFF

SEQ ID NO: 569333 - protein, 13 aa, Homo sapiens
  CDR3 for alpha chain variable domain of TCR clone 284667 (TRAV2, TRAJ36)
CAVDQTGANNLFF

SEQ ID NO: 569334 - protein, 12 aa, Homo sapiens
  CDR3 for beta chain variable domain of TCR clone 284667 (TRBV19, TRBJ1-1)
CASMNIYTEAFF

SEQ ID NO: 569335 - protein, 15 aa, Homo sapiens
  CDR3 for alpha chain variable domain of TCR clone 284668 (TRAV14/DV4, TRAJ12)
CAMREERDSSYKLIF

SEQ ID NO: 569336 - protein, 14 aa, Homo sapiens
  CDR3 for beta chain variable domain of TCR clone 284668 (TRBV23-1, TRBJ2-5)
CASSFLRSQETQYF

SEQ ID NO: 569337 - protein, 15 aa, Homo sapiens
  CDR3 for alpha chain variable domain of TCR clone 284669 (TRAV21, TRAJ53)
CATLDSGGSNYKLTF

SEQ ID NO: 569338 - protein, 12 aa, Homo sapiens
  CDR3 for beta chain variable domain of TCR clone 284669 (TRBV14, TRBJ2-7)
CASSLNQRGQYF

SEQ ID NO: 569339 - protein, 14 aa, Homo sapiens
  CDR3 for alpha chain variable domain of TCR clone 284670 (TRAV38-1, TRAJ45)
CPSHSGGGPDGLTF

SEQ ID NO: 569340 - protein, 13 aa, Homo sapiens
  CDR3 for beta chain variable domain of TCR clone 284670 (TRBV10-3, TRBJ1-2)
CAISERDSYGYTF

SEQ ID NO: 569341 - protein, 12 aa, Homo sapiens
  CDR3 for alpha chain variable domain of TCR clone 284671 (TRAV3, TRAJ43)
CALRDPNNDMRF

SEQ ID NO: 569342 - protein, 15 aa, Homo sapiens
  CDR3 for beta chain variable domain of TCR clone 284671 (TRBV6-5, TRBJ2-1)
CASSYDAGAGNEQFF

SEQ ID NO: 569343 - protein, 13 aa, Homo sapiens
  CDR3 for alpha chain variable domain of TCR clone 284672 (TRAV13-1, TRAJ21)
CAASIYNFNKFYF

SEQ ID NO: 569344 - protein, 14 aa, Homo sapiens
  CDR3 for beta chain variable domain of TCR clone 284672 (TRBV15, TRBJ2-4)
CATSRVTQGNIQYF

SEQ ID NO: 569345 - protein, 17 aa, Homo sapiens
  CDR3 for alpha chain variable domain of TCR clone 284673 (TRAV1-1, TRAJ4)
CALYNKLIFGAGTRLAV

SEQ ID NO: 569346 - protein, 17 aa, Homo sapiens
  CDR3 for beta chain variable domain of TCR clone 284673 (TRBV13, TRBJ2-3)
CASSLSRVAGGRNTQYF

SEQ ID NO: 569347 - protein, 14 aa, Homo sapiens
  CDR3 for alpha chain variable domain of TCR clone 284674 (TRAV8-2, TRAJ6)
CVVISAGGSDIPTF

SEQ ID NO: 569348 - protein, 16 aa, Homo sapiens
  CDR3 for beta chain variable domain of TCR clone 284674 (TRBV7-6, TRBJ2-6)
CASSLPGLSGANVLTF

SEQ ID NO: 569349 - protein, 16 aa, Homo sapiens
  CDR3 for alpha chain variable domain of TCR clone 284675 (TRAV38-1, TRAJ32)
CAFMKGGGGATNKLIF

SEQ ID NO: 569350 - protein, 14 aa, Homo sapiens
  CDR3 for beta chain variable domain of TCR clone 284675 (TRBV12-5, TRBJ2-5)
CASGSRTHQETQYF

SEQ ID NO: 569351 - protein, 11 aa, Homo sapiens
  CDR3 for alpha chain variable domain of TCR clone 284676 (TRAV35, TRAJ30)
CAGPGDDKIIF

SEQ ID NO: 569352 - protein, 15 aa, Homo sapiens
  CDR3 for beta chain variable domain of TCR clone 284676 (TRBV12-4, TRBJ2-5)
CASSPPTGLQETQYF

SEQ ID NO: 569353 - protein, 14 aa, Homo sapiens
  CDR3 for alpha chain variable domain of TCR clone 284677 (TRAV3, TRAJ20)
CAVRDIKFSDYKLF

SEQ ID NO: 569354 - protein, 15 aa, Homo sapiens
  CDR3 for beta chain variable domain of TCR clone 284677 (TRBV7-9, TRBJ1-6)
CASSSPGRGNSPLHF

SEQ ID NO: 569355 - protein, 13 aa, Homo sapiens
  CDR3 for alpha chain variable domain of TCR clone 284678 (TRAV1-1, TRAJ9)
CAAKNTGGFKTIF

SEQ ID NO: 569356 - protein, 19 aa, Homo sapiens
  CDR3 for beta chain variable domain of TCR clone 284678 (TRBV11-3, TRBJ2-1)
CASSLGTRKARSSYNEQFF

SEQ ID NO: 569357 - protein, 20 aa, Homo sapiens
  CDR3 for alpha chain variable domain of TCR clone 284679 (TRAV13-1, TRAJ10)
CAAKGHGRRKQTHLWDRHST

SEQ ID NO: 569358 - protein, 13 aa, Homo sapiens
  CDR3 for beta chain variable domain of TCR clone 284679 (TRBV20-1, TRBJ1-1)
CSARGGGNTEAFF

SEQ ID NO: 569359 - protein, 16 aa, Homo sapiens
  CDR3 for alpha chain variable domain of TCR clone 284680 (TRAV27, TRAJ34)
CSGGGLGDYNTDKLIF

SEQ ID NO: 569360 - protein, 15 aa, Homo sapiens
  CDR3 for beta chain variable domain of TCR clone 284680 (TRBV9, TRBJ1-4)
CASSVGGSTNEKLFF

SEQ ID NO: 569361 - protein, 16 aa, Homo sapiens
  CDR3 for alpha chain variable domain of TCR clone 284681 (TRAV30, TRAJ24)
CGTEIVDADSWGKFPF

SEQ ID NO: 569362 - protein, 14 aa, Homo sapiens
  CDR3 for beta chain variable domain of TCR clone 284681 (TRBV12-5, TRBJ2-5)
CASGSPTHQETQYF

SEQ ID NO: 569363 - protein, 11 aa, Homo sapiens
  CDR3 for alpha chain variable domain of TCR clone 284682 (TRAV23/DV6, TRAJ49)
FAVAPVTSSIL

SEQ ID NO: 569364 - protein, 14 aa, Homo sapiens
  CDR3 for beta chain variable domain of TCR clone 284682 (TRBV19, TRBJ2-1)
CASPTFVLSGEQFF

SEQ ID NO: 569365 - protein, 13 aa, Homo sapiens
  CDR3 for alpha chain variable domain of TCR clone 284683 (TRAV8-3, TRAJ4)
WVFYSGGYNKLIF

SEQ ID NO: 569366 - protein, 13 aa, Homo sapiens
  CDR3 for beta chain variable domain of TCR clone 284683 (TRBV12-4, TRBJ1-1)
CASSPGTGFEAFF

SEQ ID NO: 569367 - protein, 14 aa, Homo sapiens
  CDR3 for alpha chain variable domain of TCR clone 284684 (TRAV1-2, TRAJ16)
CAVNRFTDGQKLLF

SEQ ID NO: 569368 - protein, 13 aa, Homo sapiens
  CDR3 for beta chain variable domain of TCR clone 284684 (TRBV7-9, TRBJ1-2)
CASSLKQNYGYTF

SEQ ID NO: 569369 - protein, 11 aa, Homo sapiens
  CDR3 for alpha chain variable domain of TCR clone 284685 (TRAV16, TRAJ49)
CALRSGNQFYF

SEQ ID NO: 569370 - protein, 20 aa, Homo sapiens
  CDR3 for beta chain variable domain of TCR clone 284685 (TRBV28, TRBJ2-7)
CASSSGLAGVGTSSTSGRHQ

SEQ ID NO: 569371 - protein, 10 aa, Homo sapiens
  CDR3 for alpha chain variable domain of TCR clone 284686 (TRAV12-3, TRAJ18)
CAMSAEAQPW

SEQ ID NO: 569372 - protein, 16 aa, Homo sapiens
  CDR3 for beta chain variable domain of TCR clone 284686 (TRBV4-1, TRBJ2-3)
CASSQRAGGLTDTQYF

SEQ ID NO: 569373 - protein, 15 aa, Homo sapiens
  CDR3 for alpha chain variable domain of TCR clone 284687 (TRAV3, TRAJ22)
CAVRDRGGSARQLTF

SEQ ID NO: 569374 - protein, 13 aa, Homo sapiens
  CDR3 for beta chain variable domain of TCR clone 284687 (TRBV12-4, TRBJ1-4)
CASAMGHNEKLFF

SEQ ID NO: 569375 - protein, 11 aa, Homo sapiens
  CDR3 for alpha chain variable domain of TCR clone 284688 (TRAV21, TRAJ39)
LLVNAGNMLTF

SEQ ID NO: 569376 - protein, 16 aa, Homo sapiens
  CDR3 for beta chain variable domain of TCR clone 284688 (TRBV9, TRBJ2-7)
CASSVGLGGGTYEKYF

SEQ ID NO: 569377 - protein, 23 aa, Homo sapiens
  CDR3 for alpha chain variable domain of TCR clone 284689 (TRAV12-2, TRAJ36)
SLLIRDSQPSDSATLERANNLFF

SEQ ID NO: 569378 - protein, 12 aa, Homo sapiens
  CDR3 for beta chain variable domain of TCR clone 284689 (TRBV7-9)
CASSTDREKLFF

SEQ ID NO: 569379 - protein, 15 aa, Homo sapiens
  CDR3 for alpha chain variable domain of TCR clone 284690 (TRAV10, TRAJ44)
CVVSGATDTASKLTF

SEQ ID NO: 569380 - protein, 14 aa, Homo sapiens
  CDR3 for beta chain variable domain of TCR clone 284690 (TRBV12-4, TRBJ1-2)
CASSFVGTAYGYTF

SEQ ID NO: 569381 - protein, 13 aa, Homo sapiens
  CDR3 for alpha chain variable domain of TCR clone 284691 (TRAV24, TRAJ5)
CACCGAGRRALTF

SEQ ID NO: 569382 - protein, 13 aa, Homo sapiens
  CDR3 for beta chain variable domain of TCR clone 284691 (TRBV19, TRBJ1-2)
CASSVPGQDGYTC

SEQ ID NO: 569383 - protein, 18 aa, Homo sapiens
  CDR3 for alpha chain variable domain of TCR clone 284692 (TRAV13-1, TRAJ52)
CAASKRSAGGTSYGKLTF

SEQ ID NO: 569384 - protein, 17 aa, Homo sapiens
  CDR3 for beta chain variable domain of TCR clone 284692 (TRBV11-3, TRBJ2-4)
CASSSVGPGGHRNIQYF

SEQ ID NO: 569385 - protein, 12 aa, Homo sapiens
  CDR3 for alpha chain variable domain of TCR clone 284693 (TRAV12-2, TRAJ45)
CASGGGADGLTF

SEQ ID NO: 569386 - protein, 16 aa, Homo sapiens
  CDR3 for beta chain variable domain of TCR clone 284693 (TRBV19, TRBJ2-3)
CASSPGPLASTDTQYF

SEQ ID NO: 569387 - protein, 15 aa, Homo sapiens
  CDR3 for alpha chain variable domain of TCR clone 284694 (TRAV26-1, TRAJ29)
CIVRVEGSGNPPLVF

SEQ ID NO: 569388 - protein, 14 aa, Homo sapiens
  CDR3 for beta chain variable domain of TCR clone 284694 (TRBV18, TRBJ2-5)
CASSPGVSQETQYS

SEQ ID NO: 569389 - protein, 13 aa, Homo sapiens
  CDR3 for alpha chain variable domain of TCR clone 284695 (TRAV8-6, TRAJ49)
CAVITNTGNQFYF

SEQ ID NO: 569390 - protein, 14 aa, Homo sapiens
  CDR3 for beta chain variable domain of TCR clone 284695 (TRBV5-1, TRBJ2-7)
YASSRGESLYEQYF

SEQ ID NO: 569391 - protein, 16 aa, Homo sapiens
  CDR3 for alpha chain variable domain of TCR clone 284696 (TRAV26-1, TRAJ23)
CIVRVHPYNQGGKIIF

SEQ ID NO: 569392 - protein, 15 aa, Homo sapiens
  CDR3 for beta chain variable domain of TCR clone 284696 (TRBV5-7, TRBJ2-7)
CASSPYFEGSYEQYF

SEQ ID NO: 569393 - protein, 14 aa, Homo sapiens
  CDR3 for alpha chain variable domain of TCR clone 284697 (TRAV1-1, TRAJ27)
CAVIYNTNAGKSTF

SEQ ID NO: 569394 - protein, 14 aa, Homo sapiens
  CDR3 for beta chain variable domain of TCR clone 284697 (TRBV2, TRBJ1-5)
CASSGTVSNQPQHF

SEQ ID NO: 569395 - protein, 15 aa, Homo sapiens
  CDR3 for alpha chain variable domain of TCR clone 284698 (TRAV12-2, TRAJ43)
CAFDMRFGAGTRLTV

SEQ ID NO: 569396 - protein, 15 aa, Homo sapiens
  CDR3 for beta chain variable domain of TCR clone 284698 (TRBV29-1, TRBJ2-1)
CSGRDRKSSYNEQFF

SEQ ID NO: 569397 - protein, 10 aa, Homo sapiens
  CDR3 for alpha chain variable domain of TCR clone 284699 (TRAV2, TRAJ34)
CAVVNDKLIF

SEQ ID NO: 569398 - protein, 15 aa, Homo sapiens
  CDR3 for beta chain variable domain of TCR clone 284699 (TRBV3-1, TRBJ2-2)
CASSQDWTRAVELFF

SEQ ID NO: 569399 - protein, 13 aa, Homo sapiens
  CDR3 for alpha chain variable domain of TCR clone 284700 (TRAV2, TRAJ15)
CAVASQAGTALIF

SEQ ID NO: 569400 - protein, 15 aa, Homo sapiens
  CDR3 for beta chain variable domain of TCR clone 284700 (TRBV7-3, TRBJ2-2)
CASGETGQGTGELFF

SEQ ID NO: 569401 - protein, 14 aa, Homo sapiens
  CDR3 for alpha chain variable domain of TCR clone 284701 (TRAV29/DV5, TRAJ12)
CAATRMDSSYKLIF

SEQ ID NO: 569402 - protein, 15 aa, Homo sapiens
  CDR3 for beta chain variable domain of TCR clone 284701 (TRBV7-2, TRBJ2-1)
CASSLVAGGHNEQFF

SEQ ID NO: 569403 - protein, 12 aa, Homo sapiens
  CDR3 for alpha chain variable domain of TCR clone 284702 (TRAV12-3, TRAJ17)
CAMTLTGNKLTF

SEQ ID NO: 569404 - protein, 15 aa, Homo sapiens
  CDR3 for beta chain variable domain of TCR clone 284702 (TRBV20-1, TRBJ2-7)
CSARDRVAGMDKQYF

SEQ ID NO: 569405 - protein, 13 aa, Homo sapiens
  CDR3 for alpha chain variable domain of TCR clone 284703 (TRAV27, TRAJ45)
CRSSGGGADGLTF

SEQ ID NO: 569406 - protein, 17 aa, Homo sapiens
  CDR3 for beta chain variable domain of TCR clone 284703 (TRBV13, TRBJ2-7)
CASSLKPGASGTYEQYF

SEQ ID NO: 569407 - protein, 17 aa, Homo sapiens
  CDR3 for alpha chain variable domain of TCR clone 284704 (TRAV12-2, TRAJ52)
CAVNKGAGGTSYGKLTF

SEQ ID NO: 569408 - protein, 15 aa, Homo sapiens
  CDR3 for beta chain variable domain of TCR clone 284704 (TRBV6-6, TRBJ2-7)
CASSYSYGGSYEQYF

SEQ ID NO: 569409 - protein, 18 aa, Homo sapiens
  CDR3 for alpha chain variable domain of TCR clone 284705 (TRAV12-3, TRAJ52)
CAMSVGGAGGTSYGKLTF

SEQ ID NO: 569410 - protein, 16 aa, Homo sapiens
  CDR3 for beta chain variable domain of TCR clone 284705 (TRBV6-3, TRBJ2-6)
CASSYGPGAGANVLTF

SEQ ID NO: 569411 - protein, 10 aa, Homo sapiens
  CDR3 for alpha chain variable domain of TCR clone 284706 (TRAV17, TRAJ52)
SATSYGKLTF

SEQ ID NO: 569412 - protein, 15 aa, Homo sapiens
  CDR3 for beta chain variable domain of TCR clone 284706 (TRBV2, TRBJ2-1)
CASSEEREGDNEQFF

SEQ ID NO: 569413 - protein, 18 aa, Homo sapiens
  CDR3 for alpha chain variable domain of TCR clone 284707 (TRAV13-1, TRAJ52)
CAAGKRSTGGTSYGKLTF

SEQ ID NO: 569414 - protein, 13 aa, Homo sapiens
  CDR3 for beta chain variable domain of TCR clone 284707 (TRBV12-4, TRBJ1-2)
CASSLRQGKGYTF

SEQ ID NO: 569415 - protein, 15 aa, Homo sapiens
  CDR3 for alpha chain variable domain of TCR clone 284708 (TRAV20, TRAJ4)
CAVQVFSGGYNKLIF

SEQ ID NO: 569416 - protein, 13 aa, Homo sapiens
  CDR3 for beta chain variable domain of TCR clone 284708 (TRBV19, TRBJ1-2)
CASSVPGQDGYTF

SEQ ID NO: 569417 - protein, 11 aa, Homo sapiens
  CDR3 for alpha chain variable domain of TCR clone 284709 (TRAV12-3, TRAJ27)
CAVANAGKSTF

SEQ ID NO: 569418 - protein, 16 aa, Homo sapiens
  CDR3 for beta chain variable domain of TCR clone 284709 (TRBV5-4, TRBJ2-3)
CASQQPGAGGADTQYF

SEQ ID NO: 569419 - protein, 14 aa, Homo sapiens
  CDR3 for alpha chain variable domain of TCR clone 284710 (TRAV1-2, TRAJ8)
CAVREDTGFQKLVF

SEQ ID NO: 569420 - protein, 15 aa, Homo sapiens
  CDR3 for beta chain variable domain of TCR clone 284710 (TRBV5-8, TRBJ1-5)
CASSLVRTGNQPQHF

SEQ ID NO: 569421 - protein, 14 aa, Homo sapiens
  CDR3 for alpha chain variable domain of TCR clone 284711 (TRAV1-2, TRAJ16)
CAVNRLSDGQKLLF

SEQ ID NO: 569422 - protein, 10 aa, Homo sapiens
  CDR3 for beta chain variable domain of TCR clone 284711 (TRBV20-1, TRBJ1-4)
PQGANEKLFF

SEQ ID NO: 569423 - protein, 12 aa, Homo sapiens
  CDR3 for alpha chain variable domain of TCR clone 284712 (TRAV13-1, TRAJ49)
CAASSTGNQFYF

SEQ ID NO: 569424 - protein, 14 aa, Homo sapiens
  CDR3 for beta chain variable domain of TCR clone 284712 (TRBV7-2, TRBJ2-5)
CASRPAGNQETQYF

SEQ ID NO: 569425 - protein, 15 aa, Homo sapiens
  CDR3 for alpha chain variable domain of TCR clone 284713 (TRAV27, TRAJ38)
CAGRFNAGNNRKLIW

SEQ ID NO: 569426 - protein, 13 aa, Homo sapiens
  CDR3 for beta chain variable domain of TCR clone 284713 (TRBV12-5, TRBJ2-3)
CASQNRGADTQYF

SEQ ID NO: 569427 - protein, 14 aa, Homo sapiens
  CDR3 for alpha chain variable domain of TCR clone 284714 (TRAV13-1, TRAJ44)
CAAKATGTASKLTF

SEQ ID NO: 569428 - protein, 15 aa, Homo sapiens
  CDR3 for beta chain variable domain of TCR clone 284714 (TRBV19, TRBJ1-2)
CASGRGGGGGYGYTF

SEQ ID NO: 569429 - protein, 16 aa, Homo sapiens
  CDR3 for alpha chain variable domain of TCR clone 284715 (TRAV12-2, TRAJ40)
CAVIRGGTSGTYKYIF

SEQ ID NO: 569430 - protein, 15 aa, Homo sapiens
  CDR3 for beta chain variable domain of TCR clone 284715 (TRBV7-9, TRBJ1-4)
CASSARTGGNEKLFF

SEQ ID NO: 569431 - protein, 13 aa, Homo sapiens
  CDR3 for alpha chain variable domain of TCR clone 284716 (TRAV2, TRAJ40)
CAVVTSGTYKYIF

SEQ ID NO: 569432 - protein, 14 aa, Homo sapiens
  CDR3 for beta chain variable domain of TCR clone 284716 (TRBV19, TRBJ2-1)
CASPTVVSSGEQFF

SEQ ID NO: 569433 - protein, 12 aa, Homo sapiens
  CDR3 for alpha chain variable domain of TCR clone 284717 (TRAV36/DV7, TRAJ54)
CAVVRGAQKLVS

SEQ ID NO: 569434 - protein, 14 aa, Homo sapiens
  CDR3 for beta chain variable domain of TCR clone 284717 (TRBV4-2, TRBJ2-1)
CASGLDRAYNEQFF

SEQ ID NO: 569435 - protein, 13 aa, Homo sapiens
  CDR3 for alpha chain variable domain of TCR clone 284718 (TRAV21, TRAJ27)
CAARPGNACKSTF

SEQ ID NO: 569436 - protein, 14 aa, Homo sapiens
  CDR3 for beta chain variable domain of TCR clone 284718 (TRBV4-1, TRBJ2-2)
CASSQAVNTGELFF

SEQ ID NO: 569437 - protein, 16 aa, Homo sapiens
  CDR3 for alpha chain variable domain of TCR clone 284719 (TRAV17, TRAJ28)
CATASVSGAGSYQLTF

SEQ ID NO: 569438 - protein, 14 aa, Homo sapiens
  CDR3 for beta chain variable domain of TCR clone 284719 (TRBV5-1, TRBJ2-5)
CASSLAGKQETQYF

SEQ ID NO: 569439 - protein, 13 aa, Homo sapiens
  CDR3 for alpha chain variable domain of TCR clone 284720 (TRAV13-2, TRAJ13)
CAERPGGYQKVTF

SEQ ID NO: 569440 - protein, 15 aa, Homo sapiens
  CDR3 for beta chain variable domain of TCR clone 284720 (TRBV11-3, TRBJ2-7)
CASSPGPASTYEQYF

SEQ ID NO: 569441 - protein, 12 aa, Homo sapiens
  CDR3 for alpha chain variable domain of TCR clone 284721 (TRAV29/DV5, TRAJ49)
CAATDTGNQFYF

SEQ ID NO: 569442 - protein, 15 aa, Homo sapiens
  CDR3 for beta chain variable domain of TCR clone 284721 (TRBV7-9, TRBJ1-4)
CASSRTGGFNEKLFF

SEQ ID NO: 569443 - protein, 12 aa, Homo sapiens
  CDR3 for alpha chain variable domain of TCR clone 284722 (TRAV21, TRAJ33)
CAKMDSNYQLIW

SEQ ID NO: 569444 - protein, 17 aa, Homo sapiens
  CDR3 for beta chain variable domain of TCR clone 284722 (TRBV20-1, TRBJ2-2)
CSASGSGQGGLTWELFF

SEQ ID NO: 569445 - protein, 15 aa, Homo sapiens
  CDR3 for alpha chain variable domain of TCR clone 284723 (TRAV3, TRAJ22)
CAVRDRGGSARQLTF

SEQ ID NO: 569446 - protein, 13 aa, Homo sapiens
  CDR3 for beta chain variable domain of TCR clone 284723 (TRBV7-9, TRBJ2-5)
CASSSTGTGTQYF

SEQ ID NO: 569447 - protein, 15 aa, Homo sapiens
  CDR3 for alpha chain variable domain of TCR clone 284724 (TRAV25, TRAJ52)
CAGTSGGTSYGKLTF

SEQ ID NO: 569448 - protein, 15 aa, Homo sapiens
  CDR3 for beta chain variable domain of TCR clone 284724 (TRBV6-3, TRBJ2-7)
CASSSPGTVFYEQYF

SEQ ID NO: 569449 - protein, 12 aa, Homo sapiens
  CDR3 for alpha chain variable domain of TCR clone 284725 (TRAV38-2/DV8, TRAJ43)
CAYTINNNDMRF

SEQ ID NO: 569450 - protein, 14 aa, Homo sapiens
  CDR3 for beta chain variable domain of TCR clone 284725 (TRBV11-2, TRBJ2-5)
CASSRTGGIETQYF

SEQ ID NO: 569451 - protein, 15 aa, Homo sapiens
  CDR3 for alpha chain variable domain of TCR clone 284726 (TRAV17, TRAJ23)
CDTDAEDNQGGKLIF

SEQ ID NO: 569452 - protein, 12 aa, Homo sapiens
  CDR3 for beta chain variable domain of TCR clone 284726 (TRBV2, TRBJ2-1)
CAKREGYNEQFF

SEQ ID NO: 569453 - protein, 15 aa, Homo sapiens
  CDR3 for alpha chain variable domain of TCR clone 284727 (TRAV3, TRAJ22)
CAVRDRGGSARQLIF

SEQ ID NO: 569454 - protein, 16 aa, Homo sapiens
  CDR3 for beta chain variable domain of TCR clone 284727 (TRBV5-4, TRBJ2-3)
CASQQPGAGGSDTQYF

SEQ ID NO: 569455 - protein, 14 aa, Homo sapiens
  CDR3 for alpha chain variable domain of TCR clone 284728 (TRAV4, TRAJ26)
CLVGPHNYGQNFVF

SEQ ID NO: 569456 - protein, 15 aa, Homo sapiens
  CDR3 for beta chain variable domain of TCR clone 284728 (TRBV27, TRBJ2-1)
CASSNGGGSSNEQFF

SEQ ID NO: 569457 - protein, 18 aa, Homo sapiens
  CDR3 for alpha chain variable domain of TCR clone 284729 (TRAV12-3, TRAJ52)
CAMSRTNAGGTSYGKLTF

SEQ ID NO: 569458 - protein, 13 aa, Homo sapiens
  CDR3 for beta chain variable domain of TCR clone 284729 (TRBV20-1, TRBJ1-1)
CSARGGGNTEAFF

SEQ ID NO: 569459 - protein, 17 aa, Homo sapiens
  CDR3 for alpha chain variable domain of TCR clone 284730 (TRAV2, TRAJ22)
ILQVRETDAAEQRQLTF

SEQ ID NO: 569460 - protein, 16 aa, Homo sapiens
  CDR3 for beta chain variable domain of TCR clone 284730 (TRBV2, TRBJ2-5)
CASSETQGVGEETQYF

SEQ ID NO: 569461 - protein, 13 aa, Homo sapiens
  CDR3 for alpha chain variable domain of TCR clone 284731 (TRAV12-1, TRAJ34)
CGEPLRNTDKLIF

SEQ ID NO: 569462 - protein, 20 aa, Homo sapiens
  CDR3 for beta chain variable domain of TCR clone 284731 (TRBV28, TRBJ2-1)
CPSTPIGRSPGLAGGNEQFF

SEQ ID NO: 569463 - protein, 12 aa, Homo sapiens
  CDR3 for alpha chain variable domain of TCR clone 284732 (TRAV21, TRAJ11)
CAATSGYSTLTF

SEQ ID NO: 569464 - protein, 14 aa, Homo sapiens
  CDR3 for beta chain variable domain of TCR clone 284732 (TRBV20-1, TRBJ2-7)
CSAPELAGVGELYF

SEQ ID NO: 569465 - protein, 11 aa, Homo sapiens
  CDR3 for alpha chain variable domain of TCR clone 284733 (TRAV39, TRAJ33)
CSVDPWIATIS

SEQ ID NO: 569466 - protein, 16 aa, Homo sapiens
  CDR3 for beta chain variable domain of TCR clone 284733 (TRBV18, TRBJ1-4)
CASSPLVGDRAEKLFF

SEQ ID NO: 569467 - protein, 12 aa, Homo sapiens
  CDR3 for alpha chain variable domain of TCR clone 284734 (TRAV13-2, TRAJ23)
CAERHRGGKLIF

SEQ ID NO: 569468 - protein, 14 aa, Homo sapiens
  CDR3 for beta chain variable domain of TCR clone 284734 (TRBV7-2, TRBJ1-2)
CASSRGGTNYGYTF

SEQ ID NO: 569469 - protein, 14 aa, Homo sapiens
  CDR3 for alpha chain variable domain of TCR clone 284735 (TRAV1-2, TRAJ16)
CAVNRFSDGQKLLF

SEQ ID NO: 569470 - protein, 15 aa, Homo sapiens
  CDR3 for beta chain variable domain of TCR clone 284735 (TRBV19, TRBJ2-2)
CQPISRDRGHRGAVF

SEQ ID NO: 569471 - protein, 13 aa, Homo sapiens
  CDR3 for alpha chain variable domain of TCR clone 284736 (TRAV21, TRAJ45)
CAVMGGGADGLTF

SEQ ID NO: 569472 - protein, 20 aa, Homo sapiens
  CDR3 for beta chain variable domain of TCR clone 284736 (TRBV7-8, TRBJ2-1)
CASSLAHRLAGVRAYNEQFF

SEQ ID NO: 569473 - protein, 14 aa, Homo sapiens
  CDR3 for alpha chain variable domain of TCR clone 284737 (TRAV1-2, TRAJ16)
CAVNRFLGGQKLLF

SEQ ID NO: 569474 - protein, 12 aa, Homo sapiens
  CDR3 for beta chain variable domain of TCR clone 284737 (TRBV11-2, TRBJ2-2)
CASSLGGGELFF

SEQ ID NO: 569475 - protein, 14 aa, Homo sapiens
  CDR3 for alpha chain variable domain of TCR clone 284738 (TRAV13-1, TRAJ53)
CAASISGSNYKLTF

SEQ ID NO: 569476 - protein, 15 aa, Homo sapiens
  CDR3 for beta chain variable domain of TCR clone 284738 (TRBV4-1, TRBJ1-4)
CASIDTGGTNEKLFF

SEQ ID NO: 569477 - protein, 15 aa, Homo sapiens
  CDR3 for alpha chain variable domain of TCR clone 284739 (TRAV27, TRAJ28)
ASTSHSGAGSYQLTF

SEQ ID NO: 569478 - protein, 13 aa, Homo sapiens
  CDR3 for beta chain variable domain of TCR clone 284739 (TRBV7-9, TRBJ1-2)
CASSLKQNYGYTF

SEQ ID NO: 569479 - protein, 14 aa, Homo sapiens
  CDR3 for alpha chain variable domain of TCR clone 284740 (TRAV12-2, TRAJ45)
CAVNKGGGADGLTF

SEQ ID NO: 569480 - protein, 13 aa, Homo sapiens
  CDR3 for beta chain variable domain of TCR clone 284740 (TRBV3-1, TRBJ1-5)
CAITRRDGQPQHF

SEQ ID NO: 569481 - protein, 13 aa, Homo sapiens
  CDR3 for alpha chain variable domain of TCR clone 284741 (TRAV21, TRAJ27)
CAARPGNAGKSTF

SEQ ID NO: 569482 - protein, 13 aa, Homo sapiens
  CDR3 for beta chain variable domain of TCR clone 284741 (TRBV19, TRBJ1-3)
CASRLSLGNTIYF

SEQ ID NO: 569483 - protein, 15 aa, Homo sapiens
  CDR3 for alpha chain variable domain of TCR clone 284742 (TRAV23/DV6, TRAJ18)
CAARYRGSTLWRLYF

SEQ ID NO: 569484 - protein, 13 aa, Homo sapiens
  CDR3 for beta chain variable domain of TCR clone 284742 (TRBV7-2, TRBJ2-7)
CASSSPSGSEQYL

SEQ ID NO: 569485 - protein, 13 aa, Homo sapiens
  CDR3 for alpha chain variable domain of TCR clone 284743 (TRAV2, TRAJ40)
CAVVTSGTYKYIF

SEQ ID NO: 569486 - protein, 18 aa, Homo sapiens
  CDR3 for beta chain variable domain of TCR clone 284743 (TRBV18, TRBJ2-2)
CASSPRRTGGIGTGELFF

SEQ ID NO: 569487 - protein, 12 aa, Homo sapiens
  CDR3 for alpha chain variable domain of TCR clone 284744 (TRAV12-3, TRAJ17)
CAMTLTGNKLTF

SEQ ID NO: 569488 - protein, 20 aa, Homo sapiens
  CDR3 for beta chain variable domain of TCR clone 284744 (TRBV19, TRBJ2-1)
WASSISRTVTSTRLNNEQFF

SEQ ID NO: 569489 - protein, 15 aa, Homo sapiens
  CDR3 for alpha chain variable domain of TCR clone 284745 (TRAV12-1, TRAJ9)
CVVSFGDTGVFKTIF

SEQ ID NO: 569490 - protein, 12 aa, Homo sapiens
  CDR3 for beta chain variable domain of TCR clone 284745 (TRBV14, TRBJ2-7)
CASSLYKDEQYF

SEQ ID NO: 569491 - protein, 12 aa, Homo sapiens
  CDR3 for alpha chain variable domain of TCR clone 284746 (TRAV21, TRAJ37)
CAVRGNTGKLIF

SEQ ID NO: 569492 - protein, 14 aa, Homo sapiens
  CDR3 for beta chain variable domain of TCR clone 284746 (TRBV19, TRBJ2-1)
CTSEVTGARNEQFF

SEQ ID NO: 569493 - protein, 14 aa, Homo sapiens
  CDR3 for alpha chain variable domain of TCR clone 284747 (TRAV1-2, TRAJ8)
CAVREDTGFQKLVF

SEQ ID NO: 569494 - protein, 12 aa, Homo sapiens
  CDR3 for beta chain variable domain of TCR clone 284747 (TRBV11-2, TRBJ2-2)
CASRLGGGELFF

SEQ ID NO: 569495 - protein, 16 aa, Homo sapiens
  CDR3 for alpha chain variable domain of TCR clone 284748 (TRAV26-2, TRAJ45)
CTTASPIGGGADGLTF

SEQ ID NO: 569496 - protein, 20 aa, Homo sapiens
  CDR3 for beta chain variable domain of TCR clone 284748 (TRBV28, TRBJ2-1)
CASTPIGRSSGLAGGNEQFF

SEQ ID NO: 569497 - protein, 14 aa, Homo sapiens
  CDR3 for alpha chain variable domain of TCR clone 284749 (TRAV25, TRAJ27)
CAGPGNTNAGKSTF

SEQ ID NO: 569498 - protein, 13 aa, Homo sapiens
  CDR3 for beta chain variable domain of TCR clone 284749 (TRBV4-1, TRBJ2-2)
CASSQENTGELFF

SEQ ID NO: 569499 - protein, 11 aa, Homo sapiens
  CDR3 for alpha chain variable domain of TCR clone 284750 (TRAV1-1, TRAJ23)
CAVHQVGKLIF

SEQ ID NO: 569500 - protein, 20 aa, Homo sapiens
  CDR3 for beta chain variable domain of TCR clone 284750 (TRBV7-8, TRBJ2-2)
CASSHLFPGPTIHITGELFF

SEQ ID NO: 569501 - protein, 13 aa, Homo sapiens
  CDR3 for alpha chain variable domain of TCR clone 284751 (TRAV21, TRAJ36)
CAVIKTGANNLFF

SEQ ID NO: 569502 - protein, 18 aa, Homo sapiens
  CDR3 for beta chain variable domain of TCR clone 284751 (TRBV11-2, TRBJ2-6)
CASSLNPFLGTGANVLTF

SEQ ID NO: 569503 - protein, 13 aa, Homo sapiens
  CDR3 for alpha chain variable domain of TCR clone 284752 (TRAV27, TRAJ3)
ASLRGSSASKIIF

SEQ ID NO: 569504 - protein, 14 aa, Homo sapiens
  CDR3 for beta chain variable domain of TCR clone 284752 (TRBV7-3, TRBJ2-1)
CASSLAGGTNEQFF

SEQ ID NO: 569505 - protein, 14 aa, Homo sapiens
  CDR3 for alpha chain variable domain of TCR clone 284753 (TRAV12-2, TRAJ23)
CAVNRMNQGGKLIF

SEQ ID NO: 569506 - protein, 13 aa, Homo sapiens
  CDR3 for beta chain variable domain of TCR clone 284753 (TRBV2, TRBJ1-1)
CASNLLRNTEAFF

SEQ ID NO: 569507 - protein, 21 aa, Homo sapiens
  CDR3 for alpha chain variable domain of TCR clone 284754 (TRAV1-1, TRAJ6)
CLLLLRCERLERTGGSYIPTF

SEQ ID NO: 569508 - protein, 13 aa, Homo sapiens
  CDR3 for beta chain variable domain of TCR clone 284754 (TRBV10-2, TRBJ2-7)
CASGASGGYEQFF

SEQ ID NO: 569509 - protein, 14 aa, Homo sapiens
  CDR3 for alpha chain variable domain of TCR clone 284755 (TRAV2, TRAJ9)
CAVEDRSGGFKTIF

SEQ ID NO: 569510 - protein, 17 aa, Homo sapiens
  CDR3 for beta chain variable domain of TCR clone 284755 (TRBV20-1, TRBJ2-3)
CSASLLGRGGSADTQYF

SEQ ID NO: 569511 - protein, 15 aa, Homo sapiens
  CDR3 for alpha chain variable domain of TCR clone 284756 (TRAV4, TRAJ39)
CLVGPNNNAGNMLTF

SEQ ID NO: 569512 - protein, 11 aa, Homo sapiens
  CDR3 for beta chain variable domain of TCR clone 284756 (TRBV28, TRBJ1-5)
CASRGGQPQHF

SEQ ID NO: 569513 - protein, 13 aa, Homo sapiens
  CDR3 for alpha chain variable domain of TCR clone 284757 (TRAV17, TRAJ5)
CAPMDTGRRALTF

SEQ ID NO: 569514 - protein, 15 aa, Homo sapiens
  CDR3 for beta chain variable domain of TCR clone 284757 (TRBV19, TRBJ1-2)
CASSVGQVLNYGYTF

SEQ ID NO: 569515 - protein, 11 aa, Homo sapiens
  CDR3 for alpha chain variable domain of TCR clone 284758 (TRAV1-1, TRAJ23)
CAVRQGGKLSF

SEQ ID NO: 569516 - protein, 17 aa, Homo sapiens
  CDR3 for beta chain variable domain of TCR clone 284758 (TRBV20-1, TRBJ2-4)
CSARDWASGGRENIQYF

SEQ ID NO: 569517 - protein, 13 aa, Homo sapiens
  CDR3 for alpha chain variable domain of TCR clone 284759 (TRAV27, TRAJ45)
CRSSGGGADGLTF

SEQ ID NO: 569518 - protein, 15 aa, Homo sapiens
  CDR3 for beta chain variable domain of TCR clone 284759 (TRBV12-4, TRBJ2-5)
CASNTLAGYQETQYF

SEQ ID NO: 569519 - protein, 20 aa, Homo sapiens
  CDR3 for alpha chain variable domain of TCR clone 284760 (TRAV25, TRAJ33)
TATQTTDVGTSRGSNYQLIL

SEQ ID NO: 569520 - protein, 14 aa, Homo sapiens
  CDR3 for beta chain variable domain of TCR clone 284760 (TRBV7-2, TRBJ2-5)
CASSTGGELKTQYF

SEQ ID NO: 569521 - protein, 14 aa, Homo sapiens
  CDR3 for alpha chain variable domain of TCR clone 284761 (TRAV26-1, TRAJ34)
CIVRESYNTDKRIF

SEQ ID NO: 569522 - protein, 13 aa, Homo sapiens
  CDR3 for beta chain variable domain of TCR clone 284761 (TRBV19, TRBJ2-1)
CATSRGVYNEQFF

SEQ ID NO: 569523 - protein, 11 aa, Homo sapiens
  CDR3 for alpha chain variable domain of TCR clone 284762 (TRAV17, TRAJ39)
CATNPYNMLTF

SEQ ID NO: 569524 - protein, 13 aa, Homo sapiens
  CDR3 for beta chain variable domain of TCR clone 284762 (TRBV7-8, TRBJ2-1)
CASTREAVDEQFF

SEQ ID NO: 569525 - protein, 14 aa, Homo sapiens
  CDR3 for alpha chain variable domain of TCR clone 284763 (TRAV1-2, TRAJ8)
CAVSEDTGFQKLVF

SEQ ID NO: 569526 - protein, 12 aa, Homo sapiens
  CDR3 for beta chain variable domain of TCR clone 284763 (TRBV11-2, TRBJ2-1)
CASSPGNNEQFF

SEQ ID NO: 569527 - protein, 21 aa, Homo sapiens
  CDR3 for alpha chain variable domain of TCR clone 284764 (TRAV8-4, TRAJ20)
CAVTNVLTTTSSALEPEQQQL

SEQ ID NO: 569528 - protein, 15 aa, Homo sapiens
  CDR3 for beta chain variable domain of TCR clone 284764 (TRBV28, TRBJ2-4)
CAAGSGTLLMGIQYF

SEQ ID NO: 569529 - protein, 16 aa, Homo sapiens
  CDR3 for alpha chain variable domain of TCR clone 284765 (TRAV16, TRAJ54)
CALSPPLIQGAKKLVF

SEQ ID NO: 569530 - protein, 13 aa, Homo sapiens
  CDR3 for beta chain variable domain of TCR clone 284765 (TRBV7-9, TRBJ1-2)
CASSLKQNYGYTF

SEQ ID NO: 569531 - protein, 17 aa, Homo sapiens
  CDR3 for alpha chain variable domain of TCR clone 284766 (TRAV23/DV6, TRAJ9)
CAASLSPPNPGGFKTIF

SEQ ID NO: 569532 - protein, 14 aa, Homo sapiens
  CDR3 for beta chain variable domain of TCR clone 284766 (TRBV11-2, TRBJ2-5)
CASSRTGGIETQYF

SEQ ID NO: 569533 - protein, 13 aa, Homo sapiens
  CDR3 for alpha chain variable domain of TCR clone 284767 (TRAV30, TRAJ16)
CGTFGGDGQKLLF

SEQ ID NO: 569534 - protein, 14 aa, Homo sapiens
  CDR3 for beta chain variable domain of TCR clone 284767 (TRBV19, TRBJ2-1)
CASPTFVLSGEQFF

SEQ ID NO: 569535 - protein, 13 aa, Homo sapiens
  CDR3 for alpha chain variable domain of TCR clone 284768 (TRAV2, TRAJ40)
CAVVTSGTYKYTF

SEQ ID NO: 569536 - protein, 14 aa, Homo sapiens
  CDR3 for beta chain variable domain of TCR clone 284768 (TRBV19, TRBJ2-1)
CASPTFVLSGEQFC

SEQ ID NO: 569537 - protein, 12 aa, Homo sapiens
  CDR3 for alpha chain variable domain of TCR clone 284769 (TRAV10, TRAJ43)
CVVVRVGNDMRL

SEQ ID NO: 569538 - protein, 13 aa, Homo sapiens
  CDR3 for beta chain variable domain of TCR clone 284769 (TRBV7-2, TRBJ1-1)
CASNLKGAKVAFF

SEQ ID NO: 569539 - protein, 19 aa, Homo sapiens
  CDR3 for alpha chain variable domain of TCR clone 284770 (TRAV26-1, TRAJ22)
CCVLLHRWVFSGSARQLTF

SEQ ID NO: 569540 - protein, 13 aa, Homo sapiens
  CDR3 for beta chain variable domain of TCR clone 284770 (TRBV6-5, TRBJ1-4)
CASSEGVREKLFF

SEQ ID NO: 569541 - protein, 11 aa, Homo sapiens
  CDR3 for alpha chain variable domain of TCR clone 284771 (TRAV17, TRAJ31)
CATDRTARLMF

SEQ ID NO: 569542 - protein, 14 aa, Homo sapiens
  CDR3 for beta chain variable domain of TCR clone 284771 (TRBV7-2, TRBJ1-1)
CASSFLTGTTEAFF

SEQ ID NO: 569543 - protein, 12 aa, Homo sapiens
  CDR3 for alpha chain variable domain of TCR clone 284772 (TRAV36/DV7, TRAJ54)
CPVVRGAHKLVF

SEQ ID NO: 569544 - protein, 14 aa, Homo sapiens
  CDR3 for beta chain variable domain of TCR clone 284772 (TRBV7-3, TRBJ1-1)
CASSLKGGNTEAFF

SEQ ID NO: 569545 - protein, 14 aa, Homo sapiens
  CDR3 for alpha chain variable domain of TCR clone 284773 (TRAV12-1, TRAJ8)
CVVNSNTGFQKLEF

SEQ ID NO: 569546 - protein, 16 aa, Homo sapiens
  CDR3 for beta chain variable domain of TCR clone 284773 (TRBV20-1, TRBJ2-2)
CSARDDRVGLTGELFF

SEQ ID NO: 569547 - protein, 15 aa, Homo sapiens
  CDR3 for alpha chain variable domain of TCR clone 284774 (TRAV8-3, TRAJ27)
CAVGPSKTNVGKLTF

SEQ ID NO: 569548 - protein, 15 aa, Homo sapiens
  CDR3 for beta chain variable domain of TCR clone 284774 (TRBV7-2, TRBJ2-1)
CASSSGLAGGNEQFF

SEQ ID NO: 569549 - protein, 15 aa, Homo sapiens
  CDR3 for alpha chain variable domain of TCR clone 284775 (TRAV8-2, TRAJ40)
CVVLGTTSGTYKYIF

SEQ ID NO: 569550 - protein, 16 aa, Homo sapiens
  CDR3 for beta chain variable domain of TCR clone 284775 (TRBV7-3, TRBJ2-1)
CASSVVGYRSYNEQFF

SEQ ID NO: 569551 - protein, 17 aa, Homo sapiens
  CDR3 for alpha chain variable domain of TCR clone 284776 (TRAV3, TRAJ12)
CAVRDGGRMDSSYKLIF

SEQ ID NO: 569552 - protein, 17 aa, Homo sapiens
  CDR3 for beta chain variable domain of TCR clone 284776 (TRBV2, TRBJ2-1)
CASSRPGQGVMVNEQFF

SEQ ID NO: 569553 - protein, 15 aa, Homo sapiens
  CDR3 for alpha chain variable domain of TCR clone 284777 (TRAV2, TRAJ9)
CAVEARGTGGFQTIF

SEQ ID NO: 569554 - protein, 13 aa, Homo sapiens
  CDR3 for beta chain variable domain of TCR clone 284777 (TRBV19, TRBJ1-2)
CASSVPGQDGYTF

SEQ ID NO: 569555 - protein, 17 aa, Homo sapiens
  CDR3 for alpha chain variable domain of TCR clone 284778 (TRAV3, TRAJ6)
SAVRDGPREGGSYIPTF

SEQ ID NO: 569556 - protein, 14 aa, Homo sapiens
  CDR3 for beta chain variable domain of TCR clone 284778 (TRBV7-2, TRBJ2-7)
CASSPKTSFYEQYF

SEQ ID NO: 569557 - protein, 16 aa, Homo sapiens
  CDR3 for alpha chain variable domain of TCR clone 284779 (TRAV3, TRAJ37)
CAVRGKGSGNTGKPIF

SEQ ID NO: 569558 - protein, 15 aa, Homo sapiens
  CDR3 for beta chain variable domain of TCR clone 284779 (TRBV20-1, TRBJ2-1)
CSARGGTRYYNEQFF

SEQ ID NO: 569559 - protein, 16 aa, Homo sapiens
  CDR3 for alpha chain variable domain of TCR clone 284780 (TRAV4, TRAJ22)
CLVGDLYSSSARQLTF

SEQ ID NO: 569560 - protein, 16 aa, Homo sapiens
  CDR3 for beta chain variable domain of TCR clone 284780 (TRBV7-9, TRBJ2-3)
CASSPWREVGTDTQYF

SEQ ID NO: 569561 - protein, 12 aa, Homo sapiens
  CDR3 for alpha chain variable domain of TCR clone 284781 (TRAV21, TRAJ6)
CAGKGGSYIPTF

SEQ ID NO: 569562 - protein, 13 aa, Homo sapiens
  CDR3 for beta chain variable domain of TCR clone 284781 (TRBV11-2, TRBJ1-1)
CASSFTENTEAFF

SEQ ID NO: 569563 - protein, 16 aa, Homo sapiens
  CDR3 for alpha chain variable domain of TCR clone 284782 (TRAV26-1, )
CIDIQNPDPAVYQLID

SEQ ID NO: 569564 - protein, 19 aa, Homo sapiens
  CDR3 for beta chain variable domain of TCR clone 284782 (TRBV19, TRBJ2-5)
CASSIGQVTDLFLGETQYF

SEQ ID NO: 569565 - protein, 15 aa, Homo sapiens
  CDR3 for alpha chain variable domain of TCR clone 284783 (TRAV8-6, TRAJ11)
CAVSDRRSGYSTLTF

SEQ ID NO: 569566 - protein, 15 aa, Homo sapiens
  CDR3 for beta chain variable domain of TCR clone 284783 (TRBV7-3, TRBJ2-1)
CASSPTGGSRNEQLF

SEQ ID NO: 569567 - protein, 15 aa, Homo sapiens
  CDR3 for alpha chain variable domain of TCR clone 284784 (TRAV26-1, TRAJ29)
CIVRVEGSGNTPLVF

SEQ ID NO: 569568 - protein, 14 aa, Homo sapiens
  CDR3 for beta chain variable domain of TCR clone 284784 (TRBV25-1, TRBJ1-1)
CASTHLGVNTEAFF

SEQ ID NO: 569569 - protein, 15 aa, Homo sapiens
  CDR3 for alpha chain variable domain of TCR clone 284785 (TRAV25, TRAJ52)
CAGTSGGTSYGKLTF

SEQ ID NO: 569570 - protein, 14 aa, Homo sapiens
  CDR3 for beta chain variable domain of TCR clone 284785 (TRBV20-1, TRBJ2-5)
CSARDGRAGETQYF

SEQ ID NO: 569571 - protein, 11 aa, Homo sapiens
  CDR3 for alpha chain variable domain of TCR clone 284786 (TRAV12-1, TRAJ30)
CVVNGQDKIIF

SEQ ID NO: 569572 - protein, 13 aa, Homo sapiens
  CDR3 for beta chain variable domain of TCR clone 284786 (TRBV19, TRBJ1-2)
CASSVPGQDGYSF

SEQ ID NO: 569573 - protein, 13 aa, Homo sapiens
  CDR3 for alpha chain variable domain of TCR clone 284787 (TRAV21, TRAJ27)
CAARPGNAGKSTF

SEQ ID NO: 569574 - protein, 14 aa, Homo sapiens
  CDR3 for beta chain variable domain of TCR clone 284787 (TRBV11-2, TRBJ2-7)
WASSLGAGAYEQYF

SEQ ID NO: 569575 - protein, 11 aa, Homo sapiens
  CDR3 for alpha chain variable domain of TCR clone 284788 (TRAV2, TRAJ13)
CASGGYQKVTF

SEQ ID NO: 569576 - protein, 14 aa, Homo sapiens
  CDR3 for beta chain variable domain of TCR clone 284788 (TRBV7-3, TRBJ2-1)
CAISLAGGTNEQFF

SEQ ID NO: 569577 - protein, 16 aa, Homo sapiens
  CDR3 for alpha chain variable domain of TCR clone 284789 (TRAV26-1, TRAJ52)
CIVSNAGGTSYGKLTF

SEQ ID NO: 569578 - protein, 15 aa, Homo sapiens
  CDR3 for beta chain variable domain of TCR clone 284789 (TRBV7-3, TRBJ2-1)
CASSPTGGGEVEQFV

SEQ ID NO: 569579 - protein, 17 aa, Homo sapiens
  CDR3 for alpha chain variable domain of TCR clone 284790 (TRAV3, TRAJ12)
CAVRDGGRMDSSYTLIF

SEQ ID NO: 569580 - protein, 14 aa, Homo sapiens
  CDR3 for beta chain variable domain of TCR clone 284790 (TRBV7-9, TRBJ1-2)
CASSRQGANYGDTF

SEQ ID NO: 569581 - protein, 14 aa, Homo sapiens
  CDR3 for alpha chain variable domain of TCR clone 284791 (TRAV16, TRAJ26)
CITVLSAYGQNFVF

SEQ ID NO: 569582 - protein, 14 aa, Homo sapiens
  CDR3 for beta chain variable domain of TCR clone 284791 (TRBV7-2, TRBJ2-7)
YASRSQGAAYEQYF

SEQ ID NO: 569583 - protein, 13 aa, Homo sapiens
  CDR3 for alpha chain variable domain of TCR clone 284792 (TRAV27, TRAJ45)
CRSSGGGADGLTF

SEQ ID NO: 569584 - protein, 14 aa, Homo sapiens
  CDR3 for beta chain variable domain of TCR clone 284792 (TRBV11-2, TRBJ2-2)
CASSSGGYTGELFF

SEQ ID NO: 569585 - protein, 14 aa, Homo sapiens
  CDR3 for alpha chain variable domain of TCR clone 284793 (TRAV12-1, TRAJ13)
CVVIDSGGYQKVTF

SEQ ID NO: 569586 - protein, 15 aa, Homo sapiens
  CDR3 for beta chain variable domain of TCR clone 284793 (TRBV7-9, TRBJ2-2)
CASGPLDTFPGELFF

SEQ ID NO: 569587 - protein, 16 aa, Homo sapiens
  CDR3 for alpha chain variable domain of TCR clone 284794 (TRAV3, TRAJ37)
CAVRGKGSGNTGNLIF

SEQ ID NO: 569588 - protein, 12 aa, Homo sapiens
  CDR3 for beta chain variable domain of TCR clone 284794 (TRBV12-4, TRBJ2-7)
CASSLGGYEQYF

SEQ ID NO: 569589 - protein, 14 aa, Homo sapiens
  CDR3 for alpha chain variable domain of TCR clone 284795 (TRAV20, TRAJ18)
CAVGRGSTLGRLYF

SEQ ID NO: 569590 - protein, 14 aa, Homo sapiens
  CDR3 for beta chain variable domain of TCR clone 284795 (TRBV28, TRBJ2-4)
CASTQVTGVNIQYC

SEQ ID NO: 569591 - protein, 16 aa, Homo sapiens
  CDR3 for alpha chain variable domain of TCR clone 284796 (TRAV30, TRAJ24)
CGTEIVDADSWGKFTF

SEQ ID NO: 569592 - protein, 13 aa, Homo sapiens
  CDR3 for beta chain variable domain of TCR clone 284796 (TRBV18, TRBJ1-2)
CASSASATEGYTF

SEQ ID NO: 569593 - protein, 15 aa, Homo sapiens
  CDR3 for alpha chain variable domain of TCR clone 284797 (TRAV2, TRAJ24)
CAVEVLTDSWGKFPF

SEQ ID NO: 569594 - protein, 14 aa, Homo sapiens
  CDR3 for beta chain variable domain of TCR clone 284797 (TRBV19, TRBJ2-1)
CASSMGSGRRSSSS

SEQ ID NO: 569595 - protein, 12 aa, Homo sapiens
  CDR3 for alpha chain variable domain of TCR clone 284798 (TRAV26-1, TRAJ26)
CIVFIYGQNFVF

SEQ ID NO: 569596 - protein, 13 aa, Homo sapiens
  CDR3 for beta chain variable domain of TCR clone 284798 (TRBV27, TRBJ1-1)
CASSLSIGDEAFF

SEQ ID NO: 569597 - protein, 14 aa, Homo sapiens
  CDR3 for alpha chain variable domain of TCR clone 284799 (TRAV1-2, TRAJ8)
CAVRDPPGFQKLVF

SEQ ID NO: 569598 - protein, 16 aa, Homo sapiens
  CDR3 for beta chain variable domain of TCR clone 284799 (TRBV6-6, TRBJ2-3)
CASSYSHAGSTDTQYF

SEQ ID NO: 569599 - protein, 13 aa, Homo sapiens
  CDR3 for alpha chain variable domain of TCR clone 284800 (TRAV8-4, TRAJ30)
CAVSVNRDDKIIF

SEQ ID NO: 569600 - protein, 12 aa, Homo sapiens
  CDR3 for beta chain variable domain of TCR clone 284800 (TRBV5-7, TRBJ1-1)
CASSLGRGKAFF

SEQ ID NO: 569601 - protein, 13 aa, Homo sapiens
  CDR3 for alpha chain variable domain of TCR clone 284801 (TRAV13-1, TRAJ6)
CAASKGGSYKPTF

SEQ ID NO: 569602 - protein, 14 aa, Homo sapiens
  CDR3 for beta chain variable domain of TCR clone 284801 (TRBV7-2, TRBJ2-1)
CASSLGVGYNEQFF

SEQ ID NO: 569603 - protein, 14 aa, Homo sapiens
  CDR3 for alpha chain variable domain of TCR clone 284802 (TRAV3, TRAJ28)
FAVRRGAGSHQLTF

SEQ ID NO: 569604 - protein, 16 aa, Homo sapiens
  CDR3 for beta chain variable domain of TCR clone 284802 (TRBV4-1, TRBJ2-7)
CASSQEWTSGPLEQYF

SEQ ID NO: 569605 - protein, 14 aa, Homo sapiens
  CDR3 for alpha chain variable domain of TCR clone 284803 (TRAV1-2, TRAJ16)
CAVNRFSDGQKLIF

SEQ ID NO: 569606 - protein, 15 aa, Homo sapiens
  CDR3 for beta chain variable domain of TCR clone 284803 (TRBV7-2, TRBJ2-1)
CASTHGTGIYNEQFF

SEQ ID NO: 569607 - protein, 12 aa, Homo sapiens
  CDR3 for alpha chain variable domain of TCR clone 284804 (TRAV12-3, TRAJ17)
CAMTLTGNKLTF

SEQ ID NO: 569608 - protein, 15 aa, Homo sapiens
  CDR3 for beta chain variable domain of TCR clone 284804 (TRBV12-4, TRBJ2-5)
CASRPPTGLQETQYF

SEQ ID NO: 569609 - protein, 12 aa, Homo sapiens
  CDR3 for alpha chain variable domain of TCR clone 284805 (TRAV12-1, TRAJ40)
CVVYSGTYKYIF

SEQ ID NO: 569610 - protein, 14 aa, Homo sapiens
  CDR3 for beta chain variable domain of TCR clone 284805 (TRBV5-1, TRBJ2-7)
CASSRGESLYEQYF

SEQ ID NO: 569611 - protein, 12 aa, Homo sapiens
  CDR3 for alpha chain variable domain of TCR clone 284806 (TRAV12-3, TRAJ17)
CAMTLTGNKLTF

SEQ ID NO: 569612 - protein, 22 aa, Homo sapiens
  CDR3 for beta chain variable domain of TCR clone 284806 (TRBV6-4, TRBJ2-3)
CTSVPAVTHKGTSGGLGDTQYF

SEQ ID NO: 569613 - protein, 12 aa, Homo sapiens
  CDR3 for alpha chain variable domain of TCR clone 284807 (TRAV17, TRAJ57)
CATDGGSEKLVF

SEQ ID NO: 569614 - protein, 12 aa, Homo sapiens
  CDR3 for beta chain variable domain of TCR clone 284807 (TRBV7-9, TRBJ1-4)
CASSTDREKLFF

SEQ ID NO: 569615 - protein, 16 aa, Homo sapiens
  CDR3 for alpha chain variable domain of TCR clone 284808 (TRAV20, TRAJ22)
CAVQASSSCSARQLTF

SEQ ID NO: 569616 - protein, 13 aa, Homo sapiens
  CDR3 for beta chain variable domain of TCR clone 284808 (TRBV7-2, TRBJ2-5)
CASSQTSVETQYF

SEQ ID NO: 569617 - protein, 15 aa, Homo sapiens
  CDR3 for alpha chain variable domain of TCR clone 284809 (TRAV8-3, TRAJ21)
CAVGALSPRGYKFYF

SEQ ID NO: 569618 - protein, 15 aa, Homo sapiens
  CDR3 for beta chain variable domain of TCR clone 284809 (TRBV7-8, TRBJ1-5)
CASSLERRGLEPQHF

SEQ ID NO: 569619 - protein, 15 aa, Homo sapiens
  CDR3 for alpha chain variable domain of TCR clone 284810 (TRAV12-1, TRAJ4)
CVVNGFSGGYNKLIF

SEQ ID NO: 569620 - protein, 18 aa, Homo sapiens
  CDR3 for beta chain variable domain of TCR clone 284810 (TRBV6-5, TRBJ2-1)
CASSYSYRRAGVYNEQFF

SEQ ID NO: 569621 - protein, 13 aa, Homo sapiens
  CDR3 for alpha chain variable domain of TCR clone 284811 (TRAV8-3, TRAJ48)
CAVVPFGNEKLTF

SEQ ID NO: 569622 - protein, 15 aa, Homo sapiens
  CDR3 for beta chain variable domain of TCR clone 284811 (TRBV7-9, TRBJ1-5)
CASSQGHQPNQPQHF

SEQ ID NO: 569623 - protein, 19 aa, Homo sapiens
  CDR3 for alpha chain variable domain of TCR clone 284812 (TRAV26-1, TRAJ28)
CIVRVAHAYSGAGSYQLTF

SEQ ID NO: 569624 - protein, 15 aa, Homo sapiens
  CDR3 for beta chain variable domain of TCR clone 284812 (TRBV4-1, TRBJ2-5)
CASSQWDLYQETQYF

SEQ ID NO: 569625 - protein, 13 aa, Homo sapiens
  CDR3 for alpha chain variable domain of TCR clone 284813 (TRAV13-2, TRAJ48)
CAEMDFGNEKLTF

SEQ ID NO: 569626 - protein, 14 aa, Homo sapiens
  CDR3 for beta chain variable domain of TCR clone 284813 (TRBV11-2, TRBJ2-5)
CASSRTGGIETQYF

SEQ ID NO: 569627 - protein, 13 aa, Homo sapiens
  CDR3 for alpha chain variable domain of TCR clone 284814 (TRAV27, TRAJ39)
CSGDTPAGNMLTF

SEQ ID NO: 569628 - protein, 13 aa, Homo sapiens
  CDR3 for beta chain variable domain of TCR clone 284814 (TRBV4-1, TRBJ2-4)
CASSQVGIDIQYF

SEQ ID NO: 569629 - protein, 16 aa, Homo sapiens
  CDR3 for alpha chain variable domain of TCR clone 284815 (TRAV16, TRAJ52)
CALSAAGGTSYGKLTF

SEQ ID NO: 569630 - protein, 17 aa, Homo sapiens
  CDR3 for beta chain variable domain of TCR clone 284815 (TRBV11-2, TRBJ2-1)
CDSSLYPPGVEYNEQFF

SEQ ID NO: 569631 - protein, 13 aa, Homo sapiens
  CDR3 for alpha chain variable domain of TCR clone 284816 (TRAV16, TRAJ58)
CALSIPSSSRLTF

SEQ ID NO: 569632 - protein, 14 aa, Homo sapiens
  CDR3 for beta chain variable domain of TCR clone 284816 (TRBV6-5, TRBJ2-7)
CASSPHRGLREQYF

SEQ ID NO: 569633 - protein, 14 aa, Homo sapiens
  CDR3 for alpha chain variable domain of TCR clone 284817 (TRAV30, TRAJ33)
CGTVAPRSNYQLIW

SEQ ID NO: 569634 - protein, 15 aa, Homo sapiens
  CDR3 for beta chain variable domain of TCR clone 284817 (TRBV7-9, TRBJ1-4)
CAGSRTGGFNEKLFF

SEQ ID NO: 569635 - protein, 14 aa, Homo sapiens
  CDR3 for alpha chain variable domain of TCR clone 284818 (TRAV26-2, TRAJ28)
CILGIWGWELPTHF

SEQ ID NO: 569636 - protein, 11 aa, Homo sapiens
  CDR3 for beta chain variable domain of TCR clone 284818 (TRBV25-1, TRBJ2-7)
CASSTSYEQYF

SEQ ID NO: 569637 - protein, 12 aa, Homo sapiens
  CDR3 for alpha chain variable domain of TCR clone 284819 (TRAV13-1, TRAJ27)
CAAHTNAGKSTF

SEQ ID NO: 569638 - protein, 16 aa, Homo sapiens
  CDR3 for beta chain variable domain of TCR clone 284819 (TRBV19, TRBJ1-1)
CASSPTRFWPGTEAFF

SEQ ID NO: 569639 - protein, 12 aa, Homo sapiens
  CDR3 for alpha chain variable domain of TCR clone 284820 (TRAV12-3, TRAJ17)
CAMKITGNKLTF

SEQ ID NO: 569640 - protein, 15 aa, Homo sapiens
  CDR3 for beta chain variable domain of TCR clone 284820 (TRBV20-1, TRBJ2-7)
CSTRDRVSGMDEQYF

SEQ ID NO: 569641 - protein, 15 aa, Homo sapiens
  CDR3 for alpha chain variable domain of TCR clone 284821 (TRAV26-1, TRAJ40)
CIVRVTTSGTYKYFF

SEQ ID NO: 569642 - protein, 12 aa, Homo sapiens
  CDR3 for beta chain variable domain of TCR clone 284821 (TRBV7-9, TRBJ1-4)
CASSTDREKLFF

SEQ ID NO: 569643 - protein, 15 aa, Homo sapiens
  CDR3 for alpha chain variable domain of TCR clone 284822 (TRAV35, TRAJ58)
CAGRRQETSGSRLTF

SEQ ID NO: 569644 - protein, 14 aa, Homo sapiens
  CDR3 for beta chain variable domain of TCR clone 284822 (TRBV7-2, TRBJ2-7)
CASSPKTSFYEQYF

SEQ ID NO: 569645 - protein, 14 aa, Homo sapiens
  CDR3 for alpha chain variable domain of TCR clone 284823 (TRAV13-1, TRAJ23)
CAASRLGRGGKLIF

SEQ ID NO: 569646 - protein, 14 aa, Homo sapiens
  CDR3 for beta chain variable domain of TCR clone 284823 (TRBV7-2, TRBJ2-1)
CASSLVAGRNEQFF

SEQ ID NO: 569647 - protein, 11 aa, Homo sapiens
  CDR3 for alpha chain variable domain of TCR clone 284824 (TRAV4, TRAJ28)
CLVGDKRAETL

SEQ ID NO: 569648 - protein, 13 aa, Homo sapiens
  CDR3 for beta chain variable domain of TCR clone 284824 (TRBV20-1, TRBJ2-7)
CSATHTSGYEQYF

SEQ ID NO: 569649 - protein, 16 aa, Homo sapiens
  CDR3 for alpha chain variable domain of TCR clone 284825 (TRAV20, TRAJ10)
CAVLRGLTGGGNKLTF

SEQ ID NO: 569650 - protein, 16 aa, Homo sapiens
  CDR3 for beta chain variable domain of TCR clone 284825 (TRBV19, TRBJ2-1)
CASSKAGPSSYNEQFF

SEQ ID NO: 569651 - protein, 13 aa, Homo sapiens
  CDR3 for alpha chain variable domain of TCR clone 284826 (TRAV1-2, TRAJ9)
CAALNTGGFKTIF

SEQ ID NO: 569652 - protein, 18 aa, Homo sapiens
  CDR3 for beta chain variable domain of TCR clone 284826 (TRBV4-1, TRBJ2-3)
CASGHQLAGGRSTDTQYF

SEQ ID NO: 569653 - protein, 13 aa, Homo sapiens
  CDR3 for alpha chain variable domain of TCR clone 284827 (TRAV21, TRAJ27)
CAARPGNAGKSTF

SEQ ID NO: 569654 - protein, 13 aa, Homo sapiens
  CDR3 for beta chain variable domain of TCR clone 284827 (TRBV13, TRBJ2-5)
CASSLGGEETQYF

SEQ ID NO: 569655 - protein, 14 aa, Homo sapiens
  CDR3 for alpha chain variable domain of TCR clone 284828 (TRAV1-2, TRAJ12)
CAVSGTDSSYKLNF

SEQ ID NO: 569656 - protein, 15 aa, Homo sapiens
  CDR3 for beta chain variable domain of TCR clone 284828 (TRBV2, TRBJ2-4)
CASSGTNLAKNIQYF

SEQ ID NO: 569657 - protein, 16 aa, Homo sapiens
  CDR3 for alpha chain variable domain of TCR clone 284829 (TRAV12-2, TRAJ50)
CAVGTATKTSYDKVIF

SEQ ID NO: 569658 - protein, 16 aa, Homo sapiens
  CDR3 for beta chain variable domain of TCR clone 284829 (TRBV19, TRBJ2-1)
CASSSKGTRSYNEQFF

SEQ ID NO: 569659 - protein, 11 aa, Homo sapiens
  CDR3 for alpha chain variable domain of TCR clone 284830 (TRAV12-1, TRAJ21)
WLVYNFNKFYF

SEQ ID NO: 569660 - protein, 14 aa, Homo sapiens
  CDR3 for beta chain variable domain of TCR clone 284830 (TRBV19, TRBJ2-7)
CASSMGQGAIEQYF

SEQ ID NO: 569661 - protein, 10 aa, Homo sapiens
  CDR3 for alpha chain variable domain of TCR clone 284831 (TRAV17, TRAJ36)
CATVAGNLFL

SEQ ID NO: 569662 - protein, 13 aa, Homo sapiens
  CDR3 for beta chain variable domain of TCR clone 284831 (TRBV12-4, TRBJ1-2)
CASSLRQGKGYTF

SEQ ID NO: 569663 - protein, 13 aa, Homo sapiens
  CDR3 for alpha chain variable domain of TCR clone 284832 (TRAV1-2, TRAJ9)
CAVLNTGGFKTIF

SEQ ID NO: 569664 - protein, 14 aa, Homo sapiens
  CDR3 for beta chain variable domain of TCR clone 284832 (TRBV5-1, TRBJ2-2)
CASSLGGGSGEVFF

SEQ ID NO: 569665 - protein, 14 aa, Homo sapiens
  CDR3 for alpha chain variable domain of TCR clone 284833 (TRAV1-2, TRAJ16)
CAVNRFLDGQKLLL

SEQ ID NO: 569666 - protein, 13 aa, Homo sapiens
  CDR3 for beta chain variable domain of TCR clone 284833 (TRBV10-3, TRBJ2-7)
CASKLAVNYEQYF

SEQ ID NO: 569667 - protein, 16 aa, Homo sapiens
  CDR3 for alpha chain variable domain of TCR clone 284834 (TRAV30, TRAJ24)
CGTEIVDADSWGKFQF

SEQ ID NO: 569668 - protein, 14 aa, Homo sapiens
  CDR3 for beta chain variable domain of TCR clone 284834 (TRBV5-1, TRBJ1-4)
CASSLDRTHEKLFF

SEQ ID NO: 569669 - protein, 14 aa, Homo sapiens
  CDR3 for alpha chain variable domain of TCR clone 284835 (TRAV8-4, TRAJ11)
CAVSLNSGYSTPTF

SEQ ID NO: 569670 - protein, 14 aa, Homo sapiens
  CDR3 for beta chain variable domain of TCR clone 284835 (TRBV19, TRBJ2-1)
CASKDPGLANEQFF

SEQ ID NO: 569671 - protein, 13 aa, Homo sapiens
  CDR3 for alpha chain variable domain of TCR clone 284836 (TRAV3, TRAJ27)
CAVRPLGAGKSTF

SEQ ID NO: 569672 - protein, 13 aa, Homo sapiens
  CDR3 for beta chain variable domain of TCR clone 284836 (TRBV19, TRBJ1-1)
CASSIGPQAEAFF

SEQ ID NO: 569673 - protein, 11 aa, Homo sapiens
  CDR3 for alpha chain variable domain of TCR clone 284837 (TRAV8-3, TRAJ52)
PADYSYGKLTF

SEQ ID NO: 569674 - protein, 18 aa, Homo sapiens
  CDR3 for beta chain variable domain of TCR clone 284837 (TRBV11-2, TRBJ2-6)
CASSLNPFLGTGANVLTF

SEQ ID NO: 569675 - protein, 10 aa, Homo sapiens
  CDR3 for alpha chain variable domain of TCR clone 284838 (TRAV1-2, TRAJ23)
CAGQGGKLIF

SEQ ID NO: 569676 - protein, 18 aa, Homo sapiens
  CDR3 for beta chain variable domain of TCR clone 284838 (TRBV11-2, TRBJ1-1)
CASSLRQAGNTRKLSLDK

SEQ ID NO: 569677 - protein, 16 aa, Homo sapiens
  CDR3 for alpha chain variable domain of TCR clone 284839 (TRAV16, TRAJ4)
CALSRMFSGGYNKLIF

SEQ ID NO: 569678 - protein, 13 aa, Homo sapiens
  CDR3 for beta chain variable domain of TCR clone 284839 (TRBV12-5, TRBJ2-3)
CASGDRQSDTQYF

SEQ ID NO: 569679 - protein, 14 aa, Homo sapiens
  CDR3 for alpha chain variable domain of TCR clone 284840 (TRAV1-2, TRAJ24)
CAVLTTDSWGQFQF

SEQ ID NO: 569680 - protein, 21 aa, Homo sapiens
  CDR3 for beta chain variable domain of TCR clone 284840 (TRBV6-5, TRBJ1-3)
WASSYWEKIAQGMSSGNTIYF

SEQ ID NO: 569681 - protein, 11 aa, Homo sapiens
  CDR3 for alpha chain variable domain of TCR clone 284841 (TRAV2, TRAJ23)
CAVDTRGKLIF

SEQ ID NO: 569682 - protein, 16 aa, Homo sapiens
  CDR3 for beta chain variable domain of TCR clone 284841 (TRBV28, TRBJ1-5)
CASRTGLQGEGQPQHF

SEQ ID NO: 569683 - protein, 14 aa, Homo sapiens
  CDR3 for alpha chain variable domain of TCR clone 284842 (TRAV36/DV7, TRAJ53)
CAVVDGGSNYKLTF

SEQ ID NO: 569684 - protein, 14 aa, Homo sapiens
  CDR3 for beta chain variable domain of TCR clone 284842 (TRBV12-5, TRBJ2-5)
CASGSRTHQETQYF

SEQ ID NO: 569685 - protein, 14 aa, Homo sapiens
  CDR3 for alpha chain variable domain of TCR clone 284843 (TRAV12-1, TRAJ24)
CVVRSTDSWGTFQF

SEQ ID NO: 569686 - protein, 13 aa, Homo sapiens
  CDR3 for beta chain variable domain of TCR clone 284843 (TRBV2, TRBJ2-3)
CASILAGGQGQYF

SEQ ID NO: 569687 - protein, 14 aa, Homo sapiens
  CDR3 for alpha chain variable domain of TCR clone 284844 (TRAV2, TRAJ29)
CAVTLPSGNTPLVF

SEQ ID NO: 569688 - protein, 13 aa, Homo sapiens
  CDR3 for beta chain variable domain of TCR clone 284844 (TRBV11-2, TRBJ2-1)
CASSLGLAGGRFF

SEQ ID NO: 569689 - protein, 13 aa, Homo sapiens
  CDR3 for alpha chain variable domain of TCR clone 284845 (TRAV12-2, TRAJ34)
CALSKGDTDRLIF

SEQ ID NO: 569690 - protein, 13 aa, Homo sapiens
  CDR3 for beta chain variable domain of TCR clone 284845 (TRBV20-1, TRBJ2-1)
CSASGTPGDEQFF

SEQ ID NO: 569691 - protein, 16 aa, Homo sapiens
  CDR3 for alpha chain variable domain of TCR clone 284846 (TRAV4, TRAJ22)
CLVGDLYSGSARQLTF

SEQ ID NO: 569692 - protein, 15 aa, Homo sapiens
  CDR3 for beta chain variable domain of TCR clone 284846 (TRBV5-1, TRBJ2-1)
CASSPPRAPYNEQFF

SEQ ID NO: 569693 - protein, 14 aa, Homo sapiens
  CDR3 for alpha chain variable domain of TCR clone 284847 (TRAV21, TRAJ35)
CAVMPIGFGNVLHC

SEQ ID NO: 569694 - protein, 17 aa, Homo sapiens
  CDR3 for beta chain variable domain of TCR clone 284847 (TRBV7-8, TRBJ2-7)
CASSFTSGRPPSYEQYF

SEQ ID NO: 569695 - protein, 13 aa, Homo sapiens
  CDR3 for alpha chain variable domain of TCR clone 284848 (TRAV21, TRAJ20)
CAVGPRVDYKLSF

SEQ ID NO: 569696 - protein, 12 aa, Homo sapiens
  CDR3 for beta chain variable domain of TCR clone 284848 (TRBV27, TRBJ2-5)
CASSPTGETQYF

SEQ ID NO: 569697 - protein, 17 aa, Homo sapiens
  CDR3 for alpha chain variable domain of TCR clone 284849 (TRAV8-6, TRAJ58)
CAVSSWVGETSGSRWTL

SEQ ID NO: 569698 - protein, 17 aa, Homo sapiens
  CDR3 for beta chain variable domain of TCR clone 284849 (TRBV4-3, TRBJ1-2)
CASSSRLQAGGSVGYIF

SEQ ID NO: 569699 - protein, 14 aa, Homo sapiens
  CDR3 for alpha chain variable domain of TCR clone 284850 (TRAV2, TRAJ9)
CAVEDRSGGFKTIL

SEQ ID NO: 569700 - protein, 14 aa, Homo sapiens
  CDR3 for beta chain variable domain of TCR clone 284850 (TRBV18, TRBJ2-7)
CASSPRGGAYEQYF

SEQ ID NO: 569701 - protein, 15 aa, Homo sapiens
  CDR3 for alpha chain variable domain of TCR clone 284851 (TRAV13-1, TRAJ52)
CAATSPRTSYGKLTF

SEQ ID NO: 569702 - protein, 16 aa, Homo sapiens
  CDR3 for beta chain variable domain of TCR clone 284851 (TRBV7-3, TRBJ2-2)
CASSLKRGTLSGELVF

SEQ ID NO: 569703 - protein, 15 aa, Homo sapiens
  CDR3 for alpha chain variable domain of TCR clone 284852 (TRAV12-3, TRAJ22)
CAMRSSSGSARQLTF

SEQ ID NO: 569704 - protein, 18 aa, Homo sapiens
  CDR3 for beta chain variable domain of TCR clone 284852 (TRBV27, TRBJ2-1)
CASRRSGRGESSGNVQFF

SEQ ID NO: 569705 - protein, 18 aa, Homo sapiens
  CDR3 for alpha chain variable domain of TCR clone 284853 (TRAV21, TRAJ52)
SAVRPSPAGGTSYGKLTF

SEQ ID NO: 569706 - protein, 17 aa, Homo sapiens
  CDR3 for beta chain variable domain of TCR clone 284853 (TRBV13, TRBJ2-3)
CASSRSRVAGGRNTQYF

SEQ ID NO: 569707 - protein, 13 aa, Homo sapiens
  CDR3 for alpha chain variable domain of TCR clone 284854 (TRAV2, TRAJ40)
CAVVISGTYKYIF

SEQ ID NO: 569708 - protein, 14 aa, Homo sapiens
  CDR3 for beta chain variable domain of TCR clone 284854 (TRBV19, TRBJ2-1)
CASPTFVLSGDQFF

SEQ ID NO: 569709 - protein, 16 aa, Homo sapiens
  CDR3 for alpha chain variable domain of TCR clone 284855 (TRAV8-3, TRAJ44)
GAVGASNTGTASKLTF

SEQ ID NO: 569710 - protein, 15 aa, Homo sapiens
  CDR3 for beta chain variable domain of TCR clone 284855 (TRBV27, TRBJ1-5)
CASTFNRGSNQPQHF

SEQ ID NO: 569711 - protein, 16 aa, Homo sapiens
  CDR3 for alpha chain variable domain of TCR clone 284856 (TRAV8-4, TRAJ10)
CAVSDILTGGGNKLTF

SEQ ID NO: 569712 - protein, 15 aa, Homo sapiens
  CDR3 for beta chain variable domain of TCR clone 284856 (TRBV7-2, TRBJ1-6)
CASSLRYAYNSHLHF

SEQ ID NO: 569713 - protein, 13 aa, Homo sapiens
  CDR3 for alpha chain variable domain of TCR clone 284857 (TRAV8-6, TRAJ50)
CAVIKTSYDKVIF

SEQ ID NO: 569714 - protein, 15 aa, Homo sapiens
  CDR3 for beta chain variable domain of TCR clone 284857 (TRBV6-3, TRBJ2-7)
CASSSPGTVFYEQYF

SEQ ID NO: 569715 - protein, 18 aa, Homo sapiens
  CDR3 for alpha chain variable domain of TCR clone 284858 (TRAV21, TRAJ52)
CAVRPSPAGGTIYGKLTF

SEQ ID NO: 569716 - protein, 13 aa, Homo sapiens
  CDR3 for beta chain variable domain of TCR clone 284858 (TRBV29-1, TRBJ2-2)
CSVYREDTGELFF

SEQ ID NO: 569717 - protein, 15 aa, Homo sapiens
  CDR3 for alpha chain variable domain of TCR clone 284859 (TRAV26-1, TRAJ47)
CIVRVGWGYGNKLVF

SEQ ID NO: 569718 - protein, 18 aa, Homo sapiens
  CDR3 for beta chain variable domain of TCR clone 284859 (TRBV4-1, TRBJ2-2)
CASSFRTSGGEGPGELFF

SEQ ID NO: 569719 - protein, 17 aa, Homo sapiens
  CDR3 for alpha chain variable domain of TCR clone 284860 (TRAV23/DV6, TRAJ57)
CAASSTLSQGGSEKLVF

SEQ ID NO: 569720 - protein, 13 aa, Homo sapiens
  CDR3 for beta chain variable domain of TCR clone 284860 (TRBV7-9, TRBJ2-3)
CASSPGSTDTQYF

SEQ ID NO: 569721 - protein, 13 aa, Homo sapiens
  CDR3 for alpha chain variable domain of TCR clone 284861 (TRAV12-2, TRAJ52)
CAAHGTSYGKLKF

SEQ ID NO: 569722 - protein, 15 aa, Homo sapiens
  CDR3 for beta chain variable domain of TCR clone 284861 (TRBV10-3, TRBJ2-7)
CAISTFSGVKGEQYF

SEQ ID NO: 569723 - protein, 14 aa, Homo sapiens
  CDR3 for alpha chain variable domain of TCR clone 284862 (TRAV8-4, TRAJ16)
CAVSPVGRWPEAAP

SEQ ID NO: 569724 - protein, 14 aa, Homo sapiens
  CDR3 for beta chain variable domain of TCR clone 284862 (TRBV23-1, TRBJ2-5)
CASSFLRSQETQYF

SEQ ID NO: 569725 - protein, 13 aa, Homo sapiens
  CDR3 for alpha chain variable domain of TCR clone 284863 (TRAV12-1, TRAJ9)
CVVRNTGGFKTIF

SEQ ID NO: 569726 - protein, 14 aa, Homo sapiens
  CDR3 for beta chain variable domain of TCR clone 284863 (TRBV20-1, TRBJ2-1)
CSAKIGGPANEQFF

SEQ ID NO: 569727 - protein, 13 aa, Homo sapiens
  CDR3 for alpha chain variable domain of TCR clone 284864 (TRAV12-3, TRAJ33)
CAMSVNRNYQLIW

SEQ ID NO: 569728 - protein, 12 aa, Homo sapiens
  CDR3 for beta chain variable domain of TCR clone 284864 (TRBV29-1, TRBJ2-2)
CSVDKYTGELFF

SEQ ID NO: 569729 - protein, 15 aa, Homo sapiens
  CDR3 for alpha chain variable domain of TCR clone 284865 (TRAV3, TRAJ20)
CAVRDIKLSDYKLSF

SEQ ID NO: 569730 - protein, 15 aa, Homo sapiens
  CDR3 for beta chain variable domain of TCR clone 284865 (TRBV7-9, TRBJ1-6)
RASSSTGRGNSPLHF

SEQ ID NO: 569731 - protein, 12 aa, Homo sapiens
  CDR3 for alpha chain variable domain of TCR clone 284866 (TRAV35, TRAJ44)
CAGHPTASKLTF

SEQ ID NO: 569732 - protein, 13 aa, Homo sapiens
  CDR3 for beta chain variable domain of TCR clone 284866 (TRBV12-4, TRBJ2-7)
CASSPTETYEQYF

SEQ ID NO: 569733 - protein, 14 aa, Homo sapiens
  CDR3 for alpha chain variable domain of TCR clone 284867 (TRAV17, TRAJ15)
CATGPNQAGTALIF

SEQ ID NO: 569734 - protein, 15 aa, Homo sapiens
  CDR3 for beta chain variable domain of TCR clone 284867 (TRBV11-1, TRBJ2-7)
CASSLNYGASYEQYF

SEQ ID NO: 569735 - protein, 14 aa, Homo sapiens
  CDR3 for alpha chain variable domain of TCR clone 284868 (TRAV26-1, TRAJ54)
CIVRVPQGAQKLVF

SEQ ID NO: 569736 - protein, 18 aa, Homo sapiens
  CDR3 for beta chain variable domain of TCR clone 284868 (TRBV2, TRBJ2-2)
CQQSTGTSGGGNTGELFF

SEQ ID NO: 569737 - protein, 14 aa, Homo sapiens
  CDR3 for alpha chain variable domain of TCR clone 284869 (TRAV21, TRAJ35)
CAVMPIGFGNVLHC

SEQ ID NO: 569738 - protein, 12 aa, Homo sapiens
  CDR3 for beta chain variable domain of TCR clone 284869 (TRBV7-9, TRBJ2-7)
CASSIKRAEQYF

SEQ ID NO: 569739 - protein, 14 aa, Homo sapiens
  CDR3 for alpha chain variable domain of TCR clone 284870 (TRAV17, TRAJ57)
CATDPQGGSEKLVF

SEQ ID NO: 569740 - protein, 18 aa, Homo sapiens
  CDR3 for beta chain variable domain of TCR clone 284870 (TRBV6-6, TRBJ1-3)
CASSYSKWDSISGNTIYV

SEQ ID NO: 569741 - protein, 16 aa, Homo sapiens
  CDR3 for alpha chain variable domain of TCR clone 284871 (TRAV3, TRAJ3)
CAVRDRAKSSASKIIF

SEQ ID NO: 569742 - protein, 13 aa, Homo sapiens
  CDR3 for beta chain variable domain of TCR clone 284871 (TRBV4-2, TRBJ2-3)
CASSLTSTDTQYF

SEQ ID NO: 569743 - protein, 12 aa, Homo sapiens
  CDR3 for alpha chain variable domain of TCR clone 284872 (TRAV8-3, TRAJ6)
CAVAGGSYIPTF

SEQ ID NO: 569744 - protein, 12 aa, Homo sapiens
  CDR3 for beta chain variable domain of TCR clone 284872 (TRBV18, TRBJ1-4)
CASSPSREKLFF

SEQ ID NO: 569745 - protein, 13 aa, Homo sapiens
  CDR3 for alpha chain variable domain of TCR clone 284873 (TRAV13-1, TRAJ32)
CAASNGWWCYKQA

SEQ ID NO: 569746 - protein, 17 aa, Homo sapiens
  CDR3 for beta chain variable domain of TCR clone 284873 (TRBV15, TRBJ1-2)
CATSGREIDVVNYRHTF

SEQ ID NO: 569747 - protein, 14 aa, Homo sapiens
  CDR3 for alpha chain variable domain of TCR clone 284874 (TRAV12-2, TRAJ40)
CAVKIPSGTYNYFF

SEQ ID NO: 569748 - protein, 18 aa, Homo sapiens
  CDR3 for beta chain variable domain of TCR clone 284874 (TRBV20-1, TRBJ2-6)
CSAETTPTRGSGANVLTF

SEQ ID NO: 569749 - protein, 15 aa, Homo sapiens
  CDR3 for alpha chain variable domain of TCR clone 284875 (TRAV13-1, TRAJ45)
CVASGSGGGADGLTF

SEQ ID NO: 569750 - protein, 15 aa, Homo sapiens
  CDR3 for beta chain variable domain of TCR clone 284875 (TRBV7-9, TRBJ1-5)
CASGQGHQPNQPQHF

SEQ ID NO: 569751 - protein, 12 aa, Homo sapiens
  CDR3 for alpha chain variable domain of TCR clone 284876 (TRAV12-1, TRAJ34)
CVVAGATDKLIF

SEQ ID NO: 569752 - protein, 12 aa, Homo sapiens
  CDR3 for beta chain variable domain of TCR clone 284876 (TRBV7-9, TRBJ1-1)
CASSLVRSEAFF

SEQ ID NO: 569753 - protein, 13 aa, Homo sapiens
  CDR3 for alpha chain variable domain of TCR clone 284877 (TRAV12-3, TRAJ54)
CEMTLQGAQKLVF

SEQ ID NO: 569754 - protein, 14 aa, Homo sapiens
  CDR3 for beta chain variable domain of TCR clone 284877 (TRBV4-1, TRBJ2-2)
CASSQAVNTGELFF

SEQ ID NO: 569755 - protein, 12 aa, Homo sapiens
  CDR3 for alpha chain variable domain of TCR clone 284878 (TRAV12-3, TRAJ17)
CAITLKGNKLTF

SEQ ID NO: 569756 - protein, 15 aa, Homo sapiens
  CDR3 for beta chain variable domain of TCR clone 284878 (TRBV20-1, TRBJ2-7)
CSARDRVSGMDEQYF

SEQ ID NO: 569757 - protein, 14 aa, Homo sapiens
  CDR3 for alpha chain variable domain of TCR clone 284879 (TRAV8-2, TRAJ44)
CVVSLTGTASKLTF

SEQ ID NO: 569758 - protein, 11 aa, Homo sapiens
  CDR3 for beta chain variable domain of TCR clone 284879 (TRBV12-4, TRBJ2-2)
CASSSAGELFF

SEQ ID NO: 569759 - protein, 13 aa, Homo sapiens
  CDR3 for alpha chain variable domain of TCR clone 284880 (TRAV1-2, TRAJ9)
CAALNTGGFKTIF

SEQ ID NO: 569760 - protein, 13 aa, Homo sapiens
  CDR3 for beta chain variable domain of TCR clone 284880 (TRBV12-4, TRBJ2-5)
CASSPGTEETQYF

SEQ ID NO: 569761 - protein, 12 aa, Homo sapiens
  CDR3 for alpha chain variable domain of TCR clone 284881 (TRAV3, TRAJ34)
CAVLGNTEKLIF

SEQ ID NO: 569762 - protein, 13 aa, Homo sapiens
  CDR3 for beta chain variable domain of TCR clone 284881 (TRBV19, TRBJ2-1)
CASSIGTGNEQFF

SEQ ID NO: 569763 - protein, 14 aa, Homo sapiens
  CDR3 for alpha chain variable domain of TCR clone 284882 (TRAV1-2, TRAJ8)
GAVREDTGFHKLVF

SEQ ID NO: 569764 - protein, 15 aa, Homo sapiens
  CDR3 for beta chain variable domain of TCR clone 284882 (TRBV6-3, TRBJ2-7)
CASSSPGTVFYEQYF

SEQ ID NO: 569765 - protein, 15 aa, Homo sapiens
  CDR3 for alpha chain variable domain of TCR clone 284883 (TRAV26-1, TRAJ22)
CIVRVSFWFCKATDL

SEQ ID NO: 569766 - protein, 15 aa, Homo sapiens
  CDR3 for beta chain variable domain of TCR clone 284883 (TRBV7-8, TRBJ2-3)
CASSLSADSGGAQYF

SEQ ID NO: 569767 - protein, 14 aa, Homo sapiens
  CDR3 for alpha chain variable domain of TCR clone 284884 (TRAV23/DV6, TRAJ22)
CAAFSSGSARQLPF

SEQ ID NO: 569768 - protein, 14 aa, Homo sapiens
  CDR3 for beta chain variable domain of TCR clone 284884 (TRBV19, TRBJ2-5)
CASSPPGVRETQYF

SEQ ID NO: 569769 - protein, 22 aa, Homo sapiens
  CDR3 for alpha chain variable domain of TCR clone 284885 (TRAV13-2, TRAJ13)
QLLNLETQLSTFVPEGYQKVTF

SEQ ID NO: 569770 - protein, 14 aa, Homo sapiens
  CDR3 for beta chain variable domain of TCR clone 284885 (TRBV19, TRBJ2-1)
CASPTFVLSGEQFF

SEQ ID NO: 569771 - protein, 14 aa, Homo sapiens
  CDR3 for alpha chain variable domain of TCR clone 284886 (TRAV2, TRAJ37)
CAVDFTSNTGKLIF

SEQ ID NO: 569772 - protein, 12 aa, Homo sapiens
  CDR3 for beta chain variable domain of TCR clone 284886 (TRBV7-3, TRBJ2-5)
CASSSPGGTQYF

SEQ ID NO: 569773 - protein, 12 aa, Homo sapiens
  CDR3 for alpha chain variable domain of TCR clone 284887 (TRAV12-2, TRAJ8)
CAVNTGFQKLVF

SEQ ID NO: 569774 - protein, 15 aa, Homo sapiens
  CDR3 for beta chain variable domain of TCR clone 284887 (TRBV7-8, TRBJ1-5)
CASSLERRGFEPQHF

SEQ ID NO: 569775 - protein, 12 aa, Homo sapiens
  CDR3 for alpha chain variable domain of TCR clone 284888 (TRAV25, TRAJ29)
CAGHSVNTPLVF

SEQ ID NO: 569776 - protein, 14 aa, Homo sapiens
  CDR3 for beta chain variable domain of TCR clone 284888 (TRBV6-1, TRBJ2-7)
CASTRTGDYYEQYF

SEQ ID NO: 569777 - protein, 12 aa, Homo sapiens
  CDR3 for alpha chain variable domain of TCR clone 284889 (TRAV20, TRAJ56)
CAVTGANSKLTF

SEQ ID NO: 569778 - protein, 12 aa, Homo sapiens
  CDR3 for beta chain variable domain of TCR clone 284889 (TRBV29-1, TRBJ2-3)
CSVTGGADTQYF

SEQ ID NO: 569779 - protein, 13 aa, Homo sapiens
  CDR3 for alpha chain variable domain of TCR clone 284890 (TRAV16, TRAJ52)
CALRGTSYGKLTF

SEQ ID NO: 569780 - protein, 16 aa, Homo sapiens
  CDR3 for beta chain variable domain of TCR clone 284890 (TRBV19, TRBJ2-3)
CASSPGAASRTDTQYF

SEQ ID NO: 569781 - protein, 19 aa, Homo sapiens
  CDR3 for alpha chain variable domain of TCR clone 284891 (TRAV2, TRAJ20)
ILQVREADAAVYRGCKLSF

SEQ ID NO: 569782 - protein, 17 aa, Homo sapiens
  CDR3 for beta chain variable domain of TCR clone 284891 (TRBV11-2, TRBJ2-1)
CASSLSPPGVEYNEQFF

SEQ ID NO: 569783 - protein, 14 aa, Homo sapiens
  CDR3 for alpha chain variable domain of TCR clone 284892 (TRAV1-2, TRAJ8)
CAVREDTVFQKLVF

SEQ ID NO: 569784 - protein, 16 aa, Homo sapiens
  CDR3 for beta chain variable domain of TCR clone 284892 (TRBV15, TRBJ2-3)
CATSRDLGIVTDTQHF

SEQ ID NO: 569785 - protein, 11 aa, Homo sapiens
  CDR3 for alpha chain variable domain of TCR clone 284893 (TRAV3, TRAJ21)
CAVGNFNKFYF

SEQ ID NO: 569786 - protein, 16 aa, Homo sapiens
  CDR3 for beta chain variable domain of TCR clone 284893 (TRBV20-1, TRBJ1-2)
CSASMGQGVTNYGYTF

SEQ ID NO: 569787 - protein, 13 aa, Homo sapiens
  CDR3 for alpha chain variable domain of TCR clone 284894 (TRAV13-1, TRAJ39)
CAASIWEGNMLTF

SEQ ID NO: 569788 - protein, 13 aa, Homo sapiens
  CDR3 for beta chain variable domain of TCR clone 284894 (TRBV11-2, TRBJ1-3)
CASSLEPVNTIYF

SEQ ID NO: 569789 - protein, 14 aa, Homo sapiens
  CDR3 for alpha chain variable domain of TCR clone 284895 (TRAV3, TRAJ17)
CAVRDAAAGNKLTF

SEQ ID NO: 569790 - protein, 13 aa, Homo sapiens
  CDR3 for beta chain variable domain of TCR clone 284895 (TRBV2, TRBJ1-1)
YASSVSRYTEAFF

SEQ ID NO: 569791 - protein, 17 aa, Homo sapiens
  CDR3 for alpha chain variable domain of TCR clone 284896 (TRAV23/DV6, TRAJ57)
CSASSTLSQCGSEKLVF

SEQ ID NO: 569792 - protein, 14 aa, Homo sapiens
  CDR3 for beta chain variable domain of TCR clone 284896 (TRBV25-1, TRBJ1-1)
CASTHLGGNTEAFF

SEQ ID NO: 569793 - protein, 14 aa, Homo sapiens
  CDR3 for alpha chain variable domain of TCR clone 284897 (TRAV35, TRAJ33)
CAGSSQDSNSQLIW

SEQ ID NO: 569794 - protein, 15 aa, Homo sapiens
  CDR3 for beta chain variable domain of TCR clone 284897 (TRBV20-1, TRBJ2-7)
CSAESGTSGAYEHYF

SEQ ID NO: 569795 - protein, 14 aa, Homo sapiens
  CDR3 for alpha chain variable domain of TCR clone 284898 (TRAV29/DV5, TRAJ47)
CAASSIEYGNKLVF

SEQ ID NO: 569796 - protein, 16 aa, Homo sapiens
  CDR3 for beta chain variable domain of TCR clone 284898 (TRBV12-5, TRBJ2-5)
CASGPRTSGNQETQYF

SEQ ID NO: 569797 - protein, 14 aa, Homo sapiens
  CDR3 for alpha chain variable domain of TCR clone 284899 (TRAV3, TRAJ9)
CAVRDDTGGVKTIF

SEQ ID NO: 569798 - protein, 18 aa, Homo sapiens
  CDR3 for beta chain variable domain of TCR clone 284899 (TRBV20-1, TRBJ2-6)
CSAETTPTHGSGANVLTF

SEQ ID NO: 569799 - protein, 15 aa, Homo sapiens
  CDR3 for alpha chain variable domain of TCR clone 284900 (TRAV12-3, TRAJ6)
CAMSATTGGSYIPTF

SEQ ID NO: 569800 - protein, 18 aa, Homo sapiens
  CDR3 for beta chain variable domain of TCR clone 284900 (TRBV7-6, TRBJ2-1)
CASSPRTSGMSSYSEQFF

SEQ ID NO: 569801 - protein, 16 aa, Homo sapiens
  CDR3 for alpha chain variable domain of TCR clone 284901 (TRAV30, TRAJ24)
CGTEIVDAESWGKFQF

SEQ ID NO: 569802 - protein, 17 aa, Homo sapiens
  CDR3 for beta chain variable domain of TCR clone 284901 (TRBV20-1, TRBJ2-1)
CSAPPRLAGTRYNEQFF

SEQ ID NO: 569803 - protein, 14 aa, Homo sapiens
  CDR3 for alpha chain variable domain of TCR clone 284902 (TRAV23/DV6, TRAJ4)
CAANLSGGYHKLIF

SEQ ID NO: 569804 - protein, 17 aa, Homo sapiens
  CDR3 for beta chain variable domain of TCR clone 284902 (TRBV4-1, TRBJ1-3)
CASSPQRGIRFGNTIYF

SEQ ID NO: 569805 - protein, 14 aa, Homo sapiens
  CDR3 for alpha chain variable domain of TCR clone 284903 (TRAV17, TRAJ35)
CATDRPGFGNVLHC

SEQ ID NO: 569806 - protein, 14 aa, Homo sapiens
  CDR3 for beta chain variable domain of TCR clone 284903 (TRBV7-8, TRBJ2-3)
CDSSLEAGTDTQYF

SEQ ID NO: 569807 - protein, 14 aa, Homo sapiens
  CDR3 for alpha chain variable domain of TCR clone 284904 (TRAV8-2, TRAJ37)
CVVSISGNTGKLIF

SEQ ID NO: 569808 - protein, 15 aa, Homo sapiens
  CDR3 for beta chain variable domain of TCR clone 284904 (TRBV9, TRBJ1-6)
CASSVSGTGDSPLHF

SEQ ID NO: 569809 - protein, 12 aa, Homo sapiens
  CDR3 for alpha chain variable domain of TCR clone 284905 (TRAV12-3, TRAJ17)
CAMTLTGNKQTF

SEQ ID NO: 569810 - protein, 15 aa, Homo sapiens
  CDR3 for beta chain variable domain of TCR clone 284905 (TRBV20-1, TRBJ2-7)
CSARVRVSGMDEQYF

SEQ ID NO: 569811 - protein, 13 aa, Homo sapiens
  CDR3 for alpha chain variable domain of TCR clone 284906 (TRAV36/DV7, TRAJ54)
CAVDIQGAQKLVF

SEQ ID NO: 569812 - protein, 19 aa, Homo sapiens
  CDR3 for beta chain variable domain of TCR clone 284906 (TRBV25-1, TRBJ2-2)
CAILVYRVDRGRKTGELFF

SEQ ID NO: 569813 - protein, 14 aa, Homo sapiens
  CDR3 for alpha chain variable domain of TCR clone 284907 (TRAV12-2, TRAJ4)
CAEDLSGGYNKLIF

SEQ ID NO: 569814 - protein, 13 aa, Homo sapiens
  CDR3 for beta chain variable domain of TCR clone 284907 (TRBV7-9, TRBJ1-2)
CASSLKQNYGYTC

SEQ ID NO: 569815 - protein, 19 aa, Homo sapiens
  CDR3 for alpha chain variable domain of TCR clone 284908 (TRAV2, TRAJ20)
ILQVREADAAVYRYCKLSF

SEQ ID NO: 569816 - protein, 16 aa, Homo sapiens
  CDR3 for beta chain variable domain of TCR clone 284908 (TRBV19, TRBJ2-1)
CASSKAGPSSYNEQFF

SEQ ID NO: 569817 - protein, 13 aa, Homo sapiens
  CDR3 for alpha chain variable domain of TCR clone 284909 (TRAV13-2, TRAJ40)
CAEFTSGTYKNIF

SEQ ID NO: 569818 - protein, 14 aa, Homo sapiens
  CDR3 for beta chain variable domain of TCR clone 284909 (TRBV10-2, TRBJ1-5)
CASSSTGRNQPQHF

SEQ ID NO: 569819 - protein, 13 aa, Homo sapiens
  CDR3 for alpha chain variable domain of TCR clone 284910 (TRAV36/DV7, TRAJ54)
CAVLIQGAQKLVF

SEQ ID NO: 569820 - protein, 16 aa, Homo sapiens
  CDR3 for beta chain variable domain of TCR clone 284910 (TRBV6-1, TRBJ2-2)
CASSGQGLANTGELFF

SEQ ID NO: 569821 - protein, 15 aa, Homo sapiens
  CDR3 for alpha chain variable domain of TCR clone 284911 (TRAV35, TRAJ20)
CAGQLVGSNDYKLSF

SEQ ID NO: 569822 - protein, 13 aa, Homo sapiens
  CDR3 for beta chain variable domain of TCR clone 284911 (TRBV19, TRBJ2-7)
CARSKTGTHEQYF

SEQ ID NO: 569823 - protein, 14 aa, Homo sapiens
  CDR3 for alpha chain variable domain of TCR clone 284912 (TRAV1-2, TRAJ8)
CAVREDTGFQKLVF

SEQ ID NO: 569824 - protein, 16 aa, Homo sapiens
  CDR3 for beta chain variable domain of TCR clone 284912 (TRBV7-2, TRBJ1-4)
CASSLAPGRRDEKLFF

SEQ ID NO: 569825 - protein, 10 aa, Homo sapiens
  CDR3 for alpha chain variable domain of TCR clone 284913 (TRAV30, TRAJ16)
CGTGGQKLLF

SEQ ID NO: 569826 - protein, 17 aa, Homo sapiens
  CDR3 for beta chain variable domain of TCR clone 284913 (TRBV13, TRBJ2-3)
CASSLSRVAGGRNTQYF

SEQ ID NO: 569827 - protein, 13 aa, Homo sapiens
  CDR3 for alpha chain variable domain of TCR clone 284914 (TRAV13-2, TRAJ48)
CAEMDFGHEKLTF

SEQ ID NO: 569828 - protein, 14 aa, Homo sapiens
  CDR3 for beta chain variable domain of TCR clone 284914 (TRBV20-1, TRBJ2-7)
CSAKRGRSSYEQYF

SEQ ID NO: 569829 - protein, 14 aa, Homo sapiens
  CDR3 for alpha chain variable domain of TCR clone 284915 (TRAV17, TRAJ12)
CATDEKDSSYELIF

SEQ ID NO: 569830 - protein, 16 aa, Homo sapiens
  CDR3 for beta chain variable domain of TCR clone 284915 (TRBV11-2, TRBJ2-1)
CASSPRLAGVYNEQFF

SEQ ID NO: 569831 - protein, 13 aa, Homo sapiens
  CDR3 for alpha chain variable domain of TCR clone 284916 (TRAV23/DV6, TRAJ22)
CAPYSGSARQLTF

SEQ ID NO: 569832 - protein, 12 aa, Homo sapiens
  CDR3 for beta chain variable domain of TCR clone 284916 (TRBV28, TRBJ2-3)
CASSLYRDTQYF

SEQ ID NO: 569833 - protein, 17 aa, Homo sapiens
  CDR3 for alpha chain variable domain of TCR clone 284917 (TRAV13-1, TRAJ52)
CAASSGADGTSYGKLTF

SEQ ID NO: 569834 - protein, 14 aa, Homo sapiens
  CDR3 for beta chain variable domain of TCR clone 284917 (TRBV5-1, TRBJ2-7)
CASSLWGAQDEQYF

SEQ ID NO: 569835 - protein, 14 aa, Homo sapiens
  CDR3 for alpha chain variable domain of TCR clone 284918 (TRAV12-1, TRAJ43)
CVVKGRSNNNDMRF

SEQ ID NO: 569836 - protein, 13 aa, Homo sapiens
  CDR3 for beta chain variable domain of TCR clone 284918 (TRBV27, TRBJ1-1)
CASSLSIGAEAFF

SEQ ID NO: 569837 - protein, 11 aa, Homo sapiens
  CDR3 for alpha chain variable domain of TCR clone 284919 (TRAV21, TRAJ34)
CAHYNTDKLIF

SEQ ID NO: 569838 - protein, 17 aa, Homo sapiens
  CDR3 for beta chain variable domain of TCR clone 284919 (TRBV5-1, TRBJ2-5)
CASSPVALGQNQETQYF

SEQ ID NO: 569839 - protein, 17 aa, Homo sapiens
  CDR3 for alpha chain variable domain of TCR clone 284920 (TRAV26-2, TRAJ28)
CILRPLLIVAGSYQLTF

SEQ ID NO: 569840 - protein, 13 aa, Homo sapiens
  CDR3 for beta chain variable domain of TCR clone 284920 (TRBV7-3, TRBJ1-1)
CASSQDWGAEAFF

SEQ ID NO: 569841 - protein, 14 aa, Homo sapiens
  CDR3 for alpha chain variable domain of TCR clone 284921 (TRAV1-1, TRAJ23)
CSVSIYNQGGKLIF

SEQ ID NO: 569842 - protein, 15 aa, Homo sapiens
  CDR3 for beta chain variable domain of TCR clone 284921 (TRBV5-8, TRBJ2-2)
CASSLDRGATGELFF

SEQ ID NO: 569843 - protein, 16 aa, Homo sapiens
  CDR3 for alpha chain variable domain of TCR clone 284922 (TRAV12-1, TRAJ12)
CVVNTLLMDSSYKLIF

SEQ ID NO: 569844 - protein, 13 aa, Homo sapiens
  CDR3 for beta chain variable domain of TCR clone 284922 (TRBV14, TRBJ2-7)
CASSKDRRYEQYF

SEQ ID NO: 569845 - protein, 15 aa, Homo sapiens
  CDR3 for alpha chain variable domain of TCR clone 284923 (TRAV14/DV4, TRAJ22)
CNERGPPGSARHLTF

SEQ ID NO: 569846 - protein, 16 aa, Homo sapiens
  CDR3 for beta chain variable domain of TCR clone 284923 (TRBV19, TRBJ1-6)
CASSVAPVAGNSPLHF

SEQ ID NO: 569847 - protein, 12 aa, Homo sapiens
  CDR3 for alpha chain variable domain of TCR clone 284924 (TRAV16, TRAJ26)
CSSEDGGQNFVF

SEQ ID NO: 569848 - protein, 13 aa, Homo sapiens
  CDR3 for beta chain variable domain of TCR clone 284924 (TRBV25-1, TRBJ1-1)
CASSDRGRAEAFF

SEQ ID NO: 569849 - protein, 13 aa, Homo sapiens
  CDR3 for alpha chain variable domain of TCR clone 284925 (TRAV8-6, TRAJ49)
CAAITNTGNQFYF

SEQ ID NO: 569850 - protein, 16 aa, Homo sapiens
  CDR3 for beta chain variable domain of TCR clone 284925 (TRBV7-3, TRBJ2-3)
CASSLSGYRPEDTQYF

SEQ ID NO: 569851 - protein, 10 aa, Homo sapiens
  CDR3 for alpha chain variable domain of TCR clone 284926 (TRAV2, TRAJ34)
CAVVNDKPIF

SEQ ID NO: 569852 - protein, 18 aa, Homo sapiens
  CDR3 for beta chain variable domain of TCR clone 284926 (TRBV11-2, TRBJ2-3)
CASSLGGASRGAPNTQYF

SEQ ID NO: 569853 - protein, 15 aa, Homo sapiens
  CDR3 for alpha chain variable domain of TCR clone 284927 (TRAV8-4, TRAJ40)
CALSSITSGTYKYIF

SEQ ID NO: 569854 - protein, 13 aa, Homo sapiens
  CDR3 for beta chain variable domain of TCR clone 284927 (TRBV2, TRBJ2-1)
CATSRGTDNEQFF

SEQ ID NO: 569855 - protein, 16 aa, Homo sapiens
  CDR3 for alpha chain variable domain of TCR clone 284928 (TRAV3, TRAJ10)
CAVRDIRAGGGNKLTF

SEQ ID NO: 569856 - protein, 17 aa, Homo sapiens
  CDR3 for beta chain variable domain of TCR clone 284928 (TRBV6-5, TRBJ2-4)
CASRPTPGQGSKNIQYF

SEQ ID NO: 569857 - protein, 16 aa, Homo sapiens
  CDR3 for alpha chain variable domain of TCR clone 284929 (TRAV26-1, TRAJ48)
IASSDLSHFGNEKLTF

SEQ ID NO: 569858 - protein, 14 aa, Homo sapiens
  CDR3 for beta chain variable domain of TCR clone 284929 (TRBV13, TRBJ2-7)
CASSLKGASYEQYF

SEQ ID NO: 569859 - protein, 14 aa, Homo sapiens
  CDR3 for alpha chain variable domain of TCR clone 284930 (TRAV1-2, TRAJ4)
CAVRSPGGYNKLIF

SEQ ID NO: 569860 - protein, 14 aa, Homo sapiens
  CDR3 for beta chain variable domain of TCR clone 284930 (TRBV5-1, TRBJ1-2)
CASSLEPVNYGYTF

SEQ ID NO: 569861 - protein, 15 aa, Homo sapiens
  CDR3 for alpha chain variable domain of TCR clone 284931 (TRAV2, TRAJ38)
CAVEDRIDNNRKLIW

SEQ ID NO: 569862 - protein, 16 aa, Homo sapiens
  CDR3 for beta chain variable domain of TCR clone 284931 (TRBV7-8, TRBJ2-1)
CASSLAGTGRYNKQFF

SEQ ID NO: 569863 - protein, 13 aa, Homo sapiens
  CDR3 for alpha chain variable domain of TCR clone 284932 (TRAV3, TRAJ21)
CAVREPDLNKFYS

SEQ ID NO: 569864 - protein, 13 aa, Homo sapiens
  CDR3 for beta chain variable domain of TCR clone 284932 (TRBV9, TRBJ2-1)
CASSPSGGNKQFF

SEQ ID NO: 569865 - protein, 12 aa, Homo sapiens
  CDR3 for alpha chain variable domain of TCR clone 284933 (TRAV12-1, TRAJ40)
CVVYSGTYKYIF

SEQ ID NO: 569866 - protein, 16 aa, Homo sapiens
  CDR3 for beta chain variable domain of TCR clone 284933 (TRBV12-4, TRBJ2-5)
CASSFFVRGRQETQYF

SEQ ID NO: 569867 - protein, 14 aa, Homo sapiens
  CDR3 for alpha chain variable domain of TCR clone 284934 (TRAV12-3, TRAJ10)
SHLPLTGGGNKLTF

SEQ ID NO: 569868 - protein, 16 aa, Homo sapiens
  CDR3 for beta chain variable domain of TCR clone 284934 (TRBV19, TRBJ2-1)
CASSQAGPSSYNEQFF

SEQ ID NO: 569869 - protein, 16 aa, Homo sapiens
  CDR3 for alpha chain variable domain of TCR clone 284935 (TRAV3, TRAJ4)
CAVRALFSGGYNKLIF

SEQ ID NO: 569870 - protein, 16 aa, Homo sapiens
  CDR3 for beta chain variable domain of TCR clone 284935 (TRBV6-1, TRBJ1-6)
CASSERGGSGNSPLHF

SEQ ID NO: 569871 - protein, 13 aa, Homo sapiens
  CDR3 for alpha chain variable domain of TCR clone 284936 (TRAV21, TRAJ15)
CAVVNQAGTALIF

SEQ ID NO: 569872 - protein, 16 aa, Homo sapiens
  CDR3 for beta chain variable domain of TCR clone 284936 (TRBV5-1, TRBJ2-2)
CASSLWDTTNTGELFF

SEQ ID NO: 569873 - protein, 15 aa, Homo sapiens
  CDR3 for alpha chain variable domain of TCR clone 284937 (TRAV8-3, TRAJ45)
CASSYSGGGADGLTF

SEQ ID NO: 569874 - protein, 15 aa, Homo sapiens
  CDR3 for beta chain variable domain of TCR clone 284937 (TRBV7-3, TRBJ2-3)
CASSLTSGVGDTQYF

SEQ ID NO: 569875 - protein, 16 aa, Homo sapiens
  CDR3 for alpha chain variable domain of TCR clone 284938 (TRAV30, TRAJ24)
CGTEIVDDDSWGKFQF

SEQ ID NO: 569876 - protein, 17 aa, Homo sapiens
  CDR3 for beta chain variable domain of TCR clone 284938 (TRBV20-1, TRBJ2-1)
CSARDRRRASSYNEQFF

SEQ ID NO: 569877 - protein, 13 aa, Homo sapiens
  CDR3 for alpha chain variable domain of TCR clone 284939 (TRAV38-1, TRAJ42)
CARWGVSQGNLIF

SEQ ID NO: 569878 - protein, 17 aa, Homo sapiens
  CDR3 for beta chain variable domain of TCR clone 284939 (TRBV20-1, TRBJ2-1)
CSARDPLAGVWDNEQFF

SEQ ID NO: 569879 - protein, 12 aa, Homo sapiens
  CDR3 for alpha chain variable domain of TCR clone 284940 (TRAV13-1, TRAJ49)
CAAYSTGNQFYF

SEQ ID NO: 569880 - protein, 16 aa, Homo sapiens
  CDR3 for beta chain variable domain of TCR clone 284940 (TRBV27, TRBJ2-2)
CASSSSGVSNTGELFF

SEQ ID NO: 569881 - protein, 10 aa, Homo sapiens
  CDR3 for alpha chain variable domain of TCR clone 284941 (TRAV23/DV6, TRAJ31)
CARAGARRMF

SEQ ID NO: 569882 - protein, 14 aa, Homo sapiens
  CDR3 for beta chain variable domain of TCR clone 284941 (TRBV7-8, TRBJ1-2)
CASSPDSLSYGYTF

SEQ ID NO: 569883 - protein, 11 aa, Homo sapiens
  CDR3 for alpha chain variable domain of TCR clone 284942 (TRAV2, TRAJ13)
CACGGYQKVTF

SEQ ID NO: 569884 - protein, 16 aa, Homo sapiens
  CDR3 for beta chain variable domain of TCR clone 284942 (TRBV10-3, TRBJ2-1)
CAISGVGDGGGGEQFF

SEQ ID NO: 569885 - protein, 16 aa, Homo sapiens
  CDR3 for alpha chain variable domain of TCR clone 284943 (TRAV12-2, TRAJ40)
CAVIRGGTSGTYKYIF

SEQ ID NO: 569886 - protein, 13 aa, Homo sapiens
  CDR3 for beta chain variable domain of TCR clone 284943 (TRBV7-9, TRBJ1-2)
CDSSLKQNYGYTF

SEQ ID NO: 569887 - protein, 16 aa, Homo sapiens
  CDR3 for alpha chain variable domain of TCR clone 284944 (TRAV3, TRAJ37)
CAVRPHGSGNTGKLIF

SEQ ID NO: 569888 - protein, 15 aa, Homo sapiens
  CDR3 for beta chain variable domain of TCR clone 284944 (TRBV10-3, TRBJ2-3)
CAISPTSGGTDTQYF

SEQ ID NO: 569889 - protein, 11 aa, Homo sapiens
  CDR3 for alpha chain variable domain of TCR clone 284945 (TRAV17, TRAJ31)
CATDRTAGLMF

SEQ ID NO: 569890 - protein, 14 aa, Homo sapiens
  CDR3 for beta chain variable domain of TCR clone 284945 (TRBV4-1, TRBJ2-2)
CASSQAVNTGELFF

SEQ ID NO: 569891 - protein, 15 aa, Homo sapiens
  CDR3 for alpha chain variable domain of TCR clone 284946 (TRAV26-1, TRAJ29)
CIVRGEGSGNTPLVF

SEQ ID NO: 569892 - protein, 14 aa, Homo sapiens
  CDR3 for beta chain variable domain of TCR clone 284946 (TRBV18, TRBJ2-5)
CASSPGVSKETQYF

SEQ ID NO: 569893 - protein, 13 aa, Homo sapiens
  CDR3 for alpha chain variable domain of TCR clone 284947 (TRAV21, TRAJ27)
CAALNTNAVKSTF

SEQ ID NO: 569894 - protein, 14 aa, Homo sapiens
  CDR3 for beta chain variable domain of TCR clone 284947 (TRBV27, TRBJ1-1)
CASSLLSGLSEAFF

SEQ ID NO: 569895 - protein, 13 aa, Homo sapiens
  CDR3 for alpha chain variable domain of TCR clone 284948 (TRAV13-2, TRAJ48)
CAEMDFGNEKLTF

SEQ ID NO: 569896 - protein, 15 aa, Homo sapiens
  CDR3 for beta chain variable domain of TCR clone 284948 (TRBV7-9, TRBJ1-6)
CASSSPGRGNSLLHF

SEQ ID NO: 569897 - protein, 16 aa, Homo sapiens
  CDR3 for alpha chain variable domain of TCR clone 284949 (TRAV29/DV5, TRAJ36)
CAASAGVETGANNLCF

SEQ ID NO: 569898 - protein, 16 aa, Homo sapiens
  CDR3 for beta chain variable domain of TCR clone 284949 (TRBV5-1, TRBJ2-3)
CASSLGLAVYTDTHYF

SEQ ID NO: 569899 - protein, 12 aa, Homo sapiens
  CDR3 for alpha chain variable domain of TCR clone 284950 (TRAV3, TRAJ26)
CAVRDYGQNFVF

SEQ ID NO: 569900 - protein, 15 aa, Homo sapiens
  CDR3 for beta chain variable domain of TCR clone 284950 (TRBV19, TRBJ1-5)
CASSIVWADNQPQHF

SEQ ID NO: 569901 - protein, 15 aa, Homo sapiens
  CDR3 for alpha chain variable domain of TCR clone 284951 (TRAV26-1, TRAJ29)
CIVRVEGSGNTPLVF

SEQ ID NO: 569902 - protein, 13 aa, Homo sapiens
  CDR3 for beta chain variable domain of TCR clone 284951 (TRBV13, TRBJ2-1)
CASTPGSYNEQFF

SEQ ID NO: 569903 - protein, 12 aa, Homo sapiens
  CDR3 for alpha chain variable domain of TCR clone 284952 (TRAV12-2, TRAJ8)
CAVNTGFQKLVF

SEQ ID NO: 569904 - protein, 15 aa, Homo sapiens
  CDR3 for beta chain variable domain of TCR clone 284952 (TRBV7-8, TRBJ1-5)
CASSLERRGLEPQYF

SEQ ID NO: 569905 - protein, 14 aa, Homo sapiens
  CDR3 for alpha chain variable domain of TCR clone 284953 (TRAV26-1, TRAJ48)
CIVRGGFGNEKLTF

SEQ ID NO: 569906 - protein, 13 aa, Homo sapiens
  CDR3 for beta chain variable domain of TCR clone 284953 (TRBV11-3, TRBJ2-3)
CASSHDTKDTQYF

SEQ ID NO: 569907 - protein, 16 aa, Homo sapiens
  CDR3 for alpha chain variable domain of TCR clone 284954 (TRAV12-3, TRAJ28)
CAMSANSGAGSYQLTF

SEQ ID NO: 569908 - protein, 16 aa, Homo sapiens
  CDR3 for beta chain variable domain of TCR clone 284954 (TRBV7-2, TRBJ1-3)
CASSRLEASSGNTIYF

SEQ ID NO: 569909 - protein, 18 aa, Homo sapiens
  CDR3 for alpha chain variable domain of TCR clone 284955 (TRAV13-1, TRAJ52)
CAASKRSAGGTRYGKLTF

SEQ ID NO: 569910 - protein, 12 aa, Homo sapiens
  CDR3 for beta chain variable domain of TCR clone 284955 (TRBV11-2, TRBJ2-2)
CASSLGGGELFF

SEQ ID NO: 569911 - protein, 13 aa, Homo sapiens
  CDR3 for alpha chain variable domain of TCR clone 284956 (TRAV1-2, TRAJ12)
CAVSMDSSYKLIF

SEQ ID NO: 569912 - protein, 14 aa, Homo sapiens
  CDR3 for beta chain variable domain of TCR clone 284956 (TRBV19, TRBJ2-1)
CASRSGRDYNEQFF

SEQ ID NO: 569913 - protein, 12 aa, Homo sapiens
  CDR3 for alpha chain variable domain of TCR clone 284957 (TRAV12-1, TRAJ40)
CVVYSGTYKYIF

SEQ ID NO: 569914 - protein, 15 aa, Homo sapiens
  CDR3 for beta chain variable domain of TCR clone 284957 (TRBV12-4, TRBJ2-3)
CASSSTSGSTDTQYF

SEQ ID NO: 569915 - protein, 12 aa, Homo sapiens
  CDR3 for alpha chain variable domain of TCR clone 284958 (TRAV12-2, TRAJ10)
WGVTGGGNKLTF

SEQ ID NO: 569916 - protein, 15 aa, Homo sapiens
  CDR3 for beta chain variable domain of TCR clone 284958 (TRBV27, TRBJ2-1)
CASRNGGGSSNEQFF

SEQ ID NO: 569917 - protein, 14 aa, Homo sapiens
  CDR3 for alpha chain variable domain of TCR clone 284959 (TRAV35, TRAJ33)
CSGSSQDSNYQLIW

SEQ ID NO: 569918 - protein, 15 aa, Homo sapiens
  CDR3 for beta chain variable domain of TCR clone 284959 (TRBV24-1, TRBJ2-1)
CATSGSGGFYNEQFF

SEQ ID NO: 569919 - protein, 12 aa, Homo sapiens
  CDR3 for alpha chain variable domain of TCR clone 284960 (TRAV1-2, TRAJ29)
CAVPSGNTPLVF

SEQ ID NO: 569920 - protein, 13 aa, Homo sapiens
  CDR3 for beta chain variable domain of TCR clone 284960 (TRBV19, TRBJ1-2)
CASSVPGQDGYTF

SEQ ID NO: 569921 - protein, 14 aa, Homo sapiens
  CDR3 for alpha chain variable domain of TCR clone 284961 (TRAV12-1, TRAJ17)
CVVNYKAAGNKLTF

SEQ ID NO: 569922 - protein, 15 aa, Homo sapiens
  CDR3 for beta chain variable domain of TCR clone 284961 (TRBV28, TRBJ2-7)
CASSPGGRGFYEQYF

SEQ ID NO: 569923 - protein, 13 aa, Homo sapiens
  CDR3 for alpha chain variable domain of TCR clone 284962 (TRAV26-1, )
CIVSHRVEGFWNQ

SEQ ID NO: 569924 - protein, 13 aa, Homo sapiens
  CDR3 for beta chain variable domain of TCR clone 284962 (TRBV12-4, TRBJ1-5)
CASSPDRAQPQHF

SEQ ID NO: 569925 - protein, 16 aa, Homo sapiens
  CDR3 for alpha chain variable domain of TCR clone 284963 (TRAV30, TRAJ24)
CGTEIVDADSWGKFQF

SEQ ID NO: 569926 - protein, 14 aa, Homo sapiens
  CDR3 for beta chain variable domain of TCR clone 284963 (TRBV11-2, TRBJ2-5)
CASRPLAGRETQYF

SEQ ID NO: 569927 - protein, 15 aa, Homo sapiens
  CDR3 for alpha chain variable domain of TCR clone 284964 (TRAV8-3, TRAJ45)
CASLYSGGGADGLTF

SEQ ID NO: 569928 - protein, 12 aa, Homo sapiens
  CDR3 for beta chain variable domain of TCR clone 284964 (TRBV11-2, TRBJ2-3)
CASRPGTDTQYF

SEQ ID NO: 569929 - protein, 12 aa, Homo sapiens
  CDR3 for alpha chain variable domain of TCR clone 284965 (TRAV13-1, TRAJ48)
CAANFGNEKLTF

SEQ ID NO: 569930 - protein, 15 aa, Homo sapiens
  CDR3 for beta chain variable domain of TCR clone 284965 (TRBV7-9, TRBJ1-4)
CASSRTGGFNEKLFF

SEQ ID NO: 569931 - protein, 12 aa, Homo sapiens
  CDR3 for alpha chain variable domain of TCR clone 284966 (TRAV21, TRAJ33)
CAKMDSNYQLIW

SEQ ID NO: 569932 - protein, 11 aa, Homo sapiens
  CDR3 for beta chain variable domain of TCR clone 284966 (TRBV19, TRBJ1-1)
CASSIGSGDFF

SEQ ID NO: 569933 - protein, 16 aa, Homo sapiens
  CDR3 for alpha chain variable domain of TCR clone 284967 (TRAV30, TRAJ24)
CGAEIVDADSWGKFQF

SEQ ID NO: 569934 - protein, 14 aa, Homo sapiens
  CDR3 for beta chain variable domain of TCR clone 284967 (TRBV4-2, TRBJ2-3)
CASSQERGTDTQYF

SEQ ID NO: 569935 - protein, 13 aa, Homo sapiens
  CDR3 for alpha chain variable domain of TCR clone 284968 (TRAV12-2, TRAJ47)
CAVFMEYGNKLVF

SEQ ID NO: 569936 - protein, 14 aa, Homo sapiens
  CDR3 for beta chain variable domain of TCR clone 284968 (TRBV4-1, TRBJ1-5)
CASSQGPTNKPQHF

SEQ ID NO: 569937 - protein, 15 aa, Homo sapiens
  CDR3 for alpha chain variable domain of TCR clone 284969 (TRAV3, TRAJ3)
CAVRDMSSSASKIIF

SEQ ID NO: 569938 - protein, 12 aa, Homo sapiens
  CDR3 for beta chain variable domain of TCR clone 284969 (TRBV19, TRBJ2-1)
CASSRQGAEQFF

SEQ ID NO: 569939 - protein, 16 aa, Homo sapiens
  CDR3 for alpha chain variable domain of TCR clone 284970 (TRAV4, TRAJ9)
CLVGDPNRPGGFKTIF

SEQ ID NO: 569940 - protein, 15 aa, Homo sapiens
  CDR3 for beta chain variable domain of TCR clone 284970 (TRBV5-1, TRBJ2-5)
CASSFKGGDQETQYF

SEQ ID NO: 569941 - protein, 11 aa, Homo sapiens
  CDR3 for alpha chain variable domain of TCR clone 284971 (TRAV21, TRAJ9)
FAVPGGFKTIF

SEQ ID NO: 569942 - protein, 12 aa, Homo sapiens
  CDR3 for beta chain variable domain of TCR clone 284971 (TRBV20-1, TRBJ2-3)
CSARVGTDTQYF

SEQ ID NO: 569943 - protein, 12 aa, Homo sapiens
  CDR3 for alpha chain variable domain of TCR clone 284972 (TRAV21, TRAJ23)
CAVGPQGGKLNF

SEQ ID NO: 569944 - protein, 13 aa, Homo sapiens
  CDR3 for beta chain variable domain of TCR clone 284972 (TRBV20-1, TRBJ2-7)
CSARTGAGYEQYF

SEQ ID NO: 569945 - protein, 13 aa, Homo sapiens
  CDR3 for alpha chain variable domain of TCR clone 284973 (TRAV2, TRAJ29)
CAAGNSGNTPLVF

SEQ ID NO: 569946 - protein, 16 aa, Homo sapiens
  CDR3 for beta chain variable domain of TCR clone 284973 (TRBV7-9, TRBJ1-2)
CASSPGWGAINYGYTF

SEQ ID NO: 569947 - protein, 14 aa, Homo sapiens
  CDR3 for alpha chain variable domain of TCR clone 284974 (TRAV1-2, TRAJ16)
CAVNRFSDGQKLLF

SEQ ID NO: 569948 - protein, 17 aa, Homo sapiens
  CDR3 for beta chain variable domain of TCR clone 284974 (TRBV4-2, TRBJ2-1)
CASSQVSGLAMNNEQFF

SEQ ID NO: 569949 - protein, 15 aa, Homo sapiens
  CDR3 for alpha chain variable domain of TCR clone 284975 (TRAV26-1, TRAJ29)
CIFRVEGSGNTPLVF

SEQ ID NO: 569950 - protein, 12 aa, Homo sapiens
  CDR3 for beta chain variable domain of TCR clone 284975 (TRBV5-5, TRBJ2-5)
CASSYFGETQYF

SEQ ID NO: 569951 - protein, 14 aa, Homo sapiens
  CDR3 for alpha chain variable domain of TCR clone 284976 (TRAV20, TRAJ29)
CAVQARVGNTPLDF

SEQ ID NO: 569952 - protein, 15 aa, Homo sapiens
  CDR3 for beta chain variable domain of TCR clone 284976 (TRBV29-1, TRBJ2-7)
CSVEFFDRGSYEQYF

SEQ ID NO: 569953 - protein, 13 aa, Homo sapiens
  CDR3 for alpha chain variable domain of TCR clone 284977 (TRAV17, TRAJ9)
CATDYTGGFKTIF

SEQ ID NO: 569954 - protein, 15 aa, Homo sapiens
  CDR3 for beta chain variable domain of TCR clone 284977 (TRBV19, TRBJ1-6)
CASSTQGAVGSPLHF

SEQ ID NO: 569955 - protein, 12 aa, Homo sapiens
  CDR3 for alpha chain variable domain of TCR clone 284978 (TRAV16, TRAJ10)
CSRTGGGNKLTF

SEQ ID NO: 569956 - protein, 15 aa, Homo sapiens
  CDR3 for beta chain variable domain of TCR clone 284978 (TRBV6-3, TRBJ2-7)
CASSSPGTAFYERYF

SEQ ID NO: 569957 - protein, 14 aa, Homo sapiens
  CDR3 for alpha chain variable domain of TCR clone 284979 (TRAV2, TRAJ9)
CAVEDRSGGFKTIF

SEQ ID NO: 569958 - protein, 16 aa, Homo sapiens
  CDR3 for beta chain variable domain of TCR clone 284979 (TRBV20-1, TRBJ2-3)
CSAVRDRGTIADTQYF

SEQ ID NO: 569959 - protein, 14 aa, Homo sapiens
  CDR3 for alpha chain variable domain of TCR clone 284980 (TRAV13-1, TRAJ35)
SSASKGGFGNVLHC

SEQ ID NO: 569960 - protein, 13 aa, Homo sapiens
  CDR3 for beta chain variable domain of TCR clone 284980 (TRBV7-3, TRBJ1-1)
CASSQDWGAEAFF

SEQ ID NO: 569961 - protein, 12 aa, Homo sapiens
  CDR3 for alpha chain variable domain of TCR clone 284981 (TRAV9-2, TRAJ36)
CALKKGANNLFF

SEQ ID NO: 569962 - protein, 13 aa, Homo sapiens
  CDR3 for beta chain variable domain of TCR clone 284981 (TRBV27, TRBJ1-1)
CASSLSIGAEAFF

SEQ ID NO: 569963 - protein, 19 aa, Homo sapiens
  CDR3 for alpha chain variable domain of TCR clone 284982 (TRAV25, TRAJ20)
TATQTTDVGILPHDYKLSF

SEQ ID NO: 569964 - protein, 16 aa, Homo sapiens
  CDR3 for beta chain variable domain of TCR clone 284982 (TRBV4-1, TRBJ2-1)
CASSQEAGQGSDEQFF

SEQ ID NO: 569965 - protein, 14 aa, Homo sapiens
  CDR3 for alpha chain variable domain of TCR clone 284983 (TRAV4, TRAJ33)
CLVGDVQSNYQLIW

SEQ ID NO: 569966 - protein, 14 aa, Homo sapiens
  CDR3 for beta chain variable domain of TCR clone 284983 (TRBV12-5, TRBJ2-5)
CASGSRTHQETQYF

SEQ ID NO: 569967 - protein, 14 aa, Homo sapiens
  CDR3 for alpha chain variable domain of TCR clone 284984 (TRAV17, TRAJ31)
CAAVLRNNNARLMF

SEQ ID NO: 569968 - protein, 14 aa, Homo sapiens
  CDR3 for beta chain variable domain of TCR clone 284984 (TRBV12-4, TRBJ2-5)
CAGSLWQKQETQYF

SEQ ID NO: 569969 - protein, 16 aa, Homo sapiens
  CDR3 for alpha chain variable domain of TCR clone 284985 (TRAV3, TRAJ23)
CAVEPLIYNQGGKLIF

SEQ ID NO: 569970 - protein, 16 aa, Homo sapiens
  CDR3 for beta chain variable domain of TCR clone 284985 (TRBV3-1, TRBJ2-5)
CASSPGQFNGFGTQYF

SEQ ID NO: 569971 - protein, 14 aa, Homo sapiens
  CDR3 for alpha chain variable domain of TCR clone 284986 (TRAV2, TRAJ37)
CAVDFTSNTGKLIF

SEQ ID NO: 569972 - protein, 13 aa, Homo sapiens
  CDR3 for beta chain variable domain of TCR clone 284986 (TRBV20-1, TRBJ1-1)
QCSTWGGGTEAFF

SEQ ID NO: 569973 - protein, 15 aa, Homo sapiens
  CDR3 for alpha chain variable domain of TCR clone 284987 (TRAV3, TRAJ3)
CAVRDRDSSASKIIF

SEQ ID NO: 569974 - protein, 14 aa, Homo sapiens
  CDR3 for beta chain variable domain of TCR clone 284987 (TRBV19, TRBJ2-1)
CASPTFVLSGEQFF

SEQ ID NO: 569975 - protein, 13 aa, Homo sapiens
  CDR3 for alpha chain variable domain of TCR clone 284988 (TRAV13-2, TRAJ13)
CVERPGGYQKVTF

SEQ ID NO: 569976 - protein, 15 aa, Homo sapiens
  CDR3 for beta chain variable domain of TCR clone 284988 (TRBV4-1, TRBJ1-4)
CASSDTGGTNEKLFF

SEQ ID NO: 569977 - protein, 13 aa, Homo sapiens
  CDR3 for alpha chain variable domain of TCR clone 284989 (TRAV27, TRAJ56)
CAGKPGANSKLTF

SEQ ID NO: 569978 - protein, 16 aa, Homo sapiens
  CDR3 for beta chain variable domain of TCR clone 284989 (TRBV7-9, TRBJ1-2)
CASSLGFSSGEDGYTF

SEQ ID NO: 569979 - protein, 11 aa, Homo sapiens
  CDR3 for alpha chain variable domain of TCR clone 284990 (TRAV13-1, TRAJ33)
CAANSNYQLLW

SEQ ID NO: 569980 - protein, 14 aa, Homo sapiens
  CDR3 for beta chain variable domain of TCR clone 284990 (TRBV20-1, TRBJ2-1)
CSAQIGGSANEQFF

SEQ ID NO: 569981 - protein, 11 aa, Homo sapiens
  CDR3 for alpha chain variable domain of TCR clone 284991 (TRAV1-2, TRAJ40)
CAVPGTYKYIF

SEQ ID NO: 569982 - protein, 15 aa, Homo sapiens
  CDR3 for beta chain variable domain of TCR clone 284991 (TRBV27, TRBJ2-1)
CASSNGGGSSNEQFF

SEQ ID NO: 569983 - protein, 12 aa, Homo sapiens
  CDR3 for alpha chain variable domain of TCR clone 284992 (TRAV1-1, TRAJ39)
CAVPVVGNMLTF

SEQ ID NO: 569984 - protein, 14 aa, Homo sapiens
  CDR3 for beta chain variable domain of TCR clone 284992 (TRBV7-2, TRBJ2-1)
CASSRGGARNEQFF

SEQ ID NO: 569985 - protein, 11 aa, Homo sapiens
  CDR3 for alpha chain variable domain of TCR clone 284993 (TRAV3, TRAJ21)
CAVGNFNKFYF

SEQ ID NO: 569986 - protein, 17 aa, Homo sapiens
  CDR3 for beta chain variable domain of TCR clone 284993 (TRBV7-3, TRBJ2-3)
CASSLMKRTRGADTQYF

SEQ ID NO: 569987 - protein, 14 aa, Homo sapiens
  CDR3 for alpha chain variable domain of TCR clone 284994 (TRAV12-3, TRAJ10)
SHLPLTGGGNKLTF

SEQ ID NO: 569988 - protein, 13 aa, Homo sapiens
  CDR3 for beta chain variable domain of TCR clone 284994 (TRBV18, TRBJ1-2)
CASSASATEGYTF

SEQ ID NO: 569989 - protein, 16 aa, Homo sapiens
  CDR3 for alpha chain variable domain of TCR clone 284995 (TRAV30, TRAJ24)
CGTEIVDADSWGKFQF

SEQ ID NO: 569990 - protein, 15 aa, Homo sapiens
  CDR3 for beta chain variable domain of TCR clone 284995 (TRBV6-1, TRBJ2-3)
CASSERTGRTDTQYF

SEQ ID NO: 569991 - protein, 14 aa, Homo sapiens
  CDR3 for alpha chain variable domain of TCR clone 284996 (TRAV12-2, TRAJ40)
CAVKIPSGTYQYIF

SEQ ID NO: 569992 - protein, 14 aa, Homo sapiens
  CDR3 for beta chain variable domain of TCR clone 284996 (TRBV11-2, TRBJ1-5)
CASSLDRGRQPQHF

SEQ ID NO: 569993 - protein, 13 aa, Homo sapiens
  CDR3 for alpha chain variable domain of TCR clone 284997 (TRAV22, TRAJ29)
CAVGGSGNTPLVF

SEQ ID NO: 569994 - protein, 15 aa, Homo sapiens
  CDR3 for beta chain variable domain of TCR clone 284997 (TRBV4-2, TRBJ1-1)
CASSQAGNTEASLDK

SEQ ID NO: 569995 - protein, 17 aa, Homo sapiens
  CDR3 for alpha chain variable domain of TCR clone 284998 (TRAV8-3, TRAJ40)
CAAPSWAQEPTDTSLEQ

SEQ ID NO: 569996 - protein, 12 aa, Homo sapiens
  CDR3 for beta chain variable domain of TCR clone 284998 (TRBV11-2, TRBJ2-2)
CASSLGGGELFF

SEQ ID NO: 569997 - protein, 13 aa, Homo sapiens
  CDR3 for alpha chain variable domain of TCR clone 284999 (TRAV20, TRAJ54)
CAVQAGGAQKLVF

SEQ ID NO: 569998 - protein, 14 aa, Homo sapiens
  CDR3 for beta chain variable domain of TCR clone 284999 (TRBV20-1, TRBJ2-7)
CSAKTGKGGYEQYF

SEQ ID NO: 569999 - protein, 15 aa, Homo sapiens
  CDR3 for alpha chain variable domain of TCR clone 285000 (TRAV2, TRAJ22)
CAVPSRGGSARQLTF

SEQ ID NO: 570000 - protein, 13 aa, Homo sapiens
  CDR3 for beta chain variable domain of TCR clone 285000 (TRBV7-6, TRBJ1-2)
CQQQVDRDYGYTF

SEQ ID NO: 570001 - protein, 14 aa, Homo sapiens
  CDR3 for alpha chain variable domain of TCR clone 285001 (TRAV39, TRAJ57)
CDVEGQGGSEKLVF

SEQ ID NO: 570002 - protein, 16 aa, Homo sapiens
  CDR3 for beta chain variable domain of TCR clone 285001 (TRBV9, TRBJ2-1)
CASSVGGGGNYNEQFF

SEQ ID NO: 570003 - protein, 12 aa, Homo sapiens
  CDR3 for alpha chain variable domain of TCR clone 285002 (TRAV26-1, TRAJ13)
CIVSRGYQKVTF

SEQ ID NO: 570004 - protein, 12 aa, Homo sapiens
  CDR3 for beta chain variable domain of TCR clone 285002 (TRBV7-2, TRBJ1-6)
CASSLSSSPLHF

SEQ ID NO: 570005 - protein, 13 aa, Homo sapiens
  CDR3 for alpha chain variable domain of TCR clone 285003 (TRAV4, TRAJ34)
CLVSDYNTDKLIF

SEQ ID NO: 570006 - protein, 23 aa, Homo sapiens
  CDR3 for beta chain variable domain of TCR clone 285003 (TRBV4-2, TRBJ2-3)
CASSQDPPRASSISGGRGDTQYF

SEQ ID NO: 570007 - protein, 13 aa, Homo sapiens
  CDR3 for alpha chain variable domain of TCR clone 285004 (TRAV20, TRAJ49)
CAVQARTGNQFYF

SEQ ID NO: 570008 - protein, 14 aa, Homo sapiens
  CDR3 for beta chain variable domain of TCR clone 285004 (TRBV11-3, TRBJ1-5)
LTGDRLYYNQPQHF

SEQ ID NO: 570009 - protein, 13 aa, Homo sapiens
  CDR3 for alpha chain variable domain of TCR clone 285005 (TRAV3, TRAJ21)
CAVATSTNFTLDL

SEQ ID NO: 570010 - protein, 15 aa, Homo sapiens
  CDR3 for beta chain variable domain of TCR clone 285005 (TRBV19, TRBJ1-2)
CASSVGQVLNYGYTF

SEQ ID NO: 570011 - protein, 15 aa, Homo sapiens
  CDR3 for alpha chain variable domain of TCR clone 285006 (TRAV3, TRAJ3)
CAVRDRGSSASKIIF

SEQ ID NO: 570012 - protein, 18 aa, Homo sapiens
  CDR3 for beta chain variable domain of TCR clone 285006 (TRBV25-1, TRBJ1-2)
CASSGLQNGQGLIFGCTF

SEQ ID NO: 570013 - protein, 14 aa, Homo sapiens
  CDR3 for alpha chain variable domain of TCR clone 285007 (TRAV2, TRAJ9)
CAVEDRSGGFKTIF

SEQ ID NO: 570014 - protein, 14 aa, Homo sapiens
  CDR3 for beta chain variable domain of TCR clone 285007 (TRBV7-2, TRBJ2-7)
CASSSISGFSEQYF

SEQ ID NO: 570015 - protein, 14 aa, Homo sapiens
  CDR3 for alpha chain variable domain of TCR clone 285008 (TRAV12-1, TRAJ3)
CVVILYSSASKIIF

SEQ ID NO: 570016 - protein, 14 aa, Homo sapiens
  CDR3 for beta chain variable domain of TCR clone 285008 (TRBV15, TRBJ2-5)
CATSIGGLGETQYF

SEQ ID NO: 570017 - protein, 15 aa, Homo sapiens
  CDR3 for alpha chain variable domain of TCR clone 285009 (TRAV17, TRAJ57)
CATGPSQGGSEKLVF

SEQ ID NO: 570018 - protein, 15 aa, Homo sapiens
  CDR3 for beta chain variable domain of TCR clone 285009 (TRBV7-9, TRBJ1-4)
CASSARTGGNEKLFF

SEQ ID NO: 570019 - protein, 14 aa, Homo sapiens
  CDR3 for alpha chain variable domain of TCR clone 285010 (TRAV14/DV4, TRAJ54)
GAMREAPGAQKLVF

SEQ ID NO: 570020 - protein, 15 aa, Homo sapiens
  CDR3 for beta chain variable domain of TCR clone 285010 (TRBV5-1, TRBJ2-7)
CASSLNGGPAREQYF

SEQ ID NO: 570021 - protein, 11 aa, Homo sapiens
  CDR3 for alpha chain variable domain of TCR clone 285011 (TRAV12-1, TRAJ8)
CVVTGFQKLVF

SEQ ID NO: 570022 - protein, 15 aa, Homo sapiens
  CDR3 for beta chain variable domain of TCR clone 285011 (TRBV5-1, TRBJ2-1)
CASSPPRAPYNEQFF

SEQ ID NO: 570023 - protein, 17 aa, Homo sapiens
  CDR3 for alpha chain variable domain of TCR clone 285012 (TRAV3, TRAJ6)
CAVRDGPRAGGSYIPTF

SEQ ID NO: 570024 - protein, 15 aa, Homo sapiens
  CDR3 for beta chain variable domain of TCR clone 285012 (TRBV11-2, TRBJ1-1)
CASSFSTRMNTEAFF

SEQ ID NO: 570025 - protein, 13 aa, Homo sapiens
  CDR3 for alpha chain variable domain of TCR clone 285013 (TRAV1-2, TRAJ31)
CAVRGYNNARLMF

SEQ ID NO: 570026 - protein, 14 aa, Homo sapiens
  CDR3 for beta chain variable domain of TCR clone 285013 (TRBV12-4, TRBJ1-3)
SASTLTGAGNTIYF

SEQ ID NO: 570027 - protein, 14 aa, Homo sapiens
  CDR3 for alpha chain variable domain of TCR clone 285014 (TRAV38-1, TRAJ45)
CASHSGGGADGLTF

SEQ ID NO: 570028 - protein, 15 aa, Homo sapiens
  CDR3 for beta chain variable domain of TCR clone 285014 (TRBV27, TRBJ2-1)
CASSNGGGSSNEQFF

SEQ ID NO: 570029 - protein, 16 aa, Homo sapiens
  CDR3 for alpha chain variable domain of TCR clone 285015 (TRAV14/DV4, TRAJ53)
CAMREGGGGSNYKLTF

SEQ ID NO: 570030 - protein, 16 aa, Homo sapiens
  CDR3 for beta chain variable domain of TCR clone 285015 (TRBV28, TRBJ2-7)
CASSLTASGSKYEQYF

SEQ ID NO: 570031 - protein, 15 aa, Homo sapiens
  CDR3 for alpha chain variable domain of TCR clone 285016 (TRAV12-1, TRAJ44)
CVADLPTGTASKLTF

SEQ ID NO: 570032 - protein, 12 aa, Homo sapiens
  CDR3 for beta chain variable domain of TCR clone 285016 (TRBV6-5, TRBJ2-5)
CSGPQGGETQYF

SEQ ID NO: 570033 - protein, 14 aa, Homo sapiens
  CDR3 for alpha chain variable domain of TCR clone 285017 (TRAV12-2, TRAJ17)
CAVNIKAAGNKLNF

SEQ ID NO: 570034 - protein, 16 aa, Homo sapiens
  CDR3 for beta chain variable domain of TCR clone 285017 (TRBV20-1, TRBJ2-6)
CSASSQGYDGANVLTF

SEQ ID NO: 570035 - protein, 17 aa, Homo sapiens
  CDR3 for alpha chain variable domain of TCR clone 285018 (TRAV13-1, TRAJ52)
GAASSGAGGTSYGKLTF

SEQ ID NO: 570036 - protein, 15 aa, Homo sapiens
  CDR3 for beta chain variable domain of TCR clone 285018 (TRBV2, TRBJ2-1)
CASSELAGSYNEQFF

SEQ ID NO: 570037 - protein, 15 aa, Homo sapiens
  CDR3 for alpha chain variable domain of TCR clone 285019 (TRAV38-1, TRAJ37)
CAFIVGSGNTGKLIF

SEQ ID NO: 570038 - protein, 16 aa, Homo sapiens
  CDR3 for beta chain variable domain of TCR clone 285019 (TRBV6-1, TRBJ2-3)
CASSEVIGQGTDTQYF

SEQ ID NO: 570039 - protein, 10 aa, Homo sapiens
  CDR3 for alpha chain variable domain of TCR clone 285020 (TRAV21, TRAJ35)
CAVFGNVLHC

SEQ ID NO: 570040 - protein, 13 aa, Homo sapiens
  CDR3 for beta chain variable domain of TCR clone 285020 (TRBV19, TRBJ1-2)
CASSRGQVYGYTF

SEQ ID NO: 570041 - protein, 16 aa, Homo sapiens
  CDR3 for alpha chain variable domain of TCR clone 285021 (TRAV27, TRAJ13)
CAGAKSDSGGYQKGTF

SEQ ID NO: 570042 - protein, 15 aa, Homo sapiens
  CDR3 for beta chain variable domain of TCR clone 285021 (TRBV29-1, TRBJ2-1)
CSVGRHALFYNEQFF

SEQ ID NO: 570043 - protein, 13 aa, Homo sapiens
  CDR3 for alpha chain variable domain of TCR clone 285022 (TRAV21, TRAJ42)
CAVGGGSQGNLIF

SEQ ID NO: 570044 - protein, 12 aa, Homo sapiens
  CDR3 for beta chain variable domain of TCR clone 285022 (TRBV19, TRBJ2-1)
CASSQISNEQFF

SEQ ID NO: 570045 - protein, 11 aa, Homo sapiens
  CDR3 for alpha chain variable domain of TCR clone 285023 (TRAV12-2, TRAJ49)
CALQGGNQFYF

SEQ ID NO: 570046 - protein, 14 aa, Homo sapiens
  CDR3 for beta chain variable domain of TCR clone 285023 (TRBV25-1, TRBJ1-1)
CASTHLGGNTEAFF

SEQ ID NO: 570047 - protein, 11 aa, Homo sapiens
  CDR3 for alpha chain variable domain of TCR clone 285024 (TRAV1-1, TRAJ23)
GAVRQGGKLIF

SEQ ID NO: 570048 - protein, 13 aa, Homo sapiens
  CDR3 for beta chain variable domain of TCR clone 285024 (TRBV7-3, TRBJ1-1)
CASSQDWGAEAFF

SEQ ID NO: 570049 - protein, 13 aa, Homo sapiens
  CDR3 for alpha chain variable domain of TCR clone 285025 (TRAV8-1, TRAJ9)
CAVNSVGGFKTIF

SEQ ID NO: 570050 - protein, 12 aa, Homo sapiens
  CDR3 for beta chain variable domain of TCR clone 285025 (TRBV12-4, TRBJ2-7)
CASSLGGYEQYF

SEQ ID NO: 570051 - protein, 11 aa, Homo sapiens
  CDR3 for alpha chain variable domain of TCR clone 285026 (TRAV2, TRAJ31)
CAAGPPARRMF

SEQ ID NO: 570052 - protein, 12 aa, Homo sapiens
  CDR3 for beta chain variable domain of TCR clone 285026 (TRBV7-8, TRBJ2-7)
CASSLGDREQYF

SEQ ID NO: 570053 - protein, 11 aa, Homo sapiens
  CDR3 for alpha chain variable domain of TCR clone 285027 (TRAV2, TRAJ13)
CASGGYQKVTF

SEQ ID NO: 570054 - protein, 14 aa, Homo sapiens
  CDR3 for beta chain variable domain of TCR clone 285027 (TRBV4-2, TRBJ2-3)
CASSQGRGTDTQYF

SEQ ID NO: 570055 - protein, 11 aa, Homo sapiens
  CDR3 for alpha chain variable domain of TCR clone 285028 (TRAV3, TRAJ21)
CAVGNFNKFYF

SEQ ID NO: 570056 - protein, 14 aa, Homo sapiens
  CDR3 for beta chain variable domain of TCR clone 285028 (TRBV19, TRBJ2-3)
CASSVAGGTDTQYF

SEQ ID NO: 570057 - protein, 12 aa, Homo sapiens
  CDR3 for alpha chain variable domain of TCR clone 285029 (TRAV8-3, TRAJ27)
CAVGAEAGKSTF

SEQ ID NO: 570058 - protein, 14 aa, Homo sapiens
  CDR3 for beta chain variable domain of TCR clone 285029 (TRBV2, TRBJ2-1)
CASRLILGHDEQFF

SEQ ID NO: 570059 - protein, 14 aa, Homo sapiens
  CDR3 for alpha chain variable domain of TCR clone 285030 (TRAV2, TRAJ9)
CAVEDWSGGFKTIF

SEQ ID NO: 570060 - protein, 17 aa, Homo sapiens
  CDR3 for beta chain variable domain of TCR clone 285030 (TRBV7-8, TRBJ2-6)
CASSAGTGGAGANVLTF

SEQ ID NO: 570061 - protein, 17 aa, Homo sapiens
  CDR3 for alpha chain variable domain of TCR clone 285031 (TRAV29/DV5, TRAJ42)
CAASAGIYGGSQGNLIF

SEQ ID NO: 570062 - protein, 16 aa, Homo sapiens
  CDR3 for beta chain variable domain of TCR clone 285031 (TRBV27, TRBJ2-2)
CASSFRGLVRTGELFF

SEQ ID NO: 570063 - protein, 17 aa, Homo sapiens
  CDR3 for alpha chain variable domain of TCR clone 285032 (TRAV3, TRAJ6)
CAVRDDPRAVGSYIPTF

SEQ ID NO: 570064 - protein, 14 aa, Homo sapiens
  CDR3 for beta chain variable domain of TCR clone 285032 (TRBV7-2, TRBJ2-7)
CASSPKTSFYEQYF

SEQ ID NO: 570065 - protein, 16 aa, Homo sapiens
  CDR3 for alpha chain variable domain of TCR clone 285033 (TRAV30, TRAJ24)
FGTEIVDADSWGKFQF

SEQ ID NO: 570066 - protein, 14 aa, Homo sapiens
  CDR3 for beta chain variable domain of TCR clone 285033 (TRBV6-1, TRBJ1-3)
CASVQGGGGNTIYF

SEQ ID NO: 570067 - protein, 16 aa, Homo sapiens
  CDR3 for alpha chain variable domain of TCR clone 285034 (TRAV1-2, TRAJ35)
CAVRGLTIGFGNVLHC

SEQ ID NO: 570068 - protein, 14 aa, Homo sapiens
  CDR3 for beta chain variable domain of TCR clone 285034 (TRBV7-6, TRBJ2-3)
CASSLGTVTDTQYF

SEQ ID NO: 570069 - protein, 16 aa, Homo sapiens
  CDR3 for alpha chain variable domain of TCR clone 285035 (TRAV3, TRAJ37)
CAVRPHGSGNTGKLIF

SEQ ID NO: 570070 - protein, 12 aa, Homo sapiens
  CDR3 for beta chain variable domain of TCR clone 285035 (TRBV5-4, TRBJ2-5)
CASSSTRETQYF

SEQ ID NO: 570071 - protein, 13 aa, Homo sapiens
  CDR3 for alpha chain variable domain of TCR clone 285036 (TRAV23/DV6, TRAJ54)
CAASNQGAQKLVF

SEQ ID NO: 570072 - protein, 14 aa, Homo sapiens
  CDR3 for beta chain variable domain of TCR clone 285036 (TRBV6-1, TRBJ1-3)
CASVQGGGGNTIYF

SEQ ID NO: 570073 - protein, 17 aa, Homo sapiens
  CDR3 for alpha chain variable domain of TCR clone 285037 (TRAV3, TRAJ6)
CAVRDGPRAGGSNIPTV

SEQ ID NO: 570074 - protein, 14 aa, Homo sapiens
  CDR3 for beta chain variable domain of TCR clone 285037 (TRBV7-2, TRBJ2-7)
CASSPKTSFYEQYF

SEQ ID NO: 570075 - protein, 17 aa, Homo sapiens
  CDR3 for alpha chain variable domain of TCR clone 285038 (TRAV12-1, TRAJ27)
CVVNMSAAGTTAGKSTF

SEQ ID NO: 570076 - protein, 15 aa, Homo sapiens
  CDR3 for beta chain variable domain of TCR clone 285038 (TRBV4-3, TRBJ1-2)
CASSQNYGVMDGYTF

SEQ ID NO: 570077 - protein, 14 aa, Homo sapiens
  CDR3 for alpha chain variable domain of TCR clone 285039 (TRAV12-2, TRAJ13)
CAVNPSGGYQQVTF

SEQ ID NO: 570078 - protein, 14 aa, Homo sapiens
  CDR3 for beta chain variable domain of TCR clone 285039 (TRBV12-4, TRBJ1-1)
CASSLGTGGTEAFF

SEQ ID NO: 570079 - protein, 14 aa, Homo sapiens
  CDR3 for alpha chain variable domain of TCR clone 285040 (TRAV38-1, TRAJ39)
CAFAYNNAGNMLTV

SEQ ID NO: 570080 - protein, 15 aa, Homo sapiens
  CDR3 for beta chain variable domain of TCR clone 285040 (TRBV19, TRBJ2-6)
CASSIGPSGANVLTF

SEQ ID NO: 570081 - protein, 17 aa, Homo sapiens
  CDR3 for alpha chain variable domain of TCR clone 285041 (TRAV3, TRAJ6)
CAVSDGPRAGGSYIPTF

SEQ ID NO: 570082 - protein, 13 aa, Homo sapiens
  CDR3 for beta chain variable domain of TCR clone 285041 (TRBV27, TRBJ1-1)
CASSLSIGAEAFF

SEQ ID NO: 570083 - protein, 17 aa, Homo sapiens
  CDR3 for alpha chain variable domain of TCR clone 285042 (TRAV3, TRAJ12)
CAVRDGGRMDSSYKLIF

SEQ ID NO: 570084 - protein, 17 aa, Homo sapiens
  CDR3 for beta chain variable domain of TCR clone 285042 (TRBV20-1, TRBJ2-2)
CSASGSGQGGLTGELFF

SEQ ID NO: 570085 - protein, 16 aa, Homo sapiens
  CDR3 for alpha chain variable domain of TCR clone 285043 (TRAV3, TRAJ10)
CAVRDMRAGGGNKLTF

SEQ ID NO: 570086 - protein, 13 aa, Homo sapiens
  CDR3 for beta chain variable domain of TCR clone 285043 (TRBV6-1, TRBJ1-1)
CASRRQGNTEAFF

SEQ ID NO: 570087 - protein, 13 aa, Homo sapiens
  CDR3 for alpha chain variable domain of TCR clone 285044 (TRAV27, TRAJ39)
CAGVNNAGNMLTF

SEQ ID NO: 570088 - protein, 19 aa, Homo sapiens
  CDR3 for beta chain variable domain of TCR clone 285044 (TRBV5-1, TRBJ2-3)
WASSLWLAGGITTTDTQYF

SEQ ID NO: 570089 - protein, 14 aa, Homo sapiens
  CDR3 for alpha chain variable domain of TCR clone 285045 (TRAV38-1, TRAJ40)
CALRPTPGTYKYIF

SEQ ID NO: 570090 - protein, 14 aa, Homo sapiens
  CDR3 for beta chain variable domain of TCR clone 285045 (TRBV25-1, TRBJ1-1)
CASTHLGGDTEAFF

SEQ ID NO: 570091 - protein, 18 aa, Homo sapiens
  CDR3 for alpha chain variable domain of TCR clone 285046 (TRAV3, TRAJ42)
CAVRDPENYGGSQGNLIF

SEQ ID NO: 570092 - protein, 16 aa, Homo sapiens
  CDR3 for beta chain variable domain of TCR clone 285046 (TRBV12-4, TRBJ1-5)
CASSRPVGGSNQPQHF

SEQ ID NO: 570093 - protein, 11 aa, Homo sapiens
  CDR3 for alpha chain variable domain of TCR clone 285047 (TRAV2, TRAJ33)
CAVDSNYQLIW

SEQ ID NO: 570094 - protein, 15 aa, Homo sapiens
  CDR3 for beta chain variable domain of TCR clone 285047 (TRBV5-1, TRBJ2-7)
CASSLYPDGGYEQYF

SEQ ID NO: 570095 - protein, 11 aa, Homo sapiens
  CDR3 for alpha chain variable domain of TCR clone 285048 (TRAV6, TRAJ39)
CAPDAGNLLTF

SEQ ID NO: 570096 - protein, 14 aa, Homo sapiens
  CDR3 for beta chain variable domain of TCR clone 285048 (TRBV28, TRBJ1-5)
CASSRTGLNQPQHF

SEQ ID NO: 570097 - protein, 16 aa, Homo sapiens
  CDR3 for alpha chain variable domain of TCR clone 285049 (TRAV3, TRAJ10)
CAVRDMRAGGGNKLTF

SEQ ID NO: 570098 - protein, 15 aa, Homo sapiens
  CDR3 for beta chain variable domain of TCR clone 285049 (TRBV6-3, TRBJ2-7)
CASSSPGIVFYEQYF

SEQ ID NO: 570099 - protein, 14 aa, Homo sapiens
  CDR3 for alpha chain variable domain of TCR clone 285050 (TRAV24, TRAJ42)
CAQNYGGSQGNLIF

SEQ ID NO: 570100 - protein, 15 aa, Homo sapiens
  CDR3 for beta chain variable domain of TCR clone 285050 (TRBV19, TRBJ1-5)
CASSIPGGAGQPQHL

SEQ ID NO: 570101 - protein, 13 aa, Homo sapiens
  CDR3 for alpha chain variable domain of TCR clone 285051 (TRAV27, TRAJ41)
CAGEGNSGYALNF

SEQ ID NO: 570102 - protein, 14 aa, Homo sapiens
  CDR3 for beta chain variable domain of TCR clone 285051 (TRBV7-2, TRBJ1-1)
CASSFLTGSTEAFF

SEQ ID NO: 570103 - protein, 17 aa, Homo sapiens
  CDR3 for alpha chain variable domain of TCR clone 285052 (TRAV3, TRAJ6)
CAVRDGPRARGSYIPTF

SEQ ID NO: 570104 - protein, 13 aa, Homo sapiens
  CDR3 for beta chain variable domain of TCR clone 285052 (TRBV20-1, TRBJ1-1)
CSARGGGNTEDFF

SEQ ID NO: 570105 - protein, 18 aa, Homo sapiens
  CDR3 for alpha chain variable domain of TCR clone 285053 (TRAV12-3, TRAJ52)
CAMSVGGAGGTSYGKLTL

SEQ ID NO: 570106 - protein, 14 aa, Homo sapiens
  CDR3 for beta chain variable domain of TCR clone 285053 (TRBV7-2, TRBJ2-7)
CASSPKTSFYEQYF

SEQ ID NO: 570107 - protein, 14 aa, Homo sapiens
  CDR3 for alpha chain variable domain of TCR clone 285054 (TRAV26-1, TRAJ40)
CIVRVARGTYKYIF

SEQ ID NO: 570108 - protein, 20 aa, Homo sapiens
  CDR3 for beta chain variable domain of TCR clone 285054 (TRBV7-8, TRBJ2-2)
CASSHLFPGPTIHITGELFF

SEQ ID NO: 570109 - protein, 13 aa, Homo sapiens
  CDR3 for alpha chain variable domain of TCR clone 285055 (TRAV12-1, TRAJ11)
CVVNRAGYSTLTF

SEQ ID NO: 570110 - protein, 12 aa, Homo sapiens
  CDR3 for beta chain variable domain of TCR clone 285055 (TRBV4-1, TRBJ2-3)
CASSQGTDTQYF

SEQ ID NO: 570111 - protein, 15 aa, Homo sapiens
  CDR3 for alpha chain variable domain of TCR clone 285056 (TRAV5, TRAJ33)
CAEAPAMDSNYQLIW

SEQ ID NO: 570112 - protein, 12 aa, Homo sapiens
  CDR3 for beta chain variable domain of TCR clone 285056 (TRBV6-3, TRBJ2-7)
CASGLTPYEQYF

SEQ ID NO: 570113 - protein, 16 aa, Homo sapiens
  CDR3 for alpha chain variable domain of TCR clone 285057 (TRAV3, TRAJ3)
CAVRERAKSSASRIIF

SEQ ID NO: 570114 - protein, 16 aa, Homo sapiens
  CDR3 for beta chain variable domain of TCR clone 285057 (TRBV20-1, TRBJ2-4)
CSATSLAELAKNSQYF

SEQ ID NO: 570115 - protein, 14 aa, Homo sapiens
  CDR3 for alpha chain variable domain of TCR clone 285058 (TRAV26-1, TRAJ38)
CIADNAGNNRKMSW

SEQ ID NO: 570116 - protein, 13 aa, Homo sapiens
  CDR3 for beta chain variable domain of TCR clone 285058 (TRBV20-1, TRBJ1-1)
CSARGGGNTEAFF

SEQ ID NO: 570117 - protein, 15 aa, Homo sapiens
  CDR3 for alpha chain variable domain of TCR clone 285059 (TRAV27, TRAJ38)
CAARRNAGNNRKLIW

SEQ ID NO: 570118 - protein, 14 aa, Homo sapiens
  CDR3 for beta chain variable domain of TCR clone 285059 (TRBV20-1, TRBJ2-7)
CSAPELAGVGEQYF

SEQ ID NO: 570119 - protein, 14 aa, Homo sapiens
  CDR3 for alpha chain variable domain of TCR clone 285060 (TRAV26-1, TRAJ45)
CIVRVVGGADGLTF

SEQ ID NO: 570120 - protein, 16 aa, Homo sapiens
  CDR3 for beta chain variable domain of TCR clone 285060 (TRBV7-9, TRBJ1-1)
CASSLTQVRSNTEACF

SEQ ID NO: 570121 - protein, 11 aa, Homo sapiens
  CDR3 for alpha chain variable domain of TCR clone 285061 (TRAV12-1, TRAJ15)
CVVNAGTALIF

SEQ ID NO: 570122 - protein, 13 aa, Homo sapiens
  CDR3 for beta chain variable domain of TCR clone 285061 (TRBV4-1, TRBJ2-1)
CASSQAGGDEQFF

SEQ ID NO: 570123 - protein, 15 aa, Homo sapiens
  CDR3 for alpha chain variable domain of TCR clone 285062 (TRAV23/DV6, TRAJ13)
CAAWPGGGGYQKVTF

SEQ ID NO: 570124 - protein, 12 aa, Homo sapiens
  CDR3 for beta chain variable domain of TCR clone 285062 (TRBV28, TRBJ2-3)
CASSLYRDTQYF

SEQ ID NO: 570125 - protein, 14 aa, Homo sapiens
  CDR3 for alpha chain variable domain of TCR clone 285063 (TRAV12-2, TRAJ13)
CAVKKTGGYQKVTF

SEQ ID NO: 570126 - protein, 13 aa, Homo sapiens
  CDR3 for beta chain variable domain of TCR clone 285063 (TRBV19, TRBJ1-1)
CASSFGRNTEAFF

SEQ ID NO: 570127 - protein, 14 aa, Homo sapiens
  CDR3 for alpha chain variable domain of TCR clone 285064 (TRAV12-3, TRAJ33)
CAMSVPGSNYQSIW

SEQ ID NO: 570128 - protein, 12 aa, Homo sapiens
  CDR3 for beta chain variable domain of TCR clone 285064 (TRBV7-8, TRBJ2-7)
CASSLGDREQYF

SEQ ID NO: 570129 - protein, 12 aa, Homo sapiens
  CDR3 for alpha chain variable domain of TCR clone 285065 (TRAV30, TRAJ20)
CGTESNDYKLSF

SEQ ID NO: 570130 - protein, 15 aa, Homo sapiens
  CDR3 for beta chain variable domain of TCR clone 285065 (TRBV20-1, TRBJ2-7)
CSSRDRVSGMDEQYF

SEQ ID NO: 570131 - protein, 14 aa, Homo sapiens
  CDR3 for alpha chain variable domain of TCR clone 285066 (TRAV17, TRAJ53)
CATDAGGSNYKLTF

SEQ ID NO: 570132 - protein, 12 aa, Homo sapiens
  CDR3 for beta chain variable domain of TCR clone 285066 (TRBV12-4, TRBJ2-1)
CASSPGRNEQFF

SEQ ID NO: 570133 - protein, 14 aa, Homo sapiens
  CDR3 for alpha chain variable domain of TCR clone 285067 (TRAV8-1, TRAJ34)
CAVITTYNTDKLIL

SEQ ID NO: 570134 - protein, 14 aa, Homo sapiens
  CDR3 for beta chain variable domain of TCR clone 285067 (TRBV11-3, TRBJ1-3)
CASSHNGQGNTIYF

SEQ ID NO: 570135 - protein, 15 aa, Homo sapiens
  CDR3 for alpha chain variable domain of TCR clone 285068 (TRAV13-1, TRAJ10)
CAATILPGGGNKLTL

SEQ ID NO: 570136 - protein, 15 aa, Homo sapiens
  CDR3 for beta chain variable domain of TCR clone 285068 (TRBV2, TRBJ2-7)
CASTLLGSGATEQYF

SEQ ID NO: 570137 - protein, 18 aa, Homo sapiens
  CDR3 for alpha chain variable domain of TCR clone 285069 (TRAV21, TRAJ52)
CAVRPSPAGGTSYGKRTF

SEQ ID NO: 570138 - protein, 17 aa, Homo sapiens
  CDR3 for beta chain variable domain of TCR clone 285069 (TRBV11-2, TRBJ2-1)
CASSLYPPGVEYNEQFF

SEQ ID NO: 570139 - protein, 16 aa, Homo sapiens
  CDR3 for alpha chain variable domain of TCR clone 285070 (TRAV4, TRAJ22)
CLVGDLYSGSARQLTF

SEQ ID NO: 570140 - protein, 15 aa, Homo sapiens
  CDR3 for beta chain variable domain of TCR clone 285070 (TRBV7-9, TRBJ1-4)
CASSRTGGFNEKLFL

SEQ ID NO: 570141 - protein, 14 aa, Homo sapiens
  CDR3 for alpha chain variable domain of TCR clone 285071 (TRAV35, TRAJ22)
CAGLRPGSARQLTF

SEQ ID NO: 570142 - protein, 16 aa, Homo sapiens
  CDR3 for beta chain variable domain of TCR clone 285071 (TRBV5-1, TRBJ1-2)
CASSLDVNRGSYGYTF

SEQ ID NO: 570143 - protein, 16 aa, Homo sapiens
  CDR3 for alpha chain variable domain of TCR clone 285072 (TRAV13-2, TRAJ53)
CAENANSGGSNYKLTF

SEQ ID NO: 570144 - protein, 19 aa, Homo sapiens
  CDR3 for beta chain variable domain of TCR clone 285072 (TRBV28, TRBJ2-7)
CASSYSGTSRLGWVYEQDF

SEQ ID NO: 570145 - protein, 12 aa, Homo sapiens
  CDR3 for alpha chain variable domain of TCR clone 285073 (TRAV13-1, TRAJ49)
CAASPMGNQFYF

SEQ ID NO: 570146 - protein, 18 aa, Homo sapiens
  CDR3 for beta chain variable domain of TCR clone 285073 (TRBV11-2, TRBJ2-3)
CASSLGGASRGAPNTQYF

SEQ ID NO: 570147 - protein, 15 aa, Homo sapiens
  CDR3 for alpha chain variable domain of TCR clone 285074 (TRAV12-1, TRAJ44)
CAVFVNTGTASKLTF

SEQ ID NO: 570148 - protein, 16 aa, Homo sapiens
  CDR3 for beta chain variable domain of TCR clone 285074 (TRBV20-1, TRBJ2-5)
CSPGGTSGGYMETQYF

SEQ ID NO: 570149 - protein, 14 aa, Homo sapiens
  CDR3 for alpha chain variable domain of TCR clone 285075 (TRAV12-3, TRAJ13)
CAMRKSGGYQKVTF

SEQ ID NO: 570150 - protein, 14 aa, Homo sapiens
  CDR3 for beta chain variable domain of TCR clone 285075 (TRBV4-1, TRBJ1-6)
CASSPGSDSSPLHF

SEQ ID NO: 570151 - protein, 15 aa, Homo sapiens
  CDR3 for alpha chain variable domain of TCR clone 285076 (TRAV26-1, TRAJ39)
CVVRVVGDAGNMLTF

SEQ ID NO: 570152 - protein, 13 aa, Homo sapiens
  CDR3 for beta chain variable domain of TCR clone 285076 (TRBV12-4, TRBJ1-2)
CASSLRQGKGYTF

SEQ ID NO: 570153 - protein, 15 aa, Homo sapiens
  CDR3 for alpha chain variable domain of TCR clone 285077 (TRAV8-2, TRAJ24)
CVVSDGTDSWGKLQF

SEQ ID NO: 570154 - protein, 11 aa, Homo sapiens
  CDR3 for beta chain variable domain of TCR clone 285077 (TRBV20-1, TRBJ1-2)
CSVQGAGGYTF

SEQ ID NO: 570155 - protein, 15 aa, Homo sapiens
  CDR3 for alpha chain variable domain of TCR clone 285078 (TRAV17, TRAJ23)
CATDAVDNQGGKLIF

SEQ ID NO: 570156 - protein, 12 aa, Homo sapiens
  CDR3 for beta chain variable domain of TCR clone 285078 (TRBV2, TRBJ2-1)
CAKREGYNEQFF

SEQ ID NO: 570157 - protein, 14 aa, Homo sapiens
  CDR3 for alpha chain variable domain of TCR clone 285079 (TRAV26-1, TRAJ45)
CIEVTGGGANGLTF

SEQ ID NO: 570158 - protein, 19 aa, Homo sapiens
  CDR3 for beta chain variable domain of TCR clone 285079 (TRBV19, TRBJ2-2)
CASTRPGLAGGRVTGELFF

SEQ ID NO: 570159 - protein, 14 aa, Homo sapiens
  CDR3 for alpha chain variable domain of TCR clone 285080 (TRAV12-2, TRAJ13)
CAVKRTGGYQKVTF

SEQ ID NO: 570160 - protein, 13 aa, Homo sapiens
  CDR3 for beta chain variable domain of TCR clone 285080 (TRBV7-3, TRBJ2-5)
CASSFRGGETQYF

SEQ ID NO: 570161 - protein, 19 aa, Homo sapiens
  CDR3 for alpha chain variable domain of TCR clone 285081 (TRAV26-1, TRAJ22)
CCVLLHRWVLSGSARQLTF

SEQ ID NO: 570162 - protein, 19 aa, Homo sapiens
  CDR3 for beta chain variable domain of TCR clone 285081 (TRBV19, TRBJ2-5)
CASSIGQVTDFFLGETQYF

SEQ ID NO: 570163 - protein, 14 aa, Homo sapiens
  CDR3 for alpha chain variable domain of TCR clone 285082 (TRAV8-2, TRAJ4)
CVVSPSGVYNKLIF

SEQ ID NO: 570164 - protein, 14 aa, Homo sapiens
  CDR3 for beta chain variable domain of TCR clone 285082 (TRBV19, TRBJ2-5)
CASSSSGIQETQYF

SEQ ID NO: 570165 - protein, 15 aa, Homo sapiens
  CDR3 for alpha chain variable domain of TCR clone 285083 (TRAV12-2, TRAJ42)
CAVNSHGGSQGNLIF

SEQ ID NO: 570166 - protein, 13 aa, Homo sapiens
  CDR3 for beta chain variable domain of TCR clone 285083 (TRBV27, TRBJ1-1)
CASSVSANTEASF

SEQ ID NO: 570167 - protein, 14 aa, Homo sapiens
  CDR3 for alpha chain variable domain of TCR clone 285084 (TRAV2, TRAJ9)
CAVEDRSVGCKTIF

SEQ ID NO: 570168 - protein, 14 aa, Homo sapiens
  CDR3 for beta chain variable domain of TCR clone 285084 (TRBV20-1, TRBJ1-1)
CSAQTRIGGTEAFF

SEQ ID NO: 570169 - protein, 11 aa, Homo sapiens
  CDR3 for alpha chain variable domain of TCR clone 285085 (TRAV16, TRAJ3)
CAPFLQQCFQD

SEQ ID NO: 570170 - protein, 13 aa, Homo sapiens
  CDR3 for beta chain variable domain of TCR clone 285085 (TRBV12-4, TRBJ1-2)
CASSLRQGKGYTF

SEQ ID NO: 570171 - protein, 15 aa, Homo sapiens
  CDR3 for alpha chain variable domain of TCR clone 285086 (TRAV8-6, TRAJ6)
CAVRDASGGSYIPTF

SEQ ID NO: 570172 - protein, 14 aa, Homo sapiens
  CDR3 for beta chain variable domain of TCR clone 285086 (TRBV19, TRBJ2-5)
CASSSSGIQETQYF

SEQ ID NO: 570173 - protein, 14 aa, Homo sapiens
  CDR3 for alpha chain variable domain of TCR clone 285087 (TRAV1-2, TRAJ16)
CAVNRFSDGQKLLF

SEQ ID NO: 570174 - protein, 14 aa, Homo sapiens
  CDR3 for beta chain variable domain of TCR clone 285087 (TRBV20-1, TRBJ2-7)
CSARRGNGIYEQYF

SEQ ID NO: 570175 - protein, 14 aa, Homo sapiens
  CDR3 for alpha chain variable domain of TCR clone 285088 (TRAV17, TRAJ56)
FATVPAGANSKLTF

SEQ ID NO: 570176 - protein, 13 aa, Homo sapiens
  CDR3 for beta chain variable domain of TCR clone 285088 (TRBV12-4, TRBJ2-2)
CASSITGSGELFF

SEQ ID NO: 570177 - protein, 15 aa, Homo sapiens
  CDR3 for alpha chain variable domain of TCR clone 285089 (TRAV21, TRAJ22)
CAVRLFFWFCKATDL

SEQ ID NO: 570178 - protein, 14 aa, Homo sapiens
  CDR3 for beta chain variable domain of TCR clone 285089 (TRBV19, TRBJ1-5)
RASRAPDSFLSQHF

SEQ ID NO: 570179 - protein, 16 aa, Homo sapiens
  CDR3 for alpha chain variable domain of TCR clone 285090 (TRAV16, TRAJ52)
CALSGVGGTSYGKLTF

SEQ ID NO: 570180 - protein, 15 aa, Homo sapiens
  CDR3 for beta chain variable domain of TCR clone 285090 (TRBV4-2, TRBJ1-2)
CASSGGGAGIGGYTF

SEQ ID NO: 570181 - protein, 15 aa, Homo sapiens
  CDR3 for alpha chain variable domain of TCR clone 285091 (TRAV2, TRAJ15)
CAVEDRGQARTALIF

SEQ ID NO: 570182 - protein, 13 aa, Homo sapiens
  CDR3 for beta chain variable domain of TCR clone 285091 (TRBV10-2, TRBJ2-7)
CASGGSGGYEQYF

SEQ ID NO: 570183 - protein, 16 aa, Homo sapiens
  CDR3 for alpha chain variable domain of TCR clone 285092 (TRAV3, TRAJ10)
CAVRDMRAGGGNKLTF

SEQ ID NO: 570184 - protein, 12 aa, Homo sapiens
  CDR3 for beta chain variable domain of TCR clone 285092 (TRBV11-2, TRBJ2-2)
CASRLPTGELFF

SEQ ID NO: 570185 - protein, 13 aa, Homo sapiens
  CDR3 for alpha chain variable domain of TCR clone 285093 (TRAV39, TRAJ33)
CAANPDSNYQLIW

SEQ ID NO: 570186 - protein, 13 aa, Homo sapiens
  CDR3 for beta chain variable domain of TCR clone 285093 (TRBV18, TRBJ1-1)
CASSGGRNTEDFF

SEQ ID NO: 570187 - protein, 14 aa, Homo sapiens
  CDR3 for alpha chain variable domain of TCR clone 285094 (TRAV16, TRAJ33)
CALPAMDNNYQLIW

SEQ ID NO: 570188 - protein, 12 aa, Homo sapiens
  CDR3 for beta chain variable domain of TCR clone 285094 (TRBV5-1, TRBJ1-2)
CASSQDTYGYTF

SEQ ID NO: 570189 - protein, 23 aa, Homo sapiens
  CDR3 for alpha chain variable domain of TCR clone 285095 (TRAV36/DV7, TRAJ44)
CAVEQIPALPVTSPLGLEQDFRP

SEQ ID NO: 570190 - protein, 16 aa, Homo sapiens
  CDR3 for beta chain variable domain of TCR clone 285095 (TRBV7-9, TRBJ1-2)
CASSLGFSSGEDGYTF

SEQ ID NO: 570191 - protein, 13 aa, Homo sapiens
  CDR3 for alpha chain variable domain of TCR clone 285096 (TRAV13-2, TRAJ49)
CAEAPQTGNQFYF

SEQ ID NO: 570192 - protein, 18 aa, Homo sapiens
  CDR3 for beta chain variable domain of TCR clone 285096 (TRBV7-9, TRBJ2-7)
CASSLTTSGSRTWYEQYF

SEQ ID NO: 570193 - protein, 18 aa, Homo sapiens
  CDR3 for alpha chain variable domain of TCR clone 285097 (TRAV26-1, TRAJ23)
CIVRVGLEVWNQGGKLIF

SEQ ID NO: 570194 - protein, 16 aa, Homo sapiens
  CDR3 for beta chain variable domain of TCR clone 285097 (TRBV20-1, TRBJ1-2)
CSASMGQGVANYGYTF

SEQ ID NO: 570195 - protein, 14 aa, Homo sapiens
  CDR3 for alpha chain variable domain of TCR clone 285098 (TRAV20, TRAJ56)
CAVQFGGANSKLTF

SEQ ID NO: 570196 - protein, 13 aa, Homo sapiens
  CDR3 for beta chain variable domain of TCR clone 285098 (TRBV4-1, TRBJ2-2)
CASSQENTGELFF

SEQ ID NO: 570197 - protein, 14 aa, Homo sapiens
  CDR3 for alpha chain variable domain of TCR clone 285099 (TRAV12-3, TRAJ6)
CAMSATGGSYIPTF

SEQ ID NO: 570198 - protein, 16 aa, Homo sapiens
  CDR3 for beta chain variable domain of TCR clone 285099 (TRBV4-2, TRBJ2-1)
CASSLRAGQGANEQFF

SEQ ID NO: 570199 - protein, 16 aa, Homo sapiens
  CDR3 for alpha chain variable domain of TCR clone 285100 (TRAV12-1, TRAJ53)
CVVTSVAGGSNYKLTF

SEQ ID NO: 570200 - protein, 16 aa, Homo sapiens
  CDR3 for beta chain variable domain of TCR clone 285100 (TRBV6-6, TRBJ2-3)
CSSSYSHAGSTDTQYF

SEQ ID NO: 570201 - protein, 13 aa, Homo sapiens
  CDR3 for alpha chain variable domain of TCR clone 285101 (TRAV12-1, TRAJ33)
CSDAPDSNYQLIW

SEQ ID NO: 570202 - protein, 12 aa, Homo sapiens
  CDR3 for beta chain variable domain of TCR clone 285101 (TRBV11-2, TRBJ2-2)
CASSLGGGELFF

SEQ ID NO: 570203 - protein, 17 aa, Homo sapiens
  CDR3 for alpha chain variable domain of TCR clone 285102 (TRAV13-1, TRAJ28)
CAASPPYSGAGSYQLTF

SEQ ID NO: 570204 - protein, 13 aa, Homo sapiens
  CDR3 for beta chain variable domain of TCR clone 285102 (TRBV7-2, TRBJ2-7)
CASSSPSGGEQYF

SEQ ID NO: 570205 - protein, 12 aa, Homo sapiens
  CDR3 for alpha chain variable domain of TCR clone 285103 (TRAV36/DV7, TRAJ54)
CAVVRGAQKLGF

SEQ ID NO: 570206 - protein, 18 aa, Homo sapiens
  CDR3 for beta chain variable domain of TCR clone 285103 (TRBV20-1, TRBJ2-3)
CSASGLAGGPGTTDTQYF

SEQ ID NO: 570207 - protein, 10 aa, Homo sapiens
  CDR3 for alpha chain variable domain of TCR clone 285104 (TRAV23/DV6, TRAJ57)
CAASSTLSQG

SEQ ID NO: 570208 - protein, 11 aa, Homo sapiens
  CDR3 for beta chain variable domain of TCR clone 285104 (TRBV7-8, TRBJ2-7)
CASSLSLEQYF

SEQ ID NO: 570209 - protein, 15 aa, Homo sapiens
  CDR3 for alpha chain variable domain of TCR clone 285105 (TRAV1-2, TRAJ30)
CAVRPHGNRYDKIIF

SEQ ID NO: 570210 - protein, 13 aa, Homo sapiens
  CDR3 for beta chain variable domain of TCR clone 285105 (TRBV4-1, TRBJ2-7)
CASSQGQAYEQYF

SEQ ID NO: 570211 - protein, 12 aa, Homo sapiens
  CDR3 for alpha chain variable domain of TCR clone 285106 (TRAV1-1, TRAJ9)
CAVDTGGFKTIF

SEQ ID NO: 570212 - protein, 14 aa, Homo sapiens
  CDR3 for beta chain variable domain of TCR clone 285106 (TRBV7-2, TRBJ2-7)
CASSPKPSFYEQYF

SEQ ID NO: 570213 - protein, 15 aa, Homo sapiens
  CDR3 for alpha chain variable domain of TCR clone 285107 (TRAV20, TRAJ53)
CAVQASGGSNYKLTF

SEQ ID NO: 570214 - protein, 15 aa, Homo sapiens
  CDR3 for beta chain variable domain of TCR clone 285107 (TRBV20-1, TRBJ2-7)
CSAESGTSGAYEQYF

SEQ ID NO: 570215 - protein, 12 aa, Homo sapiens
  CDR3 for alpha chain variable domain of TCR clone 285108 (TRAV12-3, TRAJ34)
CAMGYNTDKLIF

SEQ ID NO: 570216 - protein, 14 aa, Homo sapiens
  CDR3 for beta chain variable domain of TCR clone 285108 (TRBV4-1, TRBJ2-2)
CASSQVVNTGELFF

SEQ ID NO: 570217 - protein, 16 aa, Homo sapiens
  CDR3 for alpha chain variable domain of TCR clone 285109 (TRAV23/DV6, TRAJ9)
CAASIGGNTGGFKTIF

SEQ ID NO: 570218 - protein, 14 aa, Homo sapiens
  CDR3 for beta chain variable domain of TCR clone 285109 (TRBV9, TRBJ2-7)
CARSVGVGSYEQYF

SEQ ID NO: 570219 - protein, 18 aa, Homo sapiens
  CDR3 for alpha chain variable domain of TCR clone 285110 (TRAV13-1, TRAJ52)
CAASERSAGGTSYGKLTF

SEQ ID NO: 570220 - protein, 20 aa, Homo sapiens
  CDR3 for beta chain variable domain of TCR clone 285110 (TRBV7-8, TRBJ2-2)
CASSHLFPGPTIHITGELFF

SEQ ID NO: 570221 - protein, 14 aa, Homo sapiens
  CDR3 for alpha chain variable domain of TCR clone 285111 (TRAV26-1, TRAJ38)
FIADNACNNRKLIW

SEQ ID NO: 570222 - protein, 13 aa, Homo sapiens
  CDR3 for beta chain variable domain of TCR clone 285111 (TRBV20-1, TRBJ1-1)
CSARGGGNTEAFF

SEQ ID NO: 570223 - protein, 12 aa, Homo sapiens
  CDR3 for alpha chain variable domain of TCR clone 285112 (TRAV8-3, TRAJ26)
CAGDNYGQNFVF

SEQ ID NO: 570224 - protein, 15 aa, Homo sapiens
  CDR3 for beta chain variable domain of TCR clone 285112 (TRBV19, TRBJ2-7)
CASSPAGSGEALRYF

SEQ ID NO: 570225 - protein, 14 aa, Homo sapiens
  CDR3 for alpha chain variable domain of TCR clone 285113 (TRAV1-2, TRAJ16)
CAVNRFSDGQKLLF

SEQ ID NO: 570226 - protein, 16 aa, Homo sapiens
  CDR3 for beta chain variable domain of TCR clone 285113 (TRBV19, TRBJ2-1)
CASSKTGPSSYNEQFF

SEQ ID NO: 570227 - protein, 14 aa, Homo sapiens
  CDR3 for alpha chain variable domain of TCR clone 285114 (TRAV12-3, TRAJ10)
SHLPLTGGGNKLTF

SEQ ID NO: 570228 - protein, 15 aa, Homo sapiens
  CDR3 for beta chain variable domain of TCR clone 285114 (TRBV7-3, TRBJ2-2)
CASSEKGQGTGELFF

SEQ ID NO: 570229 - protein, 13 aa, Homo sapiens
  CDR3 for alpha chain variable domain of TCR clone 285115 (TRAV27, TRAJ57)
CRSAQGGSEKLVF

SEQ ID NO: 570230 - protein, 11 aa, Homo sapiens
  CDR3 for beta chain variable domain of TCR clone 285115 (TRBV11-2, TRBJ1-1)
CANSINTEDFF

SEQ ID NO: 570231 - protein, 14 aa, Homo sapiens
  CDR3 for alpha chain variable domain of TCR clone 285116 (TRAV17, TRAJ35)
CATDRPGFGNVLHC

SEQ ID NO: 570232 - protein, 13 aa, Homo sapiens
  CDR3 for beta chain variable domain of TCR clone 285116 (TRBV7-9, TRBJ1-2)
CASSLKQNYGYTF

SEQ ID NO: 570233 - protein, 13 aa, Homo sapiens
  CDR3 for alpha chain variable domain of TCR clone 285117 (TRAV8-3, TRAJ44)
CAVVPGTASKLTS

SEQ ID NO: 570234 - protein, 14 aa, Homo sapiens
  CDR3 for beta chain variable domain of TCR clone 285117 (TRBV7-2, TRBJ2-7)
CASRSQGAAYEQYF

SEQ ID NO: 570235 - protein, 13 aa, Homo sapiens
  CDR3 for alpha chain variable domain of TCR clone 285118 (TRAV1-1, TRAJ10)
CAVNSGGYQKVTF

SEQ ID NO: 570236 - protein, 12 aa, Homo sapiens
  CDR3 for beta chain variable domain of TCR clone 285118 (TRBV28, TRBJ2-1)
CASSVLINEQFF

SEQ ID NO: 570237 - protein, 11 aa, Homo sapiens
  CDR3 for alpha chain variable domain of TCR clone 285119 (TRAV17, TRAJ43)
CATPRSNDMRF

SEQ ID NO: 570238 - protein, 16 aa, Homo sapiens
  CDR3 for beta chain variable domain of TCR clone 285119 (TRBV20-1, TRBJ1-4)
CSAPGQGLLTNEKLFF

SEQ ID NO: 570239 - protein, 14 aa, Homo sapiens
  CDR3 for alpha chain variable domain of TCR clone 285120 (TRAV26-1, TRAJ34)
CIVRVAYTTDKLIF

SEQ ID NO: 570240 - protein, 15 aa, Homo sapiens
  CDR3 for beta chain variable domain of TCR clone 285120 (TRBV7-2, TRBJ2-1)
CASSSGLAGGNEQFF

SEQ ID NO: 570241 - protein, 15 aa, Homo sapiens
  CDR3 for alpha chain variable domain of TCR clone 285121 (TRAV27, TRAJ38)
CAARRNAGNNRKLIW

SEQ ID NO: 570242 - protein, 13 aa, Homo sapiens
  CDR3 for beta chain variable domain of TCR clone 285121 (TRBV20-1, TRBJ1-1)
RSARAGGNTEAFF

SEQ ID NO: 570243 - protein, 19 aa, Homo sapiens
  CDR3 for alpha chain variable domain of TCR clone 285122 (TRAV2, TRAJ20)
ILQVREADAAVYRDCKLSF

SEQ ID NO: 570244 - protein, 15 aa, Homo sapiens
  CDR3 for beta chain variable domain of TCR clone 285122 (TRBV5-1, TRBJ2-1)
CASSPPRAPYNEQFF

SEQ ID NO: 570245 - protein, 14 aa, Homo sapiens
  CDR3 for alpha chain variable domain of TCR clone 285123 (TRAV1-2, TRAJ15)
CAVRDRQAGTALIV

SEQ ID NO: 570246 - protein, 14 aa, Homo sapiens
  CDR3 for beta chain variable domain of TCR clone 285123 (TRBV4-1, TRBJ2-2)
CASSQAVNTGELFF

SEQ ID NO: 570247 - protein, 13 aa, Homo sapiens
  CDR3 for alpha chain variable domain of TCR clone 285124 (TRAV30, TRAJ24)
CGTVTDSCGKLQF

SEQ ID NO: 570248 - protein, 14 aa, Homo sapiens
  CDR3 for beta chain variable domain of TCR clone 285124 (TRBV6-3, TRBJ2-2)
CASTYTPDTGELFF

SEQ ID NO: 570249 - protein, 14 aa, Homo sapiens
  CDR3 for alpha chain variable domain of TCR clone 285125 (TRAV17, TRAJ16)
CATADFSDGQKLLF

SEQ ID NO: 570250 - protein, 16 aa, Homo sapiens
  CDR3 for beta chain variable domain of TCR clone 285125 (TRBV7-2, TRBJ2-3)
CASSESGPTGTDTQYF

SEQ ID NO: 570251 - protein, 12 aa, Homo sapiens
  CDR3 for alpha chain variable domain of TCR clone 285126 (TRAV16, TRAJ56)
CAPTGANSKLTF

SEQ ID NO: 570252 - protein, 15 aa, Homo sapiens
  CDR3 for beta chain variable domain of TCR clone 285126 (TRBV19, TRBJ1-1)
CASTSGQIQNTEAFF

SEQ ID NO: 570253 - protein, 10 aa, Homo sapiens
  CDR3 for alpha chain variable domain of TCR clone 285127 (TRAV23/DV6, TRAJ43)
CAAAVAALAQ

SEQ ID NO: 570254 - protein, 16 aa, Homo sapiens
  CDR3 for beta chain variable domain of TCR clone 285127 (TRBV18, TRBJ1-2)
FASSPPERVTIYGYTF

SEQ ID NO: 570255 - protein, 14 aa, Homo sapiens
  CDR3 for alpha chain variable domain of TCR clone 285128 (TRAV8-1, TRAJ34)
CAVITTYNTEKLIF

SEQ ID NO: 570256 - protein, 14 aa, Homo sapiens
  CDR3 for beta chain variable domain of TCR clone 285128 (TRBV11-3, TRBJ1-3)
CASSRNGQGNTIYF

SEQ ID NO: 570257 - protein, 12 aa, Homo sapiens
  CDR3 for alpha chain variable domain of TCR clone 285129 (TRAV36/DV7, TRAJ54)
CAVVRGAQKLVL

SEQ ID NO: 570258 - protein, 14 aa, Homo sapiens
  CDR3 for beta chain variable domain of TCR clone 285129 (TRBV7-3, TRBJ1-1)
CASSLKGGNTEASF

SEQ ID NO: 570259 - protein, 21 aa, Homo sapiens
  CDR3 for alpha chain variable domain of TCR clone 285130 (TRAV26-2, TRAJ53)
CCVLLHPETPTGGGSNYKLTF

SEQ ID NO: 570260 - protein, 17 aa, Homo sapiens
  CDR3 for beta chain variable domain of TCR clone 285130 (TRBV19, TRBJ2-6)
CASSTGQVFSGANVLTF

SEQ ID NO: 570261 - protein, 12 aa, Homo sapiens
  CDR3 for alpha chain variable domain of TCR clone 285131 (TRAV12-3, TRAJ17)
CAMTLTCNKLTF

SEQ ID NO: 570262 - protein, 16 aa, Homo sapiens
  CDR3 for beta chain variable domain of TCR clone 285131 (TRBV12-4, TRBJ2-5)
CASSFFVRGRQETQYF

SEQ ID NO: 570263 - protein, 15 aa, Homo sapiens
  CDR3 for alpha chain variable domain of TCR clone 285132 (TRAV38-1, TRAJ37)
CAVIFGSGNTGKLIF

SEQ ID NO: 570264 - protein, 16 aa, Homo sapiens
  CDR3 for beta chain variable domain of TCR clone 285132 (TRBV6-1, TRBJ2-3)
CASSEVIGQGTDTQYF

SEQ ID NO: 570265 - protein, 13 aa, Homo sapiens
  CDR3 for alpha chain variable domain of TCR clone 285133 (TRAV1-2, TRAJ9)
CAALNTGGFKTIS

SEQ ID NO: 570266 - protein, 13 aa, Homo sapiens
  CDR3 for beta chain variable domain of TCR clone 285133 (TRBV19, TRBJ1-2)
CASSVPGQDSYTF

SEQ ID NO: 570267 - protein, 14 aa, Homo sapiens
  CDR3 for alpha chain variable domain of TCR clone 285134 (TRAV1-2, TRAJ16)
CAVNRFSDVQKLLF

SEQ ID NO: 570268 - protein, 15 aa, Homo sapiens
  CDR3 for beta chain variable domain of TCR clone 285134 (TRBV19, TRBJ1-6)
CASSTQGAVGSPLHF

SEQ ID NO: 570269 - protein, 13 aa, Homo sapiens
  CDR3 for alpha chain variable domain of TCR clone 285135 (TRAV29/DV5, TRAJ31)
CSASRNNNARLMF

SEQ ID NO: 570270 - protein, 12 aa, Homo sapiens
  CDR3 for beta chain variable domain of TCR clone 285135 (TRBV11-2, TRBJ2-1)
CASSPGNNEQFF

SEQ ID NO: 570271 - protein, 15 aa, Homo sapiens
  CDR3 for alpha chain variable domain of TCR clone 285136 (TRAV3, TRAJ20)
CAVRDIKLSDYKLSF

SEQ ID NO: 570272 - protein, 15 aa, Homo sapiens
  CDR3 for beta chain variable domain of TCR clone 285136 (TRBV7-9, TRBJ1-6)
CASSSAGRGNSPLHF

SEQ ID NO: 570273 - protein, 14 aa, Homo sapiens
  CDR3 for alpha chain variable domain of TCR clone 285137 (TRAV27, TRAJ40)
CAGSLLRGTYKYIF

SEQ ID NO: 570274 - protein, 15 aa, Homo sapiens
  CDR3 for beta chain variable domain of TCR clone 285137 (TRBV6-3, TRBJ1-4)
CASSSPGQENEELFF

SEQ ID NO: 570275 - protein, 11 aa, Homo sapiens
  CDR3 for alpha chain variable domain of TCR clone 285138 (TRAV21, TRAJ48)
CAVDGHEKLTF

SEQ ID NO: 570276 - protein, 15 aa, Homo sapiens
  CDR3 for beta chain variable domain of TCR clone 285138 (TRBV6-6, TRBJ2-5)
CASSPGGGLEETQYF

SEQ ID NO: 570277 - protein, 11 aa, Homo sapiens
  CDR3 for alpha chain variable domain of TCR clone 285139 (TRAV17, TRAJ9)
CATTGGFKTIF

SEQ ID NO: 570278 - protein, 16 aa, Homo sapiens
  CDR3 for beta chain variable domain of TCR clone 285139 (TRBV7-2, TRBJ2-5)
CASSPGGARRGETQYF

SEQ ID NO: 570279 - protein, 14 aa, Homo sapiens
  CDR3 for alpha chain variable domain of TCR clone 285140 (TRAV9-2, TRAJ39)
CALYIYNPGNMLTF

SEQ ID NO: 570280 - protein, 15 aa, Homo sapiens
  CDR3 for beta chain variable domain of TCR clone 285140 (TRBV27, TRBJ1-6)
CASSFDRGLGSPLHF

SEQ ID NO: 570281 - protein, 14 aa, Homo sapiens
  CDR3 for alpha chain variable domain of TCR clone 285141 (TRAV5, TRAJ4)
CAASFSGGYNRLIF

SEQ ID NO: 570282 - protein, 19 aa, Homo sapiens
  CDR3 for beta chain variable domain of TCR clone 285141 (TRBV2, TRBJ2-7)
CASSDDETSGKANDYEQYF

SEQ ID NO: 570283 - protein, 11 aa, Homo sapiens
  CDR3 for alpha chain variable domain of TCR clone 285142 (TRAV1-2, TRAJ20)
CAVSNDYKLSF

SEQ ID NO: 570284 - protein, 15 aa, Homo sapiens
  CDR3 for beta chain variable domain of TCR clone 285142 (TRBV7-2, TRBJ2-7)
CASSWGQGAIYEQYF

SEQ ID NO: 570285 - protein, 12 aa, Homo sapiens
  CDR3 for alpha chain variable domain of TCR clone 285143 (TRAV3, TRAJ20)
CAVRDGDYKLSF

SEQ ID NO: 570286 - protein, 15 aa, Homo sapiens
  CDR3 for beta chain variable domain of TCR clone 285143 (TRBV4-1, TRBJ1-1)
CASSQEWGHYTEAFF

SEQ ID NO: 570287 - protein, 13 aa, Homo sapiens
  CDR3 for alpha chain variable domain of TCR clone 285144 (TRAV3, TRAJ20)
CAVRSLNDYKLSF

SEQ ID NO: 570288 - protein, 13 aa, Homo sapiens
  CDR3 for beta chain variable domain of TCR clone 285144 (TRBV7-3, TRBJ1-1)
CASSQGWGAEAFF

SEQ ID NO: 570289 - protein, 20 aa, Homo sapiens
  CDR3 for alpha chain variable domain of TCR clone 285145 (TRAV12-2, TRAJ52)
SPVIQPPARAGGTSYGKLTF

SEQ ID NO: 570290 - protein, 16 aa, Homo sapiens
  CDR3 for beta chain variable domain of TCR clone 285145 (TRBV15, TRBJ1-2)
CAPSRGPRTGGGGYTF

SEQ ID NO: 570291 - protein, 17 aa, Homo sapiens
  CDR3 for alpha chain variable domain of TCR clone 285146 (TRAV3, TRAJ6)
CAVRDGPRAGGSYIPTF

SEQ ID NO: 570292 - protein, 16 aa, Homo sapiens
  CDR3 for beta chain variable domain of TCR clone 285146 (TRBV4-3, TRBJ2-3)
CASSQGGLAGTDTQYF

SEQ ID NO: 570293 - protein, 10 aa, Homo sapiens
  CDR3 for alpha chain variable domain of TCR clone 285147 (TRAV30, TRAJ48)
CGIGNEELTF

SEQ ID NO: 570294 - protein, 13 aa, Homo sapiens
  CDR3 for beta chain variable domain of TCR clone 285147 (TRBV29-1, TRBJ2-7)
CSVGPSGGYEQYF

SEQ ID NO: 570295 - protein, 13 aa, Homo sapiens
  CDR3 for alpha chain variable domain of TCR clone 285148 (TRAV8-6, TRAJ49)
CAVITNTGNQFYF

SEQ ID NO: 570296 - protein, 15 aa, Homo sapiens
  CDR3 for beta chain variable domain of TCR clone 285148 (TRBV6-3, TRBJ2-7)
CASSSPGTVFYVQYF

SEQ ID NO: 570297 - protein, 22 aa, Homo sapiens
  CDR3 for alpha chain variable domain of TCR clone 285149 (TRAV36/DV7, TRAJ38)
CVANAGNNHIQNPDPAVYQLRD

SEQ ID NO: 570298 - protein, 14 aa, Homo sapiens
  CDR3 for beta chain variable domain of TCR clone 285149 (TRBV7-2, TRBJ2-7)
CASSPKTSFYEQYF

SEQ ID NO: 570299 - protein, 10 aa, Homo sapiens
  CDR3 for alpha chain variable domain of TCR clone 285150 (TRAV1-2, TRAJ23)
CAGQGGKLIF

SEQ ID NO: 570300 - protein, 15 aa, Homo sapiens
  CDR3 for beta chain variable domain of TCR clone 285150 (TRBV28, TRBJ2-7)
CASSPGGRGFYEQYF

SEQ ID NO: 570301 - protein, 16 aa, Homo sapiens
  CDR3 for alpha chain variable domain of TCR clone 285151 (TRAV12-3, TRAJ18)
CAMRGSRGSTLGRLYF

SEQ ID NO: 570302 - protein, 19 aa, Homo sapiens
  CDR3 for beta chain variable domain of TCR clone 285151 (TRBV6-3, TRBJ2-7)
CASSYRTRLAGGVSGEQYF

SEQ ID NO: 570303 - protein, 14 aa, Homo sapiens
  CDR3 for alpha chain variable domain of TCR clone 285152 (TRAV13-1, TRAJ10)
CAAKEPGGGNKLTF

SEQ ID NO: 570304 - protein, 14 aa, Homo sapiens
  CDR3 for beta chain variable domain of TCR clone 285152 (TRBV6-6, TRBJ2-7)
CARSDSGAGYEQYF

SEQ ID NO: 570305 - protein, 14 aa, Homo sapiens
  CDR3 for alpha chain variable domain of TCR clone 285153 (TRAV1-2, TRAJ8)
CAVREDTGFQKLVV

SEQ ID NO: 570306 - protein, 12 aa, Homo sapiens
  CDR3 for beta chain variable domain of TCR clone 285153 (TRBV29-1, TRBJ2-3)
CSVTGGADTQYF

SEQ ID NO: 570307 - protein, 11 aa, Homo sapiens
  CDR3 for alpha chain variable domain of TCR clone 285154 (TRAV2, TRAJ33)
CAVESNYQLIW

SEQ ID NO: 570308 - protein, 16 aa, Homo sapiens
  CDR3 for beta chain variable domain of TCR clone 285154 (TRBV10-3, TRBJ2-1)
CAISGVGDGGGGEQFF

SEQ ID NO: 570309 - protein, 14 aa, Homo sapiens
  CDR3 for alpha chain variable domain of TCR clone 285155 (TRAV26-1, TRAJ39)
CIVRGSRAGNMLTF

SEQ ID NO: 570310 - protein, 12 aa, Homo sapiens
  CDR3 for beta chain variable domain of TCR clone 285155 (TRBV11-2, TRBJ2-1)
CASSPGNNEQFF

SEQ ID NO: 570311 - protein, 15 aa, Homo sapiens
  CDR3 for alpha chain variable domain of TCR clone 285156 (TRAV26-1, TRAJ22)
CIVRVSFWFCKATDL

SEQ ID NO: 570312 - protein, 15 aa, Homo sapiens
  CDR3 for beta chain variable domain of TCR clone 285156 (TRBV7-9, TRBJ2-2)
CASSPETGAGGELFF

SEQ ID NO: 570313 - protein, 12 aa, Homo sapiens
  CDR3 for alpha chain variable domain of TCR clone 285157 (TRAV12-3, TRAJ41)
CAMSYSGYALNF

SEQ ID NO: 570314 - protein, 13 aa, Homo sapiens
  CDR3 for beta chain variable domain of TCR clone 285157 (TRBV7-3, TRBJ2-1)
CASSLDRYNEQFF

SEQ ID NO: 570315 - protein, 17 aa, Homo sapiens
  CDR3 for alpha chain variable domain of TCR clone 285158 (TRAV8-6, TRAJ58)
CALSSWVGETSGSRLTF

SEQ ID NO: 570316 - protein, 16 aa, Homo sapiens
  CDR3 for beta chain variable domain of TCR clone 285158 (TRBV20-1, TRBJ1-4)
CSAPGQGLLTNEKLFF

SEQ ID NO: 570317 - protein, 15 aa, Homo sapiens
  CDR3 for alpha chain variable domain of TCR clone 285159 (TRAV4, TRAJ39)
CLVGPKNNAGNMLTF

SEQ ID NO: 570318 - protein, 14 aa, Homo sapiens
  CDR3 for beta chain variable domain of TCR clone 285159 (TRBV19, TRBJ2-1)
CASPTFVLSGEQFF

SEQ ID NO: 570319 - protein, 13 aa, Homo sapiens
  CDR3 for alpha chain variable domain of TCR clone 285160 (TRAV23/DV6, TRAJ6)
CAAKTGGSNIPTF

SEQ ID NO: 570320 - protein, 15 aa, Homo sapiens
  CDR3 for beta chain variable domain of TCR clone 285160 (TRBV5-1, TRBJ1-2)
CASSSYGEFDYGYAF

SEQ ID NO: 570321 - protein, 16 aa, Homo sapiens
  CDR3 for alpha chain variable domain of TCR clone 285161 (TRAV17, TRAJ35)
CATAEGGIGFGHVLHC

SEQ ID NO: 570322 - protein, 16 aa, Homo sapiens
  CDR3 for beta chain variable domain of TCR clone 285161 (TRBV6-5, TRBJ2-7)
CASSSDPTSGFYDQYF

SEQ ID NO: 570323 - protein, 16 aa, Homo sapiens
  CDR3 for alpha chain variable domain of TCR clone 285162 (TRAV21, TRAJ52)
CAVTNAGGTSYGKLTF

SEQ ID NO: 570324 - protein, 13 aa, Homo sapiens
  CDR3 for beta chain variable domain of TCR clone 285162 (TRBV20-1, TRBJ2-3)
CSARLAGTDTQCF

SEQ ID NO: 570325 - protein, 16 aa, Homo sapiens
  CDR3 for alpha chain variable domain of TCR clone 285163 (TRAV16, TRAJ52)
CALSAAGATSYGKLTF

SEQ ID NO: 570326 - protein, 12 aa, Homo sapiens
  CDR3 for beta chain variable domain of TCR clone 285163 (TRBV12-4, TRBJ1-3)
CASSFSGNTIYF

SEQ ID NO: 570327 - protein, 12 aa, Homo sapiens
  CDR3 for alpha chain variable domain of TCR clone 285164 (TRAV12-2, TRAJ10)
WGLTGGGNKLTF

SEQ ID NO: 570328 - protein, 14 aa, Homo sapiens
  CDR3 for beta chain variable domain of TCR clone 285164 (TRBV19, TRBJ2-3)
CASSAPRGTDTQYF

SEQ ID NO: 570329 - protein, 16 aa, Homo sapiens
  CDR3 for alpha chain variable domain of TCR clone 285165 (TRAV26-1, TRAJ48)
CIVREPPNLGNEKLTF

SEQ ID NO: 570330 - protein, 15 aa, Homo sapiens
  CDR3 for beta chain variable domain of TCR clone 285165 (TRBV7-2, TRBJ2-6)
CASSLQEAGANVLTF

SEQ ID NO: 570331 - protein, 15 aa, Homo sapiens
  CDR3 for alpha chain variable domain of TCR clone 285166 (TRAV8-4, TRAJ28)
CAVSLSGAGSYQLTF

SEQ ID NO: 570332 - protein, 15 aa, Homo sapiens
  CDR3 for beta chain variable domain of TCR clone 285166 (TRBV19, TRBJ1-5)
CASSIVWADNQPQHF

SEQ ID NO: 570333 - protein, 16 aa, Homo sapiens
  CDR3 for alpha chain variable domain of TCR clone 285167 (TRAV3, TRAJ21)
CAVRDIERGNFNKFYF

SEQ ID NO: 570334 - protein, 18 aa, Homo sapiens
  CDR3 for beta chain variable domain of TCR clone 285167 (TRBV6-3, TRBJ2-1)
CASSLLTSGRVSYNEQFF

SEQ ID NO: 570335 - protein, 13 aa, Homo sapiens
  CDR3 for alpha chain variable domain of TCR clone 285168 (TRAV21, TRAJ6)
CAGGSGGSYIPTF

SEQ ID NO: 570336 - protein, 16 aa, Homo sapiens
  CDR3 for beta chain variable domain of TCR clone 285168 (TRBV7-3, TRBJ2-2)
CASSLKRGTLSGELFF

SEQ ID NO: 570337 - protein, 13 aa, Homo sapiens
  CDR3 for alpha chain variable domain of TCR clone 285169 (TRAV35, TRAJ48)
CAGHEFGDEKLTF

SEQ ID NO: 570338 - protein, 14 aa, Homo sapiens
  CDR3 for beta chain variable domain of TCR clone 285169 (TRBV19, TRBJ2-1)
CASPTFVLSGEQFF

SEQ ID NO: 570339 - protein, 14 aa, Homo sapiens
  CDR3 for alpha chain variable domain of TCR clone 285170 (TRAV1-1, TRAJ27)
CDVIYNTNAVKSTF

SEQ ID NO: 570340 - protein, 15 aa, Homo sapiens
  CDR3 for beta chain variable domain of TCR clone 285170 (TRBV7-2, TRBJ2-1)
CASSSGLAGGNEQFF

SEQ ID NO: 570341 - protein, 11 aa, Homo sapiens
  CDR3 for alpha chain variable domain of TCR clone 285171 (TRAV2, TRAJ13)
CASGGYQKVTF

SEQ ID NO: 570342 - protein, 14 aa, Homo sapiens
  CDR3 for beta chain variable domain of TCR clone 285171 (TRBV6-3, TRBJ2-7)
CASSYSVRVYEQYF

SEQ ID NO: 570343 - protein, 16 aa, Homo sapiens
  CDR3 for alpha chain variable domain of TCR clone 285172 (TRAV3, TRAJ5)
CAVRNLMDTSRRALTF

SEQ ID NO: 570344 - protein, 16 aa, Homo sapiens
  CDR3 for beta chain variable domain of TCR clone 285172 (TRBV4-2, TRBJ2-7)
CASSQEGLANSYEQYF

SEQ ID NO: 570345 - protein, 13 aa, Homo sapiens
  CDR3 for alpha chain variable domain of TCR clone 285173 (TRAV25, TRAJ30)
CAGRVDRYDKIIF

SEQ ID NO: 570346 - protein, 17 aa, Homo sapiens
  CDR3 for beta chain variable domain of TCR clone 285173 (TRBV7-9, TRBJ2-6)
CASSFGAGYSGANVLTF

SEQ ID NO: 570347 - protein, 13 aa, Homo sapiens
  CDR3 for alpha chain variable domain of TCR clone 285174 (TRAV2, TRAJ15)
CALASQAGTALIF

SEQ ID NO: 570348 - protein, 15 aa, Homo sapiens
  CDR3 for beta chain variable domain of TCR clone 285174 (TRBV20-1, TRBJ2-7)
CSARDRVSGMDEQYF

SEQ ID NO: 570349 - protein, 17 aa, Homo sapiens
  CDR3 for alpha chain variable domain of TCR clone 285175 (TRAV3, TRAJ38)
CAVRDCLNAGNNRKLIV

SEQ ID NO: 570350 - protein, 14 aa, Homo sapiens
  CDR3 for beta chain variable domain of TCR clone 285175 (TRBV4-1, TRBJ2-2)
CASSQAVNTGELFF

SEQ ID NO: 570351 - protein, 14 aa, Homo sapiens
  CDR3 for alpha chain variable domain of TCR clone 285176 (TRAV13-1, TRAJ3)
CAASKSSSASKIIL

SEQ ID NO: 570352 - protein, 13 aa, Homo sapiens
  CDR3 for beta chain variable domain of TCR clone 285176 (TRBV25-1, TRBJ2-5)
CASSESGRETQYF

SEQ ID NO: 570353 - protein, 13 aa, Homo sapiens
  CDR3 for alpha chain variable domain of TCR clone 285177 (TRAV17, TRAJ5)
CAPMDTGRRALTF

SEQ ID NO: 570354 - protein, 15 aa, Homo sapiens
  CDR3 for beta chain variable domain of TCR clone 285177 (TRBV7-2, TRBJ2-1)
CASTHGTGIYNEQFF

SEQ ID NO: 570355 - protein, 14 aa, Homo sapiens
  CDR3 for alpha chain variable domain of TCR clone 285178 (TRAV12-3, TRAJ10)
SHLPLTGGGNKLTF

SEQ ID NO: 570356 - protein, 16 aa, Homo sapiens
  CDR3 for beta chain variable domain of TCR clone 285178 (TRBV12-3, TRBJ2-5)
CASSWRPSGDLETQYF

SEQ ID NO: 570357 - protein, 16 aa, Homo sapiens
  CDR3 for alpha chain variable domain of TCR clone 285179 (TRAV12-1, TRAJ48)
CVVNMVSNFGNEKLTF

SEQ ID NO: 570358 - protein, 18 aa, Homo sapiens
  CDR3 for beta chain variable domain of TCR clone 285179 (TRBV11-2, TRBJ2-6)
CASSLNPFLGTGDNVLTF

SEQ ID NO: 570359 - protein, 12 aa, Homo sapiens
  CDR3 for alpha chain variable domain of TCR clone 285180 (TRAV2, TRAJ33)
CAFMDSNYQLIW

SEQ ID NO: 570360 - protein, 14 aa, Homo sapiens
  CDR3 for beta chain variable domain of TCR clone 285180 (TRBV7-8, TRBJ2-3)
CASSLEAGTDTQYF

SEQ ID NO: 570361 - protein, 15 aa, Homo sapiens
  CDR3 for alpha chain variable domain of TCR clone 285181 (TRAV27, TRAJ38)
CAARRNAGNNRKLIW

SEQ ID NO: 570362 - protein, 12 aa, Homo sapiens
  CDR3 for beta chain variable domain of TCR clone 285181 (TRBV12-4, TRBJ2-7)
CASSLGGYEQYF

SEQ ID NO: 570363 - protein, 16 aa, Homo sapiens
  CDR3 for alpha chain variable domain of TCR clone 285182 (TRAV12-2, TRAJ6)
CSAPLAGSGGSYIPTF

SEQ ID NO: 570364 - protein, 10 aa, Homo sapiens
  CDR3 for beta chain variable domain of TCR clone 285182 (TRBV28, TRBJ1-2)
CASSSDRAVF

SEQ ID NO: 570365 - protein, 14 aa, Homo sapiens
  CDR3 for alpha chain variable domain of TCR clone 285183 (TRAV12-2, TRAJ44)
CAVNPAGTASKLTF

SEQ ID NO: 570366 - protein, 12 aa, Homo sapiens
  CDR3 for beta chain variable domain of TCR clone 285183 (TRBV20-1, TRBJ1-2)
CSVTPEGYGYTF

SEQ ID NO: 570367 - protein, 13 aa, Homo sapiens
  CDR3 for alpha chain variable domain of TCR clone 285184 (TRAV13-1, TRAJ11)
CAAVLAGYSTLTF

SEQ ID NO: 570368 - protein, 17 aa, Homo sapiens
  CDR3 for beta chain variable domain of TCR clone 285184 (TRBV25-1, TRBJ2-7)
CASCDARVVFSSYEQYF

SEQ ID NO: 570369 - protein, 16 aa, Homo sapiens
  CDR3 for alpha chain variable domain of TCR clone 285185 (TRAV3, TRAJ37)
CAVRPHGSGNTGKLIF

SEQ ID NO: 570370 - protein, 15 aa, Homo sapiens
  CDR3 for beta chain variable domain of TCR clone 285185 (TRBV10-3, TRBJ2-3)
CAISLTSGGTDKQYF

SEQ ID NO: 570371 - protein, 18 aa, Homo sapiens
  CDR3 for alpha chain variable domain of TCR clone 285186 (TRAV13-1, TRAJ52)
CAASKRSAGGTSYGKLTF

SEQ ID NO: 570372 - protein, 15 aa, Homo sapiens
  CDR3 for beta chain variable domain of TCR clone 285186 (TRBV27, TRBJ2-1)
CASSNGGGSPNEQFF

SEQ ID NO: 570373 - protein, 16 aa, Homo sapiens
  CDR3 for alpha chain variable domain of TCR clone 285187 (TRAV30, TRAJ24)
CGTEIVDADSWGKFQF

SEQ ID NO: 570374 - protein, 15 aa, Homo sapiens
  CDR3 for beta chain variable domain of TCR clone 285187 (TRBV5-1, TRBJ1-2)
CASSLVGGQSQGYTF

SEQ ID NO: 570375 - protein, 16 aa, Homo sapiens
  CDR3 for alpha chain variable domain of TCR clone 285188 (TRAV30, TRAJ24)
CGTEIVDADSWGKFQF

SEQ ID NO: 570376 - protein, 14 aa, Homo sapiens
  CDR3 for beta chain variable domain of TCR clone 285188 (TRBV12-5, TRBJ2-5)
CASGSRTHQEAQYV

SEQ ID NO: 570377 - protein, 15 aa, Homo sapiens
  CDR3 for alpha chain variable domain of TCR clone 285189 (TRAV12-3, TRAJ43)
CAFDMRFGAGTRLTV

SEQ ID NO: 570378 - protein, 18 aa, Homo sapiens
  CDR3 for beta chain variable domain of TCR clone 285189 (TRBV20-1, TRBJ2-3)
CSASGLAGGPGTTDTQYF

SEQ ID NO: 570379 - protein, 11 aa, Homo sapiens
  CDR3 for alpha chain variable domain of TCR clone 285190 (TRAV2, TRAJ20)
CAVLNDYKLSF

SEQ ID NO: 570380 - protein, 13 aa, Homo sapiens
  CDR3 for beta chain variable domain of TCR clone 285190 (TRBV7-6, TRBJ1-2)
CASSLVADYGYTF

SEQ ID NO: 570381 - protein, 14 aa, Homo sapiens
  CDR3 for alpha chain variable domain of TCR clone 285191 (TRAV1-2, TRAJ16)
CAVNRFSDDQKLLF

SEQ ID NO: 570382 - protein, 12 aa, Homo sapiens
  CDR3 for beta chain variable domain of TCR clone 285191 (TRBV14, TRBJ2-7)
CASSRLKGEQYF

SEQ ID NO: 570383 - protein, 13 aa, Homo sapiens
  CDR3 for alpha chain variable domain of TCR clone 285192 (TRAV27, TRAJ53)
CAGQGGSDYKLTF

SEQ ID NO: 570384 - protein, 13 aa, Homo sapiens
  CDR3 for beta chain variable domain of TCR clone 285192 (TRBV29-1, TRBJ1-1)
CSVESGFGTEAFF

SEQ ID NO: 570385 - protein, 20 aa, Homo sapiens
  CDR3 for alpha chain variable domain of TCR clone 285193 (TRAV27, TRAJ34)
ASTSVQGGGLGEYNTDKPIF

SEQ ID NO: 570386 - protein, 15 aa, Homo sapiens
  CDR3 for beta chain variable domain of TCR clone 285193 (TRBV9, TRBJ1-4)
CASSVGGSTNEKLFF

SEQ ID NO: 570387 - protein, 12 aa, Homo sapiens
  CDR3 for alpha chain variable domain of TCR clone 285194 (TRAV13-2, TRAJ23)
CAERHRGGKLIF

SEQ ID NO: 570388 - protein, 13 aa, Homo sapiens
  CDR3 for beta chain variable domain of TCR clone 285194 (TRBV20-1, TRBJ2-2)
CSASAAGTGELFF

SEQ ID NO: 570389 - protein, 15 aa, Homo sapiens
  CDR3 for alpha chain variable domain of TCR clone 285195 (TRAV3, TRAJ13)
CAVRDIAGGSQKVTF

SEQ ID NO: 570390 - protein, 13 aa, Homo sapiens
  CDR3 for beta chain variable domain of TCR clone 285195 (TRBV2, TRBJ2-2)
CASSKKNTGELFF

SEQ ID NO: 570391 - protein, 12 aa, Homo sapiens
  CDR3 for alpha chain variable domain of TCR clone 285196 (TRAV12-3, TRAJ17)
CAMTLTGNKLTS

SEQ ID NO: 570392 - protein, 13 aa, Homo sapiens
  CDR3 for beta chain variable domain of TCR clone 285196 (TRBV12-4, TRBJ1-1)
CASSPGTGFEAFF

SEQ ID NO: 570393 - protein, 13 aa, Homo sapiens
  CDR3 for alpha chain variable domain of TCR clone 285197 (TRAV12-3, TRAJ48)
CAMSLVGNEKLTF

SEQ ID NO: 570394 - protein, 14 aa, Homo sapiens
  CDR3 for beta chain variable domain of TCR clone 285197 (TRBV7-6, TRBJ2-3)
CASSLGTVTDTQYF

SEQ ID NO: 570395 - protein, 15 aa, Homo sapiens
  CDR3 for alpha chain variable domain of TCR clone 285198 (TRAV12-2, TRAJ56)
CAVNPFTRANSKLTF

SEQ ID NO: 570396 - protein, 13 aa, Homo sapiens
  CDR3 for beta chain variable domain of TCR clone 285198 (TRBV20-1, TRBJ1-2)
RSARDRVYGGYTF

SEQ ID NO: 570397 - protein, 12 aa, Homo sapiens
  CDR3 for alpha chain variable domain of TCR clone 285199 (TRAV21, TRAJ11)
CAATSGYSTLTF

SEQ ID NO: 570398 - protein, 14 aa, Homo sapiens
  CDR3 for beta chain variable domain of TCR clone 285199 (TRBV20-1, TRBJ2-7)
CSAPEPAGVGKQYF

SEQ ID NO: 570399 - protein, 13 aa, Homo sapiens
  CDR3 for alpha chain variable domain of TCR clone 285200 (TRAV13-1, TRAJ21)
CAASIYNFNKFYF

SEQ ID NO: 570400 - protein, 12 aa, Homo sapiens
  CDR3 for beta chain variable domain of TCR clone 285200 (TRBV12-4, TRBJ1-5)
CASSLGRQPQHF

SEQ ID NO: 570401 - protein, 13 aa, Homo sapiens
  CDR3 for alpha chain variable domain of TCR clone 285201 (TRAV1-2, TRAJ9)
CAALNTGGFKTIF

SEQ ID NO: 570402 - protein, 15 aa, Homo sapiens
  CDR3 for beta chain variable domain of TCR clone 285201 (TRBV24-1, TRBJ2-1)
CGTSGSGGFYNEQFF

SEQ ID NO: 570403 - protein, 12 aa, Homo sapiens
  CDR3 for alpha chain variable domain of TCR clone 285202 (TRAV16, TRAJ10)
CSRTGGGNKPTF

SEQ ID NO: 570404 - protein, 15 aa, Homo sapiens
  CDR3 for beta chain variable domain of TCR clone 285202 (TRBV7-9, TRBJ1-4)
CASSARTGGNEKLFF

SEQ ID NO: 570405 - protein, 13 aa, Homo sapiens
  CDR3 for alpha chain variable domain of TCR clone 285203 (TRAV27, TRAJ6)
CAGGTRGSYIPTF

SEQ ID NO: 570406 - protein, 13 aa, Homo sapiens
  CDR3 for beta chain variable domain of TCR clone 285203 (TRBV2, TRBJ2-5)
CASGTPYQETQYF

SEQ ID NO: 570407 - protein, 15 aa, Homo sapiens
  CDR3 for alpha chain variable domain of TCR clone 285204 (TRAV12-2, TRAJ23)
CAVKPIYNQGGKLIL

SEQ ID NO: 570408 - protein, 15 aa, Homo sapiens
  CDR3 for beta chain variable domain of TCR clone 285204 (TRBV5-1, TRBJ1-2)
CASSLVGGQSQGYTF

SEQ ID NO: 570409 - protein, 12 aa, Homo sapiens
  CDR3 for alpha chain variable domain of TCR clone 285205 (TRAV8-6, TRAJ22)
CALNPGTRQLTF

SEQ ID NO: 570410 - protein, 13 aa, Homo sapiens
  CDR3 for beta chain variable domain of TCR clone 285205 (TRBV7-2, TRBJ2-7)
CASRTSSSWEQYF

SEQ ID NO: 570411 - protein, 12 aa, Homo sapiens
  CDR3 for alpha chain variable domain of TCR clone 285206 (TRAV23/DV6, TRAJ49)
CAASSTGNQFYF

SEQ ID NO: 570412 - protein, 15 aa, Homo sapiens
  CDR3 for beta chain variable domain of TCR clone 285206 (TRBV10-3, TRBJ2-3)
CAIDTSGRRTDTQYS

SEQ ID NO: 570413 - protein, 13 aa, Homo sapiens
  CDR3 for alpha chain variable domain of TCR clone 285207 (TRAV27, TRAJ45)
CRSSEGGADGLTF

SEQ ID NO: 570414 - protein, 15 aa, Homo sapiens
  CDR3 for beta chain variable domain of TCR clone 285207 (TRBV9, TRBJ2-2)
CASSDFAGASGELFF

SEQ ID NO: 570415 - protein, 14 aa, Homo sapiens
  CDR3 for alpha chain variable domain of TCR clone 285208 (TRAV13-1, TRAJ44)
CAAKATGTASTLTF

SEQ ID NO: 570416 - protein, 14 aa, Homo sapiens
  CDR3 for beta chain variable domain of TCR clone 285208 (TRBV19, TRBJ2-2)
CASSTLHRSGELFF

SEQ ID NO: 570417 - protein, 14 aa, Homo sapiens
  CDR3 for alpha chain variable domain of TCR clone 285209 (TRAV23/DV6, TRAJ24)
CAASLSDSWGTLQF

SEQ ID NO: 570418 - protein, 16 aa, Homo sapiens
  CDR3 for beta chain variable domain of TCR clone 285209 (TRBV7-9, TRBJ2-6)
CASSLKGPLRANALTF

SEQ ID NO: 570419 - protein, 14 aa, Homo sapiens
  CDR3 for alpha chain variable domain of TCR clone 285210 (TRAV17, TRAJ22)
CATSPSGSARQLTF

SEQ ID NO: 570420 - protein, 15 aa, Homo sapiens
  CDR3 for beta chain variable domain of TCR clone 285210 (TRBV4-1, TRBJ2-5)
CPSSQWDLYQETQYF

SEQ ID NO: 570421 - protein, 14 aa, Homo sapiens
  CDR3 for alpha chain variable domain of TCR clone 285211 (TRAV38-1, TRAJ35)
CAFSAIGFGNVLHC

SEQ ID NO: 570422 - protein, 17 aa, Homo sapiens
  CDR3 for beta chain variable domain of TCR clone 285211 (TRBV13, TRBJ2-3)
CASSLSRVAGGRNTQYF

SEQ ID NO: 570423 - protein, 11 aa, Homo sapiens
  CDR3 for alpha chain variable domain of TCR clone 285212 (TRAV21, TRAJ33)
CAVLSNYQLIW

SEQ ID NO: 570424 - protein, 12 aa, Homo sapiens
  CDR3 for beta chain variable domain of TCR clone 285212 (TRBV7-8, TRBJ2-7)
CASSIGDREQYF

SEQ ID NO: 570425 - protein, 14 aa, Homo sapiens
  CDR3 for alpha chain variable domain of TCR clone 285213 (TRAV8-3, TRAJ4)
CAVGASGGYKKWIF

SEQ ID NO: 570426 - protein, 13 aa, Homo sapiens
  CDR3 for beta chain variable domain of TCR clone 285213 (TRBV18, TRBJ2-5)
CASSLQGQETQYF

SEQ ID NO: 570427 - protein, 15 aa, Homo sapiens
  CDR3 for alpha chain variable domain of TCR clone 285214 (TRAV26-2, TRAJ42)
CILRDESRSQGNLIF

SEQ ID NO: 570428 - protein, 15 aa, Homo sapiens
  CDR3 for beta chain variable domain of TCR clone 285214 (TRBV4-1, TRBJ1-4)
CASSDTGGTNEKLFF

SEQ ID NO: 570429 - protein, 13 aa, Homo sapiens
  CDR3 for alpha chain variable domain of TCR clone 285215 (TRAV17, TRAJ4)
CATKSGGYNKLIF

SEQ ID NO: 570430 - protein, 14 aa, Homo sapiens
  CDR3 for beta chain variable domain of TCR clone 285215 (TRBV7-9, TRBJ1-2)
CASSRQGANYGYTF

SEQ ID NO: 570431 - protein, 13 aa, Homo sapiens
  CDR3 for alpha chain variable domain of TCR clone 285216 (TRAV17, TRAJ5)
CATCDTGRRALTF

SEQ ID NO: 570432 - protein, 13 aa, Homo sapiens
  CDR3 for beta chain variable domain of TCR clone 285216 (TRBV19, TRBJ1-5)
CASSIEPVQPQHF

SEQ ID NO: 570433 - protein, 16 aa, Homo sapiens
  CDR3 for alpha chain variable domain of TCR clone 285217 (TRAV13-2, TRAJ53)
CAEDANSGGSNYKLTF

SEQ ID NO: 570434 - protein, 19 aa, Homo sapiens
  CDR3 for beta chain variable domain of TCR clone 285217 (TRBV28, TRBJ2-7)
CASSYSGTSRLGWVYEQYF

SEQ ID NO: 570435 - protein, 13 aa, Homo sapiens
  CDR3 for alpha chain variable domain of TCR clone 285218 (TRAV35, TRAJ42)
CAGFPGSQGNLIF

SEQ ID NO: 570436 - protein, 14 aa, Homo sapiens
  CDR3 for beta chain variable domain of TCR clone 285218 (TRBV7-3, TRBJ2-1)
CASSLAGGTNEQFF

SEQ ID NO: 570437 - protein, 16 aa, Homo sapiens
  CDR3 for alpha chain variable domain of TCR clone 285219 (TRAV3, TRAJ10)
CAVRDMRAGGGNKLTF

SEQ ID NO: 570438 - protein, 16 aa, Homo sapiens
  CDR3 for beta chain variable domain of TCR clone 285219 (TRBV11-2, TRBJ2-7)
CASSLAPTGVNYEQYF

SEQ ID NO: 570439 - protein, 14 aa, Homo sapiens
  CDR3 for alpha chain variable domain of TCR clone 285220 (TRAV1-2, TRAJ16)
CVVNRFSDGQKLLF

SEQ ID NO: 570440 - protein, 15 aa, Homo sapiens
  CDR3 for beta chain variable domain of TCR clone 285220 (TRBV20-1, TRBJ2-7)
CSARDRVSGMDEQYF

SEQ ID NO: 570441 - protein, 14 aa, Homo sapiens
  CDR3 for alpha chain variable domain of TCR clone 285221 (TRAV8-1, TRAJ34)
CAVNPSYNTNKLIF

SEQ ID NO: 570442 - protein, 16 aa, Homo sapiens
  CDR3 for beta chain variable domain of TCR clone 285221 (TRBV7-2, TRBJ2-6)
CASSLAGRSGANVLTF

SEQ ID NO: 570443 - protein, 16 aa, Homo sapiens
  CDR3 for alpha chain variable domain of TCR clone 285222 (TRAV14/DV4, TRAJ53)
CAMREGGGGSNYKLTF

SEQ ID NO: 570444 - protein, 13 aa, Homo sapiens
  CDR3 for beta chain variable domain of TCR clone 285222 (TRBV12-4, TRBJ2-7)
CASSLSGVYEQYF

SEQ ID NO: 570445 - protein, 15 aa, Homo sapiens
  CDR3 for alpha chain variable domain of TCR clone 285223 (TRAV21, TRAJ53)
CATLNSGGSNYKLTF

SEQ ID NO: 570446 - protein, 16 aa, Homo sapiens
  CDR3 for beta chain variable domain of TCR clone 285223 (TRBV20-1, TRBJ1-4)
CSAPGQGVLTNEKLFF

SEQ ID NO: 570447 - protein, 14 aa, Homo sapiens
  CDR3 for alpha chain variable domain of TCR clone 285224 (TRAV4, TRAJ17)
CLVGGKAAGNKLTF

SEQ ID NO: 570448 - protein, 16 aa, Homo sapiens
  CDR3 for beta chain variable domain of TCR clone 285224 (TRBV7-8, TRBJ2-4)
CASSAERTLAKNIQYF

SEQ ID NO: 570449 - protein, 14 aa, Homo sapiens
  CDR3 for alpha chain variable domain of TCR clone 285225 (TRAV26-1, TRAJ45)
CIEVTGGGADGLTF

SEQ ID NO: 570450 - protein, 15 aa, Homo sapiens
  CDR3 for beta chain variable domain of TCR clone 285225 (TRBV11-2, TRBJ1-2)
CASSLEGVQRNGYTF

SEQ ID NO: 570451 - protein, 14 aa, Homo sapiens
  CDR3 for alpha chain variable domain of TCR clone 285226 (TRAV12-3, TRAJ53)
CGATSGGSNYKLTF

SEQ ID NO: 570452 - protein, 13 aa, Homo sapiens
  CDR3 for beta chain variable domain of TCR clone 285226 (TRBV19, TRBJ1-5)
CASSTQEGQPQHF

SEQ ID NO: 570453 - protein, 14 aa, Homo sapiens
  CDR3 for alpha chain variable domain of TCR clone 285227 (TRAV12-2, TRAJ45)
CAVYSGGGADGLTF

SEQ ID NO: 570454 - protein, 19 aa, Homo sapiens
  CDR3 for beta chain variable domain of TCR clone 285227 (TRBV7-2, TRBJ2-3)
CASSFLSRNWGGGTDTQYF

SEQ ID NO: 570455 - protein, 14 aa, Homo sapiens
  CDR3 for alpha chain variable domain of TCR clone 285228 (TRAV23/DV6, TRAJ22)
CAADPSGSARLLTF

SEQ ID NO: 570456 - protein, 14 aa, Homo sapiens
  CDR3 for beta chain variable domain of TCR clone 285228 (TRBV5-1, TRBJ2-7)
CASSLWGAQDEQYF

SEQ ID NO: 570457 - protein, 14 aa, Homo sapiens
  CDR3 for alpha chain variable domain of TCR clone 285229 (TRAV22, TRAJ40)
CAVESTSGTYEYIF

SEQ ID NO: 570458 - protein, 17 aa, Homo sapiens
  CDR3 for beta chain variable domain of TCR clone 285229 (TRBV7-9, TRBJ2-2)
CASSLGVAGMNTVELFF

SEQ ID NO: 570459 - protein, 11 aa, Homo sapiens
  CDR3 for alpha chain variable domain of TCR clone 285230 (TRAV2, TRAJ13)
CASGGYQKVTF

SEQ ID NO: 570460 - protein, 14 aa, Homo sapiens
  CDR3 for beta chain variable domain of TCR clone 285230 (TRBV5-5, TRBJ2-2)
CASSLLGDTGELFF

SEQ ID NO: 570461 - protein, 10 aa, Homo sapiens
  CDR3 for alpha chain variable domain of TCR clone 285231 (TRAV26-1, TRAJ22)
CIAGSRQLTF

SEQ ID NO: 570462 - protein, 17 aa, Homo sapiens
  CDR3 for beta chain variable domain of TCR clone 285231 (TRBV5-4, TRBJ1-1)
CASFPPKGRLQNTEAVF

SEQ ID NO: 570463 - protein, 16 aa, Homo sapiens
  CDR3 for alpha chain variable domain of TCR clone 285232 (TRAV20, TRAJ6)
CAVQAGGTGGSYIPTF

SEQ ID NO: 570464 - protein, 16 aa, Homo sapiens
  CDR3 for beta chain variable domain of TCR clone 285232 (TRBV7-8, TRBJ2-6)
CASRVGDSSGANVLTF

SEQ ID NO: 570465 - protein, 14 aa, Homo sapiens
  CDR3 for alpha chain variable domain of TCR clone 285233 (TRAV12-1, TRAJ9)
CVVTGYTGGFKTIF

SEQ ID NO: 570466 - protein, 16 aa, Homo sapiens
  CDR3 for beta chain variable domain of TCR clone 285233 (TRBV20-1, TRBJ2-1)
CSARDFSGRIGDEQFF

SEQ ID NO: 570467 - protein, 18 aa, Homo sapiens
  CDR3 for alpha chain variable domain of TCR clone 285234 (TRAV12-2, )
CAVEDIQNPDPAVYQLRD

SEQ ID NO: 570468 - protein, 16 aa, Homo sapiens
  CDR3 for beta chain variable domain of TCR clone 285234 (TRBV6-1, TRBJ1-2)
CASSGAWQGRPHGYAF

SEQ ID NO: 570469 - protein, 13 aa, Homo sapiens
  CDR3 for alpha chain variable domain of TCR clone 285235 (TRAV13-1, TRAJ39)
CSKYSNAGNMLTF

SEQ ID NO: 570470 - protein, 14 aa, Homo sapiens
  CDR3 for beta chain variable domain of TCR clone 285235 (TRBV4-3, TRBJ1-2)
CASSPMTGGYGYTF

SEQ ID NO: 570471 - protein, 17 aa, Homo sapiens
  CDR3 for alpha chain variable domain of TCR clone 285236 (TRAV2, TRAJ36)
CAVEDRGNWGKQPLLWD

SEQ ID NO: 570472 - protein, 14 aa, Homo sapiens
  CDR3 for beta chain variable domain of TCR clone 285236 (TRBV7-9, TRBJ2-5)
CASSLDTAQETEYF

SEQ ID NO: 570473 - protein, 14 aa, Homo sapiens
  CDR3 for alpha chain variable domain of TCR clone 285237 (TRAV1-2, TRAJ8)
CAVREDTGFQKLVF

SEQ ID NO: 570474 - protein, 15 aa, Homo sapiens
  CDR3 for beta chain variable domain of TCR clone 285237 (TRBV20-1, TRBJ2-1)
CSASSAGSSYNEQFF

SEQ ID NO: 570475 - protein, 18 aa, Homo sapiens
  CDR3 for alpha chain variable domain of TCR clone 285238 (TRAV26-1, TRAJ23)
CIVRVGLEVWNQGGKLII

SEQ ID NO: 570476 - protein, 16 aa, Homo sapiens
  CDR3 for beta chain variable domain of TCR clone 285238 (TRBV12-4, TRBJ2-5)
CASSFFVRGRQETQYF

SEQ ID NO: 570477 - protein, 16 aa, Homo sapiens
  CDR3 for alpha chain variable domain of TCR clone 285239 (TRAV3, TRAJ37)
CAVRPHGSGNTGKLIF

SEQ ID NO: 570478 - protein, 11 aa, Homo sapiens
  CDR3 for beta chain variable domain of TCR clone 285239 (TRBV10-3, TRBJ2-7)
CAISEGHEQYF

SEQ ID NO: 570479 - protein, 14 aa, Homo sapiens
  CDR3 for alpha chain variable domain of TCR clone 285240 (TRAV12-1, TRAJ17)
CVVNYKAAGNKLTF

SEQ ID NO: 570480 - protein, 17 aa, Homo sapiens
  CDR3 for beta chain variable domain of TCR clone 285240 (TRBV20-1, TRBJ2-1)
CSASSSRLAGSYNAQFF

SEQ ID NO: 570481 - protein, 12 aa, Homo sapiens
  CDR3 for alpha chain variable domain of TCR clone 285241 (TRAV8-3, TRAJ20)
CAVGANDYKLSF

SEQ ID NO: 570482 - protein, 19 aa, Homo sapiens
  CDR3 for beta chain variable domain of TCR clone 285241 (TRBV19, TRBJ2-5)
CASSIGQVTDFFLGETQYF

SEQ ID NO: 570483 - protein, 15 aa, Homo sapiens
  CDR3 for alpha chain variable domain of TCR clone 285242 (TRAV21, TRAJ53)
CATLNSGGSNYKLTF

SEQ ID NO: 570484 - protein, 13 aa, Homo sapiens
  CDR3 for beta chain variable domain of TCR clone 285242 (TRBV10-3, TRBJ2-7)
CASKLAVNYVQYF

SEQ ID NO: 570485 - protein, 17 aa, Homo sapiens
  CDR3 for alpha chain variable domain of TCR clone 285243 (TRAV3, TRAJ42)
CAVRDRDYGGSQGNLIF

SEQ ID NO: 570486 - protein, 16 aa, Homo sapiens
  CDR3 for beta chain variable domain of TCR clone 285243 (TRBV12-5, TRBJ2-5)
CASGTRTSGNQETQYF

SEQ ID NO: 570487 - protein, 15 aa, Homo sapiens
  CDR3 for alpha chain variable domain of TCR clone 285244 (TRAV38-2/DV8, TRAJ57)
CAYKSGLGGSEKLVV

SEQ ID NO: 570488 - protein, 16 aa, Homo sapiens
  CDR3 for beta chain variable domain of TCR clone 285244 (TRBV28, TRBJ1-5)
CASSFRGGYSNQPQHF

SEQ ID NO: 570489 - protein, 11 aa, Homo sapiens
  CDR3 for alpha chain variable domain of TCR clone 285245 (TRAV13-1, TRAJ39)
CASQAGNMLTF

SEQ ID NO: 570490 - protein, 14 aa, Homo sapiens
  CDR3 for beta chain variable domain of TCR clone 285245 (TRBV11-2, TRBJ1-5)
CASSLDRGRQPQHF

SEQ ID NO: 570491 - protein, 12 aa, Homo sapiens
  CDR3 for alpha chain variable domain of TCR clone 285246 (TRAV21, TRAJ11)
CAATSGFSTLTF

SEQ ID NO: 570492 - protein, 14 aa, Homo sapiens
  CDR3 for beta chain variable domain of TCR clone 285246 (TRBV20-1, TRBJ2-7)
CSAPELAGVGEQYV

SEQ ID NO: 570493 - protein, 13 aa, Homo sapiens
  CDR3 for alpha chain variable domain of TCR clone 285247 (TRAV8-3, TRAJ28)
CAVDAVGGYQPTF

SEQ ID NO: 570494 - protein, 15 aa, Homo sapiens
  CDR3 for beta chain variable domain of TCR clone 285247 (TRBV7-9, TRBJ1-5)
CASSQGHQPNQPQHF

SEQ ID NO: 570495 - protein, 12 aa, Homo sapiens
  CDR3 for alpha chain variable domain of TCR clone 285248 (TRAV26-1, TRAJ35)
CIGLSFGNVLHC

SEQ ID NO: 570496 - protein, 17 aa, Homo sapiens
  CDR3 for beta chain variable domain of TCR clone 285248 (TRBV11-3, TRBJ2-5)
CASSLPGGRGGKETQYF

SEQ ID NO: 570497 - protein, 14 aa, Homo sapiens
  CDR3 for alpha chain variable domain of TCR clone 285249 (TRAV12-1, TRAJ3)
CGAARYISASKIIF

SEQ ID NO: 570498 - protein, 15 aa, Homo sapiens
  CDR3 for beta chain variable domain of TCR clone 285249 (TRBV7-2, TRBJ2-6)
CASSREGSGANVLTF

SEQ ID NO: 570499 - protein, 14 aa, Homo sapiens
  CDR3 for alpha chain variable domain of TCR clone 285250 (TRAV13-2, TRAJ39)
CADHPPGAGNMLTF

SEQ ID NO: 570500 - protein, 12 aa, Homo sapiens
  CDR3 for beta chain variable domain of TCR clone 285250 (TRBV11-2, TRBJ2-1)
CASSPGNNEQFF

SEQ ID NO: 570501 - protein, 12 aa, Homo sapiens
  CDR3 for alpha chain variable domain of TCR clone 285251 (TRAV10, TRAJ34)
CVVSGKHRQARL

SEQ ID NO: 570502 - protein, 14 aa, Homo sapiens
  CDR3 for beta chain variable domain of TCR clone 285251 (TRBV19, TRBJ2-1)
CASPTFVLSGEQFF

SEQ ID NO: 570503 - protein, 14 aa, Homo sapiens
  CDR3 for alpha chain variable domain of TCR clone 285252 (TRAV1-1, TRAJ27)
CAVIYNTNAGKSTF

SEQ ID NO: 570504 - protein, 16 aa, Homo sapiens
  CDR3 for beta chain variable domain of TCR clone 285252 (TRBV12-4, TRBJ1-2)
CASSPTATGKTRGYTF

SEQ ID NO: 570505 - protein, 17 aa, Homo sapiens
  CDR3 for alpha chain variable domain of TCR clone 285253 (TRAV20, TRAJ4)
CAVQLVLFSGGYNKLIF

SEQ ID NO: 570506 - protein, 15 aa, Homo sapiens
  CDR3 for beta chain variable domain of TCR clone 285253 (TRBV19, TRBJ2-1)
CASSSPGVPLDEQFF

SEQ ID NO: 570507 - protein, 13 aa, Homo sapiens
  CDR3 for alpha chain variable domain of TCR clone 285254 (TRAV12-1, TRAJ22)
CVVYSGSARQLTL

SEQ ID NO: 570508 - protein, 10 aa, Homo sapiens
  CDR3 for beta chain variable domain of TCR clone 285254 (TRBV6-3, TRBJ2-2)
CASRDGELFF

SEQ ID NO: 570509 - protein, 14 aa, Homo sapiens
  CDR3 for alpha chain variable domain of TCR clone 285255 (TRAV8-6, TRAJ54)
CAVSPSLGAQKLVF

SEQ ID NO: 570510 - protein, 15 aa, Homo sapiens
  CDR3 for beta chain variable domain of TCR clone 285255 (TRBV4-1, TRBJ1-6)
CASSAGQGYNSPLHF

SEQ ID NO: 570511 - protein, 12 aa, Homo sapiens
  CDR3 for alpha chain variable domain of TCR clone 285256 (TRAV5, TRAJ3)
CAEDSSASKIIF

SEQ ID NO: 570512 - protein, 14 aa, Homo sapiens
  CDR3 for beta chain variable domain of TCR clone 285256 (TRBV11-2, TRBJ2-3)
CASSRLARTDTQYF

SEQ ID NO: 570513 - protein, 14 aa, Homo sapiens
  CDR3 for alpha chain variable domain of TCR clone 285257 (TRAV12-3, TRAJ42)
CAMNYGGRQGNLIF

SEQ ID NO: 570514 - protein, 15 aa, Homo sapiens
  CDR3 for beta chain variable domain of TCR clone 285257 (TRBV20-1, TRBJ2-7)
CSARDRVSGMDEQYF

SEQ ID NO: 570515 - protein, 14 aa, Homo sapiens
  CDR3 for alpha chain variable domain of TCR clone 285258 (TRAV27, TRAJ40)
CAGSLLRGTYKYIF

SEQ ID NO: 570516 - protein, 15 aa, Homo sapiens
  CDR3 for beta chain variable domain of TCR clone 285258 (TRBV6-3, TRBJ1-4)
CASSSPGQENEKLFY

SEQ ID NO: 570517 - protein, 14 aa, Homo sapiens
  CDR3 for alpha chain variable domain of TCR clone 285259 (TRAV1-2, TRAJ8)
CAVREDTGFQKLVF

SEQ ID NO: 570518 - protein, 14 aa, Homo sapiens
  CDR3 for beta chain variable domain of TCR clone 285259 (TRBV18, TRBJ1-5)
CASSPGNSNQPQHF

SEQ ID NO: 570519 - protein, 14 aa, Homo sapiens
  CDR3 for alpha chain variable domain of TCR clone 285260 (TRAV1-2, TRAJ8)
CAVREDTGFQKLVF

SEQ ID NO: 570520 - protein, 16 aa, Homo sapiens
  CDR3 for beta chain variable domain of TCR clone 285260 (TRBV4-1, TRBJ2-3)
CASSQYTSGAEDTQYF

SEQ ID NO: 570521 - protein, 15 aa, Homo sapiens
  CDR3 for alpha chain variable domain of TCR clone 285261 (TRAV3, TRAJ22)
CTVRDRGGSARQLTF

SEQ ID NO: 570522 - protein, 16 aa, Homo sapiens
  CDR3 for beta chain variable domain of TCR clone 285261 (TRBV5-4, TRBJ2-3)
CASQQPGGGGADTQYF

SEQ ID NO: 570523 - protein, 12 aa, Homo sapiens
  CDR3 for alpha chain variable domain of TCR clone 285262 (TRAV21, TRAJ27)
CAANTNAGKSTF

SEQ ID NO: 570524 - protein, 15 aa, Homo sapiens
  CDR3 for beta chain variable domain of TCR clone 285262 (TRBV12-4, TRBJ2-5)
CASSPPTGLQETQYF

SEQ ID NO: 570525 - protein, 19 aa, Homo sapiens
  CDR3 for alpha chain variable domain of TCR clone 285263 (TRAV29/DV5, TRAJ49)
CSVLLCSKLTVDTGHQFYF

SEQ ID NO: 570526 - protein, 17 aa, Homo sapiens
  CDR3 for beta chain variable domain of TCR clone 285263 (TRBV13, TRBJ2-3)
CASSLSRVAGGRNTQYF

SEQ ID NO: 570527 - protein, 14 aa, Homo sapiens
  CDR3 for alpha chain variable domain of TCR clone 285264 (TRAV26-1, TRAJ38)
CIADNAGNNRKLIW

SEQ ID NO: 570528 - protein, 13 aa, Homo sapiens
  CDR3 for beta chain variable domain of TCR clone 285264 (TRBV20-1, TRBJ1-1)
CTARGGGNTEAFF

SEQ ID NO: 570529 - protein, 15 aa, Homo sapiens
  CDR3 for alpha chain variable domain of TCR clone 285265 (TRAV3, TRAJ20)
CAVRDIKLSDYTISF

SEQ ID NO: 570530 - protein, 15 aa, Homo sapiens
  CDR3 for beta chain variable domain of TCR clone 285265 (TRBV7-9, TRBJ1-6)
CASSSPGRGNSPLHF

SEQ ID NO: 570531 - protein, 16 aa, Homo sapiens
  CDR3 for alpha chain variable domain of TCR clone 285266 (TRAV21, TRAJ22)
CAVRVISSGSARQLTF

SEQ ID NO: 570532 - protein, 12 aa, Homo sapiens
  CDR3 for beta chain variable domain of TCR clone 285266 (TRBV20-1, TRBJ2-7)
CSAGLKMGEQYF

SEQ ID NO: 570533 - protein, 16 aa, Homo sapiens
  CDR3 for alpha chain variable domain of TCR clone 285267 (TRAV8-3, TRAJ44)
CAVGTLMTGTASKLTF

SEQ ID NO: 570534 - protein, 13 aa, Homo sapiens
  CDR3 for beta chain variable domain of TCR clone 285267 (TRBV11-2, TRBJ2-1)
CASGLRLTHEQFF

SEQ ID NO: 570535 - protein, 13 aa, Homo sapiens
  CDR3 for alpha chain variable domain of TCR clone 285268 (TRAV13-1, TRAJ26)
CAIVFGPGTRLSV

SEQ ID NO: 570536 - protein, 17 aa, Homo sapiens
  CDR3 for beta chain variable domain of TCR clone 285268 (TRBV18, TRBJ2-1)
CASSKGLSGGADNEQFF

SEQ ID NO: 570537 - protein, 14 aa, Homo sapiens
  CDR3 for alpha chain variable domain of TCR clone 285269 (TRAV3, TRAJ17)
CAVRDAAAGNKLTF

SEQ ID NO: 570538 - protein, 15 aa, Homo sapiens
  CDR3 for beta chain variable domain of TCR clone 285269 (TRBV3-1, TRBJ2-7)
CASSQDRQGAYEQYF

SEQ ID NO: 570539 - protein, 16 aa, Homo sapiens
  CDR3 for alpha chain variable domain of TCR clone 285270 (TRAV30, TRAJ24)
CGTEIVDADSWGKFKF

SEQ ID NO: 570540 - protein, 17 aa, Homo sapiens
  CDR3 for beta chain variable domain of TCR clone 285270 (TRBV7-2, TRBJ2-7)
CASSPFGSSGPSPEQYF

SEQ ID NO: 570541 - protein, 11 aa, Homo sapiens
  CDR3 for alpha chain variable domain of TCR clone 285271 (TRAV1-2, TRAJ31)
CAVKNNARLMF

SEQ ID NO: 570542 - protein, 15 aa, Homo sapiens
  CDR3 for beta chain variable domain of TCR clone 285271 (TRBV11-3, TRBJ2-7)
CASSPGPASSYEQYF

SEQ ID NO: 570543 - protein, 15 aa, Homo sapiens
  CDR3 for alpha chain variable domain of TCR clone 285272 (TRAV8-4, TRAJ47)
CAESDLLGYGNKLVF

SEQ ID NO: 570544 - protein, 16 aa, Homo sapiens
  CDR3 for beta chain variable domain of TCR clone 285272 (TRBV19, TRBJ2-2)
CASSPSGGLNTGELFF

SEQ ID NO: 570545 - protein, 12 aa, Homo sapiens
  CDR3 for alpha chain variable domain of TCR clone 285273 (TRAV12-1, TRAJ15)
CVANQAGTALIF

SEQ ID NO: 570546 - protein, 14 aa, Homo sapiens
  CDR3 for beta chain variable domain of TCR clone 285273 (TRBV11-3, TRBJ2-1)
CASSLAVSYNEQFF

SEQ ID NO: 570547 - protein, 15 aa, Homo sapiens
  CDR3 for alpha chain variable domain of TCR clone 285274 (TRAV14/DV4, TRAJ46)
CAMREKKSSGDTLTF

SEQ ID NO: 570548 - protein, 13 aa, Homo sapiens
  CDR3 for beta chain variable domain of TCR clone 285274 (TRBV20-1, TRBJ2-5)
CSAREAFQETQYF

SEQ ID NO: 570549 - protein, 13 aa, Homo sapiens
  CDR3 for alpha chain variable domain of TCR clone 285275 (TRAV20, TRAJ34)
CAVRSYNTYKLIF

SEQ ID NO: 570550 - protein, 12 aa, Homo sapiens
  CDR3 for beta chain variable domain of TCR clone 285275 (TRBV11-2, TRBJ2-1)
CASSPGNNEQFF

SEQ ID NO: 570551 - protein, 12 aa, Homo sapiens
  CDR3 for alpha chain variable domain of TCR clone 285276 (TRAV8-3, TRAJ6)
CAVAGGSYIPTF

SEQ ID NO: 570552 - protein, 17 aa, Homo sapiens
  CDR3 for beta chain variable domain of TCR clone 285276 (TRBV24-1, TRBJ2-1)
CATSDVSTSGTYNEQFF

SEQ ID NO: 570553 - protein, 16 aa, Homo sapiens
  CDR3 for alpha chain variable domain of TCR clone 285277 (TRAV12-3, TRAJ53)
CAMRPGSGGSNYKLTF

SEQ ID NO: 570554 - protein, 11 aa, Homo sapiens
  CDR3 for beta chain variable domain of TCR clone 285277 (TRBV29-1, TRBJ2-5)
CSGDRTGTQYF

SEQ ID NO: 570555 - protein, 14 aa, Homo sapiens
  CDR3 for alpha chain variable domain of TCR clone 285278 (TRAV1-2, TRAJ8)
CAVREDTGFQKLVF

SEQ ID NO: 570556 - protein, 15 aa, Homo sapiens
  CDR3 for beta chain variable domain of TCR clone 285278 (TRBV5-1, TRBJ2-1)
CASSWGPGPGGEQFF

SEQ ID NO: 570557 - protein, 14 aa, Homo sapiens
  CDR3 for alpha chain variable domain of TCR clone 285279 (TRAV3, TRAJ6)
CAVREPWGSYIPTF

SEQ ID NO: 570558 - protein, 15 aa, Homo sapiens
  CDR3 for beta chain variable domain of TCR clone 285279 (TRBV19, TRBJ1-6)
CASSTQGAVGSPLHF

SEQ ID NO: 570559 - protein, 14 aa, Homo sapiens
  CDR3 for alpha chain variable domain of TCR clone 285280 (TRAV8-3, TRAJ10)
CAVGNAGGVNKLTF

SEQ ID NO: 570560 - protein, 16 aa, Homo sapiens
  CDR3 for beta chain variable domain of TCR clone 285280 (TRBV11-2, TRBJ1-2)
CASSLDTGGADYGYTF

SEQ ID NO: 570561 - protein, 13 aa, Homo sapiens
  CDR3 for alpha chain variable domain of TCR clone 285281 (TRAV2, TRAJ39)
CAVLNNAGNMPTF

SEQ ID NO: 570562 - protein, 16 aa, Homo sapiens
  CDR3 for beta chain variable domain of TCR clone 285281 (TRBV19, TRBJ2-1)
CASRTSSGSIVNEQFF

SEQ ID NO: 570563 - protein, 14 aa, Homo sapiens
  CDR3 for alpha chain variable domain of TCR clone 285282 (TRAV10, TRAJ36)
CVVKYEGGANNLFF

SEQ ID NO: 570564 - protein, 15 aa, Homo sapiens
  CDR3 for beta chain variable domain of TCR clone 285282 (TRBV6-3, TRBJ2-2)
CASSFLATLTGELFF

SEQ ID NO: 570565 - protein, 17 aa, Homo sapiens
  CDR3 for alpha chain variable domain of TCR clone 285283 (TRAV4, TRAJ42)
CLVGVLNYGGSQGNLIF

SEQ ID NO: 570566 - protein, 16 aa, Homo sapiens
  CDR3 for beta chain variable domain of TCR clone 285283 (TRBV19, TRBJ1-1)
CASRFGGPVTGTEAFF

SEQ ID NO: 570567 - protein, 11 aa, Homo sapiens
  CDR3 for alpha chain variable domain of TCR clone 285284 (TRAV2, TRAJ20)
CAVLSDYKLSF

SEQ ID NO: 570568 - protein, 16 aa, Homo sapiens
  CDR3 for beta chain variable domain of TCR clone 285284 (TRBV11-1, TRBJ2-2)
CASSAEGLKNTGELFF

SEQ ID NO: 570569 - protein, 13 aa, Homo sapiens
  CDR3 for alpha chain variable domain of TCR clone 285285 (TRAV8-1, TRAJ34)
CAVNGKGNDKLIF

SEQ ID NO: 570570 - protein, 13 aa, Homo sapiens
  CDR3 for beta chain variable domain of TCR clone 285285 (TRBV20-1, TRBJ2-5)
CSARLAGVETQYF

SEQ ID NO: 570571 - protein, 15 aa, Homo sapiens
  CDR3 for alpha chain variable domain of TCR clone 285286 (TRAV40, TRAJ45)
CLLGDLGGGADGLTF

SEQ ID NO: 570572 - protein, 13 aa, Homo sapiens
  CDR3 for beta chain variable domain of TCR clone 285286 (TRBV7-9, TRBJ1-2)
CASSLKQYYGYTF

SEQ ID NO: 570573 - protein, 13 aa, Homo sapiens
  CDR3 for alpha chain variable domain of TCR clone 285287 (TRAV12-2, TRAJ30)
CSVNLNRDDKIIF

SEQ ID NO: 570574 - protein, 14 aa, Homo sapiens
  CDR3 for beta chain variable domain of TCR clone 285287 (TRBV20-1, TRBJ2-3)
CSASSGGSTDTQYF

SEQ ID NO: 570575 - protein, 14 aa, Homo sapiens
  CDR3 for alpha chain variable domain of TCR clone 285288 (TRAV12-3, TRAJ10)
SHLPLTGGGNKLIF

SEQ ID NO: 570576 - protein, 12 aa, Homo sapiens
  CDR3 for beta chain variable domain of TCR clone 285288 (TRBV7-9, TRBJ2-7)
CASSIKREEQYF

SEQ ID NO: 570577 - protein, 14 aa, Homo sapiens
  CDR3 for alpha chain variable domain of TCR clone 285289 (TRAV16, TRAJ39)
CALSKNNAGNMLSF

SEQ ID NO: 570578 - protein, 16 aa, Homo sapiens
  CDR3 for beta chain variable domain of TCR clone 285289 (TRBV6-6, TRBJ2-1)
CASSYSFSGSYNEQFF

SEQ ID NO: 570579 - protein, 14 aa, Homo sapiens
  CDR3 for alpha chain variable domain of TCR clone 285290 (TRAV8-1, TRAJ48)
CAVNAGFGNEKLTF

SEQ ID NO: 570580 - protein, 11 aa, Homo sapiens
  CDR3 for beta chain variable domain of TCR clone 285290 (TRBV19, TRBJ1-1)
CASSIGSEAFF

SEQ ID NO: 570581 - protein, 15 aa, Homo sapiens
  CDR3 for alpha chain variable domain of TCR clone 285291 (TRAV13-2, TRAJ58)
CVTAQKENSGSRLPF

SEQ ID NO: 570582 - protein, 14 aa, Homo sapiens
  CDR3 for beta chain variable domain of TCR clone 285291 (TRBV7-2, TRBJ2-3)
CASRRGLAADTQYF

SEQ ID NO: 570583 - protein, 13 aa, Homo sapiens
  CDR3 for alpha chain variable domain of TCR clone 285292 (TRAV8-1, TRAJ30)
CAVIMNRDEKIIF

SEQ ID NO: 570584 - protein, 14 aa, Homo sapiens
  CDR3 for beta chain variable domain of TCR clone 285292 (TRBV7-6, TRBJ2-3)
CASSLGTVTDTQYF

SEQ ID NO: 570585 - protein, 15 aa, Homo sapiens
  CDR3 for alpha chain variable domain of TCR clone 285293 (TRAV16, TRAJ23)
CALSGPYNQGGKLIF

SEQ ID NO: 570586 - protein, 14 aa, Homo sapiens
  CDR3 for beta chain variable domain of TCR clone 285293 (TRBV3-1, TRBJ2-3)
CASSQLAGTDTQYF

SEQ ID NO: 570587 - protein, 14 aa, Homo sapiens
  CDR3 for alpha chain variable domain of TCR clone 285294 (TRAV12-3, TRAJ43)
CAMSLGGAGTRLPV

SEQ ID NO: 570588 - protein, 13 aa, Homo sapiens
  CDR3 for beta chain variable domain of TCR clone 285294 (TRBV7-9, TRBJ1-2)
CASSLKQNYGYTF

SEQ ID NO: 570589 - protein, 13 aa, Homo sapiens
  CDR3 for alpha chain variable domain of TCR clone 285295 (TRAV12-3, TRAJ47)
CAMKKEYGNKLVF

SEQ ID NO: 570590 - protein, 16 aa, Homo sapiens
  CDR3 for beta chain variable domain of TCR clone 285295 (TRBV3-1, TRBJ2-6)
CASSLTWVSGANVLIF

SEQ ID NO: 570591 - protein, 12 aa, Homo sapiens
  CDR3 for alpha chain variable domain of TCR clone 285296 (TRAV4, TRAJ26)
CLVGDYGQNFVF

SEQ ID NO: 570592 - protein, 15 aa, Homo sapiens
  CDR3 for beta chain variable domain of TCR clone 285296 (TRBV4-1, TRBJ2-7)
CASSQQGQGFDEQYF

SEQ ID NO: 570593 - protein, 18 aa, Homo sapiens
  CDR3 for alpha chain variable domain of TCR clone 285297 (TRAV26-1, TRAJ42)
CTMHRQTYYGGSQGNLIF

SEQ ID NO: 570594 - protein, 16 aa, Homo sapiens
  CDR3 for beta chain variable domain of TCR clone 285297 (TRBV7-3, TRBJ2-2)
CASSLKRGTLSGELFF

SEQ ID NO: 570595 - protein, 14 aa, Homo sapiens
  CDR3 for alpha chain variable domain of TCR clone 285298 (TRAV26-1, TRAJ38)
CIADNARNNRKLIW

SEQ ID NO: 570596 - protein, 15 aa, Homo sapiens
  CDR3 for beta chain variable domain of TCR clone 285298 (TRBV2, TRBJ2-7)
CASSEGLARSYEQYF

SEQ ID NO: 570597 - protein, 14 aa, Homo sapiens
  CDR3 for alpha chain variable domain of TCR clone 285299 (TRAV8-1, TRAJ5)
CAVRTDTGRRALTV

SEQ ID NO: 570598 - protein, 14 aa, Homo sapiens
  CDR3 for beta chain variable domain of TCR clone 285299 (TRBV7-8, TRBJ2-3)
CASSFPDGQDTQYF

SEQ ID NO: 570599 - protein, 13 aa, Homo sapiens
  CDR3 for alpha chain variable domain of TCR clone 285300 (TRAV12-1, TRAJ38)
CLVPAGNNRKLIL

SEQ ID NO: 570600 - protein, 16 aa, Homo sapiens
  CDR3 for beta chain variable domain of TCR clone 285300 (TRBV4-2, TRBJ1-1)
CASSQAGFGMNTEAFF

SEQ ID NO: 570601 - protein, 15 aa, Homo sapiens
  CDR3 for alpha chain variable domain of TCR clone 285301 (TRAV3, TRAJ39)
CAVRDRYNAGNMLTF

SEQ ID NO: 570602 - protein, 18 aa, Homo sapiens
  CDR3 for beta chain variable domain of TCR clone 285301 (TRBV4-3, TRBJ2-1)
CASSQDLASGTTYDEQFF

SEQ ID NO: 570603 - protein, 18 aa, Homo sapiens
  CDR3 for alpha chain variable domain of TCR clone 285302 (TRAV26-2, TRAJ33)
CCVLLHPEEPASNYQLIW

SEQ ID NO: 570604 - protein, 15 aa, Homo sapiens
  CDR3 for beta chain variable domain of TCR clone 285302 (TRBV20-1, TRBJ2-7)
CSAESGTSGAYEQYF

SEQ ID NO: 570605 - protein, 14 aa, Homo sapiens
  CDR3 for alpha chain variable domain of TCR clone 285303 (TRAV1-2, TRAJ16)
CAVNRFSDGQKLLF

SEQ ID NO: 570606 - protein, 14 aa, Homo sapiens
  CDR3 for beta chain variable domain of TCR clone 285303 (TRBV6-1, TRBJ1-3)
CASVQRGGGNTIYF

SEQ ID NO: 570607 - protein, 15 aa, Homo sapiens
  CDR3 for alpha chain variable domain of TCR clone 285304 (TRAV3, TRAJ22)
CAVRDRGGSARQLTF

SEQ ID NO: 570608 - protein, 13 aa, Homo sapiens
  CDR3 for beta chain variable domain of TCR clone 285304 (TRBV2, TRBJ1-5)
CATAGPCNQPQHF

SEQ ID NO: 570609 - protein, 14 aa, Homo sapiens
  CDR3 for alpha chain variable domain of TCR clone 285305 (TRAV12-2, TRAJ5)
CAVNRSTGRGALTF

SEQ ID NO: 570610 - protein, 15 aa, Homo sapiens
  CDR3 for beta chain variable domain of TCR clone 285305 (TRBV4-1, TRBJ1-4)
CASSDTGGTNEKLFF

SEQ ID NO: 570611 - protein, 16 aa, Homo sapiens
  CDR3 for alpha chain variable domain of TCR clone 285306 (TRAV16, TRAJ4)
CALSRMFSGGYNRLLF

SEQ ID NO: 570612 - protein, 16 aa, Homo sapiens
  CDR3 for beta chain variable domain of TCR clone 285306 (TRBV24-1, TRBJ2-3)
CATSDPGTGATDTQYF

SEQ ID NO: 570613 - protein, 11 aa, Homo sapiens
  CDR3 for alpha chain variable domain of TCR clone 285307 (TRAV12-1, TRAJ21)
CVMNNFNKFYF

SEQ ID NO: 570614 - protein, 17 aa, Homo sapiens
  CDR3 for beta chain variable domain of TCR clone 285307 (TRBV7-8, TRBJ2-1)
CASSPPTGTLAYNEQFF

SEQ ID NO: 570615 - protein, 13 aa, Homo sapiens
  CDR3 for alpha chain variable domain of TCR clone 285308 (TRAV13-1, TRAJ43)
CAASKNNNNDMRF

SEQ ID NO: 570616 - protein, 15 aa, Homo sapiens
  CDR3 for beta chain variable domain of TCR clone 285308 (TRBV5-1, TRBJ2-6)
CASSLDPSGANVLTF

SEQ ID NO: 570617 - protein, 13 aa, Homo sapiens
  CDR3 for alpha chain variable domain of TCR clone 285309 (TRAV8-3, TRAJ4)
WVFYFGGYNKLIF

SEQ ID NO: 570618 - protein, 14 aa, Homo sapiens
  CDR3 for beta chain variable domain of TCR clone 285309 (TRBV7-9, TRBJ2-3)
CASSLEDGTDTQYF

SEQ ID NO: 570619 - protein, 15 aa, Homo sapiens
  CDR3 for alpha chain variable domain of TCR clone 285310 (TRAV26-1, TRAJ34)
CIVRSGGRNTDKLIF

SEQ ID NO: 570620 - protein, 13 aa, Homo sapiens
  CDR3 for beta chain variable domain of TCR clone 285310 (TRBV19, TRBJ1-2)
CASSVPGQDGYTF

SEQ ID NO: 570621 - protein, 17 aa, Homo sapiens
  CDR3 for alpha chain variable domain of TCR clone 285311 (TRAV26-2, TRAJ42)
CILRDVGYGGSQRNLIF

SEQ ID NO: 570622 - protein, 16 aa, Homo sapiens
  CDR3 for beta chain variable domain of TCR clone 285311 (TRBV12-4, TRBJ2-7)
CASSLIGGTGTYEQYF

SEQ ID NO: 570623 - protein, 13 aa, Homo sapiens
  CDR3 for alpha chain variable domain of TCR clone 285312 (TRAV23/DV6, TRAJ36)
CAASRTGANNFFF

SEQ ID NO: 570624 - protein, 13 aa, Homo sapiens
  CDR3 for beta chain variable domain of TCR clone 285312 (TRBV5-4, TRBJ1-5)
CASSLGGGQPQHF

SEQ ID NO: 570625 - protein, 11 aa, Homo sapiens
  CDR3 for alpha chain variable domain of TCR clone 285313 (TRAV3, TRAJ21)
CAVGNFNKFYF

SEQ ID NO: 570626 - protein, 13 aa, Homo sapiens
  CDR3 for beta chain variable domain of TCR clone 285313 (TRBV5-1, TRBJ2-1)
CASRPFGYNEQFF

SEQ ID NO: 570627 - protein, 11 aa, Homo sapiens
  CDR3 for alpha chain variable domain of TCR clone 285314 (TRAV12-1, TRAJ43)
CVEYDNNGMRF

SEQ ID NO: 570628 - protein, 17 aa, Homo sapiens
  CDR3 for beta chain variable domain of TCR clone 285314 (TRBV20-1, TRBJ2-1)
CSARDPLAGVWDNEQFF

SEQ ID NO: 570629 - protein, 12 aa, Homo sapiens
  CDR3 for alpha chain variable domain of TCR clone 285315 (TRAV13-2, TRAJ23)
CAERHRGGKLIF

SEQ ID NO: 570630 - protein, 12 aa, Homo sapiens
  CDR3 for beta chain variable domain of TCR clone 285315 (TRBV6-1, TRBJ2-7)
CASSDYSYEQYF

SEQ ID NO: 570631 - protein, 12 aa, Homo sapiens
  CDR3 for alpha chain variable domain of TCR clone 285316 (TRAV35, TRAJ43)
CAGAYNNNDMRF

SEQ ID NO: 570632 - protein, 14 aa, Homo sapiens
  CDR3 for beta chain variable domain of TCR clone 285316 (TRBV2, TRBJ2-2)
CASSWQGATGELYF

SEQ ID NO: 570633 - protein, 23 aa, Homo sapiens
  CDR3 for alpha chain variable domain of TCR clone 285317 (TRAV26-1, )
CIVRPLNAGNDHIQNPAPAVYQL

SEQ ID NO: 570634 - protein, 13 aa, Homo sapiens
  CDR3 for beta chain variable domain of TCR clone 285317 (TRBV18, TRBJ1-1)
CASSPNGDTEAFF

SEQ ID NO: 570635 - protein, 14 aa, Homo sapiens
  CDR3 for alpha chain variable domain of TCR clone 285318 (TRAV12-2, TRAJ17)
CAVLFKAAGNKLTF

SEQ ID NO: 570636 - protein, 15 aa, Homo sapiens
  CDR3 for beta chain variable domain of TCR clone 285318 (TRBV20-1, TRBJ2-1)
CSARGIGGTYNEQFF

SEQ ID NO: 570637 - protein, 12 aa, Homo sapiens
  CDR3 for alpha chain variable domain of TCR clone 285319 (TRAV30, TRAJ39)
CGRGNAGNMLTF

SEQ ID NO: 570638 - protein, 15 aa, Homo sapiens
  CDR3 for beta chain variable domain of TCR clone 285319 (TRBV12-4, TRBJ2-5)
CASSPPTGLQETQYF

SEQ ID NO: 570639 - protein, 16 aa, Homo sapiens
  CDR3 for alpha chain variable domain of TCR clone 285320 (TRAV17, TRAJ28)
CATDEYSGAGSYQLTF

SEQ ID NO: 570640 - protein, 13 aa, Homo sapiens
  CDR3 for beta chain variable domain of TCR clone 285320 (TRBV7-9, TRBJ1-2)
CASRTGPSYGYTV

SEQ ID NO: 570641 - protein, 15 aa, Homo sapiens
  CDR3 for alpha chain variable domain of TCR clone 285321 (TRAV12-3, TRAJ40)
CAMSDSGTYKYILEQ

SEQ ID NO: 570642 - protein, 22 aa, Homo sapiens
  CDR3 for beta chain variable domain of TCR clone 285321 (TRBV14, TRBJ1-5)
CASSQDGVTPYLPPIGNQPQHF

SEQ ID NO: 570643 - protein, 11 aa, Homo sapiens
  CDR3 for alpha chain variable domain of TCR clone 285322 (TRAV2, TRAJ13)
CSSVGYQKVTF

SEQ ID NO: 570644 - protein, 16 aa, Homo sapiens
  CDR3 for beta chain variable domain of TCR clone 285322 (TRBV6-1, TRBJ2-5)
CASSETLDRGAETQYF

SEQ ID NO: 570645 - protein, 14 aa, Homo sapiens
  CDR3 for alpha chain variable domain of TCR clone 285323 (TRAV41, TRAJ32)
CCPNYGGATNKLIF

SEQ ID NO: 570646 - protein, 14 aa, Homo sapiens
  CDR3 for beta chain variable domain of TCR clone 285323 (TRBV13, TRBJ2-5)
CASSLGPRGETQYF

SEQ ID NO: 570647 - protein, 15 aa, Homo sapiens
  CDR3 for alpha chain variable domain of TCR clone 285324 (TRAV12-3, TRAJ6)
CAMSATSGGSYIPTF

SEQ ID NO: 570648 - protein, 13 aa, Homo sapiens
  CDR3 for beta chain variable domain of TCR clone 285324 (TRBV7-9, TRBJ1-2)
CASSLKQNYGYSF

SEQ ID NO: 570649 - protein, 16 aa, Homo sapiens
  CDR3 for alpha chain variable domain of TCR clone 285325 (TRAV8-3, TRAJ10)
CAVGPIRTGGGNKLTF

SEQ ID NO: 570650 - protein, 16 aa, Homo sapiens
  CDR3 for beta chain variable domain of TCR clone 285325 (TRBV7-2, TRBJ2-5)
CASSSKWLSSQETQYF

SEQ ID NO: 570651 - protein, 15 aa, Homo sapiens
  CDR3 for alpha chain variable domain of TCR clone 285326 (TRAV36/DV7, TRAJ44)
CAVCRNTGTASKLTF

SEQ ID NO: 570652 - protein, 13 aa, Homo sapiens
  CDR3 for beta chain variable domain of TCR clone 285326 (TRBV18, TRBJ2-3)
CASSTGRTDTQDF

SEQ ID NO: 570653 - protein, 12 aa, Homo sapiens
  CDR3 for alpha chain variable domain of TCR clone 285327 (TRAV8-6, TRAJ43)
CAVRYNNNDMRF

SEQ ID NO: 570654 - protein, 16 aa, Homo sapiens
  CDR3 for beta chain variable domain of TCR clone 285327 (TRBV7-6, TRBJ2-3)
CASSPLAGGSTDTQYF

SEQ ID NO: 570655 - protein, 14 aa, Homo sapiens
  CDR3 for alpha chain variable domain of TCR clone 285328 (TRAV26-1, TRAJ38)
CIADNAGNNRKLIW

SEQ ID NO: 570656 - protein, 13 aa, Homo sapiens
  CDR3 for beta chain variable domain of TCR clone 285328 (TRBV15, TRBJ1-6)
CATLGGLNSPLHF

SEQ ID NO: 570657 - protein, 21 aa, Homo sapiens
  CDR3 for alpha chain variable domain of TCR clone 285329 (TRAV23/DV6, TRAJ30)
PSLEIQPPTSVQQARDDKIIF

SEQ ID NO: 570658 - protein, 15 aa, Homo sapiens
  CDR3 for beta chain variable domain of TCR clone 285329 (TRBV9, TRBJ2-2)
CISVPAASSPGSCFF

SEQ ID NO: 570659 - protein, 14 aa, Homo sapiens
  CDR3 for alpha chain variable domain of TCR clone 285330 (TRAV3, TRAJ9)
CAVRLNTGGFKTIF

SEQ ID NO: 570660 - protein, 16 aa, Homo sapiens
  CDR3 for beta chain variable domain of TCR clone 285330 (TRBV12-5, TRBJ2-5)
CASGHRTSGNQETQYF

SEQ ID NO: 570661 - protein, 16 aa, Homo sapiens
  CDR3 for alpha chain variable domain of TCR clone 285331 (TRAV26-1, TRAJ48)
IASSNLSNFGNEKLTF

SEQ ID NO: 570662 - protein, 14 aa, Homo sapiens
  CDR3 for beta chain variable domain of TCR clone 285331 (TRBV13, TRBJ2-7)
CASSLKGASYEQYF

SEQ ID NO: 570663 - protein, 13 aa, Homo sapiens
  CDR3 for alpha chain variable domain of TCR clone 285332 (TRAV13-1, TRAJ10)
CSALEGGGNKLTF

SEQ ID NO: 570664 - protein, 13 aa, Homo sapiens
  CDR3 for beta chain variable domain of TCR clone 285332 (TRBV7-9, TRBJ1-2)
CASSLKQNYGYTF

SEQ ID NO: 570665 - protein, 16 aa, Homo sapiens
  CDR3 for alpha chain variable domain of TCR clone 285333 (TRAV30, TRAJ24)
CGTAIVAADSWGKFQF

SEQ ID NO: 570666 - protein, 14 aa, Homo sapiens
  CDR3 for beta chain variable domain of TCR clone 285333 (TRBV12-5, TRBJ2-5)
CASGSRAHQETQYF

SEQ ID NO: 570667 - protein, 12 aa, Homo sapiens
  CDR3 for alpha chain variable domain of TCR clone 285334 (TRAV23/DV6, TRAJ30)
CAASKGDDKIIF

SEQ ID NO: 570668 - protein, 13 aa, Homo sapiens
  CDR3 for beta chain variable domain of TCR clone 285334 (TRBV19, TRBJ1-2)
CASSVPGQDGHTF

SEQ ID NO: 570669 - protein, 16 aa, Homo sapiens
  CDR3 for alpha chain variable domain of TCR clone 285335 (TRAV30, TRAJ24)
CGTEIVDADSWGKFQF

SEQ ID NO: 570670 - protein, 15 aa, Homo sapiens
  CDR3 for beta chain variable domain of TCR clone 285335 (TRBV5-1, TRBJ1-3)
CASSPDSSSGNTIYF

SEQ ID NO: 570671 - protein, 11 aa, Homo sapiens
  CDR3 for alpha chain variable domain of TCR clone 285336 (TRAV1-2, TRAJ40)
CAVPVTYKYIF

SEQ ID NO: 570672 - protein, 16 aa, Homo sapiens
  CDR3 for beta chain variable domain of TCR clone 285336 (TRBV29-1, TRBJ2-7)
CSVEGVGTSGSYEQYF

SEQ ID NO: 570673 - protein, 10 aa, Homo sapiens
  CDR3 for alpha chain variable domain of TCR clone 285337 (TRAV1-2, TRAJ18)
CAVRGEAQPW

SEQ ID NO: 570674 - protein, 14 aa, Homo sapiens
  CDR3 for beta chain variable domain of TCR clone 285337 (TRBV7-2, TRBJ2-7)
CASSFKGQDHGQYF

SEQ ID NO: 570675 - protein, 10 aa, Homo sapiens
  CDR3 for alpha chain variable domain of TCR clone 285338 (TRAV1-2, TRAJ20)
CALNDYKLSF

SEQ ID NO: 570676 - protein, 16 aa, Homo sapiens
  CDR3 for beta chain variable domain of TCR clone 285338 (TRBV20-1, TRBJ1-1)
CSARALTQGMNTEVFF

SEQ ID NO: 570677 - protein, 16 aa, Homo sapiens
  CDR3 for alpha chain variable domain of TCR clone 285339 (TRAV23/DV6, TRAJ3)
CSKHAVSYSSASKIIF

SEQ ID NO: 570678 - protein, 17 aa, Homo sapiens
  CDR3 for beta chain variable domain of TCR clone 285339 (TRBV7-8, TRBJ2-6)
CASSAGTGGAGANVLTF

SEQ ID NO: 570679 - protein, 13 aa, Homo sapiens
  CDR3 for alpha chain variable domain of TCR clone 285340 (TRAV3, TRAJ27)
CAVRPLSAGNSTF

SEQ ID NO: 570680 - protein, 13 aa, Homo sapiens
  CDR3 for beta chain variable domain of TCR clone 285340 (TRBV7-9, TRBJ2-3)
CASSPGSTDTQYF

SEQ ID NO: 570681 - protein, 12 aa, Homo sapiens
  CDR3 for alpha chain variable domain of TCR clone 285341 (TRAV13-1, TRAJ21)
CAAKEGCNKFYF

SEQ ID NO: 570682 - protein, 13 aa, Homo sapiens
  CDR3 for beta chain variable domain of TCR clone 285341 (TRBV7-3, TRBJ1-1)
CASSQDWGAEAFF

SEQ ID NO: 570683 - protein, 13 aa, Homo sapiens
  CDR3 for alpha chain variable domain of TCR clone 285342 (TRAV8-4, TRAJ10)
CAALTGGGSKLTF

SEQ ID NO: 570684 - protein, 15 aa, Homo sapiens
  CDR3 for beta chain variable domain of TCR clone 285342 (TRBV2, TRBJ2-3)
CASSDFEKATDTQYF

SEQ ID NO: 570685 - protein, 17 aa, Homo sapiens
  CDR3 for alpha chain variable domain of TCR clone 285343 (TRAV13-1, TRAJ28)
CAASPPYSGAGSYQLTS

SEQ ID NO: 570686 - protein, 11 aa, Homo sapiens
  CDR3 for beta chain variable domain of TCR clone 285343 (TRBV20-1, TRBJ2-1)
CSLSSGSEQFF

SEQ ID NO: 570687 - protein, 15 aa, Homo sapiens
  CDR3 for alpha chain variable domain of TCR clone 285344 (TRAV17, TRAJ52)
CAREAGGTSYGKLTF

SEQ ID NO: 570688 - protein, 14 aa, Homo sapiens
  CDR3 for beta chain variable domain of TCR clone 285344 (TRBV28, TRBJ1-5)
CASSLGVLVKPQHF

SEQ ID NO: 570689 - protein, 16 aa, Homo sapiens
  CDR3 for alpha chain variable domain of TCR clone 285345 (TRAV3, TRAJ37)
CAGRGKGSGNTGKLIF

SEQ ID NO: 570690 - protein, 15 aa, Homo sapiens
  CDR3 for beta chain variable domain of TCR clone 285345 (TRBV9, TRBJ1-4)
CASSVGGSTNEKLFF

SEQ ID NO: 570691 - protein, 18 aa, Homo sapiens
  CDR3 for alpha chain variable domain of TCR clone 285346 (TRAV26-2, TRAJ45)
CILRDRVDQEEVLADAPL

SEQ ID NO: 570692 - protein, 15 aa, Homo sapiens
  CDR3 for beta chain variable domain of TCR clone 285346 (TRBV7-6, TRBJ2-5)
CASSKPTGPQETQYF

SEQ ID NO: 570693 - protein, 13 aa, Homo sapiens
  CDR3 for alpha chain variable domain of TCR clone 285347 (TRAV27, TRAJ8)
CAGGPTGFQKLVF

SEQ ID NO: 570694 - protein, 15 aa, Homo sapiens
  CDR3 for beta chain variable domain of TCR clone 285347 (TRBV28, TRBJ2-7)
CASSPGGRGFYEQYF

SEQ ID NO: 570695 - protein, 14 aa, Homo sapiens
  CDR3 for alpha chain variable domain of TCR clone 285348 (TRAV8-3, TRAJ35)
CAVVPQGFGNVLHC

SEQ ID NO: 570696 - protein, 14 aa, Homo sapiens
  CDR3 for beta chain variable domain of TCR clone 285348 (TRBV19, TRBJ2-1)
CASPTFVLGGEQFF

SEQ ID NO: 570697 - protein, 11 aa, Homo sapiens
  CDR3 for alpha chain variable domain of TCR clone 285349 (TRAV13-1, TRAJ39)
CASHAGNMLTF

SEQ ID NO: 570698 - protein, 14 aa, Homo sapiens
  CDR3 for beta chain variable domain of TCR clone 285349 (TRBV11-2, TRBJ1-5)
CASSLDRGRQLQHF

SEQ ID NO: 570699 - protein, 15 aa, Homo sapiens
  CDR3 for alpha chain variable domain of TCR clone 285350 (TRAV29/DV5, TRAJ42)
CAAKTDGGSQGNLIF

SEQ ID NO: 570700 - protein, 15 aa, Homo sapiens
  CDR3 for beta chain variable domain of TCR clone 285350 (TRBV5-1, TRBJ2-2)
CASSSQGGNTGELIF

SEQ ID NO: 570701 - protein, 16 aa, Homo sapiens
  CDR3 for alpha chain variable domain of TCR clone 285351 (TRAV14/DV4, TRAJ53)
CAMREGGGGSNYKLTF

SEQ ID NO: 570702 - protein, 14 aa, Homo sapiens
  CDR3 for beta chain variable domain of TCR clone 285351 (TRBV7-9, TRBJ2-4)
CASSLAMGGNIQYF

SEQ ID NO: 570703 - protein, 13 aa, Homo sapiens
  CDR3 for alpha chain variable domain of TCR clone 285352 (TRAV8-3, TRAJ44)
CAVVPGTASKLTF

SEQ ID NO: 570704 - protein, 13 aa, Homo sapiens
  CDR3 for beta chain variable domain of TCR clone 285352 (TRBV10-3, TRBJ1-2)
SAISERDSYGYTF

SEQ ID NO: 570705 - protein, 11 aa, Homo sapiens
  CDR3 for alpha chain variable domain of TCR clone 285353 (TRAV12-2, TRAJ39)
KRDNAGNMLTF

SEQ ID NO: 570706 - protein, 13 aa, Homo sapiens
  CDR3 for beta chain variable domain of TCR clone 285353 (TRBV7-9, TRBJ1-2)
CASSSKQNYGYTF

SEQ ID NO: 570707 - protein, 13 aa, Homo sapiens
  CDR3 for alpha chain variable domain of TCR clone 285354 (TRAV12-2, TRAJ39)
CAVNNNAGNMLTF

SEQ ID NO: 570708 - protein, 13 aa, Homo sapiens
  CDR3 for beta chain variable domain of TCR clone 285354 (TRBV10-3, TRBJ2-7)
CASKLAVNYEQYF

SEQ ID NO: 570709 - protein, 11 aa, Homo sapiens
  CDR3 for alpha chain variable domain of TCR clone 285355 (TRAV12-3, TRAJ27)
CAMANAGKSTF

SEQ ID NO: 570710 - protein, 13 aa, Homo sapiens
  CDR3 for beta chain variable domain of TCR clone 285355 (TRBV20-1, TRBJ1-1)
CSARVGGTTEAFF

SEQ ID NO: 570711 - protein, 14 aa, Homo sapiens
  CDR3 for alpha chain variable domain of TCR clone 285356 (TRAV8-1, TRAJ9)
CAVNAWTGGFKTIF

SEQ ID NO: 570712 - protein, 16 aa, Homo sapiens
  CDR3 for beta chain variable domain of TCR clone 285356 (TRBV28, TRBJ2-2)
CVSSLEGGSNTGELFF

SEQ ID NO: 570713 - protein, 11 aa, Homo sapiens
  CDR3 for alpha chain variable domain of TCR clone 285357 (TRAV1-1, TRAJ23)
CAVRQGGKLTF

SEQ ID NO: 570714 - protein, 20 aa, Homo sapiens
  CDR3 for beta chain variable domain of TCR clone 285357 (TRBV7-8, TRBJ2-2)
CASSHLFPGPTVHITGELFF

SEQ ID NO: 570715 - protein, 13 aa, Homo sapiens
  CDR3 for alpha chain variable domain of TCR clone 285358 (TRAV12-1, TRAJ17)
CVVSKDAGNKLTF

SEQ ID NO: 570716 - protein, 17 aa, Homo sapiens
  CDR3 for beta chain variable domain of TCR clone 285358 (TRBV4-1, TRBJ2-5)
CACSQDPSGGPQETQYF

SEQ ID NO: 570717 - protein, 23 aa, Homo sapiens
  CDR3 for alpha chain variable domain of TCR clone 285359 (TRAV26-1, TRAJ38)
CIADNAGNNHIQNPDPAVYQLRD

SEQ ID NO: 570718 - protein, 15 aa, Homo sapiens
  CDR3 for beta chain variable domain of TCR clone 285359 (TRBV24-1, TRBJ2-1)
CATSGSGGFYNEQFF

SEQ ID NO: 570719 - protein, 14 aa, Homo sapiens
  CDR3 for alpha chain variable domain of TCR clone 285360 (TRAV17, TRAJ34)
CATDSLEGTAKLIF

SEQ ID NO: 570720 - protein, 14 aa, Homo sapiens
  CDR3 for beta chain variable domain of TCR clone 285360 (TRBV7-2, TRBJ2-7)
CASRSQGAAYEQYF

SEQ ID NO: 570721 - protein, 16 aa, Homo sapiens
  CDR3 for alpha chain variable domain of TCR clone 285361 (TRAV12-1, TRAJ48)
CVVNMVSNFGNEKLTF

SEQ ID NO: 570722 - protein, 18 aa, Homo sapiens
  CDR3 for beta chain variable domain of TCR clone 285361 (TRBV11-2, TRBJ2-6)
CASSLNPFLGTGANVLTF

SEQ ID NO: 570723 - protein, 10 aa, Homo sapiens
  CDR3 for alpha chain variable domain of TCR clone 285362 (TRAV30, TRAJ48)
CGIGNETLTF

SEQ ID NO: 570724 - protein, 15 aa, Homo sapiens
  CDR3 for beta chain variable domain of TCR clone 285362 (TRBV28, TRBJ2-1)
CASRKTGTAYNEQFF

SEQ ID NO: 570725 - protein, 14 aa, Homo sapiens
  CDR3 for alpha chain variable domain of TCR clone 285363 (TRAV12-2, TRAJ44)
CAVNPAGTASKLTF

SEQ ID NO: 570726 - protein, 16 aa, Homo sapiens
  CDR3 for beta chain variable domain of TCR clone 285363 (TRBV7-2, TRBJ2-7)
CASSLEAGGPWYEQYF

SEQ ID NO: 570727 - protein, 14 aa, Homo sapiens
  CDR3 for alpha chain variable domain of TCR clone 285364 (TRAV35, TRAJ22)
CAGLRPGSARQLTF

SEQ ID NO: 570728 - protein, 14 aa, Homo sapiens
  CDR3 for beta chain variable domain of TCR clone 285364 (TRBV4-1, TRBJ2-7)
CASSQVAGGDEQYF

SEQ ID NO: 570729 - protein, 14 aa, Homo sapiens
  CDR3 for alpha chain variable domain of TCR clone 285365 (TRAV21, TRAJ17)
CVVNYKAAGNKLTF

SEQ ID NO: 570730 - protein, 17 aa, Homo sapiens
  CDR3 for beta chain variable domain of TCR clone 285365 (TRBV20-1, TRBJ2-1)
CSASSSGLAGSYNEQFF

SEQ ID NO: 570731 - protein, 14 aa, Homo sapiens
  CDR3 for alpha chain variable domain of TCR clone 285366 (TRAV1-2, TRAJ16)
CAVNRFSDGQKLLF

SEQ ID NO: 570732 - protein, 14 aa, Homo sapiens
  CDR3 for beta chain variable domain of TCR clone 285366 (TRBV10-3, TRBJ2-5)
CAIRTSGGQETQYF

SEQ ID NO: 570733 - protein, 14 aa, Homo sapiens
  CDR3 for alpha chain variable domain of TCR clone 285367 (TRAV12-2, TRAJ13)
CAVKKTGGYQKVTF

SEQ ID NO: 570734 - protein, 16 aa, Homo sapiens
  CDR3 for beta chain variable domain of TCR clone 285367 (TRBV2, TRBJ2-1)
CASRSPAAGKYNEQFF

SEQ ID NO: 570735 - protein, 12 aa, Homo sapiens
  CDR3 for alpha chain variable domain of TCR clone 285368 (TRAV8-3, TRAJ26)
CAGDNYGQNFVF

SEQ ID NO: 570736 - protein, 15 aa, Homo sapiens
  CDR3 for beta chain variable domain of TCR clone 285368 (TRBV11-2, TRBJ2-1)
CASSLGTSGLNAQFF

SEQ ID NO: 570737 - protein, 14 aa, Homo sapiens
  CDR3 for alpha chain variable domain of TCR clone 285369 (TRAV26-1, TRAJ34)
CIVRVAYNTDKLIF

SEQ ID NO: 570738 - protein, 14 aa, Homo sapiens
  CDR3 for beta chain variable domain of TCR clone 285369 (TRBV7-3, TRBJ1-1)
CASSLKGGNTEAFF

SEQ ID NO: 570739 - protein, 16 aa, Homo sapiens
  CDR3 for alpha chain variable domain of TCR clone 285370 (TRAV3, TRAJ37)
CAVIVRGSGNTGKLIF

SEQ ID NO: 570740 - protein, 13 aa, Homo sapiens
  CDR3 for beta chain variable domain of TCR clone 285370 (TRBV7-9, TRBJ1-2)
CASSLKQNYGYTF

SEQ ID NO: 570741 - protein, 14 aa, Homo sapiens
  CDR3 for alpha chain variable domain of TCR clone 285371 (TRAV13-1, TRAJ39)
CAASYNNSGNMLTF

SEQ ID NO: 570742 - protein, 13 aa, Homo sapiens
  CDR3 for beta chain variable domain of TCR clone 285371 (TRBV24-1, TRBJ1-4)
CATNNGRSEKLFF

SEQ ID NO: 570743 - protein, 12 aa, Homo sapiens
  CDR3 for alpha chain variable domain of TCR clone 285372 (TRAV27, TRAJ13)
CAGVRGYQKVTF

SEQ ID NO: 570744 - protein, 14 aa, Homo sapiens
  CDR3 for beta chain variable domain of TCR clone 285372 (TRBV7-9, TRBJ2-4)
CASSLAMGGNIQYF

SEQ ID NO: 570745 - protein, 16 aa, Homo sapiens
  CDR3 for alpha chain variable domain of TCR clone 285373 (TRAV13-1, TRAJ17)
CAASKGVKAAGNKLTF

SEQ ID NO: 570746 - protein, 15 aa, Homo sapiens
  CDR3 for beta chain variable domain of TCR clone 285373 (TRBV20-1, TRBJ1-5)
CSAREGGYSNHPQHF

SEQ ID NO: 570747 - protein, 14 aa, Homo sapiens
  CDR3 for alpha chain variable domain of TCR clone 285374 (TRAV26-1, TRAJ54)
CIVRRTQGAQKLVF

SEQ ID NO: 570748 - protein, 14 aa, Homo sapiens
  CDR3 for beta chain variable domain of TCR clone 285374 (TRBV29-1, TRBJ2-5)
CSARGGAEGETQYF

SEQ ID NO: 570749 - protein, 12 aa, Homo sapiens
  CDR3 for alpha chain variable domain of TCR clone 285375 (TRAV21, TRAJ42)
CAVGGSQGNLIF

SEQ ID NO: 570750 - protein, 15 aa, Homo sapiens
  CDR3 for beta chain variable domain of TCR clone 285375 (TRBV13, TRBJ1-5)
CASSFGQGGVQPQHF

SEQ ID NO: 570751 - protein, 13 aa, Homo sapiens
  CDR3 for alpha chain variable domain of TCR clone 285376 (TRAV8-1, TRAJ41)
CAVNPGSGYALNF

SEQ ID NO: 570752 - protein, 13 aa, Homo sapiens
  CDR3 for beta chain variable domain of TCR clone 285376 (TRBV9, TRBJ2-1)
CASSVGQGGEQFF

SEQ ID NO: 570753 - protein, 13 aa, Homo sapiens
  CDR3 for alpha chain variable domain of TCR clone 285377 (TRAV21, TRAJ20)
CAVGLRVDSKLSF

SEQ ID NO: 570754 - protein, 16 aa, Homo sapiens
  CDR3 for beta chain variable domain of TCR clone 285377 (TRBV9, TRBJ2-2)
CASSAMGKGNTGELFF

SEQ ID NO: 570755 - protein, 13 aa, Homo sapiens
  CDR3 for alpha chain variable domain of TCR clone 285378 (TRAV21, TRAJ31)
CAPFRNKNARLMF

SEQ ID NO: 570756 - protein, 16 aa, Homo sapiens
  CDR3 for beta chain variable domain of TCR clone 285378 (TRBV7-3, TRBJ2-2)
CASSLKRGTLSGELFF

SEQ ID NO: 570757 - protein, 14 aa, Homo sapiens
  CDR3 for alpha chain variable domain of TCR clone 285379 (TRAV1-2, TRAJ16)
CAVNRFSDGQKLLF

SEQ ID NO: 570758 - protein, 20 aa, Homo sapiens
  CDR3 for beta chain variable domain of TCR clone 285379 (TRBV4-3, TRBJ2-2)
GPVSLRQQPPWGSGTGELFF

SEQ ID NO: 570759 - protein, 12 aa, Homo sapiens
  CDR3 for alpha chain variable domain of TCR clone 285380 (TRAV13-1, TRAJ21)
CAAKDGFNKFYF

SEQ ID NO: 570760 - protein, 19 aa, Homo sapiens
  CDR3 for beta chain variable domain of TCR clone 285380 (TRBV2, TRBJ2-7)
CASSDDETSGRANDYEQYF

SEQ ID NO: 570761 - protein, 15 aa, Homo sapiens
  CDR3 for alpha chain variable domain of TCR clone 285381 (TRAV12-2, TRAJ53)
CAVNGGGGSNHKLTF

SEQ ID NO: 570762 - protein, 14 aa, Homo sapiens
  CDR3 for beta chain variable domain of TCR clone 285381 (TRBV18, TRBJ2-7)
CASSPRGGAYEQYF

SEQ ID NO: 570763 - protein, 13 aa, Homo sapiens
  CDR3 for alpha chain variable domain of TCR clone 285382 (TRAV12-1, TRAJ33)
CGDAPDSNYQLIW

SEQ ID NO: 570764 - protein, 15 aa, Homo sapiens
  CDR3 for beta chain variable domain of TCR clone 285382 (TRBV27, TRBJ2-1)
CASSNGGGSSNEQFL

SEQ ID NO: 570765 - protein, 13 aa, Homo sapiens
  CDR3 for alpha chain variable domain of TCR clone 285383 (TRAV14/DV4, TRAJ9)
CNEFNTGGFKTIF

SEQ ID NO: 570766 - protein, 16 aa, Homo sapiens
  CDR3 for beta chain variable domain of TCR clone 285383 (TRBV7-8, TRBJ2-5)
CASSLDGAGGLETQYF

SEQ ID NO: 570767 - protein, 14 aa, Homo sapiens
  CDR3 for alpha chain variable domain of TCR clone 285384 (TRAV23/DV6, TRAJ23)
CAASRRGQGGKLIF

SEQ ID NO: 570768 - protein, 14 aa, Homo sapiens
  CDR3 for beta chain variable domain of TCR clone 285384 (TRBV18, TRBJ1-1)
CASSPPTGRTEAFF

SEQ ID NO: 570769 - protein, 15 aa, Homo sapiens
  CDR3 for alpha chain variable domain of TCR clone 285385 (TRAV27, TRAJ38)
CAARRNAGNNRKLIW

SEQ ID NO: 570770 - protein, 17 aa, Homo sapiens
  CDR3 for beta chain variable domain of TCR clone 285385 (TRBV5-1, TRBJ2-7)
CASSKPEGREASYEQYF

SEQ ID NO: 570771 - protein, 12 aa, Homo sapiens
  CDR3 for alpha chain variable domain of TCR clone 285386 (TRAV12-3, TRAJ17)
CAMTLTGNELTF

SEQ ID NO: 570772 - protein, 14 aa, Homo sapiens
  CDR3 for beta chain variable domain of TCR clone 285386 (TRBV7-3, TRBJ2-1)
CASSLAGGTNEQFF

SEQ ID NO: 570773 - protein, 11 aa, Homo sapiens
  CDR3 for alpha chain variable domain of TCR clone 285387 (TRAV17, TRAJ9)
CATTGGFKTIF

SEQ ID NO: 570774 - protein, 16 aa, Homo sapiens
  CDR3 for beta chain variable domain of TCR clone 285387 (TRBV7-9, TRBJ2-1)
CASSDVAGGSYNEQFF

SEQ ID NO: 570775 - protein, 16 aa, Homo sapiens
  CDR3 for alpha chain variable domain of TCR clone 285388 (TRAV30, TRAJ24)
CGTEIVDADSWGEFQF

SEQ ID NO: 570776 - protein, 16 aa, Homo sapiens
  CDR3 for beta chain variable domain of TCR clone 285388 (TRBV28, TRBJ2-7)
CASSLFFETGGPEQYF

SEQ ID NO: 570777 - protein, 13 aa, Homo sapiens
  CDR3 for alpha chain variable domain of TCR clone 285389 (TRAV17, TRAJ39)
CAISTNAGNMLTF

SEQ ID NO: 570778 - protein, 18 aa, Homo sapiens
  CDR3 for beta chain variable domain of TCR clone 285389 (TRBV15, TRBJ2-3)
CATSRDGARSWDTDTQYF

SEQ ID NO: 570779 - protein, 12 aa, Homo sapiens
  CDR3 for alpha chain variable domain of TCR clone 285390 (TRAV35, TRAJ49)
CAGWNIGNHFYF

SEQ ID NO: 570780 - protein, 16 aa, Homo sapiens
  CDR3 for beta chain variable domain of TCR clone 285390 (TRBV5-1, TRBJ2-2)
CASSLWDTTNTGELFF

SEQ ID NO: 570781 - protein, 14 aa, Homo sapiens
  CDR3 for alpha chain variable domain of TCR clone 285391 (TRAV12-2, TRAJ44)
CAVNPAGPASKLTF

SEQ ID NO: 570782 - protein, 14 aa, Homo sapiens
  CDR3 for beta chain variable domain of TCR clone 285391 (TRBV6-1, TRBJ1-3)
CASVQGGGGNTIYF

SEQ ID NO: 570783 - protein, 16 aa, Homo sapiens
  CDR3 for alpha chain variable domain of TCR clone 285392 (TRAV30, TRAJ24)
CGTEIVDADSWGKFQF

SEQ ID NO: 570784 - protein, 15 aa, Homo sapiens
  CDR3 for beta chain variable domain of TCR clone 285392 (TRBV12-4, TRBJ2-7)
CASSHRTSGNYEQYF

SEQ ID NO: 570785 - protein, 10 aa, Homo sapiens
  CDR3 for alpha chain variable domain of TCR clone 285393 (TRAV36/DV7, TRAJ48)
CAVGNEKLTF

SEQ ID NO: 570786 - protein, 15 aa, Homo sapiens
  CDR3 for beta chain variable domain of TCR clone 285393 (TRBV7-2, TRBJ2-1)
CASSSGLAGGNEQFF

SEQ ID NO: 570787 - protein, 13 aa, Homo sapiens
  CDR3 for alpha chain variable domain of TCR clone 285394 (TRAV26-1, TRAJ29)
CIVRRSGNTPLVF

SEQ ID NO: 570788 - protein, 17 aa, Homo sapiens
  CDR3 for beta chain variable domain of TCR clone 285394 (TRBV19, TRBJ1-1)
CASSIAGGGLMNTEAFF

SEQ ID NO: 570789 - protein, 12 aa, Homo sapiens
  CDR3 for alpha chain variable domain of TCR clone 285395 (TRAV29/DV5, TRAJ49)
CASTDTVNQFYF

SEQ ID NO: 570790 - protein, 12 aa, Homo sapiens
  CDR3 for beta chain variable domain of TCR clone 285395 (TRBV28, TRBJ2-7)
CASSRSGYEQYF

SEQ ID NO: 570791 - protein, 12 aa, Homo sapiens
  CDR3 for alpha chain variable domain of TCR clone 285396 (TRAV12-3, TRAJ3)
CAIDSSASKIIF

SEQ ID NO: 570792 - protein, 17 aa, Homo sapiens
  CDR3 for beta chain variable domain of TCR clone 285396 (TRBV7-9, TRBJ2-3)
CASSLEEAGAYPETQYF

SEQ ID NO: 570793 - protein, 16 aa, Homo sapiens
  CDR3 for alpha chain variable domain of TCR clone 285397 (TRAV27, TRAJ48)
TAARPGDTGLYLPLTF

SEQ ID NO: 570794 - protein, 12 aa, Homo sapiens
  CDR3 for beta chain variable domain of TCR clone 285397 (TRBV14, TRBJ1-1)
CASSQLKGLAFF

SEQ ID NO: 570795 - protein, 16 aa, Homo sapiens
  CDR3 for alpha chain variable domain of TCR clone 285398 (TRAV12-3, TRAJ53)
CAMSPGSGGSNYKLTF

SEQ ID NO: 570796 - protein, 14 aa, Homo sapiens
  CDR3 for beta chain variable domain of TCR clone 285398 (TRBV7-9, TRBJ1-1)
CASTPLQSYTEAFF

SEQ ID NO: 570797 - protein, 13 aa, Homo sapiens
  CDR3 for alpha chain variable domain of TCR clone 285399 (TRAV30, TRAJ39)
YGTEKNAGNMLTF

SEQ ID NO: 570798 - protein, 12 aa, Homo sapiens
  CDR3 for beta chain variable domain of TCR clone 285399 (TRBV12-4, TRBJ2-5)
CASSSAQETQYF

SEQ ID NO: 570799 - protein, 12 aa, Homo sapiens
  CDR3 for alpha chain variable domain of TCR clone 285400 (TRAV12-1, TRAJ40)
CVVYSGTYKYIF

SEQ ID NO: 570800 - protein, 17 aa, Homo sapiens
  CDR3 for beta chain variable domain of TCR clone 285400 (TRBV7-3, TRBJ2-3)
CASSLMKRMRGADTQYF

SEQ ID NO: 570801 - protein, 12 aa, Homo sapiens
  CDR3 for alpha chain variable domain of TCR clone 285401 (TRAV29/DV5, TRAJ15)
CASNQAGTALIF

SEQ ID NO: 570802 - protein, 15 aa, Homo sapiens
  CDR3 for beta chain variable domain of TCR clone 285401 (TRBV11-2, TRBJ2-2)
CASSSERVNAGELFF

SEQ ID NO: 570803 - protein, 15 aa, Homo sapiens
  CDR3 for alpha chain variable domain of TCR clone 285402 (TRAV27, TRAJ45)
CAPVYSGGGADGLTF

SEQ ID NO: 570804 - protein, 15 aa, Homo sapiens
  CDR3 for beta chain variable domain of TCR clone 285402 (TRBV23-1, TRBJ1-5)
CASSQSRGQGWGAYI

SEQ ID NO: 570805 - protein, 14 aa, Homo sapiens
  CDR3 for alpha chain variable domain of TCR clone 285403 (TRAV8-4, TRAJ8)
CAVSEDTGFQKLVF

SEQ ID NO: 570806 - protein, 15 aa, Homo sapiens
  CDR3 for beta chain variable domain of TCR clone 285403 (TRBV6-1, TRBJ2-3)
CASSERGGITDTQYF

SEQ ID NO: 570807 - protein, 12 aa, Homo sapiens
  CDR3 for alpha chain variable domain of TCR clone 285404 (TRAV26-1, TRAJ43)
CIVRPRGDDMRF

SEQ ID NO: 570808 - protein, 16 aa, Homo sapiens
  CDR3 for beta chain variable domain of TCR clone 285404 (TRBV7-3, TRBJ2-2)
CASSLKRGTLSGELFF

SEQ ID NO: 570809 - protein, 14 aa, Homo sapiens
  CDR3 for alpha chain variable domain of TCR clone 285405 (TRAV13-1, TRAJ44)
CAAKATGTACKLTF

SEQ ID NO: 570810 - protein, 16 aa, Homo sapiens
  CDR3 for beta chain variable domain of TCR clone 285405 (TRBV7-9, TRBJ2-6)
CASSLKGPLRANVLTF

SEQ ID NO: 570811 - protein, 11 aa, Homo sapiens
  CDR3 for alpha chain variable domain of TCR clone 285406 (TRAV2, TRAJ13)
CASGGYQKVTF

SEQ ID NO: 570812 - protein, 17 aa, Homo sapiens
  CDR3 for beta chain variable domain of TCR clone 285406 (TRBV11-2, TRBJ2-1)
CASSLYPPVVEYNEQFF

SEQ ID NO: 570813 - protein, 15 aa, Homo sapiens
  CDR3 for alpha chain variable domain of TCR clone 285407 (TRAV8-3, TRAJ27)
CAVGPSKTNAGTSTF

SEQ ID NO: 570814 - protein, 13 aa, Homo sapiens
  CDR3 for beta chain variable domain of TCR clone 285407 (TRBV20-1, TRBJ1-1)
CSAPLGGGTEAFF

SEQ ID NO: 570815 - protein, 13 aa, Homo sapiens
  CDR3 for alpha chain variable domain of TCR clone 285408 (TRAV26-1, )
CIVSHRVEGFWNQ

SEQ ID NO: 570816 - protein, 14 aa, Homo sapiens
  CDR3 for beta chain variable domain of TCR clone 285408 (TRBV20-1, TRBJ2-7)
CSAWTALSSYEQYL

SEQ ID NO: 570817 - protein, 14 aa, Homo sapiens
  CDR3 for alpha chain variable domain of TCR clone 285409 (TRAV12-1, TRAJ23)
CVVMIYNQGGKIIF

SEQ ID NO: 570818 - protein, 23 aa, Homo sapiens
  CDR3 for beta chain variable domain of TCR clone 285409 (TRBV7-3, TRBJ1-6)
CASSLTSRDEASDPSSYNSPHHF

SEQ ID NO: 570819 - protein, 11 aa, Homo sapiens
  CDR3 for alpha chain variable domain of TCR clone 285410 (TRAV2, TRAJ13)
CASGGYQKVTF

SEQ ID NO: 570820 - protein, 14 aa, Homo sapiens
  CDR3 for beta chain variable domain of TCR clone 285410 (TRBV7-2, TRBJ2-7)
CASSLKTSFYEQYF

SEQ ID NO: 570821 - protein, 16 aa, Homo sapiens
  CDR3 for alpha chain variable domain of TCR clone 285411 (TRAV21, TRAJ52)
CAVTNTGGTSYGKLTF

SEQ ID NO: 570822 - protein, 13 aa, Homo sapiens
  CDR3 for beta chain variable domain of TCR clone 285411 (TRBV20-1, TRBJ2-3)
CSARLAGTDTQYF

SEQ ID NO: 570823 - protein, 14 aa, Homo sapiens
  CDR3 for alpha chain variable domain of TCR clone 285412 (TRAV4, TRAJ17)
CLVGDMAAGNKLTF

SEQ ID NO: 570824 - protein, 15 aa, Homo sapiens
  CDR3 for beta chain variable domain of TCR clone 285412 (TRBV7-9, TRBJ1-6)
CASSSPGRGNSPLHF

SEQ ID NO: 570825 - protein, 14 aa, Homo sapiens
  CDR3 for alpha chain variable domain of TCR clone 285413 (TRAV12-2, TRAJ40)
CAVRIPSGTYKYIF

SEQ ID NO: 570826 - protein, 14 aa, Homo sapiens
  CDR3 for beta chain variable domain of TCR clone 285413 (TRBV20-1, TRBJ1-1)
CSAQTRIGGTEASF

SEQ ID NO: 570827 - protein, 14 aa, Homo sapiens
  CDR3 for alpha chain variable domain of TCR clone 285414 (TRAV12-1, TRAJ12)
CVVTSGDSSYKLIF

SEQ ID NO: 570828 - protein, 15 aa, Homo sapiens
  CDR3 for beta chain variable domain of TCR clone 285414 (TRBV12-4, TRBJ2-5)
CASSPPTGLQETQYF

SEQ ID NO: 570829 - protein, 16 aa, Homo sapiens
  CDR3 for alpha chain variable domain of TCR clone 285415 (TRAV23/DV6, TRAJ52)
CAARPSGGTSYGKLTF

SEQ ID NO: 570830 - protein, 13 aa, Homo sapiens
  CDR3 for beta chain variable domain of TCR clone 285415 (TRBV7-9, TRBJ1-1)
CASSSSGETEAFF

SEQ ID NO: 570831 - protein, 14 aa, Homo sapiens
  CDR3 for alpha chain variable domain of TCR clone 285416 (TRAV17, TRAJ6)
CATDASGGSYIPTF

SEQ ID NO: 570832 - protein, 12 aa, Homo sapiens
  CDR3 for beta chain variable domain of TCR clone 285416 (TRBV7-8, TRBJ2-7)
CASSLAGYEQYF

SEQ ID NO: 570833 - protein, 16 aa, Homo sapiens
  CDR3 for alpha chain variable domain of TCR clone 285417 (TRAV30, TRAJ24)
CGTEIVDADSWGKFQF

SEQ ID NO: 570834 - protein, 13 aa, Homo sapiens
  CDR3 for beta chain variable domain of TCR clone 285417 (TRBV11-2, TRBJ2-5)
CASGHGAKETQYF

SEQ ID NO: 570835 - protein, 15 aa, Homo sapiens
  CDR3 for alpha chain variable domain of TCR clone 285418 (TRAV3, TRAJ5)
CAVRDLDTGRRALTF

SEQ ID NO: 570836 - protein, 14 aa, Homo sapiens
  CDR3 for beta chain variable domain of TCR clone 285418 (TRBV5-1, TRBJ2-3)
CASRGQTSTDTQYF

SEQ ID NO: 570837 - protein, 14 aa, Homo sapiens
  CDR3 for alpha chain variable domain of TCR clone 285419 (TRAV34, TRAJ44)
CGADGTGTASKLTF

SEQ ID NO: 570838 - protein, 20 aa, Homo sapiens
  CDR3 for beta chain variable domain of TCR clone 285419 (TRBV7-9, TRBJ1-5)
CISVSDAGQGAPYSNQPQHF

SEQ ID NO: 570839 - protein, 19 aa, Homo sapiens
  CDR3 for alpha chain variable domain of TCR clone 285420 (TRAV2, TRAJ20)
ILQVREADAAVYRDCKLSF

SEQ ID NO: 570840 - protein, 13 aa, Homo sapiens
  CDR3 for beta chain variable domain of TCR clone 285420 (TRBV7-3, TRBJ1-2)
CASSLKRGYGYTF

SEQ ID NO: 570841 - protein, 15 aa, Homo sapiens
  CDR3 for alpha chain variable domain of TCR clone 285421 (TRAV29/DV5, TRAJ40)
CAASGDTSGTYKYIF

SEQ ID NO: 570842 - protein, 14 aa, Homo sapiens
  CDR3 for beta chain variable domain of TCR clone 285421 (TRBV7-9, TRBJ2-1)
CASSPRDSLYEQFF

SEQ ID NO: 570843 - protein, 15 aa, Homo sapiens
  CDR3 for alpha chain variable domain of TCR clone 285422 (TRAV12-1, TRAJ45)
CVVLSGGGGADGLTF

SEQ ID NO: 570844 - protein, 14 aa, Homo sapiens
  CDR3 for beta chain variable domain of TCR clone 285422 (TRBV19, TRBJ2-7)
CASSMGQGAIEQYF

SEQ ID NO: 570845 - protein, 14 aa, Homo sapiens
  CDR3 for alpha chain variable domain of TCR clone 285423 (TRAV1-2, TRAJ8)
CAVRGDTGFQKLVF

SEQ ID NO: 570846 - protein, 12 aa, Homo sapiens
  CDR3 for beta chain variable domain of TCR clone 285423 (TRBV11-2, TRBJ2-5)
CASSLDTQTQYF

SEQ ID NO: 570847 - protein, 15 aa, Homo sapiens
  CDR3 for alpha chain variable domain of TCR clone 285424 (TRAV8-3, TRAJ7)
CAVGSISYGNNRLAF

SEQ ID NO: 570848 - protein, 13 aa, Homo sapiens
  CDR3 for beta chain variable domain of TCR clone 285424 (TRBV4-2, TRBJ1-1)
CASSQAGNTAAFS

SEQ ID NO: 570849 - protein, 13 aa, Homo sapiens
  CDR3 for alpha chain variable domain of TCR clone 285425 (TRAV27, TRAJ41)
CAGEGNYGYALNF

SEQ ID NO: 570850 - protein, 14 aa, Homo sapiens
  CDR3 for beta chain variable domain of TCR clone 285425 (TRBV25-1, TRBJ1-1)
CASTHLGGNTEAFF

SEQ ID NO: 570851 - protein, 14 aa, Homo sapiens
  CDR3 for alpha chain variable domain of TCR clone 285426 (TRAV12-1, TRAJ29)
CVVNEGSGNTPLVF

SEQ ID NO: 570852 - protein, 13 aa, Homo sapiens
  CDR3 for beta chain variable domain of TCR clone 285426 (TRBV7-9, TRBJ2-3)
CASSHGSTDTQYF

SEQ ID NO: 570853 - protein, 13 aa, Homo sapiens
  CDR3 for alpha chain variable domain of TCR clone 285427 (TRAV13-1, TRAJ6)
CARGSGGSYIPTF

SEQ ID NO: 570854 - protein, 16 aa, Homo sapiens
  CDR3 for beta chain variable domain of TCR clone 285427 (TRBV7-3, TRBJ2-2)
CASSLKRGTLSGELFF

SEQ ID NO: 570855 - protein, 16 aa, Homo sapiens
  CDR3 for alpha chain variable domain of TCR clone 285428 (TRAV12-2, TRAJ6)
CAAPLAGSGGSYIPTC

SEQ ID NO: 570856 - protein, 10 aa, Homo sapiens
  CDR3 for beta chain variable domain of TCR clone 285428 (TRBV28, TRBJ1-2)
CASSSDRAVF

SEQ ID NO: 570857 - protein, 14 aa, Homo sapiens
  CDR3 for alpha chain variable domain of TCR clone 285429 (TRAV2, TRAJ37)
CAVDFTSNTGKLIF

SEQ ID NO: 570858 - protein, 14 aa, Homo sapiens
  CDR3 for beta chain variable domain of TCR clone 285429 (TRBV28, TRBJ2-7)
CASSGLAEPAEQYF

SEQ ID NO: 570859 - protein, 15 aa, Homo sapiens
  CDR3 for alpha chain variable domain of TCR clone 285430 (TRAV8-2, TRAJ40)
CVVLGTTSGTYKYIF

SEQ ID NO: 570860 - protein, 16 aa, Homo sapiens
  CDR3 for beta chain variable domain of TCR clone 285430 (TRBV19, TRBJ1-1)
CASSIEVSGGRLSLDK

SEQ ID NO: 570861 - protein, 11 aa, Homo sapiens
  CDR3 for alpha chain variable domain of TCR clone 285431 (TRAV27, TRAJ20)
CAGADDYKLSF

SEQ ID NO: 570862 - protein, 16 aa, Homo sapiens
  CDR3 for beta chain variable domain of TCR clone 285431 (TRBV6-5, TRBJ2-3)
CASRFHRGEGSDTQYF

SEQ ID NO: 570863 - protein, 16 aa, Homo sapiens
  CDR3 for alpha chain variable domain of TCR clone 285432 (TRAV1-2, TRAJ10)
CAVRVVLTGGGNKLTF

SEQ ID NO: 570864 - protein, 17 aa, Homo sapiens
  CDR3 for beta chain variable domain of TCR clone 285432 (TRBV15, TRBJ1-5)
CATSRAPPGTRNQPQHF

SEQ ID NO: 570865 - protein, 13 aa, Homo sapiens
  CDR3 for alpha chain variable domain of TCR clone 285433 (TRAV38-1, TRAJ45)
CLLSGGGADGLTF

SEQ ID NO: 570866 - protein, 20 aa, Homo sapiens
  CDR3 for beta chain variable domain of TCR clone 285433 (TRBV28, TRBJ2-1)
CASTPIGRSPGLAGGNEQFF

SEQ ID NO: 570867 - protein, 17 aa, Homo sapiens
  CDR3 for alpha chain variable domain of TCR clone 285434 (TRAV8-6, TRAJ58)
CPVSSWVGETSDSRLTF

SEQ ID NO: 570868 - protein, 14 aa, Homo sapiens
  CDR3 for beta chain variable domain of TCR clone 285434 (TRBV19, TRBJ1-4)
CASSMGRHNEKLFF

SEQ ID NO: 570869 - protein, 14 aa, Homo sapiens
  CDR3 for alpha chain variable domain of TCR clone 285435 (TRAV26-1, TRAJ34)
CIVRVAYNTDKLIF

SEQ ID NO: 570870 - protein, 13 aa, Homo sapiens
  CDR3 for beta chain variable domain of TCR clone 285435 (TRBV20-1, TRBJ1-1)
CSARVGGNTEAFF

SEQ ID NO: 570871 - protein, 15 aa, Homo sapiens
  CDR3 for alpha chain variable domain of TCR clone 285436 (TRAV4, TRAJ32)
CLVGEDGGATNKLIF

SEQ ID NO: 570872 - protein, 12 aa, Homo sapiens
  CDR3 for beta chain variable domain of TCR clone 285436 (TRBV7-6, TRBJ2-5)
CASSLSQETQYF

SEQ ID NO: 570873 - protein, 17 aa, Homo sapiens
  CDR3 for alpha chain variable domain of TCR clone 285437 (TRAV26-2, TRAJ28)
FILRPLLIVAGSYQLTF

SEQ ID NO: 570874 - protein, 11 aa, Homo sapiens
  CDR3 for beta chain variable domain of TCR clone 285437 (TRBV11-2, TRBJ2-2)
CASSLPGELFF

SEQ ID NO: 570875 - protein, 14 aa, Homo sapiens
  CDR3 for alpha chain variable domain of TCR clone 285438 (TRAV12-3, TRAJ58)
CAMSTETSGSRLTF

SEQ ID NO: 570876 - protein, 15 aa, Homo sapiens
  CDR3 for beta chain variable domain of TCR clone 285438 (TRBV4-1, TRBJ1-4)
CASSDTGGTKEKLFF

SEQ ID NO: 570877 - protein, 16 aa, Homo sapiens
  CDR3 for alpha chain variable domain of TCR clone 285439 (TRAV14/DV4, TRAJ20)
CAMREGRSRDDYKLSF

SEQ ID NO: 570878 - protein, 14 aa, Homo sapiens
  CDR3 for beta chain variable domain of TCR clone 285439 (TRBV11-2, TRBJ2-7)
CASSSTGEGYEQYF

SEQ ID NO: 570879 - protein, 16 aa, Homo sapiens
  CDR3 for alpha chain variable domain of TCR clone 285440 (TRAV3, TRAJ37)
CAVRGKGSGNTGKLIF

SEQ ID NO: 570880 - protein, 15 aa, Homo sapiens
  CDR3 for beta chain variable domain of TCR clone 285440 (TRBV10-2, TRBJ2-6)
CASSEQGTGANVLTF

SEQ ID NO: 570881 - protein, 13 aa, Homo sapiens
  CDR3 for alpha chain variable domain of TCR clone 285441 (TRAV27, TRAJ6)
CAGGTRGSYIPTF

SEQ ID NO: 570882 - protein, 13 aa, Homo sapiens
  CDR3 for beta chain variable domain of TCR clone 285441 (TRBV7-2, TRBJ2-4)
CASSREHANIQYF

SEQ ID NO: 570883 - protein, 16 aa, Homo sapiens
  CDR3 for alpha chain variable domain of TCR clone 285442 (TRAV3, TRAJ10)
CAVSDMRAGGGNKLTF

SEQ ID NO: 570884 - protein, 17 aa, Homo sapiens
  CDR3 for beta chain variable domain of TCR clone 285442 (TRBV20-1, TRBJ2-2)
CSASGSGQGGLTGELFF

SEQ ID NO: 570885 - protein, 15 aa, Homo sapiens
  CDR3 for alpha chain variable domain of TCR clone 285443 (TRAV2, TRAJ24)
CAVEVLTDSWGKFQF

SEQ ID NO: 570886 - protein, 16 aa, Homo sapiens
  CDR3 for beta chain variable domain of TCR clone 285443 (TRBV11-2, TRBJ2-3)
CASSSRTSGGAGTQYF

SEQ ID NO: 570887 - protein, 15 aa, Homo sapiens
  CDR3 for alpha chain variable domain of TCR clone 285444 (TRAV3, TRAJ5)
CAVRDRKTGRRALTF

SEQ ID NO: 570888 - protein, 15 aa, Homo sapiens
  CDR3 for beta chain variable domain of TCR clone 285444 (TRBV7-8, TRBJ2-1)
CGSSLAGSLYNEQFF

SEQ ID NO: 570889 - protein, 15 aa, Homo sapiens
  CDR3 for alpha chain variable domain of TCR clone 285445 (TRAV14/DV4, TRAJ28)
CAMSPLRAASYQLTF

SEQ ID NO: 570890 - protein, 15 aa, Homo sapiens
  CDR3 for beta chain variable domain of TCR clone 285445 (TRBV14, TRBJ1-5)
ISVPAAKIGGWPQHF

SEQ ID NO: 570891 - protein, 14 aa, Homo sapiens
  CDR3 for alpha chain variable domain of TCR clone 285446 (TRAV4, TRAJ13)
CLVGYSGGYQKVTF

SEQ ID NO: 570892 - protein, 13 aa, Homo sapiens
  CDR3 for beta chain variable domain of TCR clone 285446 (TRBV18, TRBJ1-1)
CASSGGRDTEAFF

SEQ ID NO: 570893 - protein, 18 aa, Homo sapiens
  CDR3 for alpha chain variable domain of TCR clone 285447 (TRAV29/DV5, TRAJ52)
CAAGFRGAGGTSYGKLTF

SEQ ID NO: 570894 - protein, 14 aa, Homo sapiens
  CDR3 for beta chain variable domain of TCR clone 285447 (TRBV2, TRBJ2-7)
CASSGGTGAYEQYF

SEQ ID NO: 570895 - protein, 15 aa, Homo sapiens
  CDR3 for alpha chain variable domain of TCR clone 285448 (TRAV13-1, TRAJ17)
CAASIHGGCRQQANF

SEQ ID NO: 570896 - protein, 14 aa, Homo sapiens
  CDR3 for beta chain variable domain of TCR clone 285448 (TRBV20-1, TRBJ2-4)
CCARDRGQGGIQYF

SEQ ID NO: 570897 - protein, 14 aa, Homo sapiens
  CDR3 for alpha chain variable domain of TCR clone 285449 (TRAV27, TRAJ22)
CAGLPSGSARQLPF

SEQ ID NO: 570898 - protein, 13 aa, Homo sapiens
  CDR3 for beta chain variable domain of TCR clone 285449 (TRBV11-2, TRBJ2-1)
CASSLRLTHEQFF

SEQ ID NO: 570899 - protein, 15 aa, Homo sapiens
  CDR3 for alpha chain variable domain of TCR clone 285450 (TRAV12-2, TRAJ43)
CAFDMRFGAGTRLTV

SEQ ID NO: 570900 - protein, 17 aa, Homo sapiens
  CDR3 for beta chain variable domain of TCR clone 285450 (TRBV13, TRBJ2-3)
CASSLSRVAGGGNTQYF

SEQ ID NO: 570901 - protein, 15 aa, Homo sapiens
  CDR3 for alpha chain variable domain of TCR clone 285451 (TRAV8-3, TRAJ45)
CASSYSGGGADGLTF

SEQ ID NO: 570902 - protein, 13 aa, Homo sapiens
  CDR3 for beta chain variable domain of TCR clone 285451 (TRBV7-9, TRBJ2-7)
CASSFAGAYEKYF

SEQ ID NO: 570903 - protein, 12 aa, Homo sapiens
  CDR3 for alpha chain variable domain of TCR clone 285452 (TRAV26-1, TRAJ36)
CIVRVRADNLFF

SEQ ID NO: 570904 - protein, 14 aa, Homo sapiens
  CDR3 for beta chain variable domain of TCR clone 285452 (TRBV7-9, TRBJ1-5)
CASADLGSNQPQHF

SEQ ID NO: 570905 - protein, 12 aa, Homo sapiens
  CDR3 for alpha chain variable domain of TCR clone 285453 (TRAV2, TRAJ33)
CAVPDSNYQLIW

SEQ ID NO: 570906 - protein, 15 aa, Homo sapiens
  CDR3 for beta chain variable domain of TCR clone 285453 (TRBV10-2, TRBJ2-6)
CASSEQGTGANILTF

SEQ ID NO: 570907 - protein, 15 aa, Homo sapiens
  CDR3 for alpha chain variable domain of TCR clone 285454 (TRAV3, TRAJ13)
CAVRVYSGGYQKVTF

SEQ ID NO: 570908 - protein, 15 aa, Homo sapiens
  CDR3 for beta chain variable domain of TCR clone 285454 (TRBV4-2, TRBJ1-2)
CASSQRTGGRDGYTF

SEQ ID NO: 570909 - protein, 14 aa, Homo sapiens
  CDR3 for alpha chain variable domain of TCR clone 285455 (TRAV29/DV5, TRAJ36)
CAARRKTGANNLFF

SEQ ID NO: 570910 - protein, 12 aa, Homo sapiens
  CDR3 for beta chain variable domain of TCR clone 285455 (TRBV7-2, TRBJ1-6)
CASSLSSSPLHF

SEQ ID NO: 570911 - protein, 13 aa, Homo sapiens
  CDR3 for alpha chain variable domain of TCR clone 285456 (TRAV3, TRAJ20)
CAVRAGGDYKLSF

SEQ ID NO: 570912 - protein, 16 aa, Homo sapiens
  CDR3 for beta chain variable domain of TCR clone 285456 (TRBV4-1, TRBJ2-5)
CASSQTSGGPLETQYF

SEQ ID NO: 570913 - protein, 13 aa, Homo sapiens
  CDR3 for alpha chain variable domain of TCR clone 285457 (TRAV21, TRAJ15)
CAVANQAGTALIF

SEQ ID NO: 570914 - protein, 13 aa, Homo sapiens
  CDR3 for beta chain variable domain of TCR clone 285457 (TRBV13, TRBJ2-5)
CASSPEVGETQYF

SEQ ID NO: 570915 - protein, 16 aa, Homo sapiens
  CDR3 for alpha chain variable domain of TCR clone 285458 (TRAV3, TRAJ21)
CAVRDIERGNFNKFYF

SEQ ID NO: 570916 - protein, 16 aa, Homo sapiens
  CDR3 for beta chain variable domain of TCR clone 285458 (TRBV12-4, TRBJ1-5)
CASSRPVGGFNQPQHF

SEQ ID NO: 570917 - protein, 18 aa, Homo sapiens
  CDR3 for alpha chain variable domain of TCR clone 285459 (TRAV17, TRAJ45)
CATSLDLYSGGGADGLTF

SEQ ID NO: 570918 - protein, 15 aa, Homo sapiens
  CDR3 for beta chain variable domain of TCR clone 285459 (TRBV6-1, TRBJ2-3)
CASSERGGITDTQYF

SEQ ID NO: 570919 - protein, 11 aa, Homo sapiens
  CDR3 for alpha chain variable domain of TCR clone 285460 (TRAV2, TRAJ13)
CASVGYQKVTF

SEQ ID NO: 570920 - protein, 16 aa, Homo sapiens
  CDR3 for beta chain variable domain of TCR clone 285460 (TRBV27, TRBJ2-2)
CASSLSGFWVTGELFF

SEQ ID NO: 570921 - protein, 11 aa, Homo sapiens
  CDR3 for alpha chain variable domain of TCR clone 285461 (TRAV6, TRAJ31)
FALRDNARLMF

SEQ ID NO: 570922 - protein, 12 aa, Homo sapiens
  CDR3 for beta chain variable domain of TCR clone 285461 (TRBV11-2, TRBJ2-2)
CASSLGGGELFF

SEQ ID NO: 570923 - protein, 15 aa, Homo sapiens
  CDR3 for alpha chain variable domain of TCR clone 285462 (TRAV12-3, TRAJ5)
CAMSGLGTGRSALTF

SEQ ID NO: 570924 - protein, 16 aa, Homo sapiens
  CDR3 for beta chain variable domain of TCR clone 285462 (TRBV20-1, TRBJ2-3)
CSARLHSAGAIDTQYF

SEQ ID NO: 570925 - protein, 16 aa, Homo sapiens
  CDR3 for alpha chain variable domain of TCR clone 285463 (TRAV12-3, TRAJ10)
CAMKKGITGGGNKLTF

SEQ ID NO: 570926 - protein, 16 aa, Homo sapiens
  CDR3 for beta chain variable domain of TCR clone 285463 (TRBV7-2, TRBJ2-5)
CASSSKWLSGQETQYF

SEQ ID NO: 570927 - protein, 19 aa, Homo sapiens
  CDR3 for alpha chain variable domain of TCR clone 285464 (TRAV30, TRAJ52)
CGTEANTNAGGISYGKLTF

SEQ ID NO: 570928 - protein, 17 aa, Homo sapiens
  CDR3 for beta chain variable domain of TCR clone 285464 (TRBV28, TRBJ2-7)
CASSPLRGRRWKGGQYF

SEQ ID NO: 570929 - protein, 14 aa, Homo sapiens
  CDR3 for alpha chain variable domain of TCR clone 285465 (TRAV1-2, TRAJ16)
CAVNRFSDGQKLLF

SEQ ID NO: 570930 - protein, 14 aa, Homo sapiens
  CDR3 for beta chain variable domain of TCR clone 285465 (TRBV20-1, TRBJ1-5)
CSAPVTGVGQPQHF

SEQ ID NO: 570931 - protein, 13 aa, Homo sapiens
  CDR3 for alpha chain variable domain of TCR clone 285466 (TRAV12-1, TRAJ40)
CVVPTSGTYKYIF

SEQ ID NO: 570932 - protein, 18 aa, Homo sapiens
  CDR3 for beta chain variable domain of TCR clone 285466 (TRBV7-6, TRBJ2-1)
CASSPRTSGMSSYDEQFF

SEQ ID NO: 570933 - protein, 18 aa, Homo sapiens
  CDR3 for alpha chain variable domain of TCR clone 285467 (TRAV26-2, TRAJ45)
CILRVDKYSGVGADGLTF

SEQ ID NO: 570934 - protein, 11 aa, Homo sapiens
  CDR3 for beta chain variable domain of TCR clone 285467 (TRBV29-1, TRBJ2-5)
CSEDRTGTQYF

SEQ ID NO: 570935 - protein, 14 aa, Homo sapiens
  CDR3 for alpha chain variable domain of TCR clone 285468 (TRAV36/DV7, TRAJ40)
CAVETTSGTYKYTF

SEQ ID NO: 570936 - protein, 13 aa, Homo sapiens
  CDR3 for beta chain variable domain of TCR clone 285468 (TRBV10-3, TRBJ2-5)
CAMTSGARETQYF

SEQ ID NO: 570937 - protein, 14 aa, Homo sapiens
  CDR3 for alpha chain variable domain of TCR clone 285469 (TRAV27, TRAJ38)
CAARRNAGNNRSCF

SEQ ID NO: 570938 - protein, 13 aa, Homo sapiens
  CDR3 for beta chain variable domain of TCR clone 285469 (TRBV12-5, TRBJ2-3)
CASGDRQSDTQYF

SEQ ID NO: 570939 - protein, 13 aa, Homo sapiens
  CDR3 for alpha chain variable domain of TCR clone 285470 (TRAV16, TRAJ27)
CALRRTNAGKSTF

SEQ ID NO: 570940 - protein, 14 aa, Homo sapiens
  CDR3 for beta chain variable domain of TCR clone 285470 (TRBV5-1, TRBJ2-7)
CASSRGESLYEQYF

SEQ ID NO: 570941 - protein, 11 aa, Homo sapiens
  CDR3 for alpha chain variable domain of TCR clone 285471 (TRAV29/DV5, TRAJ31)
CAAMNNARLMF

SEQ ID NO: 570942 - protein, 13 aa, Homo sapiens
  CDR3 for beta chain variable domain of TCR clone 285471 (TRBV19, TRBJ1-1)
CASSITGESEAFF

SEQ ID NO: 570943 - protein, 14 aa, Homo sapiens
  CDR3 for alpha chain variable domain of TCR clone 285472 (TRAV35, TRAJ13)
CAGRSPGGYQKVTF

SEQ ID NO: 570944 - protein, 13 aa, Homo sapiens
  CDR3 for beta chain variable domain of TCR clone 285472 (TRBV11-2, TRBJ2-2)
CASGRDREEELFF

SEQ ID NO: 570945 - protein, 14 aa, Homo sapiens
  CDR3 for alpha chain variable domain of TCR clone 285473 (TRAV12-1, TRAJ43)
CVVNGRSNNNDMRL

SEQ ID NO: 570946 - protein, 13 aa, Homo sapiens
  CDR3 for beta chain variable domain of TCR clone 285473 (TRBV10-3, TRBJ2-7)
CASKLAVNYEQYF

SEQ ID NO: 570947 - protein, 12 aa, Homo sapiens
  CDR3 for alpha chain variable domain of TCR clone 285474 (TRAV13-2, TRAJ23)
CAERHRGGKLIF

SEQ ID NO: 570948 - protein, 13 aa, Homo sapiens
  CDR3 for beta chain variable domain of TCR clone 285474 (TRBV7-9, TRBJ1-2)
CASSLKQNHGYTF

SEQ ID NO: 570949 - protein, 17 aa, Homo sapiens
  CDR3 for alpha chain variable domain of TCR clone 285475 (TRAV3, TRAJ6)
CAVRDGPRAGGSYIPTF

SEQ ID NO: 570950 - protein, 17 aa, Homo sapiens
  CDR3 for beta chain variable domain of TCR clone 285475 (TRBV10-3, TRBJ2-6)
CAISESTAPSGANVLTF

SEQ ID NO: 570951 - protein, 15 aa, Homo sapiens
  CDR3 for alpha chain variable domain of TCR clone 285476 (TRAV3, TRAJ3)
CAVRDRDSSASKIIF

SEQ ID NO: 570952 - protein, 18 aa, Homo sapiens
  CDR3 for beta chain variable domain of TCR clone 285476 (TRBV25-1, TRBJ1-2)
CASSGLQNGLGLIFGYTF

SEQ ID NO: 570953 - protein, 21 aa, Homo sapiens
  CDR3 for alpha chain variable domain of TCR clone 285477 (TRAV26-1, TRAJ38)
CIADNAGNNHIQNPDPAVHQL

SEQ ID NO: 570954 - protein, 13 aa, Homo sapiens
  CDR3 for beta chain variable domain of TCR clone 285477 (TRBV20-1, TRBJ1-1)
CSARGGGNTEAFF

SEQ ID NO: 570955 - protein, 14 aa, Homo sapiens
  CDR3 for alpha chain variable domain of TCR clone 285478 (TRAV2, TRAJ9)
CAVEDRSGRFKTIF

SEQ ID NO: 570956 - protein, 13 aa, Homo sapiens
  CDR3 for beta chain variable domain of TCR clone 285478 (TRBV27, TRBJ1-1)
CASSLSIGAEAFF

SEQ ID NO: 570957 - protein, 12 aa, Homo sapiens
  CDR3 for alpha chain variable domain of TCR clone 285479 (TRAV16, TRAJ10)
CSRTGGGNKLTF

SEQ ID NO: 570958 - protein, 16 aa, Homo sapiens
  CDR3 for beta chain variable domain of TCR clone 285479 (TRBV4-1, TRBJ1-2)
CASSQDAGQVLYGYTF

SEQ ID NO: 570959 - protein, 12 aa, Homo sapiens
  CDR3 for alpha chain variable domain of TCR clone 285480 (TRAV1-1, TRAJ39)
CAVPVVGKLLTF

SEQ ID NO: 570960 - protein, 16 aa, Homo sapiens
  CDR3 for beta chain variable domain of TCR clone 285480 (TRBV19, TRBJ2-2)
CASSFPGQGLAGELFF

SEQ ID NO: 570961 - protein, 14 aa, Homo sapiens
  CDR3 for alpha chain variable domain of TCR clone 285481 (TRAV35, TRAJ42)
CCVPYGGSQGNLIF

SEQ ID NO: 570962 - protein, 18 aa, Homo sapiens
  CDR3 for beta chain variable domain of TCR clone 285481 (TRBV13, TRBJ2-6)
CDSSPMTSGGSGANVLTF

SEQ ID NO: 570963 - protein, 18 aa, Homo sapiens
  CDR3 for alpha chain variable domain of TCR clone 285482 (TRAV13-1, TRAJ52)
CAASKRSAGGTSYGKLTF

SEQ ID NO: 570964 - protein, 13 aa, Homo sapiens
  CDR3 for beta chain variable domain of TCR clone 285482 (TRBV7-9, TRBJ2-4)
CATEGLAGNIQYF

SEQ ID NO: 570965 - protein, 14 aa, Homo sapiens
  CDR3 for alpha chain variable domain of TCR clone 285483 (TRAV35, TRAJ53)
CAANSGGSNYKLTF

SEQ ID NO: 570966 - protein, 11 aa, Homo sapiens
  CDR3 for beta chain variable domain of TCR clone 285483 (TRBV4-1, TRBJ1-4)
CASKENEKLFF

SEQ ID NO: 570967 - protein, 17 aa, Homo sapiens
  CDR3 for alpha chain variable domain of TCR clone 285484 (TRAV21, TRAJ10)
CAVMVYILTGGGNKLTF

SEQ ID NO: 570968 - protein, 13 aa, Homo sapiens
  CDR3 for beta chain variable domain of TCR clone 285484 (TRBV7-7, TRBJ2-2)
CASSLTSAGELFF

SEQ ID NO: 570969 - protein, 12 aa, Homo sapiens
  CDR3 for alpha chain variable domain of TCR clone 285485 (TRAV8-3, TRAJ40)
CAVTSGTYKYIF

SEQ ID NO: 570970 - protein, 14 aa, Homo sapiens
  CDR3 for beta chain variable domain of TCR clone 285485 (TRBV12-4, TRBJ2-3)
CASSGQGSTDTQYL

SEQ ID NO: 570971 - protein, 16 aa, Homo sapiens
  CDR3 for alpha chain variable domain of TCR clone 285486 (TRAV12-3, TRAJ53)
CAMSPGSGCSKYKLTF

SEQ ID NO: 570972 - protein, 11 aa, Homo sapiens
  CDR3 for beta chain variable domain of TCR clone 285486 (TRBV29-1, TRBJ2-5)
CSEDRTGTQYF

SEQ ID NO: 570973 - protein, 12 aa, Homo sapiens
  CDR3 for alpha chain variable domain of TCR clone 285487 (TRAV27, TRAJ13)
CAGAGGYQKVTF

SEQ ID NO: 570974 - protein, 12 aa, Homo sapiens
  CDR3 for beta chain variable domain of TCR clone 285487 (TRBV7-8, TRBJ2-1)
CASSLGHNEQFF

SEQ ID NO: 570975 - protein, 10 aa, Homo sapiens
  CDR3 for alpha chain variable domain of TCR clone 285488 (TRAV1-2, TRAJ31)
CAFFDARLMF

SEQ ID NO: 570976 - protein, 17 aa, Homo sapiens
  CDR3 for beta chain variable domain of TCR clone 285488 (TRBV15, TRBJ1-2)
CTTSGREIDVVNYGYTV

SEQ ID NO: 570977 - protein, 14 aa, Homo sapiens
  CDR3 for alpha chain variable domain of TCR clone 285489 (TRAV12-1, TRAJ12)
CVVTSGDSSYKLIF

SEQ ID NO: 570978 - protein, 14 aa, Homo sapiens
  CDR3 for beta chain variable domain of TCR clone 285489 (TRBV28, TRBJ1-5)
CASSGQALYQPQHF

SEQ ID NO: 570979 - protein, 12 aa, Homo sapiens
  CDR3 for alpha chain variable domain of TCR clone 285490 (TRAV17, TRAJ30)
CVPGGRDDKIIF

SEQ ID NO: 570980 - protein, 14 aa, Homo sapiens
  CDR3 for beta chain variable domain of TCR clone 285490 (TRBV7-7, TRBJ2-2)
CASSRDRSTGELFF

SEQ ID NO: 570981 - protein, 10 aa, Homo sapiens
  CDR3 for alpha chain variable domain of TCR clone 285491 (TRAV23/DV6, TRAJ57)
CAASSTLSQG

SEQ ID NO: 570982 - protein, 14 aa, Homo sapiens
  CDR3 for beta chain variable domain of TCR clone 285491 (TRBV19, TRBJ2-1)
CASSKDRRQDEQFF

SEQ ID NO: 570983 - protein, 15 aa, Homo sapiens
  CDR3 for alpha chain variable domain of TCR clone 285492 (TRAV12-1, TRAJ42)
CVVKTGGGSQGNLIF

SEQ ID NO: 570984 - protein, 20 aa, Homo sapiens
  CDR3 for beta chain variable domain of TCR clone 285492 (TRBV7-8, TRBJ2-2)
CASSHLFPGPTIHITGELFF

SEQ ID NO: 570985 - protein, 12 aa, Homo sapiens
  CDR3 for alpha chain variable domain of TCR clone 285493 (TRAV27, TRAJ35)
CSGADFGNVLHC

SEQ ID NO: 570986 - protein, 16 aa, Homo sapiens
  CDR3 for beta chain variable domain of TCR clone 285493 (TRBV6-1, TRBJ2-1)
CASILRQGSSYNEQLF

SEQ ID NO: 570987 - protein, 15 aa, Homo sapiens
  CDR3 for alpha chain variable domain of TCR clone 285494 (TRAV12-1, TRAJ45)
CVVLSGGGGADGLTF

SEQ ID NO: 570988 - protein, 12 aa, Homo sapiens
  CDR3 for beta chain variable domain of TCR clone 285494 (TRBV12-4, TRBJ2-7)
CASSLGGYEQYF

SEQ ID NO: 570989 - protein, 17 aa, Homo sapiens
  CDR3 for alpha chain variable domain of TCR clone 285495 (TRAV3, TRAJ12)
CAVRDGGRMDSSYKLIF

SEQ ID NO: 570990 - protein, 13 aa, Homo sapiens
  CDR3 for beta chain variable domain of TCR clone 285495 (TRBV7-7, TRBJ1-1)
CASSLGANTEAFF

SEQ ID NO: 570991 - protein, 16 aa, Homo sapiens
  CDR3 for alpha chain variable domain of TCR clone 285496 (TRAV3, TRAJ37)
CAVRPHCSGNTGKLIF

SEQ ID NO: 570992 - protein, 15 aa, Homo sapiens
  CDR3 for beta chain variable domain of TCR clone 285496 (TRBV20-1, TRBJ2-7)
CSARDRVSGMDEQYF

SEQ ID NO: 570993 - protein, 14 aa, Homo sapiens
  CDR3 for alpha chain variable domain of TCR clone 285497 (TRAV12-2, TRAJ40)
CAVKIPSGAYKYIF

SEQ ID NO: 570994 - protein, 14 aa, Homo sapiens
  CDR3 for beta chain variable domain of TCR clone 285497 (TRBV7-6, TRBJ2-3)
CASSLGTVTDTQYF

SEQ ID NO: 570995 - protein, 16 aa, Homo sapiens
  CDR3 for alpha chain variable domain of TCR clone 285498 (TRAV30, TRAJ24)
CGTEIVDADSWGKFQF

SEQ ID NO: 570996 - protein, 13 aa, Homo sapiens
  CDR3 for beta chain variable domain of TCR clone 285498 (TRBV6-5, TRBJ1-2)
CASSSPEQGRTMA

SEQ ID NO: 570997 - protein, 15 aa, Homo sapiens
  CDR3 for alpha chain variable domain of TCR clone 285499 (TRAV26-2, TRAJ57)
CILRDIRGGSEKLFF

SEQ ID NO: 570998 - protein, 15 aa, Homo sapiens
  CDR3 for beta chain variable domain of TCR clone 285499 (TRBV2, TRBJ2-1)
CASDIGLAGEGEQFF

SEQ ID NO: 570999 - protein, 12 aa, Homo sapiens
  CDR3 for alpha chain variable domain of TCR clone 285500 (TRAV13-1, TRAJ21)
CAAKEGFNKFYL

SEQ ID NO: 571000 - protein, 13 aa, Homo sapiens
  CDR3 for beta chain variable domain of TCR clone 285500 (TRBV19, TRBJ2-7)
CASSPRQSYEQYF

SEQ ID NO: 571001 - protein, 15 aa, Homo sapiens
  CDR3 for alpha chain variable domain of TCR clone 285501 (TRAV21, TRAJ57)
CAVIITQGGSEKLVF

SEQ ID NO: 571002 - protein, 15 aa, Homo sapiens
  CDR3 for beta chain variable domain of TCR clone 285501 (TRBV7-9, TRBJ1-6)
CASSSPGRGNSPLHF

SEQ ID NO: 571003 - protein, 15 aa, Homo sapiens
  CDR3 for alpha chain variable domain of TCR clone 285502 (TRAV12-3, TRAJ6)
CAMSATTGGSYIPTF

SEQ ID NO: 571004 - protein, 13 aa, Homo sapiens
  CDR3 for beta chain variable domain of TCR clone 285502 (TRBV5-7, TRBJ1-2)
CASSLIRAPGYTF

SEQ ID NO: 571005 - protein, 12 aa, Homo sapiens
  CDR3 for alpha chain variable domain of TCR clone 285503 (TRAV12-3, TRAJ40)
CAMSSGTYKYIF

SEQ ID NO: 571006 - protein, 17 aa, Homo sapiens
  CDR3 for beta chain variable domain of TCR clone 285503 (TRBV7-6, TRBJ2-2)
CASSFTSGADNTGELFF

SEQ ID NO: 571007 - protein, 13 aa, Homo sapiens
  CDR3 for alpha chain variable domain of TCR clone 285504 (TRAV20, TRAJ54)
CALTFEGAQKLVF

SEQ ID NO: 571008 - protein, 16 aa, Homo sapiens
  CDR3 for beta chain variable domain of TCR clone 285504 (TRBV6-4, TRBJ1-2)
CASSEAVGDPNYGYTF

SEQ ID NO: 571009 - protein, 12 aa, Homo sapiens
  CDR3 for alpha chain variable domain of TCR clone 285505 (TRAV17, TRAJ20)
CATYSNDYKLSF

SEQ ID NO: 571010 - protein, 11 aa, Homo sapiens
  CDR3 for beta chain variable domain of TCR clone 285505 (TRBV4-1, TRBJ2-2)
CASEHTGELFF

SEQ ID NO: 571011 - protein, 16 aa, Homo sapiens
  CDR3 for alpha chain variable domain of TCR clone 285506 (TRAV30, TRAJ24)
CGTEIVDADSWGKFQF

SEQ ID NO: 571012 - protein, 14 aa, Homo sapiens
  CDR3 for beta chain variable domain of TCR clone 285506 (TRBV19, TRBJ1-1)
CASRPRDRDTEAFF

SEQ ID NO: 571013 - protein, 14 aa, Homo sapiens
  CDR3 for alpha chain variable domain of TCR clone 285507 (TRAV1-2, TRAJ16)
CAVNRFSDGQKLLF

SEQ ID NO: 571014 - protein, 18 aa, Homo sapiens
  CDR3 for beta chain variable domain of TCR clone 285507 (TRBV4-3, TRBJ1-6)
CASSQETPASSYNSPLHF

SEQ ID NO: 571015 - protein, 11 aa, Homo sapiens
  CDR3 for alpha chain variable domain of TCR clone 285508 (TRAV2, TRAJ33)
CAVDSNFQLIW

SEQ ID NO: 571016 - protein, 13 aa, Homo sapiens
  CDR3 for beta chain variable domain of TCR clone 285508 (TRBV7-2, TRBJ2-4)
CASSREHANIQYF

SEQ ID NO: 571017 - protein, 19 aa, Homo sapiens
  CDR3 for alpha chain variable domain of TCR clone 285509 (TRAV2, TRAJ20)
ILQVREADAAVYRDCKLSF

SEQ ID NO: 571018 - protein, 17 aa, Homo sapiens
  CDR3 for beta chain variable domain of TCR clone 285509 (TRBV7-3, TRBJ2-3)
CASSLMKRMRGADTQYF

SEQ ID NO: 571019 - protein, 12 aa, Homo sapiens
  CDR3 for alpha chain variable domain of TCR clone 285510 (TRAV26-2, TRAJ47)
CILVEYGNKLVF

SEQ ID NO: 571020 - protein, 15 aa, Homo sapiens
  CDR3 for beta chain variable domain of TCR clone 285510 (TRBV5-1, TRBJ2-3)
CASSVTSGSTDTQYF

SEQ ID NO: 571021 - protein, 15 aa, Homo sapiens
  CDR3 for alpha chain variable domain of TCR clone 285511 (TRAV2, TRAJ9)
CAVEDRGTGGFKTIF

SEQ ID NO: 571022 - protein, 16 aa, Homo sapiens
  CDR3 for beta chain variable domain of TCR clone 285511 (TRBV7-6, TRBJ2-7)
CASSGGTGALSYEQYF

SEQ ID NO: 571023 - protein, 14 aa, Homo sapiens
  CDR3 for alpha chain variable domain of TCR clone 285512 (TRAV12-3, TRAJ10)
SHLPLTGGVNKLTF

SEQ ID NO: 571024 - protein, 13 aa, Homo sapiens
  CDR3 for beta chain variable domain of TCR clone 285512 (TRBV4-1, TRBJ2-2)
CASGQENTGELFF

SEQ ID NO: 571025 - protein, 12 aa, Homo sapiens
  CDR3 for alpha chain variable domain of TCR clone 285513 (TRAV21, TRAJ29)
CAVTSGNTPLVF

SEQ ID NO: 571026 - protein, 12 aa, Homo sapiens
  CDR3 for beta chain variable domain of TCR clone 285513 (TRBV11-2, TRBJ2-2)
CASSLPTGELFF

SEQ ID NO: 571027 - protein, 12 aa, Homo sapiens
  CDR3 for alpha chain variable domain of TCR clone 285514 (TRAV20, TRAJ54)
CAVQEGAQELVF

SEQ ID NO: 571028 - protein, 17 aa, Homo sapiens
  CDR3 for beta chain variable domain of TCR clone 285514 (TRBV13, TRBJ2-3)
CASSLSRVAGGRNTQYF

SEQ ID NO: 571029 - protein, 12 aa, Homo sapiens
  CDR3 for alpha chain variable domain of TCR clone 285515 (TRAV8-3, TRAJ13)
CAVGAGYQKVTF

SEQ ID NO: 571030 - protein, 14 aa, Homo sapiens
  CDR3 for beta chain variable domain of TCR clone 285515 (TRBV7-9, TRBJ2-5)
CASSLDTAQETQYF

SEQ ID NO: 571031 - protein, 12 aa, Homo sapiens
  CDR3 for alpha chain variable domain of TCR clone 285516 (TRAV13-2, TRAJ23)
CAERHRGRKLIF

SEQ ID NO: 571032 - protein, 16 aa, Homo sapiens
  CDR3 for beta chain variable domain of TCR clone 285516 (TRBV19, TRBJ2-1)
CASSMAGPSSYNEQFF

SEQ ID NO: 571033 - protein, 12 aa, Homo sapiens
  CDR3 for alpha chain variable domain of TCR clone 285517 (TRAV20, TRAJ34)
CAVKDNTDKLIF

SEQ ID NO: 571034 - protein, 13 aa, Homo sapiens
  CDR3 for beta chain variable domain of TCR clone 285517 (TRBV19, TRBJ2-1)
CASKVGAGGEQFF

SEQ ID NO: 571035 - protein, 12 aa, Homo sapiens
  CDR3 for alpha chain variable domain of TCR clone 285518 (TRAV12-2, TRAJ36)
CAVRIGANNLFF

SEQ ID NO: 571036 - protein, 16 aa, Homo sapiens
  CDR3 for beta chain variable domain of TCR clone 285518 (TRBV18, TRBJ2-7)
CASSPLPVGLSYEQYF

SEQ ID NO: 571037 - protein, 14 aa, Homo sapiens
  CDR3 for alpha chain variable domain of TCR clone 285519 (TRAV1-2, TRAJ16)
CAVNRVSDGQKLLF

SEQ ID NO: 571038 - protein, 13 aa, Homo sapiens
  CDR3 for beta chain variable domain of TCR clone 285519 (TRBV20-1, TRBJ1-1)
CSARLGQGTEAFF

SEQ ID NO: 571039 - protein, 15 aa, Homo sapiens
  CDR3 for alpha chain variable domain of TCR clone 285520 (TRAV39, TRAJ32)
CAVDMEGGATNKLIF

SEQ ID NO: 571040 - protein, 17 aa, Homo sapiens
  CDR3 for beta chain variable domain of TCR clone 285520 (TRBV7-2, TRBJ1-4)
CASSFRAGPTTNEKLFF

SEQ ID NO: 571041 - protein, 13 aa, Homo sapiens
  CDR3 for alpha chain variable domain of TCR clone 285521 (TRAV21, TRAJ27)
CAARPDNAGKSTF

SEQ ID NO: 571042 - protein, 15 aa, Homo sapiens
  CDR3 for beta chain variable domain of TCR clone 285521 (TRBV9, TRBJ1-6)
CASSVAGTGDSPLHF

SEQ ID NO: 571043 - protein, 14 aa, Homo sapiens
  CDR3 for alpha chain variable domain of TCR clone 285522 (TRAV3, TRAJ21)
CAVRDAYNFNKFYL

SEQ ID NO: 571044 - protein, 15 aa, Homo sapiens
  CDR3 for beta chain variable domain of TCR clone 285522 (TRBV6-5, TRBJ1-5)
CASSYSWDSNQPQHF

SEQ ID NO: 571045 - protein, 16 aa, Homo sapiens
  CDR3 for alpha chain variable domain of TCR clone 285523 (TRAV35, TRAJ42)
GRMERYYGGSQGNRIF

SEQ ID NO: 571046 - protein, 15 aa, Homo sapiens
  CDR3 for beta chain variable domain of TCR clone 285523 (TRBV6-1, TRBJ2-7)
CASSDWDKPNYEQYF

SEQ ID NO: 571047 - protein, 15 aa, Homo sapiens
  CDR3 for alpha chain variable domain of TCR clone 285524 (TRAV12-3, TRAJ42)
CAMSGHGGSQGNLIF

SEQ ID NO: 571048 - protein, 15 aa, Homo sapiens
  CDR3 for beta chain variable domain of TCR clone 285524 (TRBV28, TRBJ2-7)
CASSPGGRGFYEQYF

SEQ ID NO: 571049 - protein, 17 aa, Homo sapiens
  CDR3 for alpha chain variable domain of TCR clone 285525 (TRAV22, TRAJ53)
CAEEFSNSGGSNYKLTF

SEQ ID NO: 571050 - protein, 14 aa, Homo sapiens
  CDR3 for beta chain variable domain of TCR clone 285525 (TRBV2, TRBJ1-2)
CASSEGGRNYGYTF

SEQ ID NO: 571051 - protein, 13 aa, Homo sapiens
  CDR3 for alpha chain variable domain of TCR clone 285526 (TRAV3, TRAJ43)
CAVKAMNNNDMRF

SEQ ID NO: 571052 - protein, 16 aa, Homo sapiens
  CDR3 for beta chain variable domain of TCR clone 285526 (TRBV7-9, TRBJ2-3)
CASSFSVAGGTDTQYF

SEQ ID NO: 571053 - protein, 10 aa, Homo sapiens
  CDR3 for alpha chain variable domain of TCR clone 285527 (TRAV8-4, TRAJ43)
CAVSAEDMRV

SEQ ID NO: 571054 - protein, 13 aa, Homo sapiens
  CDR3 for beta chain variable domain of TCR clone 285527 (TRBV12-4, TRBJ2-5)
CASSPGTEETQYF

SEQ ID NO: 571055 - protein, 12 aa, Homo sapiens
  CDR3 for alpha chain variable domain of TCR clone 285528 (TRAV12-2, TRAJ31)
CAVNTPDARLMF

SEQ ID NO: 571056 - protein, 14 aa, Homo sapiens
  CDR3 for beta chain variable domain of TCR clone 285528 (TRBV4-2, TRBJ2-1)
CASGLDRAYNEQFF

SEQ ID NO: 571057 - protein, 11 aa, Homo sapiens
  CDR3 for alpha chain variable domain of TCR clone 285529 (TRAV1-2, TRAJ20)
CAVANDYKLSF

SEQ ID NO: 571058 - protein, 15 aa, Homo sapiens
  CDR3 for beta chain variable domain of TCR clone 285529 (TRBV5-1, TRBJ1-1)
CASSSTTGTNTEAFF

SEQ ID NO: 571059 - protein, 10 aa, Homo sapiens
  CDR3 for alpha chain variable domain of TCR clone 285530 (TRAV13-2, TRAJ49)
CEGTGNQFYF

SEQ ID NO: 571060 - protein, 12 aa, Homo sapiens
  CDR3 for beta chain variable domain of TCR clone 285530 (TRBV11-2, TRBJ2-2)
CASSLPTGELFF

SEQ ID NO: 571061 - protein, 14 aa, Homo sapiens
  CDR3 for alpha chain variable domain of TCR clone 285531 (TRAV13-1, TRAJ44)
CAAKATGTASKLTF

SEQ ID NO: 571062 - protein, 13 aa, Homo sapiens
  CDR3 for beta chain variable domain of TCR clone 285531 (TRBV25-1, TRBJ1-1)
CQHPPGGNTEAFF

SEQ ID NO: 571063 - protein, 17 aa, Homo sapiens
  CDR3 for alpha chain variable domain of TCR clone 285532 (TRAV3, TRAJ6)
CAVRDGPRAGGNYIPTF

SEQ ID NO: 571064 - protein, 15 aa, Homo sapiens
  CDR3 for beta chain variable domain of TCR clone 285532 (TRBV7-2, TRBJ2-1)
CASSSGLAGGNEQLF

SEQ ID NO: 571065 - protein, 11 aa, Homo sapiens
  CDR3 for alpha chain variable domain of TCR clone 285533 (TRAV3, TRAJ21)
CAVGNFNTFYF

SEQ ID NO: 571066 - protein, 17 aa, Homo sapiens
  CDR3 for beta chain variable domain of TCR clone 285533 (TRBV5-1, TRBJ2-5)
CASAVTRQFGNKETQYF

SEQ ID NO: 571067 - protein, 16 aa, Homo sapiens
  CDR3 for alpha chain variable domain of TCR clone 285534 (TRAV12-1, TRAJ42)
CVVTPYYGGSQGNLIF

SEQ ID NO: 571068 - protein, 13 aa, Homo sapiens
  CDR3 for beta chain variable domain of TCR clone 285534 (TRBV10-2, TRBJ1-1)
CASNDQMNTEAFF

SEQ ID NO: 571069 - protein, 17 aa, Homo sapiens
  CDR3 for alpha chain variable domain of TCR clone 285535 (TRAV9-2, TRAJ45)
CALSGYYSGGGADGLTF

SEQ ID NO: 571070 - protein, 14 aa, Homo sapiens
  CDR3 for beta chain variable domain of TCR clone 285535 (TRBV7-9, TRBJ1-2)
CASSPNSRGYGYTF

SEQ ID NO: 571071 - protein, 12 aa, Homo sapiens
  CDR3 for alpha chain variable domain of TCR clone 285536 (TRAV12-3, TRAJ17)
CSMTLTGNKLTF

SEQ ID NO: 571072 - protein, 16 aa, Homo sapiens
  CDR3 for beta chain variable domain of TCR clone 285536 (TRBV7-3, TRBJ2-1)
CASSLEGYRSYNEQFF

SEQ ID NO: 571073 - protein, 15 aa, Homo sapiens
  CDR3 for alpha chain variable domain of TCR clone 285537 (TRAV8-6, TRAJ20)
CAVTRPGSNDYKLSF

SEQ ID NO: 571074 - protein, 14 aa, Homo sapiens
  CDR3 for beta chain variable domain of TCR clone 285537 (TRBV7-9, TRBJ1-2)
CASSSNRGGDGYTF

SEQ ID NO: 571075 - protein, 15 aa, Homo sapiens
  CDR3 for alpha chain variable domain of TCR clone 285538 (TRAV35, TRAJ23)
CAGPLGNNQGGKLIF

SEQ ID NO: 571076 - protein, 14 aa, Homo sapiens
  CDR3 for beta chain variable domain of TCR clone 285538 (TRBV7-9, TRBJ1-1)
CASTPLQSYNEAFF

SEQ ID NO: 571077 - protein, 13 aa, Homo sapiens
  CDR3 for alpha chain variable domain of TCR clone 285539 (TRAV20, TRAJ9)
GAVPDTGGFKTIF

SEQ ID NO: 571078 - protein, 15 aa, Homo sapiens
  CDR3 for beta chain variable domain of TCR clone 285539 (TRBV27, TRBJ2-7)
CASSKAGRGGYEQYL

SEQ ID NO: 571079 - protein, 14 aa, Homo sapiens
  CDR3 for alpha chain variable domain of TCR clone 285540 (TRAV12-3, TRAJ10)
SHLPLTGVGNKLTF

SEQ ID NO: 571080 - protein, 11 aa, Homo sapiens
  CDR3 for beta chain variable domain of TCR clone 285540 (TRBV19, TRBJ1-1)
CASSIGSEAFF

SEQ ID NO: 571081 - protein, 15 aa, Homo sapiens
  CDR3 for alpha chain variable domain of TCR clone 285541 (TRAV3, TRAJ20)
CAVREIKLSDYKLSF

SEQ ID NO: 571082 - protein, 14 aa, Homo sapiens
  CDR3 for beta chain variable domain of TCR clone 285541 (TRBV4-2, TRBJ2-1)
CASGLDRAYNEQFF

SEQ ID NO: 571083 - protein, 14 aa, Homo sapiens
  CDR3 for alpha chain variable domain of TCR clone 285542 (TRAV27, TRAJ13)
CRSSNSGGYQKVTF

SEQ ID NO: 571084 - protein, 14 aa, Homo sapiens
  CDR3 for beta chain variable domain of TCR clone 285542 (TRBV7-6, TRBJ2-1)
CARSLGGGADEQFF

SEQ ID NO: 571085 - protein, 14 aa, Homo sapiens
  CDR3 for alpha chain variable domain of TCR clone 285543 (TRAV12-1, TRAJ24)
CVVRSTDIWGKFQF

SEQ ID NO: 571086 - protein, 13 aa, Homo sapiens
  CDR3 for beta chain variable domain of TCR clone 285543 (TRBV2, TRBJ2-3)
CASILAGGQGQYF

SEQ ID NO: 571087 - protein, 13 aa, Homo sapiens
  CDR3 for alpha chain variable domain of TCR clone 285544 (TRAV20, TRAJ37)
CAGCSSNTGKLIF

SEQ ID NO: 571088 - protein, 15 aa, Homo sapiens
  CDR3 for beta chain variable domain of TCR clone 285544 (TRBV4-1, TRBJ2-7)
CASSQQGQGFDEQYF

SEQ ID NO: 571089 - protein, 14 aa, Homo sapiens
  CDR3 for alpha chain variable domain of TCR clone 285545 (TRAV20, TRAJ32)
CCGRYGGDTNKLIF

SEQ ID NO: 571090 - protein, 16 aa, Homo sapiens
  CDR3 for beta chain variable domain of TCR clone 285545 (TRBV19, TRBJ2-2)
CASRSPGTGATGELFF

SEQ ID NO: 571091 - protein, 14 aa, Homo sapiens
  CDR3 for alpha chain variable domain of TCR clone 285546 (TRAV16, TRAJ39)
CALSKNNAGNMLTF

SEQ ID NO: 571092 - protein, 15 aa, Homo sapiens
  CDR3 for beta chain variable domain of TCR clone 285546 (TRBV28, TRBJ2-1)
CASSIIAGGRSEQFF

SEQ ID NO: 571093 - protein, 20 aa, Homo sapiens
  CDR3 for alpha chain variable domain of TCR clone 285547 (TRAV25, TRAJ21)
TATQTTDVGTYPLSFNKFYF

SEQ ID NO: 571094 - protein, 15 aa, Homo sapiens
  CDR3 for beta chain variable domain of TCR clone 285547 (TRBV6-5, TRBJ2-1)
CASSYDAGAGNEQFF

SEQ ID NO: 571095 - protein, 14 aa, Homo sapiens
  CDR3 for alpha chain variable domain of TCR clone 285548 (TRAV12-2, TRAJ53)
CAVKGGGSNYKLTF

SEQ ID NO: 571096 - protein, 13 aa, Homo sapiens
  CDR3 for beta chain variable domain of TCR clone 285548 (TRBV5-8, TRBJ1-5)
CASSPLSNQPQHF

SEQ ID NO: 571097 - protein, 13 aa, Homo sapiens
  CDR3 for alpha chain variable domain of TCR clone 285549 (TRAV13-1, TRAJ10)
CAALEGGGNKPTF

SEQ ID NO: 571098 - protein, 13 aa, Homo sapiens
  CDR3 for beta chain variable domain of TCR clone 285549 (TRBV7-9, TRBJ1-2)
CASSLKQNYGYTF

SEQ ID NO: 571099 - protein, 14 aa, Homo sapiens
  CDR3 for alpha chain variable domain of TCR clone 285550 (TRAV1-2, TRAJ8)
CAVREDTGFQKLVF

SEQ ID NO: 571100 - protein, 13 aa, Homo sapiens
  CDR3 for beta chain variable domain of TCR clone 285550 (TRBV19, TRBJ1-2)
CASSVPVQDGYTF

SEQ ID NO: 571101 - protein, 10 aa, Homo sapiens
  CDR3 for alpha chain variable domain of TCR clone 285551 (TRAV13-1, TRAJ26)
CAPYGQNFVS

SEQ ID NO: 571102 - protein, 15 aa, Homo sapiens
  CDR3 for beta chain variable domain of TCR clone 285551 (TRBV28, TRBJ2-3)
CASSQELGGTDTQYF

SEQ ID NO: 571103 - protein, 12 aa, Homo sapiens
  CDR3 for alpha chain variable domain of TCR clone 285552 (TRAV8-3, TRAJ26)
CAGDNYGQNFVF

SEQ ID NO: 571104 - protein, 13 aa, Homo sapiens
  CDR3 for beta chain variable domain of TCR clone 285552 (TRBV20-1, TRBJ2-5)
GSARGGYQETQYF

SEQ ID NO: 571105 - protein, 15 aa, Homo sapiens
  CDR3 for alpha chain variable domain of TCR clone 285553 (TRAV17, TRAJ16)
CATALRFSDGQKVPF

SEQ ID NO: 571106 - protein, 15 aa, Homo sapiens
  CDR3 for beta chain variable domain of TCR clone 285553 (TRBV20-1, TRBJ1-1)
CSASRGVTGNTEAFF

SEQ ID NO: 571107 - protein, 17 aa, Homo sapiens
  CDR3 for alpha chain variable domain of TCR clone 285554 (TRAV3, TRAJ6)
CAVRDGPRAGGSYIPTF

SEQ ID NO: 571108 - protein, 16 aa, Homo sapiens
  CDR3 for beta chain variable domain of TCR clone 285554 (TRBV12-4, TRBJ2-7)
CASSLIGVTGTYEQYF

SEQ ID NO: 571109 - protein, 12 aa, Homo sapiens
  CDR3 for alpha chain variable domain of TCR clone 285555 (TRAV13-2, TRAJ23)
CAERHRGGKLIL

SEQ ID NO: 571110 - protein, 14 aa, Homo sapiens
  CDR3 for beta chain variable domain of TCR clone 285555 (TRBV20-1, TRBJ1-1)
CSAQTRIGGTEAFF

SEQ ID NO: 571111 - protein, 14 aa, Homo sapiens
  CDR3 for alpha chain variable domain of TCR clone 285556 (TRAV1-2, TRAJ16)
CAVNRFSDGQKLLF

SEQ ID NO: 571112 - protein, 18 aa, Homo sapiens
  CDR3 for beta chain variable domain of TCR clone 285556 (TRBV12-4, TRBJ2-2)
CASRTGLAWALNTGELFF

SEQ ID NO: 571113 - protein, 17 aa, Homo sapiens
  CDR3 for alpha chain variable domain of TCR clone 285557 (TRAV3, TRAJ6)
CAVRDGPRAGGSYIPTF

SEQ ID NO: 571114 - protein, 14 aa, Homo sapiens
  CDR3 for beta chain variable domain of TCR clone 285557 (TRBV7-8, TRBJ1-5)
CASSTGTVGGPQHF

SEQ ID NO: 571115 - protein, 16 aa, Homo sapiens
  CDR3 for alpha chain variable domain of TCR clone 285558 (TRAV12-2, TRAJ6)
CAAPLAGSGGSYIPTF

SEQ ID NO: 571116 - protein, 10 aa, Homo sapiens
  CDR3 for beta chain variable domain of TCR clone 285558 (TRBV28, TRBJ1-2)
CAGSSDRAVF

SEQ ID NO: 571117 - protein, 14 aa, Homo sapiens
  CDR3 for alpha chain variable domain of TCR clone 285559 (TRAV21, TRAJ45)
CAVHSGGGADGLTF

SEQ ID NO: 571118 - protein, 19 aa, Homo sapiens
  CDR3 for beta chain variable domain of TCR clone 285559 (TRBV11-3, TRBJ2-1)
CASSLGTRKARSSYNEQFF

SEQ ID NO: 571119 - protein, 11 aa, Homo sapiens
  CDR3 for alpha chain variable domain of TCR clone 285560 (TRAV16, TRAJ49)
CSLNTGNQFYF

SEQ ID NO: 571120 - protein, 13 aa, Homo sapiens
  CDR3 for beta chain variable domain of TCR clone 285560 (TRBV7-9, TRBJ1-1)
CASSLSGETEAFF

SEQ ID NO: 571121 - protein, 12 aa, Homo sapiens
  CDR3 for alpha chain variable domain of TCR clone 285561 (TRAV2, TRAJ31)
CAVEDNNARLMF

SEQ ID NO: 571122 - protein, 16 aa, Homo sapiens
  CDR3 for beta chain variable domain of TCR clone 285561 (TRBV7-2, TRBJ2-1)
CASSLLAQLFSKGQFF

SEQ ID NO: 571123 - protein, 23 aa, Homo sapiens
  CDR3 for alpha chain variable domain of TCR clone 285562 (TRAV8-3, )
CAVVTTRIPDIQNPDPAVYQLRD

SEQ ID NO: 571124 - protein, 14 aa, Homo sapiens
  CDR3 for beta chain variable domain of TCR clone 285562 (TRBV11-2, TRBJ2-7)
CARSPSTTSYEQYF

SEQ ID NO: 571125 - protein, 13 aa, Homo sapiens
  CDR3 for alpha chain variable domain of TCR clone 285563 (TRAV39, TRAJ58)
CAGEETSASRLTF

SEQ ID NO: 571126 - protein, 13 aa, Homo sapiens
  CDR3 for beta chain variable domain of TCR clone 285563 (TRBV15, TRBJ2-7)
CATSTTGHYEQYF

SEQ ID NO: 571127 - protein, 13 aa, Homo sapiens
  CDR3 for alpha chain variable domain of TCR clone 285564 (TRAV13-1, TRAJ6)
CARGSGGSYIPTF

SEQ ID NO: 571128 - protein, 17 aa, Homo sapiens
  CDR3 for beta chain variable domain of TCR clone 285564 (TRBV7-8, TRBJ2-1)
CARSPPTGTLAYNEQFF

SEQ ID NO: 571129 - protein, 16 aa, Homo sapiens
  CDR3 for alpha chain variable domain of TCR clone 285565 (TRAV3, TRAJ37)
CAVRPHGSGNTGKLIF

SEQ ID NO: 571130 - protein, 16 aa, Homo sapiens
  CDR3 for beta chain variable domain of TCR clone 285565 (TRBV7-9, TRBJ2-3)
CASSPWREVGTDTRYF

SEQ ID NO: 571131 - protein, 13 aa, Homo sapiens
  CDR3 for alpha chain variable domain of TCR clone 285566 (TRAV21, TRAJ27)
CAARPGNAGKSTF

SEQ ID NO: 571132 - protein, 16 aa, Homo sapiens
  CDR3 for beta chain variable domain of TCR clone 285566 (TRBV4-3, TRBJ2-1)
CASSPALDRGVNEQFF

SEQ ID NO: 571133 - protein, 13 aa, Homo sapiens
  CDR3 for alpha chain variable domain of TCR clone 285567 (TRAV8-6, TRAJ24)
CAVSSDSWGKLQF

SEQ ID NO: 571134 - protein, 15 aa, Homo sapiens
  CDR3 for beta chain variable domain of TCR clone 285567 (TRBV5-5, TRBJ2-7)
CASSLAAPLSYEQYF

SEQ ID NO: 571135 - protein, 14 aa, Homo sapiens
  CDR3 for alpha chain variable domain of TCR clone 285568 (TRAV1-2, TRAJ16)
CAVNRFSDGQKLLF

SEQ ID NO: 571136 - protein, 13 aa, Homo sapiens
  CDR3 for beta chain variable domain of TCR clone 285568 (TRBV7-3, TRBJ1-1)
CAISQDWGAEAFF

SEQ ID NO: 571137 - protein, 13 aa, Homo sapiens
  CDR3 for alpha chain variable domain of TCR clone 285569 (TRAV12-3, TRAJ9)
CAMRNTEGFKTIF

SEQ ID NO: 571138 - protein, 15 aa, Homo sapiens
  CDR3 for beta chain variable domain of TCR clone 285569 (TRBV20-1, TRBJ2-7)
CSARDRVSGMDEQYF

SEQ ID NO: 571139 - protein, 13 aa, Homo sapiens
  CDR3 for alpha chain variable domain of TCR clone 285570 (TRAV3, TRAJ27)
CAVRPLGAGKSTF

SEQ ID NO: 571140 - protein, 19 aa, Homo sapiens
  CDR3 for beta chain variable domain of TCR clone 285570 (TRBV19, TRBJ2-5)
CASSIGQVTDFFLGETQYF

SEQ ID NO: 571141 - protein, 17 aa, Homo sapiens
  CDR3 for alpha chain variable domain of TCR clone 285571 (TRAV12-3, TRAJ26)
CAMSGGRWDNYGQNFVF

SEQ ID NO: 571142 - protein, 17 aa, Homo sapiens
  CDR3 for beta chain variable domain of TCR clone 285571 (TRBV11-2, TRBJ2-1)
CASSLYPPGVEYNEQFF

SEQ ID NO: 571143 - protein, 13 aa, Homo sapiens
  CDR3 for alpha chain variable domain of TCR clone 285572 (TRAV35, TRAJ57)
CWSPQGGSEKLVF

SEQ ID NO: 571144 - protein, 18 aa, Homo sapiens
  CDR3 for beta chain variable domain of TCR clone 285572 (TRBV6-6, TRBJ1-3)
CASSYSKWDSISGNTICF

SEQ ID NO: 571145 - protein, 16 aa, Homo sapiens
  CDR3 for alpha chain variable domain of TCR clone 285573 (TRAV12-1, TRAJ53)
CVVTSVAGGSNYKLTF

SEQ ID NO: 571146 - protein, 14 aa, Homo sapiens
  CDR3 for beta chain variable domain of TCR clone 285573 (TRBV12-5, TRBJ2-5)
CASGSRTHQETQYF

SEQ ID NO: 571147 - protein, 13 aa, Homo sapiens
  CDR3 for alpha chain variable domain of TCR clone 285574 (TRAV16, TRAJ58)
CALRWASGSRLTF

SEQ ID NO: 571148 - protein, 12 aa, Homo sapiens
  CDR3 for beta chain variable domain of TCR clone 285574 (TRBV7-8, TRBJ2-7)
CASEGGPHGQYF

SEQ ID NO: 571149 - protein, 14 aa, Homo sapiens
  CDR3 for alpha chain variable domain of TCR clone 285575 (TRAV3, TRAJ37)
CAVKESGNTGKLIF

SEQ ID NO: 571150 - protein, 15 aa, Homo sapiens
  CDR3 for beta chain variable domain of TCR clone 285575 (TRBV19, TRBJ1-2)
CASTLDSTGNYGYTF

SEQ ID NO: 571151 - protein, 17 aa, Homo sapiens
  CDR3 for alpha chain variable domain of TCR clone 285576 (TRAV38-2/DV8, TRAJ23)
CALARKLIFGQGTELSV

SEQ ID NO: 571152 - protein, 17 aa, Homo sapiens
  CDR3 for beta chain variable domain of TCR clone 285576 (TRBV5-4, TRBJ2-1)
CASSSAGGRGPYNEQFF

SEQ ID NO: 571153 - protein, 13 aa, Homo sapiens
  CDR3 for alpha chain variable domain of TCR clone 285577 (TRAV4, TRAJ42)
CLVGGGSQGNLIF

SEQ ID NO: 571154 - protein, 16 aa, Homo sapiens
  CDR3 for beta chain variable domain of TCR clone 285577 (TRBV5-4, TRBJ2-3)
CASQQPGAGGADTQYF

SEQ ID NO: 571155 - protein, 15 aa, Homo sapiens
  CDR3 for alpha chain variable domain of TCR clone 285578 (TRAV27, TRAJ50)
CAGVGRGTPYDKVIF

SEQ ID NO: 571156 - protein, 14 aa, Homo sapiens
  CDR3 for beta chain variable domain of TCR clone 285578 (TRBV7-2, TRBJ1-1)
CASSFYDLNTEAFS

SEQ ID NO: 571157 - protein, 14 aa, Homo sapiens
  CDR3 for alpha chain variable domain of TCR clone 285579 (TRAV8-3, TRAJ39)
CAVGANNAGSMLTF

SEQ ID NO: 571158 - protein, 12 aa, Homo sapiens
  CDR3 for beta chain variable domain of TCR clone 285579 (TRBV28, TRBJ1-2)
CASLTLAEGYTF

SEQ ID NO: 571159 - protein, 13 aa, Homo sapiens
  CDR3 for alpha chain variable domain of TCR clone 285580 (TRAV3, TRAJ31)
CAVREGNNARLMF

SEQ ID NO: 571160 - protein, 18 aa, Homo sapiens
  CDR3 for beta chain variable domain of TCR clone 285580 (TRBV7-9, TRBJ2-7)
CASSLTISGSRTWYEQYF

SEQ ID NO: 571161 - protein, 11 aa, Homo sapiens
  CDR3 for alpha chain variable domain of TCR clone 285581 (TRAV2, TRAJ13)
CASGGYQKVTF

SEQ ID NO: 571162 - protein, 13 aa, Homo sapiens
  CDR3 for beta chain variable domain of TCR clone 285581 (TRBV7-3, TRBJ2-5)
CASSSDREETQYF

SEQ ID NO: 571163 - protein, 14 aa, Homo sapiens
  CDR3 for alpha chain variable domain of TCR clone 285582 (TRAV4, TRAJ26)
CLVGPHNYGQNFVF

SEQ ID NO: 571164 - protein, 15 aa, Homo sapiens
  CDR3 for beta chain variable domain of TCR clone 285582 (TRBV6-5, TRBJ2-1)
CASSYDAGAGNEQFF

SEQ ID NO: 571165 - protein, 14 aa, Homo sapiens
  CDR3 for alpha chain variable domain of TCR clone 285583 (TRAV16, TRAJ37)
CALDISGNTGKLIF

SEQ ID NO: 571166 - protein, 16 aa, Homo sapiens
  CDR3 for beta chain variable domain of TCR clone 285583 (TRBV11-3, TRBJ2-5)
CASSSVVAGATETQYF

SEQ ID NO: 571167 - protein, 15 aa, Homo sapiens
  CDR3 for alpha chain variable domain of TCR clone 285584 (TRAV12-3, TRAJ6)
CAMSATTGGSYIPTF

SEQ ID NO: 571168 - protein, 15 aa, Homo sapiens
  CDR3 for beta chain variable domain of TCR clone 285584 (TRBV28, TRBJ2-5)
CASSPGQGSIETQYF

SEQ ID NO: 571169 - protein, 14 aa, Homo sapiens
  CDR3 for alpha chain variable domain of TCR clone 285585 (TRAV12-2, TRAJ13)
CAVKKTGGYQKVTF

SEQ ID NO: 571170 - protein, 15 aa, Homo sapiens
  CDR3 for beta chain variable domain of TCR clone 285585 (TRBV9, TRBJ1-6)
CDSSVAGTGDSPLHF

SEQ ID NO: 571171 - protein, 17 aa, Homo sapiens
  CDR3 for alpha chain variable domain of TCR clone 285586 (TRAV16, TRAJ42)
FALSPKLYGGSQGNLIF

SEQ ID NO: 571172 - protein, 13 aa, Homo sapiens
  CDR3 for beta chain variable domain of TCR clone 285586 (TRBV19, TRBJ1-5)
CASSTRRDQPQHL

SEQ ID NO: 571173 - protein, 15 aa, Homo sapiens
  CDR3 for alpha chain variable domain of TCR clone 285587 (TRAV29/DV5, TRAJ24)
CAASGATDSGGKSQF

SEQ ID NO: 571174 - protein, 12 aa, Homo sapiens
  CDR3 for beta chain variable domain of TCR clone 285587 (TRBV11-2, TRBJ2-2)
CASSLPTGELFF

SEQ ID NO: 571175 - protein, 14 aa, Homo sapiens
  CDR3 for alpha chain variable domain of TCR clone 285588 (TRAV1-2, TRAJ16)
CAVNRFSDGQKLLF

SEQ ID NO: 571176 - protein, 14 aa, Homo sapiens
  CDR3 for beta chain variable domain of TCR clone 285588 (TRBV19, TRBJ2-7)
CASSVDSESYKQYF

SEQ ID NO: 571177 - protein, 12 aa, Homo sapiens
  CDR3 for alpha chain variable domain of TCR clone 285589 (TRAV36/DV7, TRAJ54)
CAVVRGAQKLVF

SEQ ID NO: 571178 - protein, 16 aa, Homo sapiens
  CDR3 for beta chain variable domain of TCR clone 285589 (TRBV13, TRBJ2-7)
CASSLGVRGNSYEQYF

SEQ ID NO: 571179 - protein, 16 aa, Homo sapiens
  CDR3 for alpha chain variable domain of TCR clone 285590 (TRAV3, TRAJ21)
FAVRDIERGNFSKFYF

SEQ ID NO: 571180 - protein, 13 aa, Homo sapiens
  CDR3 for beta chain variable domain of TCR clone 285590 (TRBV27, TRBJ2-7)
CASSLTTGYEQYF

SEQ ID NO: 571181 - protein, 17 aa, Homo sapiens
  CDR3 for alpha chain variable domain of TCR clone 285591 (TRAV3, TRAJ38)
CAVIDCLNAGNNRKLIL

SEQ ID NO: 571182 - protein, 14 aa, Homo sapiens
  CDR3 for beta chain variable domain of TCR clone 285591 (TRBV5-5, TRBJ1-5)
CASSGQGVDQPQHF

SEQ ID NO: 571183 - protein, 10 aa, Homo sapiens
  CDR3 for alpha chain variable domain of TCR clone 285592 (TRAV23/DV6, TRAJ57)
CAASSTLSQG

SEQ ID NO: 571184 - protein, 14 aa, Homo sapiens
  CDR3 for beta chain variable domain of TCR clone 285592 (TRBV4-1, TRBJ1-5)
CASSQGPTNQPQHF

SEQ ID NO: 571185 - protein, 14 aa, Homo sapiens
  CDR3 for alpha chain variable domain of TCR clone 285593 (TRAV12-1, TRAJ9)
CVVNIITGGFKTIF

SEQ ID NO: 571186 - protein, 17 aa, Homo sapiens
  CDR3 for beta chain variable domain of TCR clone 285593 (TRBV9, TRBJ2-1)
CASSVERTGMARDEQFF

SEQ ID NO: 571187 - protein, 13 aa, Homo sapiens
  CDR3 for alpha chain variable domain of TCR clone 285594 (TRAV21, TRAJ57)
CAVTQGRSEKLVF

SEQ ID NO: 571188 - protein, 15 aa, Homo sapiens
  CDR3 for beta chain variable domain of TCR clone 285594 (TRBV5-1, TRBJ1-1)
CASSSTTGTDTEAFF

SEQ ID NO: 571189 - protein, 10 aa, Homo sapiens
  CDR3 for alpha chain variable domain of TCR clone 285595 (TRAV21, TRAJ31)
CAVDNARLMF

SEQ ID NO: 571190 - protein, 13 aa, Homo sapiens
  CDR3 for beta chain variable domain of TCR clone 285595 (TRBV4-1, TRBJ1-1)
CASSRKMNTEAFL

SEQ ID NO: 571191 - protein, 10 aa, Homo sapiens
  CDR3 for alpha chain variable domain of TCR clone 285596 (TRAV3, TRAJ30)
CAVREIEIIF

SEQ ID NO: 571192 - protein, 19 aa, Homo sapiens
  CDR3 for beta chain variable domain of TCR clone 285596 (TRBV25-1, TRBJ2-2)
CAILVYRVDRGRKTGELFF

SEQ ID NO: 571193 - protein, 15 aa, Homo sapiens
  CDR3 for alpha chain variable domain of TCR clone 285597 (TRAV13-1, TRAJ4)
CAASLISGGYNKLIF

SEQ ID NO: 571194 - protein, 13 aa, Homo sapiens
  CDR3 for beta chain variable domain of TCR clone 285597 (TRBV10-3, TRBJ2-7)
CASKLAVNYEQYF

SEQ ID NO: 571195 - protein, 13 aa, Homo sapiens
  CDR3 for alpha chain variable domain of TCR clone 285598 (TRAV2, TRAJ29)
SAAQNSGNTPLVF

SEQ ID NO: 571196 - protein, 14 aa, Homo sapiens
  CDR3 for beta chain variable domain of TCR clone 285598 (TRBV7-9, TRBJ2-4)
CASSLAMGGNIQYF

SEQ ID NO: 571197 - protein, 14 aa, Homo sapiens
  CDR3 for alpha chain variable domain of TCR clone 285599 (TRAV23/DV6, TRAJ39)
CAASMRGAGNMLTF

SEQ ID NO: 571198 - protein, 16 aa, Homo sapiens
  CDR3 for beta chain variable domain of TCR clone 285599 (TRBV20-1, TRBJ2-1)
CSALTWTSGSYNEQFF

SEQ ID NO: 571199 - protein, 11 aa, Homo sapiens
  CDR3 for alpha chain variable domain of TCR clone 285600 (TRAV1-2, TRAJ20)
CAVSNDYKLSF

SEQ ID NO: 571200 - protein, 15 aa, Homo sapiens
  CDR3 for beta chain variable domain of TCR clone 285600 (TRBV5-1, TRBJ2-2)
CASSSQGGNTGELFC

SEQ ID NO: 571201 - protein, 13 aa, Homo sapiens
  CDR3 for alpha chain variable domain of TCR clone 285601 (TRAV27, TRAJ29)
CAGANSGNTPLVF

SEQ ID NO: 571202 - protein, 14 aa, Homo sapiens
  CDR3 for beta chain variable domain of TCR clone 285601 (TRBV7-9, TRBJ2-7)
CASSIGQGAGEQYF

SEQ ID NO: 571203 - protein, 13 aa, Homo sapiens
  CDR3 for alpha chain variable domain of TCR clone 285602 (TRAV13-1, TRAJ5)
CAASDTGRRALTF

SEQ ID NO: 571204 - protein, 17 aa, Homo sapiens
  CDR3 for beta chain variable domain of TCR clone 285602 (TRBV20-1, TRBJ2-2)
CSARDRTSGRHTGELFF

SEQ ID NO: 571205 - protein, 11 aa, Homo sapiens
  CDR3 for alpha chain variable domain of TCR clone 285603 (TRAV12-3, TRAJ43)
CAMSVSNDMRF

SEQ ID NO: 571206 - protein, 18 aa, Homo sapiens
  CDR3 for beta chain variable domain of TCR clone 285603 (TRBV7-9, TRBJ2-7)
CASSLTTSGRRTWYEQYF

SEQ ID NO: 571207 - protein, 11 aa, Homo sapiens
  CDR3 for alpha chain variable domain of TCR clone 285604 (TRAV1-2, TRAJ31)
CAVNNNARLMF

SEQ ID NO: 571208 - protein, 15 aa, Homo sapiens
  CDR3 for beta chain variable domain of TCR clone 285604 (TRBV28, TRBJ2-5)
CASSIIAGGRSEQFF

SEQ ID NO: 571209 - protein, 14 aa, Homo sapiens
  CDR3 for alpha chain variable domain of TCR clone 285605 (TRAV13-1, TRAJ50)
CSKGVETSYDKVIF

SEQ ID NO: 571210 - protein, 18 aa, Homo sapiens
  CDR3 for beta chain variable domain of TCR clone 285605 (TRBV10-3, TRBJ2-1)
CTSVPSVSLRGGVDEQFF

SEQ ID NO: 571211 - protein, 14 aa, Homo sapiens
  CDR3 for alpha chain variable domain of TCR clone 285606 (TRAV35, TRAJ42)
CAGRNGGSQGNLIF

SEQ ID NO: 571212 - protein, 15 aa, Homo sapiens
  CDR3 for beta chain variable domain of TCR clone 285606 (TRBV7-9, TRBJ2-1)
CASSLGWGRANEQFF

SEQ ID NO: 571213 - protein, 14 aa, Homo sapiens
  CDR3 for alpha chain variable domain of TCR clone 285607 (TRAV1-2, TRAJ8)
CAVREDTGFQKLVF

SEQ ID NO: 571214 - protein, 14 aa, Homo sapiens
  CDR3 for beta chain variable domain of TCR clone 285607 (TRBV7-2, TRBJ1-3)
CASSLSRSGNTIYF

SEQ ID NO: 571215 - protein, 11 aa, Homo sapiens
  CDR3 for alpha chain variable domain of TCR clone 285608 (TRAV8-4, TRAJ20)
CAVTNVLTTTS

SEQ ID NO: 571216 - protein, 14 aa, Homo sapiens
  CDR3 for beta chain variable domain of TCR clone 285608 (TRBV7-2, TRBJ2-5)
CASSLSGGGETQYF

SEQ ID NO: 571217 - protein, 12 aa, Homo sapiens
  CDR3 for alpha chain variable domain of TCR clone 285609 (TRAV12-3, TRAJ17)
CAMTLTGNKLTF

SEQ ID NO: 571218 - protein, 15 aa, Homo sapiens
  CDR3 for beta chain variable domain of TCR clone 285609 (TRBV25-1, TRBJ1-6)
CASSEIGQNNSPLHF

SEQ ID NO: 571219 - protein, 13 aa, Homo sapiens
  CDR3 for alpha chain variable domain of TCR clone 285610 (TRAV2, TRAJ29)
CAVYSSGNTPLVF

SEQ ID NO: 571220 - protein, 12 aa, Homo sapiens
  CDR3 for beta chain variable domain of TCR clone 285610 (TRBV5-1, TRBJ2-7)
CASSLDSYEQYF

SEQ ID NO: 571221 - protein, 18 aa, Homo sapiens
  CDR3 for alpha chain variable domain of TCR clone 285611 (TRAV13-1, TRAJ52)
CAAKNPNAGGTSYGKLTF

SEQ ID NO: 571222 - protein, 14 aa, Homo sapiens
  CDR3 for beta chain variable domain of TCR clone 285611 (TRBV7-3, TRBJ2-1)
CASSLAGETNEQFF

SEQ ID NO: 571223 - protein, 18 aa, Homo sapiens
  CDR3 for alpha chain variable domain of TCR clone 285612 (TRAV21, TRAJ53)
CAVKGGENSEGSNYKLTF

SEQ ID NO: 571224 - protein, 13 aa, Homo sapiens
  CDR3 for beta chain variable domain of TCR clone 285612 (TRBV9, TRBJ2-1)
CASSPSGGSEQFF

SEQ ID NO: 571225 - protein, 14 aa, Homo sapiens
  CDR3 for alpha chain variable domain of TCR clone 285613 (TRAV12-2, TRAJ48)
CAVNAFFGNEKLTF

SEQ ID NO: 571226 - protein, 13 aa, Homo sapiens
  CDR3 for beta chain variable domain of TCR clone 285613 (TRBV28, TRBJ2-7)
CAGAQQGLDEQFF

SEQ ID NO: 571227 - protein, 16 aa, Homo sapiens
  CDR3 for alpha chain variable domain of TCR clone 285614 (TRAV3, TRAJ32)
CAGRENYGGATNKLIF

SEQ ID NO: 571228 - protein, 12 aa, Homo sapiens
  CDR3 for beta chain variable domain of TCR clone 285614 (TRBV20-1, TRBJ1-2)
CSVTPEGYGYTF

SEQ ID NO: 571229 - protein, 12 aa, Homo sapiens
  CDR3 for alpha chain variable domain of TCR clone 285615 (TRAV12-1, TRAJ40)
CVVYPGTYKYIF

SEQ ID NO: 571230 - protein, 14 aa, Homo sapiens
  CDR3 for beta chain variable domain of TCR clone 285615 (TRBV7-3, TRBJ1-1)
CASSLKGGNTEAFF

SEQ ID NO: 571231 - protein, 11 aa, Homo sapiens
  CDR3 for alpha chain variable domain of TCR clone 285616 (TRAV1-1, TRAJ20)
CAVFNDYRLSF

SEQ ID NO: 571232 - protein, 16 aa, Homo sapiens
  CDR3 for beta chain variable domain of TCR clone 285616 (TRBV29-1, TRBJ2-2)
CSVEKTSEGNTGELFF

SEQ ID NO: 571233 - protein, 15 aa, Homo sapiens
  CDR3 for alpha chain variable domain of TCR clone 285617 (TRAV12-3, TRAJ11)
CAMSEENSGYSTLTF

SEQ ID NO: 571234 - protein, 14 aa, Homo sapiens
  CDR3 for beta chain variable domain of TCR clone 285617 (TRBV28, TRBJ2-1)
CASSYYTAYNEQFF

SEQ ID NO: 571235 - protein, 15 aa, Homo sapiens
  CDR3 for alpha chain variable domain of TCR clone 285618 (TRAV17, TRAJ57)
CATGPSQGGSEKLVF

SEQ ID NO: 571236 - protein, 15 aa, Homo sapiens
  CDR3 for beta chain variable domain of TCR clone 285618 (TRBV10-3, TRBJ2-3)
CAISLTSGGTDTQYF

SEQ ID NO: 571237 - protein, 14 aa, Homo sapiens
  CDR3 for alpha chain variable domain of TCR clone 285619 (TRAV9-2, TRAJ39)
CALYIYNAGNMLTF

SEQ ID NO: 571238 - protein, 13 aa, Homo sapiens
  CDR3 for beta chain variable domain of TCR clone 285619 (TRBV5-1, TRBJ1-3)
CASSPRERSTIYF

SEQ ID NO: 571239 - protein, 15 aa, Homo sapiens
  CDR3 for alpha chain variable domain of TCR clone 285620 (TRAV12-1, TRAJ36)
CVVNKHQTGANNLFF

SEQ ID NO: 571240 - protein, 12 aa, Homo sapiens
  CDR3 for beta chain variable domain of TCR clone 285620 (TRBV29-1, TRBJ2-3)
CSVTGGADTQYF

SEQ ID NO: 571241 - protein, 15 aa, Homo sapiens
  CDR3 for alpha chain variable domain of TCR clone 285621 (TRAV12-1, TRAJ40)
CVVNMHFPGTYKYIF

SEQ ID NO: 571242 - protein, 12 aa, Homo sapiens
  CDR3 for beta chain variable domain of TCR clone 285621 (TRBV7-3, TRBJ2-1)
CASSLGFNEKFF

SEQ ID NO: 571243 - protein, 15 aa, Homo sapiens
  CDR3 for alpha chain variable domain of TCR clone 285622 (TRAV12-3, TRAJ11)
CAMSEENSGYSTLTF

SEQ ID NO: 571244 - protein, 13 aa, Homo sapiens
  CDR3 for beta chain variable domain of TCR clone 285622 (TRBV12-5, TRBJ2-3)
CASGDRQSDTQYF

SEQ ID NO: 571245 - protein, 13 aa, Homo sapiens
  CDR3 for alpha chain variable domain of TCR clone 285623 (TRAV36/DV7, TRAJ7)
CAVERYGNNRLAF

SEQ ID NO: 571246 - protein, 16 aa, Homo sapiens
  CDR3 for beta chain variable domain of TCR clone 285623 (TRBV6-1, TRBJ2-5)
CASSETLDRGAETQYF

SEQ ID NO: 571247 - protein, 16 aa, Homo sapiens
  CDR3 for alpha chain variable domain of TCR clone 285624 (TRAV30, TRAJ24)
CGTEIVDADSWGKFQF

SEQ ID NO: 571248 - protein, 13 aa, Homo sapiens
  CDR3 for beta chain variable domain of TCR clone 285624 (TRBV6-5, TRBJ2-7)
CASTSLYRGEQYF

SEQ ID NO: 571249 - protein, 12 aa, Homo sapiens
  CDR3 for alpha chain variable domain of TCR clone 285625 (TRAV12-2, TRAJ8)
CAVNTGFQKLVF

SEQ ID NO: 571250 - protein, 15 aa, Homo sapiens
  CDR3 for beta chain variable domain of TCR clone 285625 (TRBV7-8, TRBJ1-5)
CASSLERWGLEPQHF

SEQ ID NO: 571251 - protein, 12 aa, Homo sapiens
  CDR3 for alpha chain variable domain of TCR clone 285626 (TRAV8-3, TRAJ26)
CAGDNYGKNFVF

SEQ ID NO: 571252 - protein, 12 aa, Homo sapiens
  CDR3 for beta chain variable domain of TCR clone 285626 (TRBV11-2, TRBJ2-1)
CASSPGNNEQFF

SEQ ID NO: 571253 - protein, 13 aa, Homo sapiens
  CDR3 for alpha chain variable domain of TCR clone 285627 (TRAV12-2, TRAJ26)
CAVTDPYGQNFFF

SEQ ID NO: 571254 - protein, 12 aa, Homo sapiens
  CDR3 for beta chain variable domain of TCR clone 285627 (TRBV18, TRBJ2-7)
CASAYVGGEQYF

SEQ ID NO: 571255 - protein, 16 aa, Homo sapiens
  CDR3 for alpha chain variable domain of TCR clone 285628 (TRAV27, TRAJ53)
CAAPEGRGGSNYKLTF

SEQ ID NO: 571256 - protein, 14 aa, Homo sapiens
  CDR3 for beta chain variable domain of TCR clone 285628 (TRBV7-8, TRBJ2-5)
CASSATGGQETQYF

SEQ ID NO: 571257 - protein, 12 aa, Homo sapiens
  CDR3 for alpha chain variable domain of TCR clone 285629 (TRAV23/DV6, TRAJ32)
CSMPGATNKLIF

SEQ ID NO: 571258 - protein, 13 aa, Homo sapiens
  CDR3 for beta chain variable domain of TCR clone 285629 (TRBV7-9, TRBJ1-2)
CASSLKQNYGYTF

SEQ ID NO: 571259 - protein, 18 aa, Homo sapiens
  CDR3 for alpha chain variable domain of TCR clone 285630 (TRAV26-1, TRAJ23)
CIVRVGLEVWNQGGKLIF

SEQ ID NO: 571260 - protein, 14 aa, Homo sapiens
  CDR3 for beta chain variable domain of TCR clone 285630 (TRBV5-1, TRBJ1-1)
CASSLQGASTEAFF

SEQ ID NO: 571261 - protein, 15 aa, Homo sapiens
  CDR3 for alpha chain variable domain of TCR clone 285631 (TRAV26-1, TRAJ44)
CIARVPFGTASKLTF

SEQ ID NO: 571262 - protein, 14 aa, Homo sapiens
  CDR3 for beta chain variable domain of TCR clone 285631 (TRBV19, TRBJ2-2)
CASSIAGAFGELFF

SEQ ID NO: 571263 - protein, 14 aa, Homo sapiens
  CDR3 for alpha chain variable domain of TCR clone 285632 (TRAV2, TRAJ22)
CAVGRGGSARQLTF

SEQ ID NO: 571264 - protein, 12 aa, Homo sapiens
  CDR3 for beta chain variable domain of TCR clone 285632 (TRBV5-1, TRBJ2-7)
CASSFRGYEQYF

SEQ ID NO: 571265 - protein, 13 aa, Homo sapiens
  CDR3 for alpha chain variable domain of TCR clone 285633 (TRAV21, TRAJ3)
CCEPYSSASKIIF

SEQ ID NO: 571266 - protein, 15 aa, Homo sapiens
  CDR3 for beta chain variable domain of TCR clone 285633 (TRBV7-3, TRBJ2-1)
CASSPTGGGEVEPFF

SEQ ID NO: 571267 - protein, 13 aa, Homo sapiens
  CDR3 for alpha chain variable domain of TCR clone 285634 (TRAV12-2, TRAJ20)
CAVYPSNDYKLSF

SEQ ID NO: 571268 - protein, 17 aa, Homo sapiens
  CDR3 for beta chain variable domain of TCR clone 285634 (TRBV28, TRBJ2-5)
CASSRQGGLAGAETQYF

SEQ ID NO: 571269 - protein, 14 aa, Homo sapiens
  CDR3 for alpha chain variable domain of TCR clone 285635 (TRAV1-2, TRAJ16)
CAVNRFSDGQQLLF

SEQ ID NO: 571270 - protein, 11 aa, Homo sapiens
  CDR3 for beta chain variable domain of TCR clone 285635 (TRBV12-4, TRBJ2-3)
CASTATDTQYF

SEQ ID NO: 571271 - protein, 17 aa, Homo sapiens
  CDR3 for alpha chain variable domain of TCR clone 285636 (TRAV3, TRAJ6)
CAVRDGPRAGVSYIPTF

SEQ ID NO: 571272 - protein, 12 aa, Homo sapiens
  CDR3 for beta chain variable domain of TCR clone 285636 (TRBV11-2, TRBJ2-1)
CASSPGNNEQFF

SEQ ID NO: 571273 - protein, 14 aa, Homo sapiens
  CDR3 for alpha chain variable domain of TCR clone 285637 (TRAV16, TRAJ37)
CALDISGNTGKLIF

SEQ ID NO: 571274 - protein, 14 aa, Homo sapiens
  CDR3 for beta chain variable domain of TCR clone 285637 (TRBV7-7, TRBJ2-7)
CASSFRQGADEQYF

SEQ ID NO: 571275 - protein, 15 aa, Homo sapiens
  CDR3 for alpha chain variable domain of TCR clone 285638 (TRAV25, TRAJ10)
CAGPLLTGGGNKLTF

SEQ ID NO: 571276 - protein, 15 aa, Homo sapiens
  CDR3 for beta chain variable domain of TCR clone 285638 (TRBV5-1, TRBJ2-7)
CASSQISGTSYEQYF

SEQ ID NO: 571277 - protein, 13 aa, Homo sapiens
  CDR3 for alpha chain variable domain of TCR clone 285639 (TRAV29/DV5, TRAJ43)
CAASAGENNEMRF

SEQ ID NO: 571278 - protein, 17 aa, Homo sapiens
  CDR3 for beta chain variable domain of TCR clone 285639 (TRBV20-1, TRBJ2-1)
CSARDDRGPRFDNEQFF

SEQ ID NO: 571279 - protein, 14 aa, Homo sapiens
  CDR3 for alpha chain variable domain of TCR clone 285640 (TRAV13-2, TRAJ6)
CAERGSGGSDIPTF

SEQ ID NO: 571280 - protein, 17 aa, Homo sapiens
  CDR3 for beta chain variable domain of TCR clone 285640 (TRBV7-9, TRBJ2-3)
CASSPTVAGDLTDTQYF

SEQ ID NO: 571281 - protein, 13 aa, Homo sapiens
  CDR3 for alpha chain variable domain of TCR clone 285641 (TRAV8-2, TRAJ43)
CVVSDQGDNDMRF

SEQ ID NO: 571282 - protein, 15 aa, Homo sapiens
  CDR3 for beta chain variable domain of TCR clone 285641 (TRBV27, TRBJ2-1)
CASSNGGGSSNEQFF

SEQ ID NO: 571283 - protein, 11 aa, Homo sapiens
  CDR3 for alpha chain variable domain of TCR clone 285642 (TRAV17, TRAJ43)
CATSRSNDMRF

SEQ ID NO: 571284 - protein, 15 aa, Homo sapiens
  CDR3 for beta chain variable domain of TCR clone 285642 (TRBV11-2, TRBJ2-1)
CASSLGTTGLNEQFF

SEQ ID NO: 571285 - protein, 14 aa, Homo sapiens
  CDR3 for alpha chain variable domain of TCR clone 285643 (TRAV12-2, TRAJ53)
SRERGGGSNYKLTF

SEQ ID NO: 571286 - protein, 17 aa, Homo sapiens
  CDR3 for beta chain variable domain of TCR clone 285643 (TRBV7-3, TRBJ2-3)
CASSLMKRMRGADTQYF

SEQ ID NO: 571287 - protein, 14 aa, Homo sapiens
  CDR3 for alpha chain variable domain of TCR clone 285644 (TRAV35, TRAJ44)
CAGRPSRTASKLTF

SEQ ID NO: 571288 - protein, 14 aa, Homo sapiens
  CDR3 for beta chain variable domain of TCR clone 285644 (TRBV7-2, TRBJ1-3)
CASSRGGTGNTIYV

SEQ ID NO: 571289 - protein, 15 aa, Homo sapiens
  CDR3 for alpha chain variable domain of TCR clone 285645 (TRAV26-1, TRAJ17)
CIVRGVKAAGNKLTF

SEQ ID NO: 571290 - protein, 16 aa, Homo sapiens
  CDR3 for beta chain variable domain of TCR clone 285645 (TRBV7-9, TRBJ2-1)
CASSLVSGPSYNEQFF

SEQ ID NO: 571291 - protein, 19 aa, Homo sapiens
  CDR3 for alpha chain variable domain of TCR clone 285646 (TRAV3, TRAJ6)
CSVRDRNASRSGGSYIHTF

SEQ ID NO: 571292 - protein, 15 aa, Homo sapiens
  CDR3 for beta chain variable domain of TCR clone 285646 (TRBV18, TRBJ2-7)
CASSPTFMDSYEQYF

SEQ ID NO: 571293 - protein, 14 aa, Homo sapiens
  CDR3 for alpha chain variable domain of TCR clone 285647 (TRAV13-1, TRAJ3)
CAAEGYSSAPKIIF

SEQ ID NO: 571294 - protein, 14 aa, Homo sapiens
  CDR3 for beta chain variable domain of TCR clone 285647 (TRBV19, TRBJ2-5)
CASSSSGIQETQYF

SEQ ID NO: 571295 - protein, 12 aa, Homo sapiens
  CDR3 for alpha chain variable domain of TCR clone 285648 (TRAV23/DV6, TRAJ30)
CAASKGDDKIIF

SEQ ID NO: 571296 - protein, 18 aa, Homo sapiens
  CDR3 for beta chain variable domain of TCR clone 285648 (TRBV10-3, TRBJ2-3)
CAISESSVGPMRGDTQYF

SEQ ID NO: 571297 - protein, 13 aa, Homo sapiens
  CDR3 for alpha chain variable domain of TCR clone 285649 (TRAV13-2, TRAJ13)
CAERIWGYQKVTF

SEQ ID NO: 571298 - protein, 16 aa, Homo sapiens
  CDR3 for beta chain variable domain of TCR clone 285649 (TRBV2, TRBJ2-5)
CASSETQGVGEETQYF

SEQ ID NO: 571299 - protein, 13 aa, Homo sapiens
  CDR3 for alpha chain variable domain of TCR clone 285650 (TRAV21, TRAJ27)
CAARPGNAGKSTF

SEQ ID NO: 571300 - protein, 14 aa, Homo sapiens
  CDR3 for beta chain variable domain of TCR clone 285650 (TRBV19, TRBJ1-5)
CASGTEVYNQPQHF

SEQ ID NO: 571301 - protein, 16 aa, Homo sapiens
  CDR3 for alpha chain variable domain of TCR clone 285651 (TRAV21, TRAJ37)
CAVRPRGSSNTGKLIF

SEQ ID NO: 571302 - protein, 15 aa, Homo sapiens
  CDR3 for beta chain variable domain of TCR clone 285651 (TRBV10-3, TRBJ2-3)
CAISLTSGGTDTQYF

SEQ ID NO: 571303 - protein, 13 aa, Homo sapiens
  CDR3 for alpha chain variable domain of TCR clone 285652 (TRAV30, TRAJ6)
CGFIEGGSYIPTF

SEQ ID NO: 571304 - protein, 13 aa, Homo sapiens
  CDR3 for beta chain variable domain of TCR clone 285652 (TRBV5-4, TRBJ2-5)
CAISPVSQETQYF

SEQ ID NO: 571305 - protein, 14 aa, Homo sapiens
  CDR3 for alpha chain variable domain of TCR clone 285653 (TRAV12-2, TRAJ45)
CALPERGGADGLTF

SEQ ID NO: 571306 - protein, 14 aa, Homo sapiens
  CDR3 for beta chain variable domain of TCR clone 285653 (TRBV18, TRBJ1-5)
CASSPGNSNHAQHF

SEQ ID NO: 571307 - protein, 13 aa, Homo sapiens
  CDR3 for alpha chain variable domain of TCR clone 285654 (TRAV8-3, TRAJ44)
CAVVPGTASKLTF

SEQ ID NO: 571308 - protein, 18 aa, Homo sapiens
  CDR3 for beta chain variable domain of TCR clone 285654 (TRBV11-2, TRBJ2-3)
CASSLGGASRGAPNTQYF

SEQ ID NO: 571309 - protein, 13 aa, Homo sapiens
  CDR3 for alpha chain variable domain of TCR clone 285655 (TRAV36/DV7, TRAJ56)
CAGTTGANSKLTF

SEQ ID NO: 571310 - protein, 12 aa, Homo sapiens
  CDR3 for beta chain variable domain of TCR clone 285655 (TRBV18, TRBJ2-1)
CASSSDEDEQFF

SEQ ID NO: 571311 - protein, 12 aa, Homo sapiens
  CDR3 for alpha chain variable domain of TCR clone 285656 (TRAV13-1, TRAJ53)
AASGGRNYKLTF

SEQ ID NO: 571312 - protein, 15 aa, Homo sapiens
  CDR3 for beta chain variable domain of TCR clone 285656 (TRBV5-1, TRBJ2-1)
CASSPPRAPYNEQFV

SEQ ID NO: 571313 - protein, 14 aa, Homo sapiens
  CDR3 for alpha chain variable domain of TCR clone 285657 (TRAV13-1, TRAJ5)
CAASPGSRRRALTF

SEQ ID NO: 571314 - protein, 17 aa, Homo sapiens
  CDR3 for beta chain variable domain of TCR clone 285657 (TRBV20-1, TRBJ2-1)
CSASSSGLAGSYNEQFF

SEQ ID NO: 571315 - protein, 17 aa, Homo sapiens
  CDR3 for alpha chain variable domain of TCR clone 285658 (TRAV8-6, TRAJ58)
CAVSSWVGETSGSRLTF

SEQ ID NO: 571316 - protein, 14 aa, Homo sapiens
  CDR3 for beta chain variable domain of TCR clone 285658 (TRBV4-2, TRBJ2-1)
CASGLDRAYNQQFF

SEQ ID NO: 571317 - protein, 13 aa, Homo sapiens
  CDR3 for alpha chain variable domain of TCR clone 285659 (TRAV20, TRAJ48)
CAVQGVGDEKLTF

SEQ ID NO: 571318 - protein, 14 aa, Homo sapiens
  CDR3 for beta chain variable domain of TCR clone 285659 (TRBV27, TRBJ2-7)
CASSFRDGPYEQYF

SEQ ID NO: 571319 - protein, 23 aa, Homo sapiens
  CDR3 for alpha chain variable domain of TCR clone 285660 (TRAV26-1, TRAJ38)
CIADNAGNNHIQNPDPAVYQLRD

SEQ ID NO: 571320 - protein, 15 aa, Homo sapiens
  CDR3 for beta chain variable domain of TCR clone 285660 (TRBV19, TRBJ1-5)
CASSIVWADNQPQHF

SEQ ID NO: 571321 - protein, 15 aa, Homo sapiens
  CDR3 for alpha chain variable domain of TCR clone 285661 (TRAV3, TRAJ3)
CAVRDGHSSASKIIF

SEQ ID NO: 571322 - protein, 13 aa, Homo sapiens
  CDR3 for beta chain variable domain of TCR clone 285661 (TRBV7-3, TRBJ2-1)
CASSPGSYNEQFF

SEQ ID NO: 571323 - protein, 13 aa, Homo sapiens
  CDR3 for alpha chain variable domain of TCR clone 285662 (TRAV20, TRAJ31)
CAVQAIGGARLMF

SEQ ID NO: 571324 - protein, 18 aa, Homo sapiens
  CDR3 for beta chain variable domain of TCR clone 285662 (TRBV12-4, TRBJ1-2)
CASSPNPGQAGPYYGYTF

SEQ ID NO: 571325 - protein, 14 aa, Homo sapiens
  CDR3 for alpha chain variable domain of TCR clone 285663 (TRAV12-1, TRAJ4)
CGEQRSGGYNKLIF

SEQ ID NO: 571326 - protein, 14 aa, Homo sapiens
  CDR3 for beta chain variable domain of TCR clone 285663 (TRBV7-2, TRBJ2-2)
CASRGQGAAGELFF

SEQ ID NO: 571327 - protein, 12 aa, Homo sapiens
  CDR3 for alpha chain variable domain of TCR clone 285664 (TRAV12-2, TRAJ16)
CAVAPDGQKLPF

SEQ ID NO: 571328 - protein, 14 aa, Homo sapiens
  CDR3 for beta chain variable domain of TCR clone 285664 (TRBV18, TRBJ2-5)
CASSPGVSQETQYF

SEQ ID NO: 571329 - protein, 14 aa, Homo sapiens
  CDR3 for alpha chain variable domain of TCR clone 285665 (TRAV1-2, TRAJ16)
CAVNRFSDGQKLLL

SEQ ID NO: 571330 - protein, 15 aa, Homo sapiens
  CDR3 for beta chain variable domain of TCR clone 285665 (TRBV20-1, TRBJ2-7)
CSARKGLAESYEQYF

SEQ ID NO: 571331 - protein, 14 aa, Homo sapiens
  CDR3 for alpha chain variable domain of TCR clone 285666 (TRAV12-3, TRAJ20)
CAMIARRGDYKLSF

SEQ ID NO: 571332 - protein, 14 aa, Homo sapiens
  CDR3 for beta chain variable domain of TCR clone 285666 (TRBV7-3, TRBJ2-3)
CASSPSARTDTQYF

SEQ ID NO: 571333 - protein, 15 aa, Homo sapiens
  CDR3 for alpha chain variable domain of TCR clone 285667 (TRAV2, TRAJ9)
CAVEDRGTGCFKAIF

SEQ ID NO: 571334 - protein, 16 aa, Homo sapiens
  CDR3 for beta chain variable domain of TCR clone 285667 (TRBV24-1, TRBJ2-3)
CATSDPGTGATDTQYF

SEQ ID NO: 571335 - protein, 13 aa, Homo sapiens
  CDR3 for alpha chain variable domain of TCR clone 285668 (TRAV8-6, TRAJ49)
CAVITNTGNQFYF

SEQ ID NO: 571336 - protein, 15 aa, Homo sapiens
  CDR3 for beta chain variable domain of TCR clone 285668 (TRBV20-1, TRBJ2-7)
CSARDRVCGMDEQYF

SEQ ID NO: 571337 - protein, 12 aa, Homo sapiens
  CDR3 for alpha chain variable domain of TCR clone 285669 (TRAV1-1, TRAJ8)
CAGGTGFQKLVF

SEQ ID NO: 571338 - protein, 15 aa, Homo sapiens
  CDR3 for beta chain variable domain of TCR clone 285669 (TRBV7-9, TRBJ1-4)
CASSRTGGFHEKLFF

SEQ ID NO: 571339 - protein, 14 aa, Homo sapiens
  CDR3 for alpha chain variable domain of TCR clone 285670 (TRAV3, TRAJ34)
CAVRAPGNTDKLIF

SEQ ID NO: 571340 - protein, 14 aa, Homo sapiens
  CDR3 for beta chain variable domain of TCR clone 285670 (TRBV7-8, TRBJ1-3)
CASSSDRVRNTIYF

SEQ ID NO: 571341 - protein, 14 aa, Homo sapiens
  CDR3 for alpha chain variable domain of TCR clone 285671 (TRAV27, TRAJ45)
CAGAQEEVLTDSPL

SEQ ID NO: 571342 - protein, 17 aa, Homo sapiens
  CDR3 for beta chain variable domain of TCR clone 285671 (TRBV11-2, TRBJ2-1)
CASSLYPPGVEYNEQFL

SEQ ID NO: 571343 - protein, 15 aa, Homo sapiens
  CDR3 for alpha chain variable domain of TCR clone 285672 (TRAV27, TRAJ38)
CAARRNAGNNRKLIW

SEQ ID NO: 571344 - protein, 18 aa, Homo sapiens
  CDR3 for beta chain variable domain of TCR clone 285672 (TRBV7-2, TRBJ2-3)
CASSLRRADPPCTDTQYF

SEQ ID NO: 571345 - protein, 15 aa, Homo sapiens
  CDR3 for alpha chain variable domain of TCR clone 285673 (TRAV1-2, TRAJ31)
CVSRCQTHVWRWNSA

SEQ ID NO: 571346 - protein, 14 aa, Homo sapiens
  CDR3 for beta chain variable domain of TCR clone 285673 (TRBV19, TRBJ2-1)
CASPTFVLSGEQFF

SEQ ID NO: 571347 - protein, 14 aa, Homo sapiens
  CDR3 for alpha chain variable domain of TCR clone 285674 (TRAV1-2, TRAJ16)
CAVNLFSDGQKLLF

SEQ ID NO: 571348 - protein, 12 aa, Homo sapiens
  CDR3 for beta chain variable domain of TCR clone 285674 (TRBV5-1, TRBJ2-7)
CASSSTTYEQYF

SEQ ID NO: 571349 - protein, 14 aa, Homo sapiens
  CDR3 for alpha chain variable domain of TCR clone 285675 (TRAV12-2, TRAJ13)
CAVKKTGGYQKVTF

SEQ ID NO: 571350 - protein, 16 aa, Homo sapiens
  CDR3 for beta chain variable domain of TCR clone 285675 (TRBV11-2, TRBJ2-7)
CASSTVTAPKTYEQYF

SEQ ID NO: 571351 - protein, 13 aa, Homo sapiens
  CDR3 for alpha chain variable domain of TCR clone 285676 (TRAV12-1, TRAJ40)
CVVPTSGTYKYIF

SEQ ID NO: 571352 - protein, 16 aa, Homo sapiens
  CDR3 for beta chain variable domain of TCR clone 285676 (TRBV7-9, TRBJ1-2)
CASSLGFSSEEDGYTF

SEQ ID NO: 571353 - protein, 17 aa, Homo sapiens
  CDR3 for alpha chain variable domain of TCR clone 285677 (TRAV3, TRAJ6)
CAVRDGPMAGGSYIPTF

SEQ ID NO: 571354 - protein, 14 aa, Homo sapiens
  CDR3 for beta chain variable domain of TCR clone 285677 (TRBV7-2, TRBJ2-7)
CATSPKTSFYEQYF

SEQ ID NO: 571355 - protein, 14 aa, Homo sapiens
  CDR3 for alpha chain variable domain of TCR clone 285678 (TRAV2, TRAJ23)
CAVGLRNQGGKLIF

SEQ ID NO: 571356 - protein, 13 aa, Homo sapiens
  CDR3 for beta chain variable domain of TCR clone 285678 (TRBV12-4, TRBJ2-7)
CASSPGTEETQYF

SEQ ID NO: 571357 - protein, 15 aa, Homo sapiens
  CDR3 for alpha chain variable domain of TCR clone 285679 (TRAV3, TRAJ32)
CAVSSYGGATNKLIF

SEQ ID NO: 571358 - protein, 10 aa, Homo sapiens
  CDR3 for beta chain variable domain of TCR clone 285679 (TRBV20-1, TRBJ1-4)
DGSGWEKLFF

SEQ ID NO: 571359 - protein, 13 aa, Homo sapiens
  CDR3 for alpha chain variable domain of TCR clone 285680 (TRAV13-1, TRAJ21)
CAASIYNFNKFYF

SEQ ID NO: 571360 - protein, 14 aa, Homo sapiens
  CDR3 for beta chain variable domain of TCR clone 285680 (TRBV15, TRBJ2-3)
CATSREENTDTQYF

SEQ ID NO: 571361 - protein, 17 aa, Homo sapiens
  CDR3 for alpha chain variable domain of TCR clone 285681 (TRAV3, TRAJ42)
CAVRDRDYGGSKGNLIF

SEQ ID NO: 571362 - protein, 12 aa, Homo sapiens
  CDR3 for beta chain variable domain of TCR clone 285681 (TRBV19, TRBJ1-1)
CASSIGTEEAFF

SEQ ID NO: 571363 - protein, 14 aa, Homo sapiens
  CDR3 for alpha chain variable domain of TCR clone 285682 (TRAV8-4, TRAJ13)
CAVTLSGGYQKVTF

SEQ ID NO: 571364 - protein, 12 aa, Homo sapiens
  CDR3 for beta chain variable domain of TCR clone 285682 (TRBV11-2, TRBJ2-1)
CASSPGNNEQFF

SEQ ID NO: 571365 - protein, 17 aa, Homo sapiens
  CDR3 for alpha chain variable domain of TCR clone 285683 (TRAV13-1, TRAJ52)
CAASSGAGGTSYGKLTF

SEQ ID NO: 571366 - protein, 15 aa, Homo sapiens
  CDR3 for beta chain variable domain of TCR clone 285683 (TRBV7-9, TRBJ1-6)
CASSSPGRGNSPLHF

SEQ ID NO: 571367 - protein, 18 aa, Homo sapiens
  CDR3 for alpha chain variable domain of TCR clone 285684 (TRAV13-1, TRAJ52)
CAASKRSAGGTSYGKLTF

SEQ ID NO: 571368 - protein, 16 aa, Homo sapiens
  CDR3 for beta chain variable domain of TCR clone 285684 (TRBV6-5, TRBJ2-2)
CASSYGYTGSGGELFF

SEQ ID NO: 571369 - protein, 15 aa, Homo sapiens
  CDR3 for alpha chain variable domain of TCR clone 285685 (TRAV21, TRAJ24)
CAARSTTDSWGKLQF

SEQ ID NO: 571370 - protein, 13 aa, Homo sapiens
  CDR3 for beta chain variable domain of TCR clone 285685 (TRBV11-2, TRBJ2-5)
CASSSTGEETQYF

SEQ ID NO: 571371 - protein, 18 aa, Homo sapiens
  CDR3 for alpha chain variable domain of TCR clone 285686 (TRAV21, TRAJ52)
CAVRPSPAGGTSCGKLTS

SEQ ID NO: 571372 - protein, 17 aa, Homo sapiens
  CDR3 for beta chain variable domain of TCR clone 285686 (TRBV13, TRBJ2-3)
CASSLSRVAGGRNTQYF

SEQ ID NO: 571373 - protein, 11 aa, Homo sapiens
  CDR3 for alpha chain variable domain of TCR clone 285687 (TRAV21, TRAJ9)
CAVPGGFTTIF

SEQ ID NO: 571374 - protein, 12 aa, Homo sapiens
  CDR3 for beta chain variable domain of TCR clone 285687 (TRBV20-1, TRBJ2-3)
CSARIGTDTHYF

SEQ ID NO: 571375 - protein, 14 aa, Homo sapiens
  CDR3 for alpha chain variable domain of TCR clone 285688 (TRAV26-1, TRAJ34)
CIVRVASNTDKLIF

SEQ ID NO: 571376 - protein, 15 aa, Homo sapiens
  CDR3 for beta chain variable domain of TCR clone 285688 (TRBV20-1, TRBJ2-7)
CSARVPAAYFYEQYF

SEQ ID NO: 571377 - protein, 14 aa, Homo sapiens
  CDR3 for alpha chain variable domain of TCR clone 285689 (TRAV8-6, TRAJ8)
CAVNENTGFQKLLF

SEQ ID NO: 571378 - protein, 11 aa, Homo sapiens
  CDR3 for beta chain variable domain of TCR clone 285689 (TRBV29-1, TRBJ2-5)
CSEDRTGTQYF

SEQ ID NO: 571379 - protein, 13 aa, Homo sapiens
  CDR3 for alpha chain variable domain of TCR clone 285690 (TRAV27, TRAJ6)
CAGGTRGSYIPTF

SEQ ID NO: 571380 - protein, 17 aa, Homo sapiens
  CDR3 for beta chain variable domain of TCR clone 285690 (TRBV4-1, TRBJ2-3)
CARSQGYVSGGTDTQYF

SEQ ID NO: 571381 - protein, 11 aa, Homo sapiens
  CDR3 for alpha chain variable domain of TCR clone 285691 (TRAV3, TRAJ21)
CAVGNFNKFHF

SEQ ID NO: 571382 - protein, 16 aa, Homo sapiens
  CDR3 for beta chain variable domain of TCR clone 285691 (TRBV7-6, TRBJ2-1)
CASSAPGPSSYNEQFF

SEQ ID NO: 571383 - protein, 18 aa, Homo sapiens
  CDR3 for alpha chain variable domain of TCR clone 285692 (TRAV26-2, TRAJ45)
CILSVDKYSGGGADGLTF

SEQ ID NO: 571384 - protein, 17 aa, Homo sapiens
  CDR3 for beta chain variable domain of TCR clone 285692 (TRBV25-1, TRBJ2-1)
CASSAYGQGRGVYEQFF

SEQ ID NO: 571385 - protein, 14 aa, Homo sapiens
  CDR3 for alpha chain variable domain of TCR clone 285693 (TRAV14/DV4, TRAJ58)
CAMMKETSGSRLTF

SEQ ID NO: 571386 - protein, 12 aa, Homo sapiens
  CDR3 for beta chain variable domain of TCR clone 285693 (TRBV12-4, TRBJ2-1)
CASTYVLNDQFF

SEQ ID NO: 571387 - protein, 13 aa, Homo sapiens
  CDR3 for alpha chain variable domain of TCR clone 285694 (TRAV29/DV5, TRAJ31)
CAASRNNNARLMF

SEQ ID NO: 571388 - protein, 14 aa, Homo sapiens
  CDR3 for beta chain variable domain of TCR clone 285694 (TRBV2, TRBJ2-1)
CASRTGSSYNEQFF

SEQ ID NO: 571389 - protein, 14 aa, Homo sapiens
  CDR3 for alpha chain variable domain of TCR clone 285695 (TRAV1-2, TRAJ16)
CAVNRFSDGKKLLF

SEQ ID NO: 571390 - protein, 15 aa, Homo sapiens
  CDR3 for beta chain variable domain of TCR clone 285695 (TRBV9, TRBJ1-6)
CASRVAGTGDSPLHF

SEQ ID NO: 571391 - protein, 14 aa, Homo sapiens
  CDR3 for alpha chain variable domain of TCR clone 285696 (TRAV12-1, TRAJ9)
CVLNIITGGFKTIF

SEQ ID NO: 571392 - protein, 17 aa, Homo sapiens
  CDR3 for beta chain variable domain of TCR clone 285696 (TRBV9, TRBJ2-1)
CASGVEPTGMARDEQFF

SEQ ID NO: 571393 - protein, 14 aa, Homo sapiens
  CDR3 for alpha chain variable domain of TCR clone 285697 (TRAV16, TRAJ54)
CALSLIHGAQKLVS

SEQ ID NO: 571394 - protein, 15 aa, Homo sapiens
  CDR3 for beta chain variable domain of TCR clone 285697 (TRBV20-1, TRBJ2-7)
CSARDRVSGMDEQYF

SEQ ID NO: 571395 - protein, 10 aa, Homo sapiens
  CDR3 for alpha chain variable domain of TCR clone 285698 (TRAV12-1, TRAJ21)
CVVNPIKFYF

SEQ ID NO: 571396 - protein, 15 aa, Homo sapiens
  CDR3 for beta chain variable domain of TCR clone 285698 (TRBV7-9, TRBJ2-2)
CASRPADRDTGELFF

SEQ ID NO: 571397 - protein, 15 aa, Homo sapiens
  CDR3 for alpha chain variable domain of TCR clone 285699 (TRAV3, TRAJ32)
CAVSSYGGATNKLIF

SEQ ID NO: 571398 - protein, 13 aa, Homo sapiens
  CDR3 for beta chain variable domain of TCR clone 285699 (TRBV7-9, TRBJ2-5)
CASLPSGRETQYF

SEQ ID NO: 571399 - protein, 11 aa, Homo sapiens
  CDR3 for alpha chain variable domain of TCR clone 285700 (TRAV12-2, TRAJ43)
CASPIGNDMRF

SEQ ID NO: 571400 - protein, 14 aa, Homo sapiens
  CDR3 for beta chain variable domain of TCR clone 285700 (TRBV18, TRBJ2-5)
WASSPPGHQETQYF

SEQ ID NO: 571401 - protein, 13 aa, Homo sapiens
  CDR3 for alpha chain variable domain of TCR clone 285701 (TRAV21, TRAJ20)
CALSRLGDYKLSF

SEQ ID NO: 571402 - protein, 13 aa, Homo sapiens
  CDR3 for beta chain variable domain of TCR clone 285701 (TRBV7-3, TRBJ1-1)
CASSPAGGLEAFF

SEQ ID NO: 571403 - protein, 13 aa, Homo sapiens
  CDR3 for alpha chain variable domain of TCR clone 285702 (TRAV21, TRAJ57)
CAVTQGGSEKLVF

SEQ ID NO: 571404 - protein, 16 aa, Homo sapiens
  CDR3 for beta chain variable domain of TCR clone 285702 (TRBV29-1, TRBJ2-7)
CSVEDAEDGAAYEQYF

SEQ ID NO: 571405 - protein, 14 aa, Homo sapiens
  CDR3 for alpha chain variable domain of TCR clone 285703 (TRAV16, TRAJ13)
CALRRSGGYQKVTF

SEQ ID NO: 571406 - protein, 15 aa, Homo sapiens
  CDR3 for beta chain variable domain of TCR clone 285703 (TRBV6-1, TRBJ1-5)
CASSELREGNQHQHF

SEQ ID NO: 571407 - protein, 16 aa, Homo sapiens
  CDR3 for alpha chain variable domain of TCR clone 285704 (TRAV16, TRAJ42)
CARKVNYGGSQGNLIF

SEQ ID NO: 571408 - protein, 13 aa, Homo sapiens
  CDR3 for beta chain variable domain of TCR clone 285704 (TRBV20-1, TRBJ2-7)
CSASPPSSYEQYF

SEQ ID NO: 571409 - protein, 14 aa, Homo sapiens
  CDR3 for alpha chain variable domain of TCR clone 285705 (TRAV1-2, TRAJ8)
CAVREDTGFQKLVF

SEQ ID NO: 571410 - protein, 11 aa, Homo sapiens
  CDR3 for beta chain variable domain of TCR clone 285705 (TRBV2, TRBJ1-3)
CASSAGNTIYF

SEQ ID NO: 571411 - protein, 23 aa, Homo sapiens
  CDR3 for alpha chain variable domain of TCR clone 285706 (TRAV12-2, TRAJ36)
SLLTRDSQPSDSATLERANNLFF

SEQ ID NO: 571412 - protein, 17 aa, Homo sapiens
  CDR3 for beta chain variable domain of TCR clone 285706 (TRBV3-1, TRBJ2-3)
CASSQLLDRGHTDTQYF

SEQ ID NO: 571413 - protein, 14 aa, Homo sapiens
  CDR3 for alpha chain variable domain of TCR clone 285707 (TRAV16, TRAJ37)
CALDISGNTGKLIF

SEQ ID NO: 571414 - protein, 14 aa, Homo sapiens
  CDR3 for beta chain variable domain of TCR clone 285707 (TRBV7-6, TRBJ2-7)
CAGSFRQGADEQYF

SEQ ID NO: 571415 - protein, 15 aa, Homo sapiens
  CDR3 for alpha chain variable domain of TCR clone 285708 (TRAV26-1, TRAJ29)
CIVRVEGSGNTPLAF

SEQ ID NO: 571416 - protein, 15 aa, Homo sapiens
  CDR3 for beta chain variable domain of TCR clone 285708 (TRBV7-9, TRBJ1-5)
CASSQSHQPNQPQHF

SEQ ID NO: 571417 - protein, 19 aa, Homo sapiens
  CDR3 for alpha chain variable domain of TCR clone 285709 (TRAV30, TRAJ52)
CGTEANTNAGGTSYGKLTF

SEQ ID NO: 571418 - protein, 12 aa, Homo sapiens
  CDR3 for beta chain variable domain of TCR clone 285709 (TRBV11-2, TRBJ2-2)
CASSLGGGELFF

SEQ ID NO: 571419 - protein, 14 aa, Homo sapiens
  CDR3 for alpha chain variable domain of TCR clone 285710 (TRAV12-1, TRAJ3)
CVMNPGSSASKIIF

SEQ ID NO: 571420 - protein, 18 aa, Homo sapiens
  CDR3 for beta chain variable domain of TCR clone 285710 (TRBV4-2, TRBJ1-2)
CASSQDKVGHTVNYGYTF

SEQ ID NO: 571421 - protein, 13 aa, Homo sapiens
  CDR3 for alpha chain variable domain of TCR clone 285711 (TRAV39, TRAJ58)
CAGEETSGSRLTF

SEQ ID NO: 571422 - protein, 13 aa, Homo sapiens
  CDR3 for beta chain variable domain of TCR clone 285711 (TRBV7-9, TRBJ2-5)
CASLPSGRETQYF

SEQ ID NO: 571423 - protein, 13 aa, Homo sapiens
  CDR3 for alpha chain variable domain of TCR clone 285712 (TRAV35, TRAJ57)
CCSPQGGSEKLVF

SEQ ID NO: 571424 - protein, 18 aa, Homo sapiens
  CDR3 for beta chain variable domain of TCR clone 285712 (TRBV6-6, TRBJ1-3)
CASSYSKWDSISGNTIYF

SEQ ID NO: 571425 - protein, 14 aa, Homo sapiens
  CDR3 for alpha chain variable domain of TCR clone 285713 (TRAV12-3, TRAJ10)
SHLPLTRGGNKLTF

SEQ ID NO: 571426 - protein, 15 aa, Homo sapiens
  CDR3 for beta chain variable domain of TCR clone 285713 (TRBV10-2, TRBJ2-6)
CASSEQGTGANVLTF

SEQ ID NO: 571427 - protein, 14 aa, Homo sapiens
  CDR3 for alpha chain variable domain of TCR clone 285714 (TRAV16, TRAJ33)
CALSAMDSNYQLIW

SEQ ID NO: 571428 - protein, 15 aa, Homo sapiens
  CDR3 for beta chain variable domain of TCR clone 285714 (TRBV5-5, TRBJ1-5)
CASSSTPGSNQPQHF

SEQ ID NO: 571429 - protein, 13 aa, Homo sapiens
  CDR3 for alpha chain variable domain of TCR clone 285715 (TRAV23/DV6, TRAJ15)
CAALPAGRNCSEC

SEQ ID NO: 571430 - protein, 14 aa, Homo sapiens
  CDR3 for beta chain variable domain of TCR clone 285715 (TRBV7-9, TRBJ1-2)
CASSRQGANYGYTF

SEQ ID NO: 571431 - protein, 12 aa, Homo sapiens
  CDR3 for alpha chain variable domain of TCR clone 285716 (TRAV17, TRAJ12)
FSTLRSSYKLIF

SEQ ID NO: 571432 - protein, 16 aa, Homo sapiens
  CDR3 for beta chain variable domain of TCR clone 285716 (TRBV28, TRBJ2-7)
CASSLFFETGGPEQYF

SEQ ID NO: 571433 - protein, 14 aa, Homo sapiens
  CDR3 for alpha chain variable domain of TCR clone 285717 (TRAV1-1, TRAJ27)
CAVIYNANVGKSTF

SEQ ID NO: 571434 - protein, 15 aa, Homo sapiens
  CDR3 for beta chain variable domain of TCR clone 285717 (TRBV7-2, TRBJ2-1)
CASSSGLAGGNEQFF

SEQ ID NO: 571435 - protein, 13 aa, Homo sapiens
  CDR3 for alpha chain variable domain of TCR clone 285718 (TRAV8-3, TRAJ34)
CAGGAYNTDKRIF

SEQ ID NO: 571436 - protein, 11 aa, Homo sapiens
  CDR3 for beta chain variable domain of TCR clone 285718 (TRBV7-3, TRBJ1-2)
CASSLGDGYTF

SEQ ID NO: 571437 - protein, 18 aa, Homo sapiens
  CDR3 for alpha chain variable domain of TCR clone 285719 (TRAV13-1, TRAJ52)
CAAKNPNAGGTSYGKLTF

SEQ ID NO: 571438 - protein, 12 aa, Homo sapiens
  CDR3 for beta chain variable domain of TCR clone 285719 (TRBV5-1, TRBJ2-7)
CASSLDSYEQYF

SEQ ID NO: 571439 - protein, 16 aa, Homo sapiens
  CDR3 for alpha chain variable domain of TCR clone 285720 (TRAV36/DV7, TRAJ30)
CAVETYGLDRDDKIIF

SEQ ID NO: 571440 - protein, 16 aa, Homo sapiens
  CDR3 for beta chain variable domain of TCR clone 285720 (TRBV11-2, TRBJ1-2)
CASSLDTGGADYGYTF

SEQ ID NO: 571441 - protein, 16 aa, Homo sapiens
  CDR3 for alpha chain variable domain of TCR clone 285721 (TRAV30, TRAJ24)
RGTEIVDADSWGKFQF

SEQ ID NO: 571442 - protein, 12 aa, Homo sapiens
  CDR3 for beta chain variable domain of TCR clone 285721 (TRBV5-5, TRBJ2-5)
CASSYFGETQYF

SEQ ID NO: 571443 - protein, 15 aa, Homo sapiens
  CDR3 for alpha chain variable domain of TCR clone 285722 (TRAV4, TRAJ39)
CLVGPNNNEGNMLTF

SEQ ID NO: 571444 - protein, 14 aa, Homo sapiens
  CDR3 for beta chain variable domain of TCR clone 285722 (TRBV27, TRBJ2-2)
CASSLGAATGELFF

SEQ ID NO: 571445 - protein, 12 aa, Homo sapiens
  CDR3 for alpha chain variable domain of TCR clone 285723 (TRAV21, TRAJ42)
CAVGGSQGNLIF

SEQ ID NO: 571446 - protein, 19 aa, Homo sapiens
  CDR3 for beta chain variable domain of TCR clone 285723 (TRBV5-1, TRBJ2-3)
CASSLTRIAADGSTDTQYF

SEQ ID NO: 571447 - protein, 15 aa, Homo sapiens
  CDR3 for alpha chain variable domain of TCR clone 285724 (TRAV17, TRAJ57)
CATGPSQGGPEKLGF

SEQ ID NO: 571448 - protein, 18 aa, Homo sapiens
  CDR3 for beta chain variable domain of TCR clone 285724 (TRBV7-9, TRBJ2-7)
CASSLTTSGSRTWYEQYF

SEQ ID NO: 571449 - protein, 13 aa, Homo sapiens
  CDR3 for alpha chain variable domain of TCR clone 285725 (TRAV12-3, TRAJ41)
CAIAPNSGYALTF

SEQ ID NO: 571450 - protein, 14 aa, Homo sapiens
  CDR3 for beta chain variable domain of TCR clone 285725 (TRBV7-2, TRBJ1-3)
CASSLGTAGNTIYF

SEQ ID NO: 571451 - protein, 16 aa, Homo sapiens
  CDR3 for alpha chain variable domain of TCR clone 285726 (TRAV12-2, TRAJ32)
CAVNLGQGGATNKRIF

SEQ ID NO: 571452 - protein, 13 aa, Homo sapiens
  CDR3 for beta chain variable domain of TCR clone 285726 (TRBV9, TRBJ2-2)
CASSPRPAGELFF

SEQ ID NO: 571453 - protein, 14 aa, Homo sapiens
  CDR3 for alpha chain variable domain of TCR clone 285727 (TRAV1-2, TRAJ16)
CAVNRFSDGQKLLF

SEQ ID NO: 571454 - protein, 15 aa, Homo sapiens
  CDR3 for beta chain variable domain of TCR clone 285727 (TRBV20-1, TRBJ1-1)
CSASRGVTGNTEAFC

SEQ ID NO: 571455 - protein, 12 aa, Homo sapiens
  CDR3 for alpha chain variable domain of TCR clone 285728 (TRAV12-1, TRAJ39)
CVVIDAGNMLTF

SEQ ID NO: 571456 - protein, 15 aa, Homo sapiens
  CDR3 for beta chain variable domain of TCR clone 285728 (TRBV6-1, TRBJ2-3)
CASSERGGITDTQYF

SEQ ID NO: 571457 - protein, 12 aa, Homo sapiens
  CDR3 for alpha chain variable domain of TCR clone 285729 (TRAV12-2, TRAJ10)
WGVMLLLNKLTF

SEQ ID NO: 571458 - protein, 16 aa, Homo sapiens
  CDR3 for beta chain variable domain of TCR clone 285729 (TRBV6-4, TRBJ1-2)
CASSEAVGDPNYGYTF

SEQ ID NO: 571459 - protein, 18 aa, Homo sapiens
  CDR3 for alpha chain variable domain of TCR clone 285730 (TRAV21, TRAJ52)
CAVRPSPAGGTSYGKLTF

SEQ ID NO: 571460 - protein, 14 aa, Homo sapiens
  CDR3 for beta chain variable domain of TCR clone 285730 (TRBV11-2, TRBJ1-1)
CASSLEGVGTEAFF

SEQ ID NO: 571461 - protein, 14 aa, Homo sapiens
  CDR3 for alpha chain variable domain of TCR clone 285731 (TRAV30, TRAJ44)
CGTESAGTASKLTF

SEQ ID NO: 571462 - protein, 14 aa, Homo sapiens
  CDR3 for beta chain variable domain of TCR clone 285731 (TRBV25-1, TRBJ1-1)
CASTHLGGNTEAFF

SEQ ID NO: 571463 - protein, 14 aa, Homo sapiens
  CDR3 for alpha chain variable domain of TCR clone 285732 (TRAV26-1, TRAJ38)
CIADNASNNRKLIW

SEQ ID NO: 571464 - protein, 13 aa, Homo sapiens
  CDR3 for beta chain variable domain of TCR clone 285732 (TRBV19, TRBJ1-2)
CASSVPGQDGYTF

SEQ ID NO: 571465 - protein, 14 aa, Homo sapiens
  CDR3 for alpha chain variable domain of TCR clone 285733 (TRAV2, TRAJ9)
CAVEDRSGGFKTIF

SEQ ID NO: 571466 - protein, 14 aa, Homo sapiens
  CDR3 for beta chain variable domain of TCR clone 285733 (TRBV7-9, TRBJ1-1)
CASSAQTMNTEAFF

SEQ ID NO: 571467 - protein, 14 aa, Homo sapiens
  CDR3 for alpha chain variable domain of TCR clone 285734 (TRAV21, TRAJ35)
CAVMPLGFGNVLHS

SEQ ID NO: 571468 - protein, 12 aa, Homo sapiens
  CDR3 for beta chain variable domain of TCR clone 285734 (TRBV7-9, TRBJ2-7)
CASSIKREEQYF

SEQ ID NO: 571469 - protein, 11 aa, Homo sapiens
  CDR3 for alpha chain variable domain of TCR clone 285735 (TRAV1-2, TRAJ40)
CAVPGTYKYIF

SEQ ID NO: 571470 - protein, 15 aa, Homo sapiens
  CDR3 for beta chain variable domain of TCR clone 285735 (TRBV7-9, TRBJ2-5)
CASSLEGGSGETQYF

SEQ ID NO: 571471 - protein, 19 aa, Homo sapiens
  CDR3 for alpha chain variable domain of TCR clone 285736 (TRAV13-1, TRAJ52)
CAASSSPNAGGTRYGKLTF

SEQ ID NO: 571472 - protein, 15 aa, Homo sapiens
  CDR3 for beta chain variable domain of TCR clone 285736 (TRBV9, TRBJ1-6)
CASSTGGGVDSPLHF

SEQ ID NO: 571473 - protein, 14 aa, Homo sapiens
  CDR3 for alpha chain variable domain of TCR clone 285737 (TRAV1-2, TRAJ8)
RAVREDTGFQKLVF

SEQ ID NO: 571474 - protein, 15 aa, Homo sapiens
  CDR3 for beta chain variable domain of TCR clone 285737 (TRBV6-3, TRBJ2-7)
CASSSPGTVFYEQYS

SEQ ID NO: 571475 - protein, 14 aa, Homo sapiens
  CDR3 for alpha chain variable domain of TCR clone 285738 (TRAV8-2, TRAJ37)
CVVSISGNPGKLIF

SEQ ID NO: 571476 - protein, 12 aa, Homo sapiens
  CDR3 for beta chain variable domain of TCR clone 285738 (TRBV12-4, TRBJ2-1)
CASSLVRVERFF

SEQ ID NO: 571477 - protein, 15 aa, Homo sapiens
  CDR3 for alpha chain variable domain of TCR clone 285739 (TRAV27, TRAJ38)
CAARRNAGTNRKLIW

SEQ ID NO: 571478 - protein, 13 aa, Homo sapiens
  CDR3 for beta chain variable domain of TCR clone 285739 (TRBV28, TRBJ2-5)
CAGVSRGEETQYF

SEQ ID NO: 571479 - protein, 12 aa, Homo sapiens
  CDR3 for alpha chain variable domain of TCR clone 285740 (TRAV16, TRAJ27)
CALNTNAGKSTF

SEQ ID NO: 571480 - protein, 17 aa, Homo sapiens
  CDR3 for beta chain variable domain of TCR clone 285740 (TRBV19, TRBJ2-1)
CASSIQGLAGGYNEQFF

SEQ ID NO: 571481 - protein, 17 aa, Homo sapiens
  CDR3 for alpha chain variable domain of TCR clone 285741 (TRAV38-1, TRAJ28)
WAFMKPTSGAGSYQLTF

SEQ ID NO: 571482 - protein, 15 aa, Homo sapiens
  CDR3 for beta chain variable domain of TCR clone 285741 (TRBV5-1, TRBJ2-4)
CASSLGGGGSYIQYF

SEQ ID NO: 571483 - protein, 13 aa, Homo sapiens
  CDR3 for alpha chain variable domain of TCR clone 285742 (TRAV16, TRAJ28)
CALTVAGSYQLTF

SEQ ID NO: 571484 - protein, 16 aa, Homo sapiens
  CDR3 for beta chain variable domain of TCR clone 285742 (TRBV28, TRBJ1-5)
CASSLTGQGWNQPQHF

SEQ ID NO: 571485 - protein, 11 aa, Homo sapiens
  CDR3 for alpha chain variable domain of TCR clone 285743 (TRAV26-1, TRAJ27)
CIDPNAGTSTF

SEQ ID NO: 571486 - protein, 18 aa, Homo sapiens
  CDR3 for beta chain variable domain of TCR clone 285743 (TRBV7-9, TRBJ2-6)
CASSFPGAGISGANVLTF

SEQ ID NO: 571487 - protein, 16 aa, Homo sapiens
  CDR3 for alpha chain variable domain of TCR clone 285744 (TRAV8-3, TRAJ10)
CAVGPILTGGGNKLTF

SEQ ID NO: 571488 - protein, 16 aa, Homo sapiens
  CDR3 for beta chain variable domain of TCR clone 285744 (TRBV7-2, TRBJ2-5)
CASSSKWLCGQETQYF

SEQ ID NO: 571489 - protein, 15 aa, Homo sapiens
  CDR3 for alpha chain variable domain of TCR clone 285745 (TRAV3, TRAJ24)
CAVIDKMTAGGDCSL

SEQ ID NO: 571490 - protein, 14 aa, Homo sapiens
  CDR3 for beta chain variable domain of TCR clone 285745 (TRBV7-2, TRBJ2-3)
CASSQTGSSYTQYF

SEQ ID NO: 571491 - protein, 14 aa, Homo sapiens
  CDR3 for alpha chain variable domain of TCR clone 285746 (TRAV29/DV5, TRAJ36)
CAARRKTGANTLFF

SEQ ID NO: 571492 - protein, 14 aa, Homo sapiens
  CDR3 for beta chain variable domain of TCR clone 285746 (TRBV7-8, TRBJ2-3)
CASSLEAGTDTQYF

SEQ ID NO: 571493 - protein, 13 aa, Homo sapiens
  CDR3 for alpha chain variable domain of TCR clone 285747 (TRAV29/DV5, TRAJ29)
CAASAAGHTPLVF

SEQ ID NO: 571494 - protein, 14 aa, Homo sapiens
  CDR3 for beta chain variable domain of TCR clone 285747 (TRBV19, TRBJ2-3)
CASSAPRGTDTQYF

SEQ ID NO: 571495 - protein, 14 aa, Homo sapiens
  CDR3 for alpha chain variable domain of TCR clone 285748 (TRAV3, TRAJ9)
CAVRLNTGGFKTIF

SEQ ID NO: 571496 - protein, 15 aa, Homo sapiens
  CDR3 for beta chain variable domain of TCR clone 285748 (TRBV4-1, TRBJ2-5)
CASSQWDLYQETQYF

SEQ ID NO: 571497 - protein, 13 aa, Homo sapiens
  CDR3 for alpha chain variable domain of TCR clone 285749 (TRAV12-2, TRAJ50)
CAVIVTSYDKVIF

SEQ ID NO: 571498 - protein, 14 aa, Homo sapiens
  CDR3 for beta chain variable domain of TCR clone 285749 (TRBV9, TRBJ2-1)
CASSVEPRGKGQFF

SEQ ID NO: 571499 - protein, 17 aa, Homo sapiens
  CDR3 for alpha chain variable domain of TCR clone 285750 (TRAV8-6, TRAJ58)
CAVSSWVGKTSGSRLTF

SEQ ID NO: 571500 - protein, 14 aa, Homo sapiens
  CDR3 for beta chain variable domain of TCR clone 285750 (TRBV4-2, TRBJ2-1)
CASGLDRAYNEQLF

SEQ ID NO: 571501 - protein, 11 aa, Homo sapiens
  CDR3 for alpha chain variable domain of TCR clone 285751 (TRAV21, TRAJ41)
CAVSSGYALNF

SEQ ID NO: 571502 - protein, 13 aa, Homo sapiens
  CDR3 for beta chain variable domain of TCR clone 285751 (TRBV7-2, TRBJ2-5)
CASSQTSVETQYF

SEQ ID NO: 571503 - protein, 13 aa, Homo sapiens
  CDR3 for alpha chain variable domain of TCR clone 285752 (TRAV3, TRAJ20)
CAVRSRNDYKLSF

SEQ ID NO: 571504 - protein, 13 aa, Homo sapiens
  CDR3 for beta chain variable domain of TCR clone 285752 (TRBV6-1, TRBJ2-1)
CAGMDPTNNEQFF

SEQ ID NO: 571505 - protein, 15 aa, Homo sapiens
  CDR3 for alpha chain variable domain of TCR clone 285753 (TRAV12-1, TRAJ40)
CVVNMHFPGTYKYIF

SEQ ID NO: 571506 - protein, 18 aa, Homo sapiens
  CDR3 for beta chain variable domain of TCR clone 285753 (TRBV3-1, TRBJ1-2)
CASSQDVIGWNGDYGYTF

SEQ ID NO: 571507 - protein, 19 aa, Homo sapiens
  CDR3 for alpha chain variable domain of TCR clone 285754 (TRAV13-1, TRAJ52)
CAASSSPTAGGTSYGKLTF

SEQ ID NO: 571508 - protein, 15 aa, Homo sapiens
  CDR3 for beta chain variable domain of TCR clone 285754 (TRBV9, TRBJ1-6)
CASSTGGGVDSPLHF

SEQ ID NO: 571509 - protein, 11 aa, Homo sapiens
  CDR3 for alpha chain variable domain of TCR clone 285755 (TRAV3, TRAJ21)
CAVGNFNKFYF

SEQ ID NO: 571510 - protein, 17 aa, Homo sapiens
  CDR3 for beta chain variable domain of TCR clone 285755 (TRBV7-9, TRBJ2-7)
CASSWQGRWREAYEQYF

SEQ ID NO: 571511 - protein, 16 aa, Homo sapiens
  CDR3 for alpha chain variable domain of TCR clone 285756 (TRAV3, TRAJ10)
CAVRDRRAGGGNKLTF

SEQ ID NO: 571512 - protein, 15 aa, Homo sapiens
  CDR3 for beta chain variable domain of TCR clone 285756 (TRBV11-2, TRBJ1-6)
CASTGFGTAVSPLHF

SEQ ID NO: 571513 - protein, 14 aa, Homo sapiens
  CDR3 for alpha chain variable domain of TCR clone 285757 (TRAV12-3, TRAJ33)
CAMSVPGSNYQLIW

SEQ ID NO: 571514 - protein, 12 aa, Homo sapiens
  CDR3 for beta chain variable domain of TCR clone 285757 (TRBV7-8, TRBJ2-7)
CASSLGDREQYV

SEQ ID NO: 571515 - protein, 13 aa, Homo sapiens
  CDR3 for alpha chain variable domain of TCR clone 285758 (TRAV17, TRAJ11)
CATRNSGYSTLTF

SEQ ID NO: 571516 - protein, 15 aa, Homo sapiens
  CDR3 for beta chain variable domain of TCR clone 285758 (TRBV20-1, TRBJ2-7)
CSARDRVSGMDEQYF

SEQ ID NO: 571517 - protein, 10 aa, Homo sapiens
  CDR3 for alpha chain variable domain of TCR clone 285759 (TRAV12-2, TRAJ8)
CALGFQKLVF

SEQ ID NO: 571518 - protein, 16 aa, Homo sapiens
  CDR3 for beta chain variable domain of TCR clone 285759 (TRBV3-1, TRBJ2-5)
CASSHAIGQVEETQYF

SEQ ID NO: 571519 - protein, 15 aa, Homo sapiens
  CDR3 for alpha chain variable domain of TCR clone 285760 (TRAV2, TRAJ24)
CAVVRLKNSWGKLQF

SEQ ID NO: 571520 - protein, 16 aa, Homo sapiens
  CDR3 for beta chain variable domain of TCR clone 285760 (TRBV7-9, TRBJ2-3)
CASSPWREVGTDTQYF

SEQ ID NO: 571521 - protein, 15 aa, Homo sapiens
  CDR3 for alpha chain variable domain of TCR clone 285761 (TRAV25, TRAJ43)
CAVFMSFGAGTRLTL

SEQ ID NO: 571522 - protein, 13 aa, Homo sapiens
  CDR3 for beta chain variable domain of TCR clone 285761 (TRBV7-9, TRBJ1-2)
CASSLKQNYGYTF

SEQ ID NO: 571523 - protein, 13 aa, Homo sapiens
  CDR3 for alpha chain variable domain of TCR clone 285762 (TRAV2, TRAJ29)
CAVEPSGNTPLVF

SEQ ID NO: 571524 - protein, 16 aa, Homo sapiens
  CDR3 for beta chain variable domain of TCR clone 285762 (TRBV7-3, TRBJ2-2)
CASSLKRGTLSGELFF

SEQ ID NO: 571525 - protein, 14 aa, Homo sapiens
  CDR3 for alpha chain variable domain of TCR clone 285763 (TRAV4, TRAJ26)
CLVGPHNYGHNFVF

SEQ ID NO: 571526 - protein, 17 aa, Homo sapiens
  CDR3 for beta chain variable domain of TCR clone 285763 (TRBV24-1, TRBJ2-1)
CATSDVSTSGTYNEQFF

SEQ ID NO: 571527 - protein, 13 aa, Homo sapiens
  CDR3 for alpha chain variable domain of TCR clone 285764 (TRAV26-2, TRAJ43)
CILRAVNNNDMRF

SEQ ID NO: 571528 - protein, 14 aa, Homo sapiens
  CDR3 for beta chain variable domain of TCR clone 285764 (TRBV11-2, TRBJ2-7)
CASSLGAGAYEQYF

SEQ ID NO: 571529 - protein, 17 aa, Homo sapiens
  CDR3 for alpha chain variable domain of TCR clone 285765 (TRAV4, TRAJ13)
CLVGVQGSSGGYQKVTF

SEQ ID NO: 571530 - protein, 16 aa, Homo sapiens
  CDR3 for beta chain variable domain of TCR clone 285765 (TRBV28, TRBJ2-7)
CASSLFFGTGGPEQYF

SEQ ID NO: 571531 - protein, 14 aa, Homo sapiens
  CDR3 for alpha chain variable domain of TCR clone 285766 (TRAV2, TRAJ9)
CAVDDRSGGFKTIF

SEQ ID NO: 571532 - protein, 12 aa, Homo sapiens
  CDR3 for beta chain variable domain of TCR clone 285766 (TRBV6-1, TRBJ2-7)
CASSEPLYEQYF

SEQ ID NO: 571533 - protein, 18 aa, Homo sapiens
  CDR3 for alpha chain variable domain of TCR clone 285767 (TRAV14/DV4, TRAJ15)
CAMREFPPTGQAGTALIF

SEQ ID NO: 571534 - protein, 18 aa, Homo sapiens
  CDR3 for beta chain variable domain of TCR clone 285767 (TRBV4-1, TRBJ1-5)
CASSQDPRGQGLNQPQHF

SEQ ID NO: 571535 - protein, 14 aa, Homo sapiens
  CDR3 for alpha chain variable domain of TCR clone 285768 (TRAV12-2, TRAJ13)
CAVKKTGGHQKVTF

SEQ ID NO: 571536 - protein, 15 aa, Homo sapiens
  CDR3 for beta chain variable domain of TCR clone 285768 (TRBV27, TRBJ2-1)
CASSNGGGSSNERFF

SEQ ID NO: 571537 - protein, 17 aa, Homo sapiens
  CDR3 for alpha chain variable domain of TCR clone 285769 (TRAV13-1, TRAJ52)
CAAGRNAGGTSYGKLTF

SEQ ID NO: 571538 - protein, 12 aa, Homo sapiens
  CDR3 for beta chain variable domain of TCR clone 285769 (TRBV4-1, TRBJ2-1)
CASSAGGIEQFF

SEQ ID NO: 571539 - protein, 13 aa, Homo sapiens
  CDR3 for alpha chain variable domain of TCR clone 285770 (TRAV23/DV6, TRAJ15)
RAALPAGRNCSDL

SEQ ID NO: 571540 - protein, 14 aa, Homo sapiens
  CDR3 for beta chain variable domain of TCR clone 285770 (TRBV7-9, TRBJ1-2)
CASSRQGANYGYTS

SEQ ID NO: 571541 - protein, 13 aa, Homo sapiens
  CDR3 for alpha chain variable domain of TCR clone 285771 (TRAV17, TRAJ26)
CATVDNYGQNFVF

SEQ ID NO: 571542 - protein, 14 aa, Homo sapiens
  CDR3 for beta chain variable domain of TCR clone 285771 (TRBV7-9, TRBJ2-1)
CASSSMVGFGEQFF

SEQ ID NO: 571543 - protein, 13 aa, Homo sapiens
  CDR3 for alpha chain variable domain of TCR clone 285772 (TRAV8-4, TRAJ49)
CAVSDPGGNQFYF

SEQ ID NO: 571544 - protein, 14 aa, Homo sapiens
  CDR3 for beta chain variable domain of TCR clone 285772 (TRBV15, TRBJ2-3)
CATRSGTSTDTQYF

SEQ ID NO: 571545 - protein, 16 aa, Homo sapiens
  CDR3 for alpha chain variable domain of TCR clone 285773 (TRAV12-3, TRAJ53)
CAVSPGSGGSNYKLTF

SEQ ID NO: 571546 - protein, 11 aa, Homo sapiens
  CDR3 for beta chain variable domain of TCR clone 285773 (TRBV29-1, TRBJ2-5)
CSEDRTATQYF

SEQ ID NO: 571547 - protein, 14 aa, Homo sapiens
  CDR3 for alpha chain variable domain of TCR clone 285774 (TRAV38-1, TRAJ29)
CAFITPSGNTPLLF

SEQ ID NO: 571548 - protein, 14 aa, Homo sapiens
  CDR3 for beta chain variable domain of TCR clone 285774 (TRBV18, TRBJ2-7)
CASSPRGGAYEQYF

SEQ ID NO: 571549 - protein, 13 aa, Homo sapiens
  CDR3 for alpha chain variable domain of TCR clone 285775 (TRAV8-1, TRAJ13)
CAGSKGGYQKVTF

SEQ ID NO: 571550 - protein, 18 aa, Homo sapiens
  CDR3 for beta chain variable domain of TCR clone 285775 (TRBV11-2, TRBJ2-7)
CASSWRTVQTGQSYEQYF

SEQ ID NO: 571551 - protein, 15 aa, Homo sapiens
  CDR3 for alpha chain variable domain of TCR clone 285776 (TRAV25, TRAJ52)
CAGRPGGTSYGKLTF

SEQ ID NO: 571552 - protein, 13 aa, Homo sapiens
  CDR3 for beta chain variable domain of TCR clone 285776 (TRBV20-1, TRBJ2-1)
CSASTGGYNEQFF

SEQ ID NO: 571553 - protein, 12 aa, Homo sapiens
  CDR3 for alpha chain variable domain of TCR clone 285777 (TRAV12-3, TRAJ17)
CAMTLTGNKLTF

SEQ ID NO: 571554 - protein, 12 aa, Homo sapiens
  CDR3 for beta chain variable domain of TCR clone 285777 (TRBV7-3, TRBJ1-1)
CQQPGLVAEAFF

SEQ ID NO: 571555 - protein, 14 aa, Homo sapiens
  CDR3 for alpha chain variable domain of TCR clone 285778 (TRAV26-1, TRAJ54)
CIVRVPQGAQKLVF

SEQ ID NO: 571556 - protein, 15 aa, Homo sapiens
  CDR3 for beta chain variable domain of TCR clone 285778 (TRBV7-2, TRBJ2-2)
CASRRPGQNTGELFF

SEQ ID NO: 571557 - protein, 13 aa, Homo sapiens
  CDR3 for alpha chain variable domain of TCR clone 285779 (TRAV12-3, TRAJ33)
CAMSVNSNYQLIW

SEQ ID NO: 571558 - protein, 13 aa, Homo sapiens
  CDR3 for beta chain variable domain of TCR clone 285779 (TRBV27, TRBJ1-4)
CASSLMGDEKLFF

SEQ ID NO: 571559 - protein, 14 aa, Homo sapiens
  CDR3 for alpha chain variable domain of TCR clone 285780 (TRAV12-1, TRAJ12)
CVVTRVDSSYKLIF

SEQ ID NO: 571560 - protein, 13 aa, Homo sapiens
  CDR3 for beta chain variable domain of TCR clone 285780 (TRBV20-1, TRBJ1-1)
CSARGGGNTETFF

SEQ ID NO: 571561 - protein, 14 aa, Homo sapiens
  CDR3 for alpha chain variable domain of TCR clone 285781 (TRAV27, TRAJ36)
CAGPPKRGANSLFF

SEQ ID NO: 571562 - protein, 15 aa, Homo sapiens
  CDR3 for beta chain variable domain of TCR clone 285781 (TRBV18, TRBJ2-7)
CASSPASTPNYEQYF

SEQ ID NO: 571563 - protein, 11 aa, Homo sapiens
  CDR3 for alpha chain variable domain of TCR clone 285782 (TRAV23/DV6, TRAJ9)
CAASLSPPNTE

SEQ ID NO: 571564 - protein, 14 aa, Homo sapiens
  CDR3 for beta chain variable domain of TCR clone 285782 (TRBV11-2, TRBJ2-5)
CASSRTGGIETQYF

SEQ ID NO: 571565 - protein, 17 aa, Homo sapiens
  CDR3 for alpha chain variable domain of TCR clone 285783 (TRAV13-2, TRAJ42)
CAEKGKNYGGSQGNLIF

SEQ ID NO: 571566 - protein, 16 aa, Homo sapiens
  CDR3 for beta chain variable domain of TCR clone 285783 (TRBV7-9, TRBJ2-1)
YASSLGTGWDYNEQFF

SEQ ID NO: 571567 - protein, 15 aa, Homo sapiens
  CDR3 for alpha chain variable domain of TCR clone 285784 (TRAV12-1, TRAJ6)
CVVNSPSGGSYIPTF

SEQ ID NO: 571568 - protein, 17 aa, Homo sapiens
  CDR3 for beta chain variable domain of TCR clone 285784 (TRBV13, TRBJ2-3)
CASSLSRVAGGRNTQYF

SEQ ID NO: 571569 - protein, 15 aa, Homo sapiens
  CDR3 for alpha chain variable domain of TCR clone 285785 (TRAV21, TRAJ24)
FAARSSTDSWGKLQF

SEQ ID NO: 571570 - protein, 13 aa, Homo sapiens
  CDR3 for beta chain variable domain of TCR clone 285785 (TRBV10-3, TRBJ2-7)
CASKLAVNYEQYF

SEQ ID NO: 571571 - protein, 14 aa, Homo sapiens
  CDR3 for alpha chain variable domain of TCR clone 285786 (TRAV16, TRAJ54)
CALSDGQGAQKLVF

SEQ ID NO: 571572 - protein, 13 aa, Homo sapiens
  CDR3 for beta chain variable domain of TCR clone 285786 (TRBV20-1, TRBJ2-4)
CSAPTWAGNVQYF

SEQ ID NO: 571573 - protein, 15 aa, Homo sapiens
  CDR3 for alpha chain variable domain of TCR clone 285787 (TRAV17, TRAJ45)
CATAYSGGGADGLTF

SEQ ID NO: 571574 - protein, 14 aa, Homo sapiens
  CDR3 for beta chain variable domain of TCR clone 285787 (TRBV12-5, TRBJ2-5)
CASGSRTHQETQYF

SEQ ID NO: 571575 - protein, 12 aa, Homo sapiens
  CDR3 for alpha chain variable domain of TCR clone 285788 (TRAV1-2, TRAJ29)
CAVPSGNTPLVF

SEQ ID NO: 571576 - protein, 14 aa, Homo sapiens
  CDR3 for beta chain variable domain of TCR clone 285788 (TRBV18, TRBJ2-5)
CASSPGVAQETQYF

SEQ ID NO: 571577 - protein, 17 aa, Homo sapiens
  CDR3 for alpha chain variable domain of TCR clone 285789 (TRAV3, TRAJ6)
CAVRDGPRAGGSYLPTF

SEQ ID NO: 571578 - protein, 17 aa, Homo sapiens
  CDR3 for beta chain variable domain of TCR clone 285789 (TRBV20-1, TRBJ1-5)
CSASLSPGQGGNQPQHF

SEQ ID NO: 571579 - protein, 19 aa, Homo sapiens
  CDR3 for alpha chain variable domain of TCR clone 285790 (TRAV2, TRAJ20)
IFQVREADAAVYRDCKLSF

SEQ ID NO: 571580 - protein, 13 aa, Homo sapiens
  CDR3 for beta chain variable domain of TCR clone 285790 (TRBV15, TRBJ1-6)
CATSGGLNSPLLF

SEQ ID NO: 571581 - protein, 15 aa, Homo sapiens
  CDR3 for alpha chain variable domain of TCR clone 285791 (TRAV3, TRAJ5)
CAVRDRKTGRRALTF

SEQ ID NO: 571582 - protein, 12 aa, Homo sapiens
  CDR3 for beta chain variable domain of TCR clone 285791 (TRBV7-2, TRBJ1-5)
CASSLWSQPQHF

SEQ ID NO: 571583 - protein, 14 aa, Homo sapiens
  CDR3 for alpha chain variable domain of TCR clone 285792 (TRAV26-1, TRAJ45)
CIEVTGGGADGLTF

SEQ ID NO: 571584 - protein, 13 aa, Homo sapiens
  CDR3 for beta chain variable domain of TCR clone 285792 (TRBV7-3, TRBJ2-5)
CASSFRGGETQYF

SEQ ID NO: 571585 - protein, 13 aa, Homo sapiens
  CDR3 for alpha chain variable domain of TCR clone 285793 (TRAV8-3, TRAJ48)
CAVVPFGYEKLTF

SEQ ID NO: 571586 - protein, 15 aa, Homo sapiens
  CDR3 for beta chain variable domain of TCR clone 285793 (TRBV10-3, TRBJ2-3)
CAISLTSGGTDTQYF

SEQ ID NO: 571587 - protein, 12 aa, Homo sapiens
  CDR3 for alpha chain variable domain of TCR clone 285794 (TRAV3, TRAJ20)
CAVRDPDYTLSF

SEQ ID NO: 571588 - protein, 14 aa, Homo sapiens
  CDR3 for beta chain variable domain of TCR clone 285794 (TRBV4-2, TRBJ2-1)
CASGLDRAYNEQFF

SEQ ID NO: 571589 - protein, 15 aa, Homo sapiens
  CDR3 for alpha chain variable domain of TCR clone 285795 (TRAV8-2, TRAJ16)
CVVSDGFSDGQKLLF

SEQ ID NO: 571590 - protein, 14 aa, Homo sapiens
  CDR3 for beta chain variable domain of TCR clone 285795 (TRBV11-2, TRBJ2-7)
CASSSTGEGYEQYF

SEQ ID NO: 571591 - protein, 13 aa, Homo sapiens
  CDR3 for alpha chain variable domain of TCR clone 285796 (TRAV12-2, TRAJ42)
CAVKRGSQGTLIF

SEQ ID NO: 571592 - protein, 12 aa, Homo sapiens
  CDR3 for beta chain variable domain of TCR clone 285796 (TRBV7-8, TRBJ2-7)
CASSLGDREHYF

SEQ ID NO: 571593 - protein, 13 aa, Homo sapiens
  CDR3 for alpha chain variable domain of TCR clone 285797 (TRAV8-6, TRAJ49)
CAVITNTGNQFYF

SEQ ID NO: 571594 - protein, 13 aa, Homo sapiens
  CDR3 for beta chain variable domain of TCR clone 285797 (TRBV10-2, TRBJ2-3)
CASSESGDHTQYF

SEQ ID NO: 571595 - protein, 16 aa, Homo sapiens
  CDR3 for alpha chain variable domain of TCR clone 285798 (TRAV27, TRAJ13)
CAGAKSDSGGYQKVTF

SEQ ID NO: 571596 - protein, 17 aa, Homo sapiens
  CDR3 for beta chain variable domain of TCR clone 285798 (TRBV2, TRBJ1-4)
CASSKRELTQGEEKLFF

SEQ ID NO: 571597 - protein, 15 aa, Homo sapiens
  CDR3 for alpha chain variable domain of TCR clone 285799 (TRAV2, TRAJ9)
CAVEDRGTGGFKTIF

SEQ ID NO: 571598 - protein, 13 aa, Homo sapiens
  CDR3 for beta chain variable domain of TCR clone 285799 (TRBV20-1, TRBJ1-1)
CSPRGGGNTEAFF

SEQ ID NO: 571599 - protein, 11 aa, Homo sapiens
  CDR3 for alpha chain variable domain of TCR clone 285800 (TRAV17, TRAJ31)
CATSNNARLMF

SEQ ID NO: 571600 - protein, 15 aa, Homo sapiens
  CDR3 for beta chain variable domain of TCR clone 285800 (TRBV5-1, TRBJ2-1)
CASSLVANSYNEQFF

SEQ ID NO: 571601 - protein, 15 aa, Homo sapiens
  CDR3 for alpha chain variable domain of TCR clone 285801 (TRAV21, TRAJ37)
CAVRPTLSNTGKLIF

SEQ ID NO: 571602 - protein, 16 aa, Homo sapiens
  CDR3 for beta chain variable domain of TCR clone 285801 (TRBV24-1, TRBJ2-3)
CATSDRRQDLTDTQYL

SEQ ID NO: 571603 - protein, 12 aa, Homo sapiens
  CDR3 for alpha chain variable domain of TCR clone 285802 (TRAV13-2, TRAJ23)
CAERHRGGKLIF

SEQ ID NO: 571604 - protein, 12 aa, Homo sapiens
  CDR3 for beta chain variable domain of TCR clone 285802 (TRBV7-3, TRBJ2-1)
CASSFQSGPQFF

SEQ ID NO: 571605 - protein, 13 aa, Homo sapiens
  CDR3 for alpha chain variable domain of TCR clone 285803 (TRAV27, TRAJ49)
CAPSPYTGNQFYF

SEQ ID NO: 571606 - protein, 18 aa, Homo sapiens
  CDR3 for beta chain variable domain of TCR clone 285803 (TRBV7-3, TRBJ2-5)
CASSLGGAAQGRWETQYF

SEQ ID NO: 571607 - protein, 17 aa, Homo sapiens
  CDR3 for alpha chain variable domain of TCR clone 285804 (TRAV21, TRAJ52)
CAVVTNAGGTSYGKLTF

SEQ ID NO: 571608 - protein, 13 aa, Homo sapiens
  CDR3 for beta chain variable domain of TCR clone 285804 (TRBV5-1, TRBJ1-2)
CASSFSGNLGYTF

SEQ ID NO: 571609 - protein, 15 aa, Homo sapiens
  CDR3 for alpha chain variable domain of TCR clone 285805 (TRAV17, TRAJ54)
CAPEKLGQGAQKMVF

SEQ ID NO: 571610 - protein, 14 aa, Homo sapiens
  CDR3 for beta chain variable domain of TCR clone 285805 (TRBV7-3, TRBJ1-1)
CQQLRGQMNTEAFF

SEQ ID NO: 571611 - protein, 15 aa, Homo sapiens
  CDR3 for alpha chain variable domain of TCR clone 285806 (TRAV3, TRAJ12)
CAVRDIRDSSYKLIF

SEQ ID NO: 571612 - protein, 14 aa, Homo sapiens
  CDR3 for beta chain variable domain of TCR clone 285806 (TRBV19, TRBJ1-5)
CASSKMTGPQPQHF

SEQ ID NO: 571613 - protein, 14 aa, Homo sapiens
  CDR3 for alpha chain variable domain of TCR clone 285807 (TRAV8-6, TRAJ5)
CAVSVDTGRIALTF

SEQ ID NO: 571614 - protein, 11 aa, Homo sapiens
  CDR3 for beta chain variable domain of TCR clone 285807 (TRBV7-3, TRBJ2-5)
CASSLSETQYF

SEQ ID NO: 571615 - protein, 13 aa, Homo sapiens
  CDR3 for alpha chain variable domain of TCR clone 285808 (TRAV16, TRAJ20)
CALGPSNDYKLSF

SEQ ID NO: 571616 - protein, 15 aa, Homo sapiens
  CDR3 for beta chain variable domain of TCR clone 285808 (TRBV5-1, TRBJ2-2)
CASSRVGSDTVELFF

SEQ ID NO: 571617 - protein, 14 aa, Homo sapiens
  CDR3 for alpha chain variable domain of TCR clone 285809 (TRAV4, TRAJ20)
CLVGRRCNDYKLSF

SEQ ID NO: 571618 - protein, 18 aa, Homo sapiens
  CDR3 for beta chain variable domain of TCR clone 285809 (TRBV2, TRBJ2-5)
CASSGDPQGRGAQETQYF

SEQ ID NO: 571619 - protein, 12 aa, Homo sapiens
  CDR3 for alpha chain variable domain of TCR clone 285810 (TRAV29/DV5, TRAJ49)
CAATDTGNQFYF

SEQ ID NO: 571620 - protein, 15 aa, Homo sapiens
  CDR3 for beta chain variable domain of TCR clone 285810 (TRBV7-2, TRBJ2-1)
CASSLVAGRYNEQFF

SEQ ID NO: 571621 - protein, 14 aa, Homo sapiens
  CDR3 for alpha chain variable domain of TCR clone 285811 (TRAV21, TRAJ58)
CAVRRGRSGSRLTF

SEQ ID NO: 571622 - protein, 16 aa, Homo sapiens
  CDR3 for beta chain variable domain of TCR clone 285811 (TRBV24-1, TRBJ2-1)
CATSGVAGANYNEQFF

SEQ ID NO: 571623 - protein, 10 aa, Homo sapiens
  CDR3 for alpha chain variable domain of TCR clone 285812 (TRAV1-2, TRAJ20)
CVPNDYKLSF

SEQ ID NO: 571624 - protein, 14 aa, Homo sapiens
  CDR3 for beta chain variable domain of TCR clone 285812 (TRBV12-5, TRBJ2-5)
SASGSRTHQETQYF

SEQ ID NO: 571625 - protein, 16 aa, Homo sapiens
  CDR3 for alpha chain variable domain of TCR clone 285813 (TRAV3, TRAJ37)
CAVRGKGSGNTGKLIF

SEQ ID NO: 571626 - protein, 11 aa, Homo sapiens
  CDR3 for beta chain variable domain of TCR clone 285813 (TRBV19, TRBJ1-2)
CASIISSGYTF

SEQ ID NO: 571627 - protein, 14 aa, Homo sapiens
  CDR3 for alpha chain variable domain of TCR clone 285814 (TRAV29/DV5, TRAJ37)
CAASGSGNTGKLIF

SEQ ID NO: 571628 - protein, 17 aa, Homo sapiens
  CDR3 for beta chain variable domain of TCR clone 285814 (TRBV4-1, TRBJ2-7)
CASSPVLTSGGVVEQYF

SEQ ID NO: 571629 - protein, 12 aa, Homo sapiens
  CDR3 for alpha chain variable domain of TCR clone 285815 (TRAV1-1, TRAJ23)
CAVTNQGGKLIF

SEQ ID NO: 571630 - protein, 14 aa, Homo sapiens
  CDR3 for beta chain variable domain of TCR clone 285815 (TRBV18, TRBJ2-5)
CASSPGVSQETQYF

SEQ ID NO: 571631 - protein, 15 aa, Homo sapiens
  CDR3 for alpha chain variable domain of TCR clone 285816 (TRAV3, TRAJ5)
CAVSDRKTGRRAITF

SEQ ID NO: 571632 - protein, 15 aa, Homo sapiens
  CDR3 for beta chain variable domain of TCR clone 285816 (TRBV7-8, TRBJ2-1)
CASSLADSLYNEQFF

SEQ ID NO: 571633 - protein, 14 aa, Homo sapiens
  CDR3 for alpha chain variable domain of TCR clone 285817 (TRAV13-1, TRAJ44)
CAANATGTASKLTF

SEQ ID NO: 571634 - protein, 16 aa, Homo sapiens
  CDR3 for beta chain variable domain of TCR clone 285817 (TRBV7-9, TRBJ2-6)
CASSLKGPLRANVLTF

SEQ ID NO: 571635 - protein, 12 aa, Homo sapiens
  CDR3 for alpha chain variable domain of TCR clone 285818 (TRAV25, TRAJ5)
CAGGGGRRALTF

SEQ ID NO: 571636 - protein, 17 aa, Homo sapiens
  CDR3 for beta chain variable domain of TCR clone 285818 (TRBV13, TRBJ2-3)
CASSLSRVAGGRNTQYF

SEQ ID NO: 571637 - protein, 14 aa, Homo sapiens
  CDR3 for alpha chain variable domain of TCR clone 285819 (TRAV12-1, TRAJ17)
CVVNYKAAGNKLTF

SEQ ID NO: 571638 - protein, 12 aa, Homo sapiens
  CDR3 for beta chain variable domain of TCR clone 285819 (TRBV6-3, TRBJ2-7)
CASSLTPYEQYF

SEQ ID NO: 571639 - protein, 11 aa, Homo sapiens
  CDR3 for alpha chain variable domain of TCR clone 285820 (TRAV1-1, TRAJ23)
CAVRQGGKLIF

SEQ ID NO: 571640 - protein, 14 aa, Homo sapiens
  CDR3 for beta chain variable domain of TCR clone 285820 (TRBV7-2, TRBJ1-1)
CASSFLTGTTEAFF

SEQ ID NO: 571641 - protein, 14 aa, Homo sapiens
  CDR3 for alpha chain variable domain of TCR clone 285821 (TRAV12-2, TRAJ40)
CAVKIPSGTYKYIF

SEQ ID NO: 571642 - protein, 18 aa, Homo sapiens
  CDR3 for beta chain variable domain of TCR clone 285821 (TRBV28, TRBJ2-5)
CASSFPNFGTGGGETQYF

SEQ ID NO: 571643 - protein, 15 aa, Homo sapiens
  CDR3 for alpha chain variable domain of TCR clone 285822 (TRAV26-1, TRAJ29)
CIVRVEGSGNTPLVF

SEQ ID NO: 571644 - protein, 16 aa, Homo sapiens
  CDR3 for beta chain variable domain of TCR clone 285822 (TRBV4-2, TRBJ2-5)
CASSQELVGSQETQYF

SEQ ID NO: 571645 - protein, 12 aa, Homo sapiens
  CDR3 for alpha chain variable domain of TCR clone 285823 (TRAV21, TRAJ31)
CVLAGNNARFMF

SEQ ID NO: 571646 - protein, 16 aa, Homo sapiens
  CDR3 for beta chain variable domain of TCR clone 285823 (TRBV27, TRBJ2-5)
CASSFGPGGTKETQYF

SEQ ID NO: 571647 - protein, 12 aa, Homo sapiens
  CDR3 for alpha chain variable domain of TCR clone 285824 (TRAV35, TRAJ12)
CAGMDSSYKLIF

SEQ ID NO: 571648 - protein, 14 aa, Homo sapiens
  CDR3 for beta chain variable domain of TCR clone 285824 (TRBV28, TRBJ2-5)
CASSLYRGTETKYF

SEQ ID NO: 571649 - protein, 10 aa, Homo sapiens
  CDR3 for alpha chain variable domain of TCR clone 285825 (TRAV23/DV6, TRAJ57)
CAASSTLSQG

SEQ ID NO: 571650 - protein, 16 aa, Homo sapiens
  CDR3 for beta chain variable domain of TCR clone 285825 (TRBV25-1, TRBJ2-7)
CASSELTGGGIYEQYF

SEQ ID NO: 571651 - protein, 14 aa, Homo sapiens
  CDR3 for alpha chain variable domain of TCR clone 285826 (TRAV9-2, TRAJ39)
CALYIYNAGNMLTF

SEQ ID NO: 571652 - protein, 15 aa, Homo sapiens
  CDR3 for beta chain variable domain of TCR clone 285826 (TRBV28, TRBJ1-3)
CASSMGWASGDTIYF

SEQ ID NO: 571653 - protein, 12 aa, Homo sapiens
  CDR3 for alpha chain variable domain of TCR clone 285827 (TRAV8-6, TRAJ33)
CAVTDSNYPLIW

SEQ ID NO: 571654 - protein, 15 aa, Homo sapiens
  CDR3 for beta chain variable domain of TCR clone 285827 (TRBV4-3, TRBJ1-2)
CASSRGQGRNYGYTF

SEQ ID NO: 571655 - protein, 13 aa, Homo sapiens
  CDR3 for alpha chain variable domain of TCR clone 285828 (TRAV8-4, TRAJ48)
CAVSDPGNEKLTF

SEQ ID NO: 571656 - protein, 12 aa, Homo sapiens
  CDR3 for beta chain variable domain of TCR clone 285828 (TRBV7-8, TRBJ2-7)
CASSLGDREQYF

SEQ ID NO: 571657 - protein, 14 aa, Homo sapiens
  CDR3 for alpha chain variable domain of TCR clone 285829 (TRAV12-2, TRAJ33)
CAVKRARSNYPLIW

SEQ ID NO: 571658 - protein, 12 aa, Homo sapiens
  CDR3 for beta chain variable domain of TCR clone 285829 (TRBV24-1, TRBJ2-3)
CATSDSADTQYF

SEQ ID NO: 571659 - protein, 17 aa, Homo sapiens
  CDR3 for alpha chain variable domain of TCR clone 285830 (TRAV3, TRAJ42)
CAVRDREYGGSQGNLIF

SEQ ID NO: 571660 - protein, 16 aa, Homo sapiens
  CDR3 for beta chain variable domain of TCR clone 285830 (TRBV29-1, TRBJ2-7)
CSVEVVGTSGSYEQYF

SEQ ID NO: 571661 - protein, 15 aa, Homo sapiens
  CDR3 for alpha chain variable domain of TCR clone 285831 (TRAV21, TRAJ38)
CAVRQDAGNNRKLIW

SEQ ID NO: 571662 - protein, 11 aa, Homo sapiens
  CDR3 for beta chain variable domain of TCR clone 285831 (TRBV12-4, TRBJ2-3)
CASTDTDTQYF

SEQ ID NO: 571663 - protein, 16 aa, Homo sapiens
  CDR3 for alpha chain variable domain of TCR clone 285832 (TRAV1-2, TRAJ10)
CAVRGGLTGGGNKLTL

SEQ ID NO: 571664 - protein, 12 aa, Homo sapiens
  CDR3 for beta chain variable domain of TCR clone 285832 (TRBV7-8, TRBJ2-7)
CASSLGDREQYF

SEQ ID NO: 571665 - protein, 12 aa, Homo sapiens
  CDR3 for alpha chain variable domain of TCR clone 285833 (TRAV12-1, TRAJ20)
CVANPDDYKLSF

SEQ ID NO: 571666 - protein, 12 aa, Homo sapiens
  CDR3 for beta chain variable domain of TCR clone 285833 (TRBV11-2, TRBJ2-2)
CASSLGGGELFF

SEQ ID NO: 571667 - protein, 12 aa, Homo sapiens
  CDR3 for alpha chain variable domain of TCR clone 285834 (TRAV21, TRAJ31)
CVLAGNNARLML

SEQ ID NO: 571668 - protein, 16 aa, Homo sapiens
  CDR3 for beta chain variable domain of TCR clone 285834 (TRBV27, TRBJ2-5)
CASSFGPGGTKGTQYF

SEQ ID NO: 571669 - protein, 12 aa, Homo sapiens
  CDR3 for alpha chain variable domain of TCR clone 285835 (TRAV12-2, TRAJ8)
CAVNTGFQRLVF

SEQ ID NO: 571670 - protein, 14 aa, Homo sapiens
  CDR3 for beta chain variable domain of TCR clone 285835 (TRBV20-1, TRBJ1-1)
CSAQTRIGGTEAFF

SEQ ID NO: 571671 - protein, 16 aa, Homo sapiens
  CDR3 for alpha chain variable domain of TCR clone 285836 (TRAV30, TRAJ24)
CGTEIVDADSWGKFQF

SEQ ID NO: 571672 - protein, 13 aa, Homo sapiens
  CDR3 for beta chain variable domain of TCR clone 285836 (TRBV28, TRBJ2-7)
CASAPGLAGEQYF

SEQ ID NO: 571673 - protein, 12 aa, Homo sapiens
  CDR3 for alpha chain variable domain of TCR clone 285837 (TRAV21, TRAJ49)
CAVRNTGNQFYF

SEQ ID NO: 571674 - protein, 14 aa, Homo sapiens
  CDR3 for beta chain variable domain of TCR clone 285837 (TRBV4-2, TRBJ2-3)
CASSQERGTDTQYF

SEQ ID NO: 571675 - protein, 16 aa, Homo sapiens
  CDR3 for alpha chain variable domain of TCR clone 285838 (TRAV4, TRAJ22)
CLVGDLYSGSARQLTF

SEQ ID NO: 571676 - protein, 17 aa, Homo sapiens
  CDR3 for beta chain variable domain of TCR clone 285838 (TRBV4-3, TRBJ2-2)
CASSQDTSARSPGELFF

SEQ ID NO: 571677 - protein, 12 aa, Homo sapiens
  CDR3 for alpha chain variable domain of TCR clone 285839 (TRAV27, TRAJ35)
CAGADFGNVLHC

SEQ ID NO: 571678 - protein, 15 aa, Homo sapiens
  CDR3 for beta chain variable domain of TCR clone 285839 (TRBV11-2, TRBJ1-4)
CASSFRGLYNEKLFF

SEQ ID NO: 571679 - protein, 12 aa, Homo sapiens
  CDR3 for alpha chain variable domain of TCR clone 285840 (TRAV12-3, TRAJ17)
CAMTLTGKKLTF

SEQ ID NO: 571680 - protein, 12 aa, Homo sapiens
  CDR3 for beta chain variable domain of TCR clone 285840 (TRBV11-2, TRBJ2-7)
CASSLPTYEQYF

SEQ ID NO: 571681 - protein, 12 aa, Homo sapiens
  CDR3 for alpha chain variable domain of TCR clone 285841 (TRAV1-1, TRAJ39)
CAVPVVGNMLTF

SEQ ID NO: 571682 - protein, 13 aa, Homo sapiens
  CDR3 for beta chain variable domain of TCR clone 285841 (TRBV27, TRBJ1-4)
CASSLMGDEKLFF

SEQ ID NO: 571683 - protein, 15 aa, Homo sapiens
  CDR3 for alpha chain variable domain of TCR clone 285842 (TRAV8-6, TRAJ6)
CAASFTSGGSYIPTF

SEQ ID NO: 571684 - protein, 13 aa, Homo sapiens
  CDR3 for beta chain variable domain of TCR clone 285842 (TRBV29-1, TRBJ2-1)
CSVEGGRVNEQFF

SEQ ID NO: 571685 - protein, 14 aa, Homo sapiens
  CDR3 for alpha chain variable domain of TCR clone 285843 (TRAV26-1, TRAJ39)
CIVRGSRAGNMLTF

SEQ ID NO: 571686 - protein, 16 aa, Homo sapiens
  CDR3 for beta chain variable domain of TCR clone 285843 (TRBV7-2, TRBJ1-6)
CASSSFESSYNSPLHF

SEQ ID NO: 571687 - protein, 14 aa, Homo sapiens
  CDR3 for alpha chain variable domain of TCR clone 285844 (TRAV8-4, TRAJ22)
CAVSPGGSARQLTF

SEQ ID NO: 571688 - protein, 13 aa, Homo sapiens
  CDR3 for beta chain variable domain of TCR clone 285844 (TRBV7-9, TRBJ2-7)
CASSFAGAYEQYF

SEQ ID NO: 571689 - protein, 14 aa, Homo sapiens
  CDR3 for alpha chain variable domain of TCR clone 285845 (TRAV8-6, TRAJ5)
CAVSVDTGRRALTL

SEQ ID NO: 571690 - protein, 11 aa, Homo sapiens
  CDR3 for beta chain variable domain of TCR clone 285845 (TRBV7-3, TRBJ2-5)
CASSLSETQYF

SEQ ID NO: 571691 - protein, 15 aa, Homo sapiens
  CDR3 for alpha chain variable domain of TCR clone 285846 (TRAV8-2, TRAJ40)
CVVLGTTSGPYKYIF

SEQ ID NO: 571692 - protein, 14 aa, Homo sapiens
  CDR3 for beta chain variable domain of TCR clone 285846 (TRBV19, TRBJ2-1)
CASPTFVLSGEQFF

SEQ ID NO: 571693 - protein, 12 aa, Homo sapiens
  CDR3 for alpha chain variable domain of TCR clone 285847 (TRAV8-3, TRAJ20)
CAVGANDYKLSF

SEQ ID NO: 571694 - protein, 12 aa, Homo sapiens
  CDR3 for beta chain variable domain of TCR clone 285847 (TRBV7-9, TRBJ1-5)
CASSPQGQPQHF

SEQ ID NO: 571695 - protein, 15 aa, Homo sapiens
  CDR3 for alpha chain variable domain of TCR clone 285848 (TRAV8-2, TRAJ16)
CVVSDGFSDGQKLLF

SEQ ID NO: 571696 - protein, 15 aa, Homo sapiens
  CDR3 for beta chain variable domain of TCR clone 285848 (TRBV20-1, TRBJ2-7)
CSARDRVSGMDEQYF

SEQ ID NO: 571697 - protein, 12 aa, Homo sapiens
  CDR3 for alpha chain variable domain of TCR clone 285849 (TRAV16, TRAJ56)
CAPTGANSKLTF

SEQ ID NO: 571698 - protein, 16 aa, Homo sapiens
  CDR3 for beta chain variable domain of TCR clone 285849 (TRBV7-9, TRBJ1-2)
CASSLGSSSGEDGYTF

SEQ ID NO: 571699 - protein, 18 aa, Homo sapiens
  CDR3 for alpha chain variable domain of TCR clone 285850 (TRAV21, TRAJ52)
CAVRPSPAGGTSYGKLTF

SEQ ID NO: 571700 - protein, 16 aa, Homo sapiens
  CDR3 for beta chain variable domain of TCR clone 285850 (TRBV7-3, TRBJ2-1)
CASSLSSGGGAKEQFF

SEQ ID NO: 571701 - protein, 13 aa, Homo sapiens
  CDR3 for alpha chain variable domain of TCR clone 285851 (TRAV27, TRAJ49)
CAPRPYTGNQFYF

SEQ ID NO: 571702 - protein, 18 aa, Homo sapiens
  CDR3 for beta chain variable domain of TCR clone 285851 (TRBV7-3, TRBJ2-5)
CVSSLGGAAQGRWETQYF

SEQ ID NO: 571703 - protein, 12 aa, Homo sapiens
  CDR3 for alpha chain variable domain of TCR clone 285852 (TRAV1-1, TRAJ24)
CAVRGSWGKFQF

SEQ ID NO: 571704 - protein, 16 aa, Homo sapiens
  CDR3 for beta chain variable domain of TCR clone 285852 (TRBV27, TRBJ2-2)
CASSVRGLVRTGELFF

SEQ ID NO: 571705 - protein, 13 aa, Homo sapiens
  CDR3 for alpha chain variable domain of TCR clone 285853 (TRAV2, TRAJ40)
CAVVTSGTYKYIF

SEQ ID NO: 571706 - protein, 16 aa, Homo sapiens
  CDR3 for beta chain variable domain of TCR clone 285853 (TRBV19, TRBJ2-1)
CASSKAGPSSYKEQFF

SEQ ID NO: 571707 - protein, 21 aa, Homo sapiens
  CDR3 for alpha chain variable domain of TCR clone 285854 (TRAV29/DV5, TRAJ52)
CSVLLCSKREAGGTSYGKLTF

SEQ ID NO: 571708 - protein, 13 aa, Homo sapiens
  CDR3 for beta chain variable domain of TCR clone 285854 (TRBV27, TRBJ1-4)
CASSLVGDEKLFF

SEQ ID NO: 571709 - protein, 13 aa, Homo sapiens
  CDR3 for alpha chain variable domain of TCR clone 285855 (TRAV12-2, TRAJ18)
CAVRGSTLGRLYF

SEQ ID NO: 571710 - protein, 13 aa, Homo sapiens
  CDR3 for beta chain variable domain of TCR clone 285855 (TRBV7-8, TRBJ2-2)
CASSHLFPGPTII

SEQ ID NO: 571711 - protein, 16 aa, Homo sapiens
  CDR3 for alpha chain variable domain of TCR clone 285856 (TRAV19, TRAJ20)
CALSGWRVPNEYKLSF

SEQ ID NO: 571712 - protein, 16 aa, Homo sapiens
  CDR3 for beta chain variable domain of TCR clone 285856 (TRBV7-9, TRBJ1-2)
CASSLGFSSGEDGYTF

SEQ ID NO: 571713 - protein, 12 aa, Homo sapiens
  CDR3 for alpha chain variable domain of TCR clone 285857 (TRAV35, TRAJ49)
CAGWNTGDQFYF

SEQ ID NO: 571714 - protein, 16 aa, Homo sapiens
  CDR3 for beta chain variable domain of TCR clone 285857 (TRBV5-1, TRBJ2-2)
CASSLWDTTNTGELFF

SEQ ID NO: 571715 - protein, 14 aa, Homo sapiens
  CDR3 for alpha chain variable domain of TCR clone 285858 (TRAV8-3, TRAJ16)
CAVDRFSDGQKLLF

SEQ ID NO: 571716 - protein, 14 aa, Homo sapiens
  CDR3 for beta chain variable domain of TCR clone 285858 (TRBV19, TRBJ2-1)
CASSKDRGQDEQFF

SEQ ID NO: 571717 - protein, 12 aa, Homo sapiens
  CDR3 for alpha chain variable domain of TCR clone 285859 (TRAV13-2, TRAJ23)
CAERHRGGKLIF

SEQ ID NO: 571718 - protein, 15 aa, Homo sapiens
  CDR3 for beta chain variable domain of TCR clone 285859 (TRBV7-3, TRBJ2-1)
RASSNGGGSSNEQFF

SEQ ID NO: 571719 - protein, 15 aa, Homo sapiens
  CDR3 for alpha chain variable domain of TCR clone 285860 (TRAV2, TRAJ9)
CAVEDRGTGGFKTNF

SEQ ID NO: 571720 - protein, 16 aa, Homo sapiens
  CDR3 for beta chain variable domain of TCR clone 285860 (TRBV24-1, TRBJ2-3)
CATSDPGAGATDTQYF

SEQ ID NO: 571721 - protein, 13 aa, Homo sapiens
  CDR3 for alpha chain variable domain of TCR clone 285861 (TRAV8-6, TRAJ49)
CAVITNTGNQFYF

SEQ ID NO: 571722 - protein, 16 aa, Homo sapiens
  CDR3 for beta chain variable domain of TCR clone 285861 (TRBV5-1, TRBJ2-7)
CASSRGESFTSSTSGR

SEQ ID NO: 571723 - protein, 11 aa, Homo sapiens
  CDR3 for alpha chain variable domain of TCR clone 285862 (TRAV12-3, TRAJ43)
CAMSVSNDMRF

SEQ ID NO: 571724 - protein, 16 aa, Homo sapiens
  CDR3 for beta chain variable domain of TCR clone 285862 (TRBV20-1, TRBJ2-1)
CSARDSRGAVYNEQFF

SEQ ID NO: 571725 - protein, 10 aa, Homo sapiens
  CDR3 for alpha chain variable domain of TCR clone 285863 (TRAV30, TRAJ48)
CGIGNEKLAF

SEQ ID NO: 571726 - protein, 15 aa, Homo sapiens
  CDR3 for beta chain variable domain of TCR clone 285863 (TRBV7-9, TRBJ1-6)
CASSSPGRGNSPLHF

SEQ ID NO: 571727 - protein, 16 aa, Homo sapiens
  CDR3 for alpha chain variable domain of TCR clone 285864 (TRAV23/DV6, )
CAEHDIQNPDPAVYQL

SEQ ID NO: 571728 - protein, 19 aa, Homo sapiens
  CDR3 for beta chain variable domain of TCR clone 285864 (TRBV7-2, TRBJ1-1)
CASSFWAKRAGNPKTEAFF

SEQ ID NO: 571729 - protein, 17 aa, Homo sapiens
  CDR3 for alpha chain variable domain of TCR clone 285865 (TRAV21, TRAJ52)
CCEASPAGGTSYGKLTF

SEQ ID NO: 571730 - protein, 17 aa, Homo sapiens
  CDR3 for beta chain variable domain of TCR clone 285865 (TRBV13, TRBJ2-3)
CASSPSRVAGGRNTQYF

SEQ ID NO: 571731 - protein, 12 aa, Homo sapiens
  CDR3 for alpha chain variable domain of TCR clone 285866 (TRAV2, TRAJ10)
CASTGGGNKLTF

SEQ ID NO: 571732 - protein, 15 aa, Homo sapiens
  CDR3 for beta chain variable domain of TCR clone 285866 (TRBV28, TRBJ1-3)
CASSMGWASGNTMYF

SEQ ID NO: 571733 - protein, 19 aa, Homo sapiens
  CDR3 for alpha chain variable domain of TCR clone 285867 (TRAV13-1, TRAJ52)
CAASPYQNAGGTSYGTLTF

SEQ ID NO: 571734 - protein, 13 aa, Homo sapiens
  CDR3 for beta chain variable domain of TCR clone 285867 (TRBV29-1, TRBJ2-5)
CSATTSGGETQYF

SEQ ID NO: 571735 - protein, 16 aa, Homo sapiens
  CDR3 for alpha chain variable domain of TCR clone 285868 (TRAV16, TRAJ4)
CALSRMFSGGYNKLIF

SEQ ID NO: 571736 - protein, 14 aa, Homo sapiens
  CDR3 for beta chain variable domain of TCR clone 285868 (TRBV29-1, TRBJ1-4)
CSVSGRQGGEKLFF

SEQ ID NO: 571737 - protein, 12 aa, Homo sapiens
  CDR3 for alpha chain variable domain of TCR clone 285869 (TRAV8-3, TRAJ40)
CAVTSGTYKYIF

SEQ ID NO: 571738 - protein, 14 aa, Homo sapiens
  CDR3 for beta chain variable domain of TCR clone 285869 (TRBV12-4, TRBJ2-3)
CASSGQDSTDTQYF

SEQ ID NO: 571739 - protein, 15 aa, Homo sapiens
  CDR3 for alpha chain variable domain of TCR clone 285870 (TRAV21, TRAJ53)
CATLNSGGSNYKLTF

SEQ ID NO: 571740 - protein, 15 aa, Homo sapiens
  CDR3 for beta chain variable domain of TCR clone 285870 (TRBV20-1, TRBJ2-7)
CSARARVSGMDEQYF

SEQ ID NO: 571741 - protein, 13 aa, Homo sapiens
  CDR3 for alpha chain variable domain of TCR clone 285871 (TRAV4, TRAJ28)
CLFICGWELPTHF

SEQ ID NO: 571742 - protein, 14 aa, Homo sapiens
  CDR3 for beta chain variable domain of TCR clone 285871 (TRBV7-9, TRBJ2-5)
CASSLDTAQETQYF

SEQ ID NO: 571743 - protein, 17 aa, Homo sapiens
  CDR3 for alpha chain variable domain of TCR clone 285872 (TRAV2, TRAJ32)
CCLLLWGGGGSTNKLIF

SEQ ID NO: 571744 - protein, 13 aa, Homo sapiens
  CDR3 for beta chain variable domain of TCR clone 285872 (TRBV20-1, TRBJ1-1)
CSARGGGNTEAFF

SEQ ID NO: 571745 - protein, 13 aa, Homo sapiens
  CDR3 for alpha chain variable domain of TCR clone 285873 (TRAV13-1, TRAJ5)
CAAEHTGRRALTF

SEQ ID NO: 571746 - protein, 15 aa, Homo sapiens
  CDR3 for beta chain variable domain of TCR clone 285873 (TRBV28, TRBJ2-1)
CASSLDTSSYNEQFF

SEQ ID NO: 571747 - protein, 11 aa, Homo sapiens
  CDR3 for alpha chain variable domain of TCR clone 285874 (TRAV3, TRAJ49)
CAPITGNQLYF

SEQ ID NO: 571748 - protein, 16 aa, Homo sapiens
  CDR3 for beta chain variable domain of TCR clone 285874 (TRBV5-1, TRBJ2-3)
CASSVFPMSSTDTQYF

SEQ ID NO: 571749 - protein, 17 aa, Homo sapiens
  CDR3 for alpha chain variable domain of TCR clone 285875 (TRAV3, TRAJ6)
CAVRDGPRAGGSYIPPF

SEQ ID NO: 571750 - protein, 14 aa, Homo sapiens
  CDR3 for beta chain variable domain of TCR clone 285875 (TRBV7-2, TRBJ2-7)
CASSPKTSFYEQYC

SEQ ID NO: 571751 - protein, 13 aa, Homo sapiens
  CDR3 for alpha chain variable domain of TCR clone 285876 (TRAV41, TRAJ48)
SVPVNFGNEKLTF

SEQ ID NO: 571752 - protein, 14 aa, Homo sapiens
  CDR3 for beta chain variable domain of TCR clone 285876 (TRBV18, TRBJ2-5)
CASSPGVSQETQYF

SEQ ID NO: 571753 - protein, 12 aa, Homo sapiens
  CDR3 for alpha chain variable domain of TCR clone 285877 (TRAV21, TRAJ11)
CAATSGYSTLTF

SEQ ID NO: 571754 - protein, 14 aa, Homo sapiens
  CDR3 for beta chain variable domain of TCR clone 285877 (TRBV27, TRBJ2-7)
CASSLAGLSYEQYF

SEQ ID NO: 571755 - protein, 12 aa, Homo sapiens
  CDR3 for alpha chain variable domain of TCR clone 285878 (TRAV8-1, TRAJ26)
CAVNNYGQNFVV

SEQ ID NO: 571756 - protein, 15 aa, Homo sapiens
  CDR3 for beta chain variable domain of TCR clone 285878 (TRBV20-1, TRBJ1-1)
CSASWDRFLNTEAFF

SEQ ID NO: 571757 - protein, 15 aa, Homo sapiens
  CDR3 for alpha chain variable domain of TCR clone 285879 (TRAV29/DV5, TRAJ40)
CAASAQGAGTYKYIF

SEQ ID NO: 571758 - protein, 15 aa, Homo sapiens
  CDR3 for beta chain variable domain of TCR clone 285879 (TRBV7-2, TRBJ2-3)
CASSLAGAFIGTQYF

SEQ ID NO: 571759 - protein, 14 aa, Homo sapiens
  CDR3 for alpha chain variable domain of TCR clone 285880 (TRAV1-2, TRAJ6)
CAVRSSGGSYILTF

SEQ ID NO: 571760 - protein, 18 aa, Homo sapiens
  CDR3 for beta chain variable domain of TCR clone 285880 (TRBV20-1, TRBJ2-3)
CSASGLAGGPGTTDTQYF

SEQ ID NO: 571761 - protein, 14 aa, Homo sapiens
  CDR3 for alpha chain variable domain of TCR clone 285881 (TRAV1-2, TRAJ16)
CAVNRFSDGQKPLF

SEQ ID NO: 571762 - protein, 15 aa, Homo sapiens
  CDR3 for beta chain variable domain of TCR clone 285881 (TRBV20-1, TRBJ2-7)
CSARKGLAESYEQYF

SEQ ID NO: 571763 - protein, 13 aa, Homo sapiens
  CDR3 for alpha chain variable domain of TCR clone 285882 (TRAV21, TRAJ37)
CAVNSGNTGKLIF

SEQ ID NO: 571764 - protein, 13 aa, Homo sapiens
  CDR3 for beta chain variable domain of TCR clone 285882 (TRBV7-6, TRBJ2-3)
CASSLRSDNTQYF

SEQ ID NO: 571765 - protein, 14 aa, Homo sapiens
  CDR3 for alpha chain variable domain of TCR clone 285883 (TRAV13-2, TRAJ9)
CAENLETGGFKTIF

SEQ ID NO: 571766 - protein, 16 aa, Homo sapiens
  CDR3 for beta chain variable domain of TCR clone 285883 (TRBV12-5, TRBJ2-5)
CASGPRTSGNQETQYF

SEQ ID NO: 571767 - protein, 13 aa, Homo sapiens
  CDR3 for alpha chain variable domain of TCR clone 285884 (TRAV12-3, TRAJ33)
CAMSVNSNYQLIW

SEQ ID NO: 571768 - protein, 13 aa, Homo sapiens
  CDR3 for beta chain variable domain of TCR clone 285884 (TRBV5-1, TRBJ1-1)
CASSADWDAEAFF

SEQ ID NO: 571769 - protein, 16 aa, Homo sapiens
  CDR3 for alpha chain variable domain of TCR clone 285885 (TRAV16, TRAJ52)
CALSAAGGTSYGKLTF

SEQ ID NO: 571770 - protein, 18 aa, Homo sapiens
  CDR3 for beta chain variable domain of TCR clone 285885 (TRBV7-6, TRBJ2-1)
CASSPRTSGMSSYNEQFF

SEQ ID NO: 571771 - protein, 13 aa, Homo sapiens
  CDR3 for alpha chain variable domain of TCR clone 285886 (TRAV8-2, TRAJ29)
CALPGAGNTPLVF

SEQ ID NO: 571772 - protein, 13 aa, Homo sapiens
  CDR3 for beta chain variable domain of TCR clone 285886 (TRBV7-7, TRBJ2-5)
CASSRSGQETQYF

SEQ ID NO: 571773 - protein, 12 aa, Homo sapiens
  CDR3 for alpha chain variable domain of TCR clone 285887 (TRAV36/DV7, TRAJ54)
CAVVRGAQKLVF

SEQ ID NO: 571774 - protein, 20 aa, Homo sapiens
  CDR3 for beta chain variable domain of TCR clone 285887 (TRBV28, TRBJ2-1)
CASTPIGRSPGLAGGNEQFF

SEQ ID NO: 571775 - protein, 11 aa, Homo sapiens
  CDR3 for alpha chain variable domain of TCR clone 285888 (TRAV13-1, TRAJ20)
CAASNDYELSF

SEQ ID NO: 571776 - protein, 16 aa, Homo sapiens
  CDR3 for beta chain variable domain of TCR clone 285888 (TRBV27, TRBJ2-1)
CASSLSKGFGLDEQFF

SEQ ID NO: 571777 - protein, 16 aa, Homo sapiens
  CDR3 for alpha chain variable domain of TCR clone 285889 (TRAV30, TRAJ24)
CGTEIVDADSWGKFQF

SEQ ID NO: 571778 - protein, 13 aa, Homo sapiens
  CDR3 for beta chain variable domain of TCR clone 285889 (TRBV9, TRBJ1-1)
CASRPTGSTEAFF

SEQ ID NO: 571779 - protein, 15 aa, Homo sapiens
  CDR3 for alpha chain variable domain of TCR clone 285890 (TRAV3, TRAJ47)
CAVRDIGEYGNKLVF

SEQ ID NO: 571780 - protein, 11 aa, Homo sapiens
  CDR3 for beta chain variable domain of TCR clone 285890 (TRBV11-3, TRBJ2-2)
CASSSGGELFF

SEQ ID NO: 571781 - protein, 12 aa, Homo sapiens
  CDR3 for alpha chain variable domain of TCR clone 285891 (TRAV12-3, TRAJ17)
YAMTLTGNQLTF

SEQ ID NO: 571782 - protein, 15 aa, Homo sapiens
  CDR3 for beta chain variable domain of TCR clone 285891 (TRBV20-1, TRBJ2-7)
CSARDRVSGMDEQYF

SEQ ID NO: 571783 - protein, 12 aa, Homo sapiens
  CDR3 for alpha chain variable domain of TCR clone 285892 (TRAV16, TRAJ13)
CITLRGYQKVTF

SEQ ID NO: 571784 - protein, 17 aa, Homo sapiens
  CDR3 for beta chain variable domain of TCR clone 285892 (TRBV28, TRBJ2-5)
CASSRQGGLAGAETHYF

SEQ ID NO: 571785 - protein, 14 aa, Homo sapiens
  CDR3 for alpha chain variable domain of TCR clone 285893 (TRAV13-1, TRAJ35)
CAASKGGFGNVRHC

SEQ ID NO: 571786 - protein, 13 aa, Homo sapiens
  CDR3 for beta chain variable domain of TCR clone 285893 (TRBV7-3, TRBJ1-1)
CAGSQDWGAEAFF

SEQ ID NO: 571787 - protein, 14 aa, Homo sapiens
  CDR3 for alpha chain variable domain of TCR clone 285894 (TRAV2, TRAJ9)
CAVEVRSGGFKTIF

SEQ ID NO: 571788 - protein, 15 aa, Homo sapiens
  CDR3 for beta chain variable domain of TCR clone 285894 (TRBV20-1, TRBJ2-7)
CSARDRVSGMDEQYF

SEQ ID NO: 571789 - protein, 14 aa, Homo sapiens
  CDR3 for alpha chain variable domain of TCR clone 285895 (TRAV1-2, TRAJ16)
CAVNRFSDGLKLLF

SEQ ID NO: 571790 - protein, 12 aa, Homo sapiens
  CDR3 for beta chain variable domain of TCR clone 285895 (TRBV5-1, TRBJ2-7)
CASSSTTYEQYF

SEQ ID NO: 571791 - protein, 14 aa, Homo sapiens
  CDR3 for alpha chain variable domain of TCR clone 285896 (TRAV25, TRAJ22)
CAVRFSGSARQLTF

SEQ ID NO: 571792 - protein, 16 aa, Homo sapiens
  CDR3 for beta chain variable domain of TCR clone 285896 (TRBV4-2, TRBJ1-1)
CASSPSPGRAAPEAFF

SEQ ID NO: 571793 - protein, 12 aa, Homo sapiens
  CDR3 for alpha chain variable domain of TCR clone 285897 (TRAV13-1, TRAJ21)
CAAKEGFNKFYF

SEQ ID NO: 571794 - protein, 14 aa, Homo sapiens
  CDR3 for beta chain variable domain of TCR clone 285897 (TRBV23-1, TRBJ2-5)
CASRFLRSQETQYF

SEQ ID NO: 571795 - protein, 14 aa, Homo sapiens
  CDR3 for alpha chain variable domain of TCR clone 285898 (TRAV3, TRAJ21)
CAVRDAYNFNKFYF

SEQ ID NO: 571796 - protein, 15 aa, Homo sapiens
  CDR3 for beta chain variable domain of TCR clone 285898 (TRBV27, TRBJ2-1)
CASSNGGGSSNEQFF

SEQ ID NO: 571797 - protein, 13 aa, Homo sapiens
  CDR3 for alpha chain variable domain of TCR clone 285899 (TRAV3, TRAJ26)
CAVSRGYGQNFGF

SEQ ID NO: 571798 - protein, 15 aa, Homo sapiens
  CDR3 for beta chain variable domain of TCR clone 285899 (TRBV27, TRBJ2-1)
CASSLARGAYNEQFF

SEQ ID NO: 571799 - protein, 16 aa, Homo sapiens
  CDR3 for alpha chain variable domain of TCR clone 285900 (TRAV36/DV7, TRAJ52)
CCGSASWCTSYGKLTF

SEQ ID NO: 571800 - protein, 14 aa, Homo sapiens
  CDR3 for beta chain variable domain of TCR clone 285900 (TRBV20-1, TRBJ1-1)
CSAQTRIGGTEAFF

SEQ ID NO: 571801 - protein, 12 aa, Homo sapiens
  CDR3 for alpha chain variable domain of TCR clone 285901 (TRAV12-3, TRAJ34)
CAMGYNTDKLIF

SEQ ID NO: 571802 - protein, 14 aa, Homo sapiens
  CDR3 for beta chain variable domain of TCR clone 285901 (TRBV5-7, TRBJ1-5)
CASSRTGGGQPQHL

SEQ ID NO: 571803 - protein, 18 aa, Homo sapiens
  CDR3 for alpha chain variable domain of TCR clone 285902 (TRAV13-1, TRAJ45)
CAANAVADSGGGADGLTF

SEQ ID NO: 571804 - protein, 14 aa, Homo sapiens
  CDR3 for beta chain variable domain of TCR clone 285902 (TRBV7-9, TRBJ2-1)
CASSPRDSLYEQFF

SEQ ID NO: 571805 - protein, 21 aa, Homo sapiens
  CDR3 for alpha chain variable domain of TCR clone 285903 (TRAV17, TRAJ57)
TASRAADTASYFCANPEKLVF

SEQ ID NO: 571806 - protein, 16 aa, Homo sapiens
  CDR3 for beta chain variable domain of TCR clone 285903 (TRBV11-2, TRBJ2-3)
CASSFQGRGALDTHYF

SEQ ID NO: 571807 - protein, 15 aa, Homo sapiens
  CDR3 for alpha chain variable domain of TCR clone 285904 (TRAV16, TRAJ16)
CALKGGGSDGQKLLF

SEQ ID NO: 571808 - protein, 14 aa, Homo sapiens
  CDR3 for beta chain variable domain of TCR clone 285904 (TRBV6-1, TRBJ2-7)
CASSERVNPYEQYF

SEQ ID NO: 571809 - protein, 11 aa, Homo sapiens
  CDR3 for alpha chain variable domain of TCR clone 285905 (TRAV2, TRAJ33)
CAVDSNYQLIW

SEQ ID NO: 571810 - protein, 15 aa, Homo sapiens
  CDR3 for beta chain variable domain of TCR clone 285905 (TRBV20-1, TRBJ1-1)
CSASRGVTGNTEAFF

SEQ ID NO: 571811 - protein, 13 aa, Homo sapiens
  CDR3 for alpha chain variable domain of TCR clone 285906 (TRAV20, TRAJ20)
CAVRWVRDYKLSF

SEQ ID NO: 571812 - protein, 19 aa, Homo sapiens
  CDR3 for beta chain variable domain of TCR clone 285906 (TRBV25-1, TRBJ2-2)
CAILVYRVDRGRKTGELFF

SEQ ID NO: 571813 - protein, 12 aa, Homo sapiens
  CDR3 for alpha chain variable domain of TCR clone 285907 (TRAV12-2, TRAJ21)
CAVRYNFNKFYF

SEQ ID NO: 571814 - protein, 14 aa, Homo sapiens
  CDR3 for beta chain variable domain of TCR clone 285907 (TRBV28, TRBJ2-1)
CASSDYTAYNEQFF

SEQ ID NO: 571815 - protein, 12 aa, Homo sapiens
  CDR3 for alpha chain variable domain of TCR clone 285908 (TRAV36/DV7, TRAJ40)
CAVGTGTYKYIF

SEQ ID NO: 571816 - protein, 12 aa, Homo sapiens
  CDR3 for beta chain variable domain of TCR clone 285908 (TRBV11-2, TRBJ2-2)
CASSLGGGELFF

SEQ ID NO: 571817 - protein, 13 aa, Homo sapiens
  CDR3 for alpha chain variable domain of TCR clone 285909 (TRAV4, TRAJ34)
CLVGYYNTDKLIF

SEQ ID NO: 571818 - protein, 23 aa, Homo sapiens
  CDR3 for beta chain variable domain of TCR clone 285909 (TRBV4-2, TRBJ2-3)
CASSQDPPRASSISGGRGDTQYF

SEQ ID NO: 571819 - protein, 14 aa, Homo sapiens
  CDR3 for alpha chain variable domain of TCR clone 285910 (TRAV13-1, TRAJ10)
CAAKEPGGGNKLTF

SEQ ID NO: 571820 - protein, 15 aa, Homo sapiens
  CDR3 for beta chain variable domain of TCR clone 285910 (TRBV11-2, TRBJ1-6)
CASTLRGTGNSPLHF

SEQ ID NO: 571821 - protein, 15 aa, Homo sapiens
  CDR3 for alpha chain variable domain of TCR clone 285911 (TRAV4, TRAJ39)
CLWGPNNNAGNMLTF

SEQ ID NO: 571822 - protein, 13 aa, Homo sapiens
  CDR3 for beta chain variable domain of TCR clone 285911 (TRBV11-2, TRBJ2-5)
CASSSTGEETQYF

SEQ ID NO: 571823 - protein, 19 aa, Homo sapiens
  CDR3 for alpha chain variable domain of TCR clone 285912 (TRAV29/DV5, TRAJ49)
CSVLLCSKLTLDTGNQFYF

SEQ ID NO: 571824 - protein, 15 aa, Homo sapiens
  CDR3 for beta chain variable domain of TCR clone 285912 (TRBV9, TRBJ1-6)
CASSVAGTGDSPLHF

SEQ ID NO: 571825 - protein, 16 aa, Homo sapiens
  CDR3 for alpha chain variable domain of TCR clone 285913 (TRAV3, TRAJ10)
CAVRDMNAGGGNKLTF

SEQ ID NO: 571826 - protein, 16 aa, Homo sapiens
  CDR3 for beta chain variable domain of TCR clone 285913 (TRBV4-3, TRBJ2-7)
CASSPRTSGRSYEQYF

SEQ ID NO: 571827 - protein, 19 aa, Homo sapiens
  CDR3 for alpha chain variable domain of TCR clone 285914 (TRAV1-2, TRAJ29)
CLLPLCCERILSGNTPLVF

SEQ ID NO: 571828 - protein, 15 aa, Homo sapiens
  CDR3 for beta chain variable domain of TCR clone 285914 (TRBV4-1, TRBJ1-4)
CASSDTGGTNEKLFF

SEQ ID NO: 571829 - protein, 15 aa, Homo sapiens
  CDR3 for alpha chain variable domain of TCR clone 285915 (TRAV3, TRAJ3)
CAVRDGHISASKIIF

SEQ ID NO: 571830 - protein, 17 aa, Homo sapiens
  CDR3 for beta chain variable domain of TCR clone 285915 (TRBV11-2, TRBJ2-1)
CASSLYPPGVEYNEQFF

SEQ ID NO: 571831 - protein, 12 aa, Homo sapiens
  CDR3 for alpha chain variable domain of TCR clone 285916 (TRAV3, TRAJ20)
CAVRDTDYKLSF

SEQ ID NO: 571832 - protein, 15 aa, Homo sapiens
  CDR3 for beta chain variable domain of TCR clone 285916 (TRBV6-5, TRBJ2-5)
CASSPLAGGIETQYF

SEQ ID NO: 571833 - protein, 19 aa, Homo sapiens
  CDR3 for alpha chain variable domain of TCR clone 285917 (TRAV21, TRAJ20)
SLVTRPPTSVLPNDYKLSF

SEQ ID NO: 571834 - protein, 14 aa, Homo sapiens
  CDR3 for beta chain variable domain of TCR clone 285917 (TRBV7-2, TRBJ1-3)
CASSRLRSGNTIYF

SEQ ID NO: 571835 - protein, 13 aa, Homo sapiens
  CDR3 for alpha chain variable domain of TCR clone 285918 (TRAV3, TRAJ20)
CAVRSLNDYKLSF

SEQ ID NO: 571836 - protein, 13 aa, Homo sapiens
  CDR3 for beta chain variable domain of TCR clone 285918 (TRBV6-1, TRBJ2-1)
CAGMDPTNNEQSF

SEQ ID NO: 571837 - protein, 11 aa, Homo sapiens
  CDR3 for alpha chain variable domain of TCR clone 285919 (TRAV2, TRAJ13)
CASGGYQKGTF

SEQ ID NO: 571838 - protein, 14 aa, Homo sapiens
  CDR3 for beta chain variable domain of TCR clone 285919 (TRBV6-3, TRBJ1-1)
CASSNLLPGAEAFF

SEQ ID NO: 571839 - protein, 15 aa, Homo sapiens
  CDR3 for alpha chain variable domain of TCR clone 285920 (TRAV3, TRAJ3)
CAVRDRDSSASKIFF

SEQ ID NO: 571840 - protein, 18 aa, Homo sapiens
  CDR3 for beta chain variable domain of TCR clone 285920 (TRBV25-1, TRBJ1-2)
CASSGLQNGQGLIFGYTF

SEQ ID NO: 571841 - protein, 15 aa, Homo sapiens
  CDR3 for alpha chain variable domain of TCR clone 285921 (TRAV21, TRAJ40)
CAVRPQTSGTYKNIF

SEQ ID NO: 571842 - protein, 13 aa, Homo sapiens
  CDR3 for beta chain variable domain of TCR clone 285921 (TRBV7-2, TRBJ2-2)
CASSSVRAGELFF

SEQ ID NO: 571843 - protein, 15 aa, Homo sapiens
  CDR3 for alpha chain variable domain of TCR clone 285922 (TRAV27, TRAJ38)
RVARRNAGNNRKLIW

SEQ ID NO: 571844 - protein, 13 aa, Homo sapiens
  CDR3 for beta chain variable domain of TCR clone 285922 (TRBV12-5, TRBJ2-3)
CASGDRQSDTQYF

SEQ ID NO: 571845 - protein, 17 aa, Homo sapiens
  CDR3 for alpha chain variable domain of TCR clone 285923 (TRAV1-1, TRAJ32)
CAVRVAELWWCYKQAHL

SEQ ID NO: 571846 - protein, 12 aa, Homo sapiens
  CDR3 for beta chain variable domain of TCR clone 285923 (TRBV7-8, TRBJ2-1)
CASSLGNNEQFF

SEQ ID NO: 571847 - protein, 15 aa, Homo sapiens
  CDR3 for alpha chain variable domain of TCR clone 285924 (TRAV3, TRAJ24)
CAVRDKMTAGGNCSL

SEQ ID NO: 571848 - protein, 14 aa, Homo sapiens
  CDR3 for beta chain variable domain of TCR clone 285924 (TRBV7-2, TRBJ2-3)
CASSQTCSSYTQYF

SEQ ID NO: 571849 - protein, 12 aa, Homo sapiens
  CDR3 for alpha chain variable domain of TCR clone 285925 (TRAV13-1, TRAJ21)
CAAEEGFNKFYF

SEQ ID NO: 571850 - protein, 18 aa, Homo sapiens
  CDR3 for beta chain variable domain of TCR clone 285925 (TRBV11-2, TRBJ2-3)
CASSLGGASRGAPNTQYF

SEQ ID NO: 571851 - protein, 14 aa, Homo sapiens
  CDR3 for alpha chain variable domain of TCR clone 285926 (TRAV13-1, TRAJ35)
CTASKGGFGNVMHC

SEQ ID NO: 571852 - protein, 13 aa, Homo sapiens
  CDR3 for beta chain variable domain of TCR clone 285926 (TRBV7-3, TRBJ1-1)
CASSQDWGAEAFF

SEQ ID NO: 571853 - protein, 10 aa, Homo sapiens
  CDR3 for alpha chain variable domain of TCR clone 285927 (TRAV2, TRAJ34)
CAVANDKLIF

SEQ ID NO: 571854 - protein, 20 aa, Homo sapiens
  CDR3 for beta chain variable domain of TCR clone 285927 (TRBV19, TRBJ2-1)
CASSISRTVTSTRLNNEQFF

SEQ ID NO: 571855 - protein, 16 aa, Homo sapiens
  CDR3 for alpha chain variable domain of TCR clone 285928 (TRAV13-1, TRAJ22)
CAAKWGRSGSARQLTF

SEQ ID NO: 571856 - protein, 15 aa, Homo sapiens
  CDR3 for beta chain variable domain of TCR clone 285928 (TRBV9, TRBJ1-6)
CASSVAGTGDSPLHF

SEQ ID NO: 571857 - protein, 11 aa, Homo sapiens
  CDR3 for alpha chain variable domain of TCR clone 285929 (TRAV2, TRAJ30)
CAANRDDKIIF

SEQ ID NO: 571858 - protein, 14 aa, Homo sapiens
  CDR3 for beta chain variable domain of TCR clone 285929 (TRBV20-1, TRBJ2-7)
CSAWTALSSYEQYF

SEQ ID NO: 571859 - protein, 13 aa, Homo sapiens
  CDR3 for alpha chain variable domain of TCR clone 285930 (TRAV12-3, TRAJ33)
FAMSVNSNYQLIW

SEQ ID NO: 571860 - protein, 16 aa, Homo sapiens
  CDR3 for beta chain variable domain of TCR clone 285930 (TRBV13, TRBJ2-5)
CASSLRTGGSWETQYF

SEQ ID NO: 571861 - protein, 11 aa, Homo sapiens
  CDR3 for alpha chain variable domain of TCR clone 285931 (TRAV12-3, TRAJ43)
CAMSVSNDMRF

SEQ ID NO: 571862 - protein, 13 aa, Homo sapiens
  CDR3 for beta chain variable domain of TCR clone 285931 (TRBV29-1, TRBJ2-5)
CSAATELQETQYF

SEQ ID NO: 571863 - protein, 16 aa, Homo sapiens
  CDR3 for alpha chain variable domain of TCR clone 285932 (TRAV30, TRAJ24)
CGTEIVDADSWGEFQF

SEQ ID NO: 571864 - protein, 13 aa, Homo sapiens
  CDR3 for beta chain variable domain of TCR clone 285932 (TRBV18, TRBJ1-2)
CASSASATEGYTF

SEQ ID NO: 571865 - protein, 22 aa, Homo sapiens
  CDR3 for alpha chain variable domain of TCR clone 285933 (TRAV1-1, TRAJ30)
CAVRDQTEMTRSSLEKGHDSIF

SEQ ID NO: 571866 - protein, 12 aa, Homo sapiens
  CDR3 for beta chain variable domain of TCR clone 285933 (TRBV28, TRBJ2-6)
CAIQAGANVLTF

SEQ ID NO: 571867 - protein, 13 aa, Homo sapiens
  CDR3 for alpha chain variable domain of TCR clone 285934 (TRAV35, TRAJ42)
CAGFPGSQGNLIF

SEQ ID NO: 571868 - protein, 16 aa, Homo sapiens
  CDR3 for beta chain variable domain of TCR clone 285934 (TRBV13, TRBJ2-2)
CASSLGRGYGTGELFF

SEQ ID NO: 571869 - protein, 14 aa, Homo sapiens
  CDR3 for alpha chain variable domain of TCR clone 285935 (TRAV12-1, TRAJ17)
CVVNYKAAGNKLTF

SEQ ID NO: 571870 - protein, 14 aa, Homo sapiens
  CDR3 for beta chain variable domain of TCR clone 285935 (TRBV20-1, TRBJ2-2)
CSAPDTANTGELFF

SEQ ID NO: 571871 - protein, 14 aa, Homo sapiens
  CDR3 for alpha chain variable domain of TCR clone 285936 (TRAV3, TRAJ32)
CCERRAGATNKLIF

SEQ ID NO: 571872 - protein, 15 aa, Homo sapiens
  CDR3 for beta chain variable domain of TCR clone 285936 (TRBV7-9, TRBJ1-5)
CASSQGHQPNQPQHL

SEQ ID NO: 571873 - protein, 14 aa, Homo sapiens
  CDR3 for alpha chain variable domain of TCR clone 285937 (TRAV1-2, TRAJ16)
CAVNRFSDGQKLLF

SEQ ID NO: 571874 - protein, 12 aa, Homo sapiens
  CDR3 for beta chain variable domain of TCR clone 285937 (TRBV7-9, TRBJ2-3)
CASSFITDTQYF

SEQ ID NO: 571875 - protein, 15 aa, Homo sapiens
  CDR3 for alpha chain variable domain of TCR clone 285938 (TRAV8-3, TRAJ45)
CASSYSGGGADGLTF

SEQ ID NO: 571876 - protein, 12 aa, Homo sapiens
  CDR3 for beta chain variable domain of TCR clone 285938 (TRBV19, TRBJ1-1)
CASSTTGIEAFF

SEQ ID NO: 571877 - protein, 11 aa, Homo sapiens
  CDR3 for alpha chain variable domain of TCR clone 285939 (TRAV17, TRAJ36)
CAPTGANHLFF

SEQ ID NO: 571878 - protein, 12 aa, Homo sapiens
  CDR3 for beta chain variable domain of TCR clone 285939 (TRBV29-1, TRBJ2-3)
CSVTGGADTQYF

SEQ ID NO: 571879 - protein, 16 aa, Homo sapiens
  CDR3 for alpha chain variable domain of TCR clone 285940 (TRAV30, TRAJ24)
CGTEIVDADSWGKFQF

SEQ ID NO: 571880 - protein, 17 aa, Homo sapiens
  CDR3 for beta chain variable domain of TCR clone 285940 (TRBV20-1, TRBJ2-1)
CSASARRRASSYNEQFF

SEQ ID NO: 571881 - protein, 13 aa, Homo sapiens
  CDR3 for alpha chain variable domain of TCR clone 285941 (TRAV36/DV7, TRAJ37)
CAVFSSNTGKLIF

SEQ ID NO: 571882 - protein, 13 aa, Homo sapiens
  CDR3 for beta chain variable domain of TCR clone 285941 (TRBV2, TRBJ2-5)
CASGTPYQETQYF

SEQ ID NO: 571883 - protein, 13 aa, Homo sapiens
  CDR3 for alpha chain variable domain of TCR clone 285942 (TRAV21, TRAJ27)
CAQWGGNAGKSTF

SEQ ID NO: 571884 - protein, 13 aa, Homo sapiens
  CDR3 for beta chain variable domain of TCR clone 285942 (TRBV7-9, TRBJ1-2)
CASSLKQNYGYTF

SEQ ID NO: 571885 - protein, 14 aa, Homo sapiens
  CDR3 for alpha chain variable domain of TCR clone 285943 (TRAV12-2, TRAJ41)
CAVIRGDSGYALNF

SEQ ID NO: 571886 - protein, 15 aa, Homo sapiens
  CDR3 for beta chain variable domain of TCR clone 285943 (TRBV24-1, TRBJ1-1)
CATSDSKTVNTEAFF

SEQ ID NO: 571887 - protein, 17 aa, Homo sapiens
  CDR3 for alpha chain variable domain of TCR clone 285944 (TRAV3, TRAJ6)
CAVRDGPRAGGSYIPTF

SEQ ID NO: 571888 - protein, 15 aa, Homo sapiens
  CDR3 for beta chain variable domain of TCR clone 285944 (TRBV7-6, TRBJ2-3)
CASSPFIYSTDTQYF

SEQ ID NO: 571889 - protein, 15 aa, Homo sapiens
  CDR3 for alpha chain variable domain of TCR clone 285945 (TRAV12-1, TRAJ37)
CVVNLPTSNTGKLIF

SEQ ID NO: 571890 - protein, 12 aa, Homo sapiens
  CDR3 for beta chain variable domain of TCR clone 285945 (TRBV19, TRBJ1-5)
CASSIAQQPQHF

SEQ ID NO: 571891 - protein, 13 aa, Homo sapiens
  CDR3 for alpha chain variable domain of TCR clone 285946 (TRAV17, TRAJ5)
CAPMKMGRRALTF

SEQ ID NO: 571892 - protein, 15 aa, Homo sapiens
  CDR3 for beta chain variable domain of TCR clone 285946 (TRBV6-6, TRBJ2-5)
CASSPGGGLEETQYF

SEQ ID NO: 571893 - protein, 13 aa, Homo sapiens
  CDR3 for alpha chain variable domain of TCR clone 285947 (TRAV13-1, TRAJ7)
CAASTNWNNRLAF

SEQ ID NO: 571894 - protein, 15 aa, Homo sapiens
  CDR3 for beta chain variable domain of TCR clone 285947 (TRBV9, TRBJ2-6)
CASSDSASGANVLTF

SEQ ID NO: 571895 - protein, 15 aa, Homo sapiens
  CDR3 for alpha chain variable domain of TCR clone 285948 (TRAV26-1, TRAJ21)
CIVRVPSYNFNKFYF

SEQ ID NO: 571896 - protein, 16 aa, Homo sapiens
  CDR3 for beta chain variable domain of TCR clone 285948 (TRBV7-9, TRBJ2-3)
CASSLQGNPGTDTQYF

SEQ ID NO: 571897 - protein, 14 aa, Homo sapiens
  CDR3 for alpha chain variable domain of TCR clone 285949 (TRAV12-2, TRAJ17)
CAVLFKAAGNKLTF

SEQ ID NO: 571898 - protein, 14 aa, Homo sapiens
  CDR3 for beta chain variable domain of TCR clone 285949 (TRBV7-9, TRBJ1-1)
CASTPLQSYTEAFF

SEQ ID NO: 571899 - protein, 12 aa, Homo sapiens
  CDR3 for alpha chain variable domain of TCR clone 285950 (TRAV13-1, TRAJ21)
CAAKEGFNKFYF

SEQ ID NO: 571900 - protein, 14 aa, Homo sapiens
  CDR3 for beta chain variable domain of TCR clone 285950 (TRBV7-2, TRBJ1-5)
CASSTQGAGQPQHF

SEQ ID NO: 571901 - protein, 15 aa, Homo sapiens
  CDR3 for alpha chain variable domain of TCR clone 285951 (TRAV8-3, TRAJ28)
CAVAYSGAGSYQLTF

SEQ ID NO: 571902 - protein, 13 aa, Homo sapiens
  CDR3 for beta chain variable domain of TCR clone 285951 (TRBV19, TRBJ2-1)
CASSMYRVNEQFF

SEQ ID NO: 571903 - protein, 13 aa, Homo sapiens
  CDR3 for alpha chain variable domain of TCR clone 285952 (TRAV1-2, TRAJ36)
CAVDQTGANNLFF

SEQ ID NO: 571904 - protein, 14 aa, Homo sapiens
  CDR3 for beta chain variable domain of TCR clone 285952 (TRBV15, TRBJ2-3)
CATRSGTSTDTQYF

SEQ ID NO: 571905 - protein, 18 aa, Homo sapiens
  CDR3 for alpha chain variable domain of TCR clone 285953 (TRAV13-1, TRAJ52)
CAASKRSAGGTSTGKLTF

SEQ ID NO: 571906 - protein, 13 aa, Homo sapiens
  CDR3 for beta chain variable domain of TCR clone 285953 (TRBV12-4, TRBJ1-2)
CASSLRQGKGYTF

SEQ ID NO: 571907 - protein, 13 aa, Homo sapiens
  CDR3 for alpha chain variable domain of TCR clone 285954 (TRAV13-1, TRAJ20)
CAARVSNDYKLSF

SEQ ID NO: 571908 - protein, 16 aa, Homo sapiens
  CDR3 for beta chain variable domain of TCR clone 285954 (TRBV11-1, TRBJ1-1)
CATNPRDRACNTEAFF

SEQ ID NO: 571909 - protein, 11 aa, Homo sapiens
  CDR3 for alpha chain variable domain of TCR clone 285955 (TRAV23/DV6, TRAJ9)
CFHTGGFKTIF

SEQ ID NO: 571910 - protein, 15 aa, Homo sapiens
  CDR3 for beta chain variable domain of TCR clone 285955 (TRBV11-3, TRBJ2-3)
CASLKDGREGDTQYF

SEQ ID NO: 571911 - protein, 15 aa, Homo sapiens
  CDR3 for alpha chain variable domain of TCR clone 285956 (TRAV21, TRAJ45)
CAVSYSGGGADGLTF

SEQ ID NO: 571912 - protein, 14 aa, Homo sapiens
  CDR3 for beta chain variable domain of TCR clone 285956 (TRBV28, TRBJ1-1)
CASSESGRGTEAFF

SEQ ID NO: 571913 - protein, 10 aa, Homo sapiens
  CDR3 for alpha chain variable domain of TCR clone 285957 (TRAV23/DV6, TRAJ57)
CAASTTLSQG

SEQ ID NO: 571914 - protein, 13 aa, Homo sapiens
  CDR3 for beta chain variable domain of TCR clone 285957 (TRBV25-1, TRBJ1-1)
CQHPPGGNTEAFF

SEQ ID NO: 571915 - protein, 13 aa, Homo sapiens
  CDR3 for alpha chain variable domain of TCR clone 285958 (TRAV21, TRAJ27)
CAARPGNAGKSTF

SEQ ID NO: 571916 - protein, 15 aa, Homo sapiens
  CDR3 for beta chain variable domain of TCR clone 285958 (TRBV13, TRBJ2-1)
CASSLLSGLNNEQFF

SEQ ID NO: 571917 - protein, 11 aa, Homo sapiens
  CDR3 for alpha chain variable domain of TCR clone 285959 (TRAV8-4, TRAJ26)
CAGGEGQNFVF

SEQ ID NO: 571918 - protein, 17 aa, Homo sapiens
  CDR3 for beta chain variable domain of TCR clone 285959 (TRBV7-9, TRBJ2-3)
CASSPTVAGDLTDTHYF

SEQ ID NO: 571919 - protein, 16 aa, Homo sapiens
  CDR3 for alpha chain variable domain of TCR clone 285960 (TRAV3, TRAJ37)
CAVRGKGSGNTGKLIF

SEQ ID NO: 571920 - protein, 14 aa, Homo sapiens
  CDR3 for beta chain variable domain of TCR clone 285960 (TRBV7-2, TRBJ2-7)
CASSPNTSFYEQYF

SEQ ID NO: 571921 - protein, 14 aa, Homo sapiens
  CDR3 for alpha chain variable domain of TCR clone 285961 (TRAV13-1, TRAJ5)
CAASGGTGRRALTF

SEQ ID NO: 571922 - protein, 13 aa, Homo sapiens
  CDR3 for beta chain variable domain of TCR clone 285961 (TRBV19, TRBJ2-7)
CASRKAGGSEQYF

SEQ ID NO: 571923 - protein, 14 aa, Homo sapiens
  CDR3 for alpha chain variable domain of TCR clone 285962 (TRAV29/DV5, TRAJ36)
CAARRKTGANNLFF

SEQ ID NO: 571924 - protein, 13 aa, Homo sapiens
  CDR3 for beta chain variable domain of TCR clone 285962 (TRBV28, TRBJ2-3)
CASSLPQVDTQYF

SEQ ID NO: 571925 - protein, 16 aa, Homo sapiens
  CDR3 for alpha chain variable domain of TCR clone 285963 (TRAV30, TRAJ24)
RGTEIVDADSWGKFQF

SEQ ID NO: 571926 - protein, 16 aa, Homo sapiens
  CDR3 for beta chain variable domain of TCR clone 285963 (TRBV28, TRBJ2-7)
CASSLFFETGGPEQYF

SEQ ID NO: 571927 - protein, 14 aa, Homo sapiens
  CDR3 for alpha chain variable domain of TCR clone 285964 (TRAV13-1, TRAJ6)
CAASITGGSYIPTF

SEQ ID NO: 571928 - protein, 14 aa, Homo sapiens
  CDR3 for beta chain variable domain of TCR clone 285964 (TRBV12-4, TRBJ2-5)
CASSLWQKQETQYF

SEQ ID NO: 571929 - protein, 14 aa, Homo sapiens
  CDR3 for alpha chain variable domain of TCR clone 285965 (TRAV40, TRAJ41)
CLLGPPTSGYALNF

SEQ ID NO: 571930 - protein, 11 aa, Homo sapiens
  CDR3 for beta chain variable domain of TCR clone 285965 (TRBV19, TRBJ2-7)
CASSILGEQYF

SEQ ID NO: 571931 - protein, 14 aa, Homo sapiens
  CDR3 for alpha chain variable domain of TCR clone 285966 (TRAV12-1, TRAJ10)
CVVNGAGGGNKLTF

SEQ ID NO: 571932 - protein, 14 aa, Homo sapiens
  CDR3 for beta chain variable domain of TCR clone 285966 (TRBV7-9, TRBJ2-7)
CASSLDRPTDEQYF

SEQ ID NO: 571933 - protein, 14 aa, Homo sapiens
  CDR3 for alpha chain variable domain of TCR clone 285967 (TRAV17, TRAJ32)
CATDPGGATDKLFF

SEQ ID NO: 571934 - protein, 14 aa, Homo sapiens
  CDR3 for beta chain variable domain of TCR clone 285967 (TRBV2, TRBJ1-5)
CASSENRGGQPQHF

SEQ ID NO: 571935 - protein, 14 aa, Homo sapiens
  CDR3 for alpha chain variable domain of TCR clone 285968 (TRAV4, TRAJ23)
CLVGAGNQGGKLIF

SEQ ID NO: 571936 - protein, 19 aa, Homo sapiens
  CDR3 for beta chain variable domain of TCR clone 285968 (TRBV7-9, TRBJ1-4)
CASSGYGRPQLMKNCFLAV

SEQ ID NO: 571937 - protein, 23 aa, Homo sapiens
  CDR3 for alpha chain variable domain of TCR clone 285969 (TRAV2, TRAJ38)
CAVEDFPNAGNNHIQNPDPALYQ

SEQ ID NO: 571938 - protein, 14 aa, Homo sapiens
  CDR3 for beta chain variable domain of TCR clone 285969 (TRBV29-1, TRBJ1-4)
CSVSGRQGGEKLFF

SEQ ID NO: 571939 - protein, 16 aa, Homo sapiens
  CDR3 for alpha chain variable domain of TCR clone 285970 (TRAV12-2, TRAJ47)
CAVNREKEEYGNKLVF

SEQ ID NO: 571940 - protein, 15 aa, Homo sapiens
  CDR3 for beta chain variable domain of TCR clone 285970 (TRBV20-1, TRBJ2-7)
CSARVPAAYFYEQYF

SEQ ID NO: 571941 - protein, 18 aa, Homo sapiens
  CDR3 for alpha chain variable domain of TCR clone 285971 (TRAV1-2, TRAJ18)
CAVPPSADRGSTLGRLYF

SEQ ID NO: 571942 - protein, 15 aa, Homo sapiens
  CDR3 for beta chain variable domain of TCR clone 285971 (TRBV11-2, TRBJ2-1)
CASSRNRGLMYEQFF

SEQ ID NO: 571943 - protein, 12 aa, Homo sapiens
  CDR3 for alpha chain variable domain of TCR clone 285972 (TRAV35, TRAJ30)
CAGQLADDKIIF

SEQ ID NO: 571944 - protein, 16 aa, Homo sapiens
  CDR3 for beta chain variable domain of TCR clone 285972 (TRBV4-2, TRBJ2-5)
CQQPRKVAEFPRDQYF

SEQ ID NO: 571945 - protein, 13 aa, Homo sapiens
  CDR3 for alpha chain variable domain of TCR clone 285973 (TRAV35, TRAJ42)
CAGFPGSQGNLLF

SEQ ID NO: 571946 - protein, 14 aa, Homo sapiens
  CDR3 for beta chain variable domain of TCR clone 285973 (TRBV19, TRBJ2-1)
CASPTFVLSGEQFF

SEQ ID NO: 571947 - protein, 15 aa, Homo sapiens
  CDR3 for alpha chain variable domain of TCR clone 285974 (TRAV21, TRAJ53)
CATLNSGGSNYKLTF

SEQ ID NO: 571948 - protein, 16 aa, Homo sapiens
  CDR3 for beta chain variable domain of TCR clone 285974 (TRBV9, TRBJ2-1)
CDSSVGGGGNYNEQFF

SEQ ID NO: 571949 - protein, 12 aa, Homo sapiens
  CDR3 for alpha chain variable domain of TCR clone 285975 (TRAV10, TRAJ6)
CVVSEGSYIPTF

SEQ ID NO: 571950 - protein, 15 aa, Homo sapiens
  CDR3 for beta chain variable domain of TCR clone 285975 (TRBV2, TRBJ2-2)
CASSRETVGTGELFF

SEQ ID NO: 571951 - protein, 17 aa, Homo sapiens
  CDR3 for alpha chain variable domain of TCR clone 285976 (TRAV3, TRAJ6)
CAGRDGPRAGGSYRPTV

SEQ ID NO: 571952 - protein, 14 aa, Homo sapiens
  CDR3 for beta chain variable domain of TCR clone 285976 (TRBV7-2, TRBJ2-7)
CASSPKTSFYEQYF

SEQ ID NO: 571953 - protein, 13 aa, Homo sapiens
  CDR3 for alpha chain variable domain of TCR clone 285977 (TRAV1-2, TRAJ9)
CAALNTRGFKTIF

SEQ ID NO: 571954 - protein, 17 aa, Homo sapiens
  CDR3 for beta chain variable domain of TCR clone 285977 (TRBV3-1, TRBJ2-7)
CASSEVGHRGPSYEQYF

SEQ ID NO: 571955 - protein, 15 aa, Homo sapiens
  CDR3 for alpha chain variable domain of TCR clone 285978 (TRAV2, TRAJ42)
CAVEGYGGSQGNLIF

SEQ ID NO: 571956 - protein, 12 aa, Homo sapiens
  CDR3 for beta chain variable domain of TCR clone 285978 (TRBV11-2, TRBJ2-2)
CASSLGGGELFF

SEQ ID NO: 571957 - protein, 11 aa, Homo sapiens
  CDR3 for alpha chain variable domain of TCR clone 285979 (TRAV2, TRAJ33)
CAVDSNYQLIW

SEQ ID NO: 571958 - protein, 16 aa, Homo sapiens
  CDR3 for beta chain variable domain of TCR clone 285979 (TRBV18, TRBJ1-5)
CASSPSTGNSNQPQHF

SEQ ID NO: 571959 - protein, 15 aa, Homo sapiens
  CDR3 for alpha chain variable domain of TCR clone 285980 (TRAV39, TRAJ32)
CAVDMEGGATNKRIF

SEQ ID NO: 571960 - protein, 17 aa, Homo sapiens
  CDR3 for beta chain variable domain of TCR clone 285980 (TRBV7-2, TRBJ1-4)
CASSFKAGPTTNEKLFF

SEQ ID NO: 571961 - protein, 15 aa, Homo sapiens
  CDR3 for alpha chain variable domain of TCR clone 285981 (TRAV23/DV6, TRAJ22)
CAASFSSGSARRLTF

SEQ ID NO: 571962 - protein, 15 aa, Homo sapiens
  CDR3 for beta chain variable domain of TCR clone 285981 (TRBV10-2, TRBJ2-6)
RASSEQGTGANVLTF

SEQ ID NO: 571963 - protein, 14 aa, Homo sapiens
  CDR3 for alpha chain variable domain of TCR clone 285982 (TRAV12-3, TRAJ9)
CAMSPNTGGFKTIF

SEQ ID NO: 571964 - protein, 13 aa, Homo sapiens
  CDR3 for beta chain variable domain of TCR clone 285982 (TRBV5-1, TRBJ2-1)
CASSLGSYNEQFF

SEQ ID NO: 571965 - protein, 14 aa, Homo sapiens
  CDR3 for alpha chain variable domain of TCR clone 285983 (TRAV26-1, TRAJ45)
CIEVTGGGADGLTF

SEQ ID NO: 571966 - protein, 15 aa, Homo sapiens
  CDR3 for beta chain variable domain of TCR clone 285983 (TRBV27, TRBJ1-6)
CASSFDRGLGSPLHF

SEQ ID NO: 571967 - protein, 15 aa, Homo sapiens
  CDR3 for alpha chain variable domain of TCR clone 285984 (TRAV12-3, TRAJ13)
CAMSARSGGYQIVTF

SEQ ID NO: 571968 - protein, 21 aa, Homo sapiens
  CDR3 for beta chain variable domain of TCR clone 285984 (TRBV3-1, TRBJ2-7)
CISVPAAKKGGGRSWHYEQYF

SEQ ID NO: 571969 - protein, 14 aa, Homo sapiens
  CDR3 for alpha chain variable domain of TCR clone 285985 (TRAV12-2, TRAJ13)
CAVKKTGGYQKVTF

SEQ ID NO: 571970 - protein, 14 aa, Homo sapiens
  CDR3 for beta chain variable domain of TCR clone 285985 (TRBV5-5, TRBJ2-7)
CASSLGQGTYEKYF

SEQ ID NO: 571971 - protein, 14 aa, Homo sapiens
  CDR3 for alpha chain variable domain of TCR clone 285986 (TRAV13-2, TRAJ22)
CADGTLGSARQLTF

SEQ ID NO: 571972 - protein, 16 aa, Homo sapiens
  CDR3 for beta chain variable domain of TCR clone 285986 (TRBV19, TRBJ2-1)
CASSSKGTGSYNELFF

SEQ ID NO: 571973 - protein, 16 aa, Homo sapiens
  CDR3 for alpha chain variable domain of TCR clone 285987 (TRAV12-3, TRAJ53)
CAMSPGSGGSNYKLTF

SEQ ID NO: 571974 - protein, 14 aa, Homo sapiens
  CDR3 for beta chain variable domain of TCR clone 285987 (TRBV20-1, TRBJ1-5)
CSARDDRGSQHQHF

SEQ ID NO: 571975 - protein, 14 aa, Homo sapiens
  CDR3 for alpha chain variable domain of TCR clone 285988 (TRAV12-2, TRAJ44)
CAVNPAGTASKLTF

SEQ ID NO: 571976 - protein, 16 aa, Homo sapiens
  CDR3 for beta chain variable domain of TCR clone 285988 (TRBV2, TRBJ2-1)
CASSVGGSMSYNEQFF

SEQ ID NO: 571977 - protein, 15 aa, Homo sapiens
  CDR3 for alpha chain variable domain of TCR clone 285989 (TRAV26-1, TRAJ38)
CIVRAEGGNNRKLIW

SEQ ID NO: 571978 - protein, 14 aa, Homo sapiens
  CDR3 for beta chain variable domain of TCR clone 285989 (TRBV7-6, TRBJ2-5)
CASSSPSGSETQYC

SEQ ID NO: 571979 - protein, 13 aa, Homo sapiens
  CDR3 for alpha chain variable domain of TCR clone 285990 (TRAV29/DV5, TRAJ44)
CAASTGTASKLTF

SEQ ID NO: 571980 - protein, 15 aa, Homo sapiens
  CDR3 for beta chain variable domain of TCR clone 285990 (TRBV19, TRBJ2-7)
CASRKAVGASSTSGR

SEQ ID NO: 571981 - protein, 14 aa, Homo sapiens
  CDR3 for alpha chain variable domain of TCR clone 285991 (TRAV12-1, TRAJ13)
CVVIDSGGYQKVTF

SEQ ID NO: 571982 - protein, 17 aa, Homo sapiens
  CDR3 for beta chain variable domain of TCR clone 285991 (TRBV11-2, TRBJ2-1)
CASSLYPPGVEYNEQFF

SEQ ID NO: 571983 - protein, 14 aa, Homo sapiens
  CDR3 for alpha chain variable domain of TCR clone 285992 (TRAV12-2, TRAJ17)
CAVLFKAAGNKLTF

SEQ ID NO: 571984 - protein, 18 aa, Homo sapiens
  CDR3 for beta chain variable domain of TCR clone 285992 (TRBV11-2, TRBJ2-3)
CASSLGGASRGAPNTHYF

SEQ ID NO: 571985 - protein, 13 aa, Homo sapiens
  CDR3 for alpha chain variable domain of TCR clone 285993 (TRAV12-3, TRAJ7)
CAMTPYGNNRLAF

SEQ ID NO: 571986 - protein, 15 aa, Homo sapiens
  CDR3 for beta chain variable domain of TCR clone 285993 (TRBV10-3, TRBJ2-1)
CASSNGGGSSNEQFF

SEQ ID NO: 571987 - protein, 13 aa, Homo sapiens
  CDR3 for alpha chain variable domain of TCR clone 285994 (TRAV27, TRAJ3)
ASLRGSSASKIIF

SEQ ID NO: 571988 - protein, 14 aa, Homo sapiens
  CDR3 for beta chain variable domain of TCR clone 285994 (TRBV19, TRBJ2-1)
CASPTFVLSGEQFF

SEQ ID NO: 571989 - protein, 13 aa, Homo sapiens
  CDR3 for alpha chain variable domain of TCR clone 285995 (TRAV27, TRAJ41)
CAGEGNSGYALNF

SEQ ID NO: 571990 - protein, 16 aa, Homo sapiens
  CDR3 for beta chain variable domain of TCR clone 285995 (TRBV7-3, TRBJ2-1)
CTSSLEGYRSYNEQFF

SEQ ID NO: 571991 - protein, 13 aa, Homo sapiens
  CDR3 for alpha chain variable domain of TCR clone 285996 (TRAV27, TRAJ29)
CAGAHSGNTPLVF

SEQ ID NO: 571992 - protein, 13 aa, Homo sapiens
  CDR3 for beta chain variable domain of TCR clone 285996 (TRBV7-9, TRBJ1-2)
CASSPKTGYGYTF

SEQ ID NO: 571993 - protein, 13 aa, Homo sapiens
  CDR3 for alpha chain variable domain of TCR clone 285997 (TRAV12-2, TRAJ4)
CAVFVGGYNKLIF

SEQ ID NO: 571994 - protein, 16 aa, Homo sapiens
  CDR3 for beta chain variable domain of TCR clone 285997 (TRBV6-1, TRBJ1-2)
CASSEYASGANYGYTF

SEQ ID NO: 571995 - protein, 14 aa, Homo sapiens
  CDR3 for alpha chain variable domain of TCR clone 285998 (TRAV26-1, TRAJ21)
CIVRVVYNFNKFYF

SEQ ID NO: 571996 - protein, 15 aa, Homo sapiens
  CDR3 for beta chain variable domain of TCR clone 285998 (TRBV7-9, TRBJ1-5)
CASSQGHQPNQPQHF

SEQ ID NO: 571997 - protein, 13 aa, Homo sapiens
  CDR3 for alpha chain variable domain of TCR clone 285999 (TRAV38-2/DV8, TRAJ34)
CAYRTWNTDKLIF

SEQ ID NO: 571998 - protein, 15 aa, Homo sapiens
  CDR3 for beta chain variable domain of TCR clone 285999 (TRBV11-3, TRBJ2-3)
CASLKDGREGDTQYF

SEQ ID NO: 571999 - protein, 13 aa, Homo sapiens
  CDR3 for alpha chain variable domain of TCR clone 286000 (TRAV13-1, TRAJ40)
CSKYDLGTYKYIF

SEQ ID NO: 572000 - protein, 15 aa, Homo sapiens
  CDR3 for beta chain variable domain of TCR clone 286000 (TRBV7-3, TRBJ2-1)
CASSPTGGGEGEQFF

SEQ ID NO: 572001 - protein, 13 aa, Homo sapiens
  CDR3 for alpha chain variable domain of TCR clone 286001 (TRAV12-1, TRAJ26)
CVVRRNHGQNFVF

SEQ ID NO: 572002 - protein, 15 aa, Homo sapiens
  CDR3 for beta chain variable domain of TCR clone 286001 (TRBV15, TRBJ1-4)
CATSRDMGSYEKLFF

SEQ ID NO: 572003 - protein, 17 aa, Homo sapiens
  CDR3 for alpha chain variable domain of TCR clone 286002 (TRAV3, TRAJ6)
CAVRDGPMAGGSYIPTF

SEQ ID NO: 572004 - protein, 14 aa, Homo sapiens
  CDR3 for beta chain variable domain of TCR clone 286002 (TRBV7-2, TRBJ2-7)
CASSPKTSFYERYF

SEQ ID NO: 572005 - protein, 15 aa, Homo sapiens
  CDR3 for alpha chain variable domain of TCR clone 286003 (TRAV13-2, TRAJ35)
CAESPNIGFGNVLHF

SEQ ID NO: 572006 - protein, 13 aa, Homo sapiens
  CDR3 for beta chain variable domain of TCR clone 286003 (TRBV10-2, TRBJ2-5)
CASSTLARETQYF

SEQ ID NO: 572007 - protein, 13 aa, Homo sapiens
  CDR3 for alpha chain variable domain of TCR clone 286004 (TRAV36/DV7, TRAJ21)
CAVEAYNFNKFYF

SEQ ID NO: 572008 - protein, 15 aa, Homo sapiens
  CDR3 for beta chain variable domain of TCR clone 286004 (TRBV6-6, TRBJ2-7)
CASSYSYGGSYEQYF

SEQ ID NO: 572009 - protein, 12 aa, Homo sapiens
  CDR3 for alpha chain variable domain of TCR clone 286005 (TRAV21, TRAJ13)
PGPSGGYQKVTF

SEQ ID NO: 572010 - protein, 15 aa, Homo sapiens
  CDR3 for beta chain variable domain of TCR clone 286005 (TRBV7-9, TRBJ1-4)
CASSARTGGNEKLFF

SEQ ID NO: 572011 - protein, 16 aa, Homo sapiens
  CDR3 for alpha chain variable domain of TCR clone 286006 (TRAV26-1, TRAJ32)
CIVRTNYGGATNKLIF

SEQ ID NO: 572012 - protein, 14 aa, Homo sapiens
  CDR3 for beta chain variable domain of TCR clone 286006 (TRBV27, TRBJ1-1)
CASSLLSGLSESFF

SEQ ID NO: 572013 - protein, 16 aa, Homo sapiens
  CDR3 for alpha chain variable domain of TCR clone 286007 (TRAV4, TRAJ18)
CCVLLIGGSTLGRLYF

SEQ ID NO: 572014 - protein, 15 aa, Homo sapiens
  CDR3 for beta chain variable domain of TCR clone 286007 (TRBV5-1, TRBJ2-7)
CASSLMTSGSNEQYF

SEQ ID NO: 572015 - protein, 19 aa, Homo sapiens
  CDR3 for alpha chain variable domain of TCR clone 286008 (TRAV9-2, )
CALSEDIQNPDPAVYQLRD

SEQ ID NO: 572016 - protein, 15 aa, Homo sapiens
  CDR3 for beta chain variable domain of TCR clone 286008 (TRBV13, TRBJ2-1)
CASTLAGGSANEQFF

SEQ ID NO: 572017 - protein, 13 aa, Homo sapiens
  CDR3 for alpha chain variable domain of TCR clone 286009 (TRAV20, TRAJ54)
CAVQAGGAQKLVF

SEQ ID NO: 572018 - protein, 15 aa, Homo sapiens
  CDR3 for beta chain variable domain of TCR clone 286009 (TRBV28, TRBJ2-1)
CASSIIAGGRSEQFF

SEQ ID NO: 572019 - protein, 14 aa, Homo sapiens
  CDR3 for alpha chain variable domain of TCR clone 286010 (TRAV8-3, TRAJ30)
CAVGDMNRDDKIIF

SEQ ID NO: 572020 - protein, 17 aa, Homo sapiens
  CDR3 for beta chain variable domain of TCR clone 286010 (TRBV19, TRBJ2-2)
CARSRNPGGFGTGELFF

SEQ ID NO: 572021 - protein, 11 aa, Homo sapiens
  CDR3 for alpha chain variable domain of TCR clone 286011 (TRAV2, TRAJ13)
CASGGYQKVTF

SEQ ID NO: 572022 - protein, 15 aa, Homo sapiens
  CDR3 for beta chain variable domain of TCR clone 286011 (TRBV20-1, TRBJ2-7)
CSARDRVSGMDERYF

SEQ ID NO: 572023 - protein, 12 aa, Homo sapiens
  CDR3 for alpha chain variable domain of TCR clone 286012 (TRAV6, TRAJ3)
CALYSSASKIIF

SEQ ID NO: 572024 - protein, 12 aa, Homo sapiens
  CDR3 for beta chain variable domain of TCR clone 286012 (TRBV7-2, TRBJ2-3)
CASSLIGETQYC

SEQ ID NO: 572025 - protein, 15 aa, Homo sapiens
  CDR3 for alpha chain variable domain of TCR clone 286013 (TRAV38-2/DV8, TRAJ48)
CAYRSGGFGNEKLTF

SEQ ID NO: 572026 - protein, 16 aa, Homo sapiens
  CDR3 for beta chain variable domain of TCR clone 286013 (TRBV28, TRBJ2-7)
CASSPWVATGDLSRYF

SEQ ID NO: 572027 - protein, 14 aa, Homo sapiens
  CDR3 for alpha chain variable domain of TCR clone 286014 (TRAV8-2, TRAJ4)
CVVSPSGGYNKLIF

SEQ ID NO: 572028 - protein, 18 aa, Homo sapiens
  CDR3 for beta chain variable domain of TCR clone 286014 (TRBV25-1, TRBJ1-2)
CASSGLQNGQGLIFGYTF

SEQ ID NO: 572029 - protein, 11 aa, Homo sapiens
  CDR3 for alpha chain variable domain of TCR clone 286015 (TRAV12-3, TRAJ17)
CAMTLTGKLTF

SEQ ID NO: 572030 - protein, 15 aa, Homo sapiens
  CDR3 for beta chain variable domain of TCR clone 286015 (TRBV20-1, TRBJ2-7)
CSARDRVSGMVEQYF

SEQ ID NO: 572031 - protein, 15 aa, Homo sapiens
  CDR3 for alpha chain variable domain of TCR clone 286016 (TRAV4, TRAJ39)
CLVGPNNNAGNMLTF

SEQ ID NO: 572032 - protein, 14 aa, Homo sapiens
  CDR3 for beta chain variable domain of TCR clone 286016 (TRBV7-2, TRBJ2-7)
CASSPKTSFYEQYV

SEQ ID NO: 572033 - protein, 10 aa, Homo sapiens
  CDR3 for alpha chain variable domain of TCR clone 286017 (TRAV38-2/DV8, TRAJ40)
CASGTYKYIF

SEQ ID NO: 572034 - protein, 14 aa, Homo sapiens
  CDR3 for beta chain variable domain of TCR clone 286017 (TRBV11-3, TRBJ2-7)
CASSLGVGDYEQYF

SEQ ID NO: 572035 - protein, 14 aa, Homo sapiens
  CDR3 for alpha chain variable domain of TCR clone 286018 (TRAV2, TRAJ9)
CAVEDRSGGFKIIF

SEQ ID NO: 572036 - protein, 13 aa, Homo sapiens
  CDR3 for beta chain variable domain of TCR clone 286018 (TRBV3-1, TRBJ1-1)
CASSPGVITEAFF

SEQ ID NO: 572037 - protein, 16 aa, Homo sapiens
  CDR3 for alpha chain variable domain of TCR clone 286019 (TRAV30, TRAJ24)
CGTEIVDADSGGKFQF

SEQ ID NO: 572038 - protein, 15 aa, Homo sapiens
  CDR3 for beta chain variable domain of TCR clone 286019 (TRBV15, TRBJ1-5)
CATSRDPVSNQHQHF

SEQ ID NO: 572039 - protein, 17 aa, Homo sapiens
  CDR3 for alpha chain variable domain of TCR clone 286020 (TRAV3, TRAJ6)
CAVRDGPRAGGSYRPTV

SEQ ID NO: 572040 - protein, 20 aa, Homo sapiens
  CDR3 for beta chain variable domain of TCR clone 286020 (TRBV28, TRBJ2-1)
CASTPIGRSPGLAGGNEQFF

SEQ ID NO: 572041 - protein, 14 aa, Homo sapiens
  CDR3 for alpha chain variable domain of TCR clone 286021 (TRAV1-2, TRAJ16)
CAVNRFSDGQKLLF

SEQ ID NO: 572042 - protein, 15 aa, Homo sapiens
  CDR3 for beta chain variable domain of TCR clone 286021 (TRBV5-5, TRBJ1-5)
CASSPTPGSNQPQHF

SEQ ID NO: 572043 - protein, 13 aa, Homo sapiens
  CDR3 for alpha chain variable domain of TCR clone 286022 (TRAV12-1, TRAJ36)
CGDAQTGANNLFF

SEQ ID NO: 572044 - protein, 14 aa, Homo sapiens
  CDR3 for beta chain variable domain of TCR clone 286022 (TRBV4-2, TRBJ2-1)
CTSGLDRAYNEQFF

SEQ ID NO: 572045 - protein, 13 aa, Homo sapiens
  CDR3 for alpha chain variable domain of TCR clone 286023 (TRAV12-1, TRAJ31)
CVVNMNNNARLMF

SEQ ID NO: 572046 - protein, 18 aa, Homo sapiens
  CDR3 for beta chain variable domain of TCR clone 286023 (TRBV13, TRBJ2-6)
CASSPMTSGGSGANVLTF

SEQ ID NO: 572047 - protein, 15 aa, Homo sapiens
  CDR3 for alpha chain variable domain of TCR clone 286024 (TRAV8-3, TRAJ27)
CAVGPSKTNAGKSTF

SEQ ID NO: 572048 - protein, 16 aa, Homo sapiens
  CDR3 for beta chain variable domain of TCR clone 286024 (TRBV6-6, TRBJ2-1)
CASSVLSDSSYNEQFF

SEQ ID NO: 572049 - protein, 12 aa, Homo sapiens
  CDR3 for alpha chain variable domain of TCR clone 286025 (TRAV27, TRAJ9)
CAGESGGFKTIF

SEQ ID NO: 572050 - protein, 15 aa, Homo sapiens
  CDR3 for beta chain variable domain of TCR clone 286025 (TRBV5-1, TRBJ2-3)
CASRNQAGSTDTQYF

SEQ ID NO: 572051 - protein, 14 aa, Homo sapiens
  CDR3 for alpha chain variable domain of TCR clone 286026 (TRAV12-3, TRAJ10)
SHLPLTGGANKLTF

SEQ ID NO: 572052 - protein, 14 aa, Homo sapiens
  CDR3 for beta chain variable domain of TCR clone 286026 (TRBV11-3, TRBJ2-7)
CASSPDRNTYEQYF

SEQ ID NO: 572053 - protein, 16 aa, Homo sapiens
  CDR3 for alpha chain variable domain of TCR clone 286027 (TRAV27, TRAJ13)
CAGAKSDSGGYQKVTF

SEQ ID NO: 572054 - protein, 15 aa, Homo sapiens
  CDR3 for beta chain variable domain of TCR clone 286027 (TRBV2, TRBJ2-4)
CASSGTNLAKNIQYF

SEQ ID NO: 572055 - protein, 17 aa, Homo sapiens
  CDR3 for alpha chain variable domain of TCR clone 286028 (TRAV23/DV6, TRAJ28)
CAALLAYSGAGSYQLTF

SEQ ID NO: 572056 - protein, 14 aa, Homo sapiens
  CDR3 for beta chain variable domain of TCR clone 286028 (TRBV7-2, TRBJ2-7)
CASSPKTSFYEQYF

SEQ ID NO: 572057 - protein, 11 aa, Homo sapiens
  CDR3 for alpha chain variable domain of TCR clone 286029 (TRAV1-2, TRAJ31)
CAVSKNARLMF

SEQ ID NO: 572058 - protein, 15 aa, Homo sapiens
  CDR3 for beta chain variable domain of TCR clone 286029 (TRBV28, TRBJ2-1)
CASSIIAGGRSEQFF

SEQ ID NO: 572059 - protein, 18 aa, Homo sapiens
  CDR3 for alpha chain variable domain of TCR clone 286030 (TRAV26-2, TRAJ54)
CILRDVEVGIQGALKRVF

SEQ ID NO: 572060 - protein, 17 aa, Homo sapiens
  CDR3 for beta chain variable domain of TCR clone 286030 (TRBV20-1, TRBJ1-5)
CSASLSPGQGGNQPQHF

SEQ ID NO: 572061 - protein, 11 aa, Homo sapiens
  CDR3 for alpha chain variable domain of TCR clone 286031 (TRAV2, TRAJ33)
CAVESNYQLIW

SEQ ID NO: 572062 - protein, 12 aa, Homo sapiens
  CDR3 for beta chain variable domain of TCR clone 286031 (TRBV5-1, TRBJ2-5)
CASSLGLETQYF

SEQ ID NO: 572063 - protein, 12 aa, Homo sapiens
  CDR3 for alpha chain variable domain of TCR clone 286032 (TRAV1-1, TRAJ30)
CAVRGRDDKIIF

SEQ ID NO: 572064 - protein, 14 aa, Homo sapiens
  CDR3 for beta chain variable domain of TCR clone 286032 (TRBV6-1, TRBJ1-3)
CASVQGGRGNTIYF

SEQ ID NO: 572065 - protein, 13 aa, Homo sapiens
  CDR3 for alpha chain variable domain of TCR clone 286033 (TRAV27, TRAJ41)
CAGEGNSGYALNF

SEQ ID NO: 572066 - protein, 17 aa, Homo sapiens
  CDR3 for beta chain variable domain of TCR clone 286033 (TRBV24-1, TRBJ2-4)
CATSDAEARGVRNIQYF

SEQ ID NO: 572067 - protein, 14 aa, Homo sapiens
  CDR3 for alpha chain variable domain of TCR clone 286034 (TRAV12-3, TRAJ10)
SHLPLTGGGNKLIF

SEQ ID NO: 572068 - protein, 11 aa, Homo sapiens
  CDR3 for beta chain variable domain of TCR clone 286034 (TRBV11-2, TRBJ2-2)
CASSLPGELFL

SEQ ID NO: 572069 - protein, 16 aa, Homo sapiens
  CDR3 for alpha chain variable domain of TCR clone 286035 (TRAV3, TRAJ3)
CAVRGRAKSSASKIIF

SEQ ID NO: 572070 - protein, 13 aa, Homo sapiens
  CDR3 for beta chain variable domain of TCR clone 286035 (TRBV10-3, TRBJ2-7)
CASKLAVNYEQYF

SEQ ID NO: 572071 - protein, 16 aa, Homo sapiens
  CDR3 for alpha chain variable domain of TCR clone 286036 (TRAV30, TRAJ24)
CGTEIVDADSWGKFQF

SEQ ID NO: 572072 - protein, 15 aa, Homo sapiens
  CDR3 for beta chain variable domain of TCR clone 286036 (TRBV20-1, TRBJ2-4)
CSARDHTGGQNIQYF

SEQ ID NO: 572073 - protein, 14 aa, Homo sapiens
  CDR3 for alpha chain variable domain of TCR clone 286037 (TRAV35, TRAJ22)
CAGLRPGSARQLTF

SEQ ID NO: 572074 - protein, 15 aa, Homo sapiens
  CDR3 for beta chain variable domain of TCR clone 286037 (TRBV12-4, TRBJ2-5)
CACSPPTGLQETQYF

SEQ ID NO: 572075 - protein, 14 aa, Homo sapiens
  CDR3 for alpha chain variable domain of TCR clone 286038 (TRAV12-1, TRAJ13)
FVVIDSGGYQKVTF

SEQ ID NO: 572076 - protein, 13 aa, Homo sapiens
  CDR3 for beta chain variable domain of TCR clone 286038 (TRBV20-1, TRBJ1-1)
CSAPPGGHTEAFF

SEQ ID NO: 572077 - protein, 15 aa, Homo sapiens
  CDR3 for alpha chain variable domain of TCR clone 286039 (TRAV17, TRAJ10)
CAKVLLTGGGNKLTF

SEQ ID NO: 572078 - protein, 16 aa, Homo sapiens
  CDR3 for beta chain variable domain of TCR clone 286039 (TRBV7-9, TRBJ2-3)
CASSPWREVGTDTQYF

SEQ ID NO: 572079 - protein, 14 aa, Homo sapiens
  CDR3 for alpha chain variable domain of TCR clone 286040 (TRAV29/DV5, TRAJ10)
SHLPLTGGGNKLTF

SEQ ID NO: 572080 - protein, 17 aa, Homo sapiens
  CDR3 for beta chain variable domain of TCR clone 286040 (TRBV13, TRBJ2-3)
CASSLSRVAGGRNTQYF

SEQ ID NO: 572081 - protein, 11 aa, Homo sapiens
  CDR3 for alpha chain variable domain of TCR clone 286041 (TRAV17, TRAJ9)
CGFTGGLKTIF

SEQ ID NO: 572082 - protein, 14 aa, Homo sapiens
  CDR3 for beta chain variable domain of TCR clone 286041 (TRBV11-2, TRBJ2-5)
CASSRTGGIETQYF

SEQ ID NO: 572083 - protein, 19 aa, Homo sapiens
  CDR3 for alpha chain variable domain of TCR clone 286042 (TRAV21, TRAJ45)
CAVEAPRGDQEEVLTESPF

SEQ ID NO: 572084 - protein, 12 aa, Homo sapiens
  CDR3 for beta chain variable domain of TCR clone 286042 (TRBV29-1, TRBJ1-3)
CSTRDSGNTIYF

SEQ ID NO: 572085 - protein, 18 aa, Homo sapiens
  CDR3 for alpha chain variable domain of TCR clone 286043 (TRAV26-1, TRAJ23)
CIVRVGLEVWNQGGKLIF

SEQ ID NO: 572086 - protein, 13 aa, Homo sapiens
  CDR3 for beta chain variable domain of TCR clone 286043 (TRBV11-2, TRBJ2-5)
CASSFSSQETQYF

SEQ ID NO: 572087 - protein, 12 aa, Homo sapiens
  CDR3 for alpha chain variable domain of TCR clone 286044 (TRAV22, TRAJ36)
CSVGTGANNLFF

SEQ ID NO: 572088 - protein, 17 aa, Homo sapiens
  CDR3 for beta chain variable domain of TCR clone 286044 (TRBV15, TRBJ1-4)
CATSRYGTGDPNEKLFF

SEQ ID NO: 572089 - protein, 14 aa, Homo sapiens
  CDR3 for alpha chain variable domain of TCR clone 286045 (TRAV26-1, TRAJ49)
CIVRLTHTGNQFYF

SEQ ID NO: 572090 - protein, 13 aa, Homo sapiens
  CDR3 for beta chain variable domain of TCR clone 286045 (TRBV10-1, TRBJ1-1)
CASQGQTNTEAFF

SEQ ID NO: 572091 - protein, 17 aa, Homo sapiens
  CDR3 for alpha chain variable domain of TCR clone 286046 (TRAV12-2, TRAJ45)
CAVNIWGSGGVADGLTF

SEQ ID NO: 572092 - protein, 18 aa, Homo sapiens
  CDR3 for beta chain variable domain of TCR clone 286046 (TRBV20-1, TRBJ2-6)
CSAETTPTHGSGANVLTF

SEQ ID NO: 572093 - protein, 13 aa, Homo sapiens
  CDR3 for alpha chain variable domain of TCR clone 286047 (TRAV23/DV6, TRAJ24)
CAASTDSWGKFQF

SEQ ID NO: 572094 - protein, 14 aa, Homo sapiens
  CDR3 for beta chain variable domain of TCR clone 286047 (TRBV12-4, TRBJ1-1)
CASSFDRVNTEAFF

SEQ ID NO: 572095 - protein, 14 aa, Homo sapiens
  CDR3 for alpha chain variable domain of TCR clone 286048 (TRAV8-3, TRAJ20)
CAVGPRGNDYKPSF

SEQ ID NO: 572096 - protein, 11 aa, Homo sapiens
  CDR3 for beta chain variable domain of TCR clone 286048 (TRBV10-3, TRBJ2-2)
CATKGTGELFF

SEQ ID NO: 572097 - protein, 18 aa, Homo sapiens
  CDR3 for alpha chain variable domain of TCR clone 286049 (TRAV20, TRAJ4)
CAVQPCHMFSGGYNKLIF

SEQ ID NO: 572098 - protein, 13 aa, Homo sapiens
  CDR3 for beta chain variable domain of TCR clone 286049 (TRBV19, TRBJ2-3)
CATWDKVTDTQYF

SEQ ID NO: 572099 - protein, 15 aa, Homo sapiens
  CDR3 for alpha chain variable domain of TCR clone 286050 (TRAV8-3, TRAJ41)
CAVGSNSNSWYALNF

SEQ ID NO: 572100 - protein, 17 aa, Homo sapiens
  CDR3 for beta chain variable domain of TCR clone 286050 (TRBV25-1, TRBJ2-1)
CASSAYGQGRGVYEQFF

SEQ ID NO: 572101 - protein, 11 aa, Homo sapiens
  CDR3 for alpha chain variable domain of TCR clone 286051 (TRAV4, TRAJ31)
CLVGDNARLMF

SEQ ID NO: 572102 - protein, 11 aa, Homo sapiens
  CDR3 for beta chain variable domain of TCR clone 286051 (TRBV7-3, TRBJ2-5)
CASSLSETQYF

SEQ ID NO: 572103 - protein, 14 aa, Homo sapiens
  CDR3 for alpha chain variable domain of TCR clone 286052 (TRAV21, TRAJ35)
CAVMPIGFGNVLHC

SEQ ID NO: 572104 - protein, 16 aa, Homo sapiens
  CDR3 for beta chain variable domain of TCR clone 286052 (TRBV19, TRBJ2-1)
CASSKAGPSSYNEQFF

SEQ ID NO: 572105 - protein, 14 aa, Homo sapiens
  CDR3 for alpha chain variable domain of TCR clone 286053 (TRAV1-2, TRAJ8)
CAVREDTGFQKLVF

SEQ ID NO: 572106 - protein, 17 aa, Homo sapiens
  CDR3 for beta chain variable domain of TCR clone 286053 (TRBV7-9, TRBJ1-1)
CASSSPPGQGQNTEAFF

SEQ ID NO: 572107 - protein, 14 aa, Homo sapiens
  CDR3 for alpha chain variable domain of TCR clone 286054 (TRAV8-3, TRAJ4)
CAVGAAGGYNKLIF

SEQ ID NO: 572108 - protein, 14 aa, Homo sapiens
  CDR3 for beta chain variable domain of TCR clone 286054 (TRBV6-5, TRBJ2-1)
CQQLRWGAGNEQFF

SEQ ID NO: 572109 - protein, 17 aa, Homo sapiens
  CDR3 for alpha chain variable domain of TCR clone 286055 (TRAV12-1, TRAJ42)
WVVMRMNYGGSQGNLIF

SEQ ID NO: 572110 - protein, 13 aa, Homo sapiens
  CDR3 for beta chain variable domain of TCR clone 286055 (TRBV7-2, TRBJ1-1)
CASSLARPAEAFF

SEQ ID NO: 572111 - protein, 16 aa, Homo sapiens
  CDR3 for alpha chain variable domain of TCR clone 286056 (TRAV8-3, TRAJ52)
CAVQPVGGTSYGKLTF

SEQ ID NO: 572112 - protein, 15 aa, Homo sapiens
  CDR3 for beta chain variable domain of TCR clone 286056 (TRBV11-2, TRBJ2-7)
CASSLAGGVATEQYF

SEQ ID NO: 572113 - protein, 20 aa, Homo sapiens
  CDR3 for alpha chain variable domain of TCR clone 286057 (TRAV21, TRAJ4)
AASQPGDSATLAGGYNKLIF

SEQ ID NO: 572114 - protein, 19 aa, Homo sapiens
  CDR3 for beta chain variable domain of TCR clone 286057 (TRBV18, TRBJ1-3)
WASSPLSRTGMSSGNTIYF

SEQ ID NO: 572115 - protein, 15 aa, Homo sapiens
  CDR3 for alpha chain variable domain of TCR clone 286058 (TRAV12-1, TRAJ4)
CVVNPFSGGYNKLIF

SEQ ID NO: 572116 - protein, 13 aa, Homo sapiens
  CDR3 for beta chain variable domain of TCR clone 286058 (TRBV20-1, TRBJ1-2)
CSARGTADYVYTF

SEQ ID NO: 572117 - protein, 14 aa, Homo sapiens
  CDR3 for alpha chain variable domain of TCR clone 286059 (TRAV12-3, TRAJ48)
CAMIEGFGNEKLTF

SEQ ID NO: 572118 - protein, 16 aa, Homo sapiens
  CDR3 for beta chain variable domain of TCR clone 286059 (TRBV15, TRBJ1-4)
CATSRDLAGRGEKLFF

SEQ ID NO: 572119 - protein, 13 aa, Homo sapiens
  CDR3 for alpha chain variable domain of TCR clone 286060 (TRAV12-2, TRAJ12)
CAVNGDSSYKLIF

SEQ ID NO: 572120 - protein, 13 aa, Homo sapiens
  CDR3 for beta chain variable domain of TCR clone 286060 (TRBV7-2, TRBJ2-2)
CASSLAVTGELFF

SEQ ID NO: 572121 - protein, 16 aa, Homo sapiens
  CDR3 for alpha chain variable domain of TCR clone 286061 (TRAV3, TRAJ37)
FAVRGKGSGNTGKLIF

SEQ ID NO: 572122 - protein, 16 aa, Homo sapiens
  CDR3 for beta chain variable domain of TCR clone 286061 (TRBV10-3, TRBJ2-1)
CAISGVGDGGGGEQFF

SEQ ID NO: 572123 - protein, 15 aa, Homo sapiens
  CDR3 for alpha chain variable domain of TCR clone 286062 (TRAV27, TRAJ38)
CAARRNAGNNRKLIW

SEQ ID NO: 572124 - protein, 16 aa, Homo sapiens
  CDR3 for beta chain variable domain of TCR clone 286062 (TRBV12-5, TRBJ1-5)
CASSRPVGGSNQPQHF

SEQ ID NO: 572125 - protein, 14 aa, Homo sapiens
  CDR3 for alpha chain variable domain of TCR clone 286063 (TRAV20, TRAJ4)
CAVRLGGGYNKLIF

SEQ ID NO: 572126 - protein, 12 aa, Homo sapiens
  CDR3 for beta chain variable domain of TCR clone 286063 (TRBV5-1, TRBJ2-5)
CASSLGLETQYF

SEQ ID NO: 572127 - protein, 14 aa, Homo sapiens
  CDR3 for alpha chain variable domain of TCR clone 286064 (TRAV1-2, TRAJ8)
CAVREDTGCQKLVF

SEQ ID NO: 572128 - protein, 15 aa, Homo sapiens
  CDR3 for beta chain variable domain of TCR clone 286064 (TRBV4-1, TRBJ2-7)
CASSQDTGRLYEQYF

SEQ ID NO: 572129 - protein, 12 aa, Homo sapiens
  CDR3 for alpha chain variable domain of TCR clone 286065 (TRAV8-3, TRAJ26)
CAGDNYGQNFVF

SEQ ID NO: 572130 - protein, 15 aa, Homo sapiens
  CDR3 for beta chain variable domain of TCR clone 286065 (TRBV4-2, TRBJ1-1)
CASSQDPDSNTEAFF

SEQ ID NO: 572131 - protein, 12 aa, Homo sapiens
  CDR3 for alpha chain variable domain of TCR clone 286066 (TRAV12-1, TRAJ34)
CVVAGATDKLIF

SEQ ID NO: 572132 - protein, 12 aa, Homo sapiens
  CDR3 for beta chain variable domain of TCR clone 286066 (TRBV7-9, TRBJ1-1)
CPSSLVRGEAFF

SEQ ID NO: 572133 - protein, 15 aa, Homo sapiens
  CDR3 for alpha chain variable domain of TCR clone 286067 (TRAV17, TRAJ16)
CATALRFSDGQKLLF

SEQ ID NO: 572134 - protein, 15 aa, Homo sapiens
  CDR3 for beta chain variable domain of TCR clone 286067 (TRBV20-1, TRBJ1-1)
CSASRGVTGTTEAFF

SEQ ID NO: 572135 - protein, 14 aa, Homo sapiens
  CDR3 for alpha chain variable domain of TCR clone 286068 (TRAV12-2, TRAJ13)
CAVKKTGGYQQVTF

SEQ ID NO: 572136 - protein, 14 aa, Homo sapiens
  CDR3 for beta chain variable domain of TCR clone 286068 (TRBV12-5, TRBJ2-5)
CASGSRTHQETQYF

SEQ ID NO: 572137 - protein, 11 aa, Homo sapiens
  CDR3 for alpha chain variable domain of TCR clone 286069 (TRAV2, TRAJ33)
CAVDSNYQLIW

SEQ ID NO: 572138 - protein, 13 aa, Homo sapiens
  CDR3 for beta chain variable domain of TCR clone 286069 (TRBV19, TRBJ2-5)
CASSIPYGETQYF

SEQ ID NO: 572139 - protein, 15 aa, Homo sapiens
  CDR3 for alpha chain variable domain of TCR clone 286070 (TRAV25, TRAJ52)
CAGRPGGTSYGKLTF

SEQ ID NO: 572140 - protein, 17 aa, Homo sapiens
  CDR3 for beta chain variable domain of TCR clone 286070 (TRBV7-8, TRBJ2-6)
CVSSAGTGGAGANVLTF

SEQ ID NO: 572141 - protein, 13 aa, Homo sapiens
  CDR3 for alpha chain variable domain of TCR clone 286071 (TRAV12-1, TRAJ26)
SATYLYYGQNFVF

SEQ ID NO: 572142 - protein, 13 aa, Homo sapiens
  CDR3 for beta chain variable domain of TCR clone 286071 (TRBV10-3, TRBJ2-7)
CASKLAVNYEQYF

SEQ ID NO: 572143 - protein, 15 aa, Homo sapiens
  CDR3 for alpha chain variable domain of TCR clone 286072 (TRAV12-1, TRAJ4)
CVVNPFFGGSNKLIF

SEQ ID NO: 572144 - protein, 13 aa, Homo sapiens
  CDR3 for beta chain variable domain of TCR clone 286072 (TRBV20-1, TRBJ1-2)
CSARGTADYGYTF

SEQ ID NO: 572145 - protein, 16 aa, Homo sapiens
  CDR3 for alpha chain variable domain of TCR clone 286073 (TRAV23/DV6, TRAJ9)
CSASIGGNTGGFKTIC

SEQ ID NO: 572146 - protein, 12 aa, Homo sapiens
  CDR3 for beta chain variable domain of TCR clone 286073 (TRBV11-2, TRBJ2-1)
CASSVQREGQFF

SEQ ID NO: 572147 - protein, 15 aa, Homo sapiens
  CDR3 for alpha chain variable domain of TCR clone 286074 (TRAV25, TRAJ52)
CAGRPGGTTYGKLTF

SEQ ID NO: 572148 - protein, 17 aa, Homo sapiens
  CDR3 for beta chain variable domain of TCR clone 286074 (TRBV7-8, TRBJ2-6)
CASSAGTGGPGANGLTF

SEQ ID NO: 572149 - protein, 14 aa, Homo sapiens
  CDR3 for alpha chain variable domain of TCR clone 286075 (TRAV12-2, TRAJ53)
CAVKGGGRYYKLTF

SEQ ID NO: 572150 - protein, 14 aa, Homo sapiens
  CDR3 for beta chain variable domain of TCR clone 286075 (TRBV7-7, TRBJ2-2)
CATRQDSDTGELFF

SEQ ID NO: 572151 - protein, 13 aa, Homo sapiens
  CDR3 for alpha chain variable domain of TCR clone 286076 (TRAV12-1, TRAJ33)
CCDAPDSNYQLIW

SEQ ID NO: 572152 - protein, 12 aa, Homo sapiens
  CDR3 for beta chain variable domain of TCR clone 286076 (TRBV11-2, TRBJ2-2)
CASSLGGGELFF

SEQ ID NO: 572153 - protein, 12 aa, Homo sapiens
  CDR3 for alpha chain variable domain of TCR clone 286077 (TRAV13-2, TRAJ23)
CAERHRGVKLIF

SEQ ID NO: 572154 - protein, 12 aa, Homo sapiens
  CDR3 for beta chain variable domain of TCR clone 286077 (TRBV11-2, TRBJ2-2)
CASSLGGGELFF

SEQ ID NO: 572155 - protein, 15 aa, Homo sapiens
  CDR3 for alpha chain variable domain of TCR clone 286078 (TRAV23/DV6, TRAJ30)
CAASSQESRDDTIIF

SEQ ID NO: 572156 - protein, 12 aa, Homo sapiens
  CDR3 for beta chain variable domain of TCR clone 286078 (TRBV7-6, TRBJ2-7)
CASSLADSEQYF

SEQ ID NO: 572157 - protein, 14 aa, Homo sapiens
  CDR3 for alpha chain variable domain of TCR clone 286079 (TRAV12-2, TRAJ13)
CAVKKTGGYQKVTF

SEQ ID NO: 572158 - protein, 16 aa, Homo sapiens
  CDR3 for beta chain variable domain of TCR clone 286079 (TRBV27, TRBJ2-5)
CASSYGPGGQKETQYF

SEQ ID NO: 572159 - protein, 15 aa, Homo sapiens
  CDR3 for alpha chain variable domain of TCR clone 286080 (TRAV2, TRAJ15)
CAVEDWEQAGTALIF

SEQ ID NO: 572160 - protein, 13 aa, Homo sapiens
  CDR3 for beta chain variable domain of TCR clone 286080 (TRBV10-2, TRBJ2-7)
CASGTSGGYEQYF

SEQ ID NO: 572161 - protein, 15 aa, Homo sapiens
  CDR3 for alpha chain variable domain of TCR clone 286081 (TRAV3, TRAJ30)
CAVRDEYGRDDKIIF

SEQ ID NO: 572162 - protein, 17 aa, Homo sapiens
  CDR3 for beta chain variable domain of TCR clone 286081 (TRBV7-8, TRBJ2-6)
CASSAGTGGAGANVLTF

SEQ ID NO: 572163 - protein, 12 aa, Homo sapiens
  CDR3 for alpha chain variable domain of TCR clone 286082 (TRAV13-1, TRAJ3)
CEATGVQQCFQD

SEQ ID NO: 572164 - protein, 16 aa, Homo sapiens
  CDR3 for beta chain variable domain of TCR clone 286082 (TRBV7-3, TRBJ2-2)
CASSSKRGTLSGELFF

SEQ ID NO: 572165 - protein, 12 aa, Homo sapiens
  CDR3 for alpha chain variable domain of TCR clone 286083 (TRAV36/DV7, TRAJ54)
CAVARGAQKLVF

SEQ ID NO: 572166 - protein, 13 aa, Homo sapiens
  CDR3 for beta chain variable domain of TCR clone 286083 (TRBV7-3, TRBJ1-1)
CQQLKGGNTEAFF

SEQ ID NO: 572167 - protein, 15 aa, Homo sapiens
  CDR3 for alpha chain variable domain of TCR clone 286084 (TRAV26-1, TRAJ29)
CIVRGEGSGNTPLVF

SEQ ID NO: 572168 - protein, 15 aa, Homo sapiens
  CDR3 for beta chain variable domain of TCR clone 286084 (TRBV7-9, TRBJ1-5)
CASSQGHQPNQHQHF

SEQ ID NO: 572169 - protein, 15 aa, Homo sapiens
  CDR3 for alpha chain variable domain of TCR clone 286085 (TRAV12-1, TRAJ4)
CVVNGFSGGYNKLMF

SEQ ID NO: 572170 - protein, 18 aa, Homo sapiens
  CDR3 for beta chain variable domain of TCR clone 286085 (TRBV6-5, TRBJ2-1)
CASSYSSRRAGVYNEQFF

SEQ ID NO: 572171 - protein, 15 aa, Homo sapiens
  CDR3 for alpha chain variable domain of TCR clone 286086 (TRAV26-1, TRAJ15)
CIVRAANQAGTALIF

SEQ ID NO: 572172 - protein, 13 aa, Homo sapiens
  CDR3 for beta chain variable domain of TCR clone 286086 (TRBV12-4, TRBJ1-2)
CASSLRQGKGYTF

SEQ ID NO: 572173 - protein, 15 aa, Homo sapiens
  CDR3 for alpha chain variable domain of TCR clone 286087 (TRAV9-2, TRAJ8)
CALRGLNAGFQKLVF

SEQ ID NO: 572174 - protein, 12 aa, Homo sapiens
  CDR3 for beta chain variable domain of TCR clone 286087 (TRBV12-5, TRBJ2-5)
CASGQGVETQYF

SEQ ID NO: 572175 - protein, 14 aa, Homo sapiens
  CDR3 for alpha chain variable domain of TCR clone 286088 (TRAV12-2, TRAJ38)
CAPQTAGNNRKLIW

SEQ ID NO: 572176 - protein, 18 aa, Homo sapiens
  CDR3 for beta chain variable domain of TCR clone 286088 (TRBV28, TRBJ1-3)
CASKTPVGQIGSGITIYF

SEQ ID NO: 572177 - protein, 18 aa, Homo sapiens
  CDR3 for alpha chain variable domain of TCR clone 286089 (TRAV21, TRAJ52)
CAVMPSPAGGTSYGKLTF

SEQ ID NO: 572178 - protein, 17 aa, Homo sapiens
  CDR3 for beta chain variable domain of TCR clone 286089 (TRBV13, TRBJ2-3)
CASSLSRGAGGRNTQYF

SEQ ID NO: 572179 - protein, 13 aa, Homo sapiens
  CDR3 for alpha chain variable domain of TCR clone 286090 (TRAV3, TRAJ21)
CAVREPDFNKFYF

SEQ ID NO: 572180 - protein, 14 aa, Homo sapiens
  CDR3 for beta chain variable domain of TCR clone 286090 (TRBV11-2, TRBJ1-2)
CASSLGTANYGYTF

SEQ ID NO: 572181 - protein, 14 aa, Homo sapiens
  CDR3 for alpha chain variable domain of TCR clone 286091 (TRAV12-1, TRAJ17)
CVGNYKAAGNKLTF

SEQ ID NO: 572182 - protein, 15 aa, Homo sapiens
  CDR3 for beta chain variable domain of TCR clone 286091 (TRBV7-2, TRBJ2-7)
CASSLALGSAYEQYF

SEQ ID NO: 572183 - protein, 12 aa, Homo sapiens
  CDR3 for alpha chain variable domain of TCR clone 286092 (TRAV12-3, TRAJ17)
CAMTLTGNKLNF

SEQ ID NO: 572184 - protein, 15 aa, Homo sapiens
  CDR3 for beta chain variable domain of TCR clone 286092 (TRBV20-1, TRBJ2-7)
WSARDRVSGMDEQYF

SEQ ID NO: 572185 - protein, 15 aa, Homo sapiens
  CDR3 for alpha chain variable domain of TCR clone 286093 (TRAV13-1, TRAJ57)
QVPPLSQGGSETLVF

SEQ ID NO: 572186 - protein, 17 aa, Homo sapiens
  CDR3 for beta chain variable domain of TCR clone 286093 (TRBV7-3, TRBJ2-3)
CASSLMKRMRGADTQYF

SEQ ID NO: 572187 - protein, 13 aa, Homo sapiens
  CDR3 for alpha chain variable domain of TCR clone 286094 (TRAV8-3, TRAJ37)
CAVGSGNTGKLIF

SEQ ID NO: 572188 - protein, 11 aa, Homo sapiens
  CDR3 for beta chain variable domain of TCR clone 286094 (TRBV29-1, TRBJ1-1)
CSLQQNAEAFF

SEQ ID NO: 572189 - protein, 14 aa, Homo sapiens
  CDR3 for alpha chain variable domain of TCR clone 286095 (TRAV8-3, TRAJ39)
CAVGANNAGNMLTF

SEQ ID NO: 572190 - protein, 15 aa, Homo sapiens
  CDR3 for beta chain variable domain of TCR clone 286095 (TRBV19, TRBJ2-7)
CASSIGGGLVNEQYF

SEQ ID NO: 572191 - protein, 15 aa, Homo sapiens
  CDR3 for alpha chain variable domain of TCR clone 286096 (TRAV8-6, TRAJ49)
CAVSRASNTGNQFYF

SEQ ID NO: 572192 - protein, 13 aa, Homo sapiens
  CDR3 for beta chain variable domain of TCR clone 286096 (TRBV7-3, TRBJ1-1)
CASSQDWGAEAFF

SEQ ID NO: 572193 - protein, 16 aa, Homo sapiens
  CDR3 for alpha chain variable domain of TCR clone 286097 (TRAV35, TRAJ28)
CAGQRYSGAGSYHLTF

SEQ ID NO: 572194 - protein, 14 aa, Homo sapiens
  CDR3 for beta chain variable domain of TCR clone 286097 (TRBV7-9, TRBJ2-1)
CASSSMVGFGEQFC

SEQ ID NO: 572195 - protein, 14 aa, Homo sapiens
  CDR3 for alpha chain variable domain of TCR clone 286098 (TRAV12-3, TRAJ23)
CAMSASNQGGKLIF

SEQ ID NO: 572196 - protein, 20 aa, Homo sapiens
  CDR3 for beta chain variable domain of TCR clone 286098 (TRBV7-8, TRBJ2-2)
CASSHLFPGPTIHITGELFF

SEQ ID NO: 572197 - protein, 12 aa, Homo sapiens
  CDR3 for alpha chain variable domain of TCR clone 286099 (TRAV29/DV5, TRAJ34)
CAASGNTDKLIF

SEQ ID NO: 572198 - protein, 14 aa, Homo sapiens
  CDR3 for beta chain variable domain of TCR clone 286099 (TRBV19, TRBJ2-1)
CASPTFVLSGEQFF

SEQ ID NO: 572199 - protein, 15 aa, Homo sapiens
  CDR3 for alpha chain variable domain of TCR clone 286100 (TRAV2, TRAJ9)
CAVEDLGTGGFKTIF

SEQ ID NO: 572200 - protein, 14 aa, Homo sapiens
  CDR3 for beta chain variable domain of TCR clone 286100 (TRBV25-1, TRBJ1-1)
CASTHLGGNTEAFF

SEQ ID NO: 572201 - protein, 14 aa, Homo sapiens
  CDR3 for alpha chain variable domain of TCR clone 286101 (TRAV17, TRAJ15)
CATVRGQAGTALIF

SEQ ID NO: 572202 - protein, 17 aa, Homo sapiens
  CDR3 for beta chain variable domain of TCR clone 286101 (TRBV29-1, TRBJ2-1)
CSVVGLAGAYSYNEQFF

SEQ ID NO: 572203 - protein, 12 aa, Homo sapiens
  CDR3 for alpha chain variable domain of TCR clone 286102 (TRAV12-1, TRAJ40)
CVVKVRTYKYIF

SEQ ID NO: 572204 - protein, 14 aa, Homo sapiens
  CDR3 for beta chain variable domain of TCR clone 286102 (TRBV15, TRBJ2-5)
CATSMGGSGETQYF

SEQ ID NO: 572205 - protein, 14 aa, Homo sapiens
  CDR3 for alpha chain variable domain of TCR clone 286103 (TRAV12-2, TRAJ40)
CAVKIPSGPYKYIF

SEQ ID NO: 572206 - protein, 15 aa, Homo sapiens
  CDR3 for beta chain variable domain of TCR clone 286103 (TRBV20-1, TRBJ1-4)
CSARREWGVNEKLFF

SEQ ID NO: 572207 - protein, 13 aa, Homo sapiens
  CDR3 for alpha chain variable domain of TCR clone 286104 (TRAV8-3, TRAJ43)
CAVGPDHNNDMRF

SEQ ID NO: 572208 - protein, 14 aa, Homo sapiens
  CDR3 for beta chain variable domain of TCR clone 286104 (TRBV19, TRBJ2-1)
CASPTFVLGGEQFF

SEQ ID NO: 572209 - protein, 15 aa, Homo sapiens
  CDR3 for alpha chain variable domain of TCR clone 286105 (TRAV3, TRAJ20)
CAVRDSRSNDYKLSF

SEQ ID NO: 572210 - protein, 14 aa, Homo sapiens
  CDR3 for beta chain variable domain of TCR clone 286105 (TRBV20-1, TRBJ2-7)
CSARRGNGIYGQYF

SEQ ID NO: 572211 - protein, 14 aa, Homo sapiens
  CDR3 for alpha chain variable domain of TCR clone 286106 (TRAV29/DV5, TRAJ45)
CAARFRGGADGLTF

SEQ ID NO: 572212 - protein, 15 aa, Homo sapiens
  CDR3 for beta chain variable domain of TCR clone 286106 (TRBV5-1, TRBJ2-7)
CASSLNGGPAREQYF

SEQ ID NO: 572213 - protein, 11 aa, Homo sapiens
  CDR3 for alpha chain variable domain of TCR clone 286107 (TRAV3, TRAJ21)
CAVGNFNNFYF

SEQ ID NO: 572214 - protein, 17 aa, Homo sapiens
  CDR3 for beta chain variable domain of TCR clone 286107 (TRBV20-1, TRBJ2-1)
CSASSSGLAGSYNEQFF

SEQ ID NO: 572215 - protein, 11 aa, Homo sapiens
  CDR3 for alpha chain variable domain of TCR clone 286108 (TRAV13-1, TRAJ30)
CAASRDDKSIF

SEQ ID NO: 572216 - protein, 15 aa, Homo sapiens
  CDR3 for beta chain variable domain of TCR clone 286108 (TRBV18, TRBJ1-1)
CASSPSSWVNTEAFF

SEQ ID NO: 572217 - protein, 11 aa, Homo sapiens
  CDR3 for alpha chain variable domain of TCR clone 286109 (TRAV1-1, TRAJ16)
CAAGDGQKLLF

SEQ ID NO: 572218 - protein, 16 aa, Homo sapiens
  CDR3 for beta chain variable domain of TCR clone 286109 (TRBV7-3, TRBJ2-2)
CASSLKRGTLSGELVF

SEQ ID NO: 572219 - protein, 13 aa, Homo sapiens
  CDR3 for alpha chain variable domain of TCR clone 286110 (TRAV20, TRAJ20)
FAVQAGSGYKLSF

SEQ ID NO: 572220 - protein, 13 aa, Homo sapiens
  CDR3 for beta chain variable domain of TCR clone 286110 (TRBV3-1, TRBJ2-3)
CASSQGGGDTQYF

SEQ ID NO: 572221 - protein, 18 aa, Homo sapiens
  CDR3 for alpha chain variable domain of TCR clone 286111 (TRAV8-4, TRAJ52)
CAVTRANAGGTSYGKLTL

SEQ ID NO: 572222 - protein, 16 aa, Homo sapiens
  CDR3 for beta chain variable domain of TCR clone 286111 (TRBV11-2, TRBJ2-3)
CASSSELGSSTDTQYF

SEQ ID NO: 572223 - protein, 15 aa, Homo sapiens
  CDR3 for alpha chain variable domain of TCR clone 286112 (TRAV8-3, TRAJ45)
CASSYSGGGADGLTF

SEQ ID NO: 572224 - protein, 17 aa, Homo sapiens
  CDR3 for beta chain variable domain of TCR clone 286112 (TRBV6-3, TRBJ2-7)
CTSVPSSPGTVFYEQYF

SEQ ID NO: 572225 - protein, 13 aa, Homo sapiens
  CDR3 for alpha chain variable domain of TCR clone 286113 (TRAV13-2, TRAJ41)
CAESINSGYALTF

SEQ ID NO: 572226 - protein, 14 aa, Homo sapiens
  CDR3 for beta chain variable domain of TCR clone 286113 (TRBV2, TRBJ2-1)
CASSEALDGNEQFF

SEQ ID NO: 572227 - protein, 11 aa, Homo sapiens
  CDR3 for alpha chain variable domain of TCR clone 286114 (TRAV21, TRAJ20)
CAVRDDYKLSF

SEQ ID NO: 572228 - protein, 14 aa, Homo sapiens
  CDR3 for beta chain variable domain of TCR clone 286114 (TRBV7-2, TRBJ2-7)
RASSPKTSFYEQYF

SEQ ID NO: 572229 - protein, 14 aa, Homo sapiens
  CDR3 for alpha chain variable domain of TCR clone 286115 (TRAV20, TRAJ22)
CAVQVSGSARQLTF

SEQ ID NO: 572230 - protein, 16 aa, Homo sapiens
  CDR3 for beta chain variable domain of TCR clone 286115 (TRBV11-3, TRBJ2-5)
CASSSVVAGSTETQYF

SEQ ID NO: 572231 - protein, 13 aa, Homo sapiens
  CDR3 for alpha chain variable domain of TCR clone 286116 (TRAV1-2, TRAJ11)
CAVRREGYSTLTF

SEQ ID NO: 572232 - protein, 14 aa, Homo sapiens
  CDR3 for beta chain variable domain of TCR clone 286116 (TRBV25-1, TRBJ1-1)
CASTHLGGNTDSFF

SEQ ID NO: 572233 - protein, 16 aa, Homo sapiens
  CDR3 for alpha chain variable domain of TCR clone 286117 (TRAV12-3, TRAJ53)
CAMSPGSGGSNYKLTL

SEQ ID NO: 572234 - protein, 15 aa, Homo sapiens
  CDR3 for beta chain variable domain of TCR clone 286117 (TRBV20-1, TRBJ2-7)
CSARVPAAYFYEQYF

SEQ ID NO: 572235 - protein, 12 aa, Homo sapiens
  CDR3 for alpha chain variable domain of TCR clone 286118 (TRAV21, TRAJ31)
CAVWGNNARLMF

SEQ ID NO: 572236 - protein, 18 aa, Homo sapiens
  CDR3 for beta chain variable domain of TCR clone 286118 (TRBV12-4, TRBJ2-2)
CASSLVAGTRGRTGELFF

SEQ ID NO: 572237 - protein, 12 aa, Homo sapiens
  CDR3 for alpha chain variable domain of TCR clone 286119 (TRAV8-2, TRAJ45)
CVQGGGADGLTF

SEQ ID NO: 572238 - protein, 12 aa, Homo sapiens
  CDR3 for beta chain variable domain of TCR clone 286119 (TRBV7-8, TRBJ2-7)
CASSLGDREQYF

SEQ ID NO: 572239 - protein, 13 aa, Homo sapiens
  CDR3 for alpha chain variable domain of TCR clone 286120 (TRAV1-2, TRAJ9)
CAALNTGGFKTIF

SEQ ID NO: 572240 - protein, 17 aa, Homo sapiens
  CDR3 for beta chain variable domain of TCR clone 286120 (TRBV6-1, TRBJ2-3)
CASSEALRLISTDTQYF

SEQ ID NO: 572241 - protein, 11 aa, Homo sapiens
  CDR3 for alpha chain variable domain of TCR clone 286121 (TRAV12-1, TRAJ30)
CVVNGQDKIIF

SEQ ID NO: 572242 - protein, 16 aa, Homo sapiens
  CDR3 for beta chain variable domain of TCR clone 286121 (TRBV24-1, TRBJ2-3)
CATSDAISGITETQYF

SEQ ID NO: 572243 - protein, 12 aa, Homo sapiens
  CDR3 for alpha chain variable domain of TCR clone 286122 (TRAV36/DV7, TRAJ54)
CAVVRGAQKLVF

SEQ ID NO: 572244 - protein, 17 aa, Homo sapiens
  CDR3 for beta chain variable domain of TCR clone 286122 (TRBV11-2, TRBJ2-1)
CASSLYPPGVEYNEQFF

SEQ ID NO: 572245 - protein, 16 aa, Homo sapiens
  CDR3 for alpha chain variable domain of TCR clone 286123 (TRAV17, TRAJ36)
CATVSLHWGKQPLLWD

SEQ ID NO: 572246 - protein, 13 aa, Homo sapiens
  CDR3 for beta chain variable domain of TCR clone 286123 (TRBV4-1, TRBJ1-1)
CASSQLGTGEAFF

SEQ ID NO: 572247 - protein, 14 aa, Homo sapiens
  CDR3 for alpha chain variable domain of TCR clone 286124 (TRAV1-2, TRAJ8)
CAVRGDTGFQKLVF

SEQ ID NO: 572248 - protein, 16 aa, Homo sapiens
  CDR3 for beta chain variable domain of TCR clone 286124 (TRBV12-4, TRBJ1-5)
CASSRTVGGSNQPQHF

SEQ ID NO: 572249 - protein, 15 aa, Homo sapiens
  CDR3 for alpha chain variable domain of TCR clone 286125 (TRAV3, TRAJ4)
CAVRDGTGGYNKLIF

SEQ ID NO: 572250 - protein, 14 aa, Homo sapiens
  CDR3 for beta chain variable domain of TCR clone 286125 (TRBV7-2, TRBJ2-7)
CASRSQGAAYEQYF

SEQ ID NO: 572251 - protein, 14 aa, Homo sapiens
  CDR3 for alpha chain variable domain of TCR clone 286126 (TRAV3, TRAJ17)
VAVRDAAAGNKLTF

SEQ ID NO: 572252 - protein, 13 aa, Homo sapiens
  CDR3 for beta chain variable domain of TCR clone 286126 (TRBV19, TRBJ1-2)
CASSVPGQDGYTF

SEQ ID NO: 572253 - protein, 12 aa, Homo sapiens
  CDR3 for alpha chain variable domain of TCR clone 286127 (TRAV20, TRAJ24)
CAVYNSWGKLQL

SEQ ID NO: 572254 - protein, 15 aa, Homo sapiens
  CDR3 for beta chain variable domain of TCR clone 286127 (TRBV20-1, TRBJ2-5)
CSARVPPSGRETQYF

SEQ ID NO: 572255 - protein, 13 aa, Homo sapiens
  CDR3 for alpha chain variable domain of TCR clone 286128 (TRAV13-1, TRAJ20)
CAAMVSNDYKLSF

SEQ ID NO: 572256 - protein, 13 aa, Homo sapiens
  CDR3 for beta chain variable domain of TCR clone 286128 (TRBV20-1, TRBJ2-2)
CSASAAGTGELFF

SEQ ID NO: 572257 - protein, 11 aa, Homo sapiens
  CDR3 for alpha chain variable domain of TCR clone 286129 (TRAV29/DV5, TRAJ31)
CAASYRDRLMF

SEQ ID NO: 572258 - protein, 19 aa, Homo sapiens
  CDR3 for beta chain variable domain of TCR clone 286129 (TRBV19, TRBJ2-5)
CGSSIGQVTDFFLGETQYF

SEQ ID NO: 572259 - protein, 15 aa, Homo sapiens
  CDR3 for alpha chain variable domain of TCR clone 286130 (TRAV20, TRAJ6)
CAVRLQSGGSYIPTF

SEQ ID NO: 572260 - protein, 14 aa, Homo sapiens
  CDR3 for beta chain variable domain of TCR clone 286130 (TRBV10-3, TRBJ1-2)
CAISAGGRVDGYTF

SEQ ID NO: 572261 - protein, 15 aa, Homo sapiens
  CDR3 for alpha chain variable domain of TCR clone 286131 (TRAV1-1, TRAJ5)
CAVSHMDTGRRALTF

SEQ ID NO: 572262 - protein, 17 aa, Homo sapiens
  CDR3 for beta chain variable domain of TCR clone 286131 (TRBV28, TRBJ2-7)
CASSPGLAGGDSSEQYF

SEQ ID NO: 572263 - protein, 15 aa, Homo sapiens
  CDR3 for alpha chain variable domain of TCR clone 286132 (TRAV3, TRAJ22)
CAVRDRGGSARQLTF

SEQ ID NO: 572264 - protein, 15 aa, Homo sapiens
  CDR3 for beta chain variable domain of TCR clone 286132 (TRBV27, TRBJ1-5)
CASSLGTGFDQPQHF

SEQ ID NO: 572265 - protein, 14 aa, Homo sapiens
  CDR3 for alpha chain variable domain of TCR clone 286133 (TRAV8-3, TRAJ39)
CAVGANNAGNMLTF

SEQ ID NO: 572266 - protein, 13 aa, Homo sapiens
  CDR3 for beta chain variable domain of TCR clone 286133 (TRBV7-2, TRBJ1-3)
CASSLDRGNTIYF

SEQ ID NO: 572267 - protein, 15 aa, Homo sapiens
  CDR3 for alpha chain variable domain of TCR clone 286134 (TRAV35, TRAJ58)
CAGRRQETSGSRLTF

SEQ ID NO: 572268 - protein, 11 aa, Homo sapiens
  CDR3 for beta chain variable domain of TCR clone 286134 (TRBV11-2, TRBJ1-1)
CASSISTEAFF

SEQ ID NO: 572269 - protein, 14 aa, Homo sapiens
  CDR3 for alpha chain variable domain of TCR clone 286135 (TRAV1-2, TRAJ16)
CAVNRFSDGQKLLF

SEQ ID NO: 572270 - protein, 15 aa, Homo sapiens
  CDR3 for beta chain variable domain of TCR clone 286135 (TRBV4-2, TRBJ1-1)
CASSQQGAGDTEAFV

SEQ ID NO: 572271 - protein, 14 aa, Homo sapiens
  CDR3 for alpha chain variable domain of TCR clone 286136 (TRAV12-2, TRAJ13)
CAVAGSGGYQKVTF

SEQ ID NO: 572272 - protein, 17 aa, Homo sapiens
  CDR3 for beta chain variable domain of TCR clone 286136 (TRBV28, TRBJ2-5)
CASSTPEGDALQETQYF

SEQ ID NO: 572273 - protein, 11 aa, Homo sapiens
  CDR3 for alpha chain variable domain of TCR clone 286137 (TRAV2, TRAJ33)
CAVDSNYQLIW

SEQ ID NO: 572274 - protein, 16 aa, Homo sapiens
  CDR3 for beta chain variable domain of TCR clone 286137 (TRBV5-1, TRBJ2-1)
CASSIRSGGSYNEQFF

SEQ ID NO: 572275 - protein, 23 aa, Homo sapiens
  CDR3 for alpha chain variable domain of TCR clone 286138 (TRAV8-3, )
CAVVTTRIPDIQNPDPAVYQLRD

SEQ ID NO: 572276 - protein, 14 aa, Homo sapiens
  CDR3 for beta chain variable domain of TCR clone 286138 (TRBV11-2, TRBJ2-7)
CASSPGTTSYEQYF

SEQ ID NO: 572277 - protein, 22 aa, Homo sapiens
  CDR3 for alpha chain variable domain of TCR clone 286139 (TRAV2, TRAJ32)
CAFTMVVLQTSSSLELALGLRS

SEQ ID NO: 572278 - protein, 16 aa, Homo sapiens
  CDR3 for beta chain variable domain of TCR clone 286139 (TRBV7-9, TRBJ2-7)
CASSYPDREGGYEQYF

SEQ ID NO: 572279 - protein, 15 aa, Homo sapiens
  CDR3 for alpha chain variable domain of TCR clone 286140 (TRAV21, TRAJ24)
CAARSSTDSRGKLQF

SEQ ID NO: 572280 - protein, 15 aa, Homo sapiens
  CDR3 for beta chain variable domain of TCR clone 286140 (TRBV4-1, TRBJ2-7)
CASSQNTGRLYEQYF

SEQ ID NO: 572281 - protein, 14 aa, Homo sapiens
  CDR3 for alpha chain variable domain of TCR clone 286141 (TRAV1-2, TRAJ8)
CAVREDTGFQKLVF

SEQ ID NO: 572282 - protein, 13 aa, Homo sapiens
  CDR3 for beta chain variable domain of TCR clone 286141 (TRBV12-4, TRBJ1-1)
CASSSRAGAEAFF

SEQ ID NO: 572283 - protein, 15 aa, Homo sapiens
  CDR3 for alpha chain variable domain of TCR clone 286142 (TRAV2, TRAJ11)
CAVGGRNSGYSTLTF

SEQ ID NO: 572284 - protein, 14 aa, Homo sapiens
  CDR3 for beta chain variable domain of TCR clone 286142 (TRBV4-1, TRBJ2-2)
CAISQAVNTGELFF

SEQ ID NO: 572285 - protein, 13 aa, Homo sapiens
  CDR3 for alpha chain variable domain of TCR clone 286143 (TRAV21, TRAJ20)
CAVGLRVDYKLSF

SEQ ID NO: 572286 - protein, 14 aa, Homo sapiens
  CDR3 for beta chain variable domain of TCR clone 286143 (TRBV7-8, TRBJ2-7)
CASSQTQGADEQYF

SEQ ID NO: 572287 - protein, 19 aa, Homo sapiens
  CDR3 for alpha chain variable domain of TCR clone 286144 (TRAV1-2, TRAJ26)
CLLPLCCERPDNYGQNFVF

SEQ ID NO: 572288 - protein, 15 aa, Homo sapiens
  CDR3 for beta chain variable domain of TCR clone 286144 (TRBV9, TRBJ1-6)
CASSVAGTGDSPLHF

SEQ ID NO: 572289 - protein, 16 aa, Homo sapiens
  CDR3 for alpha chain variable domain of TCR clone 286145 (TRAV14/DV4, TRAJ20)
CAMREGRSRDDYKLSF

SEQ ID NO: 572290 - protein, 14 aa, Homo sapiens
  CDR3 for beta chain variable domain of TCR clone 286145 (TRBV2, TRBJ2-5)
CASKRDGTTETQYF

SEQ ID NO: 572291 - protein, 17 aa, Homo sapiens
  CDR3 for alpha chain variable domain of TCR clone 286146 (TRAV8-6, TRAJ58)
CAVSSWVGETSGSRLTC

SEQ ID NO: 572292 - protein, 13 aa, Homo sapiens
  CDR3 for beta chain variable domain of TCR clone 286146 (TRBV10-3, TRBJ2-7)
CASTLAVNYEQYF

SEQ ID NO: 572293 - protein, 12 aa, Homo sapiens
  CDR3 for alpha chain variable domain of TCR clone 286147 (TRAV21, TRAJ11)
CAATSGYSTLTF

SEQ ID NO: 572294 - protein, 14 aa, Homo sapiens
  CDR3 for beta chain variable domain of TCR clone 286147 (TRBV20-1, TRBJ2-7)
CSATVLAGVGEQYF

SEQ ID NO: 572295 - protein, 17 aa, Homo sapiens
  CDR3 for alpha chain variable domain of TCR clone 286148 (TRAV3, TRAJ42)
CAVRDRDYGGSQGNLIF

SEQ ID NO: 572296 - protein, 13 aa, Homo sapiens
  CDR3 for beta chain variable domain of TCR clone 286148 (TRBV10-3, TRBJ2-7)
CASKLAVNYEQFF

SEQ ID NO: 572297 - protein, 14 aa, Homo sapiens
  CDR3 for alpha chain variable domain of TCR clone 286149 (TRAV13-2, TRAJ58)
CAERWLTSGSSLTF

SEQ ID NO: 572298 - protein, 16 aa, Homo sapiens
  CDR3 for beta chain variable domain of TCR clone 286149 (TRBV18, TRBJ1-4)
CASSLQTVATNEKLFF

SEQ ID NO: 572299 - protein, 14 aa, Homo sapiens
  CDR3 for alpha chain variable domain of TCR clone 286150 (TRAV29/DV5, TRAJ34)
CAACASRETDKLIF

SEQ ID NO: 572300 - protein, 15 aa, Homo sapiens
  CDR3 for beta chain variable domain of TCR clone 286150 (TRBV7-8, TRBJ2-7)
CASSLEGAGSYEQYF

SEQ ID NO: 572301 - protein, 13 aa, Homo sapiens
  CDR3 for alpha chain variable domain of TCR clone 286151 (TRAV3, TRAJ20)
CAVRSLNDYKLSF

SEQ ID NO: 572302 - protein, 13 aa, Homo sapiens
  CDR3 for beta chain variable domain of TCR clone 286151 (TRBV6-1, TRBJ2-1)
CAGMDPTDNEQFF

SEQ ID NO: 572303 - protein, 14 aa, Homo sapiens
  CDR3 for alpha chain variable domain of TCR clone 286152 (TRAV13-1, TRAJ13)
CAASRVGGYQKVTI

SEQ ID NO: 572304 - protein, 17 aa, Homo sapiens
  CDR3 for beta chain variable domain of TCR clone 286152 (TRBV15, TRBJ1-5)
CATSRAPPGTRNQPQHF

SEQ ID NO: 572305 - protein, 16 aa, Homo sapiens
  CDR3 for alpha chain variable domain of TCR clone 286153 (TRAV12-3, TRAJ10)
CAMKKGITGGGYKLTF

SEQ ID NO: 572306 - protein, 12 aa, Homo sapiens
  CDR3 for beta chain variable domain of TCR clone 286153 (TRBV20-1, TRBJ2-7)
CSAITPTKEQYF

SEQ ID NO: 572307 - protein, 13 aa, Homo sapiens
  CDR3 for alpha chain variable domain of TCR clone 286154 (TRAV12-1, TRAJ7)
CVVNMRGNNRLAF

SEQ ID NO: 572308 - protein, 15 aa, Homo sapiens
  CDR3 for beta chain variable domain of TCR clone 286154 (TRBV5-1, TRBJ2-7)
CASSLMTSGSNEQYF

SEQ ID NO: 572309 - protein, 16 aa, Homo sapiens
  CDR3 for alpha chain variable domain of TCR clone 286155 (TRAV26-1, TRAJ37)
CIVRGDGSGNTGKLIF

SEQ ID NO: 572310 - protein, 17 aa, Homo sapiens
  CDR3 for beta chain variable domain of TCR clone 286155 (TRBV4-1, TRBJ2-7)
CGSSRDPLGVSGGEQYF

SEQ ID NO: 572311 - protein, 13 aa, Homo sapiens
  CDR3 for alpha chain variable domain of TCR clone 286156 (TRAV29/DV5, TRAJ29)
CAASAAGNTPLAF

SEQ ID NO: 572312 - protein, 13 aa, Homo sapiens
  CDR3 for beta chain variable domain of TCR clone 286156 (TRBV7-2, TRBJ2-7)
CASSSPSGSEQYF

SEQ ID NO: 572313 - protein, 14 aa, Homo sapiens
  CDR3 for alpha chain variable domain of TCR clone 286157 (TRAV17, TRAJ57)
CATDPQGGSEKPVF

SEQ ID NO: 572314 - protein, 14 aa, Homo sapiens
  CDR3 for beta chain variable domain of TCR clone 286157 (TRBV15, TRBJ2-5)
CATSGDRGQETQYF

SEQ ID NO: 572315 - protein, 18 aa, Homo sapiens
  CDR3 for alpha chain variable domain of TCR clone 286158 (TRAV21, TRAJ52)
CAVRPSPAGGTSYGKLTF

SEQ ID NO: 572316 - protein, 18 aa, Homo sapiens
  CDR3 for beta chain variable domain of TCR clone 286158 (TRBV11-3, TRBJ2-1)
CASSSYPGGRDSYNEQFF

SEQ ID NO: 572317 - protein, 13 aa, Homo sapiens
  CDR3 for alpha chain variable domain of TCR clone 286159 (TRAV29/DV5, TRAJ31)
CAASRNNNATLMF

SEQ ID NO: 572318 - protein, 12 aa, Homo sapiens
  CDR3 for beta chain variable domain of TCR clone 286159 (TRBV14, TRBJ2-5)
CASSQLKETQYF

SEQ ID NO: 572319 - protein, 12 aa, Homo sapiens
  CDR3 for alpha chain variable domain of TCR clone 286160 (TRAV13-1, TRAJ9)
CAAHTGGFKTIF

SEQ ID NO: 572320 - protein, 16 aa, Homo sapiens
  CDR3 for beta chain variable domain of TCR clone 286160 (TRBV7-3, TRBJ2-2)
CASSLKRGTLSGELFF

SEQ ID NO: 572321 - protein, 18 aa, Homo sapiens
  CDR3 for alpha chain variable domain of TCR clone 286161 (TRAV21, TRAJ52)
CSVRPSPAGGTSYGKLTF

SEQ ID NO: 572322 - protein, 15 aa, Homo sapiens
  CDR3 for beta chain variable domain of TCR clone 286161 (TRBV18, TRBJ2-2)
CASSPPVGFTGELFF

SEQ ID NO: 572323 - protein, 16 aa, Homo sapiens
  CDR3 for alpha chain variable domain of TCR clone 286162 (TRAV12-3, TRAJ53)
CAMSPGSGGSNYKLTF

SEQ ID NO: 572324 - protein, 13 aa, Homo sapiens
  CDR3 for beta chain variable domain of TCR clone 286162 (TRBV14, TRBJ2-7)
CASSQDRRYEQYF

SEQ ID NO: 572325 - protein, 10 aa, Homo sapiens
  CDR3 for alpha chain variable domain of TCR clone 286163 (TRAV8-4, TRAJ43)
CAVSADDMRF

SEQ ID NO: 572326 - protein, 13 aa, Homo sapiens
  CDR3 for beta chain variable domain of TCR clone 286163 (TRBV5-5, TRBJ1-2)
CASSFWRGEDYTF

SEQ ID NO: 572327 - protein, 16 aa, Homo sapiens
  CDR3 for alpha chain variable domain of TCR clone 286164 (TRAV3, TRAJ10)
CAVRDMRAGGGNKLTF

SEQ ID NO: 572328 - protein, 11 aa, Homo sapiens
  CDR3 for beta chain variable domain of TCR clone 286164 (TRBV11-2, TRBJ1-1)
CASSINTEAFF

SEQ ID NO: 572329 - protein, 12 aa, Homo sapiens
  CDR3 for alpha chain variable domain of TCR clone 286165 (TRAV21, TRAJ37)
CAVRGNTGKLIF

SEQ ID NO: 572330 - protein, 16 aa, Homo sapiens
  CDR3 for beta chain variable domain of TCR clone 286165 (TRBV19, TRBJ2-2)
CASRSPGTRATGELFF

SEQ ID NO: 572331 - protein, 13 aa, Homo sapiens
  CDR3 for alpha chain variable domain of TCR clone 286166 (TRAV8-4, TRAJ9)
CAVSDTGGFKTIF

SEQ ID NO: 572332 - protein, 15 aa, Homo sapiens
  CDR3 for beta chain variable domain of TCR clone 286166 (TRBV20-1, TRBJ2-7)
CSARDRVSGMDEQYI

SEQ ID NO: 572333 - protein, 16 aa, Homo sapiens
  CDR3 for alpha chain variable domain of TCR clone 286167 (TRAV12-1, TRAJ43)
CVVNPHRFAAGTRLTV

SEQ ID NO: 572334 - protein, 13 aa, Homo sapiens
  CDR3 for beta chain variable domain of TCR clone 286167 (TRBV12-4, TRBJ1-2)
CASSSGPNYGYTF

SEQ ID NO: 572335 - protein, 14 aa, Homo sapiens
  CDR3 for alpha chain variable domain of TCR clone 286168 (TRAV21, TRAJ35)
CAVMPLGFGNVLHC

SEQ ID NO: 572336 - protein, 12 aa, Homo sapiens
  CDR3 for beta chain variable domain of TCR clone 286168 (TRBV7-9, TRBJ2-7)
CASSIKREEQYC

SEQ ID NO: 572337 - protein, 13 aa, Homo sapiens
  CDR3 for alpha chain variable domain of TCR clone 286169 (TRAV2, TRAJ40)
CAVVTSGTYKYIF

SEQ ID NO: 572338 - protein, 16 aa, Homo sapiens
  CDR3 for beta chain variable domain of TCR clone 286169 (TRBV7-9, TRBJ1-3)
CASSLAAGSSGNTIYF

SEQ ID NO: 572339 - protein, 16 aa, Homo sapiens
  CDR3 for alpha chain variable domain of TCR clone 286170 (TRAV3, TRAJ37)
GAVRPHGSGNTGKLIF

SEQ ID NO: 572340 - protein, 14 aa, Homo sapiens
  CDR3 for beta chain variable domain of TCR clone 286170 (TRBV25-1, TRBJ1-1)
CASTHLGGNTDAFF

SEQ ID NO: 572341 - protein, 11 aa, Homo sapiens
  CDR3 for alpha chain variable domain of TCR clone 286171 (TRAV35, TRAJ34)
CWARNTDKLIF

SEQ ID NO: 572342 - protein, 14 aa, Homo sapiens
  CDR3 for beta chain variable domain of TCR clone 286171 (TRBV7-2, TRBJ2-7)
CASRSQGAAYEQYF

SEQ ID NO: 572343 - protein, 21 aa, Homo sapiens
  CDR3 for alpha chain variable domain of TCR clone 286172 (TRAV1-1, TRAJ6)
CLLLLRCERLERTGGSYIPTF

SEQ ID NO: 572344 - protein, 13 aa, Homo sapiens
  CDR3 for beta chain variable domain of TCR clone 286172 (TRBV10-3, TRBJ2-7)
CASKLAVNYEQYF

SEQ ID NO: 572345 - protein, 12 aa, Homo sapiens
  CDR3 for alpha chain variable domain of TCR clone 286173 (TRAV8-3, TRAJ26)
CAVDNYGQNFVF

SEQ ID NO: 572346 - protein, 15 aa, Homo sapiens
  CDR3 for beta chain variable domain of TCR clone 286173 (TRBV6-5, TRBJ2-1)
CASSYDAGAGNEQFF

SEQ ID NO: 572347 - protein, 14 aa, Homo sapiens
  CDR3 for alpha chain variable domain of TCR clone 286174 (TRAV17, TRAJ45)
CATDGRGGADGLTF

SEQ ID NO: 572348 - protein, 13 aa, Homo sapiens
  CDR3 for beta chain variable domain of TCR clone 286174 (TRBV7-9, TRBJ1-2)
CASSLKQNYGYTF

SEQ ID NO: 572349 - protein, 13 aa, Homo sapiens
  CDR3 for alpha chain variable domain of TCR clone 286175 (TRAV2, TRAJ15)
CAVASQAGTALIF

SEQ ID NO: 572350 - protein, 13 aa, Homo sapiens
  CDR3 for beta chain variable domain of TCR clone 286175 (TRBV7-3, TRBJ2-1)
CASSLDSYNEQFF

SEQ ID NO: 572351 - protein, 23 aa, Homo sapiens
  CDR3 for alpha chain variable domain of TCR clone 286176 (TRAV26-1, TRAJ38)
CIADNAGNNHIQNPDPAVYQLRD

SEQ ID NO: 572352 - protein, 12 aa, Homo sapiens
  CDR3 for beta chain variable domain of TCR clone 286176 (TRBV11-2, TRBJ2-2)
CAISLGGGELFF

SEQ ID NO: 572353 - protein, 14 aa, Homo sapiens
  CDR3 for alpha chain variable domain of TCR clone 286177 (TRAV13-1, TRAJ35)
CAASKGGFGNVLHC

SEQ ID NO: 572354 - protein, 14 aa, Homo sapiens
  CDR3 for beta chain variable domain of TCR clone 286177 (TRBV25-1, TRBJ1-4)
CASSGGGQPEKLFF

SEQ ID NO: 572355 - protein, 13 aa, Homo sapiens
  CDR3 for alpha chain variable domain of TCR clone 286178 (TRAV20, TRAJ35)
CAVQEGFGNVLHY

SEQ ID NO: 572356 - protein, 14 aa, Homo sapiens
  CDR3 for beta chain variable domain of TCR clone 286178 (TRBV5-1, TRBJ1-1)
CASSSATGGTEAFF

SEQ ID NO: 572357 - protein, 14 aa, Homo sapiens
  CDR3 for alpha chain variable domain of TCR clone 286179 (TRAV1-2, TRAJ8)
CAVREDTGFQKLVF

SEQ ID NO: 572358 - protein, 13 aa, Homo sapiens
  CDR3 for beta chain variable domain of TCR clone 286179 (TRBV5-5, TRBJ1-2)
CASSFWRGEDYAF

SEQ ID NO: 572359 - protein, 14 aa, Homo sapiens
  CDR3 for alpha chain variable domain of TCR clone 286180 (TRAV3, TRAJ33)
CAVRDMGSNYQLIW

SEQ ID NO: 572360 - protein, 17 aa, Homo sapiens
  CDR3 for beta chain variable domain of TCR clone 286180 (TRBV19, TRBJ2-1)
CASSIWSAQPTQNEQFF

SEQ ID NO: 572361 - protein, 16 aa, Homo sapiens
  CDR3 for alpha chain variable domain of TCR clone 286181 (TRAV30, TRAJ24)
CGPEIVDADSWGKFQF

SEQ ID NO: 572362 - protein, 13 aa, Homo sapiens
  CDR3 for beta chain variable domain of TCR clone 286181 (TRBV11-2, TRBJ2-5)
CASSSTGEETQYF

SEQ ID NO: 572363 - protein, 14 aa, Homo sapiens
  CDR3 for alpha chain variable domain of TCR clone 286182 (TRAV8-3, TRAJ4)
CTVGASGGYNKLIF

SEQ ID NO: 572364 - protein, 16 aa, Homo sapiens
  CDR3 for beta chain variable domain of TCR clone 286182 (TRBV4-3, TRBJ2-2)
CASSHLQGSGTGELFF

SEQ ID NO: 572365 - protein, 16 aa, Homo sapiens
  CDR3 for alpha chain variable domain of TCR clone 286183 (TRAV20, TRAJ22)
SAVQASSSGSARQLTF

SEQ ID NO: 572366 - protein, 13 aa, Homo sapiens
  CDR3 for beta chain variable domain of TCR clone 286183 (TRBV7-2, TRBJ2-5)
CASSQTSVETQYF

SEQ ID NO: 572367 - protein, 12 aa, Homo sapiens
  CDR3 for alpha chain variable domain of TCR clone 286184 (TRAV2, TRAJ31)
CAVEDNNARLMF

SEQ ID NO: 572368 - protein, 13 aa, Homo sapiens
  CDR3 for beta chain variable domain of TCR clone 286184 (TRBV19, TRBJ1-2)
CASSVPGQDGYTF

SEQ ID NO: 572369 - protein, 14 aa, Homo sapiens
  CDR3 for alpha chain variable domain of TCR clone 286185 (TRAV13-1, TRAJ4)
CAATLPSGYNKLIF

SEQ ID NO: 572370 - protein, 14 aa, Homo sapiens
  CDR3 for beta chain variable domain of TCR clone 286185 (TRBV19, TRBJ2-1)
RASPTFVLSGEQFF

SEQ ID NO: 572371 - protein, 15 aa, Homo sapiens
  CDR3 for alpha chain variable domain of TCR clone 286186 (TRAV8-3, TRAJ27)
CAVGTSKTNAGKSTF

SEQ ID NO: 572372 - protein, 16 aa, Homo sapiens
  CDR3 for beta chain variable domain of TCR clone 286186 (TRBV6-6, TRBJ2-1)
CASSLLSDSSYNEQFF

SEQ ID NO: 572373 - protein, 12 aa, Homo sapiens
  CDR3 for alpha chain variable domain of TCR clone 286187 (TRAV27, TRAJ36)
CAGMTGANNLFF

SEQ ID NO: 572374 - protein, 15 aa, Homo sapiens
  CDR3 for beta chain variable domain of TCR clone 286187 (TRBV11-3, TRBJ2-3)
CASLKDGREGDTQYF

SEQ ID NO: 572375 - protein, 14 aa, Homo sapiens
  CDR3 for alpha chain variable domain of TCR clone 286188 (TRAV8-4, TRAJ8)
CAVSLNTGFQKLVF

SEQ ID NO: 572376 - protein, 18 aa, Homo sapiens
  CDR3 for beta chain variable domain of TCR clone 286188 (TRBV11-2, TRBJ2-6)
CASSLNPFLGTGANVLTF

SEQ ID NO: 572377 - protein, 16 aa, Homo sapiens
  CDR3 for alpha chain variable domain of TCR clone 286189 (TRAV8-4, TRAJ18)
CPVTANGGATLGRLYF

SEQ ID NO: 572378 - protein, 14 aa, Homo sapiens
  CDR3 for beta chain variable domain of TCR clone 286189 (TRBV12-4, TRBJ1-2)
CASSSAGHIYGYTF

SEQ ID NO: 572379 - protein, 13 aa, Homo sapiens
  CDR3 for alpha chain variable domain of TCR clone 286190 (TRAV12-2, TRAJ13)
CREEDWGLPESYF

SEQ ID NO: 572380 - protein, 15 aa, Homo sapiens
  CDR3 for beta chain variable domain of TCR clone 286190 (TRBV27, TRBJ2-1)
CASSNGGGSSNEQFF

SEQ ID NO: 572381 - protein, 15 aa, Homo sapiens
  CDR3 for alpha chain variable domain of TCR clone 286191 (TRAV21, TRAJ53)
CATLNSGGSSYKLTF

SEQ ID NO: 572382 - protein, 13 aa, Homo sapiens
  CDR3 for beta chain variable domain of TCR clone 286191 (TRBV11-2, TRBJ2-5)
CASSSTGEETQYF

SEQ ID NO: 572383 - protein, 12 aa, Homo sapiens
  CDR3 for alpha chain variable domain of TCR clone 286192 (TRAV12-3, TRAJ20)
CAMVRGDYKLSF

SEQ ID NO: 572384 - protein, 16 aa, Homo sapiens
  CDR3 for beta chain variable domain of TCR clone 286192 (TRBV11-2, TRBJ2-1)
CASSVTADFSYNEQFF

SEQ ID NO: 572385 - protein, 14 aa, Homo sapiens
  CDR3 for alpha chain variable domain of TCR clone 286193 (TRAV2, TRAJ37)
CAVDFTSNKGKLLF

SEQ ID NO: 572386 - protein, 15 aa, Homo sapiens
  CDR3 for beta chain variable domain of TCR clone 286193 (TRBV20-1, TRBJ1-1)
CSASRGVTGNTEAFF

SEQ ID NO: 572387 - protein, 19 aa, Homo sapiens
  CDR3 for alpha chain variable domain of TCR clone 286194 (TRAV12-3, TRAJ52)
CAMSEPFYAGGTSYGKLTF

SEQ ID NO: 572388 - protein, 13 aa, Homo sapiens
  CDR3 for beta chain variable domain of TCR clone 286194 (TRBV20-1, TRBJ2-5)
CSARGDYQETQYF

SEQ ID NO: 572389 - protein, 13 aa, Homo sapiens
  CDR3 for alpha chain variable domain of TCR clone 286195 (TRAV39, TRAJ33)
CAANPDSNYQLIW

SEQ ID NO: 572390 - protein, 16 aa, Homo sapiens
  CDR3 for beta chain variable domain of TCR clone 286195 (TRBV12-4, TRBJ1-5)
CASSRPVGGSNQPQHF

SEQ ID NO: 572391 - protein, 10 aa, Homo sapiens
  CDR3 for alpha chain variable domain of TCR clone 286196 (TRAV36/DV7, TRAJ49)
CALTGNQFYF

SEQ ID NO: 572392 - protein, 13 aa, Homo sapiens
  CDR3 for beta chain variable domain of TCR clone 286196 (TRBV4-1, TRBJ2-7)
CASSQGRAYEQYF

SEQ ID NO: 572393 - protein, 17 aa, Homo sapiens
  CDR3 for alpha chain variable domain of TCR clone 286197 (TRAV3, TRAJ42)
CAVRDRDYGGSQGNLIF

SEQ ID NO: 572394 - protein, 15 aa, Homo sapiens
  CDR3 for beta chain variable domain of TCR clone 286197 (TRBV6-6, TRBJ2-7)
CASSYSYGGACEQYF

SEQ ID NO: 572395 - protein, 17 aa, Homo sapiens
  CDR3 for alpha chain variable domain of TCR clone 286198 (TRAV29/DV5, TRAJ36)
CAASAHYQSGANNLLWD

SEQ ID NO: 572396 - protein, 14 aa, Homo sapiens
  CDR3 for beta chain variable domain of TCR clone 286198 (TRBV10-2, TRBJ1-5)
CASSSTGRNQPQHF

SEQ ID NO: 572397 - protein, 14 aa, Homo sapiens
  CDR3 for alpha chain variable domain of TCR clone 286199 (TRAV12-2, TRAJ13)
CAVKKTGGYQKVTF

SEQ ID NO: 572398 - protein, 18 aa, Homo sapiens
  CDR3 for beta chain variable domain of TCR clone 286199 (TRBV20-1, TRBJ2-3)
CSASGLAGGPGTTDTQHF

SEQ ID NO: 572399 - protein, 15 aa, Homo sapiens
  CDR3 for alpha chain variable domain of TCR clone 286200 (TRAV17, TRAJ57)
CATGPSQGGLERLVF

SEQ ID NO: 572400 - protein, 16 aa, Homo sapiens
  CDR3 for beta chain variable domain of TCR clone 286200 (TRBV12-4, TRBJ1-5)
CASSRPVGGSNQPQHF

SEQ ID NO: 572401 - protein, 13 aa, Homo sapiens
  CDR3 for alpha chain variable domain of TCR clone 286201 (TRAV8-3, TRAJ48)
CAVVPFGIEKLTF

SEQ ID NO: 572402 - protein, 12 aa, Homo sapiens
  CDR3 for beta chain variable domain of TCR clone 286201 (TRBV11-2, TRBJ2-2)
CASSLGGGELFF

SEQ ID NO: 572403 - protein, 14 aa, Homo sapiens
  CDR3 for alpha chain variable domain of TCR clone 286202 (TRAV26-1, TRAJ38)
CIADNAGNNRKLIW

SEQ ID NO: 572404 - protein, 16 aa, Homo sapiens
  CDR3 for beta chain variable domain of TCR clone 286202 (TRBV6-1, TRBJ2-5)
CASSETLDRGAKTQYF

SEQ ID NO: 572405 - protein, 17 aa, Homo sapiens
  CDR3 for alpha chain variable domain of TCR clone 286203 (TRAV12-2, TRAJ48)
CASNEKLTFGTGTRLTI

SEQ ID NO: 572406 - protein, 13 aa, Homo sapiens
  CDR3 for beta chain variable domain of TCR clone 286203 (TRBV7-2, TRBJ2-7)
CASSPPSGSEQYF

SEQ ID NO: 572407 - protein, 15 aa, Homo sapiens
  CDR3 for alpha chain variable domain of TCR clone 286204 (TRAV8-3, TRAJ45)
CASSYSGGGADGLTF

SEQ ID NO: 572408 - protein, 13 aa, Homo sapiens
  CDR3 for beta chain variable domain of TCR clone 286204 (TRBV7-9, TRBJ2-3)
CASSPGSTDTQYF

SEQ ID NO: 572409 - protein, 14 aa, Homo sapiens
  CDR3 for alpha chain variable domain of TCR clone 286205 (TRAV13-1, TRAJ20)
CAARPGSNDYKLSF

SEQ ID NO: 572410 - protein, 15 aa, Homo sapiens
  CDR3 for beta chain variable domain of TCR clone 286205 (TRBV4-1, TRBJ2-7)
CASSQQGQGFYEQYF

SEQ ID NO: 572411 - protein, 13 aa, Homo sapiens
  CDR3 for alpha chain variable domain of TCR clone 286206 (TRAV21, TRAJ20)
CAVGLRVDYKLSF

SEQ ID NO: 572412 - protein, 15 aa, Homo sapiens
  CDR3 for beta chain variable domain of TCR clone 286206 (TRBV11-2, TRBJ1-2)
CASSLTGSVSYGYTF

SEQ ID NO: 572413 - protein, 15 aa, Homo sapiens
  CDR3 for alpha chain variable domain of TCR clone 286207 (TRAV4, TRAJ39)
CLVGPNNNAGNMLTF

SEQ ID NO: 572414 - protein, 15 aa, Homo sapiens
  CDR3 for beta chain variable domain of TCR clone 286207 (TRBV11-2, TRBJ2-1)
CASSLTSGGYNEQFF

SEQ ID NO: 572415 - protein, 15 aa, Homo sapiens
  CDR3 for alpha chain variable domain of TCR clone 286208 (TRAV3, TRAJ3)
CAVRDRDGSASKIIF

SEQ ID NO: 572416 - protein, 18 aa, Homo sapiens
  CDR3 for beta chain variable domain of TCR clone 286208 (TRBV25-1, TRBJ1-2)
CVSSGLQNGQGLIFGYTF

SEQ ID NO: 572417 - protein, 16 aa, Homo sapiens
  CDR3 for alpha chain variable domain of TCR clone 286209 (TRAV30, TRAJ24)
CGTEIVDADSWGKFQF

SEQ ID NO: 572418 - protein, 17 aa, Homo sapiens
  CDR3 for beta chain variable domain of TCR clone 286209 (TRBV13, TRBJ2-2)
CASSLDSGGLNTGELFF

SEQ ID NO: 572419 - protein, 12 aa, Homo sapiens
  CDR3 for alpha chain variable domain of TCR clone 286210 (TRAV21, TRAJ58)
CAAETSGSRLTF

SEQ ID NO: 572420 - protein, 15 aa, Homo sapiens
  CDR3 for beta chain variable domain of TCR clone 286210 (TRBV20-1, TRBJ2-7)
CSAIDPVKGEGEQYF

SEQ ID NO: 572421 - protein, 14 aa, Homo sapiens
  CDR3 for alpha chain variable domain of TCR clone 286211 (TRAV17, TRAJ53)
CATDAGGSNYKLTF

SEQ ID NO: 572422 - protein, 14 aa, Homo sapiens
  CDR3 for beta chain variable domain of TCR clone 286211 (TRBV7-9, TRBJ2-2)
CASSLVQDTGELFF

SEQ ID NO: 572423 - protein, 14 aa, Homo sapiens
  CDR3 for alpha chain variable domain of TCR clone 286212 (TRAV8-3, TRAJ26)
CAVAPGNYGQNFVF

SEQ ID NO: 572424 - protein, 14 aa, Homo sapiens
  CDR3 for beta chain variable domain of TCR clone 286212 (TRBV19, TRBJ2-2)
CASTVTANTGELFF

SEQ ID NO: 572425 - protein, 14 aa, Homo sapiens
  CDR3 for alpha chain variable domain of TCR clone 286213 (TRAV1-2, TRAJ16)
CAVNRISDGQKLLF

SEQ ID NO: 572426 - protein, 15 aa, Homo sapiens
  CDR3 for beta chain variable domain of TCR clone 286213 (TRBV29-1, TRBJ2-7)
CSVEFFDRGSYEQYF

SEQ ID NO: 572427 - protein, 15 aa, Homo sapiens
  CDR3 for alpha chain variable domain of TCR clone 286214 (TRAV35, TRAJ58)
CAGRRQETSGSRLTF

SEQ ID NO: 572428 - protein, 11 aa, Homo sapiens
  CDR3 for beta chain variable domain of TCR clone 286214 (TRBV11-2, TRBJ1-1)
CASSINTEAFF

SEQ ID NO: 572429 - protein, 11 aa, Homo sapiens
  CDR3 for alpha chain variable domain of TCR clone 286215 (TRAV12-2, TRAJ49)
CAVTGGNQFYF

SEQ ID NO: 572430 - protein, 16 aa, Homo sapiens
  CDR3 for beta chain variable domain of TCR clone 286215 (TRBV7-3, TRBJ2-1)
CASSLEGYRSYNEQFF

SEQ ID NO: 572431 - protein, 11 aa, Homo sapiens
  CDR3 for alpha chain variable domain of TCR clone 286216 (TRAV4, TRAJ23)
CLVAPGGKLIF

SEQ ID NO: 572432 - protein, 13 aa, Homo sapiens
  CDR3 for beta chain variable domain of TCR clone 286216 (TRBV7-9, TRBJ1-2)
CASSLKQNYCYTF

SEQ ID NO: 572433 - protein, 11 aa, Homo sapiens
  CDR3 for alpha chain variable domain of TCR clone 286217 (TRAV3, TRAJ21)
CAVDNFNKFYF

SEQ ID NO: 572434 - protein, 14 aa, Homo sapiens
  CDR3 for beta chain variable domain of TCR clone 286217 (TRBV25-1, TRBJ1-1)
CASTHLGGNTEAFF

SEQ ID NO: 572435 - protein, 12 aa, Homo sapiens
  CDR3 for alpha chain variable domain of TCR clone 286218 (TRAV12-3, TRAJ17)
CAMTLTGNKLTF

SEQ ID NO: 572436 - protein, 15 aa, Homo sapiens
  CDR3 for beta chain variable domain of TCR clone 286218 (TRBV20-1, TRBJ2-7)
GSARERVAGMDEQYF

SEQ ID NO: 572437 - protein, 13 aa, Homo sapiens
  CDR3 for alpha chain variable domain of TCR clone 286219 (TRAV27, TRAJ6)
CAGGTRGSYIPTF

SEQ ID NO: 572438 - protein, 14 aa, Homo sapiens
  CDR3 for beta chain variable domain of TCR clone 286219 (TRBV6-3, TRBJ1-1)
CASSYQRRDTEAFC

SEQ ID NO: 572439 - protein, 23 aa, Homo sapiens
  CDR3 for alpha chain variable domain of TCR clone 286220 (TRAV26-1, TRAJ38)
CIANNAGNNHIQNPDPAVYQLRD

SEQ ID NO: 572440 - protein, 13 aa, Homo sapiens
  CDR3 for beta chain variable domain of TCR clone 286220 (TRBV20-1, TRBJ1-1)
CSARGGGNTEAFL

SEQ ID NO: 572441 - protein, 10 aa, Homo sapiens
  CDR3 for alpha chain variable domain of TCR clone 286221 (TRAV30, TRAJ24)
CGTEIVMLTA

SEQ ID NO: 572442 - protein, 14 aa, Homo sapiens
  CDR3 for beta chain variable domain of TCR clone 286221 (TRBV12-5, TRBJ2-5)
CASGSRTHQDTQYF

SEQ ID NO: 572443 - protein, 12 aa, Homo sapiens
  CDR3 for alpha chain variable domain of TCR clone 286222 (TRAV12-3, TRAJ17)
CAMTLTGNKLTF

SEQ ID NO: 572444 - protein, 13 aa, Homo sapiens
  CDR3 for beta chain variable domain of TCR clone 286222 (TRBV19, TRBJ1-5)
CASIIGGNQPQHF

SEQ ID NO: 572445 - protein, 11 aa, Homo sapiens
  CDR3 for alpha chain variable domain of TCR clone 286223 (TRAV13-2, TRAJ39)
CAPKRQATCSP

SEQ ID NO: 572446 - protein, 13 aa, Homo sapiens
  CDR3 for beta chain variable domain of TCR clone 286223 (TRBV19, TRBJ2-2)
CASSIWSTGELFF

SEQ ID NO: 572447 - protein, 10 aa, Homo sapiens
  CDR3 for alpha chain variable domain of TCR clone 286224 (TRAV22, TRAJ48)
CAVGYEKLTF

SEQ ID NO: 572448 - protein, 14 aa, Homo sapiens
  CDR3 for beta chain variable domain of TCR clone 286224 (TRBV2, TRBJ2-7)
CASSLTSGGYEQYF

SEQ ID NO: 572449 - protein, 18 aa, Homo sapiens
  CDR3 for alpha chain variable domain of TCR clone 286225 (TRAV26-1, TRAJ52)
YIVRVEGAGGTSYVKLTF

SEQ ID NO: 572450 - protein, 13 aa, Homo sapiens
  CDR3 for beta chain variable domain of TCR clone 286225 (TRBV7-3, TRBJ1-2)
CASSLKRGYGYTF

SEQ ID NO: 572451 - protein, 23 aa, Homo sapiens
  CDR3 for alpha chain variable domain of TCR clone 286226 (TRAV13-1, )
CAASTRRAQIPDIQNPDPAVYQL

SEQ ID NO: 572452 - protein, 15 aa, Homo sapiens
  CDR3 for beta chain variable domain of TCR clone 286226 (TRBV7-2, TRBJ2-1)
CASSLASGRVNEQFF

SEQ ID NO: 572453 - protein, 14 aa, Homo sapiens
  CDR3 for alpha chain variable domain of TCR clone 286227 (TRAV12-3, TRAJ42)
WAMNYGGSQGNLIF

SEQ ID NO: 572454 - protein, 15 aa, Homo sapiens
  CDR3 for beta chain variable domain of TCR clone 286227 (TRBV5-7, TRBJ1-5)
CASSYGKLWDQPQHF

SEQ ID NO: 572455 - protein, 13 aa, Homo sapiens
  CDR3 for alpha chain variable domain of TCR clone 286228 (TRAV9-2, TRAJ3)
CSDLYSSASKIIF

SEQ ID NO: 572456 - protein, 15 aa, Homo sapiens
  CDR3 for beta chain variable domain of TCR clone 286228 (TRBV28, TRBJ2-4)
CAAGSGTLLMGIQYF

SEQ ID NO: 572457 - protein, 11 aa, Homo sapiens
  CDR3 for alpha chain variable domain of TCR clone 286229 (TRAV21, TRAJ48)
CAVDGNEKLTF

SEQ ID NO: 572458 - protein, 16 aa, Homo sapiens
  CDR3 for beta chain variable domain of TCR clone 286229 (TRBV12-4, TRBJ1-5)
FDRSTGPRGSNQPQHF

SEQ ID NO: 572459 - protein, 15 aa, Homo sapiens
  CDR3 for alpha chain variable domain of TCR clone 286230 (TRAV8-2, TRAJ16)
CVVSDGFSDGQKLLF

SEQ ID NO: 572460 - protein, 14 aa, Homo sapiens
  CDR3 for beta chain variable domain of TCR clone 286230 (TRBV7-3, TRBJ1-1)
CASSLGTGYTEAFC

SEQ ID NO: 572461 - protein, 14 aa, Homo sapiens
  CDR3 for alpha chain variable domain of TCR clone 286231 (TRAV12-1, TRAJ30)
CVVNIGGGDDKIIF

SEQ ID NO: 572462 - protein, 15 aa, Homo sapiens
  CDR3 for beta chain variable domain of TCR clone 286231 (TRBV18, TRBJ1-2)
CASSPSNTSNYGYTF

SEQ ID NO: 572463 - protein, 15 aa, Homo sapiens
  CDR3 for alpha chain variable domain of TCR clone 286232 (TRAV12-2, TRAJ53)
CAVNTGGGSNYKPTF

SEQ ID NO: 572464 - protein, 15 aa, Homo sapiens
  CDR3 for beta chain variable domain of TCR clone 286232 (TRBV5-1, TRBJ2-5)
CASSLGLGEIKTQYF

SEQ ID NO: 572465 - protein, 17 aa, Homo sapiens
  CDR3 for alpha chain variable domain of TCR clone 286233 (TRAV26-1, TRAJ37)
CIVRVITVSSNTGKLIF

SEQ ID NO: 572466 - protein, 12 aa, Homo sapiens
  CDR3 for beta chain variable domain of TCR clone 286233 (TRBV12-5, TRBJ2-5)
CASGQGVETQYF

SEQ ID NO: 572467 - protein, 14 aa, Homo sapiens
  CDR3 for alpha chain variable domain of TCR clone 286234 (TRAV9-2, TRAJ39)
CALYIYNAGNMLTF

SEQ ID NO: 572468 - protein, 15 aa, Homo sapiens
  CDR3 for beta chain variable domain of TCR clone 286234 (TRBV6-1, TRBJ2-3)
CASSERGWITDTQYF

SEQ ID NO: 572469 - protein, 12 aa, Homo sapiens
  CDR3 for alpha chain variable domain of TCR clone 286235 (TRAV4, TRAJ6)
CLAPGGSYIPTF

SEQ ID NO: 572470 - protein, 17 aa, Homo sapiens
  CDR3 for beta chain variable domain of TCR clone 286235 (TRBV20-1, TRBJ2-2)
CSASGSGLGGLTGELFF

SEQ ID NO: 572471 - protein, 13 aa, Homo sapiens
  CDR3 for alpha chain variable domain of TCR clone 286236 (TRAV3, TRAJ27)
CAVSPLGAGKSTF

SEQ ID NO: 572472 - protein, 13 aa, Homo sapiens
  CDR3 for beta chain variable domain of TCR clone 286236 (TRBV7-9, TRBJ2-3)
CASSPGSTDTQCF

SEQ ID NO: 572473 - protein, 15 aa, Homo sapiens
  CDR3 for alpha chain variable domain of TCR clone 286237 (TRAV26-1, TRAJ48)
CIARWSWFGNEKLTF

SEQ ID NO: 572474 - protein, 12 aa, Homo sapiens
  CDR3 for beta chain variable domain of TCR clone 286237 (TRBV19, TRBJ2-5)
CASSISEEIQYF

SEQ ID NO: 572475 - protein, 13 aa, Homo sapiens
  CDR3 for alpha chain variable domain of TCR clone 286238 (TRAV20, TRAJ20)
CAVQAGSGYKLSV

SEQ ID NO: 572476 - protein, 14 aa, Homo sapiens
  CDR3 for beta chain variable domain of TCR clone 286238 (TRBV4-3, TRBJ2-2)
CASSQGHVTGELCF

SEQ ID NO: 572477 - protein, 14 aa, Homo sapiens
  CDR3 for alpha chain variable domain of TCR clone 286239 (TRAV27, TRAJ58)
CAGDGETSGSRLTF

SEQ ID NO: 572478 - protein, 14 aa, Homo sapiens
  CDR3 for beta chain variable domain of TCR clone 286239 (TRBV25-1, TRBJ1-1)
CASTHLGGNTEAFF

SEQ ID NO: 572479 - protein, 11 aa, Homo sapiens
  CDR3 for alpha chain variable domain of TCR clone 286240 (TRAV1-1, TRAJ23)
CAVRQGGKLIF

SEQ ID NO: 572480 - protein, 15 aa, Homo sapiens
  CDR3 for beta chain variable domain of TCR clone 286240 (TRBV7-9, TRBJ1-4)
CASSRTGGFNEKLFF

SEQ ID NO: 572481 - protein, 13 aa, Homo sapiens
  CDR3 for alpha chain variable domain of TCR clone 286241 (TRAV13-1, TRAJ20)
CAARVSNDYKLSF

SEQ ID NO: 572482 - protein, 15 aa, Homo sapiens
  CDR3 for beta chain variable domain of TCR clone 286241 (TRBV6-6, TRBJ2-7)
CASSYSYGGSYEQYF

SEQ ID NO: 572483 - protein, 16 aa, Homo sapiens
  CDR3 for alpha chain variable domain of TCR clone 286242 (TRAV30, TRAJ24)
CGTELVDADSWGKFQF

SEQ ID NO: 572484 - protein, 16 aa, Homo sapiens
  CDR3 for beta chain variable domain of TCR clone 286242 (TRBV2, TRBJ1-3)
CASSGGAGRSGNTMYF

SEQ ID NO: 572485 - protein, 11 aa, Homo sapiens
  CDR3 for alpha chain variable domain of TCR clone 286243 (TRAV12-3, TRAJ43)
CAMSVSNDMRF

SEQ ID NO: 572486 - protein, 15 aa, Homo sapiens
  CDR3 for beta chain variable domain of TCR clone 286243 (TRBV20-1, TRBJ2-7)
CSAGEGLAGGYEQYF

SEQ ID NO: 572487 - protein, 14 aa, Homo sapiens
  CDR3 for alpha chain variable domain of TCR clone 286244 (TRAV12-2, TRAJ40)
CAVKIPSGTYKYIF

SEQ ID NO: 572488 - protein, 16 aa, Homo sapiens
  CDR3 for beta chain variable domain of TCR clone 286244 (TRBV20-1, TRBJ2-2)
CSASASGIPGAGELFF

SEQ ID NO: 572489 - protein, 14 aa, Homo sapiens
  CDR3 for alpha chain variable domain of TCR clone 286245 (TRAV8-3, TRAJ9)
CAVVHNTGGFKTIF

SEQ ID NO: 572490 - protein, 14 aa, Homo sapiens
  CDR3 for beta chain variable domain of TCR clone 286245 (TRBV7-3, TRBJ2-2)
CASSSGGYNGELFF

SEQ ID NO: 572491 - protein, 17 aa, Homo sapiens
  CDR3 for alpha chain variable domain of TCR clone 286246 (TRAV3, TRAJ6)
CVVRDGPRAGGSYIPTF

SEQ ID NO: 572492 - protein, 14 aa, Homo sapiens
  CDR3 for beta chain variable domain of TCR clone 286246 (TRBV7-2, TRBJ2-7)
CASSPRNSFYEQYF

SEQ ID NO: 572493 - protein, 10 aa, Homo sapiens
  CDR3 for alpha chain variable domain of TCR clone 286247 (TRAV23/DV6, TRAJ57)
CAASPTLSQG

SEQ ID NO: 572494 - protein, 15 aa, Homo sapiens
  CDR3 for beta chain variable domain of TCR clone 286247 (TRBV11-2, TRBJ2-1)
CASSLGTSGLNEQFF

SEQ ID NO: 572495 - protein, 16 aa, Homo sapiens
  CDR3 for alpha chain variable domain of TCR clone 286248 (TRAV1-2, TRAJ10)
CAVRGVLTGGGNKLTF

SEQ ID NO: 572496 - protein, 15 aa, Homo sapiens
  CDR3 for beta chain variable domain of TCR clone 286248 (TRBV27, TRBJ1-6)
CASSFDRGLGSPLHF

SEQ ID NO: 572497 - protein, 17 aa, Homo sapiens
  CDR3 for alpha chain variable domain of TCR clone 286249 (TRAV23/DV6, TRAJ57)
CAASSTLSQGGSEKLVF

SEQ ID NO: 572498 - protein, 14 aa, Homo sapiens
  CDR3 for beta chain variable domain of TCR clone 286249 (TRBV25-1, TRBJ1-1)
CTSTHLGGNTEAFF

SEQ ID NO: 572499 - protein, 14 aa, Homo sapiens
  CDR3 for alpha chain variable domain of TCR clone 286250 (TRAV21, TRAJ28)
CAVGSGAGSYQLTF

SEQ ID NO: 572500 - protein, 14 aa, Homo sapiens
  CDR3 for beta chain variable domain of TCR clone 286250 (TRBV18, IGHJ2)
CASSPGPNGEKLFF

SEQ ID NO: 572501 - protein, 15 aa, Homo sapiens
  CDR3 for alpha chain variable domain of TCR clone 286251 (TRAV3, TRAJ13)
CAVRDIAGGYQKVTF

SEQ ID NO: 572502 - protein, 13 aa, Homo sapiens
  CDR3 for beta chain variable domain of TCR clone 286251 (TRBV2, TRBJ2-2)
CASSKKNTGELVF

SEQ ID NO: 572503 - protein, 12 aa, Homo sapiens
  CDR3 for alpha chain variable domain of TCR clone 286252 (TRAV1-2, TRAJ10)
TSVTGGGNKLTF

SEQ ID NO: 572504 - protein, 14 aa, Homo sapiens
  CDR3 for beta chain variable domain of TCR clone 286252 (TRBV6-3, TRBJ2-2)
CASTYTPDTGELFF

SEQ ID NO: 572505 - protein, 15 aa, Homo sapiens
  CDR3 for alpha chain variable domain of TCR clone 286253 (TRAV26-1, TRAJ56)
CIVRVATGANSKLTF

SEQ ID NO: 572506 - protein, 15 aa, Homo sapiens
  CDR3 for beta chain variable domain of TCR clone 286253 (TRBV27, TRBJ2-7)
CASSTQREGQREQYF

SEQ ID NO: 572507 - protein, 16 aa, Homo sapiens
  CDR3 for alpha chain variable domain of TCR clone 286254 (TRAV23/DV6, TRAJ9)
CAASIGGNTGGFKTIF

SEQ ID NO: 572508 - protein, 14 aa, Homo sapiens
  CDR3 for beta chain variable domain of TCR clone 286254 (TRBV5-1, TRBJ2-7)
CASSLEGRTYEQYF

SEQ ID NO: 572509 - protein, 14 aa, Homo sapiens
  CDR3 for alpha chain variable domain of TCR clone 286255 (TRAV26-1, TRAJ21)
CIVRVAHDFNKFYF

SEQ ID NO: 572510 - protein, 15 aa, Homo sapiens
  CDR3 for beta chain variable domain of TCR clone 286255 (TRBV7-9, TRBJ1-4)
CASSARTGGNEKLFF

SEQ ID NO: 572511 - protein, 15 aa, Homo sapiens
  CDR3 for alpha chain variable domain of TCR clone 286256 (TRAV21, TRAJ53)
CATLNSGGSNYKLTF

SEQ ID NO: 572512 - protein, 14 aa, Homo sapiens
  CDR3 for beta chain variable domain of TCR clone 286256 (TRBV19, TRBJ2-2)
CASSGQGIAGELFF

SEQ ID NO: 572513 - protein, 14 aa, Homo sapiens
  CDR3 for alpha chain variable domain of TCR clone 286257 (TRAV3, TRAJ21)
CALGRGSTNFTLEL

SEQ ID NO: 572514 - protein, 14 aa, Homo sapiens
  CDR3 for beta chain variable domain of TCR clone 286257 (TRBV7-9, TRBJ2-4)
CASSLAMGGNIQYF

SEQ ID NO: 572515 - protein, 13 aa, Homo sapiens
  CDR3 for alpha chain variable domain of TCR clone 286258 (TRAV20, TRAJ49)
CAVQARTGNQFYF

SEQ ID NO: 572516 - protein, 16 aa, Homo sapiens
  CDR3 for beta chain variable domain of TCR clone 286258 (TRBV6-1, TRBJ2-1)
CASILRQGSSYNEQFF

SEQ ID NO: 572517 - protein, 21 aa, Homo sapiens
  CDR3 for alpha chain variable domain of TCR clone 286259 (TRAV36/DV7, TRAJ39)
TATQTGDSAIYLPNAGNMLTF

SEQ ID NO: 572518 - protein, 16 aa, Homo sapiens
  CDR3 for beta chain variable domain of TCR clone 286259 (TRBV18, TRBJ1-1)
CASSPPVGDENTEAFF

SEQ ID NO: 572519 - protein, 14 aa, Homo sapiens
  CDR3 for alpha chain variable domain of TCR clone 286260 (TRAV12-3, TRAJ58)
CAMSTETGGSRLTF

SEQ ID NO: 572520 - protein, 11 aa, Homo sapiens
  CDR3 for beta chain variable domain of TCR clone 286260 (TRBV29-1, TRBJ2-5)
CSEDRTGTQYF

SEQ ID NO: 572521 - protein, 16 aa, Homo sapiens
  CDR3 for alpha chain variable domain of TCR clone 286261 (TRAV30, TRAJ24)
CVTEIVDADSWGKFQF

SEQ ID NO: 572522 - protein, 13 aa, Homo sapiens
  CDR3 for beta chain variable domain of TCR clone 286261 (TRBV11-2, TRBJ2-5)
CASSSTGEETQYF

SEQ ID NO: 572523 - protein, 15 aa, Homo sapiens
  CDR3 for alpha chain variable domain of TCR clone 286262 (TRAV2, TRAJ15)
CAVEDRGQAGTALIF

SEQ ID NO: 572524 - protein, 13 aa, Homo sapiens
  CDR3 for beta chain variable domain of TCR clone 286262 (TRBV10-2, TRBJ2-7)
CASGASGSYEQYF

SEQ ID NO: 572525 - protein, 13 aa, Homo sapiens
  CDR3 for alpha chain variable domain of TCR clone 286263 (TRAV1-1, TRAJ23)
CAVVANQGGKLIF

SEQ ID NO: 572526 - protein, 16 aa, Homo sapiens
  CDR3 for beta chain variable domain of TCR clone 286263 (TRBV5-5, TRBJ1-2)
CASSPTWGRGLYGYNF

SEQ ID NO: 572527 - protein, 11 aa, Homo sapiens
  CDR3 for alpha chain variable domain of TCR clone 286264 (TRAV25, TRAJ34)
CASYNTDKLIF

SEQ ID NO: 572528 - protein, 15 aa, Homo sapiens
  CDR3 for beta chain variable domain of TCR clone 286264 (TRBV24-1, TRBJ2-4)
CATSDPRDRANIQYF

SEQ ID NO: 572529 - protein, 14 aa, Homo sapiens
  CDR3 for alpha chain variable domain of TCR clone 286265 (TRAV12-2, TRAJ36)
CAVKISTGAINLFF

SEQ ID NO: 572530 - protein, 14 aa, Homo sapiens
  CDR3 for beta chain variable domain of TCR clone 286265 (TRBV25-1, TRBJ1-2)
CASSDTTGVVGYTF

SEQ ID NO: 572531 - protein, 10 aa, Homo sapiens
  CDR3 for alpha chain variable domain of TCR clone 286266 (TRAV8-2, TRAJ29)
CTGGNTPLGF

SEQ ID NO: 572532 - protein, 13 aa, Homo sapiens
  CDR3 for beta chain variable domain of TCR clone 286266 (TRBV20-1, TRBJ1-1)
CSARGGGNTEAFF

SEQ ID NO: 572533 - protein, 13 aa, Homo sapiens
  CDR3 for alpha chain variable domain of TCR clone 286267 (TRAV36/DV7, TRAJ49)
CAGDSNTGNQFYF

SEQ ID NO: 572534 - protein, 15 aa, Homo sapiens
  CDR3 for beta chain variable domain of TCR clone 286267 (TRBV6-5, TRBJ1-6)
CASSLGQGFRSPLHF

SEQ ID NO: 572535 - protein, 14 aa, Homo sapiens
  CDR3 for alpha chain variable domain of TCR clone 286268 (TRAV17, TRAJ31)
CATVLRNNNAILMF

SEQ ID NO: 572536 - protein, 14 aa, Homo sapiens
  CDR3 for beta chain variable domain of TCR clone 286268 (TRBV12-4, TRBJ2-5)
CASSLWQKQEAQYF

SEQ ID NO: 572537 - protein, 15 aa, Homo sapiens
  CDR3 for alpha chain variable domain of TCR clone 286269 (TRAV2, TRAJ24)
CAVEVLTYSWGKFQF

SEQ ID NO: 572538 - protein, 12 aa, Homo sapiens
  CDR3 for beta chain variable domain of TCR clone 286269 (TRBV6-3, TRBJ2-1)
CASSYSQGGPTF

SEQ ID NO: 572539 - protein, 16 aa, Homo sapiens
  CDR3 for alpha chain variable domain of TCR clone 286270 (TRAV26-1, TRAJ32)
CIVRTNYGGATNKLIF

SEQ ID NO: 572540 - protein, 15 aa, Homo sapiens
  CDR3 for beta chain variable domain of TCR clone 286270 (TRBV18, TRBJ2-1)
CASLPDRGRDNEQFF

SEQ ID NO: 572541 - protein, 13 aa, Homo sapiens
  CDR3 for alpha chain variable domain of TCR clone 286271 (TRAV21, TRAJ36)
CAVREAGANNLFF

SEQ ID NO: 572542 - protein, 12 aa, Homo sapiens
  CDR3 for beta chain variable domain of TCR clone 286271 (TRBV11-2, TRBJ2-2)
CASSLGGGELFF

SEQ ID NO: 572543 - protein, 14 aa, Homo sapiens
  CDR3 for alpha chain variable domain of TCR clone 286272 (TRAV13-1, TRAJ44)
CAAKATGTASKLTF

SEQ ID NO: 572544 - protein, 16 aa, Homo sapiens
  CDR3 for beta chain variable domain of TCR clone 286272 (TRBV29-1, TRBJ2-7)
CSVEDAEDGTAYEQYF

SEQ ID NO: 572545 - protein, 17 aa, Homo sapiens
  CDR3 for alpha chain variable domain of TCR clone 286273 (TRAV26-1, TRAJ45)
CIVRGPYSGGGADGLTF

SEQ ID NO: 572546 - protein, 13 aa, Homo sapiens
  CDR3 for beta chain variable domain of TCR clone 286273 (TRBV7-6, TRBJ1-2)
CASSLVADYGYTF

SEQ ID NO: 572547 - protein, 12 aa, Homo sapiens
  CDR3 for alpha chain variable domain of TCR clone 286274 (TRAV4, TRAJ26)
CLVGDYGQNFVF

SEQ ID NO: 572548 - protein, 17 aa, Homo sapiens
  CDR3 for beta chain variable domain of TCR clone 286274 (TRBV25-1, TRBJ2-5)
CASSRRGGRGGQETQYC

SEQ ID NO: 572549 - protein, 14 aa, Homo sapiens
  CDR3 for alpha chain variable domain of TCR clone 286275 (TRAV26-1, TRAJ38)
CIADNAGNNRKLIW

SEQ ID NO: 572550 - protein, 15 aa, Homo sapiens
  CDR3 for beta chain variable domain of TCR clone 286275 (TRBV7-9, TRBJ2-1)
CASSLGWGRANEQFF

SEQ ID NO: 572551 - protein, 13 aa, Homo sapiens
  CDR3 for alpha chain variable domain of TCR clone 286276 (TRAV25, TRAJ54)
CAGTIQGAQKLLF

SEQ ID NO: 572552 - protein, 15 aa, Homo sapiens
  CDR3 for beta chain variable domain of TCR clone 286276 (TRBV19, TRBJ1-5)
CASSILTGENQPQHF

SEQ ID NO: 572553 - protein, 15 aa, Homo sapiens
  CDR3 for alpha chain variable domain of TCR clone 286277 (TRAV3, TRAJ32)
CAVSSYGGATNKLIF

SEQ ID NO: 572554 - protein, 16 aa, Homo sapiens
  CDR3 for beta chain variable domain of TCR clone 286277 (TRBV5-1, TRBJ2-5)
CASRLSLAGAQETQYF

SEQ ID NO: 572555 - protein, 14 aa, Homo sapiens
  CDR3 for alpha chain variable domain of TCR clone 286278 (TRAV1-2, TRAJ16)
CAVNRFSDGQKLLF

SEQ ID NO: 572556 - protein, 16 aa, Homo sapiens
  CDR3 for beta chain variable domain of TCR clone 286278 (TRBV12-4, TRBJ2-5)
CASSFFVRGRQEIQYF

SEQ ID NO: 572557 - protein, 14 aa, Homo sapiens
  CDR3 for alpha chain variable domain of TCR clone 286279 (TRAV16, TRAJ33)
CALSAMDSNYQLIW

SEQ ID NO: 572558 - protein, 16 aa, Homo sapiens
  CDR3 for beta chain variable domain of TCR clone 286279 (TRBV25-1, TRBJ2-7)
CDSSELTGGGIYEQYF

SEQ ID NO: 572559 - protein, 13 aa, Homo sapiens
  CDR3 for alpha chain variable domain of TCR clone 286280 (TRAV21, TRAJ57)
CAVTQGGSEKLVF

SEQ ID NO: 572560 - protein, 16 aa, Homo sapiens
  CDR3 for beta chain variable domain of TCR clone 286280 (TRBV27, TRBJ2-2)
CASSSTGGGDTGELFF

SEQ ID NO: 572561 - protein, 14 aa, Homo sapiens
  CDR3 for alpha chain variable domain of TCR clone 286281 (TRAV13-2, TRAJ17)
CAENSKAAGNKLTF

SEQ ID NO: 572562 - protein, 15 aa, Homo sapiens
  CDR3 for beta chain variable domain of TCR clone 286281 (TRBV6-1, TRBJ1-3)
CASSDFGFSGNTIYF

SEQ ID NO: 572563 - protein, 15 aa, Homo sapiens
  CDR3 for alpha chain variable domain of TCR clone 286282 (TRAV12-1, TRAJ42)
CVVTWDGGSQGNLIF

SEQ ID NO: 572564 - protein, 14 aa, Homo sapiens
  CDR3 for beta chain variable domain of TCR clone 286282 (TRBV11-2, TRBJ2-3)
CASSLGGGANTQYF

SEQ ID NO: 572565 - protein, 14 aa, Homo sapiens
  CDR3 for alpha chain variable domain of TCR clone 286283 (TRAV12-2, TRAJ9)
CAVNALEGGFKTIF

SEQ ID NO: 572566 - protein, 16 aa, Homo sapiens
  CDR3 for beta chain variable domain of TCR clone 286283 (TRBV7-2, TRBJ2-5)
CASRPFPTGGEETQYF

SEQ ID NO: 572567 - protein, 15 aa, Homo sapiens
  CDR3 for alpha chain variable domain of TCR clone 286284 (TRAV16, TRAJ16)
CALQGGGSDGQKLLF

SEQ ID NO: 572568 - protein, 16 aa, Homo sapiens
  CDR3 for beta chain variable domain of TCR clone 286284 (TRBV11-2, TRBJ2-7)
CASSPTTGGVSYEQYF

SEQ ID NO: 572569 - protein, 16 aa, Homo sapiens
  CDR3 for alpha chain variable domain of TCR clone 286285 (TRAV3, TRAJ37)
CAVRPHGSGNTGTLIF

SEQ ID NO: 572570 - protein, 16 aa, Homo sapiens
  CDR3 for beta chain variable domain of TCR clone 286285 (TRBV20-1, TRBJ1-4)
CSAPGQGLLTNEKLFF

SEQ ID NO: 572571 - protein, 13 aa, Homo sapiens
  CDR3 for alpha chain variable domain of TCR clone 286286 (TRAV27, TRAJ6)
CAGGTRGSYIPTF

SEQ ID NO: 572572 - protein, 13 aa, Homo sapiens
  CDR3 for beta chain variable domain of TCR clone 286286 (TRBV19, TRBJ1-3)
CASRLSLGNTIYF

SEQ ID NO: 572573 - protein, 15 aa, Homo sapiens
  CDR3 for alpha chain variable domain of TCR clone 286287 (TRAV3, TRAJ22)
RAVRDRGGSGRQLTF

SEQ ID NO: 572574 - protein, 16 aa, Homo sapiens
  CDR3 for beta chain variable domain of TCR clone 286287 (TRBV5-4, TRBJ2-3)
CASQQPGAGGADTQYF

SEQ ID NO: 572575 - protein, 14 aa, Homo sapiens
  CDR3 for alpha chain variable domain of TCR clone 286288 (TRAV8-1, TRAJ4)
CAVKFSGGYNKLIF

SEQ ID NO: 572576 - protein, 15 aa, Homo sapiens
  CDR3 for beta chain variable domain of TCR clone 286288 (TRBV4-1, TRBJ2-7)
CASSQEWGPSYEQYF

SEQ ID NO: 572577 - protein, 18 aa, Homo sapiens
  CDR3 for alpha chain variable domain of TCR clone 286289 (TRAV12-3, TRAJ52)
CAMSVGGVGGTSYGKLTF

SEQ ID NO: 572578 - protein, 15 aa, Homo sapiens
  CDR3 for beta chain variable domain of TCR clone 286289 (TRBV27, TRBJ1-6)
CASSFDRGLGSPLHF

SEQ ID NO: 572579 - protein, 11 aa, Homo sapiens
  CDR3 for alpha chain variable domain of TCR clone 286290 (TRAV21, TRAJ7)
CAAYGNNRLAF

SEQ ID NO: 572580 - protein, 15 aa, Homo sapiens
  CDR3 for beta chain variable domain of TCR clone 286290 (TRBV4-3, TRBJ2-5)
CASSQGTGHRETQYF

SEQ ID NO: 572581 - protein, 17 aa, Homo sapiens
  CDR3 for alpha chain variable domain of TCR clone 286291 (TRAV23/DV6, TRAJ57)
CAASSTLSQGGSEKLFF

SEQ ID NO: 572582 - protein, 16 aa, Homo sapiens
  CDR3 for beta chain variable domain of TCR clone 286291 (TRBV20-1, TRBJ1-4)
CSAPGQGLLTNEKLFF

SEQ ID NO: 572583 - protein, 14 aa, Homo sapiens
  CDR3 for alpha chain variable domain of TCR clone 286292 (TRAV30, TRAJ33)
CGTVAPRSNYQLIW

SEQ ID NO: 572584 - protein, 15 aa, Homo sapiens
  CDR3 for beta chain variable domain of TCR clone 286292 (TRBV9, TRBJ2-1)
CASSLAGSSYNEQFF

SEQ ID NO: 572585 - protein, 13 aa, Homo sapiens
  CDR3 for alpha chain variable domain of TCR clone 286293 (TRAV12-1, TRAJ16)
CVVNGPDGQKLLF

SEQ ID NO: 572586 - protein, 15 aa, Homo sapiens
  CDR3 for beta chain variable domain of TCR clone 286293 (TRBV7-2, TRBJ1-2)
CASSLVSGGVYGYTF

SEQ ID NO: 572587 - protein, 13 aa, Homo sapiens
  CDR3 for alpha chain variable domain of TCR clone 286294 (TRAV12-2, TRAJ49)
CAVKPNTGNQFYF

SEQ ID NO: 572588 - protein, 14 aa, Homo sapiens
  CDR3 for beta chain variable domain of TCR clone 286294 (TRBV18, TRBJ2-5)
CASSPGVSEETQYF

SEQ ID NO: 572589 - protein, 15 aa, Homo sapiens
  CDR3 for alpha chain variable domain of TCR clone 286295 (TRAV26-1, TRAJ29)
CIVRVEGSGNTPLVF

SEQ ID NO: 572590 - protein, 13 aa, Homo sapiens
  CDR3 for beta chain variable domain of TCR clone 286295 (TRBV2, TRBJ1-4)
CASSELGVEKLFF

SEQ ID NO: 572591 - protein, 12 aa, Homo sapiens
  CDR3 for alpha chain variable domain of TCR clone 286296 (TRAV1-2, TRAJ37)
CAFLGNTGKLIF

SEQ ID NO: 572592 - protein, 17 aa, Homo sapiens
  CDR3 for beta chain variable domain of TCR clone 286296 (TRBV4-2, TRBJ1-1)
CASSQVATGGMNTEAFF

SEQ ID NO: 572593 - protein, 16 aa, Homo sapiens
  CDR3 for alpha chain variable domain of TCR clone 286297 (TRAV16, TRAJ4)
CALSRMFSGGYNQLLF

SEQ ID NO: 572594 - protein, 16 aa, Homo sapiens
  CDR3 for beta chain variable domain of TCR clone 286297 (TRBV24-1, TRBJ2-3)
CATSDPGTGATDTQYF

SEQ ID NO: 572595 - protein, 12 aa, Homo sapiens
  CDR3 for alpha chain variable domain of TCR clone 286298 (TRAV17, TRAJ43)
CATDAFPADMRF

SEQ ID NO: 572596 - protein, 14 aa, Homo sapiens
  CDR3 for beta chain variable domain of TCR clone 286298 (TRBV20-1, TRBJ2-3)
CSARDRGSTDTQYF

SEQ ID NO: 572597 - protein, 14 aa, Homo sapiens
  CDR3 for alpha chain variable domain of TCR clone 286299 (TRAV17, TRAJ22)
CATSPSGSARQLTF

SEQ ID NO: 572598 - protein, 15 aa, Homo sapiens
  CDR3 for beta chain variable domain of TCR clone 286299 (TRBV4-1, TRBJ2-5)
CASSQWDLYQVTQYF

SEQ ID NO: 572599 - protein, 17 aa, Homo sapiens
  CDR3 for alpha chain variable domain of TCR clone 286300 (TRAV17, TRAJ52)
CATAPRAGGTSYGKLTF

SEQ ID NO: 572600 - protein, 14 aa, Homo sapiens
  CDR3 for beta chain variable domain of TCR clone 286300 (TRBV7-3, TRBJ2-1)
CASSPSGGWDEQFF

SEQ ID NO: 572601 - protein, 16 aa, Homo sapiens
  CDR3 for alpha chain variable domain of TCR clone 286301 (TRAV13-1, TRAJ10)
CAVGYILTGGGNKLTF

SEQ ID NO: 572602 - protein, 15 aa, Homo sapiens
  CDR3 for beta chain variable domain of TCR clone 286301 (TRBV12-4, TRBJ2-7)
CASSQTGAISYEQYF

SEQ ID NO: 572603 - protein, 13 aa, Homo sapiens
  CDR3 for alpha chain variable domain of TCR clone 286302 (TRAV39, TRAJ58)
CAGEETSGSRLTF

SEQ ID NO: 572604 - protein, 13 aa, Homo sapiens
  CDR3 for beta chain variable domain of TCR clone 286302 (TRBV15, TRBJ2-7)
CATGTTGHYEQYF

SEQ ID NO: 572605 - protein, 18 aa, Homo sapiens
  CDR3 for alpha chain variable domain of TCR clone 286303 (TRAV21, TRAJ52)
CAVRASPAGGTSYGKLTF

SEQ ID NO: 572606 - protein, 13 aa, Homo sapiens
  CDR3 for beta chain variable domain of TCR clone 286303 (TRBV7-3, TRBJ1-1)
CASSQDWGAEAFF

SEQ ID NO: 572607 - protein, 15 aa, Homo sapiens
  CDR3 for alpha chain variable domain of TCR clone 286304 (TRAV27, TRAJ38)
CAARRNAGNNRKLIW

SEQ ID NO: 572608 - protein, 15 aa, Homo sapiens
  CDR3 for beta chain variable domain of TCR clone 286304 (TRBV19, TRBJ2-1)
CASSSPGVPLDEQFF

SEQ ID NO: 572609 - protein, 13 aa, Homo sapiens
  CDR3 for alpha chain variable domain of TCR clone 286305 (TRAV12-1, TRAJ34)
CGEPLRNTDKLIF

SEQ ID NO: 572610 - protein, 15 aa, Homo sapiens
  CDR3 for beta chain variable domain of TCR clone 286305 (TRBV12-4, TRBJ2-2)
CASLRRGDLTGELFF

SEQ ID NO: 572611 - protein, 17 aa, Homo sapiens
  CDR3 for alpha chain variable domain of TCR clone 286306 (TRAV36/DV7, TRAJ52)
CAVAQRAGGTSYGKLAF

SEQ ID NO: 572612 - protein, 15 aa, Homo sapiens
  CDR3 for beta chain variable domain of TCR clone 286306 (TRBV6-5, TRBJ1-2)
CASSYSQAFNYGYTV

SEQ ID NO: 572613 - protein, 17 aa, Homo sapiens
  CDR3 for alpha chain variable domain of TCR clone 286307 (TRAV3, TRAJ42)
CAVRDRDYGGSQGNLIF

SEQ ID NO: 572614 - protein, 13 aa, Homo sapiens
  CDR3 for beta chain variable domain of TCR clone 286307 (TRBV20-1, TRBJ2-7)
CSSKRRGSYEQYF

SEQ ID NO: 572615 - protein, 16 aa, Homo sapiens
  CDR3 for alpha chain variable domain of TCR clone 286308 (TRAV13-1, TRAJ48)
CAASIFGNFGNEKLTF

SEQ ID NO: 572616 - protein, 16 aa, Homo sapiens
  CDR3 for beta chain variable domain of TCR clone 286308 (TRBV12-4, TRBJ2-5)
CASSFFVRGRQETQYF

SEQ ID NO: 572617 - protein, 12 aa, Homo sapiens
  CDR3 for alpha chain variable domain of TCR clone 286309 (TRAV12-3, TRAJ17)
CAMTLTGNKLTF

SEQ ID NO: 572618 - protein, 15 aa, Homo sapiens
  CDR3 for beta chain variable domain of TCR clone 286309 (TRBV20-1, TRBJ2-7)
CGARDRVSGMDEKYF

SEQ ID NO: 572619 - protein, 11 aa, Homo sapiens
  CDR3 for alpha chain variable domain of TCR clone 286310 (TRAV2, TRAJ13)
CASGGYQKVTY

SEQ ID NO: 572620 - protein, 15 aa, Homo sapiens
  CDR3 for beta chain variable domain of TCR clone 286310 (TRBV7-8, TRBJ2-3)
CASSPRTGSTDTQYF

SEQ ID NO: 572621 - protein, 18 aa, Homo sapiens
  CDR3 for alpha chain variable domain of TCR clone 286311 (TRAV21, TRAJ52)
CAVRPSPSGGTSYGKLTF

SEQ ID NO: 572622 - protein, 16 aa, Homo sapiens
  CDR3 for beta chain variable domain of TCR clone 286311 (TRBV13, TRBJ2-2)
CASSPRTGEHTGELFF

SEQ ID NO: 572623 - protein, 12 aa, Homo sapiens
  CDR3 for alpha chain variable domain of TCR clone 286312 (TRAV13-1, TRAJ21)
CAAKEGFNRFYF

SEQ ID NO: 572624 - protein, 15 aa, Homo sapiens
  CDR3 for beta chain variable domain of TCR clone 286312 (TRBV25-1, TRBJ1-4)
CASSPGDSTNEKLFF

SEQ ID NO: 572625 - protein, 16 aa, Homo sapiens
  CDR3 for alpha chain variable domain of TCR clone 286313 (TRAV30, TRAJ24)
CGTEIVDADSWGKFQF

SEQ ID NO: 572626 - protein, 12 aa, Homo sapiens
  CDR3 for beta chain variable domain of TCR clone 286313 (TRBV12-4, TRBJ2-3)
CASSSATDTQYF

SEQ ID NO: 572627 - protein, 14 aa, Homo sapiens
  CDR3 for alpha chain variable domain of TCR clone 286314 (TRAV17, TRAJ45)
CATASGGGADGLTF

SEQ ID NO: 572628 - protein, 16 aa, Homo sapiens
  CDR3 for beta chain variable domain of TCR clone 286314 (TRBV12-4, TRBJ1-5)
CASSRPVGGSNQPQHF

SEQ ID NO: 572629 - protein, 10 aa, Homo sapiens
  CDR3 for alpha chain variable domain of TCR clone 286315 (TRAV23/DV6, TRAJ57)
CAASSTLSQG

SEQ ID NO: 572630 - protein, 15 aa, Homo sapiens
  CDR3 for beta chain variable domain of TCR clone 286315 (TRBV25-1, TRBJ1-4)
CASSPGDSTSEKLFF

SEQ ID NO: 572631 - protein, 11 aa, Homo sapiens
  CDR3 for alpha chain variable domain of TCR clone 286316 (TRAV12-3, TRAJ43)
CAMSVSNDVRF

SEQ ID NO: 572632 - protein, 12 aa, Homo sapiens
  CDR3 for beta chain variable domain of TCR clone 286316 (TRBV20-1, TRBJ1-1)
QCSTWGGTEAFF

SEQ ID NO: 572633 - protein, 18 aa, Homo sapiens
  CDR3 for alpha chain variable domain of TCR clone 286317 (TRAV21, TRAJ52)
CAVRPSPAGGTSYGKLTF

SEQ ID NO: 572634 - protein, 18 aa, Homo sapiens
  CDR3 for beta chain variable domain of TCR clone 286317 (TRBV6-6, TRBJ2-3)
CASSYSVADRGPTDTQYF

SEQ ID NO: 572635 - protein, 12 aa, Homo sapiens
  CDR3 for alpha chain variable domain of TCR clone 286318 (TRAV21, TRAJ33)
CAKMDSNYQLIW

SEQ ID NO: 572636 - protein, 14 aa, Homo sapiens
  CDR3 for beta chain variable domain of TCR clone 286318 (TRBV20-1, TRBJ2-7)
CSAPELAGVGEQYF

SEQ ID NO: 572637 - protein, 14 aa, Homo sapiens
  CDR3 for alpha chain variable domain of TCR clone 286319 (TRAV2, TRAJ9)
CAVEDRSGGFKTIF

SEQ ID NO: 572638 - protein, 15 aa, Homo sapiens
  CDR3 for beta chain variable domain of TCR clone 286319 (TRBV20-1, TRBJ2-7)
CSARDRVSVMDEQYF

SEQ ID NO: 572639 - protein, 13 aa, Homo sapiens
  CDR3 for alpha chain variable domain of TCR clone 286320 (TRAV8-6, TRAJ21)
CAVSLSSLNKFYF

SEQ ID NO: 572640 - protein, 14 aa, Homo sapiens
  CDR3 for beta chain variable domain of TCR clone 286320 (TRBV7-9, TRBJ2-5)
CASSLDTAQETQYF

SEQ ID NO: 572641 - protein, 19 aa, Homo sapiens
  CDR3 for alpha chain variable domain of TCR clone 286321 (TRAV17, TRAJ17)
CATDGRPGVLKAAGNKLTF

SEQ ID NO: 572642 - protein, 17 aa, Homo sapiens
  CDR3 for beta chain variable domain of TCR clone 286321 (TRBV12-4, TRBJ1-1)
CASSLSGFRTMNTEAFF

SEQ ID NO: 572643 - protein, 15 aa, Homo sapiens
  CDR3 for alpha chain variable domain of TCR clone 286322 (TRAV3, TRAJ24)
CAGGMTTDSWGKFQC

SEQ ID NO: 572644 - protein, 14 aa, Homo sapiens
  CDR3 for beta chain variable domain of TCR clone 286322 (TRBV4-1, TRBJ2-2)
CASRRGRASGELFF

SEQ ID NO: 572645 - protein, 14 aa, Homo sapiens
  CDR3 for alpha chain variable domain of TCR clone 286323 (TRAV1-2, TRAJ16)
CAVNRFSDGQKLLF

SEQ ID NO: 572646 - protein, 13 aa, Homo sapiens
  CDR3 for beta chain variable domain of TCR clone 286323 (TRBV4-1, TRBJ2-1)
CASSQAGGDEKFF

SEQ ID NO: 572647 - protein, 13 aa, Homo sapiens
  CDR3 for alpha chain variable domain of TCR clone 286324 (TRAV2, TRAJ15)
RAVASQAGTALIF

SEQ ID NO: 572648 - protein, 14 aa, Homo sapiens
  CDR3 for beta chain variable domain of TCR clone 286324 (TRBV25-1, TRBJ1-1)
CASTHLGGNTEAFF

SEQ ID NO: 572649 - protein, 12 aa, Homo sapiens
  CDR3 for alpha chain variable domain of TCR clone 286325 (TRAV12-3, TRAJ40)
CAMSSGTYKYIF

SEQ ID NO: 572650 - protein, 15 aa, Homo sapiens
  CDR3 for beta chain variable domain of TCR clone 286325 (TRBV7-3, TRBJ2-2)
CASSEKGQGTGELFF

SEQ ID NO: 572651 - protein, 14 aa, Homo sapiens
  CDR3 for alpha chain variable domain of TCR clone 286326 (TRAV12-2, TRAJ40)
FAVKIPSGTYKYFF

SEQ ID NO: 572652 - protein, 14 aa, Homo sapiens
  CDR3 for beta chain variable domain of TCR clone 286326 (TRBV20-1, TRBJ1-1)
CSAQTRIGGTEAFF

SEQ ID NO: 572653 - protein, 15 aa, Homo sapiens
  CDR3 for alpha chain variable domain of TCR clone 286327 (TRAV8-4, TRAJ7)
CAVSGGNYGNNRLAF

SEQ ID NO: 572654 - protein, 11 aa, Homo sapiens
  CDR3 for beta chain variable domain of TCR clone 286327 (TRBV20-1, TRBJ2-1)
CSLSRGSEQFF

SEQ ID NO: 572655 - protein, 16 aa, Homo sapiens
  CDR3 for alpha chain variable domain of TCR clone 286328 (TRAV30, TRAJ24)
CGTEIVDADSWGKCLF

SEQ ID NO: 572656 - protein, 14 aa, Homo sapiens
  CDR3 for beta chain variable domain of TCR clone 286328 (TRBV12-5, TRBJ2-5)
CASGSRTHQETQYF

SEQ ID NO: 572657 - protein, 11 aa, Homo sapiens
  CDR3 for alpha chain variable domain of TCR clone 286329 (TRAV2, TRAJ13)
CASGGYQKVTF

SEQ ID NO: 572658 - protein, 14 aa, Homo sapiens
  CDR3 for beta chain variable domain of TCR clone 286329 (TRBV11-2, TRBJ2-3)
CASSLGRGTDTQYF

SEQ ID NO: 572659 - protein, 16 aa, Homo sapiens
  CDR3 for alpha chain variable domain of TCR clone 286330 (TRAV16, TRAJ52)
CALSAAGGTSYGKLTF

SEQ ID NO: 572660 - protein, 16 aa, Homo sapiens
  CDR3 for beta chain variable domain of TCR clone 286330 (TRBV12-4, TRBJ1-5)
CASNRPVGGSNQPQHF

SEQ ID NO: 572661 - protein, 20 aa, Homo sapiens
  CDR3 for alpha chain variable domain of TCR clone 286331 (TRAV21, TRAJ4)
AASQPGDSATLAGGYNKLIF

SEQ ID NO: 572662 - protein, 19 aa, Homo sapiens
  CDR3 for beta chain variable domain of TCR clone 286331 (TRBV18, TRBJ1-3)
CASSPLSRTGMCSGNTIYF

SEQ ID NO: 572663 - protein, 16 aa, Homo sapiens
  CDR3 for alpha chain variable domain of TCR clone 286332 (TRAV30, TRAJ24)
CGTEIVDADSWGKFQF

SEQ ID NO: 572664 - protein, 18 aa, Homo sapiens
  CDR3 for beta chain variable domain of TCR clone 286332 (TRBV7-9, TRBJ2-7)
CASRLTTSGSRTWYEQYI

SEQ ID NO: 572665 - protein, 13 aa, Homo sapiens
  CDR3 for alpha chain variable domain of TCR clone 286333 (TRAV16, TRAJ29)
YALSRRGNTPLVF

SEQ ID NO: 572666 - protein, 15 aa, Homo sapiens
  CDR3 for beta chain variable domain of TCR clone 286333 (TRBV4-1, TRBJ2-3)
CASSRGQGIPDTQYF

SEQ ID NO: 572667 - protein, 16 aa, Homo sapiens
  CDR3 for alpha chain variable domain of TCR clone 286334 (TRAV27, TRAJ52)
CAGAGAGGASYGKLTF

SEQ ID NO: 572668 - protein, 13 aa, Homo sapiens
  CDR3 for beta chain variable domain of TCR clone 286334 (TRBV10-3, TRBJ2-7)
CASKLAVNYEQYF

SEQ ID NO: 572669 - protein, 14 aa, Homo sapiens
  CDR3 for alpha chain variable domain of TCR clone 286335 (TRAV1-2, TRAJ16)
CAVNRFSDGQKLLF

SEQ ID NO: 572670 - protein, 14 aa, Homo sapiens
  CDR3 for beta chain variable domain of TCR clone 286335 (TRBV13, TRBJ2-7)
CASSLGRGQETQYF

SEQ ID NO: 572671 - protein, 14 aa, Homo sapiens
  CDR3 for alpha chain variable domain of TCR clone 286336 (TRAV1-2, TRAJ16)
CAVNRFSDGQKLLF

SEQ ID NO: 572672 - protein, 14 aa, Homo sapiens
  CDR3 for beta chain variable domain of TCR clone 286336 (TRBV13, TRBJ2-1)
CASSLGRGQETQYF

SEQ ID NO: 572673 - protein, 12 aa, Homo sapiens
  CDR3 for alpha chain variable domain of TCR clone 286337 (TRAV21, TRAJ27)
CAANTNAGKSTF

SEQ ID NO: 572674 - protein, 15 aa, Homo sapiens
  CDR3 for beta chain variable domain of TCR clone 286337 (TRBV4-3, TRBJ1-1)
CASSQELGRGTEALF

SEQ ID NO: 572675 - protein, 14 aa, Homo sapiens
  CDR3 for alpha chain variable domain of TCR clone 286338 (TRAV3, TRAJ9)
CAVRGNTGGFKTIF

SEQ ID NO: 572676 - protein, 14 aa, Homo sapiens
  CDR3 for beta chain variable domain of TCR clone 286338 (TRBV15, TRBJ2-1)
CVTSGVEDYNEQFF

SEQ ID NO: 572677 - protein, 16 aa, Homo sapiens
  CDR3 for alpha chain variable domain of TCR clone 286339 (TRAV13-1, TRAJ10)
CAASSHFTGGGNKLNF

SEQ ID NO: 572678 - protein, 15 aa, Homo sapiens
  CDR3 for beta chain variable domain of TCR clone 286339 (TRBV7-9, TRBJ1-6)
CASSSPGRGNSPFHF

SEQ ID NO: 572679 - protein, 14 aa, Homo sapiens
  CDR3 for alpha chain variable domain of TCR clone 286340 (TRAV27, TRAJ22)
CAGVVPGSARQLTF

SEQ ID NO: 572680 - protein, 14 aa, Homo sapiens
  CDR3 for beta chain variable domain of TCR clone 286340 (TRBV7-2, TRBJ2-5)
CASSPRGSSETKYF

SEQ ID NO: 572681 - protein, 12 aa, Homo sapiens
  CDR3 for alpha chain variable domain of TCR clone 286341 (TRAV13-1, TRAJ53)
AASGGSNYKLTF

SEQ ID NO: 572682 - protein, 15 aa, Homo sapiens
  CDR3 for beta chain variable domain of TCR clone 286341 (TRBV5-1, TRBJ2-1)
CASSPPRAPYMSSSS

SEQ ID NO: 572683 - protein, 19 aa, Homo sapiens
  CDR3 for alpha chain variable domain of TCR clone 286342 (TRAV26-1, TRAJ52)
CIVRVANNAGGTSYGKLTF

SEQ ID NO: 572684 - protein, 14 aa, Homo sapiens
  CDR3 for beta chain variable domain of TCR clone 286342 (TRBV19, TRBJ1-2)
RASSIGAGSYGYAF

SEQ ID NO: 572685 - protein, 13 aa, Homo sapiens
  CDR3 for alpha chain variable domain of TCR clone 286343 (TRAV13-1, TRAJ39)
CSKYSNAGNMLTF

SEQ ID NO: 572686 - protein, 14 aa, Homo sapiens
  CDR3 for beta chain variable domain of TCR clone 286343 (TRBV28, TRBJ2-5)
CASRGSSFWETQYF

SEQ ID NO: 572687 - protein, 15 aa, Homo sapiens
  CDR3 for alpha chain variable domain of TCR clone 286344 (TRAV3, TRAJ5)
CALRDRKTGRRALTF

SEQ ID NO: 572688 - protein, 15 aa, Homo sapiens
  CDR3 for beta chain variable domain of TCR clone 286344 (TRBV7-8, TRBJ2-1)
RASSLADSLYNEQFF

SEQ ID NO: 572689 - protein, 16 aa, Homo sapiens
  CDR3 for alpha chain variable domain of TCR clone 286345 (TRAV8-3, TRAJ42)
CAVAGDYGGSQGNLIF

SEQ ID NO: 572690 - protein, 14 aa, Homo sapiens
  CDR3 for beta chain variable domain of TCR clone 286345 (TRBV19, TRBJ2-1)
CASPTFVLSGEQFF

SEQ ID NO: 572691 - protein, 14 aa, Homo sapiens
  CDR3 for alpha chain variable domain of TCR clone 286346 (TRAV17, TRAJ57)
CATDPQGGSEKLVF

SEQ ID NO: 572692 - protein, 14 aa, Homo sapiens
  CDR3 for beta chain variable domain of TCR clone 286346 (TRBV19, TRBJ2-5)
CASSMTGQQETQYF

SEQ ID NO: 572693 - protein, 16 aa, Homo sapiens
  CDR3 for alpha chain variable domain of TCR clone 286347 (TRAV16, TRAJ52)
CALSAAGGTSYGKLTC

SEQ ID NO: 572694 - protein, 12 aa, Homo sapiens
  CDR3 for beta chain variable domain of TCR clone 286347 (TRBV12-4, TRBJ1-3)
CASSFSGNTIYF

SEQ ID NO: 572695 - protein, 13 aa, Homo sapiens
  CDR3 for alpha chain variable domain of TCR clone 286348 (TRAV8-3, TRAJ28)
CAVGAVGSYQLTF

SEQ ID NO: 572696 - protein, 16 aa, Homo sapiens
  CDR3 for beta chain variable domain of TCR clone 286348 (TRBV27, TRBJ2-2)
CASSSSGVSNTGELFF

SEQ ID NO: 572697 - protein, 18 aa, Homo sapiens
  CDR3 for alpha chain variable domain of TCR clone 286349 (TRAV26-2, TRAJ54)
CILRDAEVGIQGAQKLVF

SEQ ID NO: 572698 - protein, 16 aa, Homo sapiens
  CDR3 for beta chain variable domain of TCR clone 286349 (TRBV6-1, TRBJ2-5)
CASSETLDRGAETQYF

SEQ ID NO: 572699 - protein, 10 aa, Homo sapiens
  CDR3 for alpha chain variable domain of TCR clone 286350 (TRAV13-2, TRAJ49)
CADTGNQFYF

SEQ ID NO: 572700 - protein, 16 aa, Homo sapiens
  CDR3 for beta chain variable domain of TCR clone 286350 (TRBV29-1, TRBJ2-7)
CSVEVVGTSGSYEQYF

SEQ ID NO: 572701 - protein, 13 aa, Homo sapiens
  CDR3 for alpha chain variable domain of TCR clone 286351 (TRAV12-1, TRAJ33)
CGDAPDSNYQLIW

SEQ ID NO: 572702 - protein, 14 aa, Homo sapiens
  CDR3 for beta chain variable domain of TCR clone 286351 (TRBV2, TRBJ2-7)
CASSLTAGGYEQYF

SEQ ID NO: 572703 - protein, 14 aa, Homo sapiens
  CDR3 for alpha chain variable domain of TCR clone 286352 (TRAV26-1, TRAJ38)
CIADNAGNNRKLIW

SEQ ID NO: 572704 - protein, 14 aa, Homo sapiens
  CDR3 for beta chain variable domain of TCR clone 286352 (TRBV19, TRBJ1-5)
CASSKMTGPQPQHF

SEQ ID NO: 572705 - protein, 14 aa, Homo sapiens
  CDR3 for alpha chain variable domain of TCR clone 286353 (TRAV3, TRAJ21)
CAVESQANFNKFYF

SEQ ID NO: 572706 - protein, 15 aa, Homo sapiens
  CDR3 for beta chain variable domain of TCR clone 286353 (TRBV7-9, TRBJ2-1)
CASSSGLAGGNEQFF

SEQ ID NO: 572707 - protein, 15 aa, Homo sapiens
  CDR3 for alpha chain variable domain of TCR clone 286354 (TRAV3, TRAJ5)
CAVRDLGTGRRALTF

SEQ ID NO: 572708 - protein, 15 aa, Homo sapiens
  CDR3 for beta chain variable domain of TCR clone 286354 (TRBV20-1, TRBJ2-1)
CSARSPGGPGNEQFF

SEQ ID NO: 572709 - protein, 16 aa, Homo sapiens
  CDR3 for alpha chain variable domain of TCR clone 286355 (TRAV30, TRAJ24)
CGTEVVDADSWGKFQF

SEQ ID NO: 572710 - protein, 18 aa, Homo sapiens
  CDR3 for beta chain variable domain of TCR clone 286355 (TRBV12-5, TRBJ2-5)
CASGSRTHQETVLRARHA

SEQ ID NO: 572711 - protein, 18 aa, Homo sapiens
  CDR3 for alpha chain variable domain of TCR clone 286356 (TRAV21, TRAJ52)
CAVRPSPAGGTSYGKLTF

SEQ ID NO: 572712 - protein, 11 aa, Homo sapiens
  CDR3 for beta chain variable domain of TCR clone 286356 (TRBV6-3, TRBJ2-3)
CAAGQADTQYF

SEQ ID NO: 572713 - protein, 14 aa, Homo sapiens
  CDR3 for alpha chain variable domain of TCR clone 286357 (TRAV1-2, TRAJ8)
CAVREDTGFQKLVF

SEQ ID NO: 572714 - protein, 18 aa, Homo sapiens
  CDR3 for beta chain variable domain of TCR clone 286357 (TRBV20-1, TRBJ2-6)
CSAETTPTHGSGANVLSF

SEQ ID NO: 572715 - protein, 23 aa, Homo sapiens
  CDR3 for alpha chain variable domain of TCR clone 286358 (TRAV3, TRAJ38)
CAVRDCLNAGNNHIQNPDPAVYQ

SEQ ID NO: 572716 - protein, 14 aa, Homo sapiens
  CDR3 for beta chain variable domain of TCR clone 286358 (TRBV6-1, TRBJ1-3)
CASVQGGGGNTIYF

SEQ ID NO: 572717 - protein, 17 aa, Homo sapiens
  CDR3 for alpha chain variable domain of TCR clone 286359 (TRAV26-2, TRAJ42)
CILRDVGYGGRQGNPIF

SEQ ID NO: 572718 - protein, 16 aa, Homo sapiens
  CDR3 for beta chain variable domain of TCR clone 286359 (TRBV12-4, TRBJ2-7)
CASSLIGGTGTYEQYF

SEQ ID NO: 572719 - protein, 14 aa, Homo sapiens
  CDR3 for alpha chain variable domain of TCR clone 286360 (TRAV26-1, TRAJ49)
CIVRLTNTGNQFYF

SEQ ID NO: 572720 - protein, 15 aa, Homo sapiens
  CDR3 for beta chain variable domain of TCR clone 286360 (TRBV4-1, TRBJ2-7)
CASSKGRPTSSTSGR

SEQ ID NO: 572721 - protein, 11 aa, Homo sapiens
  CDR3 for alpha chain variable domain of TCR clone 286361 (TRAV13-2, TRAJ23)
CAESPRGKLIF

SEQ ID NO: 572722 - protein, 12 aa, Homo sapiens
  CDR3 for beta chain variable domain of TCR clone 286361 (TRBV7-9, TRBJ2-7)
CASSIKREEQYF

SEQ ID NO: 572723 - protein, 14 aa, Homo sapiens
  CDR3 for alpha chain variable domain of TCR clone 286362 (TRAV30, TRAJ26)
CGTEIFSYGQNFVF

SEQ ID NO: 572724 - protein, 13 aa, Homo sapiens
  CDR3 for beta chain variable domain of TCR clone 286362 (TRBV19, TRBJ1-3)
CASRLSLGNTIYF

SEQ ID NO: 572725 - protein, 18 aa, Homo sapiens
  CDR3 for alpha chain variable domain of TCR clone 286363 (TRAV21, TRAJ52)
CAGRPSPAGGPSYGKLTF

SEQ ID NO: 572726 - protein, 17 aa, Homo sapiens
  CDR3 for beta chain variable domain of TCR clone 286363 (TRBV13, TRBJ2-3)
CASSLSRVAGGRNTQYF

SEQ ID NO: 572727 - protein, 15 aa, Homo sapiens
  CDR3 for alpha chain variable domain of TCR clone 286364 (TRAV8-1, TRAJ6)
CAVNAGAGGSYIPTF

SEQ ID NO: 572728 - protein, 14 aa, Homo sapiens
  CDR3 for beta chain variable domain of TCR clone 286364 (TRBV25-1, TRBJ1-6)
CASSLSADISTLHF

SEQ ID NO: 572729 - protein, 15 aa, Homo sapiens
  CDR3 for alpha chain variable domain of TCR clone 286365 (TRAV12-2, TRAJ53)
CAVNGGGGSNYKLTF

SEQ ID NO: 572730 - protein, 17 aa, Homo sapiens
  CDR3 for beta chain variable domain of TCR clone 286365 (TRBV7-3, TRBJ2-3)
RASSVMKRMRGADTQYF

SEQ ID NO: 572731 - protein, 15 aa, Homo sapiens
  CDR3 for alpha chain variable domain of TCR clone 286366 (TRAV8-3, TRAJ27)
CAVGPSKTNAGKSTF

SEQ ID NO: 572732 - protein, 17 aa, Homo sapiens
  CDR3 for beta chain variable domain of TCR clone 286366 (TRBV28, TRBJ2-1)
CASSSARQALTYNEQFF

SEQ ID NO: 572733 - protein, 15 aa, Homo sapiens
  CDR3 for alpha chain variable domain of TCR clone 286367 (TRAV8-3, TRAJ45)
CASSYSGGGADGATF

SEQ ID NO: 572734 - protein, 13 aa, Homo sapiens
  CDR3 for beta chain variable domain of TCR clone 286367 (TRBV10-3, TRBJ2-7)
CASKLAVNYEQYF

SEQ ID NO: 572735 - protein, 17 aa, Homo sapiens
  CDR3 for alpha chain variable domain of TCR clone 286368 (TRAV13-1, TRAJ52)
CAASSGAGGTSYGKLTF

SEQ ID NO: 572736 - protein, 17 aa, Homo sapiens
  CDR3 for beta chain variable domain of TCR clone 286368 (TRBV11-2, TRBJ2-1)
CASSLCPLGVEYNEQFF

SEQ ID NO: 572737 - protein, 15 aa, Homo sapiens
  CDR3 for alpha chain variable domain of TCR clone 286369 (TRAV17, TRAJ57)
CATGPSQGGSEKLVF

SEQ ID NO: 572738 - protein, 14 aa, Homo sapiens
  CDR3 for beta chain variable domain of TCR clone 286369 (TRBV20-1, TRBJ2-2)
CSAPDTANTGELFF

SEQ ID NO: 572739 - protein, 17 aa, Homo sapiens
  CDR3 for alpha chain variable domain of TCR clone 286370 (TRAV21, TRAJ52)
CAVGVNAGGTSYGKLTF

SEQ ID NO: 572740 - protein, 13 aa, Homo sapiens
  CDR3 for beta chain variable domain of TCR clone 286370 (TRBV5-1, TRBJ1-2)
CASSLQGNYGYTF

SEQ ID NO: 572741 - protein, 13 aa, Homo sapiens
  CDR3 for alpha chain variable domain of TCR clone 286371 (TRAV8-4, TRAJ54)
CAVTGGGAQTLVF

SEQ ID NO: 572742 - protein, 16 aa, Homo sapiens
  CDR3 for beta chain variable domain of TCR clone 286371 (TRBV2, TRBJ2-6)
CASSEVGGAGANVLTF

SEQ ID NO: 572743 - protein, 16 aa, Homo sapiens
  CDR3 for alpha chain variable domain of TCR clone 286372 (TRAV4, TRAJ22)
CLVGDLYSGSARQLTF

SEQ ID NO: 572744 - protein, 16 aa, Homo sapiens
  CDR3 for beta chain variable domain of TCR clone 286372 (TRBV7-9, TRBJ2-1)
YASSDVAGGSYDEQFF

SEQ ID NO: 572745 - protein, 14 aa, Homo sapiens
  CDR3 for alpha chain variable domain of TCR clone 286373 (TRAV1-2, TRAJ8)
CAVREDTGFQKLVF

SEQ ID NO: 572746 - protein, 15 aa, Homo sapiens
  CDR3 for beta chain variable domain of TCR clone 286373 (TRBV5-1, TRBJ1-1)
CASSLSDLGGTEAFF

SEQ ID NO: 572747 - protein, 18 aa, Homo sapiens
  CDR3 for alpha chain variable domain of TCR clone 286374 (TRAV26-1, TRAJ5)
CIVRVVPPRDTGGRALTF

SEQ ID NO: 572748 - protein, 14 aa, Homo sapiens
  CDR3 for beta chain variable domain of TCR clone 286374 (TRBV5-4, TRBJ2-2)
CASSLEANTGELFF

SEQ ID NO: 572749 - protein, 22 aa, Homo sapiens
  CDR3 for alpha chain variable domain of TCR clone 286375 (TRAV12-2, TRAJ53)
SPVIQPPTSVPPTLSSNYKLTF

SEQ ID NO: 572750 - protein, 13 aa, Homo sapiens
  CDR3 for beta chain variable domain of TCR clone 286375 (TRBV7-7, TRBJ2-3)
CASSLSRADTQYF

SEQ ID NO: 572751 - protein, 14 aa, Homo sapiens
  CDR3 for alpha chain variable domain of TCR clone 286376 (TRAV21, TRAJ8)
CALQRDTGFQKLVF

SEQ ID NO: 572752 - protein, 15 aa, Homo sapiens
  CDR3 for beta chain variable domain of TCR clone 286376 (TRBV28, TRBJ2-1)
CASSIIAGGRSEQFF

SEQ ID NO: 572753 - protein, 15 aa, Homo sapiens
  CDR3 for alpha chain variable domain of TCR clone 286377 (TRAV16, TRAJ20)
CSLKGGLRADYKLSF

SEQ ID NO: 572754 - protein, 16 aa, Homo sapiens
  CDR3 for beta chain variable domain of TCR clone 286377 (TRBV11-3, TRBJ2-2)
CASSSRTSPGTGELFF

SEQ ID NO: 572755 - protein, 14 aa, Homo sapiens
  CDR3 for alpha chain variable domain of TCR clone 286378 (TRAV29/DV5, TRAJ36)
CAARRKTGANNLFF

SEQ ID NO: 572756 - protein, 16 aa, Homo sapiens
  CDR3 for beta chain variable domain of TCR clone 286378 (TRBV4-1, TRBJ2-3)
CASSQATSGAKDTQYF

SEQ ID NO: 572757 - protein, 16 aa, Homo sapiens
  CDR3 for alpha chain variable domain of TCR clone 286379 (TRAV12-3, TRAJ53)
CAMSPGSGGSNYKLKF

SEQ ID NO: 572758 - protein, 11 aa, Homo sapiens
  CDR3 for beta chain variable domain of TCR clone 286379 (TRBV29-1, TRBJ2-5)
CSEDRTGTQYL

SEQ ID NO: 572759 - protein, 14 aa, Homo sapiens
  CDR3 for alpha chain variable domain of TCR clone 286380 (TRAV13-1, TRAJ35)
CAASKGGCGDVLHC

SEQ ID NO: 572760 - protein, 13 aa, Homo sapiens
  CDR3 for beta chain variable domain of TCR clone 286380 (TRBV7-3, TRBJ1-1)
CASSQDWGAEAFF

SEQ ID NO: 572761 - protein, 14 aa, Homo sapiens
  CDR3 for alpha chain variable domain of TCR clone 286381 (TRAV12-2, TRAJ40)
CAVKIPSGTYKYIF

SEQ ID NO: 572762 - protein, 14 aa, Homo sapiens
  CDR3 for beta chain variable domain of TCR clone 286381 (TRBV20-1, TRBJ1-1)
CSAQTRIRGTEAFV

SEQ ID NO: 572763 - protein, 14 aa, Homo sapiens
  CDR3 for alpha chain variable domain of TCR clone 286382 (TRAV1-2, TRAJ16)
CAVNRFSDGQKLLF

SEQ ID NO: 572764 - protein, 10 aa, Homo sapiens
  CDR3 for beta chain variable domain of TCR clone 286382 (TRBV9, TRBJ1-6)
CASSSRDRGF

SEQ ID NO: 572765 - protein, 10 aa, Homo sapiens
  CDR3 for alpha chain variable domain of TCR clone 286383 (TRAV23/DV6, TRAJ57)
CPASSTLSQG

SEQ ID NO: 572766 - protein, 14 aa, Homo sapiens
  CDR3 for beta chain variable domain of TCR clone 286383 (TRBV25-1, TRBJ1-1)
CASTHLGGNTEAFF

SEQ ID NO: 572767 - protein, 17 aa, Homo sapiens
  CDR3 for alpha chain variable domain of TCR clone 286384 (TRAV23/DV6, TRAJ12)
CAAIDLGAMDSSYTLIF

SEQ ID NO: 572768 - protein, 15 aa, Homo sapiens
  CDR3 for beta chain variable domain of TCR clone 286384 (TRBV12-4, TRBJ2-5)
CASTLNSGRGETQYF

SEQ ID NO: 572769 - protein, 19 aa, Homo sapiens
  CDR3 for alpha chain variable domain of TCR clone 286385 (TRAV13-1, TRAJ52)
CAASPYPNAGGTSYGKLTF

SEQ ID NO: 572770 - protein, 13 aa, Homo sapiens
  CDR3 for beta chain variable domain of TCR clone 286385 (TRBV12-4, TRBJ1-1)
CASSPGTGFEAFF

SEQ ID NO: 572771 - protein, 13 aa, Homo sapiens
  CDR3 for alpha chain variable domain of TCR clone 286386 (TRAV21, TRAJ27)
CAARPGNAGKSTF

SEQ ID NO: 572772 - protein, 16 aa, Homo sapiens
  CDR3 for beta chain variable domain of TCR clone 286386 (TRBV11-2, TRBJ2-7)
CASSLGGGPTSSTSGR

SEQ ID NO: 572773 - protein, 13 aa, Homo sapiens
  CDR3 for alpha chain variable domain of TCR clone 286387 (TRAV8-3, TRAJ43)
CAVGADNKNDMRF

SEQ ID NO: 572774 - protein, 13 aa, Homo sapiens
  CDR3 for beta chain variable domain of TCR clone 286387 (TRBV4-2, TRBJ1-1)
CASSQAGNTEAFF

SEQ ID NO: 572775 - protein, 14 aa, Homo sapiens
  CDR3 for alpha chain variable domain of TCR clone 286388 (TRAV4, TRAJ17)
CLVGDMAAGNKLTF

SEQ ID NO: 572776 - protein, 15 aa, Homo sapiens
  CDR3 for beta chain variable domain of TCR clone 286388 (TRBV5-1, TRBJ2-3)
CASSVTSGSTDTQYF

SEQ ID NO: 572777 - protein, 16 aa, Homo sapiens
  CDR3 for alpha chain variable domain of TCR clone 286389 (TRAV1-2, TRAJ10)
CAVRGVLTGGGNKLTF

SEQ ID NO: 572778 - protein, 16 aa, Homo sapiens
  CDR3 for beta chain variable domain of TCR clone 286389 (TRBV11-3, TRBJ2-7)
CASSPHGAGGPYEQYF

SEQ ID NO: 572779 - protein, 13 aa, Homo sapiens
  CDR3 for alpha chain variable domain of TCR clone 286390 (TRAV12-1, TRAJ29)
CVVRNSGNTPLVF

SEQ ID NO: 572780 - protein, 14 aa, Homo sapiens
  CDR3 for beta chain variable domain of TCR clone 286390 (TRBV7-2, TRBJ2-7)
CDSRSQGAAYEQYF

SEQ ID NO: 572781 - protein, 15 aa, Homo sapiens
  CDR3 for alpha chain variable domain of TCR clone 286391 (TRAV21, TRAJ53)
CATLNSGGSNYKLTF

SEQ ID NO: 572782 - protein, 14 aa, Homo sapiens
  CDR3 for beta chain variable domain of TCR clone 286391 (TRBV9, TRBJ1-2)
CASSVSTRAYGYTF

SEQ ID NO: 572783 - protein, 13 aa, Homo sapiens
  CDR3 for alpha chain variable domain of TCR clone 286392 (TRAV13-2, TRAJ48)
CAEMDFGNEKLTF

SEQ ID NO: 572784 - protein, 15 aa, Homo sapiens
  CDR3 for beta chain variable domain of TCR clone 286392 (TRBV7-9, TRBJ1-6)
CASSAPGRGNSPLHV

SEQ ID NO: 572785 - protein, 12 aa, Homo sapiens
  CDR3 for alpha chain variable domain of TCR clone 286393 (TRAV12-1, TRAJ40)
CVFDSGTYKYIF

SEQ ID NO: 572786 - protein, 18 aa, Homo sapiens
  CDR3 for beta chain variable domain of TCR clone 286393 (TRBV12-4, TRBJ2-2)
CASSLVAGTRGRTGELFF

SEQ ID NO: 572787 - protein, 16 aa, Homo sapiens
  CDR3 for alpha chain variable domain of TCR clone 286394 (TRAV12-1, TRAJ45)
CVVIRYSGGGADGLTF

SEQ ID NO: 572788 - protein, 13 aa, Homo sapiens
  CDR3 for beta chain variable domain of TCR clone 286394 (TRBV20-1, TRBJ2-7)
CSATHTSGYEQYF

SEQ ID NO: 572789 - protein, 15 aa, Homo sapiens
  CDR3 for alpha chain variable domain of TCR clone 286395 (TRAV27, TRAJ38)
CAARRNAGNNRKLIW

SEQ ID NO: 572790 - protein, 16 aa, Homo sapiens
  CDR3 for beta chain variable domain of TCR clone 286395 (TRBV7-2, TRBJ2-1)
CASSPRLAGGNNEQFF

SEQ ID NO: 572791 - protein, 15 aa, Homo sapiens
  CDR3 for alpha chain variable domain of TCR clone 286396 (TRAV3, TRAJ5)
CAVRDLDTGRRALTF

SEQ ID NO: 572792 - protein, 17 aa, Homo sapiens
  CDR3 for beta chain variable domain of TCR clone 286396 (TRBV20-1, TRBJ2-2)
CSASGSGQGGLTGELFF

SEQ ID NO: 572793 - protein, 10 aa, Homo sapiens
  CDR3 for alpha chain variable domain of TCR clone 286397 (TRAV38-2/DV8, TRAJ40)
CASGTYRYIF

SEQ ID NO: 572794 - protein, 14 aa, Homo sapiens
  CDR3 for beta chain variable domain of TCR clone 286397 (TRBV7-9, TRBJ2-1)
CASSPRDSLYEQFF

SEQ ID NO: 572795 - protein, 12 aa, Homo sapiens
  CDR3 for alpha chain variable domain of TCR clone 286398 (TRAV23/DV6, TRAJ17)
CARGSCRQQANF

SEQ ID NO: 572796 - protein, 17 aa, Homo sapiens
  CDR3 for beta chain variable domain of TCR clone 286398 (TRBV4-1, TRBJ1-4)
CASSPEGPRGVEEKLFF

SEQ ID NO: 572797 - protein, 12 aa, Homo sapiens
  CDR3 for alpha chain variable domain of TCR clone 286399 (TRAV13-2, TRAJ8)
CAPWLGFQKLVF

SEQ ID NO: 572798 - protein, 14 aa, Homo sapiens
  CDR3 for beta chain variable domain of TCR clone 286399 (TRBV18, TRBJ1-5)
CASSRQHRNQPQHF

SEQ ID NO: 572799 - protein, 18 aa, Homo sapiens
  CDR3 for alpha chain variable domain of TCR clone 286400 (TRAV17, TRAJ45)
CATSLDLYSGGGADGLTF

SEQ ID NO: 572800 - protein, 14 aa, Homo sapiens
  CDR3 for beta chain variable domain of TCR clone 286400 (TRBV12-5, TRBJ2-5)
CASGSRTHQETQYF

SEQ ID NO: 572801 - protein, 17 aa, Homo sapiens
  CDR3 for alpha chain variable domain of TCR clone 286401 (TRAV29/DV5, TRAJ45)
CAADGPFSGGGADGLTF

SEQ ID NO: 572802 - protein, 13 aa, Homo sapiens
  CDR3 for beta chain variable domain of TCR clone 286401 (TRBV12-4, TRBJ1-2)
CASSLRQGKGYTF

SEQ ID NO: 572803 - protein, 13 aa, Homo sapiens
  CDR3 for alpha chain variable domain of TCR clone 286402 (TRAV8-3, TRAJ43)
CAVGPDNNNDIGF

SEQ ID NO: 572804 - protein, 14 aa, Homo sapiens
  CDR3 for beta chain variable domain of TCR clone 286402 (TRBV19, TRBJ2-1)
CASPTFVLSGEQFF

SEQ ID NO: 572805 - protein, 13 aa, Homo sapiens
  CDR3 for alpha chain variable domain of TCR clone 286403 (TRAV20, TRAJ56)
CAVQAGANSKLTF

SEQ ID NO: 572806 - protein, 14 aa, Homo sapiens
  CDR3 for beta chain variable domain of TCR clone 286403 (TRBV19, TRBJ2-7)
CASSRGRGTYEQYF

SEQ ID NO: 572807 - protein, 18 aa, Homo sapiens
  CDR3 for alpha chain variable domain of TCR clone 286404 (TRAV26-2, TRAJ54)
CILRDVEVGIQGAQKLVF

SEQ ID NO: 572808 - protein, 11 aa, Homo sapiens
  CDR3 for beta chain variable domain of TCR clone 286404 (TRBV19, TRBJ2-2)
CASRYSGELFF

SEQ ID NO: 572809 - protein, 11 aa, Homo sapiens
  CDR3 for alpha chain variable domain of TCR clone 286405 (TRAV3, TRAJ21)
CAVGNFNKFYF

SEQ ID NO: 572810 - protein, 16 aa, Homo sapiens
  CDR3 for beta chain variable domain of TCR clone 286405 (TRBV3-1, TRBJ2-7)
CASSQGATGVAYEQYF

SEQ ID NO: 572811 - protein, 12 aa, Homo sapiens
  CDR3 for alpha chain variable domain of TCR clone 286406 (TRAV21, TRAJ11)
CAATSGYSTLTF

SEQ ID NO: 572812 - protein, 16 aa, Homo sapiens
  CDR3 for beta chain variable domain of TCR clone 286406 (TRBV7-9, TRBJ2-3)
CASSPWREVGTDTQYF

SEQ ID NO: 572813 - protein, 16 aa, Homo sapiens
  CDR3 for alpha chain variable domain of TCR clone 286407 (TRAV17, TRAJ35)
CATAEGGIGFGNVLHC

SEQ ID NO: 572814 - protein, 19 aa, Homo sapiens
  CDR3 for beta chain variable domain of TCR clone 286407 (TRBV19, TRBJ2-5)
CASSIGQVTDVFLGETQYF

SEQ ID NO: 572815 - protein, 12 aa, Homo sapiens
  CDR3 for alpha chain variable domain of TCR clone 286408 (TRAV12-3, TRAJ17)
CAMTLTGNKLTF

SEQ ID NO: 572816 - protein, 16 aa, Homo sapiens
  CDR3 for beta chain variable domain of TCR clone 286408 (TRBV4-1, TRBJ2-1)
CASGLAATSSYNEQFF

SEQ ID NO: 572817 - protein, 17 aa, Homo sapiens
  CDR3 for alpha chain variable domain of TCR clone 286409 (TRAV3, TRAJ6)
CAVRYGPRAGGSYIPTF

SEQ ID NO: 572818 - protein, 18 aa, Homo sapiens
  CDR3 for beta chain variable domain of TCR clone 286409 (TRBV7-9, TRBJ2-7)
CASSLTTSGSRTWYEQYF

SEQ ID NO: 572819 - protein, 14 aa, Homo sapiens
  CDR3 for alpha chain variable domain of TCR clone 286410 (TRAV1-2, TRAJ8)
CAVREDTGYQKLVF

SEQ ID NO: 572820 - protein, 13 aa, Homo sapiens
  CDR3 for beta chain variable domain of TCR clone 286410 (TRBV12-4, TRBJ1-5)
CASSPDRAQPQHF

SEQ ID NO: 572821 - protein, 16 aa, Homo sapiens
  CDR3 for alpha chain variable domain of TCR clone 286411 (TRAV27, TRAJ13)
CAGAKSDSGGYQKVTF

SEQ ID NO: 572822 - protein, 14 aa, Homo sapiens
  CDR3 for beta chain variable domain of TCR clone 286411 (TRBV7-9, TRBJ2-2)
CASSLVQDTGELFF

SEQ ID NO: 572823 - protein, 12 aa, Homo sapiens
  CDR3 for alpha chain variable domain of TCR clone 286412 (TRAV21, TRAJ11)
CAATSGDSTLTF

SEQ ID NO: 572824 - protein, 14 aa, Homo sapiens
  CDR3 for beta chain variable domain of TCR clone 286412 (TRBV20-1, TRBJ2-7)
CSAPELAGVGEQYF

SEQ ID NO: 572825 - protein, 13 aa, Homo sapiens
  CDR3 for alpha chain variable domain of TCR clone 286413 (TRAV8-4, TRAJ30)
CAESVNRDDKIIF

SEQ ID NO: 572826 - protein, 13 aa, Homo sapiens
  CDR3 for beta chain variable domain of TCR clone 286413 (TRBV3-1, TRBJ2-2)
CASLARGSGELFF

SEQ ID NO: 572827 - protein, 16 aa, Homo sapiens
  CDR3 for alpha chain variable domain of TCR clone 286414 (TRAV16, TRAJ4)
CALSRMFSGGYNKLIF

SEQ ID NO: 572828 - protein, 13 aa, Homo sapiens
  CDR3 for beta chain variable domain of TCR clone 286414 (TRBV12-4, TRBJ1-2)
CASSSGPNYGYTF

SEQ ID NO: 572829 - protein, 18 aa, Homo sapiens
  CDR3 for alpha chain variable domain of TCR clone 286415 (TRAV21, TRAJ52)
CAVRPSPAGGTSYGKLTF

SEQ ID NO: 572830 - protein, 16 aa, Homo sapiens
  CDR3 for beta chain variable domain of TCR clone 286415 (TRBV7-3, TRBJ2-1)
CASSFEGYRSYNEQFF

SEQ ID NO: 572831 - protein, 13 aa, Homo sapiens
  CDR3 for alpha chain variable domain of TCR clone 286416 (TRAV13-1, TRAJ39)
CAASIWAGNLLTF

SEQ ID NO: 572832 - protein, 15 aa, Homo sapiens
  CDR3 for beta chain variable domain of TCR clone 286416 (TRBV7-9, TRBJ1-1)
CASSLLEQGGTEAFF

SEQ ID NO: 572833 - protein, 12 aa, Homo sapiens
  CDR3 for alpha chain variable domain of TCR clone 286417 (TRAV12-3, TRAJ17)
CAMTLTGNKLNL

SEQ ID NO: 572834 - protein, 15 aa, Homo sapiens
  CDR3 for beta chain variable domain of TCR clone 286417 (TRBV20-1, TRBJ2-7)
CSARDRVSGMDEQYF

SEQ ID NO: 572835 - protein, 12 aa, Homo sapiens
  CDR3 for alpha chain variable domain of TCR clone 286418 (TRAV36/DV7, TRAJ54)
CAVVRGAQKLVF

SEQ ID NO: 572836 - protein, 14 aa, Homo sapiens
  CDR3 for beta chain variable domain of TCR clone 286418 (TRBV5-1, TRBJ2-7)
CASSRGESLYEQYF

SEQ ID NO: 572837 - protein, 18 aa, Homo sapiens
  CDR3 for alpha chain variable domain of TCR clone 286419 (TRAV26-1, TRAJ23)
CIVRVGLEVRNQGGKLIF

SEQ ID NO: 572838 - protein, 15 aa, Homo sapiens
  CDR3 for beta chain variable domain of TCR clone 286419 (TRBV7-9, TRBJ2-2)
CASSPETGAGGELFF

SEQ ID NO: 572839 - protein, 15 aa, Homo sapiens
  CDR3 for alpha chain variable domain of TCR clone 286420 (TRAV21, TRAJ53)
CATLNSGGSNYKLTF

SEQ ID NO: 572840 - protein, 16 aa, Homo sapiens
  CDR3 for beta chain variable domain of TCR clone 286420 (TRBV28, TRBJ1-4)
CASSPPYRGRSEKLFF

SEQ ID NO: 572841 - protein, 14 aa, Homo sapiens
  CDR3 for alpha chain variable domain of TCR clone 286421 (TRAV12-1, TRAJ17)
CVVNPKAAGIKLTF

SEQ ID NO: 572842 - protein, 14 aa, Homo sapiens
  CDR3 for beta chain variable domain of TCR clone 286421 (TRBV19, TRBJ2-1)
CASPTFVLSGEQFF

SEQ ID NO: 572843 - protein, 13 aa, Homo sapiens
  CDR3 for alpha chain variable domain of TCR clone 286422 (TRAV21, TRAJ27)
CAARPGNAGKSIF

SEQ ID NO: 572844 - protein, 14 aa, Homo sapiens
  CDR3 for beta chain variable domain of TCR clone 286422 (TRBV11-2, TRBJ2-7)
CASSLGAGAYEQYF

SEQ ID NO: 572845 - protein, 16 aa, Homo sapiens
  CDR3 for alpha chain variable domain of TCR clone 286423 (TRAV12-3, TRAJ53)
CAMSPGSGGSNYKLTS

SEQ ID NO: 572846 - protein, 14 aa, Homo sapiens
  CDR3 for beta chain variable domain of TCR clone 286423 (TRBV12-5, TRBJ2-5)
CASGSRTHQETQYF

SEQ ID NO: 572847 - protein, 15 aa, Homo sapiens
  CDR3 for alpha chain variable domain of TCR clone 286424 (TRAV26-2, TRAJ57)
CILRDIRGGSEKLGF

SEQ ID NO: 572848 - protein, 11 aa, Homo sapiens
  CDR3 for beta chain variable domain of TCR clone 286424 (TRBV3-1, TRBJ2-7)
CASTSLGEQYF

SEQ ID NO: 572849 - protein, 13 aa, Homo sapiens
  CDR3 for alpha chain variable domain of TCR clone 286425 (TRAV27, TRAJ42)
CAGARGSQGNRIF

SEQ ID NO: 572850 - protein, 15 aa, Homo sapiens
  CDR3 for beta chain variable domain of TCR clone 286425 (TRBV6-3, TRBJ2-7)
CASSSPGTVFYEQYF

SEQ ID NO: 572851 - protein, 13 aa, Homo sapiens
  CDR3 for alpha chain variable domain of TCR clone 286426 (TRAV3, TRAJ33)
CDLRDRSNYQLIW

SEQ ID NO: 572852 - protein, 16 aa, Homo sapiens
  CDR3 for beta chain variable domain of TCR clone 286426 (TRBV4-2, TRBJ2-7)
CASSQDRGTSSYEQYF

SEQ ID NO: 572853 - protein, 13 aa, Homo sapiens
  CDR3 for alpha chain variable domain of TCR clone 286427 (TRAV12-1, TRAJ26)
CVVRRNYGQNFVF

SEQ ID NO: 572854 - protein, 13 aa, Homo sapiens
  CDR3 for beta chain variable domain of TCR clone 286427 (TRBV4-2, TRBJ2-1)
CQRPGQAYNEQFF

SEQ ID NO: 572855 - protein, 12 aa, Homo sapiens
  CDR3 for alpha chain variable domain of TCR clone 286428 (TRAV1-1, TRAJ8)
CAGGTGFQKLVF

SEQ ID NO: 572856 - protein, 15 aa, Homo sapiens
  CDR3 for beta chain variable domain of TCR clone 286428 (TRBV7-9, TRBJ1-4)
CAISRIGGFNEKLFF

SEQ ID NO: 572857 - protein, 14 aa, Homo sapiens
  CDR3 for alpha chain variable domain of TCR clone 286429 (TRAV16, TRAJ33)
CALSAMDSNYQLIW

SEQ ID NO: 572858 - protein, 12 aa, Homo sapiens
  CDR3 for beta chain variable domain of TCR clone 286429 (TRBV5-1, TRBJ1-2)
CASSQDTYGYTF

SEQ ID NO: 572859 - protein, 14 aa, Homo sapiens
  CDR3 for alpha chain variable domain of TCR clone 286430 (TRAV16, TRAJ33)
CALSAMDSNYQLIW

SEQ ID NO: 572860 - protein, 13 aa, Homo sapiens
  CDR3 for beta chain variable domain of TCR clone 286430 (TRBV7-2, TRBJ2-7)
CASSAPSGSEQYF

SEQ ID NO: 572861 - protein, 16 aa, Homo sapiens
  CDR3 for alpha chain variable domain of TCR clone 286431 (TRAV12-3, TRAJ53)
CAMSPGSGGSNYKLTF

SEQ ID NO: 572862 - protein, 16 aa, Homo sapiens
  CDR3 for beta chain variable domain of TCR clone 286431 (TRBV4-3, TRBJ1-1)
CASSHAGFGMNTEAFF

SEQ ID NO: 572863 - protein, 11 aa, Homo sapiens
  CDR3 for alpha chain variable domain of TCR clone 286432 (TRAV21, TRAJ11)
CAVNGYSTLTF

SEQ ID NO: 572864 - protein, 15 aa, Homo sapiens
  CDR3 for beta chain variable domain of TCR clone 286432 (TRBV18, TRBJ1-1)
CASSDRGTGDTEAFF

SEQ ID NO: 572865 - protein, 12 aa, Homo sapiens
  CDR3 for alpha chain variable domain of TCR clone 286433 (TRAV12-2, TRAJ10)
WGVTGGGNKLTF

SEQ ID NO: 572866 - protein, 16 aa, Homo sapiens
  CDR3 for beta chain variable domain of TCR clone 286433 (TRBV6-4, TRBJ1-2)
CASSEAVGDPDYGYTF

SEQ ID NO: 572867 - protein, 14 aa, Homo sapiens
  CDR3 for alpha chain variable domain of TCR clone 286434 (TRAV2, TRAJ9)
CAVDPNTGGFKTIF

SEQ ID NO: 572868 - protein, 12 aa, Homo sapiens
  CDR3 for beta chain variable domain of TCR clone 286434 (TRBV18, TRBJ2-5)
CASSPNQETQYF

SEQ ID NO: 572869 - protein, 16 aa, Homo sapiens
  CDR3 for alpha chain variable domain of TCR clone 286435 (TRAV21, TRAJ52)
CAVTNAGGASYGKLTF

SEQ ID NO: 572870 - protein, 17 aa, Homo sapiens
  CDR3 for beta chain variable domain of TCR clone 286435 (TRBV28, TRBJ2-5)
CASSRQGGLAGAETKYF

SEQ ID NO: 572871 - protein, 17 aa, Homo sapiens
  CDR3 for alpha chain variable domain of TCR clone 286436 (TRAV2, TRAJ22)
ILQVREADAAEQRQLTF

SEQ ID NO: 572872 - protein, 16 aa, Homo sapiens
  CDR3 for beta chain variable domain of TCR clone 286436 (TRBV2, TRBJ2-5)
CASSETQGLGEETQYF

SEQ ID NO: 572873 - protein, 14 aa, Homo sapiens
  CDR3 for alpha chain variable domain of TCR clone 286437 (TRAV12-3, TRAJ10)
SHLPLTGGGNKLTF

SEQ ID NO: 572874 - protein, 15 aa, Homo sapiens
  CDR3 for beta chain variable domain of TCR clone 286437 (TRBV7-9, TRBJ1-4)
CASSRTGGFKEKLFF

SEQ ID NO: 572875 - protein, 15 aa, Homo sapiens
  CDR3 for alpha chain variable domain of TCR clone 286438 (TRAV13-2, TRAJ53)
CAARGSRGSNSKLTF

SEQ ID NO: 572876 - protein, 14 aa, Homo sapiens
  CDR3 for beta chain variable domain of TCR clone 286438 (TRBV4-1, TRBJ2-2)
CASSQYPDTGELFF

SEQ ID NO: 572877 - protein, 12 aa, Homo sapiens
  CDR3 for alpha chain variable domain of TCR clone 286439 (TRAV25, TRAJ20)
CAGSSNDSKLSF

SEQ ID NO: 572878 - protein, 12 aa, Homo sapiens
  CDR3 for beta chain variable domain of TCR clone 286439 (TRBV5-4, TRBJ2-7)
CASSPRTEEQYF

SEQ ID NO: 572879 - protein, 15 aa, Homo sapiens
  CDR3 for alpha chain variable domain of TCR clone 286440 (TRAV34, TRAJ38)
CGADFTPGNNRKLIW

SEQ ID NO: 572880 - protein, 16 aa, Homo sapiens
  CDR3 for beta chain variable domain of TCR clone 286440 (TRBV7-8, TRBJ2-3)
CASSTEGQRETDTQYF

SEQ ID NO: 572881 - protein, 13 aa, Homo sapiens
  CDR3 for alpha chain variable domain of TCR clone 286441 (TRAV21, TRAJ15)
CAVANQAGTALIF

SEQ ID NO: 572882 - protein, 13 aa, Homo sapiens
  CDR3 for beta chain variable domain of TCR clone 286441 (TRBV9, TRBJ2-1)
CASSPSGGSEQFF

SEQ ID NO: 572883 - protein, 14 aa, Homo sapiens
  CDR3 for alpha chain variable domain of TCR clone 286442 (TRAV2, TRAJ37)
CAVDFTSNTGKLIF

SEQ ID NO: 572884 - protein, 15 aa, Homo sapiens
  CDR3 for beta chain variable domain of TCR clone 286442 (TRBV7-3, TRBJ2-2)
CASSETGQGTGELFF

SEQ ID NO: 572885 - protein, 13 aa, Homo sapiens
  CDR3 for alpha chain variable domain of TCR clone 286443 (TRAV21, TRAJ37)
CAVSSGNTGKLIF

SEQ ID NO: 572886 - protein, 17 aa, Homo sapiens
  CDR3 for beta chain variable domain of TCR clone 286443 (TRBV5-1, TRBJ2-5)
CASSRLGLAANQETQYF

SEQ ID NO: 572887 - protein, 13 aa, Homo sapiens
  CDR3 for alpha chain variable domain of TCR clone 286444 (TRAV12-2, TRAJ5)
CAVHGHGQESTYF

SEQ ID NO: 572888 - protein, 13 aa, Homo sapiens
  CDR3 for beta chain variable domain of TCR clone 286444 (TRBV7-2, TRBJ2-5)
CASSRGGLETQYF

SEQ ID NO: 572889 - protein, 15 aa, Homo sapiens
  CDR3 for alpha chain variable domain of TCR clone 286445 (TRAV17, TRAJ29)
CATPHQETHLLSLER

SEQ ID NO: 572890 - protein, 13 aa, Homo sapiens
  CDR3 for beta chain variable domain of TCR clone 286445 (TRBV12-4, TRBJ1-1)
CASSPGTGFEAFF

SEQ ID NO: 572891 - protein, 15 aa, Homo sapiens
  CDR3 for alpha chain variable domain of TCR clone 286446 (TRAV8-3, TRAJ45)
CASSYTGGGADGLTF

SEQ ID NO: 572892 - protein, 13 aa, Homo sapiens
  CDR3 for beta chain variable domain of TCR clone 286446 (TRBV10-3, TRBJ2-7)
CASKIAVNYEQYF

SEQ ID NO: 572893 - protein, 14 aa, Homo sapiens
  CDR3 for alpha chain variable domain of TCR clone 286447 (TRAV12-3, TRAJ10)
SHLPLTGGGNKLTF

SEQ ID NO: 572894 - protein, 15 aa, Homo sapiens
  CDR3 for beta chain variable domain of TCR clone 286447 (TRBV7-8, TRBJ1-5)
CASSLTRDTNQPQHF

SEQ ID NO: 572895 - protein, 14 aa, Homo sapiens
  CDR3 for alpha chain variable domain of TCR clone 286448 (TRAV1-2, TRAJ8)
CAVREDTGFQKLVF

SEQ ID NO: 572896 - protein, 14 aa, Homo sapiens
  CDR3 for beta chain variable domain of TCR clone 286448 (TRBV5-7, TRBJ1-5)
CASSLNRLNQPQHF

SEQ ID NO: 572897 - protein, 12 aa, Homo sapiens
  CDR3 for alpha chain variable domain of TCR clone 286449 (TRAV26-1, TRAJ13)
CIVPRGYQTVTF

SEQ ID NO: 572898 - protein, 14 aa, Homo sapiens
  CDR3 for beta chain variable domain of TCR clone 286449 (TRBV7-2, TRBJ2-7)
CASSPKTSFYEQYF

SEQ ID NO: 572899 - protein, 16 aa, Homo sapiens
  CDR3 for alpha chain variable domain of TCR clone 286450 (TRAV30, TRAJ24)
CGTEIVDADSWGEFQF

SEQ ID NO: 572900 - protein, 14 aa, Homo sapiens
  CDR3 for beta chain variable domain of TCR clone 286450 (TRBV12-5, TRBJ2-5)
CASGSRTHQEAQYF

SEQ ID NO: 572901 - protein, 14 aa, Homo sapiens
  CDR3 for alpha chain variable domain of TCR clone 286451 (TRAV12-2, TRAJ24)
CAVTPADSWGKLQF

SEQ ID NO: 572902 - protein, 15 aa, Homo sapiens
  CDR3 for beta chain variable domain of TCR clone 286451 (TRBV19, TRBJ2-5)
CASHGLAGAQETQYF

SEQ ID NO: 572903 - protein, 14 aa, Homo sapiens
  CDR3 for alpha chain variable domain of TCR clone 286452 (TRAV1-2, TRAJ26)
CCERPDNYGQNFIF

SEQ ID NO: 572904 - protein, 14 aa, Homo sapiens
  CDR3 for beta chain variable domain of TCR clone 286452 (TRBV27, TRBJ2-1)
CASSATGGYNEQFF

SEQ ID NO: 572905 - protein, 14 aa, Homo sapiens
  CDR3 for alpha chain variable domain of TCR clone 286453 (TRAV29/DV5, TRAJ32)
CAAAYGGATNDLIF

SEQ ID NO: 572906 - protein, 16 aa, Homo sapiens
  CDR3 for beta chain variable domain of TCR clone 286453 (TRBV4-2, TRBJ2-3)
CASSQELAGDTDTQYF

SEQ ID NO: 572907 - protein, 14 aa, Homo sapiens
  CDR3 for alpha chain variable domain of TCR clone 286454 (TRAV8-4, TRAJ17)
CAVIDQAAGNKLTF

SEQ ID NO: 572908 - protein, 15 aa, Homo sapiens
  CDR3 for beta chain variable domain of TCR clone 286454 (TRBV7-2, TRBJ1-2)
CASSLAPDRGLGYTF

SEQ ID NO: 572909 - protein, 18 aa, Homo sapiens
  CDR3 for alpha chain variable domain of TCR clone 286455 (TRAV26-2, TRAJ45)
CILRLWGYSGGGVDGLTF

SEQ ID NO: 572910 - protein, 17 aa, Homo sapiens
  CDR3 for beta chain variable domain of TCR clone 286455 (TRBV28, TRBJ2-3)
CASSPTPAGGRVDTQYF

SEQ ID NO: 572911 - protein, 11 aa, Homo sapiens
  CDR3 for alpha chain variable domain of TCR clone 286456 (TRAV13-2, TRAJ36)
CAETGPNNLFF

SEQ ID NO: 572912 - protein, 13 aa, Homo sapiens
  CDR3 for beta chain variable domain of TCR clone 286456 (TRBV7-9, TRBJ2-4)
CATEGLAGNIQYF

SEQ ID NO: 572913 - protein, 19 aa, Homo sapiens
  CDR3 for alpha chain variable domain of TCR clone 286457 (TRAV2, TRAJ20)
ILQVREADAAVYRDCKLSF

SEQ ID NO: 572914 - protein, 18 aa, Homo sapiens
  CDR3 for beta chain variable domain of TCR clone 286457 (TRBV6-6, TRBJ1-3)
CASSYSKWDSISGNTIYF

SEQ ID NO: 572915 - protein, 12 aa, Homo sapiens
  CDR3 for alpha chain variable domain of TCR clone 286458 (TRAV1-1, TRAJ8)
CAGGTGFQKLVV

SEQ ID NO: 572916 - protein, 15 aa, Homo sapiens
  CDR3 for beta chain variable domain of TCR clone 286458 (TRBV7-9, TRBJ1-4)
CAGSRTGGFNEKLFF

SEQ ID NO: 572917 - protein, 15 aa, Homo sapiens
  CDR3 for alpha chain variable domain of TCR clone 286459 (TRAV21, TRAJ24)
CAARSATYSWGKLQF

SEQ ID NO: 572918 - protein, 13 aa, Homo sapiens
  CDR3 for beta chain variable domain of TCR clone 286459 (TRBV11-2, TRBJ2-5)
CASSSTGEETQYF

SEQ ID NO: 572919 - protein, 13 aa, Homo sapiens
  CDR3 for alpha chain variable domain of TCR clone 286460 (TRAV13-2, TRAJ48)
CADMDLGNEKLTF

SEQ ID NO: 572920 - protein, 15 aa, Homo sapiens
  CDR3 for beta chain variable domain of TCR clone 286460 (TRBV7-9, TRBJ1-6)
CASSSPGRGNSPLHF

SEQ ID NO: 572921 - protein, 12 aa, Homo sapiens
  CDR3 for alpha chain variable domain of TCR clone 286461 (TRAV30, TRAJ39)
CGRGNAGNMLTF

SEQ ID NO: 572922 - protein, 16 aa, Homo sapiens
  CDR3 for beta chain variable domain of TCR clone 286461 (TRBV4-2, TRBJ2-2)
CASSHDPSGREGELFF

SEQ ID NO: 572923 - protein, 14 aa, Homo sapiens
  CDR3 for alpha chain variable domain of TCR clone 286462 (TRAV8-4, TRAJ48)
CAVSETFGNEKLTF

SEQ ID NO: 572924 - protein, 15 aa, Homo sapiens
  CDR3 for beta chain variable domain of TCR clone 286462 (TRBV7-8, TRBJ2-5)
CASSGAAGSQETQYF

SEQ ID NO: 572925 - protein, 10 aa, Homo sapiens
  CDR3 for alpha chain variable domain of TCR clone 286463 (TRAV26-1, TRAJ22)
RSGSARQLTF

SEQ ID NO: 572926 - protein, 14 aa, Homo sapiens
  CDR3 for beta chain variable domain of TCR clone 286463 (TRBV7-2, TRBJ2-3)
CASRRGLAADTQYF

SEQ ID NO: 572927 - protein, 12 aa, Homo sapiens
  CDR3 for alpha chain variable domain of TCR clone 286464 (TRAV13-2, TRAJ8)
CAPWLGFQKLVF

SEQ ID NO: 572928 - protein, 18 aa, Homo sapiens
  CDR3 for beta chain variable domain of TCR clone 286464 (TRBV4-1, TRBJ2-3)
CASSQGGASGGATDTQYF

SEQ ID NO: 572929 - protein, 13 aa, Homo sapiens
  CDR3 for alpha chain variable domain of TCR clone 286465 (TRAV8-1, TRAJ28)
CAVSGAGSYQLTF

SEQ ID NO: 572930 - protein, 12 aa, Homo sapiens
  CDR3 for beta chain variable domain of TCR clone 286465 (TRBV19, TRBJ1-5)
CASSIAQQPQHF

SEQ ID NO: 572931 - protein, 13 aa, Homo sapiens
  CDR3 for alpha chain variable domain of TCR clone 286466 (TRAV2, TRAJ24)
TTVPLVRWGKLQF

SEQ ID NO: 572932 - protein, 15 aa, Homo sapiens
  CDR3 for beta chain variable domain of TCR clone 286466 (TRBV5-1, TRBJ1-1)
CASSSTTGTNTEAFF

SEQ ID NO: 572933 - protein, 16 aa, Homo sapiens
  CDR3 for alpha chain variable domain of TCR clone 286467 (TRAV3, TRAJ18)
CAVRDGRGSTLGRIYF

SEQ ID NO: 572934 - protein, 15 aa, Homo sapiens
  CDR3 for beta chain variable domain of TCR clone 286467 (TRBV7-9, TRBJ1-6)
CASSSPGRGNSPLHF

SEQ ID NO: 572935 - protein, 14 aa, Homo sapiens
  CDR3 for alpha chain variable domain of TCR clone 286468 (TRAV12-1, TRAJ26)
CVVKGSNYGQNCVF

SEQ ID NO: 572936 - protein, 17 aa, Homo sapiens
  CDR3 for beta chain variable domain of TCR clone 286468 (TRBV11-2, TRBJ2-6)
CASSQRDIFSGANVLTF

SEQ ID NO: 572937 - protein, 16 aa, Homo sapiens
  CDR3 for alpha chain variable domain of TCR clone 286469 (TRAV30, TRAJ24)
CGTEIVDADGWGKFHF

SEQ ID NO: 572938 - protein, 16 aa, Homo sapiens
  CDR3 for beta chain variable domain of TCR clone 286469 (TRBV4-1, TRBJ2-3)
CASSQSTSGAEDTQYF

SEQ ID NO: 572939 - protein, 14 aa, Homo sapiens
  CDR3 for alpha chain variable domain of TCR clone 286470 (TRAV12-2, TRAJ24)
CAVTQADSWGKLQF

SEQ ID NO: 572940 - protein, 13 aa, Homo sapiens
  CDR3 for beta chain variable domain of TCR clone 286470 (TRBV6-4, TRBJ1-5)
CASSADLNQPQHF

SEQ ID NO: 572941 - protein, 13 aa, Homo sapiens
  CDR3 for alpha chain variable domain of TCR clone 286471 (TRAV21, TRAJ16)
CAVRFSDGQKLLF

SEQ ID NO: 572942 - protein, 14 aa, Homo sapiens
  CDR3 for beta chain variable domain of TCR clone 286471 (TRBV5-4, TRBJ2-2)
CASRLDGGTGELFF

SEQ ID NO: 572943 - protein, 15 aa, Homo sapiens
  CDR3 for alpha chain variable domain of TCR clone 286472 (TRAV12-1, TRAJ44)
CVVDTPQGTASKLTF

SEQ ID NO: 572944 - protein, 16 aa, Homo sapiens
  CDR3 for beta chain variable domain of TCR clone 286472 (TRBV24-1, TRBJ2-3)
CATSDPGTGATDTQYF

SEQ ID NO: 572945 - protein, 14 aa, Homo sapiens
  CDR3 for alpha chain variable domain of TCR clone 286473 (TRAV17, TRAJ42)
CATAGGGSPGNLIF

SEQ ID NO: 572946 - protein, 14 aa, Homo sapiens
  CDR3 for beta chain variable domain of TCR clone 286473 (TRBV7-2, TRBJ2-3)
CASRFSRPSDTQYF

SEQ ID NO: 572947 - protein, 14 aa, Homo sapiens
  CDR3 for alpha chain variable domain of TCR clone 286474 (TRAV1-2, TRAJ15)
CAVRYRQAGTALIF

SEQ ID NO: 572948 - protein, 14 aa, Homo sapiens
  CDR3 for beta chain variable domain of TCR clone 286474 (TRBV4-1, TRBJ2-2)
CASSQAVNTGELFF

SEQ ID NO: 572949 - protein, 19 aa, Homo sapiens
  CDR3 for alpha chain variable domain of TCR clone 286475 (TRAV12-1, TRAJ31)
SLLIRDSKLSDSATPRLMF

SEQ ID NO: 572950 - protein, 14 aa, Homo sapiens
  CDR3 for beta chain variable domain of TCR clone 286475 (TRBV2, TRBJ2-7)
CASSLTSGGYEQYF

SEQ ID NO: 572951 - protein, 21 aa, Homo sapiens
  CDR3 for alpha chain variable domain of TCR clone 286476 (TRAV2, TRAJ9)
CAVESTGGFKLSLEQEQDYLL

SEQ ID NO: 572952 - protein, 15 aa, Homo sapiens
  CDR3 for beta chain variable domain of TCR clone 286476 (TRBV10-3, TRBJ2-1)
CAITFGGGTDNEQFF

SEQ ID NO: 572953 - protein, 11 aa, Homo sapiens
  CDR3 for alpha chain variable domain of TCR clone 286477 (TRAV12-2, TRAJ49)
CALQGGNQFYF

SEQ ID NO: 572954 - protein, 13 aa, Homo sapiens
  CDR3 for beta chain variable domain of TCR clone 286477 (TRBV4-1, TRBJ1-1)
CASSQLGTGEAFC

SEQ ID NO: 572955 - protein, 14 aa, Homo sapiens
  CDR3 for alpha chain variable domain of TCR clone 286478 (TRAV38-1, TRAJ45)
WSYYSGGGADGLTF

SEQ ID NO: 572956 - protein, 15 aa, Homo sapiens
  CDR3 for beta chain variable domain of TCR clone 286478 (TRBV11-2, TRBJ2-1)
CASSKNRGLIYEQFF

SEQ ID NO: 572957 - protein, 12 aa, Homo sapiens
  CDR3 for alpha chain variable domain of TCR clone 286479 (TRAV25, TRAJ11)
CVGYSGYSTLTF

SEQ ID NO: 572958 - protein, 13 aa, Homo sapiens
  CDR3 for beta chain variable domain of TCR clone 286479 (TRBV7-9, TRBJ1-2)
CASSLKQNYGYTF

SEQ ID NO: 572959 - protein, 20 aa, Homo sapiens
  CDR3 for alpha chain variable domain of TCR clone 286480 (TRAV14/DV4, TRAJ22)
CAMREGTFSISSGSARQLTF

SEQ ID NO: 572960 - protein, 13 aa, Homo sapiens
  CDR3 for beta chain variable domain of TCR clone 286480 (TRBV4-2, TRBJ2-3)
CASSQDWQHTQYF

SEQ ID NO: 572961 - protein, 17 aa, Homo sapiens
  CDR3 for alpha chain variable domain of TCR clone 286481 (TRAV3, TRAJ12)
CAVRDGGRMDSSYKLIF

SEQ ID NO: 572962 - protein, 16 aa, Homo sapiens
  CDR3 for beta chain variable domain of TCR clone 286481 (TRBV19, TRBJ2-2)
CASRSPGTGATGELFF

SEQ ID NO: 572963 - protein, 14 aa, Homo sapiens
  CDR3 for alpha chain variable domain of TCR clone 286482 (TRAV12-1, TRAJ12)
CVVTRMDSSYKLIF

SEQ ID NO: 572964 - protein, 13 aa, Homo sapiens
  CDR3 for beta chain variable domain of TCR clone 286482 (TRBV20-1, TRBJ1-1)
CSARGGGNNEAVF

SEQ ID NO: 572965 - protein, 13 aa, Homo sapiens
  CDR3 for alpha chain variable domain of TCR clone 286483 (TRAV2, TRAJ40)
CAVVTAGTYKYIF

SEQ ID NO: 572966 - protein, 16 aa, Homo sapiens
  CDR3 for beta chain variable domain of TCR clone 286483 (TRBV7-3, TRBJ2-1)
CASSLEGYRSYNEQFF

SEQ ID NO: 572967 - protein, 15 aa, Homo sapiens
  CDR3 for alpha chain variable domain of TCR clone 286484 (TRAV8-3, TRAJ45)
CASSYSGGGADGLTF

SEQ ID NO: 572968 - protein, 15 aa, Homo sapiens
  CDR3 for beta chain variable domain of TCR clone 286484 (TRBV7-9, TRBJ2-5)
CASSFKAGREETQYF

SEQ ID NO: 572969 - protein, 14 aa, Homo sapiens
  CDR3 for alpha chain variable domain of TCR clone 286485 (TRAV13-2, TRAJ4)
CAEKGPKGYNKLIF

SEQ ID NO: 572970 - protein, 13 aa, Homo sapiens
  CDR3 for beta chain variable domain of TCR clone 286485 (TRBV18, TRBJ2-5)
CASSPPGKETKYF

SEQ ID NO: 572971 - protein, 14 aa, Homo sapiens
  CDR3 for alpha chain variable domain of TCR clone 286486 (TRAV23/DV6, TRAJ6)
CEASRSGGSYIPTF

SEQ ID NO: 572972 - protein, 17 aa, Homo sapiens
  CDR3 for beta chain variable domain of TCR clone 286486 (TRBV20-1, TRBJ2-1)
CSASAAGLAGSYNEQFF

SEQ ID NO: 572973 - protein, 14 aa, Homo sapiens
  CDR3 for alpha chain variable domain of TCR clone 286487 (TRAV1-2, TRAJ16)
CAVNRFSGGQKLLF

SEQ ID NO: 572974 - protein, 14 aa, Homo sapiens
  CDR3 for beta chain variable domain of TCR clone 286487 (TRBV20-1, TRBJ1-5)
CSAPGTGVGQPQHF

SEQ ID NO: 572975 - protein, 14 aa, Homo sapiens
  CDR3 for alpha chain variable domain of TCR clone 286488 (TRAV1-2, TRAJ6)
CAVSLSGGSYKPTF

SEQ ID NO: 572976 - protein, 15 aa, Homo sapiens
  CDR3 for beta chain variable domain of TCR clone 286488 (TRBV28, TRBJ2-7)
CASSPGGRGFYEQYF

SEQ ID NO: 572977 - protein, 12 aa, Homo sapiens
  CDR3 for alpha chain variable domain of TCR clone 286489 (TRAV13-1, TRAJ34)
CAASKGTDKLIF

SEQ ID NO: 572978 - protein, 15 aa, Homo sapiens
  CDR3 for beta chain variable domain of TCR clone 286489 (TRBV7-2, TRBJ2-3)
CASSLEQGGTDTQYF

SEQ ID NO: 572979 - protein, 11 aa, Homo sapiens
  CDR3 for alpha chain variable domain of TCR clone 286490 (TRAV17, TRAJ9)
LGFTGGFKTIF

SEQ ID NO: 572980 - protein, 14 aa, Homo sapiens
  CDR3 for beta chain variable domain of TCR clone 286490 (TRBV7-9, TRBJ2-2)
CASSLVQDTGELFF

SEQ ID NO: 572981 - protein, 12 aa, Homo sapiens
  CDR3 for alpha chain variable domain of TCR clone 286491 (TRAV17, TRAJ49)
CATVTTGNQFYF

SEQ ID NO: 572982 - protein, 20 aa, Homo sapiens
  CDR3 for beta chain variable domain of TCR clone 286491 (TRBV7-8, TRBJ2-2)
CASSHLFPGPTIHITGELFF

SEQ ID NO: 572983 - protein, 10 aa, Homo sapiens
  CDR3 for alpha chain variable domain of TCR clone 286492 (TRAV23/DV6, TRAJ57)
CAASSTLSQA

SEQ ID NO: 572984 - protein, 13 aa, Homo sapiens
  CDR3 for beta chain variable domain of TCR clone 286492 (TRBV7-9, TRBJ1-2)
CASSLKQNYGYTF

SEQ ID NO: 572985 - protein, 13 aa, Homo sapiens
  CDR3 for alpha chain variable domain of TCR clone 286493 (TRAV2, TRAJ40)
CTVVTAGTYKYIF

SEQ ID NO: 572986 - protein, 14 aa, Homo sapiens
  CDR3 for beta chain variable domain of TCR clone 286493 (TRBV19, TRBJ2-1)
CASPTFVLSGEQFF

SEQ ID NO: 572987 - protein, 12 aa, Homo sapiens
  CDR3 for alpha chain variable domain of TCR clone 286494 (TRAV3, TRAJ26)
CAVSDYGQNFVF

SEQ ID NO: 572988 - protein, 13 aa, Homo sapiens
  CDR3 for beta chain variable domain of TCR clone 286494 (TRBV19, TRBJ1-2)
CASSVPGQDGYTF

SEQ ID NO: 572989 - protein, 15 aa, Homo sapiens
  CDR3 for alpha chain variable domain of TCR clone 286495 (TRAV13-1, TRAJ56)
CAAISTTGANSKLTF

SEQ ID NO: 572990 - protein, 14 aa, Homo sapiens
  CDR3 for beta chain variable domain of TCR clone 286495 (TRBV6-1, TRBJ1-3)
CASVQGGGGNTIYF

SEQ ID NO: 572991 - protein, 14 aa, Homo sapiens
  CDR3 for alpha chain variable domain of TCR clone 286496 (TRAV12-2, TRAJ9)
CAVNLNTGGFTTIF

SEQ ID NO: 572992 - protein, 17 aa, Homo sapiens
  CDR3 for beta chain variable domain of TCR clone 286496 (TRBV20-1, TRBJ2-2)
CSASRQVGQGYTGELFF

SEQ ID NO: 572993 - protein, 13 aa, Homo sapiens
  CDR3 for alpha chain variable domain of TCR clone 286497 (TRAV12-3, TRAJ33)
CAMSLNRNYQLIW

SEQ ID NO: 572994 - protein, 14 aa, Homo sapiens
  CDR3 for beta chain variable domain of TCR clone 286497 (TRBV19, TRBJ2-1)
CASPTFVLNGEQFF

SEQ ID NO: 572995 - protein, 13 aa, Homo sapiens
  CDR3 for alpha chain variable domain of TCR clone 286498 (TRAV17, TRAJ9)
CATDYTGGFKTIF

SEQ ID NO: 572996 - protein, 13 aa, Homo sapiens
  CDR3 for beta chain variable domain of TCR clone 286498 (TRBV12-4, TRBJ1-2)
CASSPGGGEGYTF

SEQ ID NO: 572997 - protein, 15 aa, Homo sapiens
  CDR3 for alpha chain variable domain of TCR clone 286499 (TRAV8-4, TRAJ45)
CAVMWTGGGADGLTF

SEQ ID NO: 572998 - protein, 12 aa, Homo sapiens
  CDR3 for beta chain variable domain of TCR clone 286499 (TRBV29-1, TRBJ2-7)
CSVGPSGDEQYV

SEQ ID NO: 572999 - protein, 15 aa, Homo sapiens
  CDR3 for alpha chain variable domain of TCR clone 286500 (TRAV3, TRAJ20)
CAVRDIKLMDYKLSF

SEQ ID NO: 573000 - protein, 15 aa, Homo sapiens
  CDR3 for beta chain variable domain of TCR clone 286500 (TRBV7-9, TRBJ1-6)
CASSSPGRGNSPLHF

SEQ ID NO: 573001 - protein, 15 aa, Homo sapiens
  CDR3 for alpha chain variable domain of TCR clone 286501 (TRAV3, TRAJ7)
CAVRDKDNGNNILAF

SEQ ID NO: 573002 - protein, 19 aa, Homo sapiens
  CDR3 for beta chain variable domain of TCR clone 286501 (TRBV5-8, TRBJ2-3)
CASSFLGTSGSHRTDTQYF

SEQ ID NO: 573003 - protein, 12 aa, Homo sapiens
  CDR3 for alpha chain variable domain of TCR clone 286502 (TRAV12-3, TRAJ17)
CAMTLTGSKLTF

SEQ ID NO: 573004 - protein, 15 aa, Homo sapiens
  CDR3 for beta chain variable domain of TCR clone 286502 (TRBV20-1, TRBJ2-7)
CSASDRVSGMDEQYF

SEQ ID NO: 573005 - protein, 16 aa, Homo sapiens
  CDR3 for alpha chain variable domain of TCR clone 286503 (TRAV4, TRAJ22)
CLVGDIYSGSARQLTF

SEQ ID NO: 573006 - protein, 14 aa, Homo sapiens
  CDR3 for beta chain variable domain of TCR clone 286503 (TRBV28, TRBJ2-3)
CASSWRGRADTQYF

SEQ ID NO: 573007 - protein, 14 aa, Homo sapiens
  CDR3 for alpha chain variable domain of TCR clone 286504 (TRAV27, TRAJ18)
CAGYRGSTLGRLCF

SEQ ID NO: 573008 - protein, 16 aa, Homo sapiens
  CDR3 for beta chain variable domain of TCR clone 286504 (TRBV4-2, TRBJ2-3)
CASSQELAGDTDTQYF

SEQ ID NO: 573009 - protein, 11 aa, Homo sapiens
  CDR3 for alpha chain variable domain of TCR clone 286505 (TRAV1-2, TRAJ20)
CALGDDYKLSF

SEQ ID NO: 573010 - protein, 14 aa, Homo sapiens
  CDR3 for beta chain variable domain of TCR clone 286505 (TRBV5-4, TRBJ1-1)
CASSLDSRRDEAFF

SEQ ID NO: 573011 - protein, 16 aa, Homo sapiens
  CDR3 for alpha chain variable domain of TCR clone 286506 (TRAV3, TRAJ37)
CAVRGKGSGNTGKLIF

SEQ ID NO: 573012 - protein, 13 aa, Homo sapiens
  CDR3 for beta chain variable domain of TCR clone 286506 (TRBV5-1, TRBJ2-1)
CASRPFGYNEQFF

SEQ ID NO: 573013 - protein, 14 aa, Homo sapiens
  CDR3 for alpha chain variable domain of TCR clone 286507 (TRAV13-1, TRAJ45)
CAAIGGGGADGLTF

SEQ ID NO: 573014 - protein, 16 aa, Homo sapiens
  CDR3 for beta chain variable domain of TCR clone 286507 (TRBV7-2, TRBJ1-1)
CASSLGAGCTNTEAFF

SEQ ID NO: 573015 - protein, 15 aa, Homo sapiens
  CDR3 for alpha chain variable domain of TCR clone 286508 (TRAV12-1, TRAJ44)
CVADLPTGTASKLTF

SEQ ID NO: 573016 - protein, 16 aa, Homo sapiens
  CDR3 for beta chain variable domain of TCR clone 286508 (TRBV12-4, TRBJ2-5)
CASSFFVRGRQETQYF

SEQ ID NO: 573017 - protein, 17 aa, Homo sapiens
  CDR3 for alpha chain variable domain of TCR clone 286509 (TRAV36/DV7, TRAJ44)
CAVEQIPALPVNSPLGL

SEQ ID NO: 573018 - protein, 17 aa, Homo sapiens
  CDR3 for beta chain variable domain of TCR clone 286509 (TRBV20-1, TRBJ2-2)
CSASGSGQGGLTGELFF

SEQ ID NO: 573019 - protein, 12 aa, Homo sapiens
  CDR3 for alpha chain variable domain of TCR clone 286510 (TRAV17, TRAJ36)
CATLTGANNLFF

SEQ ID NO: 573020 - protein, 15 aa, Homo sapiens
  CDR3 for beta chain variable domain of TCR clone 286510 (TRBV19, TRBJ1-2)
CTSSTKTDTNYGYTF

SEQ ID NO: 573021 - protein, 14 aa, Homo sapiens
  CDR3 for alpha chain variable domain of TCR clone 286511 (TRAV1-2, TRAJ10)
CAVRVTGGGNKLTF

SEQ ID NO: 573022 - protein, 15 aa, Homo sapiens
  CDR3 for beta chain variable domain of TCR clone 286511 (TRBV18, TRBJ1-5)
CASSETGGNNQPQHF

SEQ ID NO: 573023 - protein, 17 aa, Homo sapiens
  CDR3 for alpha chain variable domain of TCR clone 286512 (TRAV13-1, TRAJ52)
CAAGRNAGGTSYGKLAF

SEQ ID NO: 573024 - protein, 13 aa, Homo sapiens
  CDR3 for beta chain variable domain of TCR clone 286512 (TRBV7-2, TRBJ1-1)
CGSNLKGAKVDFF

SEQ ID NO: 573025 - protein, 13 aa, Homo sapiens
  CDR3 for alpha chain variable domain of TCR clone 286513 (TRAV3, TRAJ27)
CAARPLGAGKSTF

SEQ ID NO: 573026 - protein, 14 aa, Homo sapiens
  CDR3 for beta chain variable domain of TCR clone 286513 (TRBV25-1, TRBJ1-1)
CASTHLGGNTEAFF

SEQ ID NO: 573027 - protein, 14 aa, Homo sapiens
  CDR3 for alpha chain variable domain of TCR clone 286514 (TRAV12-1, TRAJ17)
CVVNYKAAGNKLTF

SEQ ID NO: 573028 - protein, 15 aa, Homo sapiens
  CDR3 for beta chain variable domain of TCR clone 286514 (TRBV5-1, TRBJ2-1)
CASSLVGTVKNEQFF

SEQ ID NO: 573029 - protein, 14 aa, Homo sapiens
  CDR3 for alpha chain variable domain of TCR clone 286515 (TRAV2, TRAJ9)
CAVEDRSGGLKTIF

SEQ ID NO: 573030 - protein, 12 aa, Homo sapiens
  CDR3 for beta chain variable domain of TCR clone 286515 (TRBV12-4, TRBJ2-4)
CASSSSGNIQYF

SEQ ID NO: 573031 - protein, 12 aa, Homo sapiens
  CDR3 for alpha chain variable domain of TCR clone 286516 (TRAV21, TRAJ58)
CAAETSGLRLTF

SEQ ID NO: 573032 - protein, 15 aa, Homo sapiens
  CDR3 for beta chain variable domain of TCR clone 286516 (TRBV20-1, TRBJ2-7)
CSARDPVKGEGEQYF

SEQ ID NO: 573033 - protein, 13 aa, Homo sapiens
  CDR3 for alpha chain variable domain of TCR clone 286517 (TRAV1-1, TRAJ9)
CAAKNTGGFKTIF

SEQ ID NO: 573034 - protein, 16 aa, Homo sapiens
  CDR3 for beta chain variable domain of TCR clone 286517 (TRBV12-5, TRBJ2-5)
CASCPRTSGNQETQYF

SEQ ID NO: 573035 - protein, 17 aa, Homo sapiens
  CDR3 for alpha chain variable domain of TCR clone 286518 (TRAV3, TRAJ6)
CAVRDGPSAGGSYIPTF

SEQ ID NO: 573036 - protein, 14 aa, Homo sapiens
  CDR3 for beta chain variable domain of TCR clone 286518 (TRBV7-2, TRBJ2-7)
CASSPKTSFYEQYF

SEQ ID NO: 573037 - protein, 15 aa, Homo sapiens
  CDR3 for alpha chain variable domain of TCR clone 286519 (TRAV12-3, TRAJ6)
CAMSATTGGSYIPTF

SEQ ID NO: 573038 - protein, 15 aa, Homo sapiens
  CDR3 for beta chain variable domain of TCR clone 286519 (TRBV19, TRBJ1-5)
CASSIVWADNQPQHF

SEQ ID NO: 573039 - protein, 12 aa, Homo sapiens
  CDR3 for alpha chain variable domain of TCR clone 286520 (TRAV2, TRAJ34)
CAVERNTDKLIF

SEQ ID NO: 573040 - protein, 15 aa, Homo sapiens
  CDR3 for beta chain variable domain of TCR clone 286520 (TRBV7-2, TRBJ2-5)
CASSFLRGGEETQCF

SEQ ID NO: 573041 - protein, 19 aa, Homo sapiens
  CDR3 for alpha chain variable domain of TCR clone 286521 (TRAV29/DV5, TRAJ49)
CSVLLCSKLTVDTGNQFYF

SEQ ID NO: 573042 - protein, 17 aa, Homo sapiens
  CDR3 for beta chain variable domain of TCR clone 286521 (TRBV13, TRBJ2-3)
CASSLSRVAGGRNTHYF

SEQ ID NO: 573043 - protein, 13 aa, Homo sapiens
  CDR3 for alpha chain variable domain of TCR clone 286522 (TRAV8-6, TRAJ8)
CAVSNTGFQKLEF

SEQ ID NO: 573044 - protein, 15 aa, Homo sapiens
  CDR3 for beta chain variable domain of TCR clone 286522 (TRBV28, TRBJ2-5)
CASSSGRTIQETQYF

SEQ ID NO: 573045 - protein, 14 aa, Homo sapiens
  CDR3 for alpha chain variable domain of TCR clone 286523 (TRAV9-2, TRAJ57)
CALSPNSGSEKLVF

SEQ ID NO: 573046 - protein, 20 aa, Homo sapiens
  CDR3 for beta chain variable domain of TCR clone 286523 (TRBV28, TRBJ2-1)
CASTPIGRSPGLAGGNEQFF

SEQ ID NO: 573047 - protein, 12 aa, Homo sapiens
  CDR3 for alpha chain variable domain of TCR clone 286524 (TRAV12-3, TRAJ29)
CAAREGNTPLVF

SEQ ID NO: 573048 - protein, 14 aa, Homo sapiens
  CDR3 for beta chain variable domain of TCR clone 286524 (TRBV4-1, TRBJ2-2)
CASSQAVNTGELFF

SEQ ID NO: 573049 - protein, 14 aa, Homo sapiens
  CDR3 for alpha chain variable domain of TCR clone 286525 (TRAV36/DV7, TRAJ44)
CRGANTGTASKLTF

SEQ ID NO: 573050 - protein, 15 aa, Homo sapiens
  CDR3 for beta chain variable domain of TCR clone 286525 (TRBV20-1, TRBJ2-6)
CSAYGQVSGANVLTF

SEQ ID NO: 573051 - protein, 14 aa, Homo sapiens
  CDR3 for alpha chain variable domain of TCR clone 286526 (TRAV38-1, TRAJ45)
CASHSGGGADGLTF

SEQ ID NO: 573052 - protein, 13 aa, Homo sapiens
  CDR3 for beta chain variable domain of TCR clone 286526 (TRBV10-3, TRBJ1-2)
CGISERDSYGYTF

SEQ ID NO: 573053 - protein, 12 aa, Homo sapiens
  CDR3 for alpha chain variable domain of TCR clone 286527 (TRAV16, TRAJ17)
CAPSAAGNKLTF

SEQ ID NO: 573054 - protein, 15 aa, Homo sapiens
  CDR3 for beta chain variable domain of TCR clone 286527 (TRBV15, TRBJ2-3)
CATSRDPRGTDTQYF

SEQ ID NO: 573055 - protein, 12 aa, Homo sapiens
  CDR3 for alpha chain variable domain of TCR clone 286528 (TRAV13-1, TRAJ43)
SVQQYNNNDMRF

SEQ ID NO: 573056 - protein, 15 aa, Homo sapiens
  CDR3 for beta chain variable domain of TCR clone 286528 (TRBV12-4, TRBJ2-5)
CASSPGSSRQGTQFF

SEQ ID NO: 573057 - protein, 14 aa, Homo sapiens
  CDR3 for alpha chain variable domain of TCR clone 286529 (TRAV26-1, TRAJ45)
CIEVTGGGADGLTF

SEQ ID NO: 573058 - protein, 15 aa, Homo sapiens
  CDR3 for beta chain variable domain of TCR clone 286529 (TRBV4-3, TRBJ2-7)
CASSQGDWGDYEQYF

SEQ ID NO: 573059 - protein, 13 aa, Homo sapiens
  CDR3 for alpha chain variable domain of TCR clone 286530 (TRAV8-2, TRAJ15)
CVVRNQAGTALIF

SEQ ID NO: 573060 - protein, 14 aa, Homo sapiens
  CDR3 for beta chain variable domain of TCR clone 286530 (TRBV19, TRBJ2-1)
CASPTFVLSGEQFF

SEQ ID NO: 573061 - protein, 19 aa, Homo sapiens
  CDR3 for alpha chain variable domain of TCR clone 286531 (TRAV26-1, TRAJ52)
CFVRAHRNAGGTSYGKLTF

SEQ ID NO: 573062 - protein, 15 aa, Homo sapiens
  CDR3 for beta chain variable domain of TCR clone 286531 (TRBV29-1, TRBJ2-1)
CSGRDRKSAYNEQFF

SEQ ID NO: 573063 - protein, 16 aa, Homo sapiens
  CDR3 for alpha chain variable domain of TCR clone 286532 (TRAV12-2, TRAJ6)
CAAPLAGSGGSYIPTF

SEQ ID NO: 573064 - protein, 13 aa, Homo sapiens
  CDR3 for beta chain variable domain of TCR clone 286532 (TRBV6-9, TRBJ2-5)
CASKGDGRRTQYV

SEQ ID NO: 573065 - protein, 17 aa, Homo sapiens
  CDR3 for alpha chain variable domain of TCR clone 286533 (TRAV38-1, TRAJ28)
CAFLKPTSGAGSSQLTF

SEQ ID NO: 573066 - protein, 15 aa, Homo sapiens
  CDR3 for beta chain variable domain of TCR clone 286533 (TRBV5-1, TRBJ2-4)
CASSLGGGGSYIQYF

SEQ ID NO: 573067 - protein, 12 aa, Homo sapiens
  CDR3 for alpha chain variable domain of TCR clone 286534 (TRAV30, TRAJ39)
CGRGNAGNMLTF

SEQ ID NO: 573068 - protein, 12 aa, Homo sapiens
  CDR3 for beta chain variable domain of TCR clone 286534 (TRBV11-2, TRBJ2-1)
CASSPGNNEQFF

SEQ ID NO: 573069 - protein, 13 aa, Homo sapiens
  CDR3 for alpha chain variable domain of TCR clone 286535 (TRAV2, TRAJ40)
CAVVTSGTYKYIF

SEQ ID NO: 573070 - protein, 14 aa, Homo sapiens
  CDR3 for beta chain variable domain of TCR clone 286535 (TRBV11-3, TRBJ1-6)
FASSFSGGDSPLHF

SEQ ID NO: 573071 - protein, 18 aa, Homo sapiens
  CDR3 for alpha chain variable domain of TCR clone 286536 (TRAV21, TRAJ52)
CAVGPSPAGGTSYGKLTF

SEQ ID NO: 573072 - protein, 15 aa, Homo sapiens
  CDR3 for beta chain variable domain of TCR clone 286536 (TRBV27, TRBJ2-7)
CASSLVGGGAHEQYF

SEQ ID NO: 573073 - protein, 14 aa, Homo sapiens
  CDR3 for alpha chain variable domain of TCR clone 286537 (TRAV29/DV5, TRAJ36)
CAARRKTGANNLFF

SEQ ID NO: 573074 - protein, 12 aa, Homo sapiens
  CDR3 for beta chain variable domain of TCR clone 286537 (TRBV12-4, TRBJ2-7)
CASSVGGYEQYF

SEQ ID NO: 573075 - protein, 12 aa, Homo sapiens
  CDR3 for alpha chain variable domain of TCR clone 286538 (TRAV8-3, TRAJ26)
CAGDNYGQNFVF

SEQ ID NO: 573076 - protein, 17 aa, Homo sapiens
  CDR3 for beta chain variable domain of TCR clone 286538 (TRBV24-1, TRBJ1-2)
CATSDPRQGVLSGGYTF

SEQ ID NO: 573077 - protein, 11 aa, Homo sapiens
  CDR3 for alpha chain variable domain of TCR clone 286539 (TRAV16, TRAJ31)
CALFNNARLMF

SEQ ID NO: 573078 - protein, 20 aa, Homo sapiens
  CDR3 for beta chain variable domain of TCR clone 286539 (TRBV28, TRBJ2-1)
CASTPIGRSPGLAGGNAQFF

SEQ ID NO: 573079 - protein, 15 aa, Homo sapiens
  CDR3 for alpha chain variable domain of TCR clone 286540 (TRAV13-1, TRAJ57)
CAASNTQGGSEKLVF

SEQ ID NO: 573080 - protein, 16 aa, Homo sapiens
  CDR3 for beta chain variable domain of TCR clone 286540 (TRBV19, TRBJ2-1)
CASSKAGPSAYKEQFF

SEQ ID NO: 573081 - protein, 15 aa, Homo sapiens
  CDR3 for alpha chain variable domain of TCR clone 286541 (TRAV21, TRAJ24)
CAARSSTGSWGKLQF

SEQ ID NO: 573082 - protein, 12 aa, Homo sapiens
  CDR3 for beta chain variable domain of TCR clone 286541 (TRBV11-2, TRBJ2-5)
CSSSTGEETQYF

SEQ ID NO: 573083 - protein, 14 aa, Homo sapiens
  CDR3 for alpha chain variable domain of TCR clone 286542 (TRAV21, TRAJ23)
CAIMIYNQGGKLIF

SEQ ID NO: 573084 - protein, 18 aa, Homo sapiens
  CDR3 for beta chain variable domain of TCR clone 286542 (TRBV20-1, TRBJ2-6)
CSAETTPTHGSGDNVLTF

SEQ ID NO: 573085 - protein, 16 aa, Homo sapiens
  CDR3 for alpha chain variable domain of TCR clone 286543 (TRAV3, TRAJ37)
CAVRGKGSGNIGKLIF

SEQ ID NO: 573086 - protein, 12 aa, Homo sapiens
  CDR3 for beta chain variable domain of TCR clone 286543 (TRBV11-2, TRBJ2-2)
CASSLGGGELFF

SEQ ID NO: 573087 - protein, 12 aa, Homo sapiens
  CDR3 for alpha chain variable domain of TCR clone 286544 (TRAV12-1, TRAJ40)
CVVYSGTYKYTF

SEQ ID NO: 573088 - protein, 14 aa, Homo sapiens
  CDR3 for beta chain variable domain of TCR clone 286544 (TRBV7-6, TRBJ2-1)
CASSLGGGADEQFF

SEQ ID NO: 573089 - protein, 14 aa, Homo sapiens
  CDR3 for alpha chain variable domain of TCR clone 286545 (TRAV26-1, TRAJ22)
CIVRVYGSARQLNF

SEQ ID NO: 573090 - protein, 17 aa, Homo sapiens
  CDR3 for beta chain variable domain of TCR clone 286545 (TRBV7-3, TRBJ2-3)
CASSPGGLAGFGDTQYF

SEQ ID NO: 573091 - protein, 19 aa, Homo sapiens
  CDR3 for alpha chain variable domain of TCR clone 286546 (TRAV3, TRAJ6)
CAVRDRNPSRSGGSYIPTF

SEQ ID NO: 573092 - protein, 14 aa, Homo sapiens
  CDR3 for beta chain variable domain of TCR clone 286546 (TRBV20-1, TRBJ2-7)
CSAKRGRSSYEQYF

SEQ ID NO: 573093 - protein, 16 aa, Homo sapiens
  CDR3 for alpha chain variable domain of TCR clone 286547 (TRAV3, TRAJ37)
CAVRGKGSGNTGKLIC

SEQ ID NO: 573094 - protein, 14 aa, Homo sapiens
  CDR3 for beta chain variable domain of TCR clone 286547 (TRBV6-1, TRBJ1-3)
CASVQGGGGNTIYF

SEQ ID NO: 573095 - protein, 12 aa, Homo sapiens
  CDR3 for alpha chain variable domain of TCR clone 286548 (TRAV12-3, TRAJ13)
CAMTSGLPESYL

SEQ ID NO: 573096 - protein, 13 aa, Homo sapiens
  CDR3 for beta chain variable domain of TCR clone 286548 (TRBV20-1, TRBJ2-2)
CSALSGGAGELFF

SEQ ID NO: 573097 - protein, 11 aa, Homo sapiens
  CDR3 for alpha chain variable domain of TCR clone 286549 (TRAV13-1, TRAJ39)
CASHAGNMLTF

SEQ ID NO: 573098 - protein, 15 aa, Homo sapiens
  CDR3 for beta chain variable domain of TCR clone 286549 (TRBV20-1, TRBJ2-7)
CSARDRVSGMDEQYC

SEQ ID NO: 573099 - protein, 14 aa, Homo sapiens
  CDR3 for alpha chain variable domain of TCR clone 286550 (TRAV21, TRAJ4)
CAAPGVGGYNKLIF

SEQ ID NO: 573100 - protein, 14 aa, Homo sapiens
  CDR3 for beta chain variable domain of TCR clone 286550 (TRBV13, TRBJ2-5)
CASYRRLAEETQYF

SEQ ID NO: 573101 - protein, 15 aa, Homo sapiens
  CDR3 for alpha chain variable domain of TCR clone 286551 (TRAV2, TRAJ15)
CAVEDRNQAGTALIF

SEQ ID NO: 573102 - protein, 14 aa, Homo sapiens
  CDR3 for beta chain variable domain of TCR clone 286551 (TRBV25-1, TRBJ1-1)
CASTHLGGNTEAFF

SEQ ID NO: 573103 - protein, 14 aa, Homo sapiens
  CDR3 for alpha chain variable domain of TCR clone 286552 (TRAV8-1, TRAJ24)
CAVNAADSWGKLQF

SEQ ID NO: 573104 - protein, 15 aa, Homo sapiens
  CDR3 for beta chain variable domain of TCR clone 286552 (TRBV7-2, TRBJ2-5)
CASSFLRGGEETQYF

SEQ ID NO: 573105 - protein, 15 aa, Homo sapiens
  CDR3 for alpha chain variable domain of TCR clone 286553 (TRAV12-2, TRAJ42)
CAVNNHGGSQGNLIF

SEQ ID NO: 573106 - protein, 13 aa, Homo sapiens
  CDR3 for beta chain variable domain of TCR clone 286553 (TRBV27, TRBJ1-1)
CASSVSANTEAFF

SEQ ID NO: 573107 - protein, 16 aa, Homo sapiens
  CDR3 for alpha chain variable domain of TCR clone 286554 (TRAV12-3, TRAJ53)
CAMSPGCGGSNYKLTF

SEQ ID NO: 573108 - protein, 15 aa, Homo sapiens
  CDR3 for beta chain variable domain of TCR clone 286554 (TRBV7-9, TRBJ1-5)
CASSQGHQPNQPQHF

SEQ ID NO: 573109 - protein, 12 aa, Homo sapiens
  CDR3 for alpha chain variable domain of TCR clone 286555 (TRAV12-1, TRAJ34)
CVVAGATDKLIF

SEQ ID NO: 573110 - protein, 13 aa, Homo sapiens
  CDR3 for beta chain variable domain of TCR clone 286555 (TRBV12-5, TRBJ2-3)
CASGDRQSDTQYF

SEQ ID NO: 573111 - protein, 12 aa, Homo sapiens
  CDR3 for alpha chain variable domain of TCR clone 286556 (TRAV3, TRAJ20)
CAVRGPDYKLSF

SEQ ID NO: 573112 - protein, 14 aa, Homo sapiens
  CDR3 for beta chain variable domain of TCR clone 286556 (TRBV7-2, TRBJ2-7)
CASSPKTGFYEQYF

SEQ ID NO: 573113 - protein, 12 aa, Homo sapiens
  CDR3 for alpha chain variable domain of TCR clone 286557 (TRAV12-3, TRAJ20)
CAMVRGDYKLSF

SEQ ID NO: 573114 - protein, 16 aa, Homo sapiens
  CDR3 for beta chain variable domain of TCR clone 286557 (TRBV12-5, TRBJ2-5)
CASGPRTSGNQETQYF

SEQ ID NO: 573115 - protein, 14 aa, Homo sapiens
  CDR3 for alpha chain variable domain of TCR clone 286558 (TRAV3, TRAJ36)
CAVRDGTGANNLFF

SEQ ID NO: 573116 - protein, 16 aa, Homo sapiens
  CDR3 for beta chain variable domain of TCR clone 286558 (TRBV7-3, TRBJ2-5)
CASIQPGGSVQETLYF

SEQ ID NO: 573117 - protein, 12 aa, Homo sapiens
  CDR3 for alpha chain variable domain of TCR clone 286559 (TRAV20, TRAJ56)
CAVTGANSKLTF

SEQ ID NO: 573118 - protein, 15 aa, Homo sapiens
  CDR3 for beta chain variable domain of TCR clone 286559 (TRBV6-5, TRBJ1-4)
CASSSVGGAGEKLFF

SEQ ID NO: 573119 - protein, 15 aa, Homo sapiens
  CDR3 for alpha chain variable domain of TCR clone 286560 (TRAV12-1, TRAJ44)
CVVFVNTGTASKLTF

SEQ ID NO: 573120 - protein, 16 aa, Homo sapiens
  CDR3 for beta chain variable domain of TCR clone 286560 (TRBV20-1, TRBJ2-5)
CSPGGTSGGDMETQYF

SEQ ID NO: 573121 - protein, 12 aa, Homo sapiens
  CDR3 for alpha chain variable domain of TCR clone 286561 (TRAV21, TRAJ13)
PGPSGGYQKVTF

SEQ ID NO: 573122 - protein, 15 aa, Homo sapiens
  CDR3 for beta chain variable domain of TCR clone 286561 (TRBV7-9, TRBJ1-6)
CASSAPGRGNSPLHF

SEQ ID NO: 573123 - protein, 13 aa, Homo sapiens
  CDR3 for alpha chain variable domain of TCR clone 286562 (TRAV13-2, TRAJ15)
CAERPQAGTALIF

SEQ ID NO: 573124 - protein, 15 aa, Homo sapiens
  CDR3 for beta chain variable domain of TCR clone 286562 (TRBV11-2, TRBJ2-7)
CASRFPGTGSYEQYF

SEQ ID NO: 573125 - protein, 13 aa, Homo sapiens
  CDR3 for alpha chain variable domain of TCR clone 286563 (TRAV12-1, TRAJ40)
CVVPTSGTYKYIF

SEQ ID NO: 573126 - protein, 13 aa, Homo sapiens
  CDR3 for beta chain variable domain of TCR clone 286563 (TRBV4-2, TRBJ1-1)
CASSQAGNTDAFF

SEQ ID NO: 573127 - protein, 13 aa, Homo sapiens
  CDR3 for alpha chain variable domain of TCR clone 286564 (TRAV20, TRAJ34)
CAVSSYNTDKLIF

SEQ ID NO: 573128 - protein, 16 aa, Homo sapiens
  CDR3 for beta chain variable domain of TCR clone 286564 (TRBV7-9, TRBJ1-3)
CASSQTSGLRMGTIYF

SEQ ID NO: 573129 - protein, 16 aa, Homo sapiens
  CDR3 for alpha chain variable domain of TCR clone 286565 (TRAV30, TRAJ24)
CGTELVDADSWGKFQF

SEQ ID NO: 573130 - protein, 12 aa, Homo sapiens
  CDR3 for beta chain variable domain of TCR clone 286565 (TRBV11-2, TRBJ2-2)
CASSLGGGELFF

SEQ ID NO: 573131 - protein, 11 aa, Homo sapiens
  CDR3 for alpha chain variable domain of TCR clone 286566 (TRAV2, TRAJ33)
CAVESNYQLIW

SEQ ID NO: 573132 - protein, 14 aa, Homo sapiens
  CDR3 for beta chain variable domain of TCR clone 286566 (TRBV7-9, TRBJ2-2)
CASSGLADTGELFF

SEQ ID NO: 573133 - protein, 15 aa, Homo sapiens
  CDR3 for alpha chain variable domain of TCR clone 286567 (TRAV26-1, TRAJ29)
CIVRVEGSGNTPLAF

SEQ ID NO: 573134 - protein, 15 aa, Homo sapiens
  CDR3 for beta chain variable domain of TCR clone 286567 (TRBV7-9, TRBJ1-5)
GASSQGHQPNQPQHF

SEQ ID NO: 573135 - protein, 15 aa, Homo sapiens
  CDR3 for alpha chain variable domain of TCR clone 286568 (TRAV2, TRAJ22)
CVVPSRGGSARQLTF

SEQ ID NO: 573136 - protein, 11 aa, Homo sapiens
  CDR3 for beta chain variable domain of TCR clone 286568 (TRBV27, TRBJ2-3)
CASSLGDTQYF

SEQ ID NO: 573137 - protein, 13 aa, Homo sapiens
  CDR3 for alpha chain variable domain of TCR clone 286569 (TRAV13-1, TRAJ39)
CAASIWAANMLTF

SEQ ID NO: 573138 - protein, 15 aa, Homo sapiens
  CDR3 for beta chain variable domain of TCR clone 286569 (TRBV7-9, TRBJ1-1)
CASSLLEQGGTEAFF

SEQ ID NO: 573139 - protein, 22 aa, Homo sapiens
  CDR3 for alpha chain variable domain of TCR clone 286570 (TRAV36/DV7, TRAJ38)
CVANAGNNHIQTPDPAVYQLRD

SEQ ID NO: 573140 - protein, 14 aa, Homo sapiens
  CDR3 for beta chain variable domain of TCR clone 286570 (TRBV7-2, TRBJ2-7)
CASSLRWEVNEQYF

SEQ ID NO: 573141 - protein, 13 aa, Homo sapiens
  CDR3 for alpha chain variable domain of TCR clone 286571 (TRAV13-1, TRAJ5)
CAARVTGRRALTL

SEQ ID NO: 573142 - protein, 15 aa, Homo sapiens
  CDR3 for beta chain variable domain of TCR clone 286571 (TRBV28, TRBJ2-7)
CASSPGGRGFNEQYF

SEQ ID NO: 573143 - protein, 16 aa, Homo sapiens
  CDR3 for alpha chain variable domain of TCR clone 286572 (TRAV21, TRAJ52)
CAVTNAGGISYGKLTF

SEQ ID NO: 573144 - protein, 13 aa, Homo sapiens
  CDR3 for beta chain variable domain of TCR clone 286572 (TRBV20-1, TRBJ2-3)
CSARLAGTDTQYF

SEQ ID NO: 573145 - protein, 15 aa, Homo sapiens
  CDR3 for alpha chain variable domain of TCR clone 286573 (TRAV13-2, TRAJ10)
CAENKIGGGGNKHTF

SEQ ID NO: 573146 - protein, 15 aa, Homo sapiens
  CDR3 for beta chain variable domain of TCR clone 286573 (TRBV5-1, TRBJ1-2)
CASSPGDRGSYGYTF

SEQ ID NO: 573147 - protein, 21 aa, Homo sapiens
  CDR3 for alpha chain variable domain of TCR clone 286574 (TRAV2, TRAJ27)
ILQVREADAAVYSANAGKATF

SEQ ID NO: 573148 - protein, 15 aa, Homo sapiens
  CDR3 for beta chain variable domain of TCR clone 286574 (TRBV7-7, TRBJ1-3)
CASSQGEHSGNTIYF

SEQ ID NO: 573149 - protein, 15 aa, Homo sapiens
  CDR3 for alpha chain variable domain of TCR clone 286575 (TRAV3, TRAJ9)
CAVRARNTGGFKTIF

SEQ ID NO: 573150 - protein, 14 aa, Homo sapiens
  CDR3 for beta chain variable domain of TCR clone 286575 (TRBV2, TRBJ1-5)
CASSGTVSNQPQHF

SEQ ID NO: 573151 - protein, 13 aa, Homo sapiens
  CDR3 for alpha chain variable domain of TCR clone 286576 (TRAV26-1, TRAJ29)
CIVRRSGNTPLVF

SEQ ID NO: 573152 - protein, 15 aa, Homo sapiens
  CDR3 for beta chain variable domain of TCR clone 286576 (TRBV7-9, TRBJ1-5)
CASSQGHQPNQPQHF

SEQ ID NO: 573153 - protein, 11 aa, Homo sapiens
  CDR3 for alpha chain variable domain of TCR clone 286577 (TRAV12-1, TRAJ43)
CVEYDNNDMRF

SEQ ID NO: 573154 - protein, 16 aa, Homo sapiens
  CDR3 for beta chain variable domain of TCR clone 286577 (TRBV5-4, TRBJ2-1)
CASSFVGSGQDNEQFF

SEQ ID NO: 573155 - protein, 15 aa, Homo sapiens
  CDR3 for alpha chain variable domain of TCR clone 286578 (TRAV12-1, TRAJ8)
CVVNVENTGFQKLVF

SEQ ID NO: 573156 - protein, 14 aa, Homo sapiens
  CDR3 for beta chain variable domain of TCR clone 286578 (TRBV7-2, TRBJ1-2)
CASSRGGTNYGYTF

SEQ ID NO: 573157 - protein, 14 aa, Homo sapiens
  CDR3 for alpha chain variable domain of TCR clone 286579 (TRAV13-1, TRAJ9)
CAASALTGGFKTTF

SEQ ID NO: 573158 - protein, 16 aa, Homo sapiens
  CDR3 for beta chain variable domain of TCR clone 286579 (TRBV7-8, TRBJ2-4)
CASSAERTLAKNIQYF

SEQ ID NO: 573159 - protein, 10 aa, Homo sapiens
  CDR3 for alpha chain variable domain of TCR clone 286580 (TRAV2, TRAJ34)
CAVVSDKLIF

SEQ ID NO: 573160 - protein, 15 aa, Homo sapiens
  CDR3 for beta chain variable domain of TCR clone 286580 (TRBV3-1, TRBJ2-2)
CASSQDWTRAGELFF

SEQ ID NO: 573161 - protein, 11 aa, Homo sapiens
  CDR3 for alpha chain variable domain of TCR clone 286581 (TRAV26-1, TRAJ29)
CIVRSHTPLVF

SEQ ID NO: 573162 - protein, 15 aa, Homo sapiens
  CDR3 for beta chain variable domain of TCR clone 286581 (TRBV9, TRBJ1-6)
CASSVAGTGDSPLHF

SEQ ID NO: 573163 - protein, 16 aa, Homo sapiens
  CDR3 for alpha chain variable domain of TCR clone 286582 (TRAV30, TRAJ24)
CGTEIVDADSWGKFQF

SEQ ID NO: 573164 - protein, 15 aa, Homo sapiens
  CDR3 for beta chain variable domain of TCR clone 286582 (TRBV19, TRBJ2-7)
CASSIGGGLVNEQYF

SEQ ID NO: 573165 - protein, 10 aa, Homo sapiens
  CDR3 for alpha chain variable domain of TCR clone 286583 (TRAV12-2, TRAJ43)
FAVKVLSMRF

SEQ ID NO: 573166 - protein, 14 aa, Homo sapiens
  CDR3 for beta chain variable domain of TCR clone 286583 (TRBV11-2, TRBJ2-7)
CASSLGNSLYEQYF

SEQ ID NO: 573167 - protein, 18 aa, Homo sapiens
  CDR3 for alpha chain variable domain of TCR clone 286584 (TRAV8-4, TRAJ52)
CAVTRANAGGNSYGKLTF

SEQ ID NO: 573168 - protein, 16 aa, Homo sapiens
  CDR3 for beta chain variable domain of TCR clone 286584 (TRBV6-4, TRBJ1-2)
CASSEAVGDPNYGYTF

SEQ ID NO: 573169 - protein, 15 aa, Homo sapiens
  CDR3 for alpha chain variable domain of TCR clone 286585 (TRAV3, TRAJ3)
CAVRDGHSSASKIIF

SEQ ID NO: 573170 - protein, 13 aa, Homo sapiens
  CDR3 for beta chain variable domain of TCR clone 286585 (TRBV7-2, TRBJ2-7)
CASSFAFTYEQYF

SEQ ID NO: 573171 - protein, 13 aa, Homo sapiens
  CDR3 for alpha chain variable domain of TCR clone 286586 (TRAV13-1, TRAJ39)
CAASIWAGNMLTF

SEQ ID NO: 573172 - protein, 13 aa, Homo sapiens
  CDR3 for beta chain variable domain of TCR clone 286586 (TRBV11-2, TRBJ1-3)
CASSLEPVNIIYF

SEQ ID NO: 573173 - protein, 14 aa, Homo sapiens
  CDR3 for alpha chain variable domain of TCR clone 286587 (TRAV12-1, TRAJ12)
CVVTRMDSSYKLIF

SEQ ID NO: 573174 - protein, 15 aa, Homo sapiens
  CDR3 for beta chain variable domain of TCR clone 286587 (TRBV7-2, TRBJ2-1)
CAGSSGLAGGNKQFF

SEQ ID NO: 573175 - protein, 23 aa, Homo sapiens
  CDR3 for alpha chain variable domain of TCR clone 286588 (TRAV8-6, TRAJ36)
CAVSDWLGQTASSLGLERDSPLF

SEQ ID NO: 573176 - protein, 12 aa, Homo sapiens
  CDR3 for beta chain variable domain of TCR clone 286588 (TRBV11-2, TRBJ2-2)
CASSLPTGELFF

SEQ ID NO: 573177 - protein, 13 aa, Homo sapiens
  CDR3 for alpha chain variable domain of TCR clone 286589 (TRAV27, TRAJ42)
CAGARGSQGNLIF

SEQ ID NO: 573178 - protein, 14 aa, Homo sapiens
  CDR3 for beta chain variable domain of TCR clone 286589 (TRBV20-1, TRBJ1-1)
CSAQTRIGGTKAFF

SEQ ID NO: 573179 - protein, 14 aa, Homo sapiens
  CDR3 for alpha chain variable domain of TCR clone 286590 (TRAV1-2, TRAJ16)
CAVNRFSDGKKLLF

SEQ ID NO: 573180 - protein, 14 aa, Homo sapiens
  CDR3 for beta chain variable domain of TCR clone 286590 (TRBV2, TRBJ1-5)
CASSENRGGQPQHF

SEQ ID NO: 573181 - protein, 14 aa, Homo sapiens
  CDR3 for alpha chain variable domain of TCR clone 286591 (TRAV1-1, TRAJ35)
FAVRSIGFGNVLHC

SEQ ID NO: 573182 - protein, 14 aa, Homo sapiens
  CDR3 for beta chain variable domain of TCR clone 286591 (TRBV5-7, TRBJ2-7)
CASSGGLSSYEQYF

SEQ ID NO: 573183 - protein, 12 aa, Homo sapiens
  CDR3 for alpha chain variable domain of TCR clone 286592 (TRAV8-6, TRAJ8)
GAVTPGFQKLVV

SEQ ID NO: 573184 - protein, 16 aa, Homo sapiens
  CDR3 for beta chain variable domain of TCR clone 286592 (TRBV7-3, TRBJ2-2)
CASSLKRGTLSGELFF

SEQ ID NO: 573185 - protein, 15 aa, Homo sapiens
  CDR3 for alpha chain variable domain of TCR clone 286593 (TRAV23/DV6, TRAJ33)
CAASNSVGGNYQLIW

SEQ ID NO: 573186 - protein, 15 aa, Homo sapiens
  CDR3 for beta chain variable domain of TCR clone 286593 (TRBV7-8, TRBJ2-3)
CASSPRTGSTDTQYF

SEQ ID NO: 573187 - protein, 13 aa, Homo sapiens
  CDR3 for alpha chain variable domain of TCR clone 286594 (TRAV13-2, TRAJ11)
CAEGDSGYSTLTF

SEQ ID NO: 573188 - protein, 12 aa, Homo sapiens
  CDR3 for beta chain variable domain of TCR clone 286594 (TRBV11-2, TRBJ2-2)
CASSLGGGELFF

SEQ ID NO: 573189 - protein, 15 aa, Homo sapiens
  CDR3 for alpha chain variable domain of TCR clone 286595 (TRAV21, TRAJ53)
CATLNGGGSNYKLTF

SEQ ID NO: 573190 - protein, 16 aa, Homo sapiens
  CDR3 for beta chain variable domain of TCR clone 286595 (TRBV29-1, TRBJ1-2)
CSVEADRDIANYGYTF

SEQ ID NO: 573191 - protein, 14 aa, Homo sapiens
  CDR3 for alpha chain variable domain of TCR clone 286596 (TRAV1-2, TRAJ8)
CAVSEDTGFQKLVF

SEQ ID NO: 573192 - protein, 15 aa, Homo sapiens
  CDR3 for beta chain variable domain of TCR clone 286596 (TRBV27, TRBJ2-1)
CASSNGGGSANEQFF

SEQ ID NO: 573193 - protein, 14 aa, Homo sapiens
  CDR3 for alpha chain variable domain of TCR clone 286597 (TRAV13-1, TRAJ8)
CAAGEDTGFQKLVF

SEQ ID NO: 573194 - protein, 13 aa, Homo sapiens
  CDR3 for beta chain variable domain of TCR clone 286597 (TRBV19, TRBJ1-5)
CASSTRRDQPQHF

SEQ ID NO: 573195 - protein, 15 aa, Homo sapiens
  CDR3 for alpha chain variable domain of TCR clone 286598 (TRAV21, TRAJ52)
CAVRGGGTSYGQLTF

SEQ ID NO: 573196 - protein, 13 aa, Homo sapiens
  CDR3 for beta chain variable domain of TCR clone 286598 (TRBV6-5, TRBJ2-5)
CATAPSPQETQYF

SEQ ID NO: 573197 - protein, 18 aa, Homo sapiens
  CDR3 for alpha chain variable domain of TCR clone 286599 (TRAV29/DV5, TRAJ52)
CAAGFRGAGGTIYGKLTF

SEQ ID NO: 573198 - protein, 14 aa, Homo sapiens
  CDR3 for beta chain variable domain of TCR clone 286599 (TRBV20-1, TRBJ2-7)
CSAKRGRSSYEQYF

SEQ ID NO: 573199 - protein, 14 aa, Homo sapiens
  CDR3 for alpha chain variable domain of TCR clone 286600 (TRAV23/DV6, TRAJ28)
CAASSGAGSYQLTF

SEQ ID NO: 573200 - protein, 13 aa, Homo sapiens
  CDR3 for beta chain variable domain of TCR clone 286600 (TRBV4-2, TRBJ1-1)
CASSQAGNTEAFF

SEQ ID NO: 573201 - protein, 16 aa, Homo sapiens
  CDR3 for alpha chain variable domain of TCR clone 286601 (TRAV3, TRAJ37)
CAVRGKGPGNTGKLIF

SEQ ID NO: 573202 - protein, 15 aa, Homo sapiens
  CDR3 for beta chain variable domain of TCR clone 286601 (TRBV20-1, TRBJ2-1)
CSAGGGTRYYNEQFF

SEQ ID NO: 573203 - protein, 14 aa, Homo sapiens
  CDR3 for alpha chain variable domain of TCR clone 286602 (TRAV12-2, TRAJ13)
CAVKKTGGYQKVTF

SEQ ID NO: 573204 - protein, 14 aa, Homo sapiens
  CDR3 for beta chain variable domain of TCR clone 286602 (TRBV6-1, TRBJ2-7)
CASTRTGDYYEQYF

SEQ ID NO: 573205 - protein, 16 aa, Homo sapiens
  CDR3 for alpha chain variable domain of TCR clone 286603 (TRAV38-1, TRAJ56)
CAFMKRQTGANSKLTF

SEQ ID NO: 573206 - protein, 15 aa, Homo sapiens
  CDR3 for beta chain variable domain of TCR clone 286603 (TRBV11-3, TRBJ2-1)
CASSLAGQTYNEQFF

SEQ ID NO: 573207 - protein, 13 aa, Homo sapiens
  CDR3 for alpha chain variable domain of TCR clone 286604 (TRAV12-3, TRAJ13)
CAMETGGYQKVTF

SEQ ID NO: 573208 - protein, 15 aa, Homo sapiens
  CDR3 for beta chain variable domain of TCR clone 286604 (TRBV28, TRBJ2-7)
CASSFRGQGRYEQYF

SEQ ID NO: 573209 - protein, 18 aa, Homo sapiens
  CDR3 for alpha chain variable domain of TCR clone 286605 (TRAV21, TRAJ52)
CAVRPSPAGGTSYGNLTF

SEQ ID NO: 573210 - protein, 15 aa, Homo sapiens
  CDR3 for beta chain variable domain of TCR clone 286605 (TRBV20-1, TRBJ2-7)
CSARKGLAESYEQYF

SEQ ID NO: 573211 - protein, 14 aa, Homo sapiens
  CDR3 for alpha chain variable domain of TCR clone 286606 (TRAV3, TRAJ40)
CAVSDMTGTYKYIF

SEQ ID NO: 573212 - protein, 16 aa, Homo sapiens
  CDR3 for beta chain variable domain of TCR clone 286606 (TRBV11-2, TRBJ2-7)
CASSLAPTGVNYEQYF

SEQ ID NO: 573213 - protein, 14 aa, Homo sapiens
  CDR3 for alpha chain variable domain of TCR clone 286607 (TRAV1-2, TRAJ16)
CAVNRFSDGQKLIF

SEQ ID NO: 573214 - protein, 14 aa, Homo sapiens
  CDR3 for beta chain variable domain of TCR clone 286607 (TRBV11-2, TRBJ2-3)
CASSRLARTDTQYF

SEQ ID NO: 573215 - protein, 15 aa, Homo sapiens
  CDR3 for alpha chain variable domain of TCR clone 286608 (TRAV25, TRAJ52)
CAGTSGGTSYGKLTF

SEQ ID NO: 573216 - protein, 15 aa, Homo sapiens
  CDR3 for beta chain variable domain of TCR clone 286608 (TRBV10-2, TRBJ2-6)
CASSEQGTGANVLTF

SEQ ID NO: 573217 - protein, 14 aa, Homo sapiens
  CDR3 for alpha chain variable domain of TCR clone 286609 (TRAV12-1, TRAJ17)
CVVNPKAAGNKLTF

SEQ ID NO: 573218 - protein, 18 aa, Homo sapiens
  CDR3 for beta chain variable domain of TCR clone 286609 (TRBV6-5, TRBJ1-1)
CASSYSAPGGTGGTEAFF

SEQ ID NO: 573219 - protein, 15 aa, Homo sapiens
  CDR3 for alpha chain variable domain of TCR clone 286610 (TRAV21, TRAJ53)
CATLNSGGSNYKLTF

SEQ ID NO: 573220 - protein, 13 aa, Homo sapiens
  CDR3 for beta chain variable domain of TCR clone 286610 (TRBV10-3, TRBJ1-4)
CAISDREEEKLFF

SEQ ID NO: 573221 - protein, 12 aa, Homo sapiens
  CDR3 for alpha chain variable domain of TCR clone 286611 (TRAV25, TRAJ11)
CAVASGYSTLTF

SEQ ID NO: 573222 - protein, 14 aa, Homo sapiens
  CDR3 for beta chain variable domain of TCR clone 286611 (TRBV5-8, TRBJ2-3)
CASSLGQGTDTQYF

SEQ ID NO: 573223 - protein, 17 aa, Homo sapiens
  CDR3 for alpha chain variable domain of TCR clone 286612 (TRAV3, TRAJ6)
CAVRDGPRAGGSYKTTF

SEQ ID NO: 573224 - protein, 14 aa, Homo sapiens
  CDR3 for beta chain variable domain of TCR clone 286612 (TRBV7-2, TRBJ2-7)
CASSPKTSFYEQYF

SEQ ID NO: 573225 - protein, 14 aa, Homo sapiens
  CDR3 for alpha chain variable domain of TCR clone 286613 (TRAV1-2, TRAJ8)
CAVREDTGFQKLGF

SEQ ID NO: 573226 - protein, 17 aa, Homo sapiens
  CDR3 for beta chain variable domain of TCR clone 286613 (TRBV6-3, TRBJ2-7)
CTSVPAVPPGQFSTQYF

SEQ ID NO: 573227 - protein, 13 aa, Homo sapiens
  CDR3 for alpha chain variable domain of TCR clone 286614 (TRAV2, TRAJ40)
CAVVTSGTYKYIF

SEQ ID NO: 573228 - protein, 19 aa, Homo sapiens
  CDR3 for beta chain variable domain of TCR clone 286614 (TRBV4-1, TRBJ2-7)
CASSQEGGGITTSIYEQYF

SEQ ID NO: 573229 - protein, 16 aa, Homo sapiens
  CDR3 for alpha chain variable domain of TCR clone 286615 (TRAV3, TRAJ37)
CAVRGNGSGNTGKLIF

SEQ ID NO: 573230 - protein, 13 aa, Homo sapiens
  CDR3 for beta chain variable domain of TCR clone 286615 (TRBV10-3, TRBJ1-2)
CAISERDSYGYTF

SEQ ID NO: 573231 - protein, 19 aa, Homo sapiens
  CDR3 for alpha chain variable domain of TCR clone 286616 (TRAV25, TRAJ43)
TATQTTDVGTYFCAVFMRF

SEQ ID NO: 573232 - protein, 17 aa, Homo sapiens
  CDR3 for beta chain variable domain of TCR clone 286616 (TRBV11-2, TRBJ2-1)
CASSLYPPGVEYNEQFF

SEQ ID NO: 573233 - protein, 11 aa, Homo sapiens
  CDR3 for alpha chain variable domain of TCR clone 286617 (TRAV2, TRAJ13)
CASGGYQKVTF

SEQ ID NO: 573234 - protein, 16 aa, Homo sapiens
  CDR3 for beta chain variable domain of TCR clone 286617 (TRBV19, TRBJ2-1)
CASSKAGPSSYNEHFF

SEQ ID NO: 573235 - protein, 15 aa, Homo sapiens
  CDR3 for alpha chain variable domain of TCR clone 286618 (TRAV17, TRAJ22)
CATVAPSGSARQLTF

SEQ ID NO: 573236 - protein, 14 aa, Homo sapiens
  CDR3 for beta chain variable domain of TCR clone 286618 (TRBV4-1, TRBJ2-2)
CASSQAVNTGELFL

SEQ ID NO: 573237 - protein, 15 aa, Homo sapiens
  CDR3 for alpha chain variable domain of TCR clone 286619 (TRAV27, TRAJ50)
CAGVEMGTSYDKVIF

SEQ ID NO: 573238 - protein, 14 aa, Homo sapiens
  CDR3 for beta chain variable domain of TCR clone 286619 (TRBV7-2, TRBJ1-1)
CASSFYDLNTEAFF

SEQ ID NO: 573239 - protein, 11 aa, Homo sapiens
  CDR3 for alpha chain variable domain of TCR clone 286620 (TRAV26-1, TRAJ37)
CVVRVGRKLIF

SEQ ID NO: 573240 - protein, 14 aa, Homo sapiens
  CDR3 for beta chain variable domain of TCR clone 286620 (TRBV11-3, TRBJ2-7)
CASSSRTGRYEQYF

SEQ ID NO: 573241 - protein, 14 aa, Homo sapiens
  CDR3 for alpha chain variable domain of TCR clone 286621 (TRAV13-1, TRAJ9)
CAASALTGGFKTIF

SEQ ID NO: 573242 - protein, 13 aa, Homo sapiens
  CDR3 for beta chain variable domain of TCR clone 286621 (TRBV28, TRBJ1-1)
CASSKQGWTEAFF

SEQ ID NO: 573243 - protein, 13 aa, Homo sapiens
  CDR3 for alpha chain variable domain of TCR clone 286622 (TRAV8-6, TRAJ54)
CAVIAQGAQKLGF

SEQ ID NO: 573244 - protein, 15 aa, Homo sapiens
  CDR3 for beta chain variable domain of TCR clone 286622 (TRBV19, TRBJ2-7)
CASSIAGTGGYEQYF

SEQ ID NO: 573245 - protein, 15 aa, Homo sapiens
  CDR3 for alpha chain variable domain of TCR clone 286623 (TRAV38-1, TRAJ58)
CAFMKQETSGSRLTF

SEQ ID NO: 573246 - protein, 21 aa, Homo sapiens
  CDR3 for beta chain variable domain of TCR clone 286623 (TRBV6-3, TRBJ1-5)
WASSYELGQGVNYPLNQPQHF

SEQ ID NO: 573247 - protein, 11 aa, Homo sapiens
  CDR3 for alpha chain variable domain of TCR clone 286624 (TRAV20, TRAJ32)
CAVDGMVVLQT

SEQ ID NO: 573248 - protein, 16 aa, Homo sapiens
  CDR3 for beta chain variable domain of TCR clone 286624 (TRBV19, TRBJ2-2)
CASRSPGTGASGELFF

SEQ ID NO: 573249 - protein, 13 aa, Homo sapiens
  CDR3 for alpha chain variable domain of TCR clone 286625 (TRAV30, TRAJ24)
CGTVTDSWGKWQF

SEQ ID NO: 573250 - protein, 15 aa, Homo sapiens
  CDR3 for beta chain variable domain of TCR clone 286625 (TRBV4-1, TRBJ2-1)
CASSQDPGNYNEQFF

SEQ ID NO: 573251 - protein, 18 aa, Homo sapiens
  CDR3 for alpha chain variable domain of TCR clone 286626 (TRAV13-1, TRAJ52)
CAAKNPNAGGTSYGKLTF

SEQ ID NO: 573252 - protein, 15 aa, Homo sapiens
  CDR3 for beta chain variable domain of TCR clone 286626 (TRBV7-8, TRBJ2-1)
CASSSRLAAYNEQFF

SEQ ID NO: 573253 - protein, 20 aa, Homo sapiens
  CDR3 for alpha chain variable domain of TCR clone 286627 (TRAV12-1, TRAJ42)
SSVIQPPTSVKGGSQGNLIF

SEQ ID NO: 573254 - protein, 16 aa, Homo sapiens
  CDR3 for beta chain variable domain of TCR clone 286627 (TRBV2, TRBJ1-6)
CASSETGEIYNSPLHF

SEQ ID NO: 573255 - protein, 10 aa, Homo sapiens
  CDR3 for alpha chain variable domain of TCR clone 286628 (TRAV1-2, TRAJ31)
CAFFDARLMF

SEQ ID NO: 573256 - protein, 13 aa, Homo sapiens
  CDR3 for beta chain variable domain of TCR clone 286628 (TRBV12-5, TRBJ2-3)
CASGDRQSDTQYF

SEQ ID NO: 573257 - protein, 13 aa, Homo sapiens
  CDR3 for alpha chain variable domain of TCR clone 286629 (TRAV8-3, TRAJ43)
CAVGPDNNNDMRF

SEQ ID NO: 573258 - protein, 13 aa, Homo sapiens
  CDR3 for beta chain variable domain of TCR clone 286629 (TRBV25-1, TRBJ1-1)
CASSGQVRAEAFF

SEQ ID NO: 573259 - protein, 14 aa, Homo sapiens
  CDR3 for alpha chain variable domain of TCR clone 286630 (TRAV13-2, TRAJ11)
CAETGNSGYSTLTF

SEQ ID NO: 573260 - protein, 11 aa, Homo sapiens
  CDR3 for beta chain variable domain of TCR clone 286630 (TRBV10-3, TRBJ2-7)
CAISEGFEQYF

SEQ ID NO: 573261 - protein, 10 aa, Homo sapiens
  CDR3 for alpha chain variable domain of TCR clone 286631 (TRAV8-4, TRAJ43)
CAVSADDMRF

SEQ ID NO: 573262 - protein, 15 aa, Homo sapiens
  CDR3 for beta chain variable domain of TCR clone 286631 (TRBV7-3, TRBJ2-2)
CASKANGANTGELFF

SEQ ID NO: 573263 - protein, 14 aa, Homo sapiens
  CDR3 for alpha chain variable domain of TCR clone 286632 (TRAV3, TRAJ28)
CAVRRGAGSYQLTF

SEQ ID NO: 573264 - protein, 16 aa, Homo sapiens
  CDR3 for beta chain variable domain of TCR clone 286632 (TRBV4-1, TRBJ2-7)
CASSQEWASGPLEQYF

SEQ ID NO: 573265 - protein, 15 aa, Homo sapiens
  CDR3 for alpha chain variable domain of TCR clone 286633 (TRAV25, TRAJ52)
CAGRPGGTSYGKLTF

SEQ ID NO: 573266 - protein, 14 aa, Homo sapiens
  CDR3 for beta chain variable domain of TCR clone 286633 (TRBV15, TRBJ2-3)
CATRSGTSTDTQYF

SEQ ID NO: 573267 - protein, 16 aa, Homo sapiens
  CDR3 for alpha chain variable domain of TCR clone 286634 (TRAV12-3, TRAJ53)
CAMSPGSGGSNYKLTF

SEQ ID NO: 573268 - protein, 15 aa, Homo sapiens
  CDR3 for beta chain variable domain of TCR clone 286634 (TRBV4-1, TRBJ1-1)
CASSQEWGHYTEAFF

SEQ ID NO: 573269 - protein, 14 aa, Homo sapiens
  CDR3 for alpha chain variable domain of TCR clone 286635 (TRAV35, TRAJ10)
CAGILTGGGNKLTF

SEQ ID NO: 573270 - protein, 12 aa, Homo sapiens
  CDR3 for beta chain variable domain of TCR clone 286635 (TRBV6-3, TRBJ2-7)
CASSLTPYEQYF

SEQ ID NO: 573271 - protein, 15 aa, Homo sapiens
  CDR3 for alpha chain variable domain of TCR clone 286636 (TRAV12-1, TRAJ13)
CVVNGDSGGYQKVTF

SEQ ID NO: 573272 - protein, 15 aa, Homo sapiens
  CDR3 for beta chain variable domain of TCR clone 286636 (TRBV20-1, TRBJ2-7)
CSARDRVSGMDEQYF

SEQ ID NO: 573273 - protein, 15 aa, Homo sapiens
  CDR3 for alpha chain variable domain of TCR clone 286637 (TRAV13-2, TRAJ45)
CAESDSGGGADGLTF

SEQ ID NO: 573274 - protein, 14 aa, Homo sapiens
  CDR3 for beta chain variable domain of TCR clone 286637 (TRBV11-2, TRBJ2-5)
CASSRTGGIETQYF

SEQ ID NO: 573275 - protein, 13 aa, Homo sapiens
  CDR3 for alpha chain variable domain of TCR clone 286638 (TRAV12-3, TRAJ57)
CAMSQSGSEKLVF

SEQ ID NO: 573276 - protein, 13 aa, Homo sapiens
  CDR3 for beta chain variable domain of TCR clone 286638 (TRBV7-3, TRBJ1-1)
CASSQDWGAEAFF

SEQ ID NO: 573277 - protein, 16 aa, Homo sapiens
  CDR3 for alpha chain variable domain of TCR clone 286639 (TRAV8-6, TRAJ37)
CAVSGLGSSNTGKLIF

SEQ ID NO: 573278 - protein, 13 aa, Homo sapiens
  CDR3 for beta chain variable domain of TCR clone 286639 (TRBV7-9, TRBJ1-4)
CASSLPGIEKLFF

SEQ ID NO: 573279 - protein, 14 aa, Homo sapiens
  CDR3 for alpha chain variable domain of TCR clone 286640 (TRAV38-1, TRAJ29)
CAFITPSGNTPLVF

SEQ ID NO: 573280 - protein, 13 aa, Homo sapiens
  CDR3 for beta chain variable domain of TCR clone 286640 (TRBV18, TRBJ2-7)
CQLTERGGYEQYF

SEQ ID NO: 573281 - protein, 16 aa, Homo sapiens
  CDR3 for alpha chain variable domain of TCR clone 286641 (TRAV23/DV6, TRAJ9)
CAASIGGNTGGFKTIF

SEQ ID NO: 573282 - protein, 13 aa, Homo sapiens
  CDR3 for beta chain variable domain of TCR clone 286641 (TRBV19, TRBJ1-3)
CASRLSLGNTIYF

SEQ ID NO: 573283 - protein, 11 aa, Homo sapiens
  CDR3 for alpha chain variable domain of TCR clone 286642 (TRAV13-2, TRAJ36)
CAETGANYLFF

SEQ ID NO: 573284 - protein, 13 aa, Homo sapiens
  CDR3 for beta chain variable domain of TCR clone 286642 (TRBV7-9, TRBJ2-4)
CATEGLAGNIQYF

SEQ ID NO: 573285 - protein, 12 aa, Homo sapiens
  CDR3 for alpha chain variable domain of TCR clone 286643 (TRAV2, TRAJ9)
CAVGAGGFKTIF

SEQ ID NO: 573286 - protein, 16 aa, Homo sapiens
  CDR3 for beta chain variable domain of TCR clone 286643 (TRBV13, TRBJ2-2)
CASSPRTGEHTGEQFV

SEQ ID NO: 573287 - protein, 14 aa, Homo sapiens
  CDR3 for alpha chain variable domain of TCR clone 286644 (TRAV1-2, TRAJ16)
CAVNRFSDGQELLF

SEQ ID NO: 573288 - protein, 11 aa, Homo sapiens
  CDR3 for beta chain variable domain of TCR clone 286644 (TRBV7-8, TRBJ2-7)
CASSLSLEQYF

SEQ ID NO: 573289 - protein, 15 aa, Homo sapiens
  CDR3 for alpha chain variable domain of TCR clone 286645 (TRAV2, TRAJ9)
CAVAALNTGGFKTIF

SEQ ID NO: 573290 - protein, 13 aa, Homo sapiens
  CDR3 for beta chain variable domain of TCR clone 286645 (TRBV12-4, TRBJ2-3)
CASSSPLGGTQYF

SEQ ID NO: 573291 - protein, 14 aa, Homo sapiens
  CDR3 for alpha chain variable domain of TCR clone 286646 (TRAV26-1, TRAJ38)
CIADNAGNNRKLSW

SEQ ID NO: 573292 - protein, 15 aa, Homo sapiens
  CDR3 for beta chain variable domain of TCR clone 286646 (TRBV7-2, TRBJ2-1)
CASSLVAGRYNEQFF

SEQ ID NO: 573293 - protein, 14 aa, Homo sapiens
  CDR3 for alpha chain variable domain of TCR clone 286647 (TRAV4, TRAJ17)
CLVGDPLVGNKLTF

SEQ ID NO: 573294 - protein, 20 aa, Homo sapiens
  CDR3 for beta chain variable domain of TCR clone 286647 (TRBV20-1, TRBJ2-1)
CSARPYSVAGGPAYYNEQFF

SEQ ID NO: 573295 - protein, 14 aa, Homo sapiens
  CDR3 for alpha chain variable domain of TCR clone 286648 (TRAV25, TRAJ21)
CADYTTSTNFTLDL

SEQ ID NO: 573296 - protein, 20 aa, Homo sapiens
  CDR3 for beta chain variable domain of TCR clone 286648 (TRBV28, TRBJ2-1)
CASTPIGRSPGLAGGNEQFF

SEQ ID NO: 573297 - protein, 14 aa, Homo sapiens
  CDR3 for alpha chain variable domain of TCR clone 286649 (TRAV35, TRAJ33)
CAGSSQDSNYQLIW

SEQ ID NO: 573298 - protein, 15 aa, Homo sapiens
  CDR3 for beta chain variable domain of TCR clone 286649 (TRBV27, TRBJ2-5)
CASSLYPRGGETQYF

SEQ ID NO: 573299 - protein, 13 aa, Homo sapiens
  CDR3 for alpha chain variable domain of TCR clone 286650 (TRAV12-3, TRAJ9)
CAMRNTGGFKTIF

SEQ ID NO: 573300 - protein, 14 aa, Homo sapiens
  CDR3 for beta chain variable domain of TCR clone 286650 (TRBV19, TRBJ2-1)
CARGARSVQWEQFF

SEQ ID NO: 573301 - protein, 16 aa, Homo sapiens
  CDR3 for alpha chain variable domain of TCR clone 286651 (TRAV3, TRAJ37)
CDVRGKGSGNTGKLIF

SEQ ID NO: 573302 - protein, 15 aa, Homo sapiens
  CDR3 for beta chain variable domain of TCR clone 286651 (TRBV18, TRBJ2-1)
CDSSPPSASYNEQFF

SEQ ID NO: 573303 - protein, 13 aa, Homo sapiens
  CDR3 for alpha chain variable domain of TCR clone 286652 (TRAV12-1, TRAJ22)
CVASGGSAMQLTF

SEQ ID NO: 573304 - protein, 12 aa, Homo sapiens
  CDR3 for beta chain variable domain of TCR clone 286652 (TRBV29-1, TRBJ2-3)
CSVTGGADTQYF

SEQ ID NO: 573305 - protein, 11 aa, Homo sapiens
  CDR3 for alpha chain variable domain of TCR clone 286653 (TRAV12-3, TRAJ27)
CAMANAGKSTY

SEQ ID NO: 573306 - protein, 13 aa, Homo sapiens
  CDR3 for beta chain variable domain of TCR clone 286653 (TRBV3-1, TRBJ1-1)
CASSPGVITEAFF

SEQ ID NO: 573307 - protein, 13 aa, Homo sapiens
  CDR3 for alpha chain variable domain of TCR clone 286654 (TRAV16, TRAJ28)
CAPTGAGSYQLTF

SEQ ID NO: 573308 - protein, 16 aa, Homo sapiens
  CDR3 for beta chain variable domain of TCR clone 286654 (TRBV28, TRBJ1-5)
SASSLTGQGWNQPQHF

SEQ ID NO: 573309 - protein, 15 aa, Homo sapiens
  CDR3 for alpha chain variable domain of TCR clone 286655 (TRAV12-2, TRAJ53)
WAVNGGGGSNYKLTF

SEQ ID NO: 573310 - protein, 15 aa, Homo sapiens
  CDR3 for beta chain variable domain of TCR clone 286655 (TRBV20-1, TRBJ2-7)
CSARDRVSGMDEQYF

SEQ ID NO: 573311 - protein, 14 aa, Homo sapiens
  CDR3 for alpha chain variable domain of TCR clone 286656 (TRAV3, TRAJ9)
CAVGLNTGGFKTIF

SEQ ID NO: 573312 - protein, 15 aa, Homo sapiens
  CDR3 for beta chain variable domain of TCR clone 286656 (TRBV7-2, TRBJ1-2)
CASSLARRSIYGYTF

SEQ ID NO: 573313 - protein, 14 aa, Homo sapiens
  CDR3 for alpha chain variable domain of TCR clone 286657 (TRAV35, TRAJ22)
CAGLRPGSARQLTF

SEQ ID NO: 573314 - protein, 14 aa, Homo sapiens
  CDR3 for beta chain variable domain of TCR clone 286657 (TRBV4-1, TRBJ2-7)
CASSPVAGGGRAVL

SEQ ID NO: 573315 - protein, 12 aa, Homo sapiens
  CDR3 for alpha chain variable domain of TCR clone 286658 (TRAV12-1, TRAJ6)
CVVSEISYIPTF

SEQ ID NO: 573316 - protein, 21 aa, Homo sapiens
  CDR3 for beta chain variable domain of TCR clone 286658 (TRBV7-3, TRBJ2-1)
GGTQPCISVPAAYGLAGAQFF

SEQ ID NO: 573317 - protein, 13 aa, Homo sapiens
  CDR3 for alpha chain variable domain of TCR clone 286659 (TRAV12-2, TRAJ39)
CAVNNNAGNMLTF

SEQ ID NO: 573318 - protein, 16 aa, Homo sapiens
  CDR3 for beta chain variable domain of TCR clone 286659 (TRBV12-4, TRBJ2-5)
CASSFFVRGRQETQYF

SEQ ID NO: 573319 - protein, 14 aa, Homo sapiens
  CDR3 for alpha chain variable domain of TCR clone 286660 (TRAV12-2, TRAJ13)
CAVKKTGGYQKVTF

SEQ ID NO: 573320 - protein, 15 aa, Homo sapiens
  CDR3 for beta chain variable domain of TCR clone 286660 (TRBV20-1, TRBJ2-7)
SSARDRVSGMDEQYF

SEQ ID NO: 573321 - protein, 13 aa, Homo sapiens
  CDR3 for alpha chain variable domain of TCR clone 286661 (TRAV26-1, )
CIVSHRVEGFWNQ

SEQ ID NO: 573322 - protein, 14 aa, Homo sapiens
  CDR3 for beta chain variable domain of TCR clone 286661 (TRBV20-1, TRBJ2-7)
CSAWTSLSSYEQYF

SEQ ID NO: 573323 - protein, 12 aa, Homo sapiens
  CDR3 for alpha chain variable domain of TCR clone 286662 (TRAV12-3, TRAJ20)
CAMVRGDYKLSF

SEQ ID NO: 573324 - protein, 12 aa, Homo sapiens
  CDR3 for beta chain variable domain of TCR clone 286662 (TRBV2, TRBJ2-1)
CASSESSGPCIF

SEQ ID NO: 573325 - protein, 13 aa, Homo sapiens
  CDR3 for alpha chain variable domain of TCR clone 286663 (TRAV2, TRAJ40)
CAVVTLGTYKYIF

SEQ ID NO: 573326 - protein, 14 aa, Homo sapiens
  CDR3 for beta chain variable domain of TCR clone 286663 (TRBV19, TRBJ2-1)
CASQTFVLSGEQFF

SEQ ID NO: 573327 - protein, 16 aa, Homo sapiens
  CDR3 for alpha chain variable domain of TCR clone 286664 (TRAV14/DV4, TRAJ54)
CAMREGLAWGAQKLVF

SEQ ID NO: 573328 - protein, 19 aa, Homo sapiens
  CDR3 for beta chain variable domain of TCR clone 286664 (TRBV7-9, TRBJ2-6)
CTSSLESATVLPGANVLTF

SEQ ID NO: 573329 - protein, 16 aa, Homo sapiens
  CDR3 for alpha chain variable domain of TCR clone 286665 (TRAV12-1, TRAJ12)
CVVNTLLMDSSYKLIF

SEQ ID NO: 573330 - protein, 16 aa, Homo sapiens
  CDR3 for beta chain variable domain of TCR clone 286665 (TRBV6-4, TRBJ1-4)
CASSETGQDPNEKLFF

SEQ ID NO: 573331 - protein, 13 aa, Homo sapiens
  CDR3 for alpha chain variable domain of TCR clone 286666 (TRAV12-2, TRAJ5)
CAVKDTGRRALTF

SEQ ID NO: 573332 - protein, 15 aa, Homo sapiens
  CDR3 for beta chain variable domain of TCR clone 286666 (TRBV6-3, TRBJ2-7)
CASSSPGTVFYEQYF

SEQ ID NO: 573333 - protein, 14 aa, Homo sapiens
  CDR3 for alpha chain variable domain of TCR clone 286667 (TRAV26-1, TRAJ33)
CIVRNMDNNYQLIW

SEQ ID NO: 573334 - protein, 14 aa, Homo sapiens
  CDR3 for beta chain variable domain of TCR clone 286667 (TRBV19, TRBJ2-1)
CASPTFVLSGEQFF

SEQ ID NO: 573335 - protein, 16 aa, Homo sapiens
  CDR3 for alpha chain variable domain of TCR clone 286668 (TRAV8-6, TRAJ39)
CAVMPMNNNAGNTLTF

SEQ ID NO: 573336 - protein, 16 aa, Homo sapiens
  CDR3 for beta chain variable domain of TCR clone 286668 (TRBV15, TRBJ2-5)
CATSRYLEAAQETQYF

SEQ ID NO: 573337 - protein, 14 aa, Homo sapiens
  CDR3 for alpha chain variable domain of TCR clone 286669 (TRAV3, TRAJ40)
CAVRDRRGIYKYIF

SEQ ID NO: 573338 - protein, 16 aa, Homo sapiens
  CDR3 for beta chain variable domain of TCR clone 286669 (TRBV2, TRBJ2-5)
CASSETQGVGEETQYF

SEQ ID NO: 573339 - protein, 14 aa, Homo sapiens
  CDR3 for alpha chain variable domain of TCR clone 286670 (TRAV34, TRAJ44)
CGADGTGTASKLTF

SEQ ID NO: 573340 - protein, 17 aa, Homo sapiens
  CDR3 for beta chain variable domain of TCR clone 286670 (TRBV11-2, TRBJ2-1)
CASSLDPPGFEYNEQFF

SEQ ID NO: 573341 - protein, 14 aa, Homo sapiens
  CDR3 for alpha chain variable domain of TCR clone 286671 (TRAV4, TRAJ9)
CLVGSGTGGFKTIF

SEQ ID NO: 573342 - protein, 15 aa, Homo sapiens
  CDR3 for beta chain variable domain of TCR clone 286671 (TRBV4-3, TRBJ1-1)
CASSQELGRGTEAFF

SEQ ID NO: 573343 - protein, 15 aa, Homo sapiens
  CDR3 for alpha chain variable domain of TCR clone 286672 (TRAV20, TRAJ50)
CAVRQMKTSYDKVIF

SEQ ID NO: 573344 - protein, 16 aa, Homo sapiens
  CDR3 for beta chain variable domain of TCR clone 286672 (TRBV15, TRBJ1-2)
CATCRGPRTGGGGYTF

SEQ ID NO: 573345 - protein, 11 aa, Homo sapiens
  CDR3 for alpha chain variable domain of TCR clone 286673 (TRAV2, TRAJ33)
CAVEINYQLIW

SEQ ID NO: 573346 - protein, 16 aa, Homo sapiens
  CDR3 for beta chain variable domain of TCR clone 286673 (TRBV20-1, TRBJ1-4)
CSAPGQGLLTNEKLFF

SEQ ID NO: 573347 - protein, 15 aa, Homo sapiens
  CDR3 for alpha chain variable domain of TCR clone 286674 (TRAV27, TRAJ38)
CAGRFNAGNNRKRIW

SEQ ID NO: 573348 - protein, 13 aa, Homo sapiens
  CDR3 for beta chain variable domain of TCR clone 286674 (TRBV12-5, TRBJ2-3)
CASQNRGTDTQYL

SEQ ID NO: 573349 - protein, 14 aa, Homo sapiens
  CDR3 for alpha chain variable domain of TCR clone 286675 (TRAV21, TRAJ45)
CAVSSGGGADGLTF

SEQ ID NO: 573350 - protein, 15 aa, Homo sapiens
  CDR3 for beta chain variable domain of TCR clone 286675 (TRBV2, TRBJ2-1)
CASDIGLAGEGEQFF

SEQ ID NO: 573351 - protein, 14 aa, Homo sapiens
  CDR3 for alpha chain variable domain of TCR clone 286676 (TRAV10, TRAJ32)
CGEPRGGATNKLIF

SEQ ID NO: 573352 - protein, 14 aa, Homo sapiens
  CDR3 for beta chain variable domain of TCR clone 286676 (TRBV5-4, TRBJ2-2)
CASRLDGGAGELFF

SEQ ID NO: 573353 - protein, 12 aa, Homo sapiens
  CDR3 for alpha chain variable domain of TCR clone 286677 (TRAV12-3, TRAJ17)
CATTLTGNKLTF

SEQ ID NO: 573354 - protein, 15 aa, Homo sapiens
  CDR3 for beta chain variable domain of TCR clone 286677 (TRBV20-1, TRBJ2-7)
CSARDRGSGMDEQYF

SEQ ID NO: 573355 - protein, 14 aa, Homo sapiens
  CDR3 for alpha chain variable domain of TCR clone 286678 (TRAV17, TRAJ37)
CATDGSSNTGKLIF

SEQ ID NO: 573356 - protein, 13 aa, Homo sapiens
  CDR3 for beta chain variable domain of TCR clone 286678 (TRBV11-2, TRBJ2-1)
RASSLDLVNEQFF

SEQ ID NO: 573357 - protein, 14 aa, Homo sapiens
  CDR3 for alpha chain variable domain of TCR clone 286679 (TRAV1-2, TRAJ8)
CAVREDTGFQKLVF

SEQ ID NO: 573358 - protein, 12 aa, Homo sapiens
  CDR3 for beta chain variable domain of TCR clone 286679 (TRBV2, TRBJ2-1)
CAYGPPANEQFF

SEQ ID NO: 573359 - protein, 16 aa, Homo sapiens
  CDR3 for alpha chain variable domain of TCR clone 286680 (TRAV3, TRAJ5)
CAVRNLMDTGRRALTF

SEQ ID NO: 573360 - protein, 16 aa, Homo sapiens
  CDR3 for beta chain variable domain of TCR clone 286680 (TRBV4-2, TRBJ2-7)
CASSQEGIANSYEQYF

SEQ ID NO: 573361 - protein, 12 aa, Homo sapiens
  CDR3 for alpha chain variable domain of TCR clone 286681 (TRAV12-1, TRAJ34)
CVVAGATDKLTL

SEQ ID NO: 573362 - protein, 12 aa, Homo sapiens
  CDR3 for beta chain variable domain of TCR clone 286681 (TRBV7-9, TRBJ1-1)
CASSLVRGEAFF

SEQ ID NO: 573363 - protein, 16 aa, Homo sapiens
  CDR3 for alpha chain variable domain of TCR clone 286682 (TRAV12-2, TRAJ43)
CAGDDMRFGAGTRLTV

SEQ ID NO: 573364 - protein, 16 aa, Homo sapiens
  CDR3 for beta chain variable domain of TCR clone 286682 (TRBV2, TRBJ2-4)
CAGSEAPGGEQNIQYV

SEQ ID NO: 573365 - protein, 13 aa, Homo sapiens
  CDR3 for alpha chain variable domain of TCR clone 286683 (TRAV17, TRAJ9)
CATDYTGGFKTIF

SEQ ID NO: 573366 - protein, 17 aa, Homo sapiens
  CDR3 for beta chain variable domain of TCR clone 286683 (TRBV28, TRBJ2-5)
CASSTPEGDALQETQYF

SEQ ID NO: 573367 - protein, 15 aa, Homo sapiens
  CDR3 for alpha chain variable domain of TCR clone 286684 (TRAV21, TRAJ24)
CAARSSTDSWGKLQF

SEQ ID NO: 573368 - protein, 13 aa, Homo sapiens
  CDR3 for beta chain variable domain of TCR clone 286684 (TRBV13, TRBJ2-1)
CASTPGSYNEQFF

SEQ ID NO: 573369 - protein, 19 aa, Homo sapiens
  CDR3 for alpha chain variable domain of TCR clone 286685 (TRAV2, TRAJ20)
ILQVREADAAVYRDCKLSF

SEQ ID NO: 573370 - protein, 14 aa, Homo sapiens
  CDR3 for beta chain variable domain of TCR clone 286685 (TRBV20-1, TRBJ2-3)
RTSGGPGTTDTQYF

SEQ ID NO: 573371 - protein, 13 aa, Homo sapiens
  CDR3 for alpha chain variable domain of TCR clone 286686 (TRAV17, TRAJ5)
CALRGTGRRALTF

SEQ ID NO: 573372 - protein, 14 aa, Homo sapiens
  CDR3 for beta chain variable domain of TCR clone 286686 (TRBV18, TRBJ2-3)
CASSGLADTDTQYF

SEQ ID NO: 573373 - protein, 15 aa, Homo sapiens
  CDR3 for alpha chain variable domain of TCR clone 286687 (TRAV12-3, TRAJ42)
CAMSGHGGSQGNLIV

SEQ ID NO: 573374 - protein, 20 aa, Homo sapiens
  CDR3 for beta chain variable domain of TCR clone 286687 (TRBV7-8, TRBJ2-2)
CASSHLFPGPTIHITGELFF

SEQ ID NO: 573375 - protein, 12 aa, Homo sapiens
  CDR3 for alpha chain variable domain of TCR clone 286688 (TRAV8-3, TRAJ26)
CAGDNYGQNFVF

SEQ ID NO: 573376 - protein, 16 aa, Homo sapiens
  CDR3 for beta chain variable domain of TCR clone 286688 (TRBV2, TRBJ2-5)
CASSETQGVGEETQYF

SEQ ID NO: 573377 - protein, 10 aa, Homo sapiens
  CDR3 for alpha chain variable domain of TCR clone 286689 (TRAV13-2, TRAJ49)
CADTGNQFYF

SEQ ID NO: 573378 - protein, 14 aa, Homo sapiens
  CDR3 for beta chain variable domain of TCR clone 286689 (TRBV7-6, TRBJ2-1)
CARSLGGGADEQFF

SEQ ID NO: 573379 - protein, 14 aa, Homo sapiens
  CDR3 for alpha chain variable domain of TCR clone 286690 (TRAV8-4, TRAJ4)
CAVSPSGGYNKLIF

SEQ ID NO: 573380 - protein, 15 aa, Homo sapiens
  CDR3 for beta chain variable domain of TCR clone 286690 (TRBV7-8, TRBJ2-3)
CASSVSADSGGAQYF

SEQ ID NO: 573381 - protein, 10 aa, Homo sapiens
  CDR3 for alpha chain variable domain of TCR clone 286691 (TRAV1-2, TRAJ31)
CVSEDARLMF

SEQ ID NO: 573382 - protein, 16 aa, Homo sapiens
  CDR3 for beta chain variable domain of TCR clone 286691 (TRBV4-1, TRBJ1-2)
CASSQDAGQVLYGYTF

SEQ ID NO: 573383 - protein, 13 aa, Homo sapiens
  CDR3 for alpha chain variable domain of TCR clone 286692 (TRAV20, TRAJ9)
CAVPDTGGFKTIF

SEQ ID NO: 573384 - protein, 15 aa, Homo sapiens
  CDR3 for beta chain variable domain of TCR clone 286692 (TRBV27, TRBJ2-7)
CASSKAGRGGYKQYF

SEQ ID NO: 573385 - protein, 18 aa, Homo sapiens
  CDR3 for alpha chain variable domain of TCR clone 286693 (TRAV13-2, TRAJ20)
CSYSTWRLSCLLVHKISF

SEQ ID NO: 573386 - protein, 13 aa, Homo sapiens
  CDR3 for beta chain variable domain of TCR clone 286693 (TRBV2, TRBJ1-4)
CASSERAGEKLFF

SEQ ID NO: 573387 - protein, 11 aa, Homo sapiens
  CDR3 for alpha chain variable domain of TCR clone 286694 (TRAV12-2, TRAJ49)
CAVNTGNQFYC

SEQ ID NO: 573388 - protein, 12 aa, Homo sapiens
  CDR3 for beta chain variable domain of TCR clone 286694 (TRBV2, TRBJ2-3)
CASSGRFDTQYY

SEQ ID NO: 573389 - protein, 16 aa, Homo sapiens
  CDR3 for alpha chain variable domain of TCR clone 286695 (TRAV3, TRAJ37)
CAVRPHGSGNTGKLIF

SEQ ID NO: 573390 - protein, 13 aa, Homo sapiens
  CDR3 for beta chain variable domain of TCR clone 286695 (TRBV2, TRBJ1-5)
CASGTGGYQPQHY

SEQ ID NO: 573391 - protein, 15 aa, Homo sapiens
  CDR3 for alpha chain variable domain of TCR clone 286696 (TRAV26-1, TRAJ29)
CFVRVEGSGNTPLVF

SEQ ID NO: 573392 - protein, 15 aa, Homo sapiens
  CDR3 for beta chain variable domain of TCR clone 286696 (TRBV7-9, TRBJ1-5)
CASSRGHQPNQPQHF

SEQ ID NO: 573393 - protein, 13 aa, Homo sapiens
  CDR3 for alpha chain variable domain of TCR clone 286697 (TRAV12-1, TRAJ42)
CGGVGGSQGNLIF

SEQ ID NO: 573394 - protein, 13 aa, Homo sapiens
  CDR3 for beta chain variable domain of TCR clone 286697 (TRBV10-3, TRBJ2-7)
CASKLAVNYEQYF

SEQ ID NO: 573395 - protein, 11 aa, Homo sapiens
  CDR3 for alpha chain variable domain of TCR clone 286698 (TRAV4, TRAJ23)
CLVAPGGKRIF

SEQ ID NO: 573396 - protein, 14 aa, Homo sapiens
  CDR3 for beta chain variable domain of TCR clone 286698 (TRBV19, TRBJ2-2)
CASTVTANTGELFF

SEQ ID NO: 573397 - protein, 17 aa, Homo sapiens
  CDR3 for alpha chain variable domain of TCR clone 286699 (TRAV13-1, TRAJ52)
CAAGRNAGGTSYGKLTF

SEQ ID NO: 573398 - protein, 15 aa, Homo sapiens
  CDR3 for beta chain variable domain of TCR clone 286699 (TRBV10-2, TRBJ2-6)
CASSEQVTGANDLTF

SEQ ID NO: 573399 - protein, 16 aa, Homo sapiens
  CDR3 for alpha chain variable domain of TCR clone 286700 (TRAV3, TRAJ18)
CAVRDGRGSTLGRLYF

SEQ ID NO: 573400 - protein, 13 aa, Homo sapiens
  CDR3 for beta chain variable domain of TCR clone 286700 (TRBV7-9, TRBJ2-3)
CASSPGSTDTQYF

SEQ ID NO: 573401 - protein, 17 aa, Homo sapiens
  CDR3 for alpha chain variable domain of TCR clone 286701 (TRAV3, TRAJ42)
CAVRDRGYGGSQGNLIF

SEQ ID NO: 573402 - protein, 18 aa, Homo sapiens
  CDR3 for beta chain variable domain of TCR clone 286701 (TRBV20-1, TRBJ2-6)
CSAETTPTHGSGANVLTF

SEQ ID NO: 573403 - protein, 12 aa, Homo sapiens
  CDR3 for alpha chain variable domain of TCR clone 286702 (TRAV13-1, TRAJ48)
CAANFGNEKLTF

SEQ ID NO: 573404 - protein, 14 aa, Homo sapiens
  CDR3 for beta chain variable domain of TCR clone 286702 (TRBV11-3, TRBJ2-3)
CASSSGQGPDTQYF

SEQ ID NO: 573405 - protein, 10 aa, Homo sapiens
  CDR3 for alpha chain variable domain of TCR clone 286703 (TRAV12-2, TRAJ20)
CAVDLYKLSF

SEQ ID NO: 573406 - protein, 14 aa, Homo sapiens
  CDR3 for beta chain variable domain of TCR clone 286703 (TRBV10-3, TRBJ2-2)
CAISEVSHSGELFF

SEQ ID NO: 573407 - protein, 14 aa, Homo sapiens
  CDR3 for alpha chain variable domain of TCR clone 286704 (TRAV3, TRAJ9)
CAVRGNTGGFKPIF

SEQ ID NO: 573408 - protein, 14 aa, Homo sapiens
  CDR3 for beta chain variable domain of TCR clone 286704 (TRBV19, TRBJ2-1)
CASPTFVLSGEQFF

SEQ ID NO: 573409 - protein, 16 aa, Homo sapiens
  CDR3 for alpha chain variable domain of TCR clone 286705 (TRAV21, TRAJ45)
FAVSWGSGGGADGLTF

SEQ ID NO: 573410 - protein, 14 aa, Homo sapiens
  CDR3 for beta chain variable domain of TCR clone 286705 (TRBV4-2, TRBJ1-2)
CASSPGGSNYGYTF

SEQ ID NO: 573411 - protein, 12 aa, Homo sapiens
  CDR3 for alpha chain variable domain of TCR clone 286706 (TRAV12-1, TRAJ23)
CVVNSCGGKLIF

SEQ ID NO: 573412 - protein, 12 aa, Homo sapiens
  CDR3 for beta chain variable domain of TCR clone 286706 (TRBV2, TRBJ2-1)
CAYGPPGNEQFF

SEQ ID NO: 573413 - protein, 14 aa, Homo sapiens
  CDR3 for alpha chain variable domain of TCR clone 286707 (TRAV12-3, TRAJ10)
SHLPLTGGGNKLTF

SEQ ID NO: 573414 - protein, 15 aa, Homo sapiens
  CDR3 for beta chain variable domain of TCR clone 286707 (TRBV20-1, TRBJ1-5)
CSAFKNGQRNQPQHF

SEQ ID NO: 573415 - protein, 11 aa, Homo sapiens
  CDR3 for alpha chain variable domain of TCR clone 286708 (TRAV21, TRAJ39)
LLVNAGNMLTF

SEQ ID NO: 573416 - protein, 15 aa, Homo sapiens
  CDR3 for beta chain variable domain of TCR clone 286708 (TRBV11-3, TRBJ2-3)
CASLKDGQEGDTQYF

SEQ ID NO: 573417 - protein, 13 aa, Homo sapiens
  CDR3 for alpha chain variable domain of TCR clone 286709 (TRAV12-1, TRAJ34)
CVVTGYNTDKLIF

SEQ ID NO: 573418 - protein, 15 aa, Homo sapiens
  CDR3 for beta chain variable domain of TCR clone 286709 (TRBV7-9, TRBJ1-5)
CASSQGHQPNQPQHF

SEQ ID NO: 573419 - protein, 14 aa, Homo sapiens
  CDR3 for alpha chain variable domain of TCR clone 286710 (TRAV12-3, TRAJ54)
CAMSALQGATKLVF

SEQ ID NO: 573420 - protein, 15 aa, Homo sapiens
  CDR3 for beta chain variable domain of TCR clone 286710 (TRBV19, TRBJ2-4)
CASSTPGIAKNIQYF

SEQ ID NO: 573421 - protein, 12 aa, Homo sapiens
  CDR3 for alpha chain variable domain of TCR clone 286711 (TRAV8-3, TRAJ20)
CAVGANDYKLSF

SEQ ID NO: 573422 - protein, 11 aa, Homo sapiens
  CDR3 for beta chain variable domain of TCR clone 286711 (TRBV19, TRBJ1-1)
CASSIGSEAFF

SEQ ID NO: 573423 - protein, 11 aa, Homo sapiens
  CDR3 for alpha chain variable domain of TCR clone 286712 (TRAV21, TRAJ34)
CAVTSTDKLIF

SEQ ID NO: 573424 - protein, 17 aa, Homo sapiens
  CDR3 for beta chain variable domain of TCR clone 286712 (TRBV20-1, TRBJ2-1)
CSARSPSRGPPTMSSSS

SEQ ID NO: 573425 - protein, 15 aa, Homo sapiens
  CDR3 for alpha chain variable domain of TCR clone 286713 (TRAV3, TRAJ20)
CAVRDIKLSDYKLSF

SEQ ID NO: 573426 - protein, 15 aa, Homo sapiens
  CDR3 for beta chain variable domain of TCR clone 286713 (TRBV7-9, TRBJ1-6)
CASSSPGCGNSALHF

SEQ ID NO: 573427 - protein, 18 aa, Homo sapiens
  CDR3 for alpha chain variable domain of TCR clone 286714 (TRAV17, TRAJ10)
CFLLLFYIITGGGNKLTF

SEQ ID NO: 573428 - protein, 15 aa, Homo sapiens
  CDR3 for beta chain variable domain of TCR clone 286714 (TRBV12-4, TRBJ2-5)
CASSPPTGLQETQYF

SEQ ID NO: 573429 - protein, 15 aa, Homo sapiens
  CDR3 for alpha chain variable domain of TCR clone 286715 (TRAV26-1, TRAJ48)
CIVRVGDCGNEKLTF

SEQ ID NO: 573430 - protein, 16 aa, Homo sapiens
  CDR3 for beta chain variable domain of TCR clone 286715 (TRBV4-1, TRBJ2-3)
CASSQRAGGLTDTQYF

SEQ ID NO: 573431 - protein, 15 aa, Homo sapiens
  CDR3 for alpha chain variable domain of TCR clone 286716 (TRAV13-1, TRAJ52)
SYYNAGGTSYGKLTF

SEQ ID NO: 573432 - protein, 14 aa, Homo sapiens
  CDR3 for beta chain variable domain of TCR clone 286716 (TRBV7-2, TRBJ1-1)
CASSFLTGTTEAFF

SEQ ID NO: 573433 - protein, 14 aa, Homo sapiens
  CDR3 for alpha chain variable domain of TCR clone 286717 (TRAV4, TRAJ20)
CLVGRSSNDYKLSF

SEQ ID NO: 573434 - protein, 18 aa, Homo sapiens
  CDR3 for beta chain variable domain of TCR clone 286717 (TRBV2, TRBJ2-5)
CASSGDPQGRGAQETQYF

SEQ ID NO: 573435 - protein, 10 aa, Homo sapiens
  CDR3 for alpha chain variable domain of TCR clone 286718 (TRAV23/DV6, TRAJ57)
CAASSTLSQG

SEQ ID NO: 573436 - protein, 15 aa, Homo sapiens
  CDR3 for beta chain variable domain of TCR clone 286718 (TRBV5-1, TRBJ1-1)
CASSWTGRGNIEAFF

SEQ ID NO: 573437 - protein, 13 aa, Homo sapiens
  CDR3 for alpha chain variable domain of TCR clone 286719 (TRAV8-6, TRAJ54)
CAVSEEGAQKLVF

SEQ ID NO: 573438 - protein, 14 aa, Homo sapiens
  CDR3 for beta chain variable domain of TCR clone 286719 (TRBV12-5, TRBJ2-5)
CASGSRTHQETQYF

SEQ ID NO: 573439 - protein, 13 aa, Homo sapiens
  CDR3 for alpha chain variable domain of TCR clone 286720 (TRAV17, TRAJ5)
CALRGTGRRALTF

SEQ ID NO: 573440 - protein, 15 aa, Homo sapiens
  CDR3 for beta chain variable domain of TCR clone 286720 (TRBV4-1, TRBJ2-5)
CASSQWDLYQETQYF

SEQ ID NO: 573441 - protein, 13 aa, Homo sapiens
  CDR3 for alpha chain variable domain of TCR clone 286721 (TRAV12-2, TRAJ10)
CAVPTGGGNKLTF

SEQ ID NO: 573442 - protein, 15 aa, Homo sapiens
  CDR3 for beta chain variable domain of TCR clone 286721 (TRBV7-9, TRBJ1-1)
CASSLLEQGGTEAFF

SEQ ID NO: 573443 - protein, 11 aa, Homo sapiens
  CDR3 for alpha chain variable domain of TCR clone 286722 (TRAV23/DV6, TRAJ47)
CAAGYGNKLVY

SEQ ID NO: 573444 - protein, 13 aa, Homo sapiens
  CDR3 for beta chain variable domain of TCR clone 286722 (TRBV7-9, TRBJ2-7)
CASSFAGAYERYF

SEQ ID NO: 573445 - protein, 14 aa, Homo sapiens
  CDR3 for alpha chain variable domain of TCR clone 286723 (TRAV12-2, TRAJ44)
CAVNPAGPSSKLTF

SEQ ID NO: 573446 - protein, 13 aa, Homo sapiens
  CDR3 for beta chain variable domain of TCR clone 286723 (TRBV20-1, TRBJ1-6)
CSAPLGVGSPLHF

SEQ ID NO: 573447 - protein, 16 aa, Homo sapiens
  CDR3 for alpha chain variable domain of TCR clone 286724 (TRAV39, TRAJ32)
CAVDMEYGGATNQLSF

SEQ ID NO: 573448 - protein, 14 aa, Homo sapiens
  CDR3 for beta chain variable domain of TCR clone 286724 (TRBV9, TRBJ2-4)
CASSPSGTSGFQYF

SEQ ID NO: 573449 - protein, 15 aa, Homo sapiens
  CDR3 for alpha chain variable domain of TCR clone 286725 (TRAV38-2/DV8, TRAJ31)
CAYRTETRNNARLMF

SEQ ID NO: 573450 - protein, 16 aa, Homo sapiens
  CDR3 for beta chain variable domain of TCR clone 286725 (TRBV4-1, TRBJ1-5)
CASSQGGHTTNQPQHF

SEQ ID NO: 573451 - protein, 15 aa, Homo sapiens
  CDR3 for alpha chain variable domain of TCR clone 286726 (TRAV3, TRAJ3)
CAVRDMSSSASTIIF

SEQ ID NO: 573452 - protein, 17 aa, Homo sapiens
  CDR3 for beta chain variable domain of TCR clone 286726 (TRBV24-1, TRBJ2-1)
CATSDVSTSGTYNEQFF

SEQ ID NO: 573453 - protein, 15 aa, Homo sapiens
  CDR3 for alpha chain variable domain of TCR clone 286727 (TRAV17, TRAJ45)
CATAELGGGADGLTF

SEQ ID NO: 573454 - protein, 17 aa, Homo sapiens
  CDR3 for beta chain variable domain of TCR clone 286727 (TRBV7-8, TRBJ1-2)
CASSLRPLQGHLYGYTF

SEQ ID NO: 573455 - protein, 15 aa, Homo sapiens
  CDR3 for alpha chain variable domain of TCR clone 286728 (TRAV12-1, TRAJ44)
CVVFVNTGTASELTF

SEQ ID NO: 573456 - protein, 15 aa, Homo sapiens
  CDR3 for beta chain variable domain of TCR clone 286728 (TRBV12-4, TRBJ2-5)
CASSPPTGLQETQYF

SEQ ID NO: 573457 - protein, 12 aa, Homo sapiens
  CDR3 for alpha chain variable domain of TCR clone 286729 (TRAV12-2, TRAJ52)
IGGGTSYGKLTF

SEQ ID NO: 573458 - protein, 13 aa, Homo sapiens
  CDR3 for beta chain variable domain of TCR clone 286729 (TRBV7-9, TRBJ2-3)
CASSPGSTDTQYF

SEQ ID NO: 573459 - protein, 14 aa, Homo sapiens
  CDR3 for alpha chain variable domain of TCR clone 286730 (TRAV8-2, TRAJ4)
CVVSPSGGYNKLIF

SEQ ID NO: 573460 - protein, 16 aa, Homo sapiens
  CDR3 for beta chain variable domain of TCR clone 286730 (TRBV15, TRBJ2-7)
CATSSDGGIPSYEQYF

SEQ ID NO: 573461 - protein, 16 aa, Homo sapiens
  CDR3 for alpha chain variable domain of TCR clone 286731 (TRAV30, TRAJ24)
CGTEIVDADSWGKFQF

SEQ ID NO: 573462 - protein, 15 aa, Homo sapiens
  CDR3 for beta chain variable domain of TCR clone 286731 (TRBV12-4, TRBJ2-1)
CASSPLSGRNNEQFF

SEQ ID NO: 573463 - protein, 13 aa, Homo sapiens
  CDR3 for alpha chain variable domain of TCR clone 286732 (TRAV29/DV5, TRAJ58)
CAGEETSGSRLTF

SEQ ID NO: 573464 - protein, 13 aa, Homo sapiens
  CDR3 for beta chain variable domain of TCR clone 286732 (TRBV28, TRBJ1-2)
CASSLQGRGGYTF

SEQ ID NO: 573465 - protein, 14 aa, Homo sapiens
  CDR3 for alpha chain variable domain of TCR clone 286733 (TRAV26-1, TRAJ38)
CIADNAGNNRKLIW

SEQ ID NO: 573466 - protein, 15 aa, Homo sapiens
  CDR3 for beta chain variable domain of TCR clone 286733 (TRBV27, TRBJ2-7)
CASSTAGTGSYEQYL

SEQ ID NO: 573467 - protein, 14 aa, Homo sapiens
  CDR3 for alpha chain variable domain of TCR clone 286734 (TRAV8-1, TRAJ23)
CAVGTYNQGGKLIF

SEQ ID NO: 573468 - protein, 16 aa, Homo sapiens
  CDR3 for beta chain variable domain of TCR clone 286734 (TRBV18, TRBJ1-5)
CASSPSTGTSNQPQHS

SEQ ID NO: 573469 - protein, 11 aa, Homo sapiens
  CDR3 for alpha chain variable domain of TCR clone 286735 (TRAV36/DV7, TRAJ28)
KSGAGSYQLTF

SEQ ID NO: 573470 - protein, 11 aa, Homo sapiens
  CDR3 for beta chain variable domain of TCR clone 286735 (TRBV11-2, TRBJ2-2)
CASSLPGELFF

SEQ ID NO: 573471 - protein, 11 aa, Homo sapiens
  CDR3 for alpha chain variable domain of TCR clone 286736 (TRAV13-1, TRAJ40)
CAAFGTYKYIF

SEQ ID NO: 573472 - protein, 17 aa, Homo sapiens
  CDR3 for beta chain variable domain of TCR clone 286736 (TRBV3-1, TRBJ1-1)
CASSLFRTGSMNTEAFF

SEQ ID NO: 573473 - protein, 21 aa, Homo sapiens
  CDR3 for alpha chain variable domain of TCR clone 286737 (TRAV12-1, TRAJ32)
SSVIQPPTSMNYGGATNKLIF

SEQ ID NO: 573474 - protein, 15 aa, Homo sapiens
  CDR3 for beta chain variable domain of TCR clone 286737 (TRBV2, TRBJ2-1)
CASSEEREGDNEQFF

SEQ ID NO: 573475 - protein, 13 aa, Homo sapiens
  CDR3 for alpha chain variable domain of TCR clone 286738 (TRAV12-3, TRAJ9)
CAMRNTGGFKTIL

SEQ ID NO: 573476 - protein, 14 aa, Homo sapiens
  CDR3 for beta chain variable domain of TCR clone 286738 (TRBV11-2, TRBJ2-7)
CASSSTGDGYEQYF

SEQ ID NO: 573477 - protein, 13 aa, Homo sapiens
  CDR3 for alpha chain variable domain of TCR clone 286739 (TRAV13-2, TRAJ53)
CAENMGSNYKLTF

SEQ ID NO: 573478 - protein, 16 aa, Homo sapiens
  CDR3 for beta chain variable domain of TCR clone 286739 (TRBV4-2, TRBJ1-5)
CASSQGQGASNQPQHF

SEQ ID NO: 573479 - protein, 13 aa, Homo sapiens
  CDR3 for alpha chain variable domain of TCR clone 286740 (TRAV36/DV7, TRAJ41)
CAVEANSGYALNF

SEQ ID NO: 573480 - protein, 14 aa, Homo sapiens
  CDR3 for beta chain variable domain of TCR clone 286740 (TRBV18, TRBJ2-5)
CASSPPGHQETQYF

SEQ ID NO: 573481 - protein, 13 aa, Homo sapiens
  CDR3 for alpha chain variable domain of TCR clone 286741 (TRAV12-1, TRAJ6)
CVVFPGGSYIPKF

SEQ ID NO: 573482 - protein, 12 aa, Homo sapiens
  CDR3 for beta chain variable domain of TCR clone 286741 (TRBV11-2, TRBJ2-2)
CASSLGGGELFF

SEQ ID NO: 573483 - protein, 13 aa, Homo sapiens
  CDR3 for alpha chain variable domain of TCR clone 286742 (TRAV4, TRAJ28)
CLFIWGWELPTHF

SEQ ID NO: 573484 - protein, 14 aa, Homo sapiens
  CDR3 for beta chain variable domain of TCR clone 286742 (TRBV7-9, TRBJ2-5)
CASSLDTAQETRYF

SEQ ID NO: 573485 - protein, 16 aa, Homo sapiens
  CDR3 for alpha chain variable domain of TCR clone 286743 (TRAV3, TRAJ10)
CAVRDMRAGGGNKLTY

SEQ ID NO: 573486 - protein, 12 aa, Homo sapiens
  CDR3 for beta chain variable domain of TCR clone 286743 (TRBV20-1, TRBJ2-7)
CSAGLKMGEQYF

SEQ ID NO: 573487 - protein, 14 aa, Homo sapiens
  CDR3 for alpha chain variable domain of TCR clone 286744 (TRAV16, TRAJ31)
CVLSGGNNNARLMF

SEQ ID NO: 573488 - protein, 12 aa, Homo sapiens
  CDR3 for beta chain variable domain of TCR clone 286744 (TRBV11-2, TRBJ1-2)
CASSREGDGYTF

SEQ ID NO: 573489 - protein, 12 aa, Homo sapiens
  CDR3 for alpha chain variable domain of TCR clone 286745 (TRAV24, TRAJ37)
CASSSNTGKLIF

SEQ ID NO: 573490 - protein, 11 aa, Homo sapiens
  CDR3 for beta chain variable domain of TCR clone 286745 (TRBV29-1, TRBJ2-5)
CNEDRTGTQYF

SEQ ID NO: 573491 - protein, 13 aa, Homo sapiens
  CDR3 for alpha chain variable domain of TCR clone 286746 (TRAV17, TRAJ4)
CSTKSGGYNKLIF

SEQ ID NO: 573492 - protein, 14 aa, Homo sapiens
  CDR3 for beta chain variable domain of TCR clone 286746 (TRBV20-1, TRBJ1-5)
CSARDDRGNQPQHF

SEQ ID NO: 573493 - protein, 16 aa, Homo sapiens
  CDR3 for alpha chain variable domain of TCR clone 286747 (TRAV14/DV4, TRAJ48)
CAMREGGNFGNEKLTF

SEQ ID NO: 573494 - protein, 14 aa, Homo sapiens
  CDR3 for beta chain variable domain of TCR clone 286747 (TRBV7-2, TRBJ2-7)
CASRSQGAAYEQYF

SEQ ID NO: 573495 - protein, 16 aa, Homo sapiens
  CDR3 for alpha chain variable domain of TCR clone 286748 (TRAV1-2, TRAJ10)
CAVRGVLMGGGNKLTF

SEQ ID NO: 573496 - protein, 16 aa, Homo sapiens
  CDR3 for beta chain variable domain of TCR clone 286748 (TRBV27, TRBJ2-2)
CASSFRGLVRTGELFF

SEQ ID NO: 573497 - protein, 15 aa, Homo sapiens
  CDR3 for alpha chain variable domain of TCR clone 286749 (TRAV8-3, TRAJ11)
CAVGLFNSGYSTLTL

SEQ ID NO: 573498 - protein, 14 aa, Homo sapiens
  CDR3 for beta chain variable domain of TCR clone 286749 (TRBV12-4, TRBJ2-5)
CASSLWQKQETQYF

SEQ ID NO: 573499 - protein, 13 aa, Homo sapiens
  CDR3 for alpha chain variable domain of TCR clone 286750 (TRAV3, TRAJ36)
CALRDTWANNLFF

SEQ ID NO: 573500 - protein, 15 aa, Homo sapiens
  CDR3 for beta chain variable domain of TCR clone 286750 (TRBV24-1, TRBJ2-1)
CATSGSGGFYNEQFF

SEQ ID NO: 573501 - protein, 15 aa, Homo sapiens
  CDR3 for alpha chain variable domain of TCR clone 286751 (TRAV12-3, TRAJ49)
CAMAVTPNTGNQFYF

SEQ ID NO: 573502 - protein, 18 aa, Homo sapiens
  CDR3 for beta chain variable domain of TCR clone 286751 (TRBV4-1, TRBJ1-5)
CVSSQDPRGQGLIQPQHF

SEQ ID NO: 573503 - protein, 14 aa, Homo sapiens
  CDR3 for alpha chain variable domain of TCR clone 286752 (TRAV26-1, TRAJ21)
CIVRPPYNFNKFYF

SEQ ID NO: 573504 - protein, 15 aa, Homo sapiens
  CDR3 for beta chain variable domain of TCR clone 286752 (TRBV7-2, TRBJ2-3)
CASSLEQGGTDTQYF

SEQ ID NO: 573505 - protein, 12 aa, Homo sapiens
  CDR3 for alpha chain variable domain of TCR clone 286753 (TRAV13-1, TRAJ20)
SVQQVNDYKLSF

SEQ ID NO: 573506 - protein, 14 aa, Homo sapiens
  CDR3 for beta chain variable domain of TCR clone 286753 (TRBV7-6, TRBJ2-3)
CASSLTGGTDMQYF

SEQ ID NO: 573507 - protein, 14 aa, Homo sapiens
  CDR3 for alpha chain variable domain of TCR clone 286754 (TRAV12-3, TRAJ10)
SHLPLTGGGNKLTF

SEQ ID NO: 573508 - protein, 16 aa, Homo sapiens
  CDR3 for beta chain variable domain of TCR clone 286754 (TRBV4-1, TRBJ2-3)
CASSRRAGGLTDTQYF

SEQ ID NO: 573509 - protein, 16 aa, Homo sapiens
  CDR3 for alpha chain variable domain of TCR clone 286755 (TRAV30, TRAJ24)
CGTEIVDADSWGKFQF

SEQ ID NO: 573510 - protein, 13 aa, Homo sapiens
  CDR3 for beta chain variable domain of TCR clone 286755 (TRBV19, TRBJ2-3)
CATWDKITDTQYF

SEQ ID NO: 573511 - protein, 14 aa, Homo sapiens
  CDR3 for alpha chain variable domain of TCR clone 286756 (TRAV16, TRAJ15)
CDLSGPQAGTALIF

SEQ ID NO: 573512 - protein, 12 aa, Homo sapiens
  CDR3 for beta chain variable domain of TCR clone 286756 (TRBV18, TRBJ2-5)
CASSPSKETQYF

SEQ ID NO: 573513 - protein, 15 aa, Homo sapiens
  CDR3 for alpha chain variable domain of TCR clone 286757 (TRAV3, TRAJ3)
CAVRDRDSSASKIIF

SEQ ID NO: 573514 - protein, 14 aa, Homo sapiens
  CDR3 for beta chain variable domain of TCR clone 286757 (TRBV7-9, TRBJ1-1)
CASRDTTGDTKAFF

SEQ ID NO: 573515 - protein, 15 aa, Homo sapiens
  CDR3 for alpha chain variable domain of TCR clone 286758 (TRAV8-2, TRAJ24)
CVVSDRTDSWGKLQF

SEQ ID NO: 573516 - protein, 11 aa, Homo sapiens
  CDR3 for beta chain variable domain of TCR clone 286758 (TRBV20-1, TRBJ1-2)
CSVRGAGGYTF

SEQ ID NO: 573517 - protein, 11 aa, Homo sapiens
  CDR3 for alpha chain variable domain of TCR clone 286759 (TRAV2, TRAJ13)
CASVGYQKVTF

SEQ ID NO: 573518 - protein, 17 aa, Homo sapiens
  CDR3 for beta chain variable domain of TCR clone 286759 (TRBV28, TRBJ2-5)
CASSTPEGDALQETQYF

SEQ ID NO: 573519 - protein, 16 aa, Homo sapiens
  CDR3 for alpha chain variable domain of TCR clone 286760 (TRAV8-4, TRAJ5)
CAVSPLTDTGRRALNF

SEQ ID NO: 573520 - protein, 14 aa, Homo sapiens
  CDR3 for beta chain variable domain of TCR clone 286760 (TRBV19, TRBJ1-6)
CASSTDGWNSPLHF

SEQ ID NO: 573521 - protein, 13 aa, Homo sapiens
  CDR3 for alpha chain variable domain of TCR clone 286761 (TRAV3, TRAJ21)
CAVREPDFNKFYF

SEQ ID NO: 573522 - protein, 15 aa, Homo sapiens
  CDR3 for beta chain variable domain of TCR clone 286761 (TRBV7-3, TRBJ2-2)
CASSETGQGTGELFF

SEQ ID NO: 573523 - protein, 17 aa, Homo sapiens
  CDR3 for alpha chain variable domain of TCR clone 286762 (TRAV8-3, TRAJ42)
CCGAGMNYGVSQGKLIF

SEQ ID NO: 573524 - protein, 11 aa, Homo sapiens
  CDR3 for beta chain variable domain of TCR clone 286762 (TRBV7-2, TRBJ2-3)
CASSSSDTQYF

SEQ ID NO: 573525 - protein, 17 aa, Homo sapiens
  CDR3 for alpha chain variable domain of TCR clone 286763 (TRAV3, TRAJ6)
CAVRDGPRAGGSYIPTF

SEQ ID NO: 573526 - protein, 16 aa, Homo sapiens
  CDR3 for beta chain variable domain of TCR clone 286763 (TRBV7-2, TRBJ2-7)
CASSPKTSFYEQYSGR

SEQ ID NO: 573527 - protein, 16 aa, Homo sapiens
  CDR3 for alpha chain variable domain of TCR clone 286764 (TRAV30, TRAJ24)
CGTEIVGADSWGKSQF

SEQ ID NO: 573528 - protein, 18 aa, Homo sapiens
  CDR3 for beta chain variable domain of TCR clone 286764 (TRBV7-9, TRBJ2-1)
CASSLAVSGTSGRNEQFF

SEQ ID NO: 573529 - protein, 13 aa, Homo sapiens
  CDR3 for alpha chain variable domain of TCR clone 286765 (TRAV12-2, TRAJ9)
CAVKWAGGFKTIF

SEQ ID NO: 573530 - protein, 14 aa, Homo sapiens
  CDR3 for beta chain variable domain of TCR clone 286765 (TRBV19, TRBJ2-1)
CASSTGTSNNEQFF

SEQ ID NO: 573531 - protein, 13 aa, Homo sapiens
  CDR3 for alpha chain variable domain of TCR clone 286766 (TRAV13-1, TRAJ39)
CAASIWAGNMLTF

SEQ ID NO: 573532 - protein, 14 aa, Homo sapiens
  CDR3 for beta chain variable domain of TCR clone 286766 (TRBV7-9, TRBJ2-3)
CASSLEDGTDTQYF

SEQ ID NO: 573533 - protein, 16 aa, Homo sapiens
  CDR3 for alpha chain variable domain of TCR clone 286767 (TRAV23/DV6, TRAJ48)
CAASGVVNFGNEKLTF

SEQ ID NO: 573534 - protein, 15 aa, Homo sapiens
  CDR3 for beta chain variable domain of TCR clone 286767 (TRBV20-1, TRBJ2-5)
CSAGLGGVSQETQYF

SEQ ID NO: 573535 - protein, 16 aa, Homo sapiens
  CDR3 for alpha chain variable domain of TCR clone 286768 (TRAV21, TRAJ17)
CAVRPGEEAAGNTLTI

SEQ ID NO: 573536 - protein, 16 aa, Homo sapiens
  CDR3 for beta chain variable domain of TCR clone 286768 (TRBV2, TRBJ2-7)
CASSEPWTGPSYEQYF

SEQ ID NO: 573537 - protein, 15 aa, Homo sapiens
  CDR3 for alpha chain variable domain of TCR clone 286769 (TRAV12-2, TRAJ53)
CAVNGGGGSNYKLTF

SEQ ID NO: 573538 - protein, 15 aa, Homo sapiens
  CDR3 for beta chain variable domain of TCR clone 286769 (TRBV6-1, TRBJ2-1)
CASSELRGQYNEQFF

SEQ ID NO: 573539 - protein, 11 aa, Homo sapiens
  CDR3 for alpha chain variable domain of TCR clone 286770 (TRAV2, TRAJ13)
CASGGYQKVTF

SEQ ID NO: 573540 - protein, 13 aa, Homo sapiens
  CDR3 for beta chain variable domain of TCR clone 286770 (TRBV6-3, TRBJ2-1)
CASSYDNYNEQFF

SEQ ID NO: 573541 - protein, 14 aa, Homo sapiens
  CDR3 for alpha chain variable domain of TCR clone 286771 (TRAV1-2, TRAJ16)
CAVNRFSGGHKLLF

SEQ ID NO: 573542 - protein, 16 aa, Homo sapiens
  CDR3 for beta chain variable domain of TCR clone 286771 (TRBV9, TRBJ2-1)
CASSVGGGGNYNEQFF

SEQ ID NO: 573543 - protein, 14 aa, Homo sapiens
  CDR3 for alpha chain variable domain of TCR clone 286772 (TRAV12-2, TRAJ13)
RAVKKTGGYQKVTF

SEQ ID NO: 573544 - protein, 13 aa, Homo sapiens
  CDR3 for beta chain variable domain of TCR clone 286772 (TRBV20-1, TRBJ1-3)
CSARLGVGNTIYF

SEQ ID NO: 573545 - protein, 14 aa, Homo sapiens
  CDR3 for alpha chain variable domain of TCR clone 286773 (TRAV12-2, TRAJ17)
CAVLFKAAGTKLTF

SEQ ID NO: 573546 - protein, 12 aa, Homo sapiens
  CDR3 for beta chain variable domain of TCR clone 286773 (TRBV11-2, TRBJ2-2)
CDSSLPTGELFF

SEQ ID NO: 573547 - protein, 14 aa, Homo sapiens
  CDR3 for alpha chain variable domain of TCR clone 286774 (TRAV13-1, TRAJ5)
CAALGLAGRRALTF

SEQ ID NO: 573548 - protein, 13 aa, Homo sapiens
  CDR3 for beta chain variable domain of TCR clone 286774 (TRBV11-3, TRBJ1-1)
CATEEGLNTEAFF

SEQ ID NO: 573549 - protein, 15 aa, Homo sapiens
  CDR3 for alpha chain variable domain of TCR clone 286775 (TRAV25, TRAJ53)
CAATGGGGSNYKLTV

SEQ ID NO: 573550 - protein, 19 aa, Homo sapiens
  CDR3 for beta chain variable domain of TCR clone 286775 (TRBV7-2, TRBJ2-3)
CASSFLSRNWGGGTDTQYF

SEQ ID NO: 573551 - protein, 13 aa, Homo sapiens
  CDR3 for alpha chain variable domain of TCR clone 286776 (TRAV36/DV7, TRAJ41)
CAVEANSGYALNF

SEQ ID NO: 573552 - protein, 13 aa, Homo sapiens
  CDR3 for beta chain variable domain of TCR clone 286776 (TRBV7-9, TRBJ1-2)
CASSLKQNYGYTF

SEQ ID NO: 573553 - protein, 15 aa, Homo sapiens
  CDR3 for alpha chain variable domain of TCR clone 286777 (TRAV3, TRAJ47)
CAVRDIGEYGNKLVF

SEQ ID NO: 573554 - protein, 14 aa, Homo sapiens
  CDR3 for beta chain variable domain of TCR clone 286777 (TRBV7-2, TRBJ1-2)
CASSQTGSTYGYTF

SEQ ID NO: 573555 - protein, 13 aa, Homo sapiens
  CDR3 for alpha chain variable domain of TCR clone 286778 (TRAV27, TRAJ54)
CAGAGQGAQKLGF

SEQ ID NO: 573556 - protein, 15 aa, Homo sapiens
  CDR3 for beta chain variable domain of TCR clone 286778 (TRBV18, TRBJ2-6)
CASSPPYAGANVLTF

SEQ ID NO: 573557 - protein, 17 aa, Homo sapiens
  CDR3 for alpha chain variable domain of TCR clone 286779 (TRAV4, TRAJ18)
CLVGERSVGSTLGRLYF

SEQ ID NO: 573558 - protein, 13 aa, Homo sapiens
  CDR3 for beta chain variable domain of TCR clone 286779 (TRBV24-1, TRBJ2-2)
CATSDWSTGELFF

SEQ ID NO: 573559 - protein, 14 aa, Homo sapiens
  CDR3 for alpha chain variable domain of TCR clone 286780 (TRAV3, TRAJ8)
CAVSLNTGFQKLVF

SEQ ID NO: 573560 - protein, 15 aa, Homo sapiens
  CDR3 for beta chain variable domain of TCR clone 286780 (TRBV2, TRBJ2-5)
CASTRDGGPQETQYF

SEQ ID NO: 573561 - protein, 15 aa, Homo sapiens
  CDR3 for alpha chain variable domain of TCR clone 286781 (TRAV21, TRAJ53)
CATLNSGGSNYKLTF

SEQ ID NO: 573562 - protein, 16 aa, Homo sapiens
  CDR3 for beta chain variable domain of TCR clone 286781 (TRBV20-1, TRBJ1-2)
CSASMGQGVANYGYTF

SEQ ID NO: 573563 - protein, 16 aa, Homo sapiens
  CDR3 for alpha chain variable domain of TCR clone 286782 (TRAV26-1, TRAJ53)
CIVRVAMGGRNYQLTF

SEQ ID NO: 573564 - protein, 12 aa, Homo sapiens
  CDR3 for beta chain variable domain of TCR clone 286782 (TRBV7-9, TRBJ1-5)
CASSPQGQPQHF

SEQ ID NO: 573565 - protein, 14 aa, Homo sapiens
  CDR3 for alpha chain variable domain of TCR clone 286783 (TRAV8-3, TRAJ7)
CAAIELYGNNRLAF

SEQ ID NO: 573566 - protein, 15 aa, Homo sapiens
  CDR3 for beta chain variable domain of TCR clone 286783 (TRBV3-1, TRBJ2-1)
CASSTGDTNHNEQFF

SEQ ID NO: 573567 - protein, 14 aa, Homo sapiens
  CDR3 for alpha chain variable domain of TCR clone 286784 (TRAV12-1, TRAJ3)
CVVNPGSSASKIIF

SEQ ID NO: 573568 - protein, 15 aa, Homo sapiens
  CDR3 for beta chain variable domain of TCR clone 286784 (TRBV7-2, TRBJ2-1)
CASSSGLAGGNEQFF

SEQ ID NO: 573569 - protein, 12 aa, Homo sapiens
  CDR3 for alpha chain variable domain of TCR clone 286785 (TRAV12-3, TRAJ17)
CAVTLTGNKLTF

SEQ ID NO: 573570 - protein, 15 aa, Homo sapiens
  CDR3 for beta chain variable domain of TCR clone 286785 (TRBV20-1, TRBJ2-7)
CSARDRATGMDEQYF

SEQ ID NO: 573571 - protein, 12 aa, Homo sapiens
  CDR3 for alpha chain variable domain of TCR clone 286786 (TRAV13-2, TRAJ49)
CAETDAGNQFYF

SEQ ID NO: 573572 - protein, 13 aa, Homo sapiens
  CDR3 for beta chain variable domain of TCR clone 286786 (TRBV2, TRBJ2-1)
CASSIGTGLEQSF

SEQ ID NO: 573573 - protein, 13 aa, Homo sapiens
  CDR3 for alpha chain variable domain of TCR clone 286787 (TRAV13-1, TRAJ21)
CAASIYNFNKFYF

SEQ ID NO: 573574 - protein, 20 aa, Homo sapiens
  CDR3 for beta chain variable domain of TCR clone 286787 (TRBV7-8, TRBJ2-2)
CASSHLFPGPTIHITGELFF

SEQ ID NO: 573575 - protein, 14 aa, Homo sapiens
  CDR3 for alpha chain variable domain of TCR clone 286788 (TRAV6, TRAJ6)
CALDRAEGSYIPTF

SEQ ID NO: 573576 - protein, 13 aa, Homo sapiens
  CDR3 for beta chain variable domain of TCR clone 286788 (TRBV10-2, TRBJ2-5)
CASSEGGKETQYF

SEQ ID NO: 573577 - protein, 16 aa, Homo sapiens
  CDR3 for alpha chain variable domain of TCR clone 286789 (TRAV23/DV6, TRAJ3)
CAARAPQQCFQDNLWL

SEQ ID NO: 573578 - protein, 17 aa, Homo sapiens
  CDR3 for beta chain variable domain of TCR clone 286789 (TRBV7-9, TRBJ2-3)
CASSPTVAGDLTDTQYF

SEQ ID NO: 573579 - protein, 13 aa, Homo sapiens
  CDR3 for alpha chain variable domain of TCR clone 286790 (TRAV16, TRAJ9)
CALIRTGGFKTIF

SEQ ID NO: 573580 - protein, 15 aa, Homo sapiens
  CDR3 for beta chain variable domain of TCR clone 286790 (TRBV20-1, TRBJ2-7)
CSARDRVSGMDEQYF

SEQ ID NO: 573581 - protein, 16 aa, Homo sapiens
  CDR3 for alpha chain variable domain of TCR clone 286791 (TRAV30, TRAJ24)
CGSEIVDADSWGKFQF

SEQ ID NO: 573582 - protein, 17 aa, Homo sapiens
  CDR3 for beta chain variable domain of TCR clone 286791 (TRBV20-1, TRBJ2-1)
CSAPPRLAGTRYNEQFF

SEQ ID NO: 573583 - protein, 15 aa, Homo sapiens
  CDR3 for alpha chain variable domain of TCR clone 286792 (TRAV23/DV6, TRAJ32)
CAASKMGGATNKLIF

SEQ ID NO: 573584 - protein, 17 aa, Homo sapiens
  CDR3 for beta chain variable domain of TCR clone 286792 (TRBV11-2, TRBJ2-3)
CQQLRGASRGAPNTQYF

SEQ ID NO: 573585 - protein, 14 aa, Homo sapiens
  CDR3 for alpha chain variable domain of TCR clone 286793 (TRAV12-1, TRAJ54)
CVVNIYQGAQKLVF

SEQ ID NO: 573586 - protein, 13 aa, Homo sapiens
  CDR3 for beta chain variable domain of TCR clone 286793 (TRBV7-9, TRBJ1-2)
CASSLKQNYGYTF

SEQ ID NO: 573587 - protein, 16 aa, Homo sapiens
  CDR3 for alpha chain variable domain of TCR clone 286794 (TRAV12-2, TRAJ10)
CAVNRVLTGGGNKLTY

SEQ ID NO: 573588 - protein, 12 aa, Homo sapiens
  CDR3 for beta chain variable domain of TCR clone 286794 (TRBV28, TRBJ2-7)
CASSFSSYEQYF

SEQ ID NO: 573589 - protein, 14 aa, Homo sapiens
  CDR3 for alpha chain variable domain of TCR clone 286795 (TRAV1-2, TRAJ16)
CAVNRFSDGQKLLF

SEQ ID NO: 573590 - protein, 13 aa, Homo sapiens
  CDR3 for beta chain variable domain of TCR clone 286795 (TRBV11-2, TRBJ2-1)
CASSVGLAGGRFF

SEQ ID NO: 573591 - protein, 14 aa, Homo sapiens
  CDR3 for alpha chain variable domain of TCR clone 286796 (TRAV17, TRAJ4)
CATVPSGGSNKLIF

SEQ ID NO: 573592 - protein, 15 aa, Homo sapiens
  CDR3 for beta chain variable domain of TCR clone 286796 (TRBV7-8, TRBJ1-6)
CASSLVEGAYSPLHF

SEQ ID NO: 573593 - protein, 15 aa, Homo sapiens
  CDR3 for alpha chain variable domain of TCR clone 286797 (TRAV3, TRAJ5)
CAVRALDTGRRALTF

SEQ ID NO: 573594 - protein, 13 aa, Homo sapiens
  CDR3 for beta chain variable domain of TCR clone 286797 (TRBV12-4, TRBJ2-7)
CASSPTEAYEQYF

SEQ ID NO: 573595 - protein, 12 aa, Homo sapiens
  CDR3 for alpha chain variable domain of TCR clone 286798 (TRAV12-3, TRAJ34)
CSMGYNTDKLIF

SEQ ID NO: 573596 - protein, 15 aa, Homo sapiens
  CDR3 for beta chain variable domain of TCR clone 286798 (TRBV28, TRBJ2-1)
CASSIIAGGRSEQFF

SEQ ID NO: 573597 - protein, 11 aa, Homo sapiens
  CDR3 for alpha chain variable domain of TCR clone 286799 (TRAV12-3, TRAJ27)
CAMANAGKSTF

SEQ ID NO: 573598 - protein, 17 aa, Homo sapiens
  CDR3 for beta chain variable domain of TCR clone 286799 (TRBV13, TRBJ2-3)
CACSLSRVAGGRNTQYF

SEQ ID NO: 573599 - protein, 16 aa, Homo sapiens
  CDR3 for alpha chain variable domain of TCR clone 286800 (TRAV23/DV6, TRAJ52)
CAARPSGGTRYGKLTF

SEQ ID NO: 573600 - protein, 14 aa, Homo sapiens
  CDR3 for beta chain variable domain of TCR clone 286800 (TRBV20-1, TRBJ2-3)
CSARDASSTDTQYF

SEQ ID NO: 573601 - protein, 14 aa, Homo sapiens
  CDR3 for alpha chain variable domain of TCR clone 286801 (TRAV26-1, TRAJ34)
CIVRVAYNTDKLIF

SEQ ID NO: 573602 - protein, 13 aa, Homo sapiens
  CDR3 for beta chain variable domain of TCR clone 286801 (TRBV20-1, TRBJ2-5)
CSAREAFQETQYF

SEQ ID NO: 573603 - protein, 14 aa, Homo sapiens
  CDR3 for alpha chain variable domain of TCR clone 286802 (TRAV2, TRAJ37)
CAVDFTSNTGKLIF

SEQ ID NO: 573604 - protein, 13 aa, Homo sapiens
  CDR3 for beta chain variable domain of TCR clone 286802 (TRBV7-2, TRBJ2-7)
CASSSPSGSEQYF

SEQ ID NO: 573605 - protein, 12 aa, Homo sapiens
  CDR3 for alpha chain variable domain of TCR clone 286803 (TRAV12-2, TRAJ10)
WGVTGGGNKLTF

SEQ ID NO: 573606 - protein, 14 aa, Homo sapiens
  CDR3 for beta chain variable domain of TCR clone 286803 (TRBV19, TRBJ2-3)
CASSAPTGTDTQYF

SEQ ID NO: 573607 - protein, 13 aa, Homo sapiens
  CDR3 for alpha chain variable domain of TCR clone 286804 (TRAV20, TRAJ37)
YAGCSSNAGKLIF

SEQ ID NO: 573608 - protein, 11 aa, Homo sapiens
  CDR3 for beta chain variable domain of TCR clone 286804 (TRBV12-4, TRBJ2-3)
CASTATDTQYF

SEQ ID NO: 573609 - protein, 16 aa, Homo sapiens
  CDR3 for alpha chain variable domain of TCR clone 286805 (TRAV30, TRAJ24)
CGTEIVDADSWGEFQF

SEQ ID NO: 573610 - protein, 15 aa, Homo sapiens
  CDR3 for beta chain variable domain of TCR clone 286805 (TRBV20-1, TRBJ2-7)
CSARDRVSGMDEQYF

SEQ ID NO: 573611 - protein, 11 aa, Homo sapiens
  CDR3 for alpha chain variable domain of TCR clone 286806 (TRAV21, TRAJ39)
LLVNAGNMLTF

SEQ ID NO: 573612 - protein, 18 aa, Homo sapiens
  CDR3 for beta chain variable domain of TCR clone 286806 (TRBV7-2, TRBJ2-7)
CASSLSGRGLAGGYKQYF

SEQ ID NO: 573613 - protein, 15 aa, Homo sapiens
  CDR3 for alpha chain variable domain of TCR clone 286807 (TRAV17, TRAJ34)
CATDPRMVDTDKPIF

SEQ ID NO: 573614 - protein, 12 aa, Homo sapiens
  CDR3 for beta chain variable domain of TCR clone 286807 (TRBV10-2, TRBJ2-3)
CASSEGPGPRYF

SEQ ID NO: 573615 - protein, 14 aa, Homo sapiens
  CDR3 for alpha chain variable domain of TCR clone 286808 (TRAV2, TRAJ37)
CAVDFTSNTGKLIF

SEQ ID NO: 573616 - protein, 15 aa, Homo sapiens
  CDR3 for beta chain variable domain of TCR clone 286808 (TRBV7-8, TRBJ2-3)
CASSLMSGNTDTQYF

SEQ ID NO: 573617 - protein, 13 aa, Homo sapiens
  CDR3 for alpha chain variable domain of TCR clone 286809 (TRAV38-2/DV8, TRAJ34)
CAYRNYNTDKLIY

SEQ ID NO: 573618 - protein, 14 aa, Homo sapiens
  CDR3 for beta chain variable domain of TCR clone 286809 (TRBV7-6, TRBJ2-3)
CASSLGTVTDTQYF

SEQ ID NO: 573619 - protein, 23 aa, Homo sapiens
  CDR3 for alpha chain variable domain of TCR clone 286810 (TRAV26-1, TRAJ38)
CIADNAGNNHIQNPDPAVYQLRD

SEQ ID NO: 573620 - protein, 15 aa, Homo sapiens
  CDR3 for beta chain variable domain of TCR clone 286810 (TRBV18, TRBJ2-7)
CASSPSSTGNYEQYF

SEQ ID NO: 573621 - protein, 17 aa, Homo sapiens
  CDR3 for alpha chain variable domain of TCR clone 286811 (TRAV8-6, TRAJ58)
CAVSSWVGETSGSRLTC

SEQ ID NO: 573622 - protein, 15 aa, Homo sapiens
  CDR3 for beta chain variable domain of TCR clone 286811 (TRBV20-1, TRBJ2-7)
CSARDRVSGMDEQYF

SEQ ID NO: 573623 - protein, 15 aa, Homo sapiens
  CDR3 for alpha chain variable domain of TCR clone 286812 (TRAV35, TRAJ50)
CAGQLRKTSYDKVIF

SEQ ID NO: 573624 - protein, 12 aa, Homo sapiens
  CDR3 for beta chain variable domain of TCR clone 286812 (TRBV5-1, TRBJ2-5)
CASSLGIETQYF

SEQ ID NO: 573625 - protein, 18 aa, Homo sapiens
  CDR3 for alpha chain variable domain of TCR clone 286813 (TRAV21, TRAJ52)
CAGRPSPAGGASYGKLTF

SEQ ID NO: 573626 - protein, 17 aa, Homo sapiens
  CDR3 for beta chain variable domain of TCR clone 286813 (TRBV13, TRBJ2-3)
CASSLSRVAGGRNTQYF

SEQ ID NO: 573627 - protein, 11 aa, Homo sapiens
  CDR3 for alpha chain variable domain of TCR clone 286814 (TRAV1-2, TRAJ40)
CAVPGTYKYIF

SEQ ID NO: 573628 - protein, 12 aa, Homo sapiens
  CDR3 for beta chain variable domain of TCR clone 286814 (TRBV7-9, TRBJ1-4)
CASSTDREKLFF

SEQ ID NO: 573629 - protein, 17 aa, Homo sapiens
  CDR3 for alpha chain variable domain of TCR clone 286815 (TRAV3, TRAJ6)
CAVRDGPRAGGSYIPTF

SEQ ID NO: 573630 - protein, 22 aa, Homo sapiens
  CDR3 for beta chain variable domain of TCR clone 286815 (TRBV7-8, TRBJ2-7)
CASSRVPLRGPSSGLFSYEQYF

SEQ ID NO: 573631 - protein, 11 aa, Homo sapiens
  CDR3 for alpha chain variable domain of TCR clone 286816 (TRAV35, TRAJ34)
CWARNTDKLIF

SEQ ID NO: 573632 - protein, 13 aa, Homo sapiens
  CDR3 for beta chain variable domain of TCR clone 286816 (TRBV7-2, TRBJ1-5)
CASSFARNQPQHF

SEQ ID NO: 573633 - protein, 10 aa, Homo sapiens
  CDR3 for alpha chain variable domain of TCR clone 286817 (TRAV8-3, TRAJ20)
CAVGYYKLSF

SEQ ID NO: 573634 - protein, 15 aa, Homo sapiens
  CDR3 for beta chain variable domain of TCR clone 286817 (TRBV7-9, TRBJ1-4)
CASSRTGGFNEKLFF

SEQ ID NO: 573635 - protein, 10 aa, Homo sapiens
  CDR3 for alpha chain variable domain of TCR clone 286818 (TRAV3, TRAJ30)
FAVREIEIIF

SEQ ID NO: 573636 - protein, 12 aa, Homo sapiens
  CDR3 for beta chain variable domain of TCR clone 286818 (TRBV20-1, TRBJ2-3)
CSADGAGDTQYF

SEQ ID NO: 573637 - protein, 14 aa, Homo sapiens
  CDR3 for alpha chain variable domain of TCR clone 286819 (TRAV12-3, TRAJ13)
CAMRNSGGYQKVTF

SEQ ID NO: 573638 - protein, 15 aa, Homo sapiens
  CDR3 for beta chain variable domain of TCR clone 286819 (TRBV6-1, TRBJ2-3)
CASSERGGITDTQYF

SEQ ID NO: 573639 - protein, 14 aa, Homo sapiens
  CDR3 for alpha chain variable domain of TCR clone 286820 (TRAV21, TRAJ15)
CAVSLNQAVTALIF

SEQ ID NO: 573640 - protein, 11 aa, Homo sapiens
  CDR3 for beta chain variable domain of TCR clone 286820 (TRBV20-1, TRBJ2-7)
CSARTSYEQYF

SEQ ID NO: 573641 - protein, 13 aa, Homo sapiens
  CDR3 for alpha chain variable domain of TCR clone 286821 (TRAV12-3, TRAJ7)
CAMTPYGNNRLAF

SEQ ID NO: 573642 - protein, 15 aa, Homo sapiens
  CDR3 for beta chain variable domain of TCR clone 286821 (TRBV11-3, TRBJ2-3)
CASLKDGREGDTQYF

SEQ ID NO: 573643 - protein, 15 aa, Homo sapiens
  CDR3 for alpha chain variable domain of TCR clone 286822 (TRAV12-3, TRAJ6)
CAMSATTGGSYIPTF

SEQ ID NO: 573644 - protein, 13 aa, Homo sapiens
  CDR3 for beta chain variable domain of TCR clone 286822 (TRBV20-1, TRBJ1-6)
CSAPLGVGSPLHF

SEQ ID NO: 573645 - protein, 13 aa, Homo sapiens
  CDR3 for alpha chain variable domain of TCR clone 286823 (TRAV12-2, TRAJ16)
CVVNGPDGQKLLF

SEQ ID NO: 573646 - protein, 15 aa, Homo sapiens
  CDR3 for beta chain variable domain of TCR clone 286823 (TRBV6-3, TRBJ2-7)
CASSSPGTVFYEQYF

SEQ ID NO: 573647 - protein, 15 aa, Homo sapiens
  CDR3 for alpha chain variable domain of TCR clone 286824 (TRAV3, TRAJ5)
CAVRDPDTGRRALTF

SEQ ID NO: 573648 - protein, 14 aa, Homo sapiens
  CDR3 for beta chain variable domain of TCR clone 286824 (TRBV25-1, TRBJ1-1)
CASTHLGGNTEAFF

SEQ ID NO: 573649 - protein, 10 aa, Homo sapiens
  CDR3 for alpha chain variable domain of TCR clone 286825 (TRAV1-1, TRAJ9)
CAAKNTRLQN

SEQ ID NO: 573650 - protein, 14 aa, Homo sapiens
  CDR3 for beta chain variable domain of TCR clone 286825 (TRBV20-1, TRBJ2-1)
CSAQIGGSANEQFF

SEQ ID NO: 573651 - protein, 14 aa, Homo sapiens
  CDR3 for alpha chain variable domain of TCR clone 286826 (TRAV12-1, TRAJ23)
CVVKPGNQGGKLIF

SEQ ID NO: 573652 - protein, 16 aa, Homo sapiens
  CDR3 for beta chain variable domain of TCR clone 286826 (TRBV7-9, TRBJ1-2)
CASSLGFSSGEDGYTF

SEQ ID NO: 573653 - protein, 14 aa, Homo sapiens
  CDR3 for alpha chain variable domain of TCR clone 286827 (TRAV29/DV5, TRAJ22)
CSASATGSARQLTF

SEQ ID NO: 573654 - protein, 14 aa, Homo sapiens
  CDR3 for beta chain variable domain of TCR clone 286827 (TRBV19, TRBJ2-1)
CASSPGLAPNEQFF

SEQ ID NO: 573655 - protein, 16 aa, Homo sapiens
  CDR3 for alpha chain variable domain of TCR clone 286828 (TRAV8-3, TRAJ44)
CAVGASNTGMASKLTF

SEQ ID NO: 573656 - protein, 15 aa, Homo sapiens
  CDR3 for beta chain variable domain of TCR clone 286828 (TRBV27, TRBJ1-5)
CASTFNRGSNQPQHF

SEQ ID NO: 573657 - protein, 12 aa, Homo sapiens
  CDR3 for alpha chain variable domain of TCR clone 286829 (TRAV16, TRAJ10)
CSPTGGGNKLTF

SEQ ID NO: 573658 - protein, 12 aa, Homo sapiens
  CDR3 for beta chain variable domain of TCR clone 286829 (TRBV11-3, TRBJ1-1)
CASSHRQGEAFF

SEQ ID NO: 573659 - protein, 13 aa, Homo sapiens
  CDR3 for alpha chain variable domain of TCR clone 286830 (TRAV21, TRAJ27)
CAARPGNAGKSTF

SEQ ID NO: 573660 - protein, 15 aa, Homo sapiens
  CDR3 for beta chain variable domain of TCR clone 286830 (TRBV7-6, TRBJ2-1)
CASSSLAGEGNEQFF

SEQ ID NO: 573661 - protein, 14 aa, Homo sapiens
  CDR3 for alpha chain variable domain of TCR clone 286831 (TRAV23/DV6, TRAJ6)
CAASRPGGSYIPTF

SEQ ID NO: 573662 - protein, 17 aa, Homo sapiens
  CDR3 for beta chain variable domain of TCR clone 286831 (TRBV20-1, TRBJ2-1)
CSASASGLAGSYNEQFF

SEQ ID NO: 573663 - protein, 14 aa, Homo sapiens
  CDR3 for alpha chain variable domain of TCR clone 286832 (TRAV29/DV5, TRAJ49)
CAASAQNTGNQFYF

SEQ ID NO: 573664 - protein, 16 aa, Homo sapiens
  CDR3 for beta chain variable domain of TCR clone 286832 (TRBV12-4, TRBJ1-5)
CASRQPVEGSKQPQHF

SEQ ID NO: 573665 - protein, 16 aa, Homo sapiens
  CDR3 for alpha chain variable domain of TCR clone 286833 (TRAV4, TRAJ23)
CLVGDMVSNQGGKLIF

SEQ ID NO: 573666 - protein, 14 aa, Homo sapiens
  CDR3 for beta chain variable domain of TCR clone 286833 (TRBV4-1, TRBJ2-2)
CASSQAVNTGELFF

SEQ ID NO: 573667 - protein, 12 aa, Homo sapiens
  CDR3 for alpha chain variable domain of TCR clone 286834 (TRAV13-1, TRAJ42)
VNYGGSQGNLIF

SEQ ID NO: 573668 - protein, 15 aa, Homo sapiens
  CDR3 for beta chain variable domain of TCR clone 286834 (TRBV20-1, TRBJ2-1)
CSASSAGSSYNEQFC

SEQ ID NO: 573669 - protein, 11 aa, Homo sapiens
  CDR3 for alpha chain variable domain of TCR clone 286835 (TRAV12-3, TRAJ27)
CAMANAGKSTF

SEQ ID NO: 573670 - protein, 14 aa, Homo sapiens
  CDR3 for beta chain variable domain of TCR clone 286835 (TRBV28, TRBJ1-3)
CASSFRDRVNTIYF

SEQ ID NO: 573671 - protein, 11 aa, Homo sapiens
  CDR3 for alpha chain variable domain of TCR clone 286836 (TRAV1-1, TRAJ23)
CAVRQGGKLIF

SEQ ID NO: 573672 - protein, 13 aa, Homo sapiens
  CDR3 for beta chain variable domain of TCR clone 286836 (TRBV7-3, TRBJ1-1)
CASSQDWVAEAFF

SEQ ID NO: 573673 - protein, 15 aa, Homo sapiens
  CDR3 for alpha chain variable domain of TCR clone 286837 (TRAV8-4, TRAJ3)
CAVTGENLVQQCFQD

SEQ ID NO: 573674 - protein, 14 aa, Homo sapiens
  CDR3 for beta chain variable domain of TCR clone 286837 (TRBV16, TRBJ1-1)
CASSQAGPNTEAFF

SEQ ID NO: 573675 - protein, 10 aa, Homo sapiens
  CDR3 for alpha chain variable domain of TCR clone 286838 (TRAV2, TRAJ26)
CAVVGLWSEF

SEQ ID NO: 573676 - protein, 15 aa, Homo sapiens
  CDR3 for beta chain variable domain of TCR clone 286838 (TRBV11-3, TRBJ2-1)
CASSLGTSGLNEQFF

SEQ ID NO: 573677 - protein, 14 aa, Homo sapiens
  CDR3 for alpha chain variable domain of TCR clone 286839 (TRAV12-3, TRAJ10)
SHLPLPGGGNKLTF

SEQ ID NO: 573678 - protein, 14 aa, Homo sapiens
  CDR3 for beta chain variable domain of TCR clone 286839 (TRBV12-5, TRBJ2-5)
CASGSRTHQETQYF

SEQ ID NO: 573679 - protein, 11 aa, Homo sapiens
  CDR3 for alpha chain variable domain of TCR clone 286840 (TRAV1-1, TRAJ30)
CAQNRDDKIIF

SEQ ID NO: 573680 - protein, 15 aa, Homo sapiens
  CDR3 for beta chain variable domain of TCR clone 286840 (TRBV6-5, TRBJ2-1)
CASSYDAGAGNEQFF

SEQ ID NO: 573681 - protein, 14 aa, Homo sapiens
  CDR3 for alpha chain variable domain of TCR clone 286841 (TRAV1-2, TRAJ16)
CAVNRFSDGQKMLL

SEQ ID NO: 573682 - protein, 13 aa, Homo sapiens
  CDR3 for beta chain variable domain of TCR clone 286841 (TRBV7-9, TRBJ2-3)
CASSPGSTDTQYF

SEQ ID NO: 573683 - protein, 18 aa, Homo sapiens
  CDR3 for alpha chain variable domain of TCR clone 286842 (TRAV12-3, TRAJ52)
CAMSVGGAGGTSDGKLTF

SEQ ID NO: 573684 - protein, 16 aa, Homo sapiens
  CDR3 for beta chain variable domain of TCR clone 286842 (TRBV7-9, TRBJ1-2)
CASNISLDRGGYGYTF

SEQ ID NO: 573685 - protein, 16 aa, Homo sapiens
  CDR3 for alpha chain variable domain of TCR clone 286843 (TRAV16, TRAJ4)
CALSRMFSVGYNKLIF

SEQ ID NO: 573686 - protein, 14 aa, Homo sapiens
  CDR3 for beta chain variable domain of TCR clone 286843 (TRBV7-2, TRBJ2-5)
CASSPRGSSETQYF

SEQ ID NO: 573687 - protein, 11 aa, Homo sapiens
  CDR3 for alpha chain variable domain of TCR clone 286844 (TRAV12-3, TRAJ17)
CKTLTGNKLTF

SEQ ID NO: 573688 - protein, 20 aa, Homo sapiens
  CDR3 for beta chain variable domain of TCR clone 286844 (TRBV7-8, TRBJ2-2)
CASSHLFPGPTIHITGELFF

SEQ ID NO: 573689 - protein, 15 aa, Homo sapiens
  CDR3 for alpha chain variable domain of TCR clone 286845 (TRAV4, TRAJ10)
CLVGDGSGGGNQLTF

SEQ ID NO: 573690 - protein, 15 aa, Homo sapiens
  CDR3 for beta chain variable domain of TCR clone 286845 (TRBV27, TRBJ2-3)
CASSSLAGVIDTQYF

SEQ ID NO: 573691 - protein, 16 aa, Homo sapiens
  CDR3 for alpha chain variable domain of TCR clone 286846 (TRAV1-1, TRAJ29)
CAVRSTRNAGNTPLVF

SEQ ID NO: 573692 - protein, 12 aa, Homo sapiens
  CDR3 for beta chain variable domain of TCR clone 286846 (TRBV11-2, TRBJ2-1)
CASSTGNNEQFF

SEQ ID NO: 573693 - protein, 12 aa, Homo sapiens
  CDR3 for alpha chain variable domain of TCR clone 286847 (TRAV21, TRAJ43)
CAVSWNNNVMRF

SEQ ID NO: 573694 - protein, 12 aa, Homo sapiens
  CDR3 for beta chain variable domain of TCR clone 286847 (TRBV12-4, TRBJ2-7)
CASSLGGYEQYF

SEQ ID NO: 573695 - protein, 16 aa, Homo sapiens
  CDR3 for alpha chain variable domain of TCR clone 286848 (TRAV30, TRAJ24)
CGTEIVDADSWGTFQC

SEQ ID NO: 573696 - protein, 14 aa, Homo sapiens
  CDR3 for beta chain variable domain of TCR clone 286848 (TRBV12-5, TRBJ2-5)
CASGSRTHQETQYF

SEQ ID NO: 573697 - protein, 15 aa, Homo sapiens
  CDR3 for alpha chain variable domain of TCR clone 286849 (TRAV12-2, TRAJ52)
CAVVLVVLAMESLHL

SEQ ID NO: 573698 - protein, 13 aa, Homo sapiens
  CDR3 for beta chain variable domain of TCR clone 286849 (TRBV11-2, TRBJ2-1)
CASSLRLTHEQFF

SEQ ID NO: 573699 - protein, 10 aa, Homo sapiens
  CDR3 for alpha chain variable domain of TCR clone 286850 (TRAV30, TRAJ48)
CGIGNEKLTF

SEQ ID NO: 573700 - protein, 17 aa, Homo sapiens
  CDR3 for beta chain variable domain of TCR clone 286850 (TRBV28, TRBJ2-5)
CASSTTEGDALQETQYF

SEQ ID NO: 573701 - protein, 13 aa, Homo sapiens
  CDR3 for alpha chain variable domain of TCR clone 286851 (TRAV3, TRAJ27)
CAVRPLGAGKSTF

SEQ ID NO: 573702 - protein, 14 aa, Homo sapiens
  CDR3 for beta chain variable domain of TCR clone 286851 (TRBV7-9, TRBJ2-1)
CASSLEGGYNEQFF

SEQ ID NO: 573703 - protein, 15 aa, Homo sapiens
  CDR3 for alpha chain variable domain of TCR clone 286852 (TRAV4, TRAJ26)
CLVGGIDNYGQNFVF

SEQ ID NO: 573704 - protein, 13 aa, Homo sapiens
  CDR3 for beta chain variable domain of TCR clone 286852 (TRBV20-1, TRBJ2-5)
CSASLTGRETQDF

SEQ ID NO: 573705 - protein, 16 aa, Homo sapiens
  CDR3 for alpha chain variable domain of TCR clone 286853 (TRAV27, TRAJ53)
CAAPEGSGGSNYKLTF

SEQ ID NO: 573706 - protein, 15 aa, Homo sapiens
  CDR3 for beta chain variable domain of TCR clone 286853 (TRBV20-1, TRBJ1-1)
CSASRGVTGNTEAFF

SEQ ID NO: 573707 - protein, 14 aa, Homo sapiens
  CDR3 for alpha chain variable domain of TCR clone 286854 (TRAV2, TRAJ23)
CAVGLRNRGGKLIF

SEQ ID NO: 573708 - protein, 13 aa, Homo sapiens
  CDR3 for beta chain variable domain of TCR clone 286854 (TRBV12-4, TRBJ2-5)
CDSSPGTEETQYF

SEQ ID NO: 573709 - protein, 15 aa, Homo sapiens
  CDR3 for alpha chain variable domain of TCR clone 286855 (TRAV12-1, TRAJ44)
CVVFVNTGTASKLTF

SEQ ID NO: 573710 - protein, 15 aa, Homo sapiens
  CDR3 for beta chain variable domain of TCR clone 286855 (TRBV7-9, TRBJ1-6)
CASSSATADNSPLHF

SEQ ID NO: 573711 - protein, 13 aa, Homo sapiens
  CDR3 for alpha chain variable domain of TCR clone 286856 (TRAV20, TRAJ37)
CAGCSSNTGKLIF

SEQ ID NO: 573712 - protein, 11 aa, Homo sapiens
  CDR3 for beta chain variable domain of TCR clone 286856 (TRBV12-4, TRBJ2-3)
CASTATDTQYY

SEQ ID NO: 573713 - protein, 13 aa, Homo sapiens
  CDR3 for alpha chain variable domain of TCR clone 286857 (TRAV34, TRAJ33)
CGADMNSNYQLIW

SEQ ID NO: 573714 - protein, 19 aa, Homo sapiens
  CDR3 for beta chain variable domain of TCR clone 286857 (TRBV11-2, TRBJ2-3)
CASSAPRAGGNPSTDTQYF

SEQ ID NO: 573715 - protein, 11 aa, Homo sapiens
  CDR3 for alpha chain variable domain of TCR clone 286858 (TRAV1-2, TRAJ20)
CAVSNDYKLCF

SEQ ID NO: 573716 - protein, 15 aa, Homo sapiens
  CDR3 for beta chain variable domain of TCR clone 286858 (TRBV5-1, TRBJ2-2)
CASSSQGGNTGELFF

SEQ ID NO: 573717 - protein, 17 aa, Homo sapiens
  CDR3 for alpha chain variable domain of TCR clone 286859 (TRAV3, TRAJ6)
CAVGDGPRAGGSYIPTF

SEQ ID NO: 573718 - protein, 16 aa, Homo sapiens
  CDR3 for beta chain variable domain of TCR clone 286859 (TRBV7-3, TRBJ2-3)
CASSLSGYRPEDTQYF

SEQ ID NO: 573719 - protein, 12 aa, Homo sapiens
  CDR3 for alpha chain variable domain of TCR clone 286860 (TRAV25, TRAJ11)
CAGASGYSTLTF

SEQ ID NO: 573720 - protein, 14 aa, Homo sapiens
  CDR3 for beta chain variable domain of TCR clone 286860 (TRBV7-2, TRBJ2-7)
CASSPKTSFYEQYF

SEQ ID NO: 573721 - protein, 14 aa, Homo sapiens
  CDR3 for alpha chain variable domain of TCR clone 286861 (TRAV26-1, TRAJ48)
CIVRVGVGNEKLTF

SEQ ID NO: 573722 - protein, 14 aa, Homo sapiens
  CDR3 for beta chain variable domain of TCR clone 286861 (TRBV19, TRBJ2-1)
CASPTFVLSGEQFF

SEQ ID NO: 573723 - protein, 14 aa, Homo sapiens
  CDR3 for alpha chain variable domain of TCR clone 286862 (TRAV38-1, TRAJ45)
CASHSVGGADGLTF

SEQ ID NO: 573724 - protein, 13 aa, Homo sapiens
  CDR3 for beta chain variable domain of TCR clone 286862 (TRBV10-3, TRBJ1-2)
CAISELDSYGYTF

SEQ ID NO: 573725 - protein, 15 aa, Homo sapiens
  CDR3 for alpha chain variable domain of TCR clone 286863 (TRAV35, TRAJ40)
CAGQLGTSGTYKYIF

SEQ ID NO: 573726 - protein, 14 aa, Homo sapiens
  CDR3 for beta chain variable domain of TCR clone 286863 (TRBV7-3, TRBJ2-1)
CASILAGGTNEQLF

SEQ ID NO: 573727 - protein, 14 aa, Homo sapiens
  CDR3 for alpha chain variable domain of TCR clone 286864 (TRAV8-1, TRAJ5)
CAVRTDTGRRALTF

SEQ ID NO: 573728 - protein, 14 aa, Homo sapiens
  CDR3 for beta chain variable domain of TCR clone 286864 (TRBV12-5, TRBJ2-5)
CASGSRTHQETQYF

SEQ ID NO: 573729 - protein, 11 aa, Homo sapiens
  CDR3 for alpha chain variable domain of TCR clone 286865 (TRAV21, TRAJ23)
CAPQRRGKLIF

SEQ ID NO: 573730 - protein, 14 aa, Homo sapiens
  CDR3 for beta chain variable domain of TCR clone 286865 (TRBV12-4, TRBJ1-1)
CASTLTGHDTEAFF

SEQ ID NO: 573731 - protein, 12 aa, Homo sapiens
  CDR3 for alpha chain variable domain of TCR clone 286866 (TRAV23/DV6, TRAJ33)
CAAEDSNYQLIW

SEQ ID NO: 573732 - protein, 13 aa, Homo sapiens
  CDR3 for beta chain variable domain of TCR clone 286866 (TRBV19, TRBJ2-7)
CARSAGHGYEQYF

SEQ ID NO: 573733 - protein, 13 aa, Homo sapiens
  CDR3 for alpha chain variable domain of TCR clone 286867 (TRAV12-2, TRAJ13)
CAAARGGYQKVTF

SEQ ID NO: 573734 - protein, 13 aa, Homo sapiens
  CDR3 for beta chain variable domain of TCR clone 286867 (TRBV24-1, TRBJ2-2)
CATSDWSTGELFF

SEQ ID NO: 573735 - protein, 13 aa, Homo sapiens
  CDR3 for alpha chain variable domain of TCR clone 286868 (TRAV1-2, TRAJ7)
CAGPYYGNNRLAF

SEQ ID NO: 573736 - protein, 13 aa, Homo sapiens
  CDR3 for beta chain variable domain of TCR clone 286868 (TRBV18, TRBJ2-3)
CASSTGRTDTQYF

SEQ ID NO: 573737 - protein, 15 aa, Homo sapiens
  CDR3 for alpha chain variable domain of TCR clone 286869 (TRAV13-2, TRAJ53)
CAERGSRGSNYKLTF

SEQ ID NO: 573738 - protein, 14 aa, Homo sapiens
  CDR3 for beta chain variable domain of TCR clone 286869 (TRBV4-1, TRBJ2-2)
CASSHYPDTGELFF

SEQ ID NO: 573739 - protein, 17 aa, Homo sapiens
  CDR3 for alpha chain variable domain of TCR clone 286870 (TRAV3, TRAJ6)
CAGRDGPRAGGSYIPTC

SEQ ID NO: 573740 - protein, 14 aa, Homo sapiens
  CDR3 for beta chain variable domain of TCR clone 286870 (TRBV7-2, TRBJ2-7)
CASSPKTSFYEQYF

SEQ ID NO: 573741 - protein, 14 aa, Homo sapiens
  CDR3 for alpha chain variable domain of TCR clone 286871 (TRAV12-2, TRAJ6)
CASKWGGGGYIPTL

SEQ ID NO: 573742 - protein, 13 aa, Homo sapiens
  CDR3 for beta chain variable domain of TCR clone 286871 (TRBV2, TRBJ1-1)
CASSEGGNTEAFF

SEQ ID NO: 573743 - protein, 16 aa, Homo sapiens
  CDR3 for alpha chain variable domain of TCR clone 286872 (TRAV21, TRAJ33)
CAVSPASMDSNYQLIW

SEQ ID NO: 573744 - protein, 14 aa, Homo sapiens
  CDR3 for beta chain variable domain of TCR clone 286872 (TRBV7-2, TRBJ2-3)
CASRRGLAADTQYF

SEQ ID NO: 573745 - protein, 13 aa, Homo sapiens
  CDR3 for alpha chain variable domain of TCR clone 286873 (TRAV3, TRAJ21)
CAVREPDFNKFYF

SEQ ID NO: 573746 - protein, 20 aa, Homo sapiens
  CDR3 for beta chain variable domain of TCR clone 286873 (TRBV7-9, TRBJ2-1)
CASSSPRAPRTRSSYNEQFF

SEQ ID NO: 573747 - protein, 15 aa, Homo sapiens
  CDR3 for alpha chain variable domain of TCR clone 286874 (TRAV12-2, TRAJ43)
CAFDMRFGAGTRLTV

SEQ ID NO: 573748 - protein, 15 aa, Homo sapiens
  CDR3 for beta chain variable domain of TCR clone 286874 (TRBV4-3, TRBJ2-7)
CASSQGGRGIYEQYF

SEQ ID NO: 573749 - protein, 18 aa, Homo sapiens
  CDR3 for alpha chain variable domain of TCR clone 286875 (TRAV1-2, TRAJ18)
CAVRDMGDRGSILGRLYF

SEQ ID NO: 573750 - protein, 12 aa, Homo sapiens
  CDR3 for beta chain variable domain of TCR clone 286875 (TRBV12-4, TRBJ2-1)
CASSPGRNEQFF

SEQ ID NO: 573751 - protein, 11 aa, Homo sapiens
  CDR3 for alpha chain variable domain of TCR clone 286876 (TRAV12-1, TRAJ30)
CVVNGQDKIFF

SEQ ID NO: 573752 - protein, 12 aa, Homo sapiens
  CDR3 for beta chain variable domain of TCR clone 286876 (TRBV27, TRBJ2-2)
CASKLFTGELVL

SEQ ID NO: 573753 - protein, 13 aa, Homo sapiens
  CDR3 for alpha chain variable domain of TCR clone 286877 (TRAV2, TRAJ12)
CAVGADSSYKLIF

SEQ ID NO: 573754 - protein, 14 aa, Homo sapiens
  CDR3 for beta chain variable domain of TCR clone 286877 (TRBV28, TRBJ2-3)
CASSFVSGTDTQYF

SEQ ID NO: 573755 - protein, 13 aa, Homo sapiens
  CDR3 for alpha chain variable domain of TCR clone 286878 (TRAV3, TRAJ21)
CAVREPDFNKFYF

SEQ ID NO: 573756 - protein, 12 aa, Homo sapiens
  CDR3 for beta chain variable domain of TCR clone 286878 (TRBV11-2, TRBJ2-5)
CASSLGQETQYF

SEQ ID NO: 573757 - protein, 14 aa, Homo sapiens
  CDR3 for alpha chain variable domain of TCR clone 286879 (TRAV12-3, TRAJ29)
CAMILLSGNTPLVF

SEQ ID NO: 573758 - protein, 15 aa, Homo sapiens
  CDR3 for beta chain variable domain of TCR clone 286879 (TRBV11-2, TRBJ2-1)
CASSLTSGGYNEQFF

SEQ ID NO: 573759 - protein, 16 aa, Homo sapiens
  CDR3 for alpha chain variable domain of TCR clone 286880 (TRAV16, TRAJ4)
CALSRMFSGGYNKLIF

SEQ ID NO: 573760 - protein, 15 aa, Homo sapiens
  CDR3 for beta chain variable domain of TCR clone 286880 (TRBV28, TRBJ1-3)
CASSMGWASGNTIYF

SEQ ID NO: 573761 - protein, 15 aa, Homo sapiens
  CDR3 for alpha chain variable domain of TCR clone 286881 (TRAV12-1, TRAJ44)
CVVDEYTGTASKLTF

SEQ ID NO: 573762 - protein, 14 aa, Homo sapiens
  CDR3 for beta chain variable domain of TCR clone 286881 (TRBV5-1, TRBJ1-2)
CASSLEPVNYGCTF

SEQ ID NO: 573763 - protein, 14 aa, Homo sapiens
  CDR3 for alpha chain variable domain of TCR clone 286882 (TRAV8-6, TRAJ48)
CAVRTNFGNEKLTF

SEQ ID NO: 573764 - protein, 17 aa, Homo sapiens
  CDR3 for beta chain variable domain of TCR clone 286882 (TRBV11-2, TRBJ2-1)
CASSLYPPGVEYNEQFF

SEQ ID NO: 573765 - protein, 17 aa, Homo sapiens
  CDR3 for alpha chain variable domain of TCR clone 286883 (TRAV3, TRAJ13)
CAVRDMRRTGSYQKVTF

SEQ ID NO: 573766 - protein, 14 aa, Homo sapiens
  CDR3 for beta chain variable domain of TCR clone 286883 (TRBV5-1, TRBJ2-7)
CASSLTGSGYEQYF

SEQ ID NO: 573767 - protein, 14 aa, Homo sapiens
  CDR3 for alpha chain variable domain of TCR clone 286884 (TRAV8-6, TRAJ6)
CAVSEGGGSYIPTF

SEQ ID NO: 573768 - protein, 14 aa, Homo sapiens
  CDR3 for beta chain variable domain of TCR clone 286884 (TRBV7-8, TRBJ2-3)
CASSLEAGTDTQYF

SEQ ID NO: 573769 - protein, 12 aa, Homo sapiens
  CDR3 for alpha chain variable domain of TCR clone 286885 (TRAV12-3, TRAJ17)
CAMTLTGNKLTF

SEQ ID NO: 573770 - protein, 12 aa, Homo sapiens
  CDR3 for beta chain variable domain of TCR clone 286885 (TRBV2, TRBJ2-1)
CAYGPPGNEQFV

SEQ ID NO: 573771 - protein, 17 aa, Homo sapiens
  CDR3 for alpha chain variable domain of TCR clone 286886 (TRAV27, TRAJ52)
CAGAGWAGGTSYGNLTF

SEQ ID NO: 573772 - protein, 16 aa, Homo sapiens
  CDR3 for beta chain variable domain of TCR clone 286886 (TRBV19, TRBJ2-1)
CASSKAGPSSYNEQFF

SEQ ID NO: 573773 - protein, 16 aa, Homo sapiens
  CDR3 for alpha chain variable domain of TCR clone 286887 (TRAV1-2, TRAJ10)
CAVRGVLTGGGNKLTF

SEQ ID NO: 573774 - protein, 16 aa, Homo sapiens
  CDR3 for beta chain variable domain of TCR clone 286887 (TRBV3-1, TRBJ2-7)
CASSQGATGVAYEQYF

SEQ ID NO: 573775 - protein, 17 aa, Homo sapiens
  CDR3 for alpha chain variable domain of TCR clone 286888 (TRAV3, TRAJ42)
CAVRDRDYGGRQGNSIF

SEQ ID NO: 573776 - protein, 13 aa, Homo sapiens
  CDR3 for beta chain variable domain of TCR clone 286888 (TRBV20-1, TRBJ2-5)
CSARRGTGATQYF

SEQ ID NO: 573777 - protein, 16 aa, Homo sapiens
  CDR3 for alpha chain variable domain of TCR clone 286889 (TRAV3, TRAJ37)
CAVRGKGSGNTGKLIF

SEQ ID NO: 573778 - protein, 15 aa, Homo sapiens
  CDR3 for beta chain variable domain of TCR clone 286889 (TRBV7-9, TRBJ1-6)
CGSSSPGRGNSPLHF

SEQ ID NO: 573779 - protein, 14 aa, Homo sapiens
  CDR3 for alpha chain variable domain of TCR clone 286890 (TRAV1-2, TRAJ24)
CAVLTTDSWGKFQF

SEQ ID NO: 573780 - protein, 14 aa, Homo sapiens
  CDR3 for beta chain variable domain of TCR clone 286890 (TRBV19, TRBJ2-1)
CASPTFVLSGEQFF

SEQ ID NO: 573781 - protein, 15 aa, Homo sapiens
  CDR3 for alpha chain variable domain of TCR clone 286891 (TRAV3, TRAJ3)
CAVRDMSSSASKIIF

SEQ ID NO: 573782 - protein, 14 aa, Homo sapiens
  CDR3 for beta chain variable domain of TCR clone 286891 (TRBV19, TRBJ2-1)
CASPTFVLSSEQFF

SEQ ID NO: 573783 - protein, 13 aa, Homo sapiens
  CDR3 for alpha chain variable domain of TCR clone 286892 (TRAV23/DV6, TRAJ6)
FAAKTGGSYIPTF

SEQ ID NO: 573784 - protein, 15 aa, Homo sapiens
  CDR3 for beta chain variable domain of TCR clone 286892 (TRBV5-1, TRBJ1-2)
CASSSYGEFDYGYTF

SEQ ID NO: 573785 - protein, 12 aa, Homo sapiens
  CDR3 for alpha chain variable domain of TCR clone 286893 (TRAV1-2, TRAJ33)
CAALDSNYQLIW

SEQ ID NO: 573786 - protein, 16 aa, Homo sapiens
  CDR3 for beta chain variable domain of TCR clone 286893 (TRBV4-3, TRBJ2-2)
CASSHLQGSGTGELFF

SEQ ID NO: 573787 - protein, 10 aa, Homo sapiens
  CDR3 for alpha chain variable domain of TCR clone 286894 (TRAV1-2, TRAJ31)
CVSEDARLMF

SEQ ID NO: 573788 - protein, 13 aa, Homo sapiens
  CDR3 for beta chain variable domain of TCR clone 286894 (TRBV19, TRBJ2-1)
CQSDFRLSGEQFF

SEQ ID NO: 573789 - protein, 13 aa, Homo sapiens
  CDR3 for alpha chain variable domain of TCR clone 286895 (TRAV21, TRAJ20)
CAVGLRFDYKLSF

SEQ ID NO: 573790 - protein, 14 aa, Homo sapiens
  CDR3 for beta chain variable domain of TCR clone 286895 (TRBV13, TRBJ2-5)
CASSLERVGETQYF

SEQ ID NO: 573791 - protein, 14 aa, Homo sapiens
  CDR3 for alpha chain variable domain of TCR clone 286896 (TRAV2, TRAJ9)
CAVEDRSGGFKTIF

SEQ ID NO: 573792 - protein, 15 aa, Homo sapiens
  CDR3 for beta chain variable domain of TCR clone 286896 (TRBV5-7, TRBJ1-5)
CASSYGKVWDQPQHF

SEQ ID NO: 573793 - protein, 10 aa, Homo sapiens
  CDR3 for alpha chain variable domain of TCR clone 286897 (TRAV20, TRAJ22)
CAAPARQLTV

SEQ ID NO: 573794 - protein, 14 aa, Homo sapiens
  CDR3 for beta chain variable domain of TCR clone 286897 (TRBV19, TRBJ2-1)
CASSMGSGATEQFF

SEQ ID NO: 573795 - protein, 14 aa, Homo sapiens
  CDR3 for alpha chain variable domain of TCR clone 286898 (TRAV1-2, TRAJ8)
CAVSEDTGFQKLVF

SEQ ID NO: 573796 - protein, 15 aa, Homo sapiens
  CDR3 for beta chain variable domain of TCR clone 286898 (TRBV28, TRBJ2-5)
CASSPPWSYQETQYF

SEQ ID NO: 573797 - protein, 14 aa, Homo sapiens
  CDR3 for alpha chain variable domain of TCR clone 286899 (TRAV8-4, TRAJ49)
CAVSESNTGNEFYF

SEQ ID NO: 573798 - protein, 18 aa, Homo sapiens
  CDR3 for beta chain variable domain of TCR clone 286899 (TRBV24-1, TRBJ2-2)
CATSDSGQGTANTGELFF

SEQ ID NO: 573799 - protein, 13 aa, Homo sapiens
  CDR3 for alpha chain variable domain of TCR clone 286900 (TRAV38-1, TRAJ42)
CARWGGSQGNLIF

SEQ ID NO: 573800 - protein, 17 aa, Homo sapiens
  CDR3 for beta chain variable domain of TCR clone 286900 (TRBV20-1, TRBJ2-1)
CSARDHLAGVWDNEQFF

SEQ ID NO: 573801 - protein, 15 aa, Homo sapiens
  CDR3 for alpha chain variable domain of TCR clone 286901 (TRAV4, TRAJ36)
CLVGDRQTGAKNLFF

SEQ ID NO: 573802 - protein, 14 aa, Homo sapiens
  CDR3 for beta chain variable domain of TCR clone 286901 (TRBV19, TRBJ2-1)
CASPTFVLSGEQFF

SEQ ID NO: 573803 - protein, 13 aa, Homo sapiens
  CDR3 for alpha chain variable domain of TCR clone 286902 (TRAV27, TRAJ41)
CAGEGNSGYALNF

SEQ ID NO: 573804 - protein, 14 aa, Homo sapiens
  CDR3 for beta chain variable domain of TCR clone 286902 (TRBV7-2, TRBJ1-1)
CAISFLTGTTEAFF

SEQ ID NO: 573805 - protein, 18 aa, Homo sapiens
  CDR3 for alpha chain variable domain of TCR clone 286903 (TRAV13-1, TRAJ52)
CAADFPNAGGTSFGKLTF

SEQ ID NO: 573806 - protein, 14 aa, Homo sapiens
  CDR3 for beta chain variable domain of TCR clone 286903 (TRBV11-2, TRBJ2-3)
CASSLYAGRDTQYF

SEQ ID NO: 573807 - protein, 12 aa, Homo sapiens
  CDR3 for alpha chain variable domain of TCR clone 286904 (TRAV25, TRAJ29)
CAGHSGNTPLVF

SEQ ID NO: 573808 - protein, 14 aa, Homo sapiens
  CDR3 for beta chain variable domain of TCR clone 286904 (TRBV6-1, TRBJ2-7)
CASNRTGDYYEQYF

SEQ ID NO: 573809 - protein, 17 aa, Homo sapiens
  CDR3 for alpha chain variable domain of TCR clone 286905 (TRAV8-1, TRAJ43)
CAVTNDMRFGAGTRLTV

SEQ ID NO: 573810 - protein, 15 aa, Homo sapiens
  CDR3 for beta chain variable domain of TCR clone 286905 (TRBV6-1, TRBJ2-3)
CASSERGGITDTQYF

SEQ ID NO: 573811 - protein, 17 aa, Homo sapiens
  CDR3 for alpha chain variable domain of TCR clone 286906 (TRAV3, TRAJ6)
CAVRDGPRAGGSYIPKF

SEQ ID NO: 573812 - protein, 16 aa, Homo sapiens
  CDR3 for beta chain variable domain of TCR clone 286906 (TRBV27, TRBJ2-2)
CASSSSGVSNTGELFF

SEQ ID NO: 573813 - protein, 12 aa, Homo sapiens
  CDR3 for alpha chain variable domain of TCR clone 286907 (TRAV12-3, TRAJ17)
CAMTLTGNKLTF

SEQ ID NO: 573814 - protein, 20 aa, Homo sapiens
  CDR3 for beta chain variable domain of TCR clone 286907 (TRBV7-8, TRBJ2-2)
CASIHLFPGPTIHITGELFF

SEQ ID NO: 573815 - protein, 13 aa, Homo sapiens
  CDR3 for alpha chain variable domain of TCR clone 286908 (TRAV1-1, TRAJ9)
CAAKNTGGFKTIF

SEQ ID NO: 573816 - protein, 12 aa, Homo sapiens
  CDR3 for beta chain variable domain of TCR clone 286908 (TRBV7-2, TRBJ2-2)
CATQTVTGELFF

SEQ ID NO: 573817 - protein, 12 aa, Homo sapiens
  CDR3 for alpha chain variable domain of TCR clone 286909 (TRAV35, TRAJ12)
GRRTDSSYKLIF

SEQ ID NO: 573818 - protein, 14 aa, Homo sapiens
  CDR3 for beta chain variable domain of TCR clone 286909 (TRBV19, TRBJ1-1)
CASSPNRGDTEAFF

SEQ ID NO: 573819 - protein, 12 aa, Homo sapiens
  CDR3 for alpha chain variable domain of TCR clone 286910 (TRAV9-2, TRAJ20)
CALSEGDYKLIF

SEQ ID NO: 573820 - protein, 13 aa, Homo sapiens
  CDR3 for beta chain variable domain of TCR clone 286910 (TRBV11-2, TRBJ1-6)
CASSLAGVSPLHF

SEQ ID NO: 573821 - protein, 14 aa, Homo sapiens
  CDR3 for alpha chain variable domain of TCR clone 286911 (TRAV26-1, TRAJ34)
CIVRVAYNTDKLIF

SEQ ID NO: 573822 - protein, 12 aa, Homo sapiens
  CDR3 for beta chain variable domain of TCR clone 286911 (TRBV7-9, TRBJ2-7)
SASSIKREEQYF

SEQ ID NO: 573823 - protein, 16 aa, Homo sapiens
  CDR3 for alpha chain variable domain of TCR clone 286912 (TRAV12-3, TRAJ45)
CAMGWGSGGGADGLTF

SEQ ID NO: 573824 - protein, 15 aa, Homo sapiens
  CDR3 for beta chain variable domain of TCR clone 286912 (TRBV3-1, TRBJ1-2)
CASSHPGTPGYVYSF

SEQ ID NO: 573825 - protein, 11 aa, Homo sapiens
  CDR3 for alpha chain variable domain of TCR clone 286913 (TRAV4, TRAJ23)
CLVAPGGKLIF

SEQ ID NO: 573826 - protein, 14 aa, Homo sapiens
  CDR3 for beta chain variable domain of TCR clone 286913 (TRBV23-1, TRBJ2-5)
CASSFLRSQETQYF

SEQ ID NO: 573827 - protein, 16 aa, Homo sapiens
  CDR3 for alpha chain variable domain of TCR clone 286914 (TRAV3, TRAJ37)
CAVRPHGSGNTGKLLF

SEQ ID NO: 573828 - protein, 14 aa, Homo sapiens
  CDR3 for beta chain variable domain of TCR clone 286914 (TRBV25-1, TRBJ1-1)
CASTHLGGNTEAFF

SEQ ID NO: 573829 - protein, 16 aa, Homo sapiens
  CDR3 for alpha chain variable domain of TCR clone 286915 (TRAV1-2, TRAJ10)
CAVRGVLTGGGNKLTF

SEQ ID NO: 573830 - protein, 13 aa, Homo sapiens
  CDR3 for beta chain variable domain of TCR clone 286915 (TRBV12-4, TRBJ1-1)
CQQSRDRGTEAVF

SEQ ID NO: 573831 - protein, 15 aa, Homo sapiens
  CDR3 for alpha chain variable domain of TCR clone 286916 (TRAV1-2, TRAJ38)
CAVSENAGNNRKLIW

SEQ ID NO: 573832 - protein, 16 aa, Homo sapiens
  CDR3 for beta chain variable domain of TCR clone 286916 (TRBV4-1, TRBJ2-7)
CASSLTAGQETYEQYF

SEQ ID NO: 573833 - protein, 12 aa, Homo sapiens
  CDR3 for alpha chain variable domain of TCR clone 286917 (TRAV22, TRAJ29)
CAPPSGHTPLVF

SEQ ID NO: 573834 - protein, 14 aa, Homo sapiens
  CDR3 for beta chain variable domain of TCR clone 286917 (TRBV11-2, TRBJ2-7)
CASSLGAGAYEQYF

SEQ ID NO: 573835 - protein, 18 aa, Homo sapiens
  CDR3 for alpha chain variable domain of TCR clone 286918 (TRAV23/DV6, )
CAATALIPDIQNPDPAVY

SEQ ID NO: 573836 - protein, 16 aa, Homo sapiens
  CDR3 for beta chain variable domain of TCR clone 286918 (TRBV10-3, TRBJ2-7)
CAIRPRGQEQTYEQYF

SEQ ID NO: 573837 - protein, 15 aa, Homo sapiens
  CDR3 for alpha chain variable domain of TCR clone 286919 (TRAV3, TRAJ20)
CAVRDIKLSDYKLSF

SEQ ID NO: 573838 - protein, 15 aa, Homo sapiens
  CDR3 for beta chain variable domain of TCR clone 286919 (TRBV29-1, TRBJ2-7)
CSVEFFDRGSYEQYF

SEQ ID NO: 573839 - protein, 14 aa, Homo sapiens
  CDR3 for alpha chain variable domain of TCR clone 286920 (TRAV12-2, TRAJ17)
CAALFKAAGNKLTF

SEQ ID NO: 573840 - protein, 14 aa, Homo sapiens
  CDR3 for beta chain variable domain of TCR clone 286920 (TRBV19, TRBJ1-5)
CASRAPDSFLAQHF

SEQ ID NO: 573841 - protein, 13 aa, Homo sapiens
  CDR3 for alpha chain variable domain of TCR clone 286921 (TRAV13-2, TRAJ48)
CAEMDFGNEKLTF

SEQ ID NO: 573842 - protein, 12 aa, Homo sapiens
  CDR3 for beta chain variable domain of TCR clone 286921 (TRBV25-1, TRBJ1-1)
CASSQTRTEAFF

SEQ ID NO: 573843 - protein, 13 aa, Homo sapiens
  CDR3 for alpha chain variable domain of TCR clone 286922 (TRAV12-3, TRAJ56)
CALATGANSKMTF

SEQ ID NO: 573844 - protein, 12 aa, Homo sapiens
  CDR3 for beta chain variable domain of TCR clone 286922 (TRBV10-2, TRBJ2-3)
CASSPESDTQYF

SEQ ID NO: 573845 - protein, 13 aa, Homo sapiens
  CDR3 for alpha chain variable domain of TCR clone 286923 (TRAV20, TRAJ42)
CAVQGGSQGNLIF

SEQ ID NO: 573846 - protein, 15 aa, Homo sapiens
  CDR3 for beta chain variable domain of TCR clone 286923 (TRBV7-2, TRBJ2-7)
CASSTPGLTRGEQYF

SEQ ID NO: 573847 - protein, 14 aa, Homo sapiens
  CDR3 for alpha chain variable domain of TCR clone 286924 (TRAV16, TRAJ17)
CALSGRAAGNNLTF

SEQ ID NO: 573848 - protein, 14 aa, Homo sapiens
  CDR3 for beta chain variable domain of TCR clone 286924 (TRBV7-3, TRBJ1-1)
CASSLKGGNTEAFF

SEQ ID NO: 573849 - protein, 13 aa, Homo sapiens
  CDR3 for alpha chain variable domain of TCR clone 286925 (TRAV2, TRAJ40)
RAVVTSGTYKYIF

SEQ ID NO: 573850 - protein, 15 aa, Homo sapiens
  CDR3 for beta chain variable domain of TCR clone 286925 (TRBV7-3, TRBJ2-1)
CASSPTGGGEVEQFF

SEQ ID NO: 573851 - protein, 14 aa, Homo sapiens
  CDR3 for alpha chain variable domain of TCR clone 286926 (TRAV13-2, TRAJ43)
CAEIPMYNNNDMRF

SEQ ID NO: 573852 - protein, 12 aa, Homo sapiens
  CDR3 for beta chain variable domain of TCR clone 286926 (TRBV11-2, TRBJ2-2)
CASSLPTGELFF

SEQ ID NO: 573853 - protein, 10 aa, Homo sapiens
  CDR3 for alpha chain variable domain of TCR clone 286927 (TRAV30, TRAJ48)
CGIGNEKLTF

SEQ ID NO: 573854 - protein, 16 aa, Homo sapiens
  CDR3 for beta chain variable domain of TCR clone 286927 (TRBV7-7, TRBJ2-3)
CASSPGTSGSTDTQYF

SEQ ID NO: 573855 - protein, 14 aa, Homo sapiens
  CDR3 for alpha chain variable domain of TCR clone 286928 (TRAV12-3, TRAJ10)
SHLPLTGGGNKLTF

SEQ ID NO: 573856 - protein, 15 aa, Homo sapiens
  CDR3 for beta chain variable domain of TCR clone 286928 (TRBV9, TRBJ1-6)
CASSVAGTGDSALHC

SEQ ID NO: 573857 - protein, 14 aa, Homo sapiens
  CDR3 for alpha chain variable domain of TCR clone 286929 (TRAV2, TRAJ9)
CAVEDRSGGFKTIF

SEQ ID NO: 573858 - protein, 14 aa, Homo sapiens
  CDR3 for beta chain variable domain of TCR clone 286929 (TRBV7-3, TRBJ2-1)
CASRLAGGTNEQFF

SEQ ID NO: 573859 - protein, 10 aa, Homo sapiens
  CDR3 for alpha chain variable domain of TCR clone 286930 (TRAV1-2, TRAJ20)
CACNDYELSF

SEQ ID NO: 573860 - protein, 14 aa, Homo sapiens
  CDR3 for beta chain variable domain of TCR clone 286930 (TRBV20-1, TRBJ1-1)
CSAQTRIGGTEAFF

SEQ ID NO: 573861 - protein, 14 aa, Homo sapiens
  CDR3 for alpha chain variable domain of TCR clone 286931 (TRAV13-1, TRAJ26)
CAASSAHYGQNFVF

SEQ ID NO: 573862 - protein, 16 aa, Homo sapiens
  CDR3 for beta chain variable domain of TCR clone 286931 (TRBV29-1, TRBJ2-7)
CSVEDAEDGTAYEQYF

SEQ ID NO: 573863 - protein, 16 aa, Homo sapiens
  CDR3 for alpha chain variable domain of TCR clone 286932 (TRAV12-3, TRAJ53)
CAMSPGSGGSNYKLTF

SEQ ID NO: 573864 - protein, 14 aa, Homo sapiens
  CDR3 for beta chain variable domain of TCR clone 286932 (TRBV4-2, TRBJ2-1)
CAIGLDRAYNEQFF

SEQ ID NO: 573865 - protein, 12 aa, Homo sapiens
  CDR3 for alpha chain variable domain of TCR clone 286933 (TRAV30, TRAJ43)
CGTEERGNDMRF

SEQ ID NO: 573866 - protein, 13 aa, Homo sapiens
  CDR3 for beta chain variable domain of TCR clone 286933 (TRBV27, TRBJ2-7)
CASSFSQGYEQDF

SEQ ID NO: 573867 - protein, 11 aa, Homo sapiens
  CDR3 for alpha chain variable domain of TCR clone 286934 (TRAV2, TRAJ33)
CAVDSNYQLIW

SEQ ID NO: 573868 - protein, 17 aa, Homo sapiens
  CDR3 for beta chain variable domain of TCR clone 286934 (TRBV20-1, TRBJ2-3)
CSARDVWNAKERDTQYF

SEQ ID NO: 573869 - protein, 12 aa, Homo sapiens
  CDR3 for alpha chain variable domain of TCR clone 286935 (TRAV17, TRAJ57)
CASDGGSEKLVF

SEQ ID NO: 573870 - protein, 12 aa, Homo sapiens
  CDR3 for beta chain variable domain of TCR clone 286935 (TRBV29-1, TRBJ2-2)
CSVDKYTGELFF

SEQ ID NO: 573871 - protein, 13 aa, Homo sapiens
  CDR3 for alpha chain variable domain of TCR clone 286936 (TRAV21, TRAJ27)
CAARPGNAGKSTF

SEQ ID NO: 573872 - protein, 15 aa, Homo sapiens
  CDR3 for beta chain variable domain of TCR clone 286936 (TRBV11-3, TRBJ2-7)
CAGSPGPASSYEQYF

SEQ ID NO: 573873 - protein, 14 aa, Homo sapiens
  CDR3 for alpha chain variable domain of TCR clone 286937 (TRAV17, TRAJ5)
CATVALTGRRALTF

SEQ ID NO: 573874 - protein, 14 aa, Homo sapiens
  CDR3 for beta chain variable domain of TCR clone 286937 (TRBV28, TRBJ2-7)
CASSTYGMAYEQCF

SEQ ID NO: 573875 - protein, 17 aa, Homo sapiens
  CDR3 for alpha chain variable domain of TCR clone 286938 (TRAV23/DV6, TRAJ57)
CAASSTLSQAGSEKLVF

SEQ ID NO: 573876 - protein, 14 aa, Homo sapiens
  CDR3 for beta chain variable domain of TCR clone 286938 (TRBV25-1, TRBJ1-1)
CASTHLGGNTEALF

SEQ ID NO: 573877 - protein, 16 aa, Homo sapiens
  CDR3 for alpha chain variable domain of TCR clone 286939 (TRAV13-2, TRAJ53)
CAENANSRGSNYKLTF

SEQ ID NO: 573878 - protein, 16 aa, Homo sapiens
  CDR3 for beta chain variable domain of TCR clone 286939 (TRBV19, TRBJ2-2)
CASRSPGTGATGELFF

SEQ ID NO: 573879 - protein, 14 aa, Homo sapiens
  CDR3 for alpha chain variable domain of TCR clone 286940 (TRAV20, TRAJ32)
CCGRYGGATNKLIF

SEQ ID NO: 573880 - protein, 16 aa, Homo sapiens
  CDR3 for beta chain variable domain of TCR clone 286940 (TRBV19, TRBJ2-2)
CASRSPGTVATGELFF

SEQ ID NO: 573881 - protein, 14 aa, Homo sapiens
  CDR3 for alpha chain variable domain of TCR clone 286941 (TRAV8-6, TRAJ29)
CAVSRASGNTPLVF

SEQ ID NO: 573882 - protein, 18 aa, Homo sapiens
  CDR3 for beta chain variable domain of TCR clone 286941 (TRBV7-9, TRBJ2-7)
CASSLTTSGSRTWYEQYF

SEQ ID NO: 573883 - protein, 17 aa, Homo sapiens
  CDR3 for alpha chain variable domain of TCR clone 286942 (TRAV17, TRAJ52)
CATERPSGGTSYGKLTF

SEQ ID NO: 573884 - protein, 15 aa, Homo sapiens
  CDR3 for beta chain variable domain of TCR clone 286942 (TRBV5-1, TRBJ2-1)
CASSLVANSYNEKFF

SEQ ID NO: 573885 - protein, 16 aa, Homo sapiens
  CDR3 for alpha chain variable domain of TCR clone 286943 (TRAV21, TRAJ3)
SLVTQPPTPGASKIIF

SEQ ID NO: 573886 - protein, 15 aa, Homo sapiens
  CDR3 for beta chain variable domain of TCR clone 286943 (TRBV10-3, TRBJ2-1)
CAIRNGTSGHNEQFF

SEQ ID NO: 573887 - protein, 13 aa, Homo sapiens
  CDR3 for alpha chain variable domain of TCR clone 286944 (TRAV8-3, TRAJ4)
WLAFSGGYNKLIF

SEQ ID NO: 573888 - protein, 13 aa, Homo sapiens
  CDR3 for beta chain variable domain of TCR clone 286944 (TRBV20-1, TRBJ1-3)
CSAGAYSGNTIYF

SEQ ID NO: 573889 - protein, 14 aa, Homo sapiens
  CDR3 for alpha chain variable domain of TCR clone 286945 (TRAV17, TRAJ12)
CATDEKDSSYKLIF

SEQ ID NO: 573890 - protein, 13 aa, Homo sapiens
  CDR3 for beta chain variable domain of TCR clone 286945 (TRBV20-1, TRBJ1-1)
CSARGGGNTEAFF

SEQ ID NO: 573891 - protein, 12 aa, Homo sapiens
  CDR3 for alpha chain variable domain of TCR clone 286946 (TRAV12-2, TRAJ10)
WGVTGGGNKLTF

SEQ ID NO: 573892 - protein, 14 aa, Homo sapiens
  CDR3 for beta chain variable domain of TCR clone 286946 (TRBV7-3, TRBJ2-7)
CASSLKADSYEQYF

SEQ ID NO: 573893 - protein, 12 aa, Homo sapiens
  CDR3 for alpha chain variable domain of TCR clone 286947 (TRAV12-3, TRAJ17)
CAMTLTGNKLTF

SEQ ID NO: 573894 - protein, 11 aa, Homo sapiens
  CDR3 for beta chain variable domain of TCR clone 286947 (TRBV11-2, TRBJ1-1)
CAGSINTEAFF

SEQ ID NO: 573895 - protein, 12 aa, Homo sapiens
  CDR3 for alpha chain variable domain of TCR clone 286948 (TRAV16, TRAJ56)
CAPTGANSKLTF

SEQ ID NO: 573896 - protein, 15 aa, Homo sapiens
  CDR3 for beta chain variable domain of TCR clone 286948 (TRBV11-2, TRBJ2-1)
CASSKNRGLIYEQFF

SEQ ID NO: 573897 - protein, 18 aa, Homo sapiens
  CDR3 for alpha chain variable domain of TCR clone 286949 (TRAV13-1, TRAJ52)
CAAKNPNAGGTSYGKLTF

SEQ ID NO: 573898 - protein, 18 aa, Homo sapiens
  CDR3 for beta chain variable domain of TCR clone 286949 (TRBV12-4, TRBJ2-4)
CASRRTGAVDVAKNIQYF

SEQ ID NO: 573899 - protein, 17 aa, Homo sapiens
  CDR3 for alpha chain variable domain of TCR clone 286950 (TRAV13-1, TRAJ28)
CAASPPYSGAGSYQLTL

SEQ ID NO: 573900 - protein, 13 aa, Homo sapiens
  CDR3 for beta chain variable domain of TCR clone 286950 (TRBV7-2, TRBJ2-7)
CASSSPSGSEQYF

SEQ ID NO: 573901 - protein, 15 aa, Homo sapiens
  CDR3 for alpha chain variable domain of TCR clone 286951 (TRAV26-1, TRAJ29)
CIVRVEGSGNTPLVF

SEQ ID NO: 573902 - protein, 14 aa, Homo sapiens
  CDR3 for beta chain variable domain of TCR clone 286951 (TRBV7-9, TRBJ2-2)
CASSLVQDTGELFF

SEQ ID NO: 573903 - protein, 20 aa, Homo sapiens
  CDR3 for alpha chain variable domain of TCR clone 286952 (TRAV12-1, TRAJ42)
SSVIQPPTSVKGGSQGNLIF

SEQ ID NO: 573904 - protein, 18 aa, Homo sapiens
  CDR3 for beta chain variable domain of TCR clone 286952 (TRBV11-2, TRBJ2-3)
CASSLGGASRGAPNTQYY

SEQ ID NO: 573905 - protein, 16 aa, Homo sapiens
  CDR3 for alpha chain variable domain of TCR clone 286953 (TRAV22, TRAJ45)
CAVERGKRGGADGLTF

SEQ ID NO: 573906 - protein, 13 aa, Homo sapiens
  CDR3 for beta chain variable domain of TCR clone 286953 (TRBV24-1, TRBJ1-1)
CATSDVNSVEAFF

SEQ ID NO: 573907 - protein, 11 aa, Homo sapiens
  CDR3 for alpha chain variable domain of TCR clone 286954 (TRAV2, TRAJ13)
CASGGYQKVTF

SEQ ID NO: 573908 - protein, 16 aa, Homo sapiens
  CDR3 for beta chain variable domain of TCR clone 286954 (TRBV7-9, TRBJ2-3)
CASSPWREVGTDTQYF

SEQ ID NO: 573909 - protein, 18 aa, Homo sapiens
  CDR3 for alpha chain variable domain of TCR clone 286955 (TRAV29/DV5, TRAJ52)
CAAGFRGAGGTSYGKLTL

SEQ ID NO: 573910 - protein, 15 aa, Homo sapiens
  CDR3 for beta chain variable domain of TCR clone 286955 (TRBV7-2, TRBJ2-2)
CASRRPGQNTGELFF

SEQ ID NO: 573911 - protein, 14 aa, Homo sapiens
  CDR3 for alpha chain variable domain of TCR clone 286956 (TRAV3, TRAJ24)
CAVILTDSWGKLQF

SEQ ID NO: 573912 - protein, 15 aa, Homo sapiens
  CDR3 for beta chain variable domain of TCR clone 286956 (TRBV20-1, TRBJ2-7)
CSARDRVSGMDEQYF

SEQ ID NO: 573913 - protein, 12 aa, Homo sapiens
  CDR3 for alpha chain variable domain of TCR clone 286957 (TRAV8-3, TRAJ26)
CAGDNYSQNFVF

SEQ ID NO: 573914 - protein, 14 aa, Homo sapiens
  CDR3 for beta chain variable domain of TCR clone 286957 (TRBV7-2, TRBJ1-1)
CASSFLTGTTEAFF

SEQ ID NO: 573915 - protein, 15 aa, Homo sapiens
  CDR3 for alpha chain variable domain of TCR clone 286958 (TRAV27, TRAJ38)
CAARRNAGNNRKLIW

SEQ ID NO: 573916 - protein, 16 aa, Homo sapiens
  CDR3 for beta chain variable domain of TCR clone 286958 (TRBV4-2, TRBJ2-5)
CASSQELVGSQETQYF

SEQ ID NO: 573917 - protein, 14 aa, Homo sapiens
  CDR3 for alpha chain variable domain of TCR clone 286959 (TRAV12-1, TRAJ10)
CGEHLTGGGNKLTF

SEQ ID NO: 573918 - protein, 14 aa, Homo sapiens
  CDR3 for beta chain variable domain of TCR clone 286959 (TRBV20-1, TRBJ1-6)
CSARQGRDNSPLHF

SEQ ID NO: 573919 - protein, 12 aa, Homo sapiens
  CDR3 for alpha chain variable domain of TCR clone 286960 (TRAV13-1, TRAJ21)
CAAKEGFNKFYF

SEQ ID NO: 573920 - protein, 14 aa, Homo sapiens
  CDR3 for beta chain variable domain of TCR clone 286960 (TRBV7-3, TRBJ1-1)
CASSLGTGYTEAFF

SEQ ID NO: 573921 - protein, 16 aa, Homo sapiens
  CDR3 for alpha chain variable domain of TCR clone 286961 (TRAV13-1, TRAJ18)
CAASKMRGSTMGRLYF

SEQ ID NO: 573922 - protein, 16 aa, Homo sapiens
  CDR3 for beta chain variable domain of TCR clone 286961 (TRBV27, TRBJ1-1)
CASSSRGRTGYTEAFF

SEQ ID NO: 573923 - protein, 11 aa, Homo sapiens
  CDR3 for alpha chain variable domain of TCR clone 286962 (TRAV4, TRAJ21)
CLIYNFNKFYF

SEQ ID NO: 573924 - protein, 17 aa, Homo sapiens
  CDR3 for beta chain variable domain of TCR clone 286962 (TRBV23-1, TRBJ2-1)
CISAPAVNRDQGGEQFF

SEQ ID NO: 573925 - protein, 14 aa, Homo sapiens
  CDR3 for alpha chain variable domain of TCR clone 286963 (TRAV38-1, TRAJ45)
CASHSGGGADGLTF

SEQ ID NO: 573926 - protein, 13 aa, Homo sapiens
  CDR3 for beta chain variable domain of TCR clone 286963 (TRBV7-9, TRBJ2-2)
CASSCAGTGELFF

SEQ ID NO: 573927 - protein, 14 aa, Homo sapiens
  CDR3 for alpha chain variable domain of TCR clone 286964 (TRAV17, TRAJ57)
CATDPQGGSEKLVF

SEQ ID NO: 573928 - protein, 17 aa, Homo sapiens
  CDR3 for beta chain variable domain of TCR clone 286964 (TRBV5-1, TRBJ2-2)
CASSVAGLSGGTGELFF

SEQ ID NO: 573929 - protein, 14 aa, Homo sapiens
  CDR3 for alpha chain variable domain of TCR clone 286965 (TRAV1-2, TRAJ16)
CAVNRVSDGQKLLF

SEQ ID NO: 573930 - protein, 13 aa, Homo sapiens
  CDR3 for beta chain variable domain of TCR clone 286965 (TRBV10-2, TRBJ2-7)
CASSESGVYEQYF

SEQ ID NO: 573931 - protein, 14 aa, Homo sapiens
  CDR3 for alpha chain variable domain of TCR clone 286966 (TRAV1-2, TRAJ16)
CAVRSASDGQKLLF

SEQ ID NO: 573932 - protein, 15 aa, Homo sapiens
  CDR3 for beta chain variable domain of TCR clone 286966 (TRBV9, TRBJ1-6)
CASSVAGTGDSPLHF

SEQ ID NO: 573933 - protein, 15 aa, Homo sapiens
  CDR3 for alpha chain variable domain of TCR clone 286967 (TRAV20, TRAJ17)
CAVQDLETSGSRLTF

SEQ ID NO: 573934 - protein, 16 aa, Homo sapiens
  CDR3 for beta chain variable domain of TCR clone 286967 (TRBV7-6, TRBJ2-1)
CASSAPGPSSYNEQFF

SEQ ID NO: 573935 - protein, 19 aa, Homo sapiens
  CDR3 for alpha chain variable domain of TCR clone 286968 (TRAV26-1, TRAJ52)
CIVRVANNAGGTSHGKLTF

SEQ ID NO: 573936 - protein, 14 aa, Homo sapiens
  CDR3 for beta chain variable domain of TCR clone 286968 (TRBV19, TRBJ1-2)
CASSIGAGSYGYTF

SEQ ID NO: 573937 - protein, 15 aa, Homo sapiens
  CDR3 for alpha chain variable domain of TCR clone 286969 (TRAV23/DV6, TRAJ18)
CAARYRGSTLWRLYF

SEQ ID NO: 573938 - protein, 15 aa, Homo sapiens
  CDR3 for beta chain variable domain of TCR clone 286969 (TRBV20-1, TRBJ2-7)
CSARDRVSGMDEQYF

SEQ ID NO: 573939 - protein, 18 aa, Homo sapiens
  CDR3 for alpha chain variable domain of TCR clone 286970 (TRAV21, TRAJ52)
CAVSPSPAGGTSYGKLTF

SEQ ID NO: 573940 - protein, 14 aa, Homo sapiens
  CDR3 for beta chain variable domain of TCR clone 286970 (TRBV4-1, TRBJ2-2)
CASSQAMNTGGLFF

SEQ ID NO: 573941 - protein, 12 aa, Homo sapiens
  CDR3 for alpha chain variable domain of TCR clone 286971 (TRAV22, TRAJ22)
CAPGGSARQLTF

SEQ ID NO: 573942 - protein, 15 aa, Homo sapiens
  CDR3 for beta chain variable domain of TCR clone 286971 (TRBV19, TRBJ2-1)
CASSIQATSYNEQFF

SEQ ID NO: 573943 - protein, 14 aa, Homo sapiens
  CDR3 for alpha chain variable domain of TCR clone 286972 (TRAV12-3, TRAJ21)
CAATDLYNFNNFYF

SEQ ID NO: 573944 - protein, 13 aa, Homo sapiens
  CDR3 for beta chain variable domain of TCR clone 286972 (TRBV19, TRBJ2-2)
CASSSKNTGELFF

SEQ ID NO: 573945 - protein, 18 aa, Homo sapiens
  CDR3 for alpha chain variable domain of TCR clone 286973 (TRAV8-4, TRAJ52)
CAVTRANAGGTSYGKLTF

SEQ ID NO: 573946 - protein, 18 aa, Homo sapiens
  CDR3 for beta chain variable domain of TCR clone 286973 (TRBV7-9, TRBJ2-7)
CASSLTASGSRTWYEQYF

SEQ ID NO: 573947 - protein, 13 aa, Homo sapiens
  CDR3 for alpha chain variable domain of TCR clone 286974 (TRAV1-2, TRAJ12)
CAVSMDSSYKLIF

SEQ ID NO: 573948 - protein, 15 aa, Homo sapiens
  CDR3 for beta chain variable domain of TCR clone 286974 (TRBV27, TRBJ2-5)
CDSSLIPSGGETQYF

SEQ ID NO: 573949 - protein, 13 aa, Homo sapiens
  CDR3 for alpha chain variable domain of TCR clone 286975 (TRAV27, TRAJ49)
CAPRPYTGNQFYF

SEQ ID NO: 573950 - protein, 13 aa, Homo sapiens
  CDR3 for beta chain variable domain of TCR clone 286975 (TRBV27, TRBJ1-1)
CASSLSIGAEAFF

SEQ ID NO: 573951 - protein, 13 aa, Homo sapiens
  CDR3 for alpha chain variable domain of TCR clone 286976 (TRAV17, TRAJ29)
CATDAFRKHTSCL

SEQ ID NO: 573952 - protein, 13 aa, Homo sapiens
  CDR3 for beta chain variable domain of TCR clone 286976 (TRBV5-7, TRBJ2-6)
CASTSSGAYVLTF

SEQ ID NO: 573953 - protein, 14 aa, Homo sapiens
  CDR3 for alpha chain variable domain of TCR clone 286977 (TRAV17, TRAJ54)
CATDANQGAQKLVF

SEQ ID NO: 573954 - protein, 12 aa, Homo sapiens
  CDR3 for beta chain variable domain of TCR clone 286977 (TRBV6-3, TRBJ2-1)
CASSGSYNEQYF

SEQ ID NO: 573955 - protein, 17 aa, Homo sapiens
  CDR3 for alpha chain variable domain of TCR clone 286978 (TRAV3, TRAJ6)
CAVRYGPRAGGSYIPTF

SEQ ID NO: 573956 - protein, 13 aa, Homo sapiens
  CDR3 for beta chain variable domain of TCR clone 286978 (TRBV12-5, TRBJ2-3)
CASGDRQSDTQYF

SEQ ID NO: 573957 - protein, 15 aa, Homo sapiens
  CDR3 for alpha chain variable domain of TCR clone 286979 (TRAV3, TRAJ5)
CAVRDLDTGRKALTF

SEQ ID NO: 573958 - protein, 16 aa, Homo sapiens
  CDR3 for beta chain variable domain of TCR clone 286979 (TRBV13, TRBJ2-2)
CAGSPRTGEHTGELFF

SEQ ID NO: 573959 - protein, 13 aa, Homo sapiens
  CDR3 for alpha chain variable domain of TCR clone 286980 (TRAV17, TRAJ15)
CATDARAGTALIF

SEQ ID NO: 573960 - protein, 15 aa, Homo sapiens
  CDR3 for beta chain variable domain of TCR clone 286980 (TRBV20-1, TRBJ2-7)
CSSRDRVSGMDEQYF

SEQ ID NO: 573961 - protein, 14 aa, Homo sapiens
  CDR3 for alpha chain variable domain of TCR clone 286981 (TRAV13-1, TRAJ44)
CAAEATGTASKHTF

SEQ ID NO: 573962 - protein, 17 aa, Homo sapiens
  CDR3 for beta chain variable domain of TCR clone 286981 (TRBV7-3, TRBJ2-3)
CASSLMKRMRGADTQYF

SEQ ID NO: 573963 - protein, 14 aa, Homo sapiens
  CDR3 for alpha chain variable domain of TCR clone 286982 (TRAV27, TRAJ13)
CRSSNSGGYQKVTF

SEQ ID NO: 573964 - protein, 14 aa, Homo sapiens
  CDR3 for beta chain variable domain of TCR clone 286982 (TRBV7-6, TRBJ2-1)
GASSLGGGADEQFF

SEQ ID NO: 573965 - protein, 16 aa, Homo sapiens
  CDR3 for alpha chain variable domain of TCR clone 286983 (TRAV23/DV6, )
CADIQNPDPAVHQLRD

SEQ ID NO: 573966 - protein, 13 aa, Homo sapiens
  CDR3 for beta chain variable domain of TCR clone 286983 (TRBV28, TRBJ2-7)
CASRSSGVYEQYF

SEQ ID NO: 573967 - protein, 10 aa, Homo sapiens
  CDR3 for alpha chain variable domain of TCR clone 286984 (TRAV1-2, TRAJ23)
CAGQGGKLIF

SEQ ID NO: 573968 - protein, 13 aa, Homo sapiens
  CDR3 for beta chain variable domain of TCR clone 286984 (TRBV7-9, TRBJ1-2)
CASSLKQNYGYTF

SEQ ID NO: 573969 - protein, 13 aa, Homo sapiens
  CDR3 for alpha chain variable domain of TCR clone 286985 (TRAV25, TRAJ10)
CAGRTGGGNKLTF

SEQ ID NO: 573970 - protein, 15 aa, Homo sapiens
  CDR3 for beta chain variable domain of TCR clone 286985 (TRBV19, TRBJ2-1)
CASSSPGVPLMSSSS

SEQ ID NO: 573971 - protein, 14 aa, Homo sapiens
  CDR3 for alpha chain variable domain of TCR clone 286986 (TRAV14/DV4, TRAJ15)
CAMRRDQAGTALIF

SEQ ID NO: 573972 - protein, 11 aa, Homo sapiens
  CDR3 for beta chain variable domain of TCR clone 286986 (TRBV7-2, TRBJ2-7)
CASSSRLWQYF

SEQ ID NO: 573973 - protein, 14 aa, Homo sapiens
  CDR3 for alpha chain variable domain of TCR clone 286987 (TRAV16, TRAJ26)
CALSSANYGQNFVF

SEQ ID NO: 573974 - protein, 11 aa, Homo sapiens
  CDR3 for beta chain variable domain of TCR clone 286987 (TRBV5-1, TRBJ2-1)
CASSIGQEQFF

SEQ ID NO: 573975 - protein, 18 aa, Homo sapiens
  CDR3 for alpha chain variable domain of TCR clone 286988 (TRAV12-3, TRAJ52)
CAMSRTNAGGTSYGKLTF

SEQ ID NO: 573976 - protein, 11 aa, Homo sapiens
  CDR3 for beta chain variable domain of TCR clone 286988 (TRBV11-2, TRBJ2-2)
CASSLPGELFF

SEQ ID NO: 573977 - protein, 13 aa, Homo sapiens
  CDR3 for alpha chain variable domain of TCR clone 286989 (TRAV12-2, TRAJ9)
CAVNKGVGFKTIF

SEQ ID NO: 573978 - protein, 16 aa, Homo sapiens
  CDR3 for beta chain variable domain of TCR clone 286989 (TRBV27, TRBJ2-2)
CASSLRPGGAPGELFF

SEQ ID NO: 573979 - protein, 15 aa, Homo sapiens
  CDR3 for alpha chain variable domain of TCR clone 286990 (TRAV27, TRAJ38)
CAARRNAGNNRKLFW

SEQ ID NO: 573980 - protein, 13 aa, Homo sapiens
  CDR3 for beta chain variable domain of TCR clone 286990 (TRBV10-3, TRBJ2-7)
CASKLAVNYEQYF

SEQ ID NO: 573981 - protein, 16 aa, Homo sapiens
  CDR3 for alpha chain variable domain of TCR clone 286991 (TRAV14/DV4, TRAJ53)
CAMREGGGGSNYKLTF

SEQ ID NO: 573982 - protein, 12 aa, Homo sapiens
  CDR3 for beta chain variable domain of TCR clone 286991 (TRBV7-9, TRBJ2-7)
CASSLEGYEQYF

SEQ ID NO: 573983 - protein, 17 aa, Homo sapiens
  CDR3 for alpha chain variable domain of TCR clone 286992 (TRAV20, TRAJ57)
CAVQEIVAQGGSEKLVF

SEQ ID NO: 573984 - protein, 13 aa, Homo sapiens
  CDR3 for beta chain variable domain of TCR clone 286992 (TRBV20-1, TRBJ2-5)
CSAFVGGGETQYF

SEQ ID NO: 573985 - protein, 19 aa, Homo sapiens
  CDR3 for alpha chain variable domain of TCR clone 286993 (TRAV13-1, TRAJ37)
CDPVLWQHRPTNPWARDNF

SEQ ID NO: 573986 - protein, 14 aa, Homo sapiens
  CDR3 for beta chain variable domain of TCR clone 286993 (TRBV25-1, TRBJ1-1)
CASTHLGGNTEAFF

SEQ ID NO: 573987 - protein, 12 aa, Homo sapiens
  CDR3 for alpha chain variable domain of TCR clone 286994 (TRAV12-3, TRAJ5)
CAMDTGRRALTF

SEQ ID NO: 573988 - protein, 16 aa, Homo sapiens
  CDR3 for beta chain variable domain of TCR clone 286994 (TRBV7-2, TRBJ2-7)
CASSLEAGGPWYEQYF

SEQ ID NO: 573989 - protein, 13 aa, Homo sapiens
  CDR3 for alpha chain variable domain of TCR clone 286995 (TRAV13-1, TRAJ39)
CAAPFECRQHAHL

SEQ ID NO: 573990 - protein, 11 aa, Homo sapiens
  CDR3 for beta chain variable domain of TCR clone 286995 (TRBV19, TRBJ2-7)
CASSILGEQYF

SEQ ID NO: 573991 - protein, 14 aa, Homo sapiens
  CDR3 for alpha chain variable domain of TCR clone 286996 (TRAV30, TRAJ26)
CGTEIVSYGQNFVF

SEQ ID NO: 573992 - protein, 13 aa, Homo sapiens
  CDR3 for beta chain variable domain of TCR clone 286996 (TRBV19, TRBJ1-3)
FASRLSLGNTIYF

SEQ ID NO: 573993 - protein, 21 aa, Homo sapiens
  CDR3 for alpha chain variable domain of TCR clone 286997 (TRAV41, TRAJ45)
TASHPRDSAGASGGGAVGLTF

SEQ ID NO: 573994 - protein, 16 aa, Homo sapiens
  CDR3 for beta chain variable domain of TCR clone 286997 (TRBV5-5, TRBJ2-2)
CASSGRREGATGELFF

SEQ ID NO: 573995 - protein, 12 aa, Homo sapiens
  CDR3 for alpha chain variable domain of TCR clone 286998 (TRAV12-3, TRAJ20)
CAMVRGDYKLSF

SEQ ID NO: 573996 - protein, 12 aa, Homo sapiens
  CDR3 for beta chain variable domain of TCR clone 286998 (TRBV2, TRBJ2-1)
CAYGPPGNEQFF

SEQ ID NO: 573997 - protein, 12 aa, Homo sapiens
  CDR3 for alpha chain variable domain of TCR clone 286999 (TRAV8-3, TRAJ26)
CAGDNYGQNFVF

SEQ ID NO: 573998 - protein, 17 aa, Homo sapiens
  CDR3 for beta chain variable domain of TCR clone 286999 (TRBV28, TRBJ2-5)
CASSTPEGDALQETQYF

SEQ ID NO: 573999 - protein, 12 aa, Homo sapiens
  CDR3 for alpha chain variable domain of TCR clone 287000 (TRAV21, TRAJ11)
CAVRGGNSTLTF

SEQ ID NO: 574000 - protein, 15 aa, Homo sapiens
  CDR3 for beta chain variable domain of TCR clone 287000 (TRBV6-1, TRBJ2-7)
CASSEPVAATTEQYF

SEQ ID NO: 574001 - protein, 12 aa, Homo sapiens
  CDR3 for alpha chain variable domain of TCR clone 287001 (TRAV12-2, TRAJ43)
CAVNVNNNDIRF

SEQ ID NO: 574002 - protein, 14 aa, Homo sapiens
  CDR3 for beta chain variable domain of TCR clone 287001 (TRBV25-1, TRBJ2-2)
CASSELGLPGELFL

SEQ ID NO: 574003 - protein, 14 aa, Homo sapiens
  CDR3 for alpha chain variable domain of TCR clone 287002 (TRAV8-4, TRAJ48)
WAVSETFGNEKLTF

SEQ ID NO: 574004 - protein, 16 aa, Homo sapiens
  CDR3 for beta chain variable domain of TCR clone 287002 (TRBV6-6, TRBJ2-3)
CASSYSHAGSTDTQYF

SEQ ID NO: 574005 - protein, 15 aa, Homo sapiens
  CDR3 for alpha chain variable domain of TCR clone 287003 (TRAV13-1, TRAJ28)
CAAKDSGAGSFQLTF

SEQ ID NO: 574006 - protein, 14 aa, Homo sapiens
  CDR3 for beta chain variable domain of TCR clone 287003 (TRBV6-1, TRBJ2-2)
CASSGQGRAGELFF

SEQ ID NO: 574007 - protein, 15 aa, Homo sapiens
  CDR3 for alpha chain variable domain of TCR clone 287004 (TRAV20, TRAJ58)
CAVQDLETSGSRLTF

SEQ ID NO: 574008 - protein, 16 aa, Homo sapiens
  CDR3 for beta chain variable domain of TCR clone 287004 (TRBV7-3, TRBJ2-2)
CASSLKRGTLSGELFF

SEQ ID NO: 574009 - protein, 13 aa, Homo sapiens
  CDR3 for alpha chain variable domain of TCR clone 287005 (TRAV1-2, TRAJ9)
CAALNTGGFKTIF

SEQ ID NO: 574010 - protein, 15 aa, Homo sapiens
  CDR3 for beta chain variable domain of TCR clone 287005 (TRBV15, TRBJ1-6)
CATSGALIHPSTLGT

SEQ ID NO: 574011 - protein, 12 aa, Homo sapiens
  CDR3 for alpha chain variable domain of TCR clone 287006 (TRAV29/DV5, TRAJ49)
CAATDTGNQFYF

SEQ ID NO: 574012 - protein, 17 aa, Homo sapiens
  CDR3 for beta chain variable domain of TCR clone 287006 (TRBV7-9, TRBJ2-1)
CASSLVASYPSYNERFF

SEQ ID NO: 574013 - protein, 16 aa, Homo sapiens
  CDR3 for alpha chain variable domain of TCR clone 287007 (TRAV3, TRAJ37)
CAVRPHGSGNTGKLIF

SEQ ID NO: 574014 - protein, 12 aa, Homo sapiens
  CDR3 for beta chain variable domain of TCR clone 287007 (TRBV12-4, TRBJ2-7)
CASSLGGYEQYF

SEQ ID NO: 574015 - protein, 10 aa, Homo sapiens
  CDR3 for alpha chain variable domain of TCR clone 287008 (TRAV2, TRAJ15)
MGQAGTALIF

SEQ ID NO: 574016 - protein, 13 aa, Homo sapiens
  CDR3 for beta chain variable domain of TCR clone 287008 (TRBV10-3, TRBJ2-7)
CASKLAVNYEQYF

SEQ ID NO: 574017 - protein, 14 aa, Homo sapiens
  CDR3 for alpha chain variable domain of TCR clone 287009 (TRAV8-4, TRAJ13)
CAVTLSGGYQKVTF

SEQ ID NO: 574018 - protein, 14 aa, Homo sapiens
  CDR3 for beta chain variable domain of TCR clone 287009 (TRBV7-2, TRBJ1-1)
CASSFLTGTTEAFF

SEQ ID NO: 574019 - protein, 16 aa, Homo sapiens
  CDR3 for alpha chain variable domain of TCR clone 287010 (TRAV35, TRAJ28)
CAGQRYSGAGSYQLTF

SEQ ID NO: 574020 - protein, 16 aa, Homo sapiens
  CDR3 for beta chain variable domain of TCR clone 287010 (TRBV19, TRBJ2-2)
CASRSPGTGATGELFF

SEQ ID NO: 574021 - protein, 14 aa, Homo sapiens
  CDR3 for alpha chain variable domain of TCR clone 287011 (TRAV30, TRAJ49)
CGTEIGNTGNQFYF

SEQ ID NO: 574022 - protein, 14 aa, Homo sapiens
  CDR3 for beta chain variable domain of TCR clone 287011 (TRBV7-9, TRBJ2-7)
CASTNGATIYEQYF

SEQ ID NO: 574023 - protein, 14 aa, Homo sapiens
  CDR3 for alpha chain variable domain of TCR clone 287012 (TRAV16, TRAJ33)
CALSAMDSNYQLSG

SEQ ID NO: 574024 - protein, 17 aa, Homo sapiens
  CDR3 for beta chain variable domain of TCR clone 287012 (TRBV25-1, TRBJ2-7)
CASSDARLVFSSYEQYF

SEQ ID NO: 574025 - protein, 15 aa, Homo sapiens
  CDR3 for alpha chain variable domain of TCR clone 287013 (TRAV12-1, TRAJ44)
CVVFVNTGTASKLPF

SEQ ID NO: 574026 - protein, 16 aa, Homo sapiens
  CDR3 for beta chain variable domain of TCR clone 287013 (TRBV7-3, TRBJ2-5)
CASSLMGGASEETQYF

SEQ ID NO: 574027 - protein, 16 aa, Homo sapiens
  CDR3 for alpha chain variable domain of TCR clone 287014 (TRAV30, TRAJ24)
CGTEIVDAYSWGKFQF

SEQ ID NO: 574028 - protein, 14 aa, Homo sapiens
  CDR3 for beta chain variable domain of TCR clone 287014 (TRBV13, TRBJ2-1)
CASSPRPRYNEQFF

SEQ ID NO: 574029 - protein, 15 aa, Homo sapiens
  CDR3 for alpha chain variable domain of TCR clone 287015 (TRAV21, TRAJ10)
CAVPLLTGGGNKRTV

SEQ ID NO: 574030 - protein, 14 aa, Homo sapiens
  CDR3 for beta chain variable domain of TCR clone 287015 (TRBV12-4, TRBJ1-1)
CASSLGTGGTEAFF

SEQ ID NO: 574031 - protein, 17 aa, Homo sapiens
  CDR3 for alpha chain variable domain of TCR clone 287016 (TRAV26-1, TRAJ53)
CIVRVDDSGGSNYKLTF

SEQ ID NO: 574032 - protein, 12 aa, Homo sapiens
  CDR3 for beta chain variable domain of TCR clone 287016 (TRBV12-4, TRBJ2-7)
YASSLGGYERYF

SEQ ID NO: 574033 - protein, 17 aa, Homo sapiens
  CDR3 for alpha chain variable domain of TCR clone 287017 (TRAV38-1, TRAJ28)
CAFMKPTSGAGSYQLTF

SEQ ID NO: 574034 - protein, 15 aa, Homo sapiens
  CDR3 for beta chain variable domain of TCR clone 287017 (TRBV5-1, TRBJ2-4)
CSSSLGGGGSYSQYF

SEQ ID NO: 574035 - protein, 14 aa, Homo sapiens
  CDR3 for alpha chain variable domain of TCR clone 287018 (TRAV13-1, TRAJ40)
CAASMTSGTYKYIF

SEQ ID NO: 574036 - protein, 14 aa, Homo sapiens
  CDR3 for beta chain variable domain of TCR clone 287018 (TRBV7-2, TRBJ1-1)
CASSFLTGTTEAFF

SEQ ID NO: 574037 - protein, 14 aa, Homo sapiens
  CDR3 for alpha chain variable domain of TCR clone 287019 (TRAV1-2, TRAJ8)
RAVREDTGFQKLVF

SEQ ID NO: 574038 - protein, 15 aa, Homo sapiens
  CDR3 for beta chain variable domain of TCR clone 287019 (TRBV6-3, TRBJ2-7)
CASSSRGTVFYEQYF

SEQ ID NO: 574039 - protein, 12 aa, Homo sapiens
  CDR3 for alpha chain variable domain of TCR clone 287020 (TRAV12-1, TRAJ40)
CVVYSGSYKYIF

SEQ ID NO: 574040 - protein, 12 aa, Homo sapiens
  CDR3 for beta chain variable domain of TCR clone 287020 (TRBV12-4, TRBJ2-1)
CASTYVLNEQFF

SEQ ID NO: 574041 - protein, 17 aa, Homo sapiens
  CDR3 for alpha chain variable domain of TCR clone 287021 (TRAV8-6, TRAJ58)
CAVSSWVGENSGSRLTF

SEQ ID NO: 574042 - protein, 14 aa, Homo sapiens
  CDR3 for beta chain variable domain of TCR clone 287021 (TRBV19, TRBJ2-1)
CASPTFVLSGEQFF

SEQ ID NO: 574043 - protein, 16 aa, Homo sapiens
  CDR3 for alpha chain variable domain of TCR clone 287022 (TRAV8-3, TRAJ44)
CAVGTFMTGTASKLTF

SEQ ID NO: 574044 - protein, 14 aa, Homo sapiens
  CDR3 for beta chain variable domain of TCR clone 287022 (TRBV7-3, TRBJ2-1)
CASSLAGGTNEQFF

SEQ ID NO: 574045 - protein, 12 aa, Homo sapiens
  CDR3 for alpha chain variable domain of TCR clone 287023 (TRAV12-3, TRAJ17)
CAITLTGNKLTF

SEQ ID NO: 574046 - protein, 16 aa, Homo sapiens
  CDR3 for beta chain variable domain of TCR clone 287023 (TRBV12-5, TRBJ2-5)
CASGPRTSGNQETQYF

SEQ ID NO: 574047 - protein, 17 aa, Homo sapiens
  CDR3 for alpha chain variable domain of TCR clone 287024 (TRAV26-2, TRAJ42)
CILRDVGYGGSQGNFIF

SEQ ID NO: 574048 - protein, 16 aa, Homo sapiens
  CDR3 for beta chain variable domain of TCR clone 287024 (TRBV12-4, TRBJ2-7)
CASSWIGGTGTYEQYF

SEQ ID NO: 574049 - protein, 10 aa, Homo sapiens
  CDR3 for alpha chain variable domain of TCR clone 287025 (TRAV36/DV7, TRAJ31)
CAVGEARLMF

SEQ ID NO: 574050 - protein, 15 aa, Homo sapiens
  CDR3 for beta chain variable domain of TCR clone 287025 (TRBV7-2, TRBJ2-7)
CASSLKGALTYEQYF

SEQ ID NO: 574051 - protein, 14 aa, Homo sapiens
  CDR3 for alpha chain variable domain of TCR clone 287026 (TRAV2, TRAJ9)
CAVEDRSGGFKTIF

SEQ ID NO: 574052 - protein, 13 aa, Homo sapiens
  CDR3 for beta chain variable domain of TCR clone 287026 (TRBV2, TRBJ1-1)
CASSVLMNTEAFF

SEQ ID NO: 574053 - protein, 16 aa, Homo sapiens
  CDR3 for alpha chain variable domain of TCR clone 287027 (TRAV23/DV6, TRAJ9)
CAASIGGNTGGFKTIF

SEQ ID NO: 574054 - protein, 12 aa, Homo sapiens
  CDR3 for beta chain variable domain of TCR clone 287027 (TRBV11-2, TRBJ2-1)
CASSVPREGQFF

SEQ ID NO: 574055 - protein, 11 aa, Homo sapiens
  CDR3 for alpha chain variable domain of TCR clone 287028 (TRAV12-2, TRAJ30)
CAVGRDDKIIV

SEQ ID NO: 574056 - protein, 14 aa, Homo sapiens
  CDR3 for beta chain variable domain of TCR clone 287028 (TRBV6-1, TRBJ1-3)
CASVQGGGGNTIYF

SEQ ID NO: 574057 - protein, 15 aa, Homo sapiens
  CDR3 for alpha chain variable domain of TCR clone 287029 (TRAV21, TRAJ53)
CATLNSGGSNYKLTF

SEQ ID NO: 574058 - protein, 18 aa, Homo sapiens
  CDR3 for beta chain variable domain of TCR clone 287029 (TRBV25-1, TRBJ1-2)
CASSGLQNGQGLIFGYTF

SEQ ID NO: 574059 - protein, 13 aa, Homo sapiens
  CDR3 for alpha chain variable domain of TCR clone 287030 (TRAV8-1, TRAJ39)
CAVANNTGNMLTF

SEQ ID NO: 574060 - protein, 15 aa, Homo sapiens
  CDR3 for beta chain variable domain of TCR clone 287030 (TRBV7-2, TRBJ2-1)
CASSLNRGAYNEQFF

SEQ ID NO: 574061 - protein, 12 aa, Homo sapiens
  CDR3 for alpha chain variable domain of TCR clone 287031 (TRAV25, TRAJ11)
YAGASGYSTLTF

SEQ ID NO: 574062 - protein, 14 aa, Homo sapiens
  CDR3 for beta chain variable domain of TCR clone 287031 (TRBV5-8, TRBJ2-3)
CASSLGQGTDTQYF

SEQ ID NO: 574063 - protein, 14 aa, Homo sapiens
  CDR3 for alpha chain variable domain of TCR clone 287032 (TRAV20, TRAJ44)
CAVQDTCTASKLTF

SEQ ID NO: 574064 - protein, 13 aa, Homo sapiens
  CDR3 for beta chain variable domain of TCR clone 287032 (TRBV29-1, TRBJ1-3)
CSAGTGRGNTMYF

SEQ ID NO: 574065 - protein, 14 aa, Homo sapiens
  CDR3 for alpha chain variable domain of TCR clone 287033 (TRAV1-2, TRAJ16)
CAVNRFSDGQKLLF

SEQ ID NO: 574066 - protein, 12 aa, Homo sapiens
  CDR3 for beta chain variable domain of TCR clone 287033 (TRBV7-9, TRBJ1-1)
CASSLEGTEAFF

SEQ ID NO: 574067 - protein, 12 aa, Homo sapiens
  CDR3 for alpha chain variable domain of TCR clone 287034 (TRAV1-1, TRAJ8)
CSGGTGFQKLVF

SEQ ID NO: 574068 - protein, 16 aa, Homo sapiens
  CDR3 for beta chain variable domain of TCR clone 287034 (TRBV12-4, TRBJ1-5)
CASSRPVGGSNQHQHF

SEQ ID NO: 574069 - protein, 14 aa, Homo sapiens
  CDR3 for alpha chain variable domain of TCR clone 287035 (TRAV13-1, TRAJ44)
CAATATGTASKLTF

SEQ ID NO: 574070 - protein, 13 aa, Homo sapiens
  CDR3 for beta chain variable domain of TCR clone 287035 (TRBV5-5, TRBJ1-2)
CASSVWRGEDYAF

SEQ ID NO: 574071 - protein, 16 aa, Homo sapiens
  CDR3 for alpha chain variable domain of TCR clone 287036 (TRAV23/DV6, TRAJ4)
CAANLSGGYNKLILEQ

SEQ ID NO: 574072 - protein, 11 aa, Homo sapiens
  CDR3 for beta chain variable domain of TCR clone 287036 (TRBV7-9, TRBJ2-3)
CASSPTDTQYF

SEQ ID NO: 574073 - protein, 11 aa, Homo sapiens
  CDR3 for alpha chain variable domain of TCR clone 287037 (TRAV21, TRAJ9)
RAVPGGFKTIF

SEQ ID NO: 574074 - protein, 17 aa, Homo sapiens
  CDR3 for beta chain variable domain of TCR clone 287037 (TRBV7-9, TRBJ2-5)
CATAGGARDPVLRARHA

SEQ ID NO: 574075 - protein, 14 aa, Homo sapiens
  CDR3 for alpha chain variable domain of TCR clone 287038 (TRAV23/DV6, TRAJ36)
CAASRRTGANNLFF

SEQ ID NO: 574076 - protein, 14 aa, Homo sapiens
  CDR3 for beta chain variable domain of TCR clone 287038 (TRBV4-1, TRBJ2-2)
CASSQAVNTGELFF

SEQ ID NO: 574077 - protein, 14 aa, Homo sapiens
  CDR3 for alpha chain variable domain of TCR clone 287039 (TRAV21, TRAJ3)
CAVTGYSSASKIIF

SEQ ID NO: 574078 - protein, 13 aa, Homo sapiens
  CDR3 for beta chain variable domain of TCR clone 287039 (TRBV20-1, TRBJ1-6)
CSAPLGVGSPLHF

SEQ ID NO: 574079 - protein, 13 aa, Homo sapiens
  CDR3 for alpha chain variable domain of TCR clone 287040 (TRAV13-1, TRAJ5)
CAAEHTGRRALTF

SEQ ID NO: 574080 - protein, 15 aa, Homo sapiens
  CDR3 for beta chain variable domain of TCR clone 287040 (TRBV4-3, TRBJ1-1)
CASSQELGRGTEAFF

SEQ ID NO: 574081 - protein, 16 aa, Homo sapiens
  CDR3 for alpha chain variable domain of TCR clone 287041 (TRAV8-6, TRAJ28)
CAVTSKPGAGSYQLTF

SEQ ID NO: 574082 - protein, 16 aa, Homo sapiens
  CDR3 for beta chain variable domain of TCR clone 287041 (TRBV12-5, TRBJ2-5)
CASGPRTSGNQETQYF

SEQ ID NO: 574083 - protein, 12 aa, Homo sapiens
  CDR3 for alpha chain variable domain of TCR clone 287042 (TRAV10, TRAJ31)
CVVSANNARLMF

SEQ ID NO: 574084 - protein, 14 aa, Homo sapiens
  CDR3 for beta chain variable domain of TCR clone 287042 (TRBV4-2, TRBJ2-1)
CASGLDRAYNEQFF

SEQ ID NO: 574085 - protein, 13 aa, Homo sapiens
  CDR3 for alpha chain variable domain of TCR clone 287043 (TRAV27, TRAJ53)
CAGQGGSNYKLTF

SEQ ID NO: 574086 - protein, 13 aa, Homo sapiens
  CDR3 for beta chain variable domain of TCR clone 287043 (TRBV29-1, TRBJ1-1)
CSVESGFGTDAFF

SEQ ID NO: 574087 - protein, 18 aa, Homo sapiens
  CDR3 for alpha chain variable domain of TCR clone 287044 (TRAV26-2, TRAJ33)
CCVLLHPEEPASNYQLIW

SEQ ID NO: 574088 - protein, 15 aa, Homo sapiens
  CDR3 for beta chain variable domain of TCR clone 287044 (TRBV11-3, TRBJ2-1)
CASSLGDSSHNEQFF

SEQ ID NO: 574089 - protein, 15 aa, Homo sapiens
  CDR3 for alpha chain variable domain of TCR clone 287045 (TRAV20, TRAJ37)
CAVQARSSNTGKLIF

SEQ ID NO: 574090 - protein, 18 aa, Homo sapiens
  CDR3 for beta chain variable domain of TCR clone 287045 (TRBV20-1, TRBJ2-6)
CSAETTPTHGSGANVLTF

SEQ ID NO: 574091 - protein, 17 aa, Homo sapiens
  CDR3 for alpha chain variable domain of TCR clone 287046 (TRAV27, TRAJ42)
CAERVIYYGGSQGNLIF

SEQ ID NO: 574092 - protein, 16 aa, Homo sapiens
  CDR3 for beta chain variable domain of TCR clone 287046 (TRBV7-9, TRBJ2-1)
CASSDVAGGSYNEQFF

SEQ ID NO: 574093 - protein, 15 aa, Homo sapiens
  CDR3 for alpha chain variable domain of TCR clone 287047 (TRAV12-1, TRAJ36)
CVGNEHKTGANNLFF

SEQ ID NO: 574094 - protein, 12 aa, Homo sapiens
  CDR3 for beta chain variable domain of TCR clone 287047 (TRBV29-1, TRBJ2-3)
CSVTGGADTQYF

SEQ ID NO: 574095 - protein, 11 aa, Homo sapiens
  CDR3 for alpha chain variable domain of TCR clone 287048 (TRAV17, TRAJ9)
CATTGGFKTIL

SEQ ID NO: 574096 - protein, 13 aa, Homo sapiens
  CDR3 for beta chain variable domain of TCR clone 287048 (TRBV12-4, TRBJ1-2)
CASSLDSNYGYTF

SEQ ID NO: 574097 - protein, 16 aa, Homo sapiens
  CDR3 for alpha chain variable domain of TCR clone 287049 (TRAV30, TRAJ24)
CGTELVDADSWGKFQF

SEQ ID NO: 574098 - protein, 17 aa, Homo sapiens
  CDR3 for beta chain variable domain of TCR clone 287049 (TRBV20-1, TRBJ2-1)
CSAPPRLAGTRYNEQFF

SEQ ID NO: 574099 - protein, 11 aa, Homo sapiens
  CDR3 for alpha chain variable domain of TCR clone 287050 (TRAV1-2, TRAJ40)
CAGPGNYKYIF

SEQ ID NO: 574100 - protein, 15 aa, Homo sapiens
  CDR3 for beta chain variable domain of TCR clone 287050 (TRBV4-1, TRBJ2-1)
CASSQDAGGLYEQFF

SEQ ID NO: 574101 - protein, 12 aa, Homo sapiens
  CDR3 for alpha chain variable domain of TCR clone 287051 (TRAV12-1, TRAJ40)
CVVYSGTYKYIF

SEQ ID NO: 574102 - protein, 12 aa, Homo sapiens
  CDR3 for beta chain variable domain of TCR clone 287051 (TRBV12-4, TRBJ2-1)
CASSLVRVEQFF

SEQ ID NO: 574103 - protein, 18 aa, Homo sapiens
  CDR3 for alpha chain variable domain of TCR clone 287052 (TRAV12-3, TRAJ52)
CAMSVGGAGGTSYGKLTF

SEQ ID NO: 574104 - protein, 16 aa, Homo sapiens
  CDR3 for beta chain variable domain of TCR clone 287052 (TRBV28, TRBJ2-7)
CASSSGTSGRGYEQYF

SEQ ID NO: 574105 - protein, 19 aa, Homo sapiens
  CDR3 for alpha chain variable domain of TCR clone 287053 (TRAV29/DV5, TRAJ49)
CSVLLCSKLTVDTGNQFYF

SEQ ID NO: 574106 - protein, 17 aa, Homo sapiens
  CDR3 for beta chain variable domain of TCR clone 287053 (TRBV13, TRBJ2-3)
CASSLSGVAGGEEYAVF

SEQ ID NO: 574107 - protein, 14 aa, Homo sapiens
  CDR3 for alpha chain variable domain of TCR clone 287054 (TRAV26-1, TRAJ49)
CIVSPSNTGNQFYF

SEQ ID NO: 574108 - protein, 15 aa, Homo sapiens
  CDR3 for beta chain variable domain of TCR clone 287054 (TRBV19, TRBJ1-1)
CASMGFRDVNTEAFF

SEQ ID NO: 574109 - protein, 17 aa, Homo sapiens
  CDR3 for alpha chain variable domain of TCR clone 287055 (TRAV8-3, TRAJ38)
CAVGASNAGNNHIQNPD

SEQ ID NO: 574110 - protein, 15 aa, Homo sapiens
  CDR3 for beta chain variable domain of TCR clone 287055 (TRBV11-3, TRBJ1-3)
CASSLFGPSGNTMYF

SEQ ID NO: 574111 - protein, 15 aa, Homo sapiens
  CDR3 for alpha chain variable domain of TCR clone 287056 (TRAV3, TRAJ5)
CAVRDLDTGRRALTF

SEQ ID NO: 574112 - protein, 16 aa, Homo sapiens
  CDR3 for beta chain variable domain of TCR clone 287056 (TRBV9, TRBJ2-1)
CASSVGGGGNYNEQFF

SEQ ID NO: 574113 - protein, 13 aa, Homo sapiens
  CDR3 for alpha chain variable domain of TCR clone 287057 (TRAV13-1, TRAJ4)
CAASIGSYNKLIF

SEQ ID NO: 574114 - protein, 16 aa, Homo sapiens
  CDR3 for beta chain variable domain of TCR clone 287057 (TRBV20-1, TRBJ2-1)
CSAPGLAGSYSDEQFF

SEQ ID NO: 574115 - protein, 21 aa, Homo sapiens
  CDR3 for alpha chain variable domain of TCR clone 287058 (TRAV3, )
CAVRPTPDIQNPDPAVYQLRD

SEQ ID NO: 574116 - protein, 19 aa, Homo sapiens
  CDR3 for beta chain variable domain of TCR clone 287058 (TRBV11-3, TRBJ2-5)
CASSDTSGGSRPSTSGQAR

SEQ ID NO: 574117 - protein, 14 aa, Homo sapiens
  CDR3 for alpha chain variable domain of TCR clone 287059 (TRAV14/DV4, TRAJ49)
CAMREGVNGNQFYF

SEQ ID NO: 574118 - protein, 14 aa, Homo sapiens
  CDR3 for beta chain variable domain of TCR clone 287059 (TRBV5-1, TRBJ1-5)
CASSLESGRRPQHF

SEQ ID NO: 574119 - protein, 14 aa, Homo sapiens
  CDR3 for alpha chain variable domain of TCR clone 287060 (TRAV26-1, TRAJ21)
CIVRVVYNFNKFYF

SEQ ID NO: 574120 - protein, 17 aa, Homo sapiens
  CDR3 for beta chain variable domain of TCR clone 287060 (TRBV11-2, TRBJ2-1)
CASSLYPQGVEYNEQFF

SEQ ID NO: 574121 - protein, 14 aa, Homo sapiens
  CDR3 for alpha chain variable domain of TCR clone 287061 (TRAV8-3, TRAJ13)
CAVGAQEGYQNVTF

SEQ ID NO: 574122 - protein, 13 aa, Homo sapiens
  CDR3 for beta chain variable domain of TCR clone 287061 (TRBV11-2, TRBJ2-5)
CASSSTGEETQYF

SEQ ID NO: 574123 - protein, 11 aa, Homo sapiens
  CDR3 for alpha chain variable domain of TCR clone 287062 (TRAV27, TRAJ45)
CAGAQEEVLTD

SEQ ID NO: 574124 - protein, 17 aa, Homo sapiens
  CDR3 for beta chain variable domain of TCR clone 287062 (TRBV11-2, TRBJ2-1)
CAGSLYPPGVEYNEQFF

SEQ ID NO: 574125 - protein, 14 aa, Homo sapiens
  CDR3 for alpha chain variable domain of TCR clone 287063 (TRAV17, TRAJ49)
CATDGRDTGNQFYF

SEQ ID NO: 574126 - protein, 14 aa, Homo sapiens
  CDR3 for beta chain variable domain of TCR clone 287063 (TRBV5-5, TRBJ1-2)
CASSFGQINYGYTF

SEQ ID NO: 574127 - protein, 12 aa, Homo sapiens
  CDR3 for alpha chain variable domain of TCR clone 287064 (TRAV2, TRAJ33)
CAFMDSNYQLMW

SEQ ID NO: 574128 - protein, 16 aa, Homo sapiens
  CDR3 for beta chain variable domain of TCR clone 287064 (TRBV2, TRBJ2-7)
CASSEPWTGPSYEQYF

SEQ ID NO: 574129 - protein, 14 aa, Homo sapiens
  CDR3 for alpha chain variable domain of TCR clone 287065 (TRAV1-2, TRAJ16)
CAVNRFSDGQKLLF

SEQ ID NO: 574130 - protein, 14 aa, Homo sapiens
  CDR3 for beta chain variable domain of TCR clone 287065 (TRBV7-3, TRBJ2-1)
CASSLAGGTNQQFF

SEQ ID NO: 574131 - protein, 14 aa, Homo sapiens
  CDR3 for alpha chain variable domain of TCR clone 287066 (TRAV12-3, TRAJ42)
CAMNYGGSQGNLIF

SEQ ID NO: 574132 - protein, 14 aa, Homo sapiens
  CDR3 for beta chain variable domain of TCR clone 287066 (TRBV7-2, TRBJ2-5)
CASSCTQGQETQYF

SEQ ID NO: 574133 - protein, 15 aa, Homo sapiens
  CDR3 for alpha chain variable domain of TCR clone 287067 (TRAV4, TRAJ4)
CLVGDWSGGYNKLIF

SEQ ID NO: 574134 - protein, 13 aa, Homo sapiens
  CDR3 for beta chain variable domain of TCR clone 287067 (TRBV20-1, TRBJ2-5)
CSARGDYQETQYF

SEQ ID NO: 574135 - protein, 18 aa, Homo sapiens
  CDR3 for alpha chain variable domain of TCR clone 287068 (TRAV26-1, TRAJ23)
CIVRVGLEVWNQGGKLIC

SEQ ID NO: 574136 - protein, 16 aa, Homo sapiens
  CDR3 for beta chain variable domain of TCR clone 287068 (TRBV12-4, TRBJ2-5)
CASSFFVRGRQETQYF

SEQ ID NO: 574137 - protein, 16 aa, Homo sapiens
  CDR3 for alpha chain variable domain of TCR clone 287069 (TRAV41, TRAJ53)
CAVRFGSGGSNYKLTF

SEQ ID NO: 574138 - protein, 14 aa, Homo sapiens
  CDR3 for beta chain variable domain of TCR clone 287069 (TRBV7-2, TRBJ2-7)
CASRSQGAAYEQYF

SEQ ID NO: 574139 - protein, 16 aa, Homo sapiens
  CDR3 for alpha chain variable domain of TCR clone 287070 (TRAV8-3, TRAJ44)
CAVRASNTGTASKLTF

SEQ ID NO: 574140 - protein, 15 aa, Homo sapiens
  CDR3 for beta chain variable domain of TCR clone 287070 (TRBV27, TRBJ1-5)
CASTFNRGSNQPQHF

SEQ ID NO: 574141 - protein, 12 aa, Homo sapiens
  CDR3 for alpha chain variable domain of TCR clone 287071 (TRAV12-3, TRAJ17)
CAMTLTGNTLTF

SEQ ID NO: 574142 - protein, 11 aa, Homo sapiens
  CDR3 for beta chain variable domain of TCR clone 287071 (TRBV12-4, TRBJ2-2)
CASSSAGELFF

SEQ ID NO: 574143 - protein, 14 aa, Homo sapiens
  CDR3 for alpha chain variable domain of TCR clone 287072 (TRAV26-1, TRAJ34)
CIVRVAYNTDKLIF

SEQ ID NO: 574144 - protein, 15 aa, Homo sapiens
  CDR3 for beta chain variable domain of TCR clone 287072 (TRBV20-1, TRBJ2-7)
CSARVPAAYFYEQDF

SEQ ID NO: 574145 - protein, 13 aa, Homo sapiens
  CDR3 for alpha chain variable domain of TCR clone 287073 (TRAV3, TRAJ21)
CAVREPDFNKFYF

SEQ ID NO: 574146 - protein, 18 aa, Homo sapiens
  CDR3 for beta chain variable domain of TCR clone 287073 (TRBV20-1, TRBJ2-6)
CSAETTPTHGSRANVLTF

SEQ ID NO: 574147 - protein, 12 aa, Homo sapiens
  CDR3 for alpha chain variable domain of TCR clone 287074 (TRAV2, TRAJ10)
FASTGGGNKLTF

SEQ ID NO: 574148 - protein, 14 aa, Homo sapiens
  CDR3 for beta chain variable domain of TCR clone 287074 (TRBV7-2, TRBJ2-2)
CASRGQGAAGELFF

SEQ ID NO: 574149 - protein, 13 aa, Homo sapiens
  CDR3 for alpha chain variable domain of TCR clone 287075 (TRAV30, TRAJ34)
CGTVGYNTDKLIF

SEQ ID NO: 574150 - protein, 16 aa, Homo sapiens
  CDR3 for beta chain variable domain of TCR clone 287075 (TRBV7-9, TRBJ1-2)
CVSSLGFSSGEDGYTF

SEQ ID NO: 574151 - protein, 13 aa, Homo sapiens
  CDR3 for alpha chain variable domain of TCR clone 287076 (TRAV38-1, TRAJ42)
CARWGGSQGNLIF

SEQ ID NO: 574152 - protein, 17 aa, Homo sapiens
  CDR3 for beta chain variable domain of TCR clone 287076 (TRBV20-1, TRBJ2-1)
CSARDPLAGVWDNEQYF

SEQ ID NO: 574153 - protein, 15 aa, Homo sapiens
  CDR3 for alpha chain variable domain of TCR clone 287077 (TRAV25, TRAJ53)
CPTSNSGGSNYKLTF

SEQ ID NO: 574154 - protein, 14 aa, Homo sapiens
  CDR3 for beta chain variable domain of TCR clone 287077 (TRBV11-2, TRBJ2-3)
CASSRVARTDTQYF

SEQ ID NO: 574155 - protein, 14 aa, Homo sapiens
  CDR3 for alpha chain variable domain of TCR clone 287078 (TRAV1-2, TRAJ8)
CAVREDTGFQKLGF

SEQ ID NO: 574156 - protein, 12 aa, Homo sapiens
  CDR3 for beta chain variable domain of TCR clone 287078 (TRBV7-9, TRBJ2-7)
CASSIKREEQYF

SEQ ID NO: 574157 - protein, 13 aa, Homo sapiens
  CDR3 for alpha chain variable domain of TCR clone 287079 (TRAV26-1, TRAJ48)
CIVRVVGDEKLTF

SEQ ID NO: 574158 - protein, 14 aa, Homo sapiens
  CDR3 for beta chain variable domain of TCR clone 287079 (TRBV12-5, TRBJ2-5)
CASGSRPHQETQYF

SEQ ID NO: 574159 - protein, 13 aa, Homo sapiens
  CDR3 for alpha chain variable domain of TCR clone 287080 (TRAV3, TRAJ21)
CAGREPDFNKFYF

SEQ ID NO: 574160 - protein, 16 aa, Homo sapiens
  CDR3 for beta chain variable domain of TCR clone 287080 (TRBV5-1, TRBJ2-3)
CASSLGLAVYTDTQYF

SEQ ID NO: 574161 - protein, 14 aa, Homo sapiens
  CDR3 for alpha chain variable domain of TCR clone 287081 (TRAV1-2, TRAJ16)
CAVNRFSDGQKLLF

SEQ ID NO: 574162 - protein, 16 aa, Homo sapiens
  CDR3 for beta chain variable domain of TCR clone 287081 (TRBV9, TRBJ2-1)
GASSVGGGGNYNEQFF

SEQ ID NO: 574163 - protein, 12 aa, Homo sapiens
  CDR3 for alpha chain variable domain of TCR clone 287082 (TRAV16, TRAJ9)
CALSSGGFKTIF

SEQ ID NO: 574164 - protein, 14 aa, Homo sapiens
  CDR3 for beta chain variable domain of TCR clone 287082 (TRBV7-9, TRBJ2-1)
CVSCLAGPYNEQFF

SEQ ID NO: 574165 - protein, 15 aa, Homo sapiens
  CDR3 for alpha chain variable domain of TCR clone 287083 (TRAV26-1, TRAJ29)
CIVRVEGSGNTPLVF

SEQ ID NO: 574166 - protein, 16 aa, Homo sapiens
  CDR3 for beta chain variable domain of TCR clone 287083 (TRBV19, TRBJ1-1)
CASSPTRFWPGTEDFF

SEQ ID NO: 574167 - protein, 13 aa, Homo sapiens
  CDR3 for alpha chain variable domain of TCR clone 287084 (TRAV38-2/DV8, TRAJ34)
CAYRTWNTDKLFF

SEQ ID NO: 574168 - protein, 16 aa, Homo sapiens
  CDR3 for beta chain variable domain of TCR clone 287084 (TRBV19, TRBJ2-1)
CDSSKAGPSSYNEQFF

SEQ ID NO: 574169 - protein, 14 aa, Homo sapiens
  CDR3 for alpha chain variable domain of TCR clone 287085 (TRAV12-2, TRAJ40)
CAVKIPSGTYKYIF

SEQ ID NO: 574170 - protein, 17 aa, Homo sapiens
  CDR3 for beta chain variable domain of TCR clone 287085 (TRBV7-8, TRBJ2-6)
CASSAGTGGAGASVLTF

SEQ ID NO: 574171 - protein, 14 aa, Homo sapiens
  CDR3 for alpha chain variable domain of TCR clone 287086 (TRAV3, TRAJ6)
CAVRDWGGSYIPTF

SEQ ID NO: 574172 - protein, 15 aa, Homo sapiens
  CDR3 for beta chain variable domain of TCR clone 287086 (TRBV13, TRBJ1-2)
CASSLGRQPGYGYTF

SEQ ID NO: 574173 - protein, 15 aa, Homo sapiens
  CDR3 for alpha chain variable domain of TCR clone 287087 (TRAV3, TRAJ20)
CAVRDIKLSDYKLSF

SEQ ID NO: 574174 - protein, 13 aa, Homo sapiens
  CDR3 for beta chain variable domain of TCR clone 287087 (TRBV20-1, TRBJ1-1)
CSARVGGNTDAFF

SEQ ID NO: 574175 - protein, 15 aa, Homo sapiens
  CDR3 for alpha chain variable domain of TCR clone 287088 (TRAV21, TRAJ38)
CAVRQDAGNNRKLIW

SEQ ID NO: 574176 - protein, 16 aa, Homo sapiens
  CDR3 for beta chain variable domain of TCR clone 287088 (TRBV4-2, TRBJ1-1)
CASRPLDGGGDTEAFV

SEQ ID NO: 574177 - protein, 14 aa, Homo sapiens
  CDR3 for alpha chain variable domain of TCR clone 287089 (TRAV16, TRAJ4)
CALHLSGGYNKLIF

SEQ ID NO: 574178 - protein, 15 aa, Homo sapiens
  CDR3 for beta chain variable domain of TCR clone 287089 (TRBV7-2, TRBJ2-7)
CASSTRLAGVDEQYF

SEQ ID NO: 574179 - protein, 15 aa, Homo sapiens
  CDR3 for alpha chain variable domain of TCR clone 287090 (TRAV8-3, TRAJ40)
CAAPSLGSGTYKYIF

SEQ ID NO: 574180 - protein, 13 aa, Homo sapiens
  CDR3 for beta chain variable domain of TCR clone 287090 (TRBV7-3, TRBJ1-1)
CASSQDWGAEAFF

SEQ ID NO: 574181 - protein, 11 aa, Homo sapiens
  CDR3 for alpha chain variable domain of TCR clone 287091 (TRAV21, TRAJ11)
CAVNGYSTLTF

SEQ ID NO: 574182 - protein, 12 aa, Homo sapiens
  CDR3 for beta chain variable domain of TCR clone 287091 (TRBV28, TRBJ2-3)
CASSLYRDTQYF

SEQ ID NO: 574183 - protein, 14 aa, Homo sapiens
  CDR3 for alpha chain variable domain of TCR clone 287092 (TRAV21, TRAJ35)
CAVMQIGFGNVLHC

SEQ ID NO: 574184 - protein, 12 aa, Homo sapiens
  CDR3 for beta chain variable domain of TCR clone 287092 (TRBV7-9, TRBJ2-7)
CASSIKREEQYF

SEQ ID NO: 574185 - protein, 17 aa, Homo sapiens
  CDR3 for alpha chain variable domain of TCR clone 287093 (TRAV26-1, TRAJ53)
CIVRVDDSGGSNYKLTF

SEQ ID NO: 574186 - protein, 14 aa, Homo sapiens
  CDR3 for beta chain variable domain of TCR clone 287093 (TRBV20-1, TRBJ2-7)
CSAPELAGVGEQYF

SEQ ID NO: 574187 - protein, 10 aa, Homo sapiens
  CDR3 for alpha chain variable domain of TCR clone 287094 (TRAV1-2, TRAJ31)
CAFFDARLMF

SEQ ID NO: 574188 - protein, 19 aa, Homo sapiens
  CDR3 for beta chain variable domain of TCR clone 287094 (TRBV25-1, TRBJ2-2)
CAILVYRVDRGRKTGELFF

SEQ ID NO: 574189 - protein, 13 aa, Homo sapiens
  CDR3 for alpha chain variable domain of TCR clone 287095 (TRAV12-1, TRAJ21)
CVVLGDNFNKFYF

SEQ ID NO: 574190 - protein, 14 aa, Homo sapiens
  CDR3 for beta chain variable domain of TCR clone 287095 (TRBV7-3, TRBJ2-2)
CASSLYPLTGELFF

SEQ ID NO: 574191 - protein, 17 aa, Homo sapiens
  CDR3 for alpha chain variable domain of TCR clone 287096 (TRAV38-1, TRAJ28)
CAFMKPTSGAESYQLTF

SEQ ID NO: 574192 - protein, 15 aa, Homo sapiens
  CDR3 for beta chain variable domain of TCR clone 287096 (TRBV5-1, TRBJ2-4)
CASSLGGGGSYIQYF

SEQ ID NO: 574193 - protein, 14 aa, Homo sapiens
  CDR3 for alpha chain variable domain of TCR clone 287097 (TRAV35, TRAJ33)
CAGSSHDSNYQLIW

SEQ ID NO: 574194 - protein, 15 aa, Homo sapiens
  CDR3 for beta chain variable domain of TCR clone 287097 (TRBV20-1, TRBJ2-7)
CSAESGTSGVYEQYF

SEQ ID NO: 574195 - protein, 18 aa, Homo sapiens
  CDR3 for alpha chain variable domain of TCR clone 287098 (TRAV3, TRAJ17)
CAVRARRGGRGCRQHANF

SEQ ID NO: 574196 - protein, 14 aa, Homo sapiens
  CDR3 for beta chain variable domain of TCR clone 287098 (TRBV4-1, TRBJ2-2)
CASSQAVNTGELFF

SEQ ID NO: 574197 - protein, 14 aa, Homo sapiens
  CDR3 for alpha chain variable domain of TCR clone 287099 (TRAV1-2, TRAJ8)
CAVREDTGFQKLVF

SEQ ID NO: 574198 - protein, 15 aa, Homo sapiens
  CDR3 for beta chain variable domain of TCR clone 287099 (TRBV20-1, TRBJ2-7)
CSARYRVSGMDEQYF

SEQ ID NO: 574199 - protein, 13 aa, Homo sapiens
  CDR3 for alpha chain variable domain of TCR clone 287100 (TRAV2, TRAJ24)
CAVSTDSWGKLQF

SEQ ID NO: 574200 - protein, 14 aa, Homo sapiens
  CDR3 for beta chain variable domain of TCR clone 287100 (TRBV13, TRBJ2-5)
CASSLGTAKETQYF

SEQ ID NO: 574201 - protein, 14 aa, Homo sapiens
  CDR3 for alpha chain variable domain of TCR clone 287101 (TRAV26-1, TRAJ40)
CIVRVARGTYKYIF

SEQ ID NO: 574202 - protein, 14 aa, Homo sapiens
  CDR3 for beta chain variable domain of TCR clone 287101 (TRBV7-3, TRBJ2-7)
CASSLKADSYERYF

SEQ ID NO: 574203 - protein, 12 aa, Homo sapiens
  CDR3 for alpha chain variable domain of TCR clone 287102 (TRAV13-2, TRAJ39)
CAENNAGNMLTF

SEQ ID NO: 574204 - protein, 15 aa, Homo sapiens
  CDR3 for beta chain variable domain of TCR clone 287102 (TRBV6-1, TRBJ2-4)
CASSEAVWPINIQYF

SEQ ID NO: 574205 - protein, 15 aa, Homo sapiens
  CDR3 for alpha chain variable domain of TCR clone 287103 (TRAV26-1, TRAJ29)
CIVRVEGSGNTPLVF

SEQ ID NO: 574206 - protein, 15 aa, Homo sapiens
  CDR3 for beta chain variable domain of TCR clone 287103 (TRBV12-4, TRBJ1-1)
CQQQDRVVANTAAFF

SEQ ID NO: 574207 - protein, 20 aa, Homo sapiens
  CDR3 for alpha chain variable domain of TCR clone 287104 (TRAV12-1, TRAJ42)
SSVIQPPTSVTGGSQGNLIL

SEQ ID NO: 574208 - protein, 18 aa, Homo sapiens
  CDR3 for beta chain variable domain of TCR clone 287104 (TRBV11-2, TRBJ2-3)
CASSLGGASRGAPNTQYF

SEQ ID NO: 574209 - protein, 14 aa, Homo sapiens
  CDR3 for alpha chain variable domain of TCR clone 287105 (TRAV12-2, TRAJ53)
CAVKGGGSNYKLTL

SEQ ID NO: 574210 - protein, 17 aa, Homo sapiens
  CDR3 for beta chain variable domain of TCR clone 287105 (TRBV28, TRBJ2-3)
CASSPTPAGGRVDTQYF

SEQ ID NO: 574211 - protein, 16 aa, Homo sapiens
  CDR3 for alpha chain variable domain of TCR clone 287106 (TRAV26-1, TRAJ47)
CIVRVVLSQYGNKLDF

SEQ ID NO: 574212 - protein, 16 aa, Homo sapiens
  CDR3 for beta chain variable domain of TCR clone 287106 (TRBV5-1, TRBJ2-1)
CASSFGVSGSYNEQFF

SEQ ID NO: 574213 - protein, 15 aa, Homo sapiens
  CDR3 for alpha chain variable domain of TCR clone 287107 (TRAV2, TRAJ13)
CATPSSSGGYQKVTF

SEQ ID NO: 574214 - protein, 14 aa, Homo sapiens
  CDR3 for beta chain variable domain of TCR clone 287107 (TRBV4-2, TRBJ2-1)
CASGLDRAYNEQFF

SEQ ID NO: 574215 - protein, 17 aa, Homo sapiens
  CDR3 for alpha chain variable domain of TCR clone 287108 (TRAV3, TRAJ12)
CAVRDGGRVDSSYKLIF

SEQ ID NO: 574216 - protein, 14 aa, Homo sapiens
  CDR3 for beta chain variable domain of TCR clone 287108 (TRBV7-9, TRBJ1-2)
CASSRQGTNYGYTF

SEQ ID NO: 574217 - protein, 15 aa, Homo sapiens
  CDR3 for alpha chain variable domain of TCR clone 287109 (TRAV8-3, TRAJ27)
CAVGPSKTNAGKSTF

SEQ ID NO: 574218 - protein, 13 aa, Homo sapiens
  CDR3 for beta chain variable domain of TCR clone 287109 (TRBV4-1, TRBJ2-2)
CASSQENTGELFF

SEQ ID NO: 574219 - protein, 14 aa, Homo sapiens
  CDR3 for alpha chain variable domain of TCR clone 287110 (TRAV12-3, TRAJ10)
SHLPLTGGGNKLTF

SEQ ID NO: 574220 - protein, 13 aa, Homo sapiens
  CDR3 for beta chain variable domain of TCR clone 287110 (TRBV7-7, TRBJ2-5)
GASSRSGQETQYF

SEQ ID NO: 574221 - protein, 15 aa, Homo sapiens
  CDR3 for alpha chain variable domain of TCR clone 287111 (TRAV4, TRAJ39)
CLVGPDNNAGNMLTF

SEQ ID NO: 574222 - protein, 13 aa, Homo sapiens
  CDR3 for beta chain variable domain of TCR clone 287111 (TRBV11-2, TRBJ2-5)
CASSSTGEETQYF

SEQ ID NO: 574223 - protein, 12 aa, Homo sapiens
  CDR3 for alpha chain variable domain of TCR clone 287112 (TRAV21, TRAJ33)
CAKMDSNNQLIW

SEQ ID NO: 574224 - protein, 14 aa, Homo sapiens
  CDR3 for beta chain variable domain of TCR clone 287112 (TRBV2, TRBJ2-7)
CASSLTSGGYEQYL

SEQ ID NO: 574225 - protein, 17 aa, Homo sapiens
  CDR3 for alpha chain variable domain of TCR clone 287113 (TRAV13-1, TRAJ28)
CAASPPHSGAGSYQLTF

SEQ ID NO: 574226 - protein, 15 aa, Homo sapiens
  CDR3 for beta chain variable domain of TCR clone 287113 (TRBV6-3, TRBJ2-2)
CASSFLATLTGELFF

SEQ ID NO: 574227 - protein, 15 aa, Homo sapiens
  CDR3 for alpha chain variable domain of TCR clone 287114 (TRAV8-4, TRAJ3)
CTVTGENLVQQCFQD

SEQ ID NO: 574228 - protein, 16 aa, Homo sapiens
  CDR3 for beta chain variable domain of TCR clone 287114 (TRBV4-2, TRBJ1-1)
CASSQAGFGMNTEAFF

SEQ ID NO: 574229 - protein, 16 aa, Homo sapiens
  CDR3 for alpha chain variable domain of TCR clone 287115 (TRAV26-1, TRAJ53)
CIVRVAMGGSNYKLTF

SEQ ID NO: 574230 - protein, 16 aa, Homo sapiens
  CDR3 for beta chain variable domain of TCR clone 287115 (TRBV28, TRBJ2-7)
CTSSLFFETGGPEQYF

SEQ ID NO: 574231 - protein, 12 aa, Homo sapiens
  CDR3 for alpha chain variable domain of TCR clone 287116 (TRAV12-3, TRAJ49)
CAVSWTGNQFYF

SEQ ID NO: 574232 - protein, 18 aa, Homo sapiens
  CDR3 for beta chain variable domain of TCR clone 287116 (TRBV7-8, TRBJ2-1)
CASSPAEGLAGGLNEQFF

SEQ ID NO: 574233 - protein, 14 aa, Homo sapiens
  CDR3 for alpha chain variable domain of TCR clone 287117 (TRAV17, TRAJ16)
CATDEFSDGQKLLF

SEQ ID NO: 574234 - protein, 15 aa, Homo sapiens
  CDR3 for beta chain variable domain of TCR clone 287117 (TRBV18, TRBJ2-1)
CASSPPSASYNEQFF

SEQ ID NO: 574235 - protein, 14 aa, Homo sapiens
  CDR3 for alpha chain variable domain of TCR clone 287118 (TRAV1-2, TRAJ8)
CAVREDKGFQKLVF

SEQ ID NO: 574236 - protein, 13 aa, Homo sapiens
  CDR3 for beta chain variable domain of TCR clone 287118 (TRBV7-3, TRBJ2-1)
CASSLDSYNEQFF

SEQ ID NO: 574237 - protein, 15 aa, Homo sapiens
  CDR3 for alpha chain variable domain of TCR clone 287119 (TRAV12-3, TRAJ42)
CAMSGHGGSQGNLIF

SEQ ID NO: 574238 - protein, 17 aa, Homo sapiens
  CDR3 for beta chain variable domain of TCR clone 287119 (TRBV7-6, TRBJ2-5)
CASSPGLADPWGETQYF

SEQ ID NO: 574239 - protein, 15 aa, Homo sapiens
  CDR3 for alpha chain variable domain of TCR clone 287120 (TRAV8-6, TRAJ38)
CAVSSNACNNRKLIW

SEQ ID NO: 574240 - protein, 14 aa, Homo sapiens
  CDR3 for beta chain variable domain of TCR clone 287120 (TRBV14, TRBJ2-1)
CASSQVQGRGEQFF

SEQ ID NO: 574241 - protein, 13 aa, Homo sapiens
  CDR3 for alpha chain variable domain of TCR clone 287121 (TRAV8-3, TRAJ43)
CAVVPYNNNDMRF

SEQ ID NO: 574242 - protein, 13 aa, Homo sapiens
  CDR3 for beta chain variable domain of TCR clone 287121 (TRBV20-1, TRBJ1-3)
CSAGAYSGNTIYF

SEQ ID NO: 574243 - protein, 13 aa, Homo sapiens
  CDR3 for alpha chain variable domain of TCR clone 287122 (TRAV3, TRAJ27)
CAVRPPGAGKSTF

SEQ ID NO: 574244 - protein, 12 aa, Homo sapiens
  CDR3 for beta chain variable domain of TCR clone 287122 (TRBV7-9, TRBJ2-7)
CATLTDAYEQYF

SEQ ID NO: 574245 - protein, 12 aa, Homo sapiens
  CDR3 for alpha chain variable domain of TCR clone 287123 (TRAV12-1, TRAJ40)
CVVYSGTYKYIF

SEQ ID NO: 574246 - protein, 16 aa, Homo sapiens
  CDR3 for beta chain variable domain of TCR clone 287123 (TRBV7-2, TRBJ2-7)
CASSLVMGVGSYEQYF

SEQ ID NO: 574247 - protein, 18 aa, Homo sapiens
  CDR3 for alpha chain variable domain of TCR clone 287124 (TRAV1-2, TRAJ18)
CAVRDMGDRGSTLGRLYF

SEQ ID NO: 574248 - protein, 13 aa, Homo sapiens
  CDR3 for beta chain variable domain of TCR clone 287124 (TRBV14, TRBJ1-1)
CASSREFGTEAFF

SEQ ID NO: 574249 - protein, 11 aa, Homo sapiens
  CDR3 for alpha chain variable domain of TCR clone 287125 (TRAV21, TRAJ34)
CAPLDTDKLIF

SEQ ID NO: 574250 - protein, 16 aa, Homo sapiens
  CDR3 for beta chain variable domain of TCR clone 287125 (TRBV5-1, TRBJ2-3)
CASSVAGDRGTDTQYF

SEQ ID NO: 574251 - protein, 13 aa, Homo sapiens
  CDR3 for alpha chain variable domain of TCR clone 287126 (TRAV3, TRAJ27)
CAVRPLGAVKSTF

SEQ ID NO: 574252 - protein, 13 aa, Homo sapiens
  CDR3 for beta chain variable domain of TCR clone 287126 (TRBV7-9, TRBJ2-3)
CASSPGSTDTQYC

SEQ ID NO: 574253 - protein, 14 aa, Homo sapiens
  CDR3 for alpha chain variable domain of TCR clone 287127 (TRAV1-2, TRAJ16)
CADNRFSDGQKLLF

SEQ ID NO: 574254 - protein, 15 aa, Homo sapiens
  CDR3 for beta chain variable domain of TCR clone 287127 (TRBV7-9, TRBJ1-6)
CASSSPGRGNSPLHF

SEQ ID NO: 574255 - protein, 14 aa, Homo sapiens
  CDR3 for alpha chain variable domain of TCR clone 287128 (TRAV13-1, TRAJ8)
CAASITGGFQKLVF

SEQ ID NO: 574256 - protein, 12 aa, Homo sapiens
  CDR3 for beta chain variable domain of TCR clone 287128 (TRBV12-4, TRBJ1-1)
CASSSGQVEAFF

SEQ ID NO: 574257 - protein, 13 aa, Homo sapiens
  CDR3 for alpha chain variable domain of TCR clone 287129 (TRAV8-3, TRAJ44)
CAVVPGTASKLTV

SEQ ID NO: 574258 - protein, 14 aa, Homo sapiens
  CDR3 for beta chain variable domain of TCR clone 287129 (TRBV11-2, TRBJ2-3)
CASSRLARTDTQYF

SEQ ID NO: 574259 - protein, 16 aa, Homo sapiens
  CDR3 for alpha chain variable domain of TCR clone 287130 (TRAV23/DV6, TRAJ9)
CAASIGGNTGGFETIF

SEQ ID NO: 574260 - protein, 14 aa, Homo sapiens
  CDR3 for beta chain variable domain of TCR clone 287130 (TRBV9, TRBJ2-7)
CASSVGVGSYEQYF

SEQ ID NO: 574261 - protein, 13 aa, Homo sapiens
  CDR3 for alpha chain variable domain of TCR clone 287131 (TRAV35, TRAJ36)
CAGPRIGANNLFF

SEQ ID NO: 574262 - protein, 15 aa, Homo sapiens
  CDR3 for beta chain variable domain of TCR clone 287131 (TRBV28, TRBJ2-5)
CASSRPWSYEETQYF

SEQ ID NO: 574263 - protein, 16 aa, Homo sapiens
  CDR3 for alpha chain variable domain of TCR clone 287132 (TRAV8-1, TRAJ39)
CAVNVPSYNAGNMLTF

SEQ ID NO: 574264 - protein, 12 aa, Homo sapiens
  CDR3 for beta chain variable domain of TCR clone 287132 (TRBV25-1, TRBJ1-1)
CASRHMNTEAFF

SEQ ID NO: 574265 - protein, 15 aa, Homo sapiens
  CDR3 for alpha chain variable domain of TCR clone 287133 (TRAV1-2, TRAJ12)
CAVIPEVDSSYKLIF

SEQ ID NO: 574266 - protein, 14 aa, Homo sapiens
  CDR3 for beta chain variable domain of TCR clone 287133 (TRBV7-3, TRBJ1-1)
CASSLKGGNTEAFF

SEQ ID NO: 574267 - protein, 15 aa, Homo sapiens
  CDR3 for alpha chain variable domain of TCR clone 287134 (TRAV3, TRAJ3)
CALRDGQRSASKIIF

SEQ ID NO: 574268 - protein, 17 aa, Homo sapiens
  CDR3 for beta chain variable domain of TCR clone 287134 (TRBV20-1, TRBJ2-2)
CSASGSGQGGLTGELFF

SEQ ID NO: 574269 - protein, 14 aa, Homo sapiens
  CDR3 for alpha chain variable domain of TCR clone 287135 (TRAV23/DV6, TRAJ8)
CASSKATGFQKLVF

SEQ ID NO: 574270 - protein, 15 aa, Homo sapiens
  CDR3 for beta chain variable domain of TCR clone 287135 (TRBV28, TRBJ2-3)
CASSPDRQGANTQYF

SEQ ID NO: 574271 - protein, 11 aa, Homo sapiens
  CDR3 for alpha chain variable domain of TCR clone 287136 (TRAV12-1, TRAJ31)
CVADNNARLMF

SEQ ID NO: 574272 - protein, 16 aa, Homo sapiens
  CDR3 for beta chain variable domain of TCR clone 287136 (TRBV7-3, TRBJ2-1)
CASSLEGYRSYNEQFF

SEQ ID NO: 574273 - protein, 15 aa, Homo sapiens
  CDR3 for alpha chain variable domain of TCR clone 287137 (TRAV27, TRAJ38)
CAARRNAGNNSKLIG

SEQ ID NO: 574274 - protein, 13 aa, Homo sapiens
  CDR3 for beta chain variable domain of TCR clone 287137 (TRBV12-5, TRBJ2-3)
CASGDRQSDTQYF

SEQ ID NO: 574275 - protein, 14 aa, Homo sapiens
  CDR3 for alpha chain variable domain of TCR clone 287138 (TRAV12-1, TRAJ40)
CVVTSVSGTYKYIF

SEQ ID NO: 574276 - protein, 18 aa, Homo sapiens
  CDR3 for beta chain variable domain of TCR clone 287138 (TRBV7-2, TRBJ2-3)
CASSLEYSDGGITDTQYF

SEQ ID NO: 574277 - protein, 13 aa, Homo sapiens
  CDR3 for alpha chain variable domain of TCR clone 287139 (TRAV34, TRAJ33)
CGADMNSNYQLIW

SEQ ID NO: 574278 - protein, 17 aa, Homo sapiens
  CDR3 for beta chain variable domain of TCR clone 287139 (TRBV20-1, TRBJ2-2)
CSASGSGQGGLTGELFF

SEQ ID NO: 574279 - protein, 14 aa, Homo sapiens
  CDR3 for alpha chain variable domain of TCR clone 287140 (TRAV8-2, TRAJ11)
CVVSEKSGYSTLTF

SEQ ID NO: 574280 - protein, 15 aa, Homo sapiens
  CDR3 for beta chain variable domain of TCR clone 287140 (TRBV28, TRBJ2-1)
CQQSPEYPRDNEQFF

SEQ ID NO: 574281 - protein, 14 aa, Homo sapiens
  CDR3 for alpha chain variable domain of TCR clone 287141 (TRAV16, TRAJ39)
CALSKNNAGNMLTF

SEQ ID NO: 574282 - protein, 17 aa, Homo sapiens
  CDR3 for beta chain variable domain of TCR clone 287141 (TRBV7-2, TRBJ2-3)
CASSLEARGTSTDTQYF

SEQ ID NO: 574283 - protein, 13 aa, Homo sapiens
  CDR3 for alpha chain variable domain of TCR clone 287142 (TRAV12-2, TRAJ53)
CSGVGGSNYKLTF

SEQ ID NO: 574284 - protein, 20 aa, Homo sapiens
  CDR3 for beta chain variable domain of TCR clone 287142 (TRBV28, TRBJ2-1)
CASTPIGRSPGLAGGNEQFF

SEQ ID NO: 574285 - protein, 13 aa, Homo sapiens
  CDR3 for alpha chain variable domain of TCR clone 287143 (TRAV12-1, TRAJ40)
CVVPTSGTYKYIF

SEQ ID NO: 574286 - protein, 18 aa, Homo sapiens
  CDR3 for beta chain variable domain of TCR clone 287143 (TRBV7-6, TRBJ2-1)
CDSSPRTSGMSSYNEQFF

SEQ ID NO: 574287 - protein, 13 aa, Homo sapiens
  CDR3 for alpha chain variable domain of TCR clone 287144 (TRAV21, TRAJ27)
CAARPGNAGKSTF

SEQ ID NO: 574288 - protein, 14 aa, Homo sapiens
  CDR3 for beta chain variable domain of TCR clone 287144 (TRBV7-7, TRBJ2-7)
CASSPGGPTYEQYF

SEQ ID NO: 574289 - protein, 14 aa, Homo sapiens
  CDR3 for alpha chain variable domain of TCR clone 287145 (TRAV1-2, TRAJ16)
CAVNRFSDGQKMLF

SEQ ID NO: 574290 - protein, 14 aa, Homo sapiens
  CDR3 for beta chain variable domain of TCR clone 287145 (TRBV29-1, TRBJ2-5)
CSFWTPYAGETQYF

SEQ ID NO: 574291 - protein, 17 aa, Homo sapiens
  CDR3 for alpha chain variable domain of TCR clone 287146 (TRAV3, TRAJ42)
CAVRDRDYGGSQGKPIF

SEQ ID NO: 574292 - protein, 15 aa, Homo sapiens
  CDR3 for beta chain variable domain of TCR clone 287146 (TRBV6-6, TRBJ2-7)
CASSYSYGGSYEQYF

SEQ ID NO: 574293 - protein, 14 aa, Homo sapiens
  CDR3 for alpha chain variable domain of TCR clone 287147 (TRAV2, TRAJ9)
CAVVDRSGGFKTIF

SEQ ID NO: 574294 - protein, 17 aa, Homo sapiens
  CDR3 for beta chain variable domain of TCR clone 287147 (TRBV11-2, TRBJ2-1)
CASSLYPPGVEYNEQFF

SEQ ID NO: 574295 - protein, 14 aa, Homo sapiens
  CDR3 for alpha chain variable domain of TCR clone 287148 (TRAV12-2, TRAJ6)
CAVNLKGGSYIPTF

SEQ ID NO: 574296 - protein, 14 aa, Homo sapiens
  CDR3 for beta chain variable domain of TCR clone 287148 (TRBV20-1, TRBJ2-7)
CSASDPTGLDEQYF

SEQ ID NO: 574297 - protein, 13 aa, Homo sapiens
  CDR3 for alpha chain variable domain of TCR clone 287149 (TRAV12-3, TRAJ43)
CAMIRPNNYDMRF

SEQ ID NO: 574298 - protein, 12 aa, Homo sapiens
  CDR3 for beta chain variable domain of TCR clone 287149 (TRBV11-2, TRBJ2-5)
CASSLGQETQYF

SEQ ID NO: 574299 - protein, 12 aa, Homo sapiens
  CDR3 for alpha chain variable domain of TCR clone 287150 (TRAV10, TRAJ6)
CVVSEGSYIPTF

SEQ ID NO: 574300 - protein, 15 aa, Homo sapiens
  CDR3 for beta chain variable domain of TCR clone 287150 (TRBV4-3, TRBJ2-7)
CASSQGGRGIYEQYV

SEQ ID NO: 574301 - protein, 22 aa, Homo sapiens
  CDR3 for alpha chain variable domain of TCR clone 287151 (TRAV3, )
CAVRDCLNAGNNHIQNPDPAVY

SEQ ID NO: 574302 - protein, 18 aa, Homo sapiens
  CDR3 for beta chain variable domain of TCR clone 287151 (TRBV24-1, TRBJ2-1)
CATSDLMFLGRGVHEQFF

SEQ ID NO: 574303 - protein, 13 aa, Homo sapiens
  CDR3 for alpha chain variable domain of TCR clone 287152 (TRAV27, TRAJ41)
CAGEGNSGYALNF

SEQ ID NO: 574304 - protein, 13 aa, Homo sapiens
  CDR3 for beta chain variable domain of TCR clone 287152 (TRBV20-1, TRBJ1-1)
CSARGGGNTETFF

SEQ ID NO: 574305 - protein, 13 aa, Homo sapiens
  CDR3 for alpha chain variable domain of TCR clone 287153 (TRAV2, TRAJ15)
CAVASQAGTALIF

SEQ ID NO: 574306 - protein, 15 aa, Homo sapiens
  CDR3 for beta chain variable domain of TCR clone 287153 (TRBV7-8, TRBJ1-5)
CASSLEGSGKQPQHF

SEQ ID NO: 574307 - protein, 20 aa, Homo sapiens
  CDR3 for alpha chain variable domain of TCR clone 287154 (TRAV21, TRAJ4)
AASQPGDPATLAGGYNKLIF

SEQ ID NO: 574308 - protein, 19 aa, Homo sapiens
  CDR3 for beta chain variable domain of TCR clone 287154 (TRBV18, TRBJ1-3)
CASSPLSRTGMSSGNTIYF

SEQ ID NO: 574309 - protein, 14 aa, Homo sapiens
  CDR3 for alpha chain variable domain of TCR clone 287155 (TRAV12-1, TRAJ9)
CVVNIITGGFKTLF

SEQ ID NO: 574310 - protein, 17 aa, Homo sapiens
  CDR3 for beta chain variable domain of TCR clone 287155 (TRBV9, TRBJ2-1)
CASSVEPTGMERDEQFF

SEQ ID NO: 574311 - protein, 13 aa, Homo sapiens
  CDR3 for alpha chain variable domain of TCR clone 287156 (TRAV36/DV7, TRAJ37)
CAVFSSNTGKLIF

SEQ ID NO: 574312 - protein, 15 aa, Homo sapiens
  CDR3 for beta chain variable domain of TCR clone 287156 (TRBV6-3, TRBJ2-1)
CASSYASDSYNEQFF

SEQ ID NO: 574313 - protein, 14 aa, Homo sapiens
  CDR3 for alpha chain variable domain of TCR clone 287157 (TRAV10, TRAJ50)
CVVREETSYDKVIF

SEQ ID NO: 574314 - protein, 13 aa, Homo sapiens
  CDR3 for beta chain variable domain of TCR clone 287157 (TRBV19, TRBJ1-1)
CASSIGPQAEAFF

SEQ ID NO: 574315 - protein, 14 aa, Homo sapiens
  CDR3 for alpha chain variable domain of TCR clone 287158 (TRAV4, TRAJ29)
CLVGDNPGNTPLVF

SEQ ID NO: 574316 - protein, 16 aa, Homo sapiens
  CDR3 for beta chain variable domain of TCR clone 287158 (TRBV5-1, TRBJ2-2)
CASSLWDTTNTGELFF

SEQ ID NO: 574317 - protein, 13 aa, Homo sapiens
  CDR3 for alpha chain variable domain of TCR clone 287159 (TRAV1-1, TRAJ23)
CAVVARQGGKLIF

SEQ ID NO: 574318 - protein, 16 aa, Homo sapiens
  CDR3 for beta chain variable domain of TCR clone 287159 (TRBV5-5, TRBJ1-2)
CASSPTWGRGLYGYTF

SEQ ID NO: 574319 - protein, 14 aa, Homo sapiens
  CDR3 for alpha chain variable domain of TCR clone 287160 (TRAV23/DV6, TRAJ22)
CAASVSGSARQLTF

SEQ ID NO: 574320 - protein, 16 aa, Homo sapiens
  CDR3 for beta chain variable domain of TCR clone 287160 (TRBV19, TRBJ2-2)
CASSFPGQGLAGKLFF

SEQ ID NO: 574321 - protein, 14 aa, Homo sapiens
  CDR3 for alpha chain variable domain of TCR clone 287161 (TRAV34, TRAJ44)
CGADGTGTASKLTF

SEQ ID NO: 574322 - protein, 15 aa, Homo sapiens
  CDR3 for beta chain variable domain of TCR clone 287161 (TRBV7-3, TRBJ1-1)
CASSPRADRNTEAFF

SEQ ID NO: 574323 - protein, 14 aa, Homo sapiens
  CDR3 for alpha chain variable domain of TCR clone 287162 (TRAV26-1, TRAJ38)
CIADNAGNNRQLIW

SEQ ID NO: 574324 - protein, 17 aa, Homo sapiens
  CDR3 for beta chain variable domain of TCR clone 287162 (TRBV7-9, TRBJ2-3)
CASSPTVAGDLTDTQYF

SEQ ID NO: 574325 - protein, 16 aa, Homo sapiens
  CDR3 for alpha chain variable domain of TCR clone 287163 (TRAV30, TRAJ24)
CGTEIADADSWGKFQF

SEQ ID NO: 574326 - protein, 16 aa, Homo sapiens
  CDR3 for beta chain variable domain of TCR clone 287163 (TRBV7-2, TRBJ2-1)
CASSLRWGRENNEQFF

SEQ ID NO: 574327 - protein, 14 aa, Homo sapiens
  CDR3 for alpha chain variable domain of TCR clone 287164 (TRAV10, TRAJ9)
CVVSANTGGFKTIF

SEQ ID NO: 574328 - protein, 15 aa, Homo sapiens
  CDR3 for beta chain variable domain of TCR clone 287164 (TRBV20-1, TRBJ2-7)
CSARDRVSGMDEQYF

SEQ ID NO: 574329 - protein, 14 aa, Homo sapiens
  CDR3 for alpha chain variable domain of TCR clone 287165 (TRAV8-3, TRAJ35)
CAVVPQGFGNVLHC

SEQ ID NO: 574330 - protein, 15 aa, Homo sapiens
  CDR3 for beta chain variable domain of TCR clone 287165 (TRBV10-1, TRBJ2-1)
CASSTGTELYNEQFF

SEQ ID NO: 574331 - protein, 13 aa, Homo sapiens
  CDR3 for alpha chain variable domain of TCR clone 287166 (TRAV13-2, TRAJ48)
CAEMDFGNEKLTF

SEQ ID NO: 574332 - protein, 14 aa, Homo sapiens
  CDR3 for beta chain variable domain of TCR clone 287166 (TRBV7-2, TRBJ2-2)
CASRGQGAAGELFF

SEQ ID NO: 574333 - protein, 12 aa, Homo sapiens
  CDR3 for alpha chain variable domain of TCR clone 287167 (TRAV12-2, TRAJ43)
CAGEYNNNDNRF

SEQ ID NO: 574334 - protein, 12 aa, Homo sapiens
  CDR3 for beta chain variable domain of TCR clone 287167 (TRBV29-1, TRBJ1-1)
CSADRGVTEAFF

SEQ ID NO: 574335 - protein, 12 aa, Homo sapiens
  CDR3 for alpha chain variable domain of TCR clone 287168 (TRAV17, TRAJ53)
CVGGGSNYKLIF

SEQ ID NO: 574336 - protein, 16 aa, Homo sapiens
  CDR3 for beta chain variable domain of TCR clone 287168 (TRBV11-2, TRBJ2-3)
CASSFQGRGALDTQYF

SEQ ID NO: 574337 - protein, 15 aa, Homo sapiens
  CDR3 for alpha chain variable domain of TCR clone 287169 (TRAV3, TRAJ29)
CAVRDINSGNTPLVF

SEQ ID NO: 574338 - protein, 16 aa, Homo sapiens
  CDR3 for beta chain variable domain of TCR clone 287169 (TRBV4-1, TRBJ2-5)
CASSQTFYGDQETQFF

SEQ ID NO: 574339 - protein, 15 aa, Homo sapiens
  CDR3 for alpha chain variable domain of TCR clone 287170 (TRAV8-3, TRAJ6)
CAVGPLGGGSYIPTF

SEQ ID NO: 574340 - protein, 14 aa, Homo sapiens
  CDR3 for beta chain variable domain of TCR clone 287170 (TRBV19, TRBJ2-2)
CASSTGQGAGELIF

SEQ ID NO: 574341 - protein, 17 aa, Homo sapiens
  CDR3 for alpha chain variable domain of TCR clone 287171 (TRAV4, TRAJ13)
CLVGVQGSSGGYQKVTF

SEQ ID NO: 574342 - protein, 15 aa, Homo sapiens
  CDR3 for beta chain variable domain of TCR clone 287171 (TRBV5-1, TRBJ1-1)
CASSSTTGTNTEAFF

SEQ ID NO: 574343 - protein, 17 aa, Homo sapiens
  CDR3 for alpha chain variable domain of TCR clone 287172 (TRAV3, TRAJ6)
CAVRDGPRAGGSHIPTF

SEQ ID NO: 574344 - protein, 18 aa, Homo sapiens
  CDR3 for beta chain variable domain of TCR clone 287172 (TRBV7-3, TRBJ2-3)
CASSSTGTYPGSTDTQYF

SEQ ID NO: 574345 - protein, 12 aa, Homo sapiens
  CDR3 for alpha chain variable domain of TCR clone 287173 (TRAV12-3, TRAJ40)
CALSSGTYKYIF

SEQ ID NO: 574346 - protein, 20 aa, Homo sapiens
  CDR3 for beta chain variable domain of TCR clone 287173 (TRBV7-8, TRBJ2-2)
CASSRLFPGPTIHISGELFF

SEQ ID NO: 574347 - protein, 13 aa, Homo sapiens
  CDR3 for alpha chain variable domain of TCR clone 287174 (TRAV12-3, TRAJ13)
CAMSSGGYQKVTF

SEQ ID NO: 574348 - protein, 11 aa, Homo sapiens
  CDR3 for beta chain variable domain of TCR clone 287174 (TRBV27, TRBJ2-3)
CASSLGDTQYF

SEQ ID NO: 574349 - protein, 14 aa, Homo sapiens
  CDR3 for alpha chain variable domain of TCR clone 287175 (TRAV3, TRAJ17)
CCERHGSCRNKLTF

SEQ ID NO: 574350 - protein, 14 aa, Homo sapiens
  CDR3 for beta chain variable domain of TCR clone 287175 (TRBV6-3, TRBJ1-1)
CASSNLLPGAEAFF

SEQ ID NO: 574351 - protein, 18 aa, Homo sapiens
  CDR3 for alpha chain variable domain of TCR clone 287176 (TRAV29/DV5, TRAJ52)
CAAGFRGAGGTSYGKLAF

SEQ ID NO: 574352 - protein, 16 aa, Homo sapiens
  CDR3 for beta chain variable domain of TCR clone 287176 (TRBV7-3, TRBJ2-2)
CASSLKRGTLSGELSF

SEQ ID NO: 574353 - protein, 15 aa, Homo sapiens
  CDR3 for alpha chain variable domain of TCR clone 287177 (TRAV8-3, TRAJ37)
CAVGGLSSNTGQLIF

SEQ ID NO: 574354 - protein, 15 aa, Homo sapiens
  CDR3 for beta chain variable domain of TCR clone 287177 (TRBV10-3, TRBJ2-7)
CATREQGLRSYEQYF

SEQ ID NO: 574355 - protein, 18 aa, Homo sapiens
  CDR3 for alpha chain variable domain of TCR clone 287178 (TRAV17, TRAJ45)
SATSLDLYSGGGADGLTF

SEQ ID NO: 574356 - protein, 13 aa, Homo sapiens
  CDR3 for beta chain variable domain of TCR clone 287178 (TRBV10-3, TRBJ2-7)
CASKLAVNYEQYF

SEQ ID NO: 574357 - protein, 13 aa, Homo sapiens
  CDR3 for alpha chain variable domain of TCR clone 287179 (TRAV20, TRAJ29)
CAVQAVGNNPLVF

SEQ ID NO: 574358 - protein, 15 aa, Homo sapiens
  CDR3 for beta chain variable domain of TCR clone 287179 (TRBV10-2, TRBJ2-5)
CASRGSGGPQETQYF

SEQ ID NO: 574359 - protein, 12 aa, Homo sapiens
  CDR3 for alpha chain variable domain of TCR clone 287180 (TRAV22, TRAJ29)
CAPPSGNTPLVF

SEQ ID NO: 574360 - protein, 14 aa, Homo sapiens
  CDR3 for beta chain variable domain of TCR clone 287180 (TRBV11-2, TRBJ2-7)
CSSSLAAGAYEQYF

SEQ ID NO: 574361 - protein, 10 aa, Homo sapiens
  CDR3 for alpha chain variable domain of TCR clone 287181 (TRAV26-1, TRAJ11)
CIPGYSTLTF

SEQ ID NO: 574362 - protein, 13 aa, Homo sapiens
  CDR3 for beta chain variable domain of TCR clone 287181 (TRBV7-6, TRBJ1-2)
CASSLVADYGYTF

SEQ ID NO: 574363 - protein, 14 aa, Homo sapiens
  CDR3 for alpha chain variable domain of TCR clone 287182 (TRAV12-3, TRAJ10)
SHLPLTGGGNKLTF

SEQ ID NO: 574364 - protein, 15 aa, Homo sapiens
  CDR3 for beta chain variable domain of TCR clone 287182 (TRBV7-3, TRBJ2-1)
CASRQRGGALIEQFF

SEQ ID NO: 574365 - protein, 18 aa, Homo sapiens
  CDR3 for alpha chain variable domain of TCR clone 287183 (TRAV3, TRAJ17)
CAVRARRGGRSCRQQANF

SEQ ID NO: 574366 - protein, 15 aa, Homo sapiens
  CDR3 for beta chain variable domain of TCR clone 287183 (TRBV5-1, TRBJ2-2)
CASSSQGGNTGELFF

SEQ ID NO: 574367 - protein, 14 aa, Homo sapiens
  CDR3 for alpha chain variable domain of TCR clone 287184 (TRAV16, TRAJ15)
CALSFNQAGTALIF

SEQ ID NO: 574368 - protein, 14 aa, Homo sapiens
  CDR3 for beta chain variable domain of TCR clone 287184 (TRBV4-1, TRBJ2-2)
CASSQAVNTGELFF

SEQ ID NO: 574369 - protein, 17 aa, Homo sapiens
  CDR3 for alpha chain variable domain of TCR clone 287185 (TRAV26-1, TRAJ53)
CIVRVDDSGGSNYKLTF

SEQ ID NO: 574370 - protein, 15 aa, Homo sapiens
  CDR3 for beta chain variable domain of TCR clone 287185 (TRBV20-1, TRBJ2-7)
CSSRVPAAYFYEQYF

SEQ ID NO: 574371 - protein, 13 aa, Homo sapiens
  CDR3 for alpha chain variable domain of TCR clone 287186 (TRAV27, TRAJ56)
CAGKPGANSKLTF

SEQ ID NO: 574372 - protein, 14 aa, Homo sapiens
  CDR3 for beta chain variable domain of TCR clone 287186 (TRBV12-4, TRBJ1-1)
CASSLGTGGTEAFF

SEQ ID NO: 574373 - protein, 16 aa, Homo sapiens
  CDR3 for alpha chain variable domain of TCR clone 287187 (TRAV29/DV5, TRAJ36)
CAASAGVGTGANNLFF

SEQ ID NO: 574374 - protein, 16 aa, Homo sapiens
  CDR3 for beta chain variable domain of TCR clone 287187 (TRBV5-1, TRBJ2-3)
CASSLGLAVYTDTQYF

SEQ ID NO: 574375 - protein, 13 aa, Homo sapiens
  CDR3 for alpha chain variable domain of TCR clone 287188 (TRAV20, TRAJ37)
CAGCSSNTGRLIF

SEQ ID NO: 574376 - protein, 16 aa, Homo sapiens
  CDR3 for beta chain variable domain of TCR clone 287188 (TRBV12-5, TRBJ2-5)
CASGPRTSGNQETHYF

SEQ ID NO: 574377 - protein, 12 aa, Homo sapiens
  CDR3 for alpha chain variable domain of TCR clone 287189 (TRAV29/DV5, TRAJ41)
CAASDSGYALNF

SEQ ID NO: 574378 - protein, 13 aa, Homo sapiens
  CDR3 for beta chain variable domain of TCR clone 287189 (TRBV2, TRBJ1-2)
CASRETRSDGYTF

SEQ ID NO: 574379 - protein, 13 aa, Homo sapiens
  CDR3 for alpha chain variable domain of TCR clone 287190 (TRAV21, TRAJ57)
CAVTQGGAEQLVF

SEQ ID NO: 574380 - protein, 15 aa, Homo sapiens
  CDR3 for beta chain variable domain of TCR clone 287190 (TRBV5-1, TRBJ1-1)
CASSSTTGTNTEAFF

SEQ ID NO: 574381 - protein, 13 aa, Homo sapiens
  CDR3 for alpha chain variable domain of TCR clone 287191 (TRAV8-2, TRAJ9)
CVVRATGDFKTIF

SEQ ID NO: 574382 - protein, 16 aa, Homo sapiens
  CDR3 for beta chain variable domain of TCR clone 287191 (TRBV11-2, TRBJ2-7)
CASSPTTGGVSYEQYF

SEQ ID NO: 574383 - protein, 15 aa, Homo sapiens
  CDR3 for alpha chain variable domain of TCR clone 287192 (TRAV3, TRAJ17)
CAVSPKEAAGNKLTF

SEQ ID NO: 574384 - protein, 19 aa, Homo sapiens
  CDR3 for beta chain variable domain of TCR clone 287192 (TRBV7-2, TRBJ2-3)
CASSPGLAGGGLTTDTQYF

SEQ ID NO: 574385 - protein, 16 aa, Homo sapiens
  CDR3 for alpha chain variable domain of TCR clone 287193 (TRAV3, TRAJ37)
CAVRPHCSGNTGKLIF

SEQ ID NO: 574386 - protein, 17 aa, Homo sapiens
  CDR3 for beta chain variable domain of TCR clone 287193 (TRBV20-1, TRBJ2-1)
CSASSSGLAGSYNEQFF

SEQ ID NO: 574387 - protein, 14 aa, Homo sapiens
  CDR3 for alpha chain variable domain of TCR clone 287194 (TRAV12-2, TRAJ17)
CAVLFKAAGNKLTF

SEQ ID NO: 574388 - protein, 12 aa, Homo sapiens
  CDR3 for beta chain variable domain of TCR clone 287194 (TRBV12-4, TRBJ1-2)
CASSVIWLHLRF

SEQ ID NO: 574389 - protein, 12 aa, Homo sapiens
  CDR3 for alpha chain variable domain of TCR clone 287195 (TRAV12-3, TRAJ17)
CAMTLTGNKLTF

SEQ ID NO: 574390 - protein, 16 aa, Homo sapiens
  CDR3 for beta chain variable domain of TCR clone 287195 (TRBV6-5, TRBJ2-5)
CASSSVGRWGRETQCF

SEQ ID NO: 574391 - protein, 15 aa, Homo sapiens
  CDR3 for alpha chain variable domain of TCR clone 287196 (TRAV12-2, TRAJ32)
CRELGQGGATNKLIF

SEQ ID NO: 574392 - protein, 15 aa, Homo sapiens
  CDR3 for beta chain variable domain of TCR clone 287196 (TRBV20-1, TRBJ2-7)
CSARGPLAGGREQYF

SEQ ID NO: 574393 - protein, 13 aa, Homo sapiens
  CDR3 for alpha chain variable domain of TCR clone 287197 (TRAV8-6, TRAJ49)
CAVITNTGNQFYF

SEQ ID NO: 574394 - protein, 14 aa, Homo sapiens
  CDR3 for beta chain variable domain of TCR clone 287197 (TRBV20-1, TRBJ2-3)
CSASSGGSTDTQYF

SEQ ID NO: 574395 - protein, 13 aa, Homo sapiens
  CDR3 for alpha chain variable domain of TCR clone 287198 (TRAV20, TRAJ37)
CAGCSSNTGKLIF

SEQ ID NO: 574396 - protein, 11 aa, Homo sapiens
  CDR3 for beta chain variable domain of TCR clone 287198 (TRBV11-2, TRBJ2-2)
CASSLPGELFF

SEQ ID NO: 574397 - protein, 13 aa, Homo sapiens
  CDR3 for alpha chain variable domain of TCR clone 287199 (TRAV17, TRAJ40)
CATDEGGTYKYIF

SEQ ID NO: 574398 - protein, 17 aa, Homo sapiens
  CDR3 for beta chain variable domain of TCR clone 287199 (TRBV7-8, TRBJ2-6)
CASSAGTGGAGANVLTF

SEQ ID NO: 574399 - protein, 16 aa, Homo sapiens
  CDR3 for alpha chain variable domain of TCR clone 287200 (TRAV23/DV6, TRAJ9)
CEASIGGNTGGFKTIF

SEQ ID NO: 574400 - protein, 11 aa, Homo sapiens
  CDR3 for beta chain variable domain of TCR clone 287200 (TRBV11-2, TRBJ2-2)
CASSLPGELFF

SEQ ID NO: 574401 - protein, 14 aa, Homo sapiens
  CDR3 for alpha chain variable domain of TCR clone 287201 (TRAV1-2, TRAJ8)
GAVREDTGFQKLVF

SEQ ID NO: 574402 - protein, 16 aa, Homo sapiens
  CDR3 for beta chain variable domain of TCR clone 287201 (TRBV20-1, TRBJ2-4)
CSARAILAGQGDIQYF

SEQ ID NO: 574403 - protein, 14 aa, Homo sapiens
  CDR3 for alpha chain variable domain of TCR clone 287202 (TRAV35, TRAJ22)
CAGLRPGSARQLTF

SEQ ID NO: 574404 - protein, 15 aa, Homo sapiens
  CDR3 for beta chain variable domain of TCR clone 287202 (TRBV7-8, TRBJ2-7)
CASSLERAGSYEQYF

SEQ ID NO: 574405 - protein, 14 aa, Homo sapiens
  CDR3 for alpha chain variable domain of TCR clone 287203 (TRAV23/DV6, TRAJ37)
CAASTSSNTGNLIF

SEQ ID NO: 574406 - protein, 14 aa, Homo sapiens
  CDR3 for beta chain variable domain of TCR clone 287203 (TRBV15, TRBJ2-3)
CATRSGTSTDTQYF

SEQ ID NO: 574407 - protein, 13 aa, Homo sapiens
  CDR3 for alpha chain variable domain of TCR clone 287204 (TRAV3, TRAJ5)
CAVRDAGRRALTF

SEQ ID NO: 574408 - protein, 14 aa, Homo sapiens
  CDR3 for beta chain variable domain of TCR clone 287204 (TRBV7-2, TRBJ2-7)
CASRSQGAAYEQYF

SEQ ID NO: 574409 - protein, 13 aa, Homo sapiens
  CDR3 for alpha chain variable domain of TCR clone 287205 (TRAV16, TRAJ26)
CITVLCLGQNFVF

SEQ ID NO: 574410 - protein, 14 aa, Homo sapiens
  CDR3 for beta chain variable domain of TCR clone 287205 (TRBV19, TRBJ2-1)
CASPTFALSGEQFF

SEQ ID NO: 574411 - protein, 12 aa, Homo sapiens
  CDR3 for alpha chain variable domain of TCR clone 287206 (TRAV12-2, TRAJ10)
WGVTGGGNKLTF

SEQ ID NO: 574412 - protein, 16 aa, Homo sapiens
  CDR3 for beta chain variable domain of TCR clone 287206 (TRBV5-5, TRBJ2-2)
CASSGRREGATGELFF

SEQ ID NO: 574413 - protein, 13 aa, Homo sapiens
  CDR3 for alpha chain variable domain of TCR clone 287207 (TRAV3, TRAJ27)
CAVRPLGAGNSNF

SEQ ID NO: 574414 - protein, 13 aa, Homo sapiens
  CDR3 for beta chain variable domain of TCR clone 287207 (TRBV7-9, TRBJ2-3)
CASSPGSTDTQYF

SEQ ID NO: 574415 - protein, 13 aa, Homo sapiens
  CDR3 for alpha chain variable domain of TCR clone 287208 (TRAV29/DV5, TRAJ31)
CAASRNNNARLMF

SEQ ID NO: 574416 - protein, 14 aa, Homo sapiens
  CDR3 for beta chain variable domain of TCR clone 287208 (TRBV5-5, TRBJ1-5)
CASSGQGVDQPQHF

SEQ ID NO: 574417 - protein, 15 aa, Homo sapiens
  CDR3 for alpha chain variable domain of TCR clone 287209 (TRAV8-2, TRAJ44)
CVVSPNTSTASKLTF

SEQ ID NO: 574418 - protein, 12 aa, Homo sapiens
  CDR3 for beta chain variable domain of TCR clone 287209 (TRBV11-2, TRBJ2-2)
CAVPRNTGELFF

SEQ ID NO: 574419 - protein, 14 aa, Homo sapiens
  CDR3 for alpha chain variable domain of TCR clone 287210 (TRAV2, TRAJ37)
CAVEDQGNTGKLIF

SEQ ID NO: 574420 - protein, 14 aa, Homo sapiens
  CDR3 for beta chain variable domain of TCR clone 287210 (TRBV18, TRBJ2-1)
CASSPQGRFNERFF

SEQ ID NO: 574421 - protein, 14 aa, Homo sapiens
  CDR3 for alpha chain variable domain of TCR clone 287211 (TRAV12-2, TRAJ13)
CAVKKTGGYQKVTF

SEQ ID NO: 574422 - protein, 16 aa, Homo sapiens
  CDR3 for beta chain variable domain of TCR clone 287211 (TRBV4-2, TRBJ2-6)
CASSQARSSGANVLTF

SEQ ID NO: 574423 - protein, 17 aa, Homo sapiens
  CDR3 for alpha chain variable domain of TCR clone 287212 (TRAV8-2, TRAJ17)
CAVSDRRFKAAGNKLTF

SEQ ID NO: 574424 - protein, 18 aa, Homo sapiens
  CDR3 for beta chain variable domain of TCR clone 287212 (TRBV7-9, TRBJ2-7)
CASSLTTSGSRTWYEQYF

SEQ ID NO: 574425 - protein, 16 aa, Homo sapiens
  CDR3 for alpha chain variable domain of TCR clone 287213 (TRAV16, TRAJ52)
CALSAAGGTSYGKLTF

SEQ ID NO: 574426 - protein, 13 aa, Homo sapiens
  CDR3 for beta chain variable domain of TCR clone 287213 (TRBV10-2, TRBJ1-1)
CASNDQMNTEAFF

SEQ ID NO: 574427 - protein, 14 aa, Homo sapiens
  CDR3 for alpha chain variable domain of TCR clone 287214 (TRAV12-2, TRAJ6)
CAVNIKGGSYIPTF

SEQ ID NO: 574428 - protein, 14 aa, Homo sapiens
  CDR3 for beta chain variable domain of TCR clone 287214 (TRBV20-1, TRBJ2-7)
CSARDPSGLDEQYF

SEQ ID NO: 574429 - protein, 12 aa, Homo sapiens
  CDR3 for alpha chain variable domain of TCR clone 287215 (TRAV1-2, TRAJ33)
CAALDSNYQLIW

SEQ ID NO: 574430 - protein, 15 aa, Homo sapiens
  CDR3 for beta chain variable domain of TCR clone 287215 (TRBV7-3, TRBJ2-2)
CASSETGQGTGELFF

SEQ ID NO: 574431 - protein, 12 aa, Homo sapiens
  CDR3 for alpha chain variable domain of TCR clone 287216 (TRAV17, TRAJ45)
CAAGGGADGLTF

SEQ ID NO: 574432 - protein, 14 aa, Homo sapiens
  CDR3 for beta chain variable domain of TCR clone 287216 (TRBV20-1, TRBJ1-1)
CSAQTRIGGIEAFF

SEQ ID NO: 574433 - protein, 13 aa, Homo sapiens
  CDR3 for alpha chain variable domain of TCR clone 287217 (TRAV27, TRAJ45)
CRSSGGGADGLTF

SEQ ID NO: 574434 - protein, 17 aa, Homo sapiens
  CDR3 for beta chain variable domain of TCR clone 287217 (TRBV10-3, TRBJ2-4)
CTSVPSVNKGSKNNQYF

SEQ ID NO: 574435 - protein, 11 aa, Homo sapiens
  CDR3 for alpha chain variable domain of TCR clone 287218 (TRAV12-3, TRAJ43)
CAMSVSNDMRF

SEQ ID NO: 574436 - protein, 16 aa, Homo sapiens
  CDR3 for beta chain variable domain of TCR clone 287218 (TRBV7-9, TRBJ2-1)
CASSDVAGGSYNEQLF

SEQ ID NO: 574437 - protein, 14 aa, Homo sapiens
  CDR3 for alpha chain variable domain of TCR clone 287219 (TRAV13-1, TRAJ9)
CAASALTGDFKTIF

SEQ ID NO: 574438 - protein, 13 aa, Homo sapiens
  CDR3 for beta chain variable domain of TCR clone 287219 (TRBV19, TRBJ1-2)
CASSVPGQDGYTF

SEQ ID NO: 574439 - protein, 16 aa, Homo sapiens
  CDR3 for alpha chain variable domain of TCR clone 287220 (TRAV3, TRAJ37)
CAVRGKGSGNTGKLIF

SEQ ID NO: 574440 - protein, 13 aa, Homo sapiens
  CDR3 for beta chain variable domain of TCR clone 287220 (TRBV4-2, TRBJ1-1)
CASSQAGNTEAFV

SEQ ID NO: 574441 - protein, 17 aa, Homo sapiens
  CDR3 for alpha chain variable domain of TCR clone 287221 (TRAV2, TRAJ22)
ILQVREADAAEQRHLTF

SEQ ID NO: 574442 - protein, 16 aa, Homo sapiens
  CDR3 for beta chain variable domain of TCR clone 287221 (TRBV2, TRBJ2-5)
CASSETQGVGEETQYF

SEQ ID NO: 574443 - protein, 13 aa, Homo sapiens
  CDR3 for alpha chain variable domain of TCR clone 287222 (TRAV2, TRAJ40)
CAVVSSGTYKYIF

SEQ ID NO: 574444 - protein, 16 aa, Homo sapiens
  CDR3 for beta chain variable domain of TCR clone 287222 (TRBV29-1, TRBJ1-2)
CSVEANRDIANYGYTF

SEQ ID NO: 574445 - protein, 17 aa, Homo sapiens
  CDR3 for alpha chain variable domain of TCR clone 287223 (TRAV4, TRAJ13)
CLVGVQGAPGGYQKVTF

SEQ ID NO: 574446 - protein, 18 aa, Homo sapiens
  CDR3 for beta chain variable domain of TCR clone 287223 (TRBV15, TRBJ2-3)
CATSRDGARSWDTDTQYF

SEQ ID NO: 574447 - protein, 14 aa, Homo sapiens
  CDR3 for alpha chain variable domain of TCR clone 287224 (TRAV23/DV6, TRAJ3)
CAASMASSSSKIIF

SEQ ID NO: 574448 - protein, 13 aa, Homo sapiens
  CDR3 for beta chain variable domain of TCR clone 287224 (TRBV27, TRBJ2-5)
CASFSRGLETQYF

SEQ ID NO: 574449 - protein, 16 aa, Homo sapiens
  CDR3 for alpha chain variable domain of TCR clone 287225 (TRAV8-3, TRAJ44)
CAVGASNTGTASKLTV

SEQ ID NO: 574450 - protein, 15 aa, Homo sapiens
  CDR3 for beta chain variable domain of TCR clone 287225 (TRBV27, TRBJ1-5)
CASTFNRGSNQPQHF

SEQ ID NO: 574451 - protein, 12 aa, Homo sapiens
  CDR3 for alpha chain variable domain of TCR clone 287226 (TRAV13-2, TRAJ8)
CAPWLGFQKLVL

SEQ ID NO: 574452 - protein, 17 aa, Homo sapiens
  CDR3 for beta chain variable domain of TCR clone 287226 (TRBV11-2, TRBJ2-1)
CASSLYPPGVEYNEQFF

SEQ ID NO: 574453 - protein, 15 aa, Homo sapiens
  CDR3 for alpha chain variable domain of TCR clone 287227 (TRAV27, TRAJ45)
CRGPQSGGGADGLTF

SEQ ID NO: 574454 - protein, 12 aa, Homo sapiens
  CDR3 for beta chain variable domain of TCR clone 287227 (TRBV24-1, TRBJ2-7)
CATSDPGYEQYF

SEQ ID NO: 574455 - protein, 10 aa, Homo sapiens
  CDR3 for alpha chain variable domain of TCR clone 287228 (TRAV8-4, TRAJ43)
CAVSADDMRF

SEQ ID NO: 574456 - protein, 16 aa, Homo sapiens
  CDR3 for beta chain variable domain of TCR clone 287228 (TRBV12-5, TRBJ2-5)
CASGTRTSGNQETQYF

SEQ ID NO: 574457 - protein, 12 aa, Homo sapiens
  CDR3 for alpha chain variable domain of TCR clone 287229 (TRAV12-3, TRAJ17)
CAMTLTGNKLTF

SEQ ID NO: 574458 - protein, 15 aa, Homo sapiens
  CDR3 for beta chain variable domain of TCR clone 287229 (TRBV19, TRBJ2-7)
CASSPAGSGEALRYF

SEQ ID NO: 574459 - protein, 13 aa, Homo sapiens
  CDR3 for alpha chain variable domain of TCR clone 287230 (TRAV8-3, TRAJ28)
CAVGAFGSYQLTF

SEQ ID NO: 574460 - protein, 15 aa, Homo sapiens
  CDR3 for beta chain variable domain of TCR clone 287230 (TRBV5-1, TRBJ2-7)
CASSLNGGPAREQYF

SEQ ID NO: 574461 - protein, 14 aa, Homo sapiens
  CDR3 for alpha chain variable domain of TCR clone 287231 (TRAV29/DV5, TRAJ32)
CAAAYGGATNKLVF

SEQ ID NO: 574462 - protein, 11 aa, Homo sapiens
  CDR3 for beta chain variable domain of TCR clone 287231 (TRBV11-2, TRBJ2-2)
CASSLPGELFF

SEQ ID NO: 574463 - protein, 14 aa, Homo sapiens
  CDR3 for alpha chain variable domain of TCR clone 287232 (TRAV23/DV6, TRAJ17)
CAARGRAAGNKLTF

SEQ ID NO: 574464 - protein, 16 aa, Homo sapiens
  CDR3 for beta chain variable domain of TCR clone 287232 (TRBV4-1, TRBJ2-7)
CASSQEWTSGPLEQYF

SEQ ID NO: 574465 - protein, 19 aa, Homo sapiens
  CDR3 for alpha chain variable domain of TCR clone 287233 (TRAV2, TRAJ20)
ILQVREADAAVYRDRKLSF

SEQ ID NO: 574466 - protein, 16 aa, Homo sapiens
  CDR3 for beta chain variable domain of TCR clone 287233 (TRBV19, TRBJ2-1)
CASSKAGPSSYNEQFF

SEQ ID NO: 574467 - protein, 14 aa, Homo sapiens
  CDR3 for alpha chain variable domain of TCR clone 287234 (TRAV26-1, TRAJ38)
CIADNAGNNRKLIW

SEQ ID NO: 574468 - protein, 16 aa, Homo sapiens
  CDR3 for beta chain variable domain of TCR clone 287234 (TRBV7-9, TRBJ2-3)
CASSLQGNPGTDTQYF

SEQ ID NO: 574469 - protein, 17 aa, Homo sapiens
  CDR3 for alpha chain variable domain of TCR clone 287235 (TRAV3, TRAJ42)
CAVRDRDYGGSQGNLIF

SEQ ID NO: 574470 - protein, 15 aa, Homo sapiens
  CDR3 for beta chain variable domain of TCR clone 287235 (TRBV6-6, TRBJ2-7)
CASSYSYGGSYAQYF

SEQ ID NO: 574471 - protein, 12 aa, Homo sapiens
  CDR3 for alpha chain variable domain of TCR clone 287236 (TRAV12-3, TRAJ17)
CAMTLTGNKLTF

SEQ ID NO: 574472 - protein, 16 aa, Homo sapiens
  CDR3 for beta chain variable domain of TCR clone 287236 (TRBV7-2, TRBJ2-1)
CASSLVAGAGYNEQFF

SEQ ID NO: 574473 - protein, 15 aa, Homo sapiens
  CDR3 for alpha chain variable domain of TCR clone 287237 (TRAV21, TRAJ24)
CAARSSTDSSGKLQF

SEQ ID NO: 574474 - protein, 13 aa, Homo sapiens
  CDR3 for beta chain variable domain of TCR clone 287237 (TRBV11-2, TRBJ2-5)
CASSSTGEETQYF

SEQ ID NO: 574475 - protein, 16 aa, Homo sapiens
  CDR3 for alpha chain variable domain of TCR clone 287238 (TRAV30, TRAJ24)
CGTEIVDDDSWGKFQF

SEQ ID NO: 574476 - protein, 14 aa, Homo sapiens
  CDR3 for beta chain variable domain of TCR clone 287238 (TRBV12-5, TRBJ2-5)
CASGLRTHQETQYF

SEQ ID NO: 574477 - protein, 14 aa, Homo sapiens
  CDR3 for alpha chain variable domain of TCR clone 287239 (TRAV23/DV6, TRAJ57)
CAAALKGGSEKLVF

SEQ ID NO: 574478 - protein, 16 aa, Homo sapiens
  CDR3 for beta chain variable domain of TCR clone 287239 (TRBV12-4, TRBJ1-5)
CASSRPVGGSNQPQHF

SEQ ID NO: 574479 - protein, 16 aa, Homo sapiens
  CDR3 for alpha chain variable domain of TCR clone 287240 (TRAV38-1, TRAJ45)
CAFMKGSGGGAAGLTF

SEQ ID NO: 574480 - protein, 15 aa, Homo sapiens
  CDR3 for beta chain variable domain of TCR clone 287240 (TRBV20-1, TRBJ2-7)
CSAREGRDSLYEQYF

SEQ ID NO: 574481 - protein, 15 aa, Homo sapiens
  CDR3 for alpha chain variable domain of TCR clone 287241 (TRAV34, TRAJ38)
CGADFTPGNNRKLIW

SEQ ID NO: 574482 - protein, 17 aa, Homo sapiens
  CDR3 for beta chain variable domain of TCR clone 287241 (TRBV15, TRBJ1-2)
CATSGREIDVVNYCYTF

SEQ ID NO: 574483 - protein, 18 aa, Homo sapiens
  CDR3 for alpha chain variable domain of TCR clone 287242 (TRAV21, TRAJ52)
CAVRPSPAGGTSYGKLTF

SEQ ID NO: 574484 - protein, 15 aa, Homo sapiens
  CDR3 for beta chain variable domain of TCR clone 287242 (TRBV28, TRBJ2-1)
CASRTGAGVIARQFF

SEQ ID NO: 574485 - protein, 12 aa, Homo sapiens
  CDR3 for alpha chain variable domain of TCR clone 287243 (TRAV12-2, TRAJ48)
CAVYFGNEKLTF

SEQ ID NO: 574486 - protein, 14 aa, Homo sapiens
  CDR3 for beta chain variable domain of TCR clone 287243 (TRBV7-8, TRBJ2-3)
CASSFPDGQDTQYF

SEQ ID NO: 574487 - protein, 16 aa, Homo sapiens
  CDR3 for alpha chain variable domain of TCR clone 287244 (TRAV26-1, TRAJ37)
CIVRGDCSGNTGKLIF

SEQ ID NO: 574488 - protein, 14 aa, Homo sapiens
  CDR3 for beta chain variable domain of TCR clone 287244 (TRBV27, TRBJ1-1)
CASSLLNGKGQGVF

SEQ ID NO: 574489 - protein, 11 aa, Homo sapiens
  CDR3 for alpha chain variable domain of TCR clone 287245 (TRAV4, TRAJ21)
CLIYNFNEFYF

SEQ ID NO: 574490 - protein, 17 aa, Homo sapiens
  CDR3 for beta chain variable domain of TCR clone 287245 (TRBV23-1, TRBJ2-1)
CISAPAVNRDQGGEQFF

SEQ ID NO: 574491 - protein, 11 aa, Homo sapiens
  CDR3 for alpha chain variable domain of TCR clone 287246 (TRAV17, TRAJ36)
CAPTGANNIFF

SEQ ID NO: 574492 - protein, 14 aa, Homo sapiens
  CDR3 for beta chain variable domain of TCR clone 287246 (TRBV19, TRBJ2-1)
CASPTFVLSGEQFF

SEQ ID NO: 574493 - protein, 15 aa, Homo sapiens
  CDR3 for alpha chain variable domain of TCR clone 287247 (TRAV34, TRAJ38)
CGADFNPGNNRKLTW

SEQ ID NO: 574494 - protein, 16 aa, Homo sapiens
  CDR3 for beta chain variable domain of TCR clone 287247 (TRBV12-5, TRBJ2-5)
CASGPRTSGNQETQYF

SEQ ID NO: 574495 - protein, 13 aa, Homo sapiens
  CDR3 for alpha chain variable domain of TCR clone 287248 (TRAV20, TRAJ40)
CAVPFSGTYQYIF

SEQ ID NO: 574496 - protein, 13 aa, Homo sapiens
  CDR3 for beta chain variable domain of TCR clone 287248 (TRBV15, TRBJ2-5)
CATSQIGEETQYF

SEQ ID NO: 574497 - protein, 16 aa, Homo sapiens
  CDR3 for alpha chain variable domain of TCR clone 287249 (TRAV30, TRAJ24)
CGTEMVDADSWGKFQF

SEQ ID NO: 574498 - protein, 14 aa, Homo sapiens
  CDR3 for beta chain variable domain of TCR clone 287249 (TRBV12-5, TRBJ2-5)
CARGSRTHQETQYF

SEQ ID NO: 574499 - protein, 16 aa, Homo sapiens
  CDR3 for alpha chain variable domain of TCR clone 287250 (TRAV30, TRAJ24)
CGTEIVDADSWGKFQF

SEQ ID NO: 574500 - protein, 15 aa, Homo sapiens
  CDR3 for beta chain variable domain of TCR clone 287250 (TRBV13, TRBJ1-2)
CASSLGRQPGYGYTF

SEQ ID NO: 574501 - protein, 13 aa, Homo sapiens
  CDR3 for alpha chain variable domain of TCR clone 287251 (TRAV21, TRAJ56)
CAVRLGANIKLTF

SEQ ID NO: 574502 - protein, 12 aa, Homo sapiens
  CDR3 for beta chain variable domain of TCR clone 287251 (TRBV12-4, TRBJ2-3)
CASSSTTDTQYF

SEQ ID NO: 574503 - protein, 13 aa, Homo sapiens
  CDR3 for alpha chain variable domain of TCR clone 287252 (TRAV8-4, TRAJ39)
STPPSDAGNMLTF

SEQ ID NO: 574504 - protein, 13 aa, Homo sapiens
  CDR3 for beta chain variable domain of TCR clone 287252 (TRBV12-4, TRBJ2-7)
CASSLTETYEQYF

SEQ ID NO: 574505 - protein, 21 aa, Homo sapiens
  CDR3 for alpha chain variable domain of TCR clone 287253 (TRAV8-4, TRAJ47)
HLTKPSAHMSDAAERGNKLVF

SEQ ID NO: 574506 - protein, 14 aa, Homo sapiens
  CDR3 for beta chain variable domain of TCR clone 287253 (TRBV7-9, TRBJ2-1)
CASSPRDSIYEQFF

SEQ ID NO: 574507 - protein, 15 aa, Homo sapiens
  CDR3 for alpha chain variable domain of TCR clone 287254 (TRAV3, TRAJ22)
CAVRDRGGSGREMTF

SEQ ID NO: 574508 - protein, 16 aa, Homo sapiens
  CDR3 for beta chain variable domain of TCR clone 287254 (TRBV5-4, TRBJ2-3)
CASQQPGAGGADTQYF

SEQ ID NO: 574509 - protein, 12 aa, Homo sapiens
  CDR3 for alpha chain variable domain of TCR clone 287255 (TRAV12-1, TRAJ37)
QDGSSNTGKIIF

SEQ ID NO: 574510 - protein, 15 aa, Homo sapiens
  CDR3 for beta chain variable domain of TCR clone 287255 (TRBV27, TRBJ2-1)
CASSFGAGGHNEQFF

SEQ ID NO: 574511 - protein, 16 aa, Homo sapiens
  CDR3 for alpha chain variable domain of TCR clone 287256 (TRAV13-2, TRAJ15)
CAENIPSNQAGTALIF

SEQ ID NO: 574512 - protein, 13 aa, Homo sapiens
  CDR3 for beta chain variable domain of TCR clone 287256 (TRBV27, TRBJ1-1)
CASSLSIGAEAFF

SEQ ID NO: 574513 - protein, 11 aa, Homo sapiens
  CDR3 for alpha chain variable domain of TCR clone 287257 (TRAV3, TRAJ21)
CAVGNFNKFYF

SEQ ID NO: 574514 - protein, 15 aa, Homo sapiens
  CDR3 for beta chain variable domain of TCR clone 287257 (TRBV19, TRBJ1-2)
CASSVGQVLNDGYTF

SEQ ID NO: 574515 - protein, 15 aa, Homo sapiens
  CDR3 for alpha chain variable domain of TCR clone 287258 (TRAV13-2, TRAJ45)
CAEHHSGVGADGLTF

SEQ ID NO: 574516 - protein, 15 aa, Homo sapiens
  CDR3 for beta chain variable domain of TCR clone 287258 (TRBV7-2, TRBJ2-7)
CASSLALGSAYEQYF

SEQ ID NO: 574517 - protein, 15 aa, Homo sapiens
  CDR3 for alpha chain variable domain of TCR clone 287259 (TRAV13-2, TRAJ50)
CAEEPLKTSYDKVIF

SEQ ID NO: 574518 - protein, 17 aa, Homo sapiens
  CDR3 for beta chain variable domain of TCR clone 287259 (TRBV13, TRBJ2-3)
CASSLSRVAGGRNTQYF

SEQ ID NO: 574519 - protein, 15 aa, Homo sapiens
  CDR3 for alpha chain variable domain of TCR clone 287260 (TRAV12-3, TRAJ27)
CAMRAYNTNAGKSTF

SEQ ID NO: 574520 - protein, 13 aa, Homo sapiens
  CDR3 for beta chain variable domain of TCR clone 287260 (TRBV11-2, TRBJ2-5)
CASSREPSETQYF

SEQ ID NO: 574521 - protein, 15 aa, Homo sapiens
  CDR3 for alpha chain variable domain of TCR clone 287261 (TRAV3, TRAJ22)
CAVRDRGGSARQLTF

SEQ ID NO: 574522 - protein, 14 aa, Homo sapiens
  CDR3 for beta chain variable domain of TCR clone 287261 (TRBV5-8, TRBJ2-3)
CASSLGQGTDTQYF

SEQ ID NO: 574523 - protein, 13 aa, Homo sapiens
  CDR3 for alpha chain variable domain of TCR clone 287262 (TRAV13-2, TRAJ48)
CAEMDFGNEKLTF

SEQ ID NO: 574524 - protein, 15 aa, Homo sapiens
  CDR3 for beta chain variable domain of TCR clone 287262 (TRBV10-1, TRBJ2-3)
CASSATSGGFDTQYF

SEQ ID NO: 574525 - protein, 12 aa, Homo sapiens
  CDR3 for alpha chain variable domain of TCR clone 287263 (TRAV13-1, TRAJ15)
CAAGKPGTALIF

SEQ ID NO: 574526 - protein, 16 aa, Homo sapiens
  CDR3 for beta chain variable domain of TCR clone 287263 (TRBV18, TRBJ2-7)
CASSPSVLGTDSEQYF

SEQ ID NO: 574527 - protein, 14 aa, Homo sapiens
  CDR3 for alpha chain variable domain of TCR clone 287264 (TRAV26-1, TRAJ5)
CIVRVRFNRRALTF

SEQ ID NO: 574528 - protein, 14 aa, Homo sapiens
  CDR3 for beta chain variable domain of TCR clone 287264 (TRBV5-4, TRBJ1-1)
CASSLDSRRDEAFF

SEQ ID NO: 574529 - protein, 13 aa, Homo sapiens
  CDR3 for alpha chain variable domain of TCR clone 287265 (TRAV35, TRAJ36)
CAGPRIGANNLFF

SEQ ID NO: 574530 - protein, 16 aa, Homo sapiens
  CDR3 for beta chain variable domain of TCR clone 287265 (TRBV28, TRBJ1-2)
CASSHGQGVYKDGYTF

SEQ ID NO: 574531 - protein, 16 aa, Homo sapiens
  CDR3 for alpha chain variable domain of TCR clone 287266 (TRAV30, TRAJ24)
CGTEIVDADSWGRFQF

SEQ ID NO: 574532 - protein, 14 aa, Homo sapiens
  CDR3 for beta chain variable domain of TCR clone 287266 (TRBV13, TRBJ2-1)
CASSPRPRYNEQFF

SEQ ID NO: 574533 - protein, 15 aa, Homo sapiens
  CDR3 for alpha chain variable domain of TCR clone 287267 (TRAV26-1, TRAJ22)
CIVRGSFWFCKATDL

SEQ ID NO: 574534 - protein, 13 aa, Homo sapiens
  CDR3 for beta chain variable domain of TCR clone 287267 (TRBV7-9, TRBJ1-2)
CASSVKQNYGYTF

SEQ ID NO: 574535 - protein, 14 aa, Homo sapiens
  CDR3 for alpha chain variable domain of TCR clone 287268 (TRAV8-3, TRAJ47)
CAVGAQGYGDKLVF

SEQ ID NO: 574536 - protein, 14 aa, Homo sapiens
  CDR3 for beta chain variable domain of TCR clone 287268 (TRBV6-5, TRBJ2-7)
CASSSGVPPYEQYF

SEQ ID NO: 574537 - protein, 13 aa, Homo sapiens
  CDR3 for alpha chain variable domain of TCR clone 287269 (TRAV2, TRAJ40)
CAVVTSGTYKYIF

SEQ ID NO: 574538 - protein, 18 aa, Homo sapiens
  CDR3 for beta chain variable domain of TCR clone 287269 (TRBV11-2, TRBJ2-7)
CASSWRTVQTGQSYEQYF

SEQ ID NO: 574539 - protein, 12 aa, Homo sapiens
  CDR3 for alpha chain variable domain of TCR clone 287270 (TRAV13-2, TRAJ23)
CAEHHRGGKLIF

SEQ ID NO: 574540 - protein, 12 aa, Homo sapiens
  CDR3 for beta chain variable domain of TCR clone 287270 (TRBV11-2, TRBJ2-2)
CASSLGGGELFF

SEQ ID NO: 574541 - protein, 12 aa, Homo sapiens
  CDR3 for alpha chain variable domain of TCR clone 287271 (TRAV16, TRAJ49)
CALNEGGNQFYF

SEQ ID NO: 574542 - protein, 15 aa, Homo sapiens
  CDR3 for beta chain variable domain of TCR clone 287271 (TRBV20-1, TRBJ2-7)
CSARDRVSGMDEQYF

SEQ ID NO: 574543 - protein, 15 aa, Homo sapiens
  CDR3 for alpha chain variable domain of TCR clone 287272 (TRAV8-3, TRAJ45)
CASSHSGGGADGLTF

SEQ ID NO: 574544 - protein, 18 aa, Homo sapiens
  CDR3 for beta chain variable domain of TCR clone 287272 (TRBV18, TRBJ1-3)
CASSPRGGAGPSGNTIYF

SEQ ID NO: 574545 - protein, 14 aa, Homo sapiens
  CDR3 for alpha chain variable domain of TCR clone 287273 (TRAV12-2, TRAJ4)
CSEDLSGGYNKLIL

SEQ ID NO: 574546 - protein, 10 aa, Homo sapiens
  CDR3 for beta chain variable domain of TCR clone 287273 (TRBV7-9, TRBJ1-2)
CASSLKQNYG

SEQ ID NO: 574547 - protein, 11 aa, Homo sapiens
  CDR3 for alpha chain variable domain of TCR clone 287274 (TRAV24, TRAJ5)
CAPRRALTFGS

SEQ ID NO: 574548 - protein, 12 aa, Homo sapiens
  CDR3 for beta chain variable domain of TCR clone 287274 (TRBV24-1, TRBJ1-2)
CATSDDGGRYTF

SEQ ID NO: 574549 - protein, 13 aa, Homo sapiens
  CDR3 for alpha chain variable domain of TCR clone 287275 (TRAV2, TRAJ29)
CAVYSSGNPPLVF

SEQ ID NO: 574550 - protein, 14 aa, Homo sapiens
  CDR3 for beta chain variable domain of TCR clone 287275 (TRBV7-9, TRBJ1-1)
CASSLGGLKTEAFF

SEQ ID NO: 574551 - protein, 14 aa, Homo sapiens
  CDR3 for alpha chain variable domain of TCR clone 287276 (TRAV12-1, TRAJ17)
CVVNYRAAGNKITF

SEQ ID NO: 574552 - protein, 17 aa, Homo sapiens
  CDR3 for beta chain variable domain of TCR clone 287276 (TRBV20-1, TRBJ2-1)
CSASSSGLAGSYNEQFF

SEQ ID NO: 574553 - protein, 16 aa, Homo sapiens
  CDR3 for alpha chain variable domain of TCR clone 287277 (TRAV30, TRAJ49)
SAAQRVGPNTGNQFHF

SEQ ID NO: 574554 - protein, 15 aa, Homo sapiens
  CDR3 for beta chain variable domain of TCR clone 287277 (TRBV2, TRBJ2-1)
CASSELAGSYNEQFF

SEQ ID NO: 574555 - protein, 14 aa, Homo sapiens
  CDR3 for alpha chain variable domain of TCR clone 287278 (TRAV12-3, TRAJ9)
CAMCVETGGFKTIF

SEQ ID NO: 574556 - protein, 14 aa, Homo sapiens
  CDR3 for beta chain variable domain of TCR clone 287278 (TRBV7-2, TRBJ2-7)
CASRSQGAAYEQYF

SEQ ID NO: 574557 - protein, 15 aa, Homo sapiens
  CDR3 for alpha chain variable domain of TCR clone 287279 (TRAV8-4, TRAJ56)
CAVSGGTGANSKLTF

SEQ ID NO: 574558 - protein, 16 aa, Homo sapiens
  CDR3 for beta chain variable domain of TCR clone 287279 (TRBV7-9, TRBJ2-1)
CASSPKGGLMSSSSGQ

SEQ ID NO: 574559 - protein, 13 aa, Homo sapiens
  CDR3 for alpha chain variable domain of TCR clone 287280 (TRAV3, TRAJ36)
CAVRDTGANNPFF

SEQ ID NO: 574560 - protein, 15 aa, Homo sapiens
  CDR3 for beta chain variable domain of TCR clone 287280 (TRBV24-1, TRBJ2-1)
CATSGSGGFYNEQLF

SEQ ID NO: 574561 - protein, 14 aa, Homo sapiens
  CDR3 for alpha chain variable domain of TCR clone 287281 (TRAV12-2, TRAJ45)
CAVNKGGGADGLTF

SEQ ID NO: 574562 - protein, 12 aa, Homo sapiens
  CDR3 for beta chain variable domain of TCR clone 287281 (TRBV7-8, TRBJ2-7)
CASSLGDREQYF

SEQ ID NO: 574563 - protein, 11 aa, Homo sapiens
  CDR3 for alpha chain variable domain of TCR clone 287282 (TRAV2, TRAJ13)
CASGGYQKDTF

SEQ ID NO: 574564 - protein, 15 aa, Homo sapiens
  CDR3 for beta chain variable domain of TCR clone 287282 (TRBV9, TRBJ1-6)
CASSVAGTGDSPLHF

SEQ ID NO: 574565 - protein, 14 aa, Homo sapiens
  CDR3 for alpha chain variable domain of TCR clone 287283 (TRAV2, TRAJ9)
CAVEDRRGGFKTIF

SEQ ID NO: 574566 - protein, 12 aa, Homo sapiens
  CDR3 for beta chain variable domain of TCR clone 287283 (TRBV14, TRBJ2-7)
CASSRLKGEQYF

SEQ ID NO: 574567 - protein, 12 aa, Homo sapiens
  CDR3 for alpha chain variable domain of TCR clone 287284 (TRAV17, TRAJ48)
CALNFGNEQLTF

SEQ ID NO: 574568 - protein, 13 aa, Homo sapiens
  CDR3 for beta chain variable domain of TCR clone 287284 (TRBV6-5, TRBJ2-5)
CASSSPGGETQYF

SEQ ID NO: 574569 - protein, 15 aa, Homo sapiens
  CDR3 for alpha chain variable domain of TCR clone 287285 (TRAV3, TRAJ17)
CAVRDTGAAGNKLTF

SEQ ID NO: 574570 - protein, 12 aa, Homo sapiens
  CDR3 for beta chain variable domain of TCR clone 287285 (TRBV11-2, TRBJ2-5)
CASSPPAETQYF

SEQ ID NO: 574571 - protein, 14 aa, Homo sapiens
  CDR3 for alpha chain variable domain of TCR clone 287286 (TRAV13-2, TRAJ11)
CAETGNSGYSTLTF

SEQ ID NO: 574572 - protein, 13 aa, Homo sapiens
  CDR3 for beta chain variable domain of TCR clone 287286 (TRBV19, TRBJ2-1)
CATSRGVYNEQFF

SEQ ID NO: 574573 - protein, 19 aa, Homo sapiens
  CDR3 for alpha chain variable domain of TCR clone 287287 (TRAV21, TRAJ34)
SLVTQPPTSAVTNTDKLIF

SEQ ID NO: 574574 - protein, 16 aa, Homo sapiens
  CDR3 for beta chain variable domain of TCR clone 287287 (TRBV18, TRBJ1-1)
CASSPGVGGRGGEAFF

SEQ ID NO: 574575 - protein, 16 aa, Homo sapiens
  CDR3 for alpha chain variable domain of TCR clone 287288 (TRAV3, TRAJ4)
CAVRPSPSGGYNKRIF

SEQ ID NO: 574576 - protein, 12 aa, Homo sapiens
  CDR3 for beta chain variable domain of TCR clone 287288 (TRBV7-9, TRBJ2-7)
CASSQGVYEQYF

SEQ ID NO: 574577 - protein, 12 aa, Homo sapiens
  CDR3 for alpha chain variable domain of TCR clone 287289 (TRAV13-1, TRAJ49)
CAASPMGNQFYF

SEQ ID NO: 574578 - protein, 15 aa, Homo sapiens
  CDR3 for beta chain variable domain of TCR clone 287289 (TRBV6-1, TRBJ2-3)
CASSERGGITDTQYF

SEQ ID NO: 574579 - protein, 16 aa, Homo sapiens
  CDR3 for alpha chain variable domain of TCR clone 287290 (TRAV1-2, TRAJ16)
CAVNRFQMARSCSLQG

SEQ ID NO: 574580 - protein, 13 aa, Homo sapiens
  CDR3 for beta chain variable domain of TCR clone 287290 (TRBV4-1, TRBJ2-1)
CASSQAGGDEQFF

SEQ ID NO: 574581 - protein, 11 aa, Homo sapiens
  CDR3 for alpha chain variable domain of TCR clone 287291 (TRAV35, TRAJ12)
RRMDSGYKLIF

SEQ ID NO: 574582 - protein, 14 aa, Homo sapiens
  CDR3 for beta chain variable domain of TCR clone 287291 (TRBV19, TRBJ1-1)
CASSPNRGDTEAFF

SEQ ID NO: 574583 - protein, 12 aa, Homo sapiens
  CDR3 for alpha chain variable domain of TCR clone 287292 (TRAV13-1, TRAJ9)
CASTTGGFKTIF

SEQ ID NO: 574584 - protein, 13 aa, Homo sapiens
  CDR3 for beta chain variable domain of TCR clone 287292 (TRBV12-4, TRBJ1-2)
CASSSVSKDGYTF

SEQ ID NO: 574585 - protein, 23 aa, Homo sapiens
  CDR3 for alpha chain variable domain of TCR clone 287293 (TRAV13-1, TRAJ49)
CGTSSILGQGQVLRSFQISRTLT

SEQ ID NO: 574586 - protein, 11 aa, Homo sapiens
  CDR3 for beta chain variable domain of TCR clone 287293 (TRBV6-3, TRBJ2-3)
CATGQADTQYF

SEQ ID NO: 574587 - protein, 16 aa, Homo sapiens
  CDR3 for alpha chain variable domain of TCR clone 287294 (TRAV2, TRAJ26)
TTVLGPPGDYGQKFVF

SEQ ID NO: 574588 - protein, 16 aa, Homo sapiens
  CDR3 for beta chain variable domain of TCR clone 287294 (TRBV13, TRBJ2-2)
CASSPRTGEHTGELFF

SEQ ID NO: 574589 - protein, 14 aa, Homo sapiens
  CDR3 for alpha chain variable domain of TCR clone 287295 (TRAV8-2, TRAJ4)
CVVSPSGGYNKLIF

SEQ ID NO: 574590 - protein, 15 aa, Homo sapiens
  CDR3 for beta chain variable domain of TCR clone 287295 (TRBV2, TRBJ2-1)
RASSELAGSYNEQFF

SEQ ID NO: 574591 - protein, 13 aa, Homo sapiens
  CDR3 for alpha chain variable domain of TCR clone 287296 (TRAV1-2, TRAJ20)
CAVRDGNDYKLSF

SEQ ID NO: 574592 - protein, 14 aa, Homo sapiens
  CDR3 for beta chain variable domain of TCR clone 287296 (TRBV7-8, TRBJ2-3)
CASSLEAGTDTQYF

SEQ ID NO: 574593 - protein, 12 aa, Homo sapiens
  CDR3 for alpha chain variable domain of TCR clone 287297 (TRAV13-1, TRAJ49)
GAASIWGNQFYF

SEQ ID NO: 574594 - protein, 14 aa, Homo sapiens
  CDR3 for beta chain variable domain of TCR clone 287297 (TRBV12-4, TRBJ1-1)
CASSLDGLNTEAFF

SEQ ID NO: 574595 - protein, 11 aa, Homo sapiens
  CDR3 for alpha chain variable domain of TCR clone 287298 (TRAV13-1, TRAJ20)
CAASKNYKLSF

SEQ ID NO: 574596 - protein, 16 aa, Homo sapiens
  CDR3 for beta chain variable domain of TCR clone 287298 (TRBV20-1, TRBJ1-4)
CSAPGQGLLTNDKLFF

SEQ ID NO: 574597 - protein, 12 aa, Homo sapiens
  CDR3 for alpha chain variable domain of TCR clone 287299 (TRAV23/DV6, TRAJ16)
CVATGTGQKLLF

SEQ ID NO: 574598 - protein, 15 aa, Homo sapiens
  CDR3 for beta chain variable domain of TCR clone 287299 (TRBV28, TRBJ1-2)
CASSSYRGLVYGYTF

SEQ ID NO: 574599 - protein, 14 aa, Homo sapiens
  CDR3 for alpha chain variable domain of TCR clone 287300 (TRAV12-1, TRAJ30)
CVVNIGGRDDKIIF

SEQ ID NO: 574600 - protein, 13 aa, Homo sapiens
  CDR3 for beta chain variable domain of TCR clone 287300 (TRBV12-5, TRBJ2-1)
CASCLGRGNEQFF

SEQ ID NO: 574601 - protein, 16 aa, Homo sapiens
  CDR3 for alpha chain variable domain of TCR clone 287301 (TRAV30, TRAJ24)
CGTEIVDADSWGKFQF

SEQ ID NO: 574602 - protein, 16 aa, Homo sapiens
  CDR3 for beta chain variable domain of TCR clone 287301 (TRBV10-3, TRBJ2-1)
CAIRGGGRGDYNEQFF

SEQ ID NO: 574603 - protein, 15 aa, Homo sapiens
  CDR3 for alpha chain variable domain of TCR clone 287302 (TRAV17, TRAJ54)
CATEKLGQGAQKLVF

SEQ ID NO: 574604 - protein, 14 aa, Homo sapiens
  CDR3 for beta chain variable domain of TCR clone 287302 (TRBV7-3, TRBJ1-1)
CQQLRGQMNTEAFS

SEQ ID NO: 574605 - protein, 15 aa, Homo sapiens
  CDR3 for alpha chain variable domain of TCR clone 287303 (TRAV12-2, TRAJ53)
CAVNTGGGSDYKLTF

SEQ ID NO: 574606 - protein, 15 aa, Homo sapiens
  CDR3 for beta chain variable domain of TCR clone 287303 (TRBV5-1, TRBJ2-5)
CASSLGLGEIKAQYF

SEQ ID NO: 574607 - protein, 12 aa, Homo sapiens
  CDR3 for alpha chain variable domain of TCR clone 287304 (TRAV1-2, TRAJ33)
CAALDSNYQLIW

SEQ ID NO: 574608 - protein, 13 aa, Homo sapiens
  CDR3 for beta chain variable domain of TCR clone 287304 (TRBV6-4, TRBJ1-5)
RASSADLNQPQHF

SEQ ID NO: 574609 - protein, 11 aa, Homo sapiens
  CDR3 for alpha chain variable domain of TCR clone 287305 (TRAV21, TRAJ11)
CAVNGYSTLTF

SEQ ID NO: 574610 - protein, 14 aa, Homo sapiens
  CDR3 for beta chain variable domain of TCR clone 287305 (TRBV4-1, TRBJ2-7)
CASSQGTTSYEQYF

SEQ ID NO: 574611 - protein, 18 aa, Homo sapiens
  CDR3 for alpha chain variable domain of TCR clone 287306 (TRAV12-3, TRAJ52)
CAMSRTNAGGTSYGKLTF

SEQ ID NO: 574612 - protein, 15 aa, Homo sapiens
  CDR3 for beta chain variable domain of TCR clone 287306 (TRBV11-2, TRBJ2-1)
CASSLGTSGLNEQFF

SEQ ID NO: 574613 - protein, 15 aa, Homo sapiens
  CDR3 for alpha chain variable domain of TCR clone 287307 (TRAV17, TRAJ16)
CATALRFSDGQKLLF

SEQ ID NO: 574614 - protein, 15 aa, Homo sapiens
  CDR3 for beta chain variable domain of TCR clone 287307 (TRBV20-1, TRBJ1-1)
CSASRGVTGNNEAFF

SEQ ID NO: 574615 - protein, 13 aa, Homo sapiens
  CDR3 for alpha chain variable domain of TCR clone 287308 (TRAV12-2, TRAJ10)
CAVPTGGGNKLTF

SEQ ID NO: 574616 - protein, 13 aa, Homo sapiens
  CDR3 for beta chain variable domain of TCR clone 287308 (TRBV7-9, TRBJ2-3)
RASSPGSTDTQYF

SEQ ID NO: 574617 - protein, 22 aa, Homo sapiens
  CDR3 for alpha chain variable domain of TCR clone 287309 (TRAV4, TRAJ38)
CLVGTNAGNNHIQNPDPAVYQL

SEQ ID NO: 574618 - protein, 14 aa, Homo sapiens
  CDR3 for beta chain variable domain of TCR clone 287309 (TRBV12-5, TRBJ2-5)
CASGSRTHQETQYF

SEQ ID NO: 574619 - protein, 17 aa, Homo sapiens
  CDR3 for alpha chain variable domain of TCR clone 287310 (TRAV3, TRAJ6)
CAVRDGPRAGGSYIPTF

SEQ ID NO: 574620 - protein, 15 aa, Homo sapiens
  CDR3 for beta chain variable domain of TCR clone 287310 (TRBV5-5, TRBJ2-2)
CASSRQASGAGELFS

SEQ ID NO: 574621 - protein, 15 aa, Homo sapiens
  CDR3 for alpha chain variable domain of TCR clone 287311 (TRAV17, TRAJ57)
CATGPSQGGSEKLVF

SEQ ID NO: 574622 - protein, 12 aa, Homo sapiens
  CDR3 for beta chain variable domain of TCR clone 287311 (TRBV2, TRBJ2-7)
CASKRGSYEQYF

SEQ ID NO: 574623 - protein, 12 aa, Homo sapiens
  CDR3 for alpha chain variable domain of TCR clone 287312 (TRAV21, TRAJ11)
CAATSGYSTLTF

SEQ ID NO: 574624 - protein, 14 aa, Homo sapiens
  CDR3 for beta chain variable domain of TCR clone 287312 (TRBV20-1, TRBJ2-7)
CSAPELAGVDEQYF

SEQ ID NO: 574625 - protein, 12 aa, Homo sapiens
  CDR3 for alpha chain variable domain of TCR clone 287313 (TRAV1-2, TRAJ33)
CATLDSNYQLIW

SEQ ID NO: 574626 - protein, 16 aa, Homo sapiens
  CDR3 for beta chain variable domain of TCR clone 287313 (TRBV6-4, TRBJ1-2)
CASSEAVGDPNYGYTF

SEQ ID NO: 574627 - protein, 10 aa, Homo sapiens
  CDR3 for alpha chain variable domain of TCR clone 287314 (TRAV1-2, TRAJ20)
CALNDYKLSF

SEQ ID NO: 574628 - protein, 16 aa, Homo sapiens
  CDR3 for beta chain variable domain of TCR clone 287314 (TRBV20-1, TRBJ1-1)
CSARALTQGMNTEAYF

SEQ ID NO: 574629 - protein, 12 aa, Homo sapiens
  CDR3 for alpha chain variable domain of TCR clone 287315 (TRAV1-1, TRAJ39)
CAVTVVGNMLTF

SEQ ID NO: 574630 - protein, 15 aa, Homo sapiens
  CDR3 for beta chain variable domain of TCR clone 287315 (TRBV27, TRBJ2-1)
CASSNGGGSSNEQFF

SEQ ID NO: 574631 - protein, 11 aa, Homo sapiens
  CDR3 for alpha chain variable domain of TCR clone 287316 (TRAV1-1, TRAJ23)
CAVRQGGKLIF

SEQ ID NO: 574632 - protein, 14 aa, Homo sapiens
  CDR3 for beta chain variable domain of TCR clone 287316 (TRBV7-8, TRBJ2-3)
CASSSEAGTDTQYF

SEQ ID NO: 574633 - protein, 12 aa, Homo sapiens
  CDR3 for alpha chain variable domain of TCR clone 287317 (TRAV27, TRAJ41)
CAGRNSGYALNF

SEQ ID NO: 574634 - protein, 15 aa, Homo sapiens
  CDR3 for beta chain variable domain of TCR clone 287317 (TRBV20-1, TRBJ1-5)
CSATSDRGLGEPQHF

SEQ ID NO: 574635 - protein, 14 aa, Homo sapiens
  CDR3 for alpha chain variable domain of TCR clone 287318 (TRAV2, TRAJ9)
CAVYDRSGGFKTIF

SEQ ID NO: 574636 - protein, 14 aa, Homo sapiens
  CDR3 for beta chain variable domain of TCR clone 287318 (TRBV7-9, TRBJ2-1)
CASSPSGGQNEQFF

SEQ ID NO: 574637 - protein, 14 aa, Homo sapiens
  CDR3 for alpha chain variable domain of TCR clone 287319 (TRAV12-3, TRAJ56)
CAMSVTGANSKLTF

SEQ ID NO: 574638 - protein, 13 aa, Homo sapiens
  CDR3 for beta chain variable domain of TCR clone 287319 (TRBV12-5, TRBJ2-3)
CASGDRQSAPPYF

SEQ ID NO: 574639 - protein, 12 aa, Homo sapiens
  CDR3 for alpha chain variable domain of TCR clone 287320 (TRAV21, TRAJ27)
CAANTNAGKSTF

SEQ ID NO: 574640 - protein, 13 aa, Homo sapiens
  CDR3 for beta chain variable domain of TCR clone 287320 (TRBV3-1, TRBJ1-1)
CASSPGVITEAFF

SEQ ID NO: 574641 - protein, 14 aa, Homo sapiens
  CDR3 for alpha chain variable domain of TCR clone 287321 (TRAV17, TRAJ57)
CATDPQGGSEKLVF

SEQ ID NO: 574642 - protein, 12 aa, Homo sapiens
  CDR3 for beta chain variable domain of TCR clone 287321 (TRBV14, TRBJ2-5)
CASSQLKETQYF

SEQ ID NO: 574643 - protein, 12 aa, Homo sapiens
  CDR3 for alpha chain variable domain of TCR clone 287322 (TRAV12-2, TRAJ20)
CAVNRNDYKLSF

SEQ ID NO: 574644 - protein, 16 aa, Homo sapiens
  CDR3 for beta chain variable domain of TCR clone 287322 (TRBV7-3, TRBJ1-2)
CASSLGAPVPNYGYTV

SEQ ID NO: 574645 - protein, 16 aa, Homo sapiens
  CDR3 for alpha chain variable domain of TCR clone 287323 (TRAV3, TRAJ21)
CAVRDIERGNFNKFYF

SEQ ID NO: 574646 - protein, 12 aa, Homo sapiens
  CDR3 for beta chain variable domain of TCR clone 287323 (TRBV12-4, TRBJ2-7)
CASSLGGYEQYF

SEQ ID NO: 574647 - protein, 12 aa, Homo sapiens
  CDR3 for alpha chain variable domain of TCR clone 287324 (TRAV13-2, TRAJ23)
CAERHRGGKLIF

SEQ ID NO: 574648 - protein, 14 aa, Homo sapiens
  CDR3 for beta chain variable domain of TCR clone 287324 (TRBV7-9, TRBJ2-2)
CASSGLADTGELFF

SEQ ID NO: 574649 - protein, 12 aa, Homo sapiens
  CDR3 for alpha chain variable domain of TCR clone 287325 (TRAV12-2, TRAJ8)
CAVNTGFQNLVF

SEQ ID NO: 574650 - protein, 14 aa, Homo sapiens
  CDR3 for beta chain variable domain of TCR clone 287325 (TRBV20-1, TRBJ1-1)
CSAQTRIGGTEAFF

SEQ ID NO: 574651 - protein, 13 aa, Homo sapiens
  CDR3 for alpha chain variable domain of TCR clone 287326 (TRAV27, TRAJ41)
CAGEGNSGYALTS

SEQ ID NO: 574652 - protein, 14 aa, Homo sapiens
  CDR3 for beta chain variable domain of TCR clone 287326 (TRBV7-2, TRBJ1-1)
CASSFLTGTTEAFF

SEQ ID NO: 574653 - protein, 14 aa, Homo sapiens
  CDR3 for alpha chain variable domain of TCR clone 287327 (TRAV12-2, TRAJ11)
CAVNRESGYSTLTF

SEQ ID NO: 574654 - protein, 16 aa, Homo sapiens
  CDR3 for beta chain variable domain of TCR clone 287327 (TRBV7-3, TRBJ2-2)
CASSLKRGTLSGELFF

SEQ ID NO: 574655 - protein, 13 aa, Homo sapiens
  CDR3 for alpha chain variable domain of TCR clone 287328 (TRAV21, TRAJ27)
CAARPGNAGKSTF

SEQ ID NO: 574656 - protein, 12 aa, Homo sapiens
  CDR3 for beta chain variable domain of TCR clone 287328 (TRBV12-4, TRBJ1-2)
CASSFIWLHLRF

SEQ ID NO: 574657 - protein, 13 aa, Homo sapiens
  CDR3 for alpha chain variable domain of TCR clone 287329 (TRAV4, TRAJ41)
CLVGENSGYALNF

SEQ ID NO: 574658 - protein, 14 aa, Homo sapiens
  CDR3 for beta chain variable domain of TCR clone 287329 (TRBV11-2, TRBJ2-3)
CASSRLARTDTQYF

SEQ ID NO: 574659 - protein, 15 aa, Homo sapiens
  CDR3 for alpha chain variable domain of TCR clone 287330 (TRAV8-3, TRAJ45)
CASSYSGGGADGLTF

SEQ ID NO: 574660 - protein, 16 aa, Homo sapiens
  CDR3 for beta chain variable domain of TCR clone 287330 (TRBV10-3, TRBJ2-1)
CAISGVGDGGGGEQFF

SEQ ID NO: 574661 - protein, 14 aa, Homo sapiens
  CDR3 for alpha chain variable domain of TCR clone 287331 (TRAV17, TRAJ22)
CATSPSGSARQLTF

SEQ ID NO: 574662 - protein, 14 aa, Homo sapiens
  CDR3 for beta chain variable domain of TCR clone 287331 (TRBV5-4, TRBJ1-1)
CASSLDSRRDEAFF

SEQ ID NO: 574663 - protein, 14 aa, Homo sapiens
  CDR3 for alpha chain variable domain of TCR clone 287332 (TRAV1-1, TRAJ28)
CVVQLWGWELPTHF

SEQ ID NO: 574664 - protein, 14 aa, Homo sapiens
  CDR3 for beta chain variable domain of TCR clone 287332 (TRBV20-1, TRBJ1-1)
CSAQTRIGGTEAFF

SEQ ID NO: 574665 - protein, 15 aa, Homo sapiens
  CDR3 for alpha chain variable domain of TCR clone 287333 (TRAV27, TRAJ38)
CAARRNAGNNRKRIW

SEQ ID NO: 574666 - protein, 13 aa, Homo sapiens
  CDR3 for beta chain variable domain of TCR clone 287333 (TRBV12-5, TRBJ2-3)
CASGDRQSDTQYL

SEQ ID NO: 574667 - protein, 14 aa, Homo sapiens
  CDR3 for alpha chain variable domain of TCR clone 287334 (TRAV12-1, TRAJ17)
CVVNYKAAGNKLHF

SEQ ID NO: 574668 - protein, 16 aa, Homo sapiens
  CDR3 for beta chain variable domain of TCR clone 287334 (TRBV12-4, TRBJ1-5)
CASSRPVGGSNQPQHF

SEQ ID NO: 574669 - protein, 14 aa, Homo sapiens
  CDR3 for alpha chain variable domain of TCR clone 287335 (TRAV13-1, TRAJ10)
CAAKEPGGGNKLTF

SEQ ID NO: 574670 - protein, 14 aa, Homo sapiens
  CDR3 for beta chain variable domain of TCR clone 287335 (TRBV20-1, TRBJ1-1)
CSAQTRIGGTESFF

SEQ ID NO: 574671 - protein, 17 aa, Homo sapiens
  CDR3 for alpha chain variable domain of TCR clone 287336 (TRAV12-2, TRAJ36)
CAVKDNLFFGTGTRLTV

SEQ ID NO: 574672 - protein, 11 aa, Homo sapiens
  CDR3 for beta chain variable domain of TCR clone 287336 (TRBV29-1, TRBJ2-5)
CSEDQTGTQYF

SEQ ID NO: 574673 - protein, 12 aa, Homo sapiens
  CDR3 for alpha chain variable domain of TCR clone 287337 (TRAV8-3, TRAJ27)
CAVCAEAGKSTF

SEQ ID NO: 574674 - protein, 14 aa, Homo sapiens
  CDR3 for beta chain variable domain of TCR clone 287337 (TRBV2, TRBJ2-1)
CASRLIVGHDEQFF

SEQ ID NO: 574675 - protein, 13 aa, Homo sapiens
  CDR3 for alpha chain variable domain of TCR clone 287338 (TRAV17, TRAJ5)
CAPMDTGRRALTF

SEQ ID NO: 574676 - protein, 16 aa, Homo sapiens
  CDR3 for beta chain variable domain of TCR clone 287338 (TRBV7-2, TRBJ2-3)
CASSESGPTGTDTQYF

SEQ ID NO: 574677 - protein, 13 aa, Homo sapiens
  CDR3 for alpha chain variable domain of TCR clone 287339 (TRAV29/DV5, TRAJ22)
CAHHSGSARQLTF

SEQ ID NO: 574678 - protein, 14 aa, Homo sapiens
  CDR3 for beta chain variable domain of TCR clone 287339 (TRBV16, TRBJ1-1)
CASSQAGPNTEAVF

SEQ ID NO: 574679 - protein, 10 aa, Homo sapiens
  CDR3 for alpha chain variable domain of TCR clone 287340 (TRAV30, TRAJ48)
CGIGNEKLTF

SEQ ID NO: 574680 - protein, 16 aa, Homo sapiens
  CDR3 for beta chain variable domain of TCR clone 287340 (TRBV7-6, TRBJ1-6)
CASSLSSRIGDSPLHF

SEQ ID NO: 574681 - protein, 11 aa, Homo sapiens
  CDR3 for alpha chain variable domain of TCR clone 287341 (TRAV36/DV7, TRAJ54)
CCGPGAQQLVF

SEQ ID NO: 574682 - protein, 15 aa, Homo sapiens
  CDR3 for beta chain variable domain of TCR clone 287341 (TRBV11-2, TRBJ2-2)
CASSSDRVNAGELFF

SEQ ID NO: 574683 - protein, 14 aa, Homo sapiens
  CDR3 for alpha chain variable domain of TCR clone 287342 (TRAV1-2, TRAJ8)
CAGREDTGFQKLVF

SEQ ID NO: 574684 - protein, 14 aa, Homo sapiens
  CDR3 for beta chain variable domain of TCR clone 287342 (TRBV7-3, TRBJ2-1)
CASSLAGGTNEQFF

SEQ ID NO: 574685 - protein, 13 aa, Homo sapiens
  CDR3 for alpha chain variable domain of TCR clone 287343 (TRAV17, TRAJ6)
CATGFGGSYIPTF

SEQ ID NO: 574686 - protein, 14 aa, Homo sapiens
  CDR3 for beta chain variable domain of TCR clone 287343 (TRBV5-1, TRBJ2-5)
CGSSFGGSQETQYF

SEQ ID NO: 574687 - protein, 12 aa, Homo sapiens
  CDR3 for alpha chain variable domain of TCR clone 287344 (TRAV13-1, TRAJ48)
CAANFGNEKLTF

SEQ ID NO: 574688 - protein, 14 aa, Homo sapiens
  CDR3 for beta chain variable domain of TCR clone 287344 (TRBV7-3, TRBJ1-1)
CASSLKGGNTEAFF

SEQ ID NO: 574689 - protein, 17 aa, Homo sapiens
  CDR3 for alpha chain variable domain of TCR clone 287345 (TRAV3, TRAJ6)
CAVGDGPRAGGSYIPTF

SEQ ID NO: 574690 - protein, 13 aa, Homo sapiens
  CDR3 for beta chain variable domain of TCR clone 287345 (TRBV27, TRBJ2-1)
CASRTLGVGEQFF

SEQ ID NO: 574691 - protein, 11 aa, Homo sapiens
  CDR3 for alpha chain variable domain of TCR clone 287346 (TRAV36/DV7, TRAJ45)
SGGGGADGLTF

SEQ ID NO: 574692 - protein, 15 aa, Homo sapiens
  CDR3 for beta chain variable domain of TCR clone 287346 (TRBV27, TRBJ2-1)
CASSNGGGSSNEQFF

SEQ ID NO: 574693 - protein, 15 aa, Homo sapiens
  CDR3 for alpha chain variable domain of TCR clone 287347 (TRAV17, TRAJ54)
CATTRSEQGAQKLGF

SEQ ID NO: 574694 - protein, 15 aa, Homo sapiens
  CDR3 for beta chain variable domain of TCR clone 287347 (TRBV7-9, TRBJ1-6)
CASSSPGRGNSPLHF

SEQ ID NO: 574695 - protein, 15 aa, Homo sapiens
  CDR3 for alpha chain variable domain of TCR clone 287348 (TRAV17, TRAJ37)
CATDGGSSDTGKLIF

SEQ ID NO: 574696 - protein, 15 aa, Homo sapiens
  CDR3 for beta chain variable domain of TCR clone 287348 (TRBV28, TRBJ2-5)
CASSSGRTIQETQYF

SEQ ID NO: 574697 - protein, 13 aa, Homo sapiens
  CDR3 for alpha chain variable domain of TCR clone 287349 (TRAV12-1, TRAJ22)
CVAAGGSARQLTF

SEQ ID NO: 574698 - protein, 12 aa, Homo sapiens
  CDR3 for beta chain variable domain of TCR clone 287349 (TRBV29-1, TRBJ2-3)
CSVTGGADTQYF

SEQ ID NO: 574699 - protein, 14 aa, Homo sapiens
  CDR3 for alpha chain variable domain of TCR clone 287350 (TRAV8-1, TRAJ24)
CAVNAADSWGKLQF

SEQ ID NO: 574700 - protein, 16 aa, Homo sapiens
  CDR3 for beta chain variable domain of TCR clone 287350 (TRBV18, TRBJ2-2)
CASSPPRTANTGELFF

SEQ ID NO: 574701 - protein, 13 aa, Homo sapiens
  CDR3 for alpha chain variable domain of TCR clone 287351 (TRAV1-2, TRAJ9)
CAALTTGGLKTIF

SEQ ID NO: 574702 - protein, 13 aa, Homo sapiens
  CDR3 for beta chain variable domain of TCR clone 287351 (TRBV19, TRBJ1-2)
CASSVPGQDGYTF

SEQ ID NO: 574703 - protein, 18 aa, Homo sapiens
  CDR3 for alpha chain variable domain of TCR clone 287352 (TRAV21, TRAJ52)
CAVRPSPAGGTSYGKLTF

SEQ ID NO: 574704 - protein, 13 aa, Homo sapiens
  CDR3 for beta chain variable domain of TCR clone 287352 (TRBV11-3, TRBJ1-2)
CASSLLQGEGYTF

SEQ ID NO: 574705 - protein, 12 aa, Homo sapiens
  CDR3 for alpha chain variable domain of TCR clone 287353 (TRAV21, TRAJ23)
CAVCPQGGKLIF

SEQ ID NO: 574706 - protein, 13 aa, Homo sapiens
  CDR3 for beta chain variable domain of TCR clone 287353 (TRBV20-1, TRBJ2-7)
CSARTGAGYEQYF

SEQ ID NO: 574707 - protein, 15 aa, Homo sapiens
  CDR3 for alpha chain variable domain of TCR clone 287354 (TRAV26-1, TRAJ17)
CIVRVVKAAGNKRTF

SEQ ID NO: 574708 - protein, 16 aa, Homo sapiens
  CDR3 for beta chain variable domain of TCR clone 287354 (TRBV7-9, TRBJ2-1)
CASSLVSGPSYNEQFF

SEQ ID NO: 574709 - protein, 14 aa, Homo sapiens
  CDR3 for alpha chain variable domain of TCR clone 287355 (TRAV12-2, TRAJ6)
CASKWGGGSYIPTF

SEQ ID NO: 574710 - protein, 12 aa, Homo sapiens
  CDR3 for beta chain variable domain of TCR clone 287355 (TRBV3-1, TRBJ2-2)
CASSLFPGELFF

SEQ ID NO: 574711 - protein, 13 aa, Homo sapiens
  CDR3 for alpha chain variable domain of TCR clone 287356 (TRAV8-3, TRAJ44)
CAVVPGTASKLTF

SEQ ID NO: 574712 - protein, 16 aa, Homo sapiens
  CDR3 for beta chain variable domain of TCR clone 287356 (TRBV7-6, TRBJ1-6)
CASSSLPAGEYSPLHF

SEQ ID NO: 574713 - protein, 14 aa, Homo sapiens
  CDR3 for alpha chain variable domain of TCR clone 287357 (TRAV12-2, TRAJ53)
CAGKGGGSNYKLTF

SEQ ID NO: 574714 - protein, 14 aa, Homo sapiens
  CDR3 for beta chain variable domain of TCR clone 287357 (TRBV19, TRBJ2-1)
CARPTFVLSGEQFF

SEQ ID NO: 574715 - protein, 13 aa, Homo sapiens
  CDR3 for alpha chain variable domain of TCR clone 287358 (TRAV23/DV6, TRAJ43)
CAASMGGNNDMRF

SEQ ID NO: 574716 - protein, 17 aa, Homo sapiens
  CDR3 for beta chain variable domain of TCR clone 287358 (TRBV7-3, TRBJ2-3)
CASSPRGQGYGTDTQYF

SEQ ID NO: 574717 - protein, 12 aa, Homo sapiens
  CDR3 for alpha chain variable domain of TCR clone 287359 (TRAV9-2, TRAJ26)
CALRGYGQNFVF

SEQ ID NO: 574718 - protein, 12 aa, Homo sapiens
  CDR3 for beta chain variable domain of TCR clone 287359 (TRBV29-1, TRBJ2-3)
CIVTGGADTQYF

SEQ ID NO: 574719 - protein, 13 aa, Homo sapiens
  CDR3 for alpha chain variable domain of TCR clone 287360 (TRAV8-3, TRAJ4)
WVFYSGGNNKLIF

SEQ ID NO: 574720 - protein, 14 aa, Homo sapiens
  CDR3 for beta chain variable domain of TCR clone 287360 (TRBV7-9, TRBJ2-3)
CASSLEDGTDTQYF

SEQ ID NO: 574721 - protein, 13 aa, Homo sapiens
  CDR3 for alpha chain variable domain of TCR clone 287361 (TRAV12-1, TRAJ33)
CGDAPDSNYQLIW

SEQ ID NO: 574722 - protein, 15 aa, Homo sapiens
  CDR3 for beta chain variable domain of TCR clone 287361 (TRBV27, TRBJ2-1)
CASSNGGGSSYEQFF

SEQ ID NO: 574723 - protein, 17 aa, Homo sapiens
  CDR3 for alpha chain variable domain of TCR clone 287362 (TRAV3, TRAJ6)
CAVSRRTDTGGSYIPTF

SEQ ID NO: 574724 - protein, 18 aa, Homo sapiens
  CDR3 for beta chain variable domain of TCR clone 287362 (TRBV7-2, TRBJ2-3)
CASNLETSRGRKADTQYF

SEQ ID NO: 574725 - protein, 21 aa, Homo sapiens
  CDR3 for alpha chain variable domain of TCR clone 287363 (TRAV2, TRAJ27)
ILQVREADAAVYSANAGKSTF

SEQ ID NO: 574726 - protein, 13 aa, Homo sapiens
  CDR3 for beta chain variable domain of TCR clone 287363 (TRBV27, TRBJ2-3)
CASSWGRTDTQYF

SEQ ID NO: 574727 - protein, 18 aa, Homo sapiens
  CDR3 for alpha chain variable domain of TCR clone 287364 (TRAV12-2, )
CAVEDIQNPDPAVYQLRD

SEQ ID NO: 574728 - protein, 15 aa, Homo sapiens
  CDR3 for beta chain variable domain of TCR clone 287364 (TRBV2, TRBJ1-2)
CASSEIGGANYGYTF

SEQ ID NO: 574729 - protein, 14 aa, Homo sapiens
  CDR3 for alpha chain variable domain of TCR clone 287365 (TRAV12-2, TRAJ13)
CALKKTGGYQKVTF

SEQ ID NO: 574730 - protein, 16 aa, Homo sapiens
  CDR3 for beta chain variable domain of TCR clone 287365 (TRBV20-1, TRBJ2-1)
CSAPGLAGSYSDEQFF

SEQ ID NO: 574731 - protein, 11 aa, Homo sapiens
  CDR3 for alpha chain variable domain of TCR clone 287366 (TRAV27, TRAJ20)
CAGLNDYKLSF

SEQ ID NO: 574732 - protein, 12 aa, Homo sapiens
  CDR3 for beta chain variable domain of TCR clone 287366 (TRBV5-1, TRBJ1-1)
CASSLTGAEAFF

SEQ ID NO: 574733 - protein, 13 aa, Homo sapiens
  CDR3 for alpha chain variable domain of TCR clone 287367 (TRAV20, TRAJ31)
CAVQAIGGARLMF

SEQ ID NO: 574734 - protein, 14 aa, Homo sapiens
  CDR3 for beta chain variable domain of TCR clone 287367 (TRBV7-2, TRBJ2-7)
CASRSQGAAYEQYF

SEQ ID NO: 574735 - protein, 11 aa, Homo sapiens
  CDR3 for alpha chain variable domain of TCR clone 287368 (TRAV26-1, TRAJ37)
CIVRVGRKLIF

SEQ ID NO: 574736 - protein, 13 aa, Homo sapiens
  CDR3 for beta chain variable domain of TCR clone 287368 (TRBV14, TRBJ1-2)
CASSEDRRYGHTF

SEQ ID NO: 574737 - protein, 16 aa, Homo sapiens
  CDR3 for alpha chain variable domain of TCR clone 287369 (TRAV13-2, TRAJ32)
CAENMNYGGATNKLIF

SEQ ID NO: 574738 - protein, 14 aa, Homo sapiens
  CDR3 for beta chain variable domain of TCR clone 287369 (TRBV4-3, TRBJ2-7)
CASSQDVAGGDQYF

SEQ ID NO: 574739 - protein, 16 aa, Homo sapiens
  CDR3 for alpha chain variable domain of TCR clone 287370 (TRAV26-1, TRAJ52)
CIVSNAGGTSYGKLTF

SEQ ID NO: 574740 - protein, 16 aa, Homo sapiens
  CDR3 for beta chain variable domain of TCR clone 287370 (TRBV5-1, TRBJ2-1)
CASSLEGRGLYNEQVV

SEQ ID NO: 574741 - protein, 14 aa, Homo sapiens
  CDR3 for alpha chain variable domain of TCR clone 287371 (TRAV23/DV6, TRAJ22)
CAASVSGSARQLTF

SEQ ID NO: 574742 - protein, 17 aa, Homo sapiens
  CDR3 for beta chain variable domain of TCR clone 287371 (TRBV7-8, TRBJ2-6)
CASSAGTGGAGANVLTF

SEQ ID NO: 574743 - protein, 14 aa, Homo sapiens
  CDR3 for alpha chain variable domain of TCR clone 287372 (TRAV8-2, TRAJ37)
CVVSISDNTGKLIF

SEQ ID NO: 574744 - protein, 17 aa, Homo sapiens
  CDR3 for beta chain variable domain of TCR clone 287372 (TRBV13, TRBJ2-3)
CASSLSRVAGGRNTQYF

SEQ ID NO: 574745 - protein, 14 aa, Homo sapiens
  CDR3 for alpha chain variable domain of TCR clone 287373 (TRAV8-6, TRAJ30)
CAVRPVNRDAKIIF

SEQ ID NO: 574746 - protein, 17 aa, Homo sapiens
  CDR3 for beta chain variable domain of TCR clone 287373 (TRBV7-8, TRBJ2-6)
CASSAGTGGAGANVLTF

SEQ ID NO: 574747 - protein, 11 aa, Homo sapiens
  CDR3 for alpha chain variable domain of TCR clone 287374 (TRAV21, TRAJ20)
CAVRDDYKLSF

SEQ ID NO: 574748 - protein, 12 aa, Homo sapiens
  CDR3 for beta chain variable domain of TCR clone 287374 (TRBV7-8, TRBJ2-7)
CASSLGDREQYF

SEQ ID NO: 574749 - protein, 12 aa, Homo sapiens
  CDR3 for alpha chain variable domain of TCR clone 287375 (TRAV12-2, TRAJ10)
WGVTGGGNKLTF

SEQ ID NO: 574750 - protein, 11 aa, Homo sapiens
  CDR3 for beta chain variable domain of TCR clone 287375 (TRBV7-8, TRBJ2-7)
CASSLSLEQYF

SEQ ID NO: 574751 - protein, 14 aa, Homo sapiens
  CDR3 for alpha chain variable domain of TCR clone 287376 (TRAV1-2, TRAJ8)
CAVRVETGFQKLVF

SEQ ID NO: 574752 - protein, 16 aa, Homo sapiens
  CDR3 for beta chain variable domain of TCR clone 287376 (TRBV4-1, TRBJ1-4)
CASSQDLRRGGEKLFF

SEQ ID NO: 574753 - protein, 14 aa, Homo sapiens
  CDR3 for alpha chain variable domain of TCR clone 287377 (TRAV4, TRAJ30)
CLVGDMNRVDKIIF

SEQ ID NO: 574754 - protein, 15 aa, Homo sapiens
  CDR3 for beta chain variable domain of TCR clone 287377 (TRBV7-2, TRBJ2-7)
CASSLSSGRTYEQYF

SEQ ID NO: 574755 - protein, 11 aa, Homo sapiens
  CDR3 for alpha chain variable domain of TCR clone 287378 (TRAV3, TRAJ21)
FAVGNFNKFYF

SEQ ID NO: 574756 - protein, 14 aa, Homo sapiens
  CDR3 for beta chain variable domain of TCR clone 287378 (TRBV7-9, TRBJ2-1)
CASSSMVGFGEQFF

SEQ ID NO: 574757 - protein, 15 aa, Homo sapiens
  CDR3 for alpha chain variable domain of TCR clone 287379 (TRAV23/DV6, TRAJ18)
CAARYRGSTLGRLYF

SEQ ID NO: 574758 - protein, 14 aa, Homo sapiens
  CDR3 for beta chain variable domain of TCR clone 287379 (TRBV6-6, TRBJ2-7)
CASQQGIRSYEQYF

SEQ ID NO: 574759 - protein, 10 aa, Homo sapiens
  CDR3 for alpha chain variable domain of TCR clone 287380 (TRAV16, TRAJ22)
SAMYLRQLTF

SEQ ID NO: 574760 - protein, 12 aa, Homo sapiens
  CDR3 for beta chain variable domain of TCR clone 287380 (TRBV7-3, TRBJ2-1)
CASSFQSGPQFF

SEQ ID NO: 574761 - protein, 13 aa, Homo sapiens
  CDR3 for alpha chain variable domain of TCR clone 287381 (TRAV39, TRAJ58)
CAGEETTGSRLTF

SEQ ID NO: 574762 - protein, 13 aa, Homo sapiens
  CDR3 for beta chain variable domain of TCR clone 287381 (TRBV15, TRBJ2-7)
CATSTTGHYEQYF

SEQ ID NO: 574763 - protein, 11 aa, Homo sapiens
  CDR3 for alpha chain variable domain of TCR clone 287382 (TRAV21, TRAJ48)
CAVDGNEKLTF

SEQ ID NO: 574764 - protein, 18 aa, Homo sapiens
  CDR3 for beta chain variable domain of TCR clone 287382 (TRBV7-9, TRBJ2-7)
CASSLTTSGSRTWYEQYF

SEQ ID NO: 574765 - protein, 12 aa, Homo sapiens
  CDR3 for alpha chain variable domain of TCR clone 287383 (TRAV17, TRAJ20)
CATDSNDYKLSF

SEQ ID NO: 574766 - protein, 12 aa, Homo sapiens
  CDR3 for beta chain variable domain of TCR clone 287383 (TRBV14, TRBJ1-1)
CASSQLKGLAFF

SEQ ID NO: 574767 - protein, 18 aa, Homo sapiens
  CDR3 for alpha chain variable domain of TCR clone 287384 (TRAV21, TRAJ52)
CAVRPSPAGGTSYGKLTF

SEQ ID NO: 574768 - protein, 12 aa, Homo sapiens
  CDR3 for beta chain variable domain of TCR clone 287384 (TRBV12-4, TRBJ2-1)
CASSLQGSEQFF

SEQ ID NO: 574769 - protein, 14 aa, Homo sapiens
  CDR3 for alpha chain variable domain of TCR clone 287385 (TRAV12-1, TRAJ17)
CVVNYKAAGTTLTF

SEQ ID NO: 574770 - protein, 17 aa, Homo sapiens
  CDR3 for beta chain variable domain of TCR clone 287385 (TRBV20-1, TRBJ2-1)
CSASSSGLAGSYNEQFF

SEQ ID NO: 574771 - protein, 14 aa, Homo sapiens
  CDR3 for alpha chain variable domain of TCR clone 287386 (TRAV12-3, TRAJ10)
SRLPLTGGGNKLTF

SEQ ID NO: 574772 - protein, 15 aa, Homo sapiens
  CDR3 for beta chain variable domain of TCR clone 287386 (TRBV7-3, TRBJ2-2)
CASSETGQGTGELFF

SEQ ID NO: 574773 - protein, 13 aa, Homo sapiens
  CDR3 for alpha chain variable domain of TCR clone 287387 (TRAV12-1, TRAJ20)
CVVNVTNDYKLSF

SEQ ID NO: 574774 - protein, 12 aa, Homo sapiens
  CDR3 for beta chain variable domain of TCR clone 287387 (TRBV11-2, TRBJ2-1)
CASSVQREGQFF

SEQ ID NO: 574775 - protein, 13 aa, Homo sapiens
  CDR3 for alpha chain variable domain of TCR clone 287388 (TRAV13-1, TRAJ39)
CAASIWAGDILTF

SEQ ID NO: 574776 - protein, 15 aa, Homo sapiens
  CDR3 for beta chain variable domain of TCR clone 287388 (TRBV7-9, TRBJ1-1)
CASSLLELGGTEAFF

SEQ ID NO: 574777 - protein, 17 aa, Homo sapiens
  CDR3 for alpha chain variable domain of TCR clone 287389 (TRAV3, TRAJ6)
CAVRDGPRAGGSYIPTF

SEQ ID NO: 574778 - protein, 15 aa, Homo sapiens
  CDR3 for beta chain variable domain of TCR clone 287389 (TRBV4-3, TRBJ1-1)
CASSPRLEGNTEAFF

SEQ ID NO: 574779 - protein, 14 aa, Homo sapiens
  CDR3 for alpha chain variable domain of TCR clone 287390 (TRAV8-4, TRAJ13)
YAVTLSGGYQKVTF

SEQ ID NO: 574780 - protein, 14 aa, Homo sapiens
  CDR3 for beta chain variable domain of TCR clone 287390 (TRBV7-2, TRBJ1-2)
CASSQTGSTYGYSF

SEQ ID NO: 574781 - protein, 12 aa, Homo sapiens
  CDR3 for alpha chain variable domain of TCR clone 287391 (TRAV12-3, TRAJ17)
CAMTLTGNKLTF

SEQ ID NO: 574782 - protein, 15 aa, Homo sapiens
  CDR3 for beta chain variable domain of TCR clone 287391 (TRBV5-4, TRBJ2-3)
CASSLYRGRKDTQYF

SEQ ID NO: 574783 - protein, 15 aa, Homo sapiens
  CDR3 for alpha chain variable domain of TCR clone 287392 (TRAV13-1, TRAJ52)
CAASSPSTSYGKLTF

SEQ ID NO: 574784 - protein, 13 aa, Homo sapiens
  CDR3 for beta chain variable domain of TCR clone 287392 (TRBV27, TRBJ2-5)
CARSLSSLETQYF

SEQ ID NO: 574785 - protein, 12 aa, Homo sapiens
  CDR3 for alpha chain variable domain of TCR clone 287393 (TRAV8-3, TRAJ20)
CAVGFNDYKLSF

SEQ ID NO: 574786 - protein, 13 aa, Homo sapiens
  CDR3 for beta chain variable domain of TCR clone 287393 (TRBV5-7, TRBJ2-3)
CASSLGRTDTQYF

SEQ ID NO: 574787 - protein, 14 aa, Homo sapiens
  CDR3 for alpha chain variable domain of TCR clone 287394 (TRAV8-4, TRAJ16)
CAVSPVGRWPEAAL

SEQ ID NO: 574788 - protein, 12 aa, Homo sapiens
  CDR3 for beta chain variable domain of TCR clone 287394 (TRBV12-4, TRBJ2-1)
CASSLQGSEQFF

SEQ ID NO: 574789 - protein, 12 aa, Homo sapiens
  CDR3 for alpha chain variable domain of TCR clone 287395 (TRAV12-2, TRAJ31)
CAVNTPDARLMF

SEQ ID NO: 574790 - protein, 15 aa, Homo sapiens
  CDR3 for beta chain variable domain of TCR clone 287395 (TRBV4-2, TRBJ1-1)
CGSSQDQGLNTEAFF

SEQ ID NO: 574791 - protein, 15 aa, Homo sapiens
  CDR3 for alpha chain variable domain of TCR clone 287396 (TRAV21, TRAJ53)
CAVRQSGGSNYKLTF

SEQ ID NO: 574792 - protein, 15 aa, Homo sapiens
  CDR3 for beta chain variable domain of TCR clone 287396 (TRBV20-1, TRBJ2-7)
CSARDRVSGMDEQYF

SEQ ID NO: 574793 - protein, 14 aa, Homo sapiens
  CDR3 for alpha chain variable domain of TCR clone 287397 (TRAV1-2, TRAJ16)
CAVNRFSDGQKLLF

SEQ ID NO: 574794 - protein, 14 aa, Homo sapiens
  CDR3 for beta chain variable domain of TCR clone 287397 (TRBV4-1, TRBJ2-2)
CASSQAVSTGELFF

SEQ ID NO: 574795 - protein, 14 aa, Homo sapiens
  CDR3 for alpha chain variable domain of TCR clone 287398 (TRAV12-1, TRAJ38)
CGELKTGNNRKLIW

SEQ ID NO: 574796 - protein, 12 aa, Homo sapiens
  CDR3 for beta chain variable domain of TCR clone 287398 (TRBV24-1, TRBJ1-1)
CATLYPDTEAFF

SEQ ID NO: 574797 - protein, 13 aa, Homo sapiens
  CDR3 for alpha chain variable domain of TCR clone 287399 (TRAV1-1, TRAJ7)
CAVRDHGNNRLAF

SEQ ID NO: 574798 - protein, 18 aa, Homo sapiens
  CDR3 for beta chain variable domain of TCR clone 287399 (TRBV25-1, TRBJ1-2)
CASSGLQNGQGLIFGDTF

SEQ ID NO: 574799 - protein, 16 aa, Homo sapiens
  CDR3 for alpha chain variable domain of TCR clone 287400 (TRAV30, TRAJ24)
CGTEIVDADSWGKFQF

SEQ ID NO: 574800 - protein, 14 aa, Homo sapiens
  CDR3 for beta chain variable domain of TCR clone 287400 (TRBV7-2, TRBJ1-2)
CASSQTGSTYGYTV

SEQ ID NO: 574801 - protein, 15 aa, Homo sapiens
  CDR3 for alpha chain variable domain of TCR clone 287401 (TRAV8-1, TRAJ6)
CAVNTPPGGSYIPTF

SEQ ID NO: 574802 - protein, 14 aa, Homo sapiens
  CDR3 for beta chain variable domain of TCR clone 287401 (TRBV12-4, TRBJ2-1)
CAGSLGQGASEQFF

SEQ ID NO: 574803 - protein, 14 aa, Homo sapiens
  CDR3 for alpha chain variable domain of TCR clone 287402 (TRAV8-4, TRAJ13)
CAVTLSGGYQKVAF

SEQ ID NO: 574804 - protein, 12 aa, Homo sapiens
  CDR3 for beta chain variable domain of TCR clone 287402 (TRBV11-2, TRBJ2-2)
CASSLGGGELFF

SEQ ID NO: 574805 - protein, 13 aa, Homo sapiens
  CDR3 for alpha chain variable domain of TCR clone 287403 (TRAV12-3, TRAJ13)
CAMSSGGYQNVTF

SEQ ID NO: 574806 - protein, 13 aa, Homo sapiens
  CDR3 for beta chain variable domain of TCR clone 287403 (TRBV19, TRBJ1-3)
CASRLSLGNTIYF

SEQ ID NO: 574807 - protein, 15 aa, Homo sapiens
  CDR3 for alpha chain variable domain of TCR clone 287404 (TRAV23/DV6, TRAJ18)
CAARYRGSTLGRLNF

SEQ ID NO: 574808 - protein, 15 aa, Homo sapiens
  CDR3 for beta chain variable domain of TCR clone 287404 (TRBV7-8, TRBJ2-1)
CASSLADSLYNEQFF

SEQ ID NO: 574809 - protein, 17 aa, Homo sapiens
  CDR3 for alpha chain variable domain of TCR clone 287405 (TRAV3, TRAJ12)
CAVRDGGRMDSSYKLIF

SEQ ID NO: 574810 - protein, 14 aa, Homo sapiens
  CDR3 for beta chain variable domain of TCR clone 287405 (TRBV7-9, TRBJ1-2)
CASSRQGANYGSTF

SEQ ID NO: 574811 - protein, 12 aa, Homo sapiens
  CDR3 for alpha chain variable domain of TCR clone 287406 (TRAV38-1, TRAJ34)
CAFMKDTDKLIF

SEQ ID NO: 574812 - protein, 17 aa, Homo sapiens
  CDR3 for beta chain variable domain of TCR clone 287406 (TRBV7-8, TRBJ2-6)
CASSAGTGGAGANVLTF

SEQ ID NO: 574813 - protein, 13 aa, Homo sapiens
  CDR3 for alpha chain variable domain of TCR clone 287407 (TRAV12-2, TRAJ20)
CAVYPSNDYKLSF

SEQ ID NO: 574814 - protein, 15 aa, Homo sapiens
  CDR3 for beta chain variable domain of TCR clone 287407 (TRBV10-2, TRBJ2-6)
CASSEQGTGANVLTF

SEQ ID NO: 574815 - protein, 18 aa, Homo sapiens
  CDR3 for alpha chain variable domain of TCR clone 287408 (TRAV21, TRAJ52)
CAVRPSPAGGTSSGKLTF

SEQ ID NO: 574816 - protein, 17 aa, Homo sapiens
  CDR3 for beta chain variable domain of TCR clone 287408 (TRBV25-1, TRBJ2-1)
CASSAYGQGRGVYEQFF

SEQ ID NO: 574817 - protein, 15 aa, Homo sapiens
  CDR3 for alpha chain variable domain of TCR clone 287409 (TRAV10, TRAJ34)
CVVSGKHRQAHLWAW

SEQ ID NO: 574818 - protein, 14 aa, Homo sapiens
  CDR3 for beta chain variable domain of TCR clone 287409 (TRBV19, TRBJ2-1)
CASPTFVLSGEQFF

SEQ ID NO: 574819 - protein, 16 aa, Homo sapiens
  CDR3 for alpha chain variable domain of TCR clone 287410 (TRAV30, TRAJ42)
CGTSTNYGGSQGNLIF

SEQ ID NO: 574820 - protein, 14 aa, Homo sapiens
  CDR3 for beta chain variable domain of TCR clone 287410 (TRBV19, TRBJ1-5)
CASNSYGTHQPQHF

SEQ ID NO: 574821 - protein, 14 aa, Homo sapiens
  CDR3 for alpha chain variable domain of TCR clone 287411 (TRAV12-2, TRAJ44)
CAVNPAGTASKLTF

SEQ ID NO: 574822 - protein, 15 aa, Homo sapiens
  CDR3 for beta chain variable domain of TCR clone 287411 (TRBV10-2, TRBJ2-6)
CASSEQGTGANVLTF

SEQ ID NO: 574823 - protein, 14 aa, Homo sapiens
  CDR3 for alpha chain variable domain of TCR clone 287412 (TRAV35, TRAJ42)
CCVPYGGSQVNLIF

SEQ ID NO: 574824 - protein, 15 aa, Homo sapiens
  CDR3 for beta chain variable domain of TCR clone 287412 (TRBV27, TRBJ2-5)
CASSLIPSGGETQYF

SEQ ID NO: 574825 - protein, 13 aa, Homo sapiens
  CDR3 for alpha chain variable domain of TCR clone 287413 (TRAV27, TRAJ49)
CAPRPYTGNQFYF

SEQ ID NO: 574826 - protein, 18 aa, Homo sapiens
  CDR3 for beta chain variable domain of TCR clone 287413 (TRBV7-3, TRBJ2-5)
CASSLGGAAQGRWEIQYF

SEQ ID NO: 574827 - protein, 14 aa, Homo sapiens
  CDR3 for alpha chain variable domain of TCR clone 287414 (TRAV26-1, TRAJ45)
CIVRVVGGADGLSF

SEQ ID NO: 574828 - protein, 16 aa, Homo sapiens
  CDR3 for beta chain variable domain of TCR clone 287414 (TRBV7-9, TRBJ1-1)
CASSLTQVRSNTEAFF

SEQ ID NO: 574829 - protein, 12 aa, Homo sapiens
  CDR3 for alpha chain variable domain of TCR clone 287415 (TRAV27, TRAJ35)
CAGADFGNVLHC

SEQ ID NO: 574830 - protein, 16 aa, Homo sapiens
  CDR3 for beta chain variable domain of TCR clone 287415 (TRBV6-1, TRBJ2-1)
CASILRQGSTYNEQFF

SEQ ID NO: 574831 - protein, 18 aa, Homo sapiens
  CDR3 for alpha chain variable domain of TCR clone 287416 (TRAV12-3, TRAJ52)
CAMSRTNAGGTSYGKLTF

SEQ ID NO: 574832 - protein, 17 aa, Homo sapiens
  CDR3 for beta chain variable domain of TCR clone 287416 (TRBV7-3, TRBJ2-3)
CASSLMKRMRGADTQDF

SEQ ID NO: 574833 - protein, 14 aa, Homo sapiens
  CDR3 for alpha chain variable domain of TCR clone 287417 (TRAV8-3, TRAJ39)
CAGGANNAGNMLTF

SEQ ID NO: 574834 - protein, 13 aa, Homo sapiens
  CDR3 for beta chain variable domain of TCR clone 287417 (TRBV3-1, TRBJ2-5)
CASSPVLSETQYF

SEQ ID NO: 574835 - protein, 12 aa, Homo sapiens
  CDR3 for alpha chain variable domain of TCR clone 287418 (TRAV12-2, TRAJ10)
WGVTRGGNKLTF

SEQ ID NO: 574836 - protein, 16 aa, Homo sapiens
  CDR3 for beta chain variable domain of TCR clone 287418 (TRBV6-4, TRBJ1-2)
CASSEAVGDPNYGYTF

SEQ ID NO: 574837 - protein, 18 aa, Homo sapiens
  CDR3 for alpha chain variable domain of TCR clone 287419 (TRAV21, TRAJ52)
CAVRPSPAGGTSYGKLTF

SEQ ID NO: 574838 - protein, 13 aa, Homo sapiens
  CDR3 for beta chain variable domain of TCR clone 287419 (TRBV5-5, TRBJ1-5)
CASSLGIGGDQHF

SEQ ID NO: 574839 - protein, 13 aa, Homo sapiens
  CDR3 for alpha chain variable domain of TCR clone 287420 (TRAV21, TRAJ20)
CAVGLRVDYKLSF

SEQ ID NO: 574840 - protein, 14 aa, Homo sapiens
  CDR3 for beta chain variable domain of TCR clone 287420 (TRBV7-2, TRBJ2-7)
CASSLYPGRYEQYF

SEQ ID NO: 574841 - protein, 22 aa, Homo sapiens
  CDR3 for alpha chain variable domain of TCR clone 287421 (TRAV27, )
CAARRNAGNTHLQNPDPAVYQL

SEQ ID NO: 574842 - protein, 13 aa, Homo sapiens
  CDR3 for beta chain variable domain of TCR clone 287421 (TRBV12-5, TRBJ2-3)
CASGDRQSDTQYF

SEQ ID NO: 574843 - protein, 14 aa, Homo sapiens
  CDR3 for alpha chain variable domain of TCR clone 287422 (TRAV2, TRAJ9)
CAVEDRSGGFETIF

SEQ ID NO: 574844 - protein, 16 aa, Homo sapiens
  CDR3 for beta chain variable domain of TCR clone 287422 (TRBV15, TRBJ2-7)
CATSRDGGIPSYEQYF

SEQ ID NO: 574845 - protein, 15 aa, Homo sapiens
  CDR3 for alpha chain variable domain of TCR clone 287423 (TRAV8-2, TRAJ23)
CVVSAFYSQGGKLIF

SEQ ID NO: 574846 - protein, 13 aa, Homo sapiens
  CDR3 for beta chain variable domain of TCR clone 287423 (TRBV4-1, TRBJ2-1)
CASSQAGGDEQFF

SEQ ID NO: 574847 - protein, 19 aa, Homo sapiens
  CDR3 for alpha chain variable domain of TCR clone 287424 (TRAV26-1, TRAJ52)
CIVRAHRNAGGTSYGKLTF

SEQ ID NO: 574848 - protein, 12 aa, Homo sapiens
  CDR3 for beta chain variable domain of TCR clone 287424 (TRBV6-3, TRBJ2-7)
CASSLTPYEQYF

SEQ ID NO: 574849 - protein, 12 aa, Homo sapiens
  CDR3 for alpha chain variable domain of TCR clone 287425 (TRAV12-2, TRAJ47)
CAVPEYGNNLVF

SEQ ID NO: 574850 - protein, 14 aa, Homo sapiens
  CDR3 for beta chain variable domain of TCR clone 287425 (TRBV20-1, TRBJ1-1)
CSAMGGTANTEAFF

SEQ ID NO: 574851 - protein, 15 aa, Homo sapiens
  CDR3 for alpha chain variable domain of TCR clone 287426 (TRAV8-3, TRAJ45)
CASSYSGGGADGFTF

SEQ ID NO: 574852 - protein, 13 aa, Homo sapiens
  CDR3 for beta chain variable domain of TCR clone 287426 (TRBV10-3, TRBJ2-7)
CASKLAVNYEQYV

SEQ ID NO: 574853 - protein, 11 aa, Homo sapiens
  CDR3 for alpha chain variable domain of TCR clone 287427 (TRAV23/DV6, TRAJ58)
CVARLLRGETS

SEQ ID NO: 574854 - protein, 13 aa, Homo sapiens
  CDR3 for beta chain variable domain of TCR clone 287427 (TRBV6-4, TRBJ1-5)
CASSADLNQPQHF

SEQ ID NO: 574855 - protein, 15 aa, Homo sapiens
  CDR3 for alpha chain variable domain of TCR clone 287428 (TRAV9-2, TRAJ49)
CALSPPDHTGNQFYF

SEQ ID NO: 574856 - protein, 14 aa, Homo sapiens
  CDR3 for beta chain variable domain of TCR clone 287428 (TRBV19, TRBJ1-5)
CASSKMTGPQPQHF

SEQ ID NO: 574857 - protein, 13 aa, Homo sapiens
  CDR3 for alpha chain variable domain of TCR clone 287429 (TRAV23/DV6, TRAJ15)
CAALPAGRNGSDL

SEQ ID NO: 574858 - protein, 14 aa, Homo sapiens
  CDR3 for beta chain variable domain of TCR clone 287429 (TRBV7-9, TRBJ1-2)
CASSRQGANYGYTF

SEQ ID NO: 574859 - protein, 14 aa, Homo sapiens
  CDR3 for alpha chain variable domain of TCR clone 287430 (TRAV20, TRAJ54)
CAVQAGRGAQKLVF

SEQ ID NO: 574860 - protein, 13 aa, Homo sapiens
  CDR3 for beta chain variable domain of TCR clone 287430 (TRBV24-1, TRBJ2-2)
CATSDWSTGELFF

SEQ ID NO: 574861 - protein, 14 aa, Homo sapiens
  CDR3 for alpha chain variable domain of TCR clone 287431 (TRAV12-3, TRAJ12)
CAMSRMDSSYKLIF

SEQ ID NO: 574862 - protein, 12 aa, Homo sapiens
  CDR3 for beta chain variable domain of TCR clone 287431 (TRBV5-1, TRBJ1-2)
CASSQDTYGYTF

SEQ ID NO: 574863 - protein, 14 aa, Homo sapiens
  CDR3 for alpha chain variable domain of TCR clone 287432 (TRAV8-6, TRAJ43)
CAVSDRVGNNDMRF

SEQ ID NO: 574864 - protein, 14 aa, Homo sapiens
  CDR3 for beta chain variable domain of TCR clone 287432 (TRBV19, TRBJ2-1)
CASPTVVLSGEQFF

SEQ ID NO: 574865 - protein, 10 aa, Homo sapiens
  CDR3 for alpha chain variable domain of TCR clone 287433 (TRAV23/DV6, TRAJ31)
CACGGARLMF

SEQ ID NO: 574866 - protein, 19 aa, Homo sapiens
  CDR3 for beta chain variable domain of TCR clone 287433 (TRBV19, TRBJ2-5)
CASSIGQVTDFFLGETQYF

SEQ ID NO: 574867 - protein, 14 aa, Homo sapiens
  CDR3 for alpha chain variable domain of TCR clone 287434 (TRAV16, TRAJ15)
CSLSGPQAGTALIF

SEQ ID NO: 574868 - protein, 12 aa, Homo sapiens
  CDR3 for beta chain variable domain of TCR clone 287434 (TRBV18, TRBJ2-5)
CASSPSNETHYL

SEQ ID NO: 574869 - protein, 12 aa, Homo sapiens
  CDR3 for alpha chain variable domain of TCR clone 287435 (TRAV12-3, TRAJ20)
CAMVRGDYKLSF

SEQ ID NO: 574870 - protein, 12 aa, Homo sapiens
  CDR3 for beta chain variable domain of TCR clone 287435 (TRBV6-1, TRBJ2-7)
CGSSDYSYEQYF

SEQ ID NO: 574871 - protein, 16 aa, Homo sapiens
  CDR3 for alpha chain variable domain of TCR clone 287436 (TRAV8-3, TRAJ21)
CAVVGETTSTNFTLDL

SEQ ID NO: 574872 - protein, 14 aa, Homo sapiens
  CDR3 for beta chain variable domain of TCR clone 287436 (TRBV4-1, TRBJ2-2)
CASSQAVNTGELFF

SEQ ID NO: 574873 - protein, 14 aa, Homo sapiens
  CDR3 for alpha chain variable domain of TCR clone 287437 (TRAV14/DV4, TRAJ54)
CAMREFQGAQKLVF

SEQ ID NO: 574874 - protein, 14 aa, Homo sapiens
  CDR3 for beta chain variable domain of TCR clone 287437 (TRBV7-3, TRBJ2-1)
CASSLAGGTNEQFF

SEQ ID NO: 574875 - protein, 17 aa, Homo sapiens
  CDR3 for alpha chain variable domain of TCR clone 287438 (TRAV26-1, TRAJ17)
CIVRGIMIKAAGNKLTF

SEQ ID NO: 574876 - protein, 14 aa, Homo sapiens
  CDR3 for beta chain variable domain of TCR clone 287438 (TRBV6-1, TRBJ1-3)
CASVQGGGGNTIYF

SEQ ID NO: 574877 - protein, 14 aa, Homo sapiens
  CDR3 for alpha chain variable domain of TCR clone 287439 (TRAV8-3, TRAJ9)
CAVVYNTGGFKTIF

SEQ ID NO: 574878 - protein, 14 aa, Homo sapiens
  CDR3 for beta chain variable domain of TCR clone 287439 (TRBV7-2, TRBJ1-2)
CASSQTGSTYGYTF

SEQ ID NO: 574879 - protein, 14 aa, Homo sapiens
  CDR3 for alpha chain variable domain of TCR clone 287440 (TRAV12-2, TRAJ13)
CAVKNTGGYQKVTF

SEQ ID NO: 574880 - protein, 13 aa, Homo sapiens
  CDR3 for beta chain variable domain of TCR clone 287440 (TRBV20-1, TRBJ1-1)
CSARGGGNTEAFF

SEQ ID NO: 574881 - protein, 13 aa, Homo sapiens
  CDR3 for alpha chain variable domain of TCR clone 287441 (TRAV13-1, TRAJ49)
CAAMLYTGNQFYF

SEQ ID NO: 574882 - protein, 14 aa, Homo sapiens
  CDR3 for beta chain variable domain of TCR clone 287441 (TRBV19, TRBJ2-1)
CASPTFVLSGEQFF

SEQ ID NO: 574883 - protein, 11 aa, Homo sapiens
  CDR3 for alpha chain variable domain of TCR clone 287442 (TRAV3, TRAJ21)
CAVGNFNKLYF

SEQ ID NO: 574884 - protein, 17 aa, Homo sapiens
  CDR3 for beta chain variable domain of TCR clone 287442 (TRBV24-1, TRBJ2-1)
CATSHVSTSGTYNEQFF

SEQ ID NO: 574885 - protein, 10 aa, Homo sapiens
  CDR3 for alpha chain variable domain of TCR clone 287443 (TRAV12-3, TRAJ18)
CAMSAEAQPW

SEQ ID NO: 574886 - protein, 13 aa, Homo sapiens
  CDR3 for beta chain variable domain of TCR clone 287443 (TRBV15, TRBJ1-6)
CSTSGGLNSPLHF

SEQ ID NO: 574887 - protein, 13 aa, Homo sapiens
  CDR3 for alpha chain variable domain of TCR clone 287444 (TRAV12-2, TRAJ37)
CAGGSGNTGKLIF

SEQ ID NO: 574888 - protein, 14 aa, Homo sapiens
  CDR3 for beta chain variable domain of TCR clone 287444 (TRBV6-1, TRBJ2-6)
CASQQGAGANVLTV

SEQ ID NO: 574889 - protein, 13 aa, Homo sapiens
  CDR3 for alpha chain variable domain of TCR clone 287445 (TRAV12-3, TRAJ33)
CAMSVNSNYQLIW

SEQ ID NO: 574890 - protein, 15 aa, Homo sapiens
  CDR3 for beta chain variable domain of TCR clone 287445 (TRBV27, TRBJ2-7)
CASSTAGTGSYEQYF

SEQ ID NO: 574891 - protein, 13 aa, Homo sapiens
  CDR3 for alpha chain variable domain of TCR clone 287446 (TRAV21, TRAJ27)
CAARPGNAGKSTF

SEQ ID NO: 574892 - protein, 14 aa, Homo sapiens
  CDR3 for beta chain variable domain of TCR clone 287446 (TRBV7-9, TRBJ1-6)
CASRPGTVNSPLHF

SEQ ID NO: 574893 - protein, 15 aa, Homo sapiens
  CDR3 for alpha chain variable domain of TCR clone 287447 (TRAV12-1, TRAJ44)
WVVFVNTGTASKLTF

SEQ ID NO: 574894 - protein, 16 aa, Homo sapiens
  CDR3 for beta chain variable domain of TCR clone 287447 (TRBV7-8, TRBJ2-6)
CQQRRDRGRWANVLTF

SEQ ID NO: 574895 - protein, 15 aa, Homo sapiens
  CDR3 for alpha chain variable domain of TCR clone 287448 (TRAV21, TRAJ53)
CAALNSGGSNYKLTL

SEQ ID NO: 574896 - protein, 16 aa, Homo sapiens
  CDR3 for beta chain variable domain of TCR clone 287448 (TRBV9, TRBJ2-1)
CASSVGGGGNYNEQFF

SEQ ID NO: 574897 - protein, 15 aa, Homo sapiens
  CDR3 for alpha chain variable domain of TCR clone 287449 (TRAV12-3, TRAJ10)
CNEKGITGGGNKLTF

SEQ ID NO: 574898 - protein, 12 aa, Homo sapiens
  CDR3 for beta chain variable domain of TCR clone 287449 (TRBV20-1, TRBJ2-7)
CSAITPTKEQYF

SEQ ID NO: 574899 - protein, 14 aa, Homo sapiens
  CDR3 for alpha chain variable domain of TCR clone 287450 (TRAV38-2/DV8, TRAJ23)
CAYRSQNKGGKLIF

SEQ ID NO: 574900 - protein, 13 aa, Homo sapiens
  CDR3 for beta chain variable domain of TCR clone 287450 (TRBV24-1, TRBJ2-1)
CATSAGPYNEQFF

SEQ ID NO: 574901 - protein, 13 aa, Homo sapiens
  CDR3 for alpha chain variable domain of TCR clone 287451 (TRAV12-3, TRAJ4)
CNEQAGGYNKLIV

SEQ ID NO: 574902 - protein, 15 aa, Homo sapiens
  CDR3 for beta chain variable domain of TCR clone 287451 (TRBV5-1, TRBJ1-1)
CASSLSDLGGTEAFF

SEQ ID NO: 574903 - protein, 13 aa, Homo sapiens
  CDR3 for alpha chain variable domain of TCR clone 287452 (TRAV21, TRAJ27)
CAARRGNAGKSTF

SEQ ID NO: 574904 - protein, 14 aa, Homo sapiens
  CDR3 for beta chain variable domain of TCR clone 287452 (TRBV7-7, TRBJ2-3)
CASSLGTVTDTQYF

SEQ ID NO: 574905 - protein, 12 aa, Homo sapiens
  CDR3 for alpha chain variable domain of TCR clone 287453 (TRAV27, TRAJ37)
CADSCSTGKLIF

SEQ ID NO: 574906 - protein, 18 aa, Homo sapiens
  CDR3 for beta chain variable domain of TCR clone 287453 (TRBV7-9, TRBJ1-1)
CASSKPWDTMGMNTEAFF

SEQ ID NO: 574907 - protein, 14 aa, Homo sapiens
  CDR3 for alpha chain variable domain of TCR clone 287454 (TRAV12-3, TRAJ10)
SHLPLTGGGNKLTF

SEQ ID NO: 574908 - protein, 14 aa, Homo sapiens
  CDR3 for beta chain variable domain of TCR clone 287454 (TRBV6-6, TRBJ2-7)
CASSDSGAGYEQYF

SEQ ID NO: 574909 - protein, 10 aa, Homo sapiens
  CDR3 for alpha chain variable domain of TCR clone 287455 (TRAV8-4, TRAJ43)
CAVSAEYMRF

SEQ ID NO: 574910 - protein, 13 aa, Homo sapiens
  CDR3 for beta chain variable domain of TCR clone 287455 (TRBV7-2, TRBJ2-2)
CASSSVRAGELFF

SEQ ID NO: 574911 - protein, 13 aa, Homo sapiens
  CDR3 for alpha chain variable domain of TCR clone 287456 (TRAV21, TRAJ45)
CAVMGGGADGLTF

SEQ ID NO: 574912 - protein, 16 aa, Homo sapiens
  CDR3 for beta chain variable domain of TCR clone 287456 (TRBV20-1, TRBJ2-1)
CSARDLKQGMNNEQFF

SEQ ID NO: 574913 - protein, 16 aa, Homo sapiens
  CDR3 for alpha chain variable domain of TCR clone 287457 (TRAV21, TRAJ17)
CAVRPGEEAAGNKLTF

SEQ ID NO: 574914 - protein, 12 aa, Homo sapiens
  CDR3 for beta chain variable domain of TCR clone 287457 (TRBV11-2, TRBJ2-1)
CASSPGNNEQFF

SEQ ID NO: 574915 - protein, 14 aa, Homo sapiens
  CDR3 for alpha chain variable domain of TCR clone 287458 (TRAV4, TRAJ17)
CLVGDPLVGNKLTS

SEQ ID NO: 574916 - protein, 20 aa, Homo sapiens
  CDR3 for beta chain variable domain of TCR clone 287458 (TRBV20-1, TRBJ2-1)
CGARPYSVAGGPSYYNEQFF

SEQ ID NO: 574917 - protein, 14 aa, Homo sapiens
  CDR3 for alpha chain variable domain of TCR clone 287459 (TRAV12-2, TRAJ11)
CAVEGGSGYSTLTF

SEQ ID NO: 574918 - protein, 12 aa, Homo sapiens
  CDR3 for beta chain variable domain of TCR clone 287459 (TRBV7-9, TRBJ2-7)
CASSFGSYEQYF

SEQ ID NO: 574919 - protein, 17 aa, Homo sapiens
  CDR3 for alpha chain variable domain of TCR clone 287460 (TRAV26-1, TRAJ37)
CIVRVITVSSNTGKLIF

SEQ ID NO: 574920 - protein, 14 aa, Homo sapiens
  CDR3 for beta chain variable domain of TCR clone 287460 (TRBV11-2, TRBJ2-7)
CASSLGAGAYEQYF

SEQ ID NO: 574921 - protein, 14 aa, Homo sapiens
  CDR3 for alpha chain variable domain of TCR clone 287461 (TRAV26-1, TRAJ38)
CIADNAGNNLKLIW

SEQ ID NO: 574922 - protein, 15 aa, Homo sapiens
  CDR3 for beta chain variable domain of TCR clone 287461 (TRBV9, TRBJ2-1)
CASSLAGSSYNEQFF

SEQ ID NO: 574923 - protein, 11 aa, Homo sapiens
  CDR3 for alpha chain variable domain of TCR clone 287462 (TRAV1-1, TRAJ23)
CAVRQGGKLIF

SEQ ID NO: 574924 - protein, 16 aa, Homo sapiens
  CDR3 for beta chain variable domain of TCR clone 287462 (TRBV4-2, TRBJ2-1)
CASSQETATPYNEQFF

SEQ ID NO: 574925 - protein, 11 aa, Homo sapiens
  CDR3 for alpha chain variable domain of TCR clone 287463 (TRAV12-1, TRAJ26)
CVVAYGQNFVF

SEQ ID NO: 574926 - protein, 15 aa, Homo sapiens
  CDR3 for beta chain variable domain of TCR clone 287463 (TRBV12-4, TRBJ2-5)
CARSGTGQAQEIQYF

SEQ ID NO: 574927 - protein, 14 aa, Homo sapiens
  CDR3 for alpha chain variable domain of TCR clone 287464 (TRAV12-1, TRAJ8)
CVVNSNTGFQKLVF

SEQ ID NO: 574928 - protein, 16 aa, Homo sapiens
  CDR3 for beta chain variable domain of TCR clone 287464 (TRBV20-1, TRBJ2-2)
CSARDDRVCLTGELFF

SEQ ID NO: 574929 - protein, 12 aa, Homo sapiens
  CDR3 for alpha chain variable domain of TCR clone 287465 (TRAV12-2, TRAJ31)
CAVNTPDARLMF

SEQ ID NO: 574930 - protein, 15 aa, Homo sapiens
  CDR3 for beta chain variable domain of TCR clone 287465 (TRBV7-2, TRBJ2-2)
CASRRPGQNTGELFF

SEQ ID NO: 574931 - protein, 12 aa, Homo sapiens
  CDR3 for alpha chain variable domain of TCR clone 287466 (TRAV3, TRAJ20)
CAVRDHDYKLSF

SEQ ID NO: 574932 - protein, 13 aa, Homo sapiens
  CDR3 for beta chain variable domain of TCR clone 287466 (TRBV9, TRBJ2-7)
CASRVGQGGEQYV

SEQ ID NO: 574933 - protein, 18 aa, Homo sapiens
  CDR3 for alpha chain variable domain of TCR clone 287467 (TRAV8-4, TRAJ52)
CAVTRLNAGGTSYGKLPF

SEQ ID NO: 574934 - protein, 20 aa, Homo sapiens
  CDR3 for beta chain variable domain of TCR clone 287467 (TRBV19, TRBJ2-1)
CASSISRTATSTRLNNEQFF

SEQ ID NO: 574935 - protein, 17 aa, Homo sapiens
  CDR3 for alpha chain variable domain of TCR clone 287468 (TRAV26-1, TRAJ37)
CIVRVITVSSNTGKLIF

SEQ ID NO: 574936 - protein, 22 aa, Homo sapiens
  CDR3 for beta chain variable domain of TCR clone 287468 (TRBV11-3, TRBJ2-2)
LGTRPCISVPAAQGGTPGSCFF

SEQ ID NO: 574937 - protein, 12 aa, Homo sapiens
  CDR3 for alpha chain variable domain of TCR clone 287469 (TRAV13-2, TRAJ8)
CAPWLGFQKLVF

SEQ ID NO: 574938 - protein, 14 aa, Homo sapiens
  CDR3 for beta chain variable domain of TCR clone 287469 (TRBV3-1, TRBJ2-7)
CASSPSSGTYEQYF

SEQ ID NO: 574939 - protein, 15 aa, Homo sapiens
  CDR3 for alpha chain variable domain of TCR clone 287470 (TRAV26-1, TRAJ29)
CIVRVEGSGNTPLGF

SEQ ID NO: 574940 - protein, 15 aa, Homo sapiens
  CDR3 for beta chain variable domain of TCR clone 287470 (TRBV28, TRBJ2-1)
CASSIIAGGRSEQFF

SEQ ID NO: 574941 - protein, 13 aa, Homo sapiens
  CDR3 for alpha chain variable domain of TCR clone 287471 (TRAV17, TRAJ9)
CATDGTGGFKTIF

SEQ ID NO: 574942 - protein, 15 aa, Homo sapiens
  CDR3 for beta chain variable domain of TCR clone 287471 (TRBV20-1, TRBJ1-1)
CSASRGVTGNTEAFF

SEQ ID NO: 574943 - protein, 16 aa, Homo sapiens
  CDR3 for alpha chain variable domain of TCR clone 287472 (TRAV14/DV4, TRAJ15)
CAMREGPAQAGTALIF

SEQ ID NO: 574944 - protein, 13 aa, Homo sapiens
  CDR3 for beta chain variable domain of TCR clone 287472 (TRBV12-5, TRBJ2-3)
CASGDRQSDTQYF

SEQ ID NO: 574945 - protein, 14 aa, Homo sapiens
  CDR3 for alpha chain variable domain of TCR clone 287473 (TRAV17, TRAJ57)
CAADPQGGSGKLVL

SEQ ID NO: 574946 - protein, 16 aa, Homo sapiens
  CDR3 for beta chain variable domain of TCR clone 287473 (TRBV27, TRBJ2-2)
CASSFRGLVRTGELFF

SEQ ID NO: 574947 - protein, 13 aa, Homo sapiens
  CDR3 for alpha chain variable domain of TCR clone 287474 (TRAV2, TRAJ29)
CAVRNSGNTRLVF

SEQ ID NO: 574948 - protein, 14 aa, Homo sapiens
  CDR3 for beta chain variable domain of TCR clone 287474 (TRBV7-9, TRBJ2-7)
CASSLQQGGYEQYF

SEQ ID NO: 574949 - protein, 14 aa, Homo sapiens
  CDR3 for alpha chain variable domain of TCR clone 287475 (TRAV12-2, TRAJ5)
CAVNRSTGRRALTF

SEQ ID NO: 574950 - protein, 16 aa, Homo sapiens
  CDR3 for beta chain variable domain of TCR clone 287475 (TRBV4-1, TRBJ2-3)
CASSQRAGGLTDTQYF

SEQ ID NO: 574951 - protein, 15 aa, Homo sapiens
  CDR3 for alpha chain variable domain of TCR clone 287476 (TRAV26-1, TRAJ56)
CIVRVATGTNSKLTF

SEQ ID NO: 574952 - protein, 15 aa, Homo sapiens
  CDR3 for beta chain variable domain of TCR clone 287476 (TRBV27, TRBJ2-7)
CASSPQREGQREQYF

SEQ ID NO: 574953 - protein, 13 aa, Homo sapiens
  CDR3 for alpha chain variable domain of TCR clone 287477 (TRAV35, TRAJ22)
CAGLSGSARQLTF

SEQ ID NO: 574954 - protein, 16 aa, Homo sapiens
  CDR3 for beta chain variable domain of TCR clone 287477 (TRBV7-9, TRBJ2-1)
CASSLVLTGQGNEHFF

SEQ ID NO: 574955 - protein, 14 aa, Homo sapiens
  CDR3 for alpha chain variable domain of TCR clone 287478 (TRAV26-1, TRAJ39)
CIVRGSRAGNMLTF

SEQ ID NO: 574956 - protein, 14 aa, Homo sapiens
  CDR3 for beta chain variable domain of TCR clone 287478 (TRBV18, TRBJ2-7)
CASSPRGGSYEQYF

SEQ ID NO: 574957 - protein, 17 aa, Homo sapiens
  CDR3 for alpha chain variable domain of TCR clone 287479 (TRAV25, TRAJ7)
CPGNNRLAFGKGNQVVF

SEQ ID NO: 574958 - protein, 14 aa, Homo sapiens
  CDR3 for beta chain variable domain of TCR clone 287479 (TRBV11-2, TRBJ2-2)
CASSLGLRVRELFF

SEQ ID NO: 574959 - protein, 14 aa, Homo sapiens
  CDR3 for alpha chain variable domain of TCR clone 287480 (TRAV2, TRAJ22)
CAVEVKRAARQLTF

SEQ ID NO: 574960 - protein, 14 aa, Homo sapiens
  CDR3 for beta chain variable domain of TCR clone 287480 (TRBV19, TRBJ2-2)
CASTLGYSGGELFF

SEQ ID NO: 574961 - protein, 14 aa, Homo sapiens
  CDR3 for alpha chain variable domain of TCR clone 287481 (TRAV12-2, TRAJ45)
CALPERGGADGLTF

SEQ ID NO: 574962 - protein, 17 aa, Homo sapiens
  CDR3 for beta chain variable domain of TCR clone 287481 (TRBV13, TRBJ2-3)
CASSLSRVAGGRNTQYF

SEQ ID NO: 574963 - protein, 12 aa, Homo sapiens
  CDR3 for alpha chain variable domain of TCR clone 287482 (TRAV12-1, TRAJ34)
CVVAGATDKLIF

SEQ ID NO: 574964 - protein, 15 aa, Homo sapiens
  CDR3 for beta chain variable domain of TCR clone 287482 (TRBV5-1, TRBJ1-1)
CASSWTGRGNTEAFF

SEQ ID NO: 574965 - protein, 15 aa, Homo sapiens
  CDR3 for alpha chain variable domain of TCR clone 287483 (TRAV26-1, TRAJ39)
CIVRVARNAGNMLTF

SEQ ID NO: 574966 - protein, 14 aa, Homo sapiens
  CDR3 for beta chain variable domain of TCR clone 287483 (TRBV7-2, TRBJ2-7)
CASRSQGAAYEQYF

SEQ ID NO: 574967 - protein, 15 aa, Homo sapiens
  CDR3 for alpha chain variable domain of TCR clone 287484 (TRAV2, TRAJ37)
CAVGDGSSNTGKLIF

SEQ ID NO: 574968 - protein, 13 aa, Homo sapiens
  CDR3 for beta chain variable domain of TCR clone 287484 (TRBV20-1, TRBJ2-7)
CSAQTGLSYEQSF

SEQ ID NO: 574969 - protein, 15 aa, Homo sapiens
  CDR3 for alpha chain variable domain of TCR clone 287485 (TRAV3, TRAJ42)
CAVIGGTGSQGNPIF

SEQ ID NO: 574970 - protein, 14 aa, Homo sapiens
  CDR3 for beta chain variable domain of TCR clone 287485 (TRBV19, TRBJ1-2)
CASSSLFARDVYTF

SEQ ID NO: 574971 - protein, 12 aa, Homo sapiens
  CDR3 for alpha chain variable domain of TCR clone 287486 (TRAV27, TRAJ11)
CAGASGYSPLTF

SEQ ID NO: 574972 - protein, 14 aa, Homo sapiens
  CDR3 for beta chain variable domain of TCR clone 287486 (TRBV12-5, TRBJ1-3)
CASGPAGSGNTIYF

SEQ ID NO: 574973 - protein, 16 aa, Homo sapiens
  CDR3 for alpha chain variable domain of TCR clone 287487 (TRAV30, TRAJ24)
CGTEIVDADSWGKFQF

SEQ ID NO: 574974 - protein, 12 aa, Homo sapiens
  CDR3 for beta chain variable domain of TCR clone 287487 (TRBV10-3, TRBJ2-2)
CAIRENTGELFF

SEQ ID NO: 574975 - protein, 21 aa, Homo sapiens
  CDR3 for alpha chain variable domain of TCR clone 287488 (TRAV1-1, TRAJ6)
CHLLLRCERLERTGGSYIPTF

SEQ ID NO: 574976 - protein, 15 aa, Homo sapiens
  CDR3 for beta chain variable domain of TCR clone 287488 (TRBV7-2, TRBJ2-3)
CASSLVVRGPDTQYF

SEQ ID NO: 574977 - protein, 17 aa, Homo sapiens
  CDR3 for alpha chain variable domain of TCR clone 287489 (TRAV13-1, TRAJ52)
CAASSGASGTSYGKLTF

SEQ ID NO: 574978 - protein, 17 aa, Homo sapiens
  CDR3 for beta chain variable domain of TCR clone 287489 (TRBV11-2, TRBJ2-1)
CASSLYPPGVEYNEQFF

SEQ ID NO: 574979 - protein, 13 aa, Homo sapiens
  CDR3 for alpha chain variable domain of TCR clone 287490 (TRAV17, TRAJ4)
CATKSGGYNKLIF

SEQ ID NO: 574980 - protein, 14 aa, Homo sapiens
  CDR3 for beta chain variable domain of TCR clone 287490 (TRBV20-1, TRBJ1-5)
GSARDDRGNQPQHF

SEQ ID NO: 574981 - protein, 14 aa, Homo sapiens
  CDR3 for alpha chain variable domain of TCR clone 287491 (TRAV13-1, TRAJ48)
CAASTDCGNEKLTF

SEQ ID NO: 574982 - protein, 15 aa, Homo sapiens
  CDR3 for beta chain variable domain of TCR clone 287491 (TRBV10-2, TRBJ2-5)
CASKPEDRRQETQYF

SEQ ID NO: 574983 - protein, 16 aa, Homo sapiens
  CDR3 for alpha chain variable domain of TCR clone 287492 (TRAV4, TRAJ22)
CLVGDLYSGSARQLTF

SEQ ID NO: 574984 - protein, 14 aa, Homo sapiens
  CDR3 for beta chain variable domain of TCR clone 287492 (TRBV7-3, TRBJ2-1)
CASSLSGSYNEQFF

SEQ ID NO: 574985 - protein, 16 aa, Homo sapiens
  CDR3 for alpha chain variable domain of TCR clone 287493 (TRAV12-2, TRAJ45)
CAVNRGSGGGADGLTF

SEQ ID NO: 574986 - protein, 15 aa, Homo sapiens
  CDR3 for beta chain variable domain of TCR clone 287493 (TRBV3-1, TRBJ1-1)
CASSRLNPPNTEAFF

SEQ ID NO: 574987 - protein, 19 aa, Homo sapiens
  CDR3 for alpha chain variable domain of TCR clone 287494 (TRAV14/DV4, TRAJ32)
TTGGLSNELPLTPTNKLIF

SEQ ID NO: 574988 - protein, 14 aa, Homo sapiens
  CDR3 for beta chain variable domain of TCR clone 287494 (TRBV24-1, TRBJ1-5)
CATSDGQLGQPQHF

SEQ ID NO: 574989 - protein, 15 aa, Homo sapiens
  CDR3 for alpha chain variable domain of TCR clone 287495 (TRAV26-1, TRAJ42)
FIVRVKGGIQGNLIF

SEQ ID NO: 574990 - protein, 14 aa, Homo sapiens
  CDR3 for beta chain variable domain of TCR clone 287495 (TRBV19, TRBJ2-2)
CATTGHANTGELFF

SEQ ID NO: 574991 - protein, 13 aa, Homo sapiens
  CDR3 for alpha chain variable domain of TCR clone 287496 (TRAV8-3, TRAJ20)
CAVGRPNDYKFSF

SEQ ID NO: 574992 - protein, 14 aa, Homo sapiens
  CDR3 for beta chain variable domain of TCR clone 287496 (TRBV12-5, TRBJ2-5)
CASGSRTHQETQYF

SEQ ID NO: 574993 - protein, 12 aa, Homo sapiens
  CDR3 for alpha chain variable domain of TCR clone 287497 (TRAV29/DV5, TRAJ34)
CAASGNTDKLIL

SEQ ID NO: 574994 - protein, 16 aa, Homo sapiens
  CDR3 for beta chain variable domain of TCR clone 287497 (TRBV12-4, TRBJ1-5)
CASRQPVEGSNQPQHF

SEQ ID NO: 574995 - protein, 11 aa, Homo sapiens
  CDR3 for alpha chain variable domain of TCR clone 287498 (TRAV27, TRAJ37)
CAGTQGGKLIF

SEQ ID NO: 574996 - protein, 13 aa, Homo sapiens
  CDR3 for beta chain variable domain of TCR clone 287498 (TRBV7-9, TRBJ1-2)
CASSLKQNYGYTF

SEQ ID NO: 574997 - protein, 13 aa, Homo sapiens
  CDR3 for alpha chain variable domain of TCR clone 287499 (TRAV8-1, TRAJ28)
CAVSGAGSYQLTF

SEQ ID NO: 574998 - protein, 15 aa, Homo sapiens
  CDR3 for beta chain variable domain of TCR clone 287499 (TRBV6-3, TRBJ2-7)
CASSSPGTVFYEQYF

SEQ ID NO: 574999 - protein, 14 aa, Homo sapiens
  CDR3 for alpha chain variable domain of TCR clone 287500 (TRAV12-3, TRAJ54)
CAMRCIQGAQKLVF

SEQ ID NO: 575000 - protein, 13 aa, Homo sapiens
  CDR3 for beta chain variable domain of TCR clone 287500 (TRBV19, TRBJ1-1)
CASSPSNGGEAFF

SEQ ID NO: 575001 - protein, 13 aa, Homo sapiens
  CDR3 for alpha chain variable domain of TCR clone 287501 (TRAV35, TRAJ42)
CAGFPGSRGDLIF

SEQ ID NO: 575002 - protein, 14 aa, Homo sapiens
  CDR3 for beta chain variable domain of TCR clone 287501 (TRBV19, TRBJ2-1)
CASPTFVLSGEQFF

SEQ ID NO: 575003 - protein, 15 aa, Homo sapiens
  CDR3 for alpha chain variable domain of TCR clone 287502 (TRAV20, TRAJ53)
CAVQASGGSNYKLPF

SEQ ID NO: 575004 - protein, 12 aa, Homo sapiens
  CDR3 for beta chain variable domain of TCR clone 287502 (TRBV7-8, TRBJ2-7)
CASSLGDREQYF

SEQ ID NO: 575005 - protein, 17 aa, Homo sapiens
  CDR3 for alpha chain variable domain of TCR clone 287503 (TRAV3, TRAJ6)
CAVRDGPRAGGSYIPTF

SEQ ID NO: 575006 - protein, 17 aa, Homo sapiens
  CDR3 for beta chain variable domain of TCR clone 287503 (TRBV11-2, TRBJ2-6)
CASSQRDIFSGANVLTF

SEQ ID NO: 575007 - protein, 15 aa, Homo sapiens
  CDR3 for alpha chain variable domain of TCR clone 287504 (TRAV38-1, TRAJ57)
CAFMDSQGRSEKLVF

SEQ ID NO: 575008 - protein, 16 aa, Homo sapiens
  CDR3 for beta chain variable domain of TCR clone 287504 (TRBV10-3, TRBJ2-1)
CAIRGGGRGDYNEQFF

SEQ ID NO: 575009 - protein, 12 aa, Homo sapiens
  CDR3 for alpha chain variable domain of TCR clone 287505 (TRAV3, TRAJ31)
CAVRDGNARLMF

SEQ ID NO: 575010 - protein, 17 aa, Homo sapiens
  CDR3 for beta chain variable domain of TCR clone 287505 (TRBV25-1, TRBJ2-5)
CASSRRGGRGGQETQYF

SEQ ID NO: 575011 - protein, 16 aa, Homo sapiens
  CDR3 for alpha chain variable domain of TCR clone 287506 (TRAV30, TRAJ24)
CGTEIVDVDSWGKFQF

SEQ ID NO: 575012 - protein, 14 aa, Homo sapiens
  CDR3 for beta chain variable domain of TCR clone 287506 (TRBV7-2, TRBJ1-2)
CASSQTGSTYGYTF

SEQ ID NO: 575013 - protein, 15 aa, Homo sapiens
  CDR3 for alpha chain variable domain of TCR clone 287507 (TRAV8-4, TRAJ37)
CAVSRGSGNTGKRIF

SEQ ID NO: 575014 - protein, 15 aa, Homo sapiens
  CDR3 for beta chain variable domain of TCR clone 287507 (TRBV5-1, TRBJ2-7)
CASSLDLTSSYEQYF

SEQ ID NO: 575015 - protein, 14 aa, Homo sapiens
  CDR3 for alpha chain variable domain of TCR clone 287508 (TRAV39, TRAJ42)
CAVDIARRQGNLIF

SEQ ID NO: 575016 - protein, 15 aa, Homo sapiens
  CDR3 for beta chain variable domain of TCR clone 287508 (TRBV27, TRBJ2-7)
CASSLFGTGLDEQYF

SEQ ID NO: 575017 - protein, 14 aa, Homo sapiens
  CDR3 for alpha chain variable domain of TCR clone 287509 (TRAV8-2, TRAJ37)
CVVSIPGNTGNLIF

SEQ ID NO: 575018 - protein, 13 aa, Homo sapiens
  CDR3 for beta chain variable domain of TCR clone 287509 (TRBV27, TRBJ1-1)
CASSLSIGAEAFF

SEQ ID NO: 575019 - protein, 14 aa, Homo sapiens
  CDR3 for alpha chain variable domain of TCR clone 287510 (TRAV12-3, TRAJ57)
CAMSAWGGSEKLVF

SEQ ID NO: 575020 - protein, 14 aa, Homo sapiens
  CDR3 for beta chain variable domain of TCR clone 287510 (TRBV7-8, TRBJ2-7)
CASSPRDRVYGQYF

SEQ ID NO: 575021 - protein, 13 aa, Homo sapiens
  CDR3 for alpha chain variable domain of TCR clone 287511 (TRAV12-2, TRAJ42)
CAVKRESQGNLIF

SEQ ID NO: 575022 - protein, 12 aa, Homo sapiens
  CDR3 for beta chain variable domain of TCR clone 287511 (TRBV5-7, TRBJ1-2)
CASSLVQNGYTF

SEQ ID NO: 575023 - protein, 16 aa, Homo sapiens
  CDR3 for alpha chain variable domain of TCR clone 287512 (TRAV3, TRAJ37)
CAVRPHGSGNTGKLIF

SEQ ID NO: 575024 - protein, 17 aa, Homo sapiens
  CDR3 for beta chain variable domain of TCR clone 287512 (TRBV5-1, TRBJ2-5)
CASSPMVLGQNQETQYF

SEQ ID NO: 575025 - protein, 14 aa, Homo sapiens
  CDR3 for alpha chain variable domain of TCR clone 287513 (TRAV2, TRAJ9)
CAVEDRSRGFKTIF

SEQ ID NO: 575026 - protein, 13 aa, Homo sapiens
  CDR3 for beta chain variable domain of TCR clone 287513 (TRBV7-3, TRBJ2-5)
CAGSFRGGETQYF

SEQ ID NO: 575027 - protein, 16 aa, Homo sapiens
  CDR3 for alpha chain variable domain of TCR clone 287514 (TRAV3, TRAJ10)
CAVRDMRAGGGNKRTF

SEQ ID NO: 575028 - protein, 14 aa, Homo sapiens
  CDR3 for beta chain variable domain of TCR clone 287514 (TRBV28, TRBJ2-2)
CASTRRSGDGELFF

SEQ ID NO: 575029 - protein, 13 aa, Homo sapiens
  CDR3 for alpha chain variable domain of TCR clone 287515 (TRAV26-1, TRAJ41)
CIVRINSGYALNF

SEQ ID NO: 575030 - protein, 13 aa, Homo sapiens
  CDR3 for beta chain variable domain of TCR clone 287515 (TRBV20-1, TRBJ1-5)
CSATAAGGQAQHF

SEQ ID NO: 575031 - protein, 14 aa, Homo sapiens
  CDR3 for alpha chain variable domain of TCR clone 287516 (TRAV20, TRAJ22)
CAVALGGSGRQLTF

SEQ ID NO: 575032 - protein, 15 aa, Homo sapiens
  CDR3 for beta chain variable domain of TCR clone 287516 (TRBV7-2, TRBJ1-1)
CASSFAGDRDTEAFF

SEQ ID NO: 575033 - protein, 14 aa, Homo sapiens
  CDR3 for alpha chain variable domain of TCR clone 287517 (TRAV8-3, TRAJ4)
CAVGASGGYNKLIF

SEQ ID NO: 575034 - protein, 14 aa, Homo sapiens
  CDR3 for beta chain variable domain of TCR clone 287517 (TRBV20-1, TRBJ1-1)
CSAQTRIGGTEAFF

SEQ ID NO: 575035 - protein, 12 aa, Homo sapiens
  CDR3 for alpha chain variable domain of TCR clone 287518 (TRAV21, TRAJ49)
CAVNDGGNHFYF

SEQ ID NO: 575036 - protein, 14 aa, Homo sapiens
  CDR3 for beta chain variable domain of TCR clone 287518 (TRBV18, TRBJ2-7)
CASSPRGGSYEQYF

SEQ ID NO: 575037 - protein, 15 aa, Homo sapiens
  CDR3 for alpha chain variable domain of TCR clone 287519 (TRAV8-3, TRAJ45)
CASSYSGGGADGLTF

SEQ ID NO: 575038 - protein, 13 aa, Homo sapiens
  CDR3 for beta chain variable domain of TCR clone 287519 (TRBV7-9, TRBJ1-2)
CASSLKQNYGDTF

SEQ ID NO: 575039 - protein, 12 aa, Homo sapiens
  CDR3 for alpha chain variable domain of TCR clone 287520 (TRAV21, TRAJ20)
CAVRGNDYKLSF

SEQ ID NO: 575040 - protein, 14 aa, Homo sapiens
  CDR3 for beta chain variable domain of TCR clone 287520 (TRBV7-8, TRBJ2-7)
CASRQTQGADEQYF

SEQ ID NO: 575041 - protein, 12 aa, Homo sapiens
  CDR3 for alpha chain variable domain of TCR clone 287521 (TRAV16, TRAJ10)
CSRTGGGNKLTF

SEQ ID NO: 575042 - protein, 12 aa, Homo sapiens
  CDR3 for beta chain variable domain of TCR clone 287521 (TRBV24-1, TRBJ1-1)
CATLYPDTEAFF

SEQ ID NO: 575043 - protein, 15 aa, Homo sapiens
  CDR3 for alpha chain variable domain of TCR clone 287522 (TRAV3, TRAJ22)
CAVRDQGGSARQLTF

SEQ ID NO: 575044 - protein, 14 aa, Homo sapiens
  CDR3 for beta chain variable domain of TCR clone 287522 (TRBV19, TRBJ2-1)
CASSRLASINEQFF

SEQ ID NO: 575045 - protein, 15 aa, Homo sapiens
  CDR3 for alpha chain variable domain of TCR clone 287523 (TRAV38-1, TRAJ57)
CAFMDSQGGSENLVF

SEQ ID NO: 575046 - protein, 16 aa, Homo sapiens
  CDR3 for beta chain variable domain of TCR clone 287523 (TRBV10-3, TRBJ2-1)
CAIRGGGRGDYNEQFF

SEQ ID NO: 575047 - protein, 15 aa, Homo sapiens
  CDR3 for alpha chain variable domain of TCR clone 287524 (TRAV25, TRAJ52)
CAGTSGGTSYGKLTF

SEQ ID NO: 575048 - protein, 16 aa, Homo sapiens
  CDR3 for beta chain variable domain of TCR clone 287524 (TRBV15, TRBJ1-2)
CATSRGPRTGCGGYTF

SEQ ID NO: 575049 - protein, 11 aa, Homo sapiens
  CDR3 for alpha chain variable domain of TCR clone 287525 (TRAV3, TRAJ21)
CAVGNFNKFYF

SEQ ID NO: 575050 - protein, 17 aa, Homo sapiens
  CDR3 for beta chain variable domain of TCR clone 287525 (TRBV4-1, TRBJ1-5)
CASSQQPPTVANQPQHF

SEQ ID NO: 575051 - protein, 12 aa, Homo sapiens
  CDR3 for alpha chain variable domain of TCR clone 287526 (TRAV12-3, TRAJ17)
CAMTLTGKKLTF

SEQ ID NO: 575052 - protein, 14 aa, Homo sapiens
  CDR3 for beta chain variable domain of TCR clone 287526 (TRBV4-1, TRBJ2-7)
CASSQDREHVEQYF

SEQ ID NO: 575053 - protein, 16 aa, Homo sapiens
  CDR3 for alpha chain variable domain of TCR clone 287527 (TRAV26-1, TRAJ38)
CIVRPLNAGNNRKLIW

SEQ ID NO: 575054 - protein, 13 aa, Homo sapiens
  CDR3 for beta chain variable domain of TCR clone 287527 (TRBV18, TRBJ1-1)
CASSHNGDTEAFF

SEQ ID NO: 575055 - protein, 13 aa, Homo sapiens
  CDR3 for alpha chain variable domain of TCR clone 287528 (TRAV3, TRAJ15)
CAVRDQAGTALIF

SEQ ID NO: 575056 - protein, 16 aa, Homo sapiens
  CDR3 for beta chain variable domain of TCR clone 287528 (TRBV11-1, TRBJ2-7)
CASSLNYGASSSTSGR

SEQ ID NO: 575057 - protein, 12 aa, Homo sapiens
  CDR3 for alpha chain variable domain of TCR clone 287529 (TRAV17, TRAJ12)
CAWGDSSYKLIF

SEQ ID NO: 575058 - protein, 12 aa, Homo sapiens
  CDR3 for beta chain variable domain of TCR clone 287529 (TRBV29-1, TRBJ1-1)
CSESDGNTEAFF

SEQ ID NO: 575059 - protein, 15 aa, Homo sapiens
  CDR3 for alpha chain variable domain of TCR clone 287530 (TRAV29/DV5, TRAJ24)
CAASGATDSWGKLQF

SEQ ID NO: 575060 - protein, 13 aa, Homo sapiens
  CDR3 for beta chain variable domain of TCR clone 287530 (TRBV27, TRBJ1-1)
CASSLSIGAEAFF

SEQ ID NO: 575061 - protein, 14 aa, Homo sapiens
  CDR3 for alpha chain variable domain of TCR clone 287531 (TRAV21, TRAJ12)
CAVRNGDSSYKLIC

SEQ ID NO: 575062 - protein, 14 aa, Homo sapiens
  CDR3 for beta chain variable domain of TCR clone 287531 (TRBV7-6, TRBJ2-7)
CASSLTGTGNEQYF

SEQ ID NO: 575063 - protein, 12 aa, Homo sapiens
  CDR3 for alpha chain variable domain of TCR clone 287532 (TRAV21, TRAJ26)
CAVADYGQHFVF

SEQ ID NO: 575064 - protein, 12 aa, Homo sapiens
  CDR3 for beta chain variable domain of TCR clone 287532 (TRBV20-1, TRBJ2-7)
CSARDEVHEQYF

SEQ ID NO: 575065 - protein, 14 aa, Homo sapiens
  CDR3 for alpha chain variable domain of TCR clone 287533 (TRAV1-2, TRAJ16)
CAVNGFSDGQKLLF

SEQ ID NO: 575066 - protein, 12 aa, Homo sapiens
  CDR3 for beta chain variable domain of TCR clone 287533 (TRBV11-2, TRBJ2-2)
CASSLGGGELFF

SEQ ID NO: 575067 - protein, 11 aa, Homo sapiens
  CDR3 for alpha chain variable domain of TCR clone 287534 (TRAV12-3, TRAJ43)
CAISVSNDMRF

SEQ ID NO: 575068 - protein, 13 aa, Homo sapiens
  CDR3 for beta chain variable domain of TCR clone 287534 (TRBV20-1, TRBJ1-1)
CSTPLGGGTEAFF

SEQ ID NO: 575069 - protein, 16 aa, Homo sapiens
  CDR3 for alpha chain variable domain of TCR clone 287535 (TRAV23/DV6, TRAJ9)
CAASIGGNNGGFKPIF

SEQ ID NO: 575070 - protein, 14 aa, Homo sapiens
  CDR3 for beta chain variable domain of TCR clone 287535 (TRBV9, TRBJ2-7)
CASSVGVGSYEQYF

SEQ ID NO: 575071 - protein, 15 aa, Homo sapiens
  CDR3 for alpha chain variable domain of TCR clone 287536 (TRAV17, TRAJ57)
CATGPSQGGSEKLVF

SEQ ID NO: 575072 - protein, 13 aa, Homo sapiens
  CDR3 for beta chain variable domain of TCR clone 287536 (TRBV11-2, TRBJ2-5)
SASSSTGEETQYF

SEQ ID NO: 575073 - protein, 17 aa, Homo sapiens
  CDR3 for alpha chain variable domain of TCR clone 287537 (TRAV8-1, TRAJ42)
CAVKWGNYGGSQGNLIF

SEQ ID NO: 575074 - protein, 15 aa, Homo sapiens
  CDR3 for beta chain variable domain of TCR clone 287537 (TRBV9, TRBJ1-6)
CASSVAGTGYSPLHF

SEQ ID NO: 575075 - protein, 11 aa, Homo sapiens
  CDR3 for alpha chain variable domain of TCR clone 287538 (TRAV2, TRAJ33)
CAVERHYQLIW

SEQ ID NO: 575076 - protein, 15 aa, Homo sapiens
  CDR3 for beta chain variable domain of TCR clone 287538 (TRBV19, TRBJ1-1)
CASTSGQIQNTEAFF

SEQ ID NO: 575077 - protein, 12 aa, Homo sapiens
  CDR3 for alpha chain variable domain of TCR clone 287539 (TRAV12-3, TRAJ17)
CAMTLTGNKLTF

SEQ ID NO: 575078 - protein, 13 aa, Homo sapiens
  CDR3 for beta chain variable domain of TCR clone 287539 (TRBV20-1, TRBJ2-5)
CSARGDYQESQYF

SEQ ID NO: 575079 - protein, 12 aa, Homo sapiens
  CDR3 for alpha chain variable domain of TCR clone 287540 (TRAV1-1, TRAJ24)
CAVRGSWGKFQF

SEQ ID NO: 575080 - protein, 16 aa, Homo sapiens
  CDR3 for beta chain variable domain of TCR clone 287540 (TRBV27, TRBJ2-5)
CASSSQTSGFQETEYF

SEQ ID NO: 575081 - protein, 13 aa, Homo sapiens
  CDR3 for alpha chain variable domain of TCR clone 287541 (TRAV9-2, TRAJ49)
CALRHFTGNQVYF

SEQ ID NO: 575082 - protein, 16 aa, Homo sapiens
  CDR3 for beta chain variable domain of TCR clone 287541 (TRBV7-9, TRBJ2-1)
CASSPRLGSSYNEQFF

SEQ ID NO: 575083 - protein, 14 aa, Homo sapiens
  CDR3 for alpha chain variable domain of TCR clone 287542 (TRAV1-2, TRAJ16)
CAVNRFSDGQKLLF

SEQ ID NO: 575084 - protein, 15 aa, Homo sapiens
  CDR3 for beta chain variable domain of TCR clone 287542 (TRBV4-1, TRBJ1-6)
CASSQGGGMDSPLHF

SEQ ID NO: 575085 - protein, 11 aa, Homo sapiens
  CDR3 for alpha chain variable domain of TCR clone 287543 (TRAV9-2, TRAJ13)
CAQGGYQKVTF

SEQ ID NO: 575086 - protein, 13 aa, Homo sapiens
  CDR3 for beta chain variable domain of TCR clone 287543 (TRBV4-2, TRBJ1-1)
CASSQAGNTEAFF

SEQ ID NO: 575087 - protein, 12 aa, Homo sapiens
  CDR3 for alpha chain variable domain of TCR clone 287544 (TRAV21, TRAJ39)
CAADNAGNMLTL

SEQ ID NO: 575088 - protein, 13 aa, Homo sapiens
  CDR3 for beta chain variable domain of TCR clone 287544 (TRBV6-1, TRBJ1-1)
CASSRQGNTEAFF

SEQ ID NO: 575089 - protein, 14 aa, Homo sapiens
  CDR3 for alpha chain variable domain of TCR clone 287545 (TRAV1-2, TRAJ27)
CAVRYNTNAGKSTF

SEQ ID NO: 575090 - protein, 16 aa, Homo sapiens
  CDR3 for beta chain variable domain of TCR clone 287545 (TRBV4-1, TRBJ1-1)
CASSYRQGTGDTEAFF

SEQ ID NO: 575091 - protein, 15 aa, Homo sapiens
  CDR3 for alpha chain variable domain of TCR clone 287546 (TRAV12-3, TRAJ6)
CAMSAASGGSYIPTF

SEQ ID NO: 575092 - protein, 13 aa, Homo sapiens
  CDR3 for beta chain variable domain of TCR clone 287546 (TRBV20-1, TRBJ1-2)
CSASTERIYDYIF

SEQ ID NO: 575093 - protein, 13 aa, Homo sapiens
  CDR3 for alpha chain variable domain of TCR clone 287547 (TRAV13-2, TRAJ54)
CAENYQGAQKLVF

SEQ ID NO: 575094 - protein, 15 aa, Homo sapiens
  CDR3 for beta chain variable domain of TCR clone 287547 (TRBV2, TRBJ2-7)
CASTLLGSGATEQYF

SEQ ID NO: 575095 - protein, 13 aa, Homo sapiens
  CDR3 for alpha chain variable domain of TCR clone 287548 (TRAV8-6, TRAJ42)
CAVRGGRQGNLIF

SEQ ID NO: 575096 - protein, 13 aa, Homo sapiens
  CDR3 for beta chain variable domain of TCR clone 287548 (TRBV7-3, TRBJ1-1)
CASSQDWGAEAFF

SEQ ID NO: 575097 - protein, 12 aa, Homo sapiens
  CDR3 for alpha chain variable domain of TCR clone 287549 (TRAV2, TRAJ10)
CASTGGGNKLTF

SEQ ID NO: 575098 - protein, 13 aa, Homo sapiens
  CDR3 for beta chain variable domain of TCR clone 287549 (TRBV12-4, TRBJ2-7)
CASSFVPTAEQYF

SEQ ID NO: 575099 - protein, 14 aa, Homo sapiens
  CDR3 for alpha chain variable domain of TCR clone 287550 (TRAV2, TRAJ37)
CAVDFTSNAGKLIF

SEQ ID NO: 575100 - protein, 15 aa, Homo sapiens
  CDR3 for beta chain variable domain of TCR clone 287550 (TRBV20-1, TRBJ1-1)
CSAGRGVTGNTEAFF

SEQ ID NO: 575101 - protein, 14 aa, Homo sapiens
  CDR3 for alpha chain variable domain of TCR clone 287551 (TRAV1-2, TRAJ16)
CAVNRFSDGQKRLF

SEQ ID NO: 575102 - protein, 13 aa, Homo sapiens
  CDR3 for beta chain variable domain of TCR clone 287551 (TRBV12-4, TRBJ1-1)
CASSPGTGFEAFF

SEQ ID NO: 575103 - protein, 17 aa, Homo sapiens
  CDR3 for alpha chain variable domain of TCR clone 287552 (TRAV3, TRAJ6)
CAVRYGPRAGGSYIPTF

SEQ ID NO: 575104 - protein, 15 aa, Homo sapiens
  CDR3 for beta chain variable domain of TCR clone 287552 (TRBV7-9, TRBJ1-6)
CASSSPGRGNSPLHF

SEQ ID NO: 575105 - protein, 13 aa, Homo sapiens
  CDR3 for alpha chain variable domain of TCR clone 287553 (TRAV13-2, TRAJ13)
CAERPGGYQKVTF

SEQ ID NO: 575106 - protein, 17 aa, Homo sapiens
  CDR3 for beta chain variable domain of TCR clone 287553 (TRBV11-2, TRBJ2-1)
CASSLCPPGVEYNEQFF

SEQ ID NO: 575107 - protein, 17 aa, Homo sapiens
  CDR3 for alpha chain variable domain of TCR clone 287554 (TRAV3, TRAJ6)
CAVRDGPRAGGSYIPTF

SEQ ID NO: 575108 - protein, 17 aa, Homo sapiens
  CDR3 for beta chain variable domain of TCR clone 287554 (TRBV20-1, TRBJ2-2)
CSASGSGQGGLTGGLFF

SEQ ID NO: 575109 - protein, 14 aa, Homo sapiens
  CDR3 for alpha chain variable domain of TCR clone 287555 (TRAV8-2, TRAJ4)
CVVSPSGGYNKLIF

SEQ ID NO: 575110 - protein, 12 aa, Homo sapiens
  CDR3 for beta chain variable domain of TCR clone 287555 (TRBV19, TRBJ1-1)
CACMNRYTEAFF

SEQ ID NO: 575111 - protein, 16 aa, Homo sapiens
  CDR3 for alpha chain variable domain of TCR clone 287556 (TRAV30, TRAJ24)
CGTEIVDADSWGKFQF

SEQ ID NO: 575112 - protein, 16 aa, Homo sapiens
  CDR3 for beta chain variable domain of TCR clone 287556 (TRBV19, TRBJ2-1)
CASSKAGPGSYNEQFF

SEQ ID NO: 575113 - protein, 16 aa, Homo sapiens
  CDR3 for alpha chain variable domain of TCR clone 287557 (TRAV30, TRAJ24)
CGTEIVDADSWGKFQF

SEQ ID NO: 575114 - protein, 12 aa, Homo sapiens
  CDR3 for beta chain variable domain of TCR clone 287557 (TRBV11-2, TRBJ2-2)
CASSLGGGELFC

SEQ ID NO: 575115 - protein, 12 aa, Homo sapiens
  CDR3 for alpha chain variable domain of TCR clone 287558 (TRAV17, TRAJ12)
CATLRSSYKLIF

SEQ ID NO: 575116 - protein, 16 aa, Homo sapiens
  CDR3 for beta chain variable domain of TCR clone 287558 (TRBV28, TRBJ2-7)
CASSLFFGTGGHEQYF

SEQ ID NO: 575117 - protein, 12 aa, Homo sapiens
  CDR3 for alpha chain variable domain of TCR clone 287559 (TRAV29/DV5, TRAJ34)
CAASDNTDKLIF

SEQ ID NO: 575118 - protein, 13 aa, Homo sapiens
  CDR3 for beta chain variable domain of TCR clone 287559 (TRBV15, TRBJ1-6)
CATSGGLNSTLHF

SEQ ID NO: 575119 - protein, 12 aa, Homo sapiens
  CDR3 for alpha chain variable domain of TCR clone 287560 (TRAV12-1, TRAJ40)
CVVYSGTYKYIF

SEQ ID NO: 575120 - protein, 12 aa, Homo sapiens
  CDR3 for beta chain variable domain of TCR clone 287560 (TRBV11-2, TRBJ2-3)
CASSQGTDTQYF

SEQ ID NO: 575121 - protein, 12 aa, Homo sapiens
  CDR3 for alpha chain variable domain of TCR clone 287561 (TRAV12-3, TRAJ17)
CAMTLTGNKLTF

SEQ ID NO: 575122 - protein, 13 aa, Homo sapiens
  CDR3 for beta chain variable domain of TCR clone 287561 (TRBV12-4, TRBJ2-2)
FASSITGSGELFF

SEQ ID NO: 575123 - protein, 15 aa, Homo sapiens
  CDR3 for alpha chain variable domain of TCR clone 287562 (TRAV26-1, TRAJ22)
CIVRVSFWFCKATDL

SEQ ID NO: 575124 - protein, 15 aa, Homo sapiens
  CDR3 for beta chain variable domain of TCR clone 287562 (TRBV7-2, TRBJ2-1)
CASSFQADEYNEQFF

SEQ ID NO: 575125 - protein, 13 aa, Homo sapiens
  CDR3 for alpha chain variable domain of TCR clone 287563 (TRAV2, TRAJ13)
CAVESGGYQKVTF

SEQ ID NO: 575126 - protein, 13 aa, Homo sapiens
  CDR3 for beta chain variable domain of TCR clone 287563 (TRBV4-2, TRBJ1-1)
CASSQAGNTEAFF

SEQ ID NO: 575127 - protein, 14 aa, Homo sapiens
  CDR3 for alpha chain variable domain of TCR clone 287564 (TRAV23/DV6, TRAJ40)
CAARKNSGTYKYSF

SEQ ID NO: 575128 - protein, 14 aa, Homo sapiens
  CDR3 for beta chain variable domain of TCR clone 287564 (TRBV10-3, TRBJ2-5)
CAISERDYQETQYF

SEQ ID NO: 575129 - protein, 14 aa, Homo sapiens
  CDR3 for alpha chain variable domain of TCR clone 287565 (TRAV1-2, TRAJ16)
CAVNRFSDGQKRLF

SEQ ID NO: 575130 - protein, 14 aa, Homo sapiens
  CDR3 for beta chain variable domain of TCR clone 287565 (TRBV23-1, TRBJ2-5)
CASSFLRSQETQYF

SEQ ID NO: 575131 - protein, 13 aa, Homo sapiens
  CDR3 for alpha chain variable domain of TCR clone 287566 (TRAV2, TRAJ40)
CAVVTSGTYKYIF

SEQ ID NO: 575132 - protein, 14 aa, Homo sapiens
  CDR3 for beta chain variable domain of TCR clone 287566 (TRBV18, TRBJ1-5)
CASSRQQRNQPQHF

SEQ ID NO: 575133 - protein, 13 aa, Homo sapiens
  CDR3 for alpha chain variable domain of TCR clone 287567 (TRAV8-6, TRAJ49)
CAVITNNGNQLYF

SEQ ID NO: 575134 - protein, 14 aa, Homo sapiens
  CDR3 for beta chain variable domain of TCR clone 287567 (TRBV5-1, TRBJ2-7)
CASSRGESLYEQYF

SEQ ID NO: 575135 - protein, 14 aa, Homo sapiens
  CDR3 for alpha chain variable domain of TCR clone 287568 (TRAV38-1, TRAJ29)
CAFITPSGITPLVF

SEQ ID NO: 575136 - protein, 12 aa, Homo sapiens
  CDR3 for beta chain variable domain of TCR clone 287568 (TRBV6-3, TRBJ2-7)
CARSLTPYEQYF

SEQ ID NO: 575137 - protein, 17 aa, Homo sapiens
  CDR3 for alpha chain variable domain of TCR clone 287569 (TRAV38-2/DV8, TRAJ23)
CALSRKLIFGQGTELSV

SEQ ID NO: 575138 - protein, 13 aa, Homo sapiens
  CDR3 for beta chain variable domain of TCR clone 287569 (TRBV7-2, TRBJ2-7)
CASSSPSGSEQYF

SEQ ID NO: 575139 - protein, 15 aa, Homo sapiens
  CDR3 for alpha chain variable domain of TCR clone 287570 (TRAV26-1, TRAJ44)
CSVRIGTGTASKLTF

SEQ ID NO: 575140 - protein, 15 aa, Homo sapiens
  CDR3 for beta chain variable domain of TCR clone 287570 (TRBV7-6, TRBJ2-1)
CASSSLAGEGNEQFF

SEQ ID NO: 575141 - protein, 12 aa, Homo sapiens
  CDR3 for alpha chain variable domain of TCR clone 287571 (TRAV8-3, TRAJ20)
CAVGANDYKLSF

SEQ ID NO: 575142 - protein, 12 aa, Homo sapiens
  CDR3 for beta chain variable domain of TCR clone 287571 (TRBV7-8, TRBJ2-7)
CASSLGDREQYF

SEQ ID NO: 575143 - protein, 16 aa, Homo sapiens
  CDR3 for alpha chain variable domain of TCR clone 287572 (TRAV26-1, TRAJ37)
CIVRGDGSGNTGKLIF

SEQ ID NO: 575144 - protein, 17 aa, Homo sapiens
  CDR3 for beta chain variable domain of TCR clone 287572 (TRBV4-1, TRBJ2-7)
CASSRDPLGVRGAEQYF

SEQ ID NO: 575145 - protein, 17 aa, Homo sapiens
  CDR3 for alpha chain variable domain of TCR clone 287573 (TRAV3, TRAJ38)
CAVRDCLNAGNNRKLIW

SEQ ID NO: 575146 - protein, 18 aa, Homo sapiens
  CDR3 for beta chain variable domain of TCR clone 287573 (TRBV4-3, TRBJ2-6)
CASSQDIQGGPGANVLTF

SEQ ID NO: 575147 - protein, 15 aa, Homo sapiens
  CDR3 for alpha chain variable domain of TCR clone 287574 (TRAV8-2, TRAJ24)
CVVSDRTDSWGKLQF

SEQ ID NO: 575148 - protein, 13 aa, Homo sapiens
  CDR3 for beta chain variable domain of TCR clone 287574 (TRBV7-9, TRBJ1-2)
CASGLKQNYGYTF

SEQ ID NO: 575149 - protein, 14 aa, Homo sapiens
  CDR3 for alpha chain variable domain of TCR clone 287575 (TRAV16, TRAJ32)
CALKSGGATNKLIF

SEQ ID NO: 575150 - protein, 15 aa, Homo sapiens
  CDR3 for beta chain variable domain of TCR clone 287575 (TRBV9, TRBJ1-6)
CASSVAGTGDSPLHF

SEQ ID NO: 575151 - protein, 12 aa, Homo sapiens
  CDR3 for alpha chain variable domain of TCR clone 287576 (TRAV13-2, TRAJ23)
CAERHRGRKLIF

SEQ ID NO: 575152 - protein, 16 aa, Homo sapiens
  CDR3 for beta chain variable domain of TCR clone 287576 (TRBV27, TRBJ2-2)
CASSLSGFWVTGELFF

SEQ ID NO: 575153 - protein, 14 aa, Homo sapiens
  CDR3 for alpha chain variable domain of TCR clone 287577 (TRAV12-2, TRAJ13)
CAGKKTGGYQKVTF

SEQ ID NO: 575154 - protein, 16 aa, Homo sapiens
  CDR3 for beta chain variable domain of TCR clone 287577 (TRBV12-4, TRBJ2-5)
CASSFFVRGRQETQYF

SEQ ID NO: 575155 - protein, 23 aa, Homo sapiens
  CDR3 for alpha chain variable domain of TCR clone 287578 (TRAV2, TRAJ38)
CAVEDFPNAGNNHIQNPDPPVYQ

SEQ ID NO: 575156 - protein, 14 aa, Homo sapiens
  CDR3 for beta chain variable domain of TCR clone 287578 (TRBV29-1, TRBJ1-4)
CSVSGRQGGEKLFF

SEQ ID NO: 575157 - protein, 15 aa, Homo sapiens
  CDR3 for alpha chain variable domain of TCR clone 287579 (TRAV3, TRAJ29)
FAVRDPLSGNTPLVF

SEQ ID NO: 575158 - protein, 17 aa, Homo sapiens
  CDR3 for beta chain variable domain of TCR clone 287579 (TRBV7-2, TRBJ2-7)
CASSLGTGTSGRYEQYF

SEQ ID NO: 575159 - protein, 18 aa, Homo sapiens
  CDR3 for alpha chain variable domain of TCR clone 287580 (TRAV1-2, TRAJ18)
CAVRDMGDRGSTLGRLYF

SEQ ID NO: 575160 - protein, 14 aa, Homo sapiens
  CDR3 for beta chain variable domain of TCR clone 287580 (TRBV19, TRBJ2-7)
CASSMGQGAIEQYF

SEQ ID NO: 575161 - protein, 12 aa, Homo sapiens
  CDR3 for alpha chain variable domain of TCR clone 287581 (TRAV4, TRAJ6)
CLAPGGSYIPTF

SEQ ID NO: 575162 - protein, 17 aa, Homo sapiens
  CDR3 for beta chain variable domain of TCR clone 287581 (TRBV28, TRBJ2-1)
CASSSARQALTYNEQFF

SEQ ID NO: 575163 - protein, 13 aa, Homo sapiens
  CDR3 for alpha chain variable domain of TCR clone 287582 (TRAV20, TRAJ34)
CAVQVGNTDKLIF

SEQ ID NO: 575164 - protein, 14 aa, Homo sapiens
  CDR3 for beta chain variable domain of TCR clone 287582 (TRBV7-6, TRBJ2-3)
CASSLGTVTDTQYF

SEQ ID NO: 575165 - protein, 16 aa, Homo sapiens
  CDR3 for alpha chain variable domain of TCR clone 287583 (TRAV1-1, TRAJ45)
CAVRADSGGGADGLTF

SEQ ID NO: 575166 - protein, 13 aa, Homo sapiens
  CDR3 for beta chain variable domain of TCR clone 287583 (TRBV20-1, TRBJ1-2)
CSARGTADYGYTF

SEQ ID NO: 575167 - protein, 13 aa, Homo sapiens
  CDR3 for alpha chain variable domain of TCR clone 287584 (TRAV23/DV6, TRAJ12)
CAPRVDSSYKLLF

SEQ ID NO: 575168 - protein, 12 aa, Homo sapiens
  CDR3 for beta chain variable domain of TCR clone 287584 (TRBV7-8, TRBJ2-7)
CASSLGDREQYF

SEQ ID NO: 575169 - protein, 16 aa, Homo sapiens
  CDR3 for alpha chain variable domain of TCR clone 287585 (TRAV3, TRAJ22)
CAVRDMGPGSARQLTF

SEQ ID NO: 575170 - protein, 16 aa, Homo sapiens
  CDR3 for beta chain variable domain of TCR clone 287585 (TRBV12-5, TRBJ2-5)
CASGPRTSGNQETQYF

SEQ ID NO: 575171 - protein, 17 aa, Homo sapiens
  CDR3 for alpha chain variable domain of TCR clone 287586 (TRAV3, TRAJ6)
CAARDGPRAGGSYRPTF

SEQ ID NO: 575172 - protein, 14 aa, Homo sapiens
  CDR3 for beta chain variable domain of TCR clone 287586 (TRBV7-2, TRBJ2-7)
CASSPKTSFYEQYF

SEQ ID NO: 575173 - protein, 15 aa, Homo sapiens
  CDR3 for alpha chain variable domain of TCR clone 287587 (TRAV8-3, TRAJ15)
CAVGAPNQAGTALLS

SEQ ID NO: 575174 - protein, 14 aa, Homo sapiens
  CDR3 for beta chain variable domain of TCR clone 287587 (TRBV20-1, TRBJ2-1)
CSPSDEASYNEQFF

SEQ ID NO: 575175 - protein, 14 aa, Homo sapiens
  CDR3 for alpha chain variable domain of TCR clone 287588 (TRAV16, TRAJ15)
CSLIGPQAGTALIF

SEQ ID NO: 575176 - protein, 12 aa, Homo sapiens
  CDR3 for beta chain variable domain of TCR clone 287588 (TRBV18, TRBJ2-5)
CASSPSKETQYF

SEQ ID NO: 575177 - protein, 14 aa, Homo sapiens
  CDR3 for alpha chain variable domain of TCR clone 287589 (TRAV16, TRAJ8)
CALLLNTGSQKLVF

SEQ ID NO: 575178 - protein, 16 aa, Homo sapiens
  CDR3 for beta chain variable domain of TCR clone 287589 (TRBV5-1, TRBJ2-7)
CASSFTTRTALVEQYF

SEQ ID NO: 575179 - protein, 12 aa, Homo sapiens
  CDR3 for alpha chain variable domain of TCR clone 287590 (TRAV13-1, TRAJ43)
CAAGRFNNDMRF

SEQ ID NO: 575180 - protein, 13 aa, Homo sapiens
  CDR3 for beta chain variable domain of TCR clone 287590 (TRBV9, TRBJ2-7)
CASSVAEYYEQYF

SEQ ID NO: 575181 - protein, 18 aa, Homo sapiens
  CDR3 for alpha chain variable domain of TCR clone 287591 (TRAV13-1, TRAJ52)
CAAKNPNAGGTSYGKLTV

SEQ ID NO: 575182 - protein, 14 aa, Homo sapiens
  CDR3 for beta chain variable domain of TCR clone 287591 (TRBV7-2, TRBJ2-7)
CASRSQGAAYEQYF

SEQ ID NO: 575183 - protein, 19 aa, Homo sapiens
  CDR3 for alpha chain variable domain of TCR clone 287592 (TRAV2, TRAJ20)
ILQVREADAAVYRDCKLIF

SEQ ID NO: 575184 - protein, 16 aa, Homo sapiens
  CDR3 for beta chain variable domain of TCR clone 287592 (TRBV19, TRBJ2-1)
CASSKAGPSSYNEQFF

SEQ ID NO: 575185 - protein, 13 aa, Homo sapiens
  CDR3 for alpha chain variable domain of TCR clone 287593 (TRAV23/DV6, TRAJ27)
CAASKPMQANHTL

SEQ ID NO: 575186 - protein, 14 aa, Homo sapiens
  CDR3 for beta chain variable domain of TCR clone 287593 (TRBV7-2, TRBJ1-1)
CASSFLTGTTEAFF

SEQ ID NO: 575187 - protein, 12 aa, Homo sapiens
  CDR3 for alpha chain variable domain of TCR clone 287594 (TRAV12-2, TRAJ8)
CAVNTGFQKLVF

SEQ ID NO: 575188 - protein, 16 aa, Homo sapiens
  CDR3 for beta chain variable domain of TCR clone 287594 (TRBV7-3, TRBJ2-2)
CARSLKRGTLSGELFF

SEQ ID NO: 575189 - protein, 16 aa, Homo sapiens
  CDR3 for alpha chain variable domain of TCR clone 287595 (TRAV3, TRAJ10)
CAVRDMRAGGGNKLTF

SEQ ID NO: 575190 - protein, 15 aa, Homo sapiens
  CDR3 for beta chain variable domain of TCR clone 287595 (TRBV9, TRBJ1-6)
CASSVDGTGDSPLHF

SEQ ID NO: 575191 - protein, 14 aa, Homo sapiens
  CDR3 for alpha chain variable domain of TCR clone 287596 (TRAV17, TRAJ39)
CATDPVRAGNMLTF

SEQ ID NO: 575192 - protein, 12 aa, Homo sapiens
  CDR3 for beta chain variable domain of TCR clone 287596 (TRBV7-9, TRBJ2-7)
CASSIKREEQYF

SEQ ID NO: 575193 - protein, 14 aa, Homo sapiens
  CDR3 for alpha chain variable domain of TCR clone 287597 (TRAV12-3, TRAJ10)
SHLPLTGGGNKLTF

SEQ ID NO: 575194 - protein, 15 aa, Homo sapiens
  CDR3 for beta chain variable domain of TCR clone 287597 (TRBV29-1, TRBJ2-7)
CSVEFFDRGSYEQYF

SEQ ID NO: 575195 - protein, 13 aa, Homo sapiens
  CDR3 for alpha chain variable domain of TCR clone 287598 (TRAV21, TRAJ3)
CAVTGSSASKIIF

SEQ ID NO: 575196 - protein, 14 aa, Homo sapiens
  CDR3 for beta chain variable domain of TCR clone 287598 (TRBV18, TRBJ2-7)
CASSPRGGAYEQYF

SEQ ID NO: 575197 - protein, 14 aa, Homo sapiens
  CDR3 for alpha chain variable domain of TCR clone 287599 (TRAV23/DV6, TRAJ37)
CAASTSSNPGQLIF

SEQ ID NO: 575198 - protein, 13 aa, Homo sapiens
  CDR3 for beta chain variable domain of TCR clone 287599 (TRBV7-7, TRBJ1-1)
CASSLGANTEAFF

SEQ ID NO: 575199 - protein, 15 aa, Homo sapiens
  CDR3 for alpha chain variable domain of TCR clone 287600 (TRAV17, TRAJ35)
CATAFVIGFGNVLHC

SEQ ID NO: 575200 - protein, 15 aa, Homo sapiens
  CDR3 for beta chain variable domain of TCR clone 287600 (TRBV7-9, TRBJ2-5)
CASSLALAEAYEQYF

SEQ ID NO: 575201 - protein, 16 aa, Homo sapiens
  CDR3 for alpha chain variable domain of TCR clone 287601 (TRAV14/DV4, TRAJ54)
CAMREGRIQGAQKLVF

SEQ ID NO: 575202 - protein, 14 aa, Homo sapiens
  CDR3 for beta chain variable domain of TCR clone 287601 (TRBV11-2, TRBJ1-2)
CASSLGTANYGYTF

SEQ ID NO: 575203 - protein, 13 aa, Homo sapiens
  CDR3 for alpha chain variable domain of TCR clone 287602 (TRAV26-1, TRAJ48)
CIVRVGGDEKLTF

SEQ ID NO: 575204 - protein, 17 aa, Homo sapiens
  CDR3 for beta chain variable domain of TCR clone 287602 (TRBV7-3, TRBJ2-2)
CASSLSGTSGGTGELFF

SEQ ID NO: 575205 - protein, 13 aa, Homo sapiens
  CDR3 for alpha chain variable domain of TCR clone 287603 (TRAV22, TRAJ29)
CAVGGSGNTPLVF

SEQ ID NO: 575206 - protein, 14 aa, Homo sapiens
  CDR3 for beta chain variable domain of TCR clone 287603 (TRBV5-1, TRBJ2-7)
CASSRGESLYEQNF

SEQ ID NO: 575207 - protein, 13 aa, Homo sapiens
  CDR3 for alpha chain variable domain of TCR clone 287604 (TRAV13-1, TRAJ5)
CAARVTGRRALTF

SEQ ID NO: 575208 - protein, 12 aa, Homo sapiens
  CDR3 for beta chain variable domain of TCR clone 287604 (TRBV3-1, TRBJ2-5)
CPSSQRGETQYF

SEQ ID NO: 575209 - protein, 16 aa, Homo sapiens
  CDR3 for alpha chain variable domain of TCR clone 287605 (TRAV3, TRAJ10)
CAVRDMNAGGGNKLTL

SEQ ID NO: 575210 - protein, 15 aa, Homo sapiens
  CDR3 for beta chain variable domain of TCR clone 287605 (TRBV20-1, TRBJ2-7)
CSARDRVSGMDEQYF

SEQ ID NO: 575211 - protein, 13 aa, Homo sapiens
  CDR3 for alpha chain variable domain of TCR clone 287606 (TRAV21, TRAJ27)
CAALNTNAGKSTF

SEQ ID NO: 575212 - protein, 14 aa, Homo sapiens
  CDR3 for beta chain variable domain of TCR clone 287606 (TRBV7-6, TRBJ2-3)
CASSLGTVTDTQYF

SEQ ID NO: 575213 - protein, 17 aa, Homo sapiens
  CDR3 for alpha chain variable domain of TCR clone 287607 (TRAV26-1, TRAJ37)
CIVRVITVSSNTGKLTF

SEQ ID NO: 575214 - protein, 13 aa, Homo sapiens
  CDR3 for beta chain variable domain of TCR clone 287607 (TRBV4-1, TRBJ2-7)
CASSQGQAYEQYF

SEQ ID NO: 575215 - protein, 14 aa, Homo sapiens
  CDR3 for alpha chain variable domain of TCR clone 287608 (TRAV13-1, TRAJ40)
CAASMTSGTYKYIF

SEQ ID NO: 575216 - protein, 15 aa, Homo sapiens
  CDR3 for beta chain variable domain of TCR clone 287608 (TRBV4-1, TRBJ2-3)
CASSQDRLPPDTQYF

SEQ ID NO: 575217 - protein, 14 aa, Homo sapiens
  CDR3 for alpha chain variable domain of TCR clone 287609 (TRAV13-1, TRAJ44)
CAAKATGIASKLTF

SEQ ID NO: 575218 - protein, 13 aa, Homo sapiens
  CDR3 for beta chain variable domain of TCR clone 287609 (TRBV20-1, TRBJ1-1)
CSARGGGNTEAFF

SEQ ID NO: 575219 - protein, 13 aa, Homo sapiens
  CDR3 for alpha chain variable domain of TCR clone 287610 (TRAV36/DV7, TRAJ37)
CAVFSSNTGKLIF

SEQ ID NO: 575220 - protein, 15 aa, Homo sapiens
  CDR3 for beta chain variable domain of TCR clone 287610 (TRBV12-4, TRBJ2-5)
CQHFFVRGRQETQYF

SEQ ID NO: 575221 - protein, 14 aa, Homo sapiens
  CDR3 for alpha chain variable domain of TCR clone 287611 (TRAV2, TRAJ37)
CAVDFTSNTGKLIF

SEQ ID NO: 575222 - protein, 14 aa, Homo sapiens
  CDR3 for beta chain variable domain of TCR clone 287611 (TRBV19, TRBJ2-5)
CASSMTGQQETQYF

SEQ ID NO: 575223 - protein, 15 aa, Homo sapiens
  CDR3 for alpha chain variable domain of TCR clone 287612 (TRAV3, TRAJ47)
CAVRDIGEYGNKLVF

SEQ ID NO: 575224 - protein, 15 aa, Homo sapiens
  CDR3 for beta chain variable domain of TCR clone 287612 (TRBV12-4, TRBJ2-5)
CASSGTGQAQETQYF

SEQ ID NO: 575225 - protein, 14 aa, Homo sapiens
  CDR3 for alpha chain variable domain of TCR clone 287613 (TRAV12-2, TRAJ17)
CAVLFKAAGNKLTS

SEQ ID NO: 575226 - protein, 17 aa, Homo sapiens
  CDR3 for beta chain variable domain of TCR clone 287613 (TRBV11-2, TRBJ2-1)
CASSLYPPGVEYNEQFF

SEQ ID NO: 575227 - protein, 11 aa, Homo sapiens
  CDR3 for alpha chain variable domain of TCR clone 287614 (TRAV12-3, TRAJ43)
CAMSVSNDMRF

SEQ ID NO: 575228 - protein, 15 aa, Homo sapiens
  CDR3 for beta chain variable domain of TCR clone 287614 (TRBV5-1, TRBJ2-1)
CASSPPRAPYNGQFF

SEQ ID NO: 575229 - protein, 18 aa, Homo sapiens
  CDR3 for alpha chain variable domain of TCR clone 287615 (TRAV12-3, TRAJ52)
CAMSRTNAGGTSYGKLTF

SEQ ID NO: 575230 - protein, 17 aa, Homo sapiens
  CDR3 for beta chain variable domain of TCR clone 287615 (TRBV7-3, TRBJ2-3)
CASSLMRRMRGADTQYS

SEQ ID NO: 575231 - protein, 21 aa, Homo sapiens
  CDR3 for alpha chain variable domain of TCR clone 287616 (TRAV21, TRAJ57)
SLVTQPPTSVLTQGRSEKLVF

SEQ ID NO: 575232 - protein, 16 aa, Homo sapiens
  CDR3 for beta chain variable domain of TCR clone 287616 (TRBV29-1, TRBJ2-7)
CSVEDAEDGTAYEQYF

SEQ ID NO: 575233 - protein, 13 aa, Homo sapiens
  CDR3 for alpha chain variable domain of TCR clone 287617 (TRAV23/DV6, TRAJ58)
CAARLIRGSSLTF

SEQ ID NO: 575234 - protein, 13 aa, Homo sapiens
  CDR3 for beta chain variable domain of TCR clone 287617 (TRBV2, TRBJ1-6)
CADSGSYNSPLHF

SEQ ID NO: 575235 - protein, 14 aa, Homo sapiens
  CDR3 for alpha chain variable domain of TCR clone 287618 (TRAV23/DV6, TRAJ17)
CAASIGAAGNKLTC

SEQ ID NO: 575236 - protein, 15 aa, Homo sapiens
  CDR3 for beta chain variable domain of TCR clone 287618 (TRBV7-9, TRBJ1-6)
CASSSPGRGNSPLHF

SEQ ID NO: 575237 - protein, 14 aa, Homo sapiens
  CDR3 for alpha chain variable domain of TCR clone 287619 (TRAV12-2, TRAJ53)
CRERGGGSNHKLTF

SEQ ID NO: 575238 - protein, 14 aa, Homo sapiens
  CDR3 for beta chain variable domain of TCR clone 287619 (TRBV19, TRBJ2-2)
CASSTLHRSGELFF

SEQ ID NO: 575239 - protein, 19 aa, Homo sapiens
  CDR3 for alpha chain variable domain of TCR clone 287620 (TRAV26-1, TRAJ50)
CCVLLHRQNPKTSYDKVIF

SEQ ID NO: 575240 - protein, 12 aa, Homo sapiens
  CDR3 for beta chain variable domain of TCR clone 287620 (TRBV12-4, TRBJ2-7)
CASSLGGYEQYF

SEQ ID NO: 575241 - protein, 14 aa, Homo sapiens
  CDR3 for alpha chain variable domain of TCR clone 287621 (TRAV26-1, TRAJ49)
CIVRLTNTGNQFYF

SEQ ID NO: 575242 - protein, 15 aa, Homo sapiens
  CDR3 for beta chain variable domain of TCR clone 287621 (TRBV11-3, TRBJ2-7)
CASSPGPASSYEQYF

SEQ ID NO: 575243 - protein, 15 aa, Homo sapiens
  CDR3 for alpha chain variable domain of TCR clone 287622 (TRAV23/DV6, TRAJ22)
CAASSLSGSARQLTF

SEQ ID NO: 575244 - protein, 16 aa, Homo sapiens
  CDR3 for beta chain variable domain of TCR clone 287622 (TRBV2, TRBJ2-1)
CASSVGGSLSYNEQFF

SEQ ID NO: 575245 - protein, 13 aa, Homo sapiens
  CDR3 for alpha chain variable domain of TCR clone 287623 (TRAV27, TRAJ29)
CAGAHSGNTPLVF

SEQ ID NO: 575246 - protein, 13 aa, Homo sapiens
  CDR3 for beta chain variable domain of TCR clone 287623 (TRBV4-2, TRBJ1-1)
CASSQAGNTEAFF

SEQ ID NO: 575247 - protein, 13 aa, Homo sapiens
  CDR3 for alpha chain variable domain of TCR clone 287624 (TRAV13-1, TRAJ43)
CAASKNNNNDMRF

SEQ ID NO: 575248 - protein, 15 aa, Homo sapiens
  CDR3 for beta chain variable domain of TCR clone 287624 (TRBV3-1, TRBJ2-2)
CASSQDWTRAGELFF

SEQ ID NO: 575249 - protein, 12 aa, Homo sapiens
  CDR3 for alpha chain variable domain of TCR clone 287625 (TRAV12-3, TRAJ17)
CAMTLTGNKLTL

SEQ ID NO: 575250 - protein, 17 aa, Homo sapiens
  CDR3 for beta chain variable domain of TCR clone 287625 (TRBV11-2, TRBJ2-1)
CASSLYPPGVEYNEQFF

SEQ ID NO: 575251 - protein, 13 aa, Homo sapiens
  CDR3 for alpha chain variable domain of TCR clone 287626 (TRAV13-2, TRAJ48)
CAEMDFGNEKLTF

SEQ ID NO: 575252 - protein, 15 aa, Homo sapiens
  CDR3 for beta chain variable domain of TCR clone 287626 (TRBV7-3, TRBJ2-1)
CASSQRGCALIEQFF

SEQ ID NO: 575253 - protein, 12 aa, Homo sapiens
  CDR3 for alpha chain variable domain of TCR clone 287627 (TRAV8-3, TRAJ41)
CAVGALGYAVNF

SEQ ID NO: 575254 - protein, 16 aa, Homo sapiens
  CDR3 for beta chain variable domain of TCR clone 287627 (TRBV7-6, TRBJ2-3)
CASSDSRGEGTDTQYF

SEQ ID NO: 575255 - protein, 12 aa, Homo sapiens
  CDR3 for alpha chain variable domain of TCR clone 287628 (TRAV12-3, TRAJ20)
CAMVRGDYKLSF

SEQ ID NO: 575256 - protein, 16 aa, Homo sapiens
  CDR3 for beta chain variable domain of TCR clone 287628 (TRBV4-2, TRBJ1-5)
CASSPGTGDSNQPQHF

SEQ ID NO: 575257 - protein, 14 aa, Homo sapiens
  CDR3 for alpha chain variable domain of TCR clone 287629 (TRAV12-2, TRAJ40)
CAVKIPSGTYKYIF

SEQ ID NO: 575258 - protein, 16 aa, Homo sapiens
  CDR3 for beta chain variable domain of TCR clone 287629 (TRBV5-1, TRBJ1-1)
CASSSGGNSLNTEAFF

SEQ ID NO: 575259 - protein, 21 aa, Homo sapiens
  CDR3 for alpha chain variable domain of TCR clone 287630 (TRAV3, )
CAVRPTPDIQNPDPAVYQLTD

SEQ ID NO: 575260 - protein, 15 aa, Homo sapiens
  CDR3 for beta chain variable domain of TCR clone 287630 (TRBV11-3, TRBJ2-5)
CASSDTSGGIETQYF

SEQ ID NO: 575261 - protein, 13 aa, Homo sapiens
  CDR3 for alpha chain variable domain of TCR clone 287631 (TRAV12-3, TRAJ13)
YAMTSGGYQKVTF

SEQ ID NO: 575262 - protein, 13 aa, Homo sapiens
  CDR3 for beta chain variable domain of TCR clone 287631 (TRBV20-1, TRBJ2-2)
CSALSGGAGELFF

SEQ ID NO: 575263 - protein, 14 aa, Homo sapiens
  CDR3 for alpha chain variable domain of TCR clone 287632 (TRAV1-2, TRAJ16)
CAVNRFSDGQKLLF

SEQ ID NO: 575264 - protein, 14 aa, Homo sapiens
  CDR3 for beta chain variable domain of TCR clone 287632 (TRBV13, TRBJ2-7)
CASSGLAGLYEQYF

SEQ ID NO: 575265 - protein, 13 aa, Homo sapiens
  CDR3 for alpha chain variable domain of TCR clone 287633 (TRAV3, TRAJ21)
CAVREPDFNKFYF

SEQ ID NO: 575266 - protein, 13 aa, Homo sapiens
  CDR3 for beta chain variable domain of TCR clone 287633 (TRBV2, TRBJ1-1)
CASSEGGNTEAFF

SEQ ID NO: 575267 - protein, 13 aa, Homo sapiens
  CDR3 for alpha chain variable domain of TCR clone 287634 (TRAV3, TRAJ21)
CAVREPDFNKFYF

SEQ ID NO: 575268 - protein, 13 aa, Homo sapiens
  CDR3 for beta chain variable domain of TCR clone 287634 (TRBV5-1, TRBJ2-4)
CASSLEGGMNQYF

SEQ ID NO: 575269 - protein, 14 aa, Homo sapiens
  CDR3 for alpha chain variable domain of TCR clone 287635 (TRAV3, TRAJ21)
CAVESQANFNKFYF

SEQ ID NO: 575270 - protein, 18 aa, Homo sapiens
  CDR3 for beta chain variable domain of TCR clone 287635 (TRBV7-9, TRBJ2-1)
GASSLAVSGTSGRNEQFF

SEQ ID NO: 575271 - protein, 12 aa, Homo sapiens
  CDR3 for alpha chain variable domain of TCR clone 287636 (TRAV12-3, TRAJ17)
CAMTLTGNKLTF

SEQ ID NO: 575272 - protein, 12 aa, Homo sapiens
  CDR3 for beta chain variable domain of TCR clone 287636 (TRBV28, TRBJ2-7)
CASSVPPYEQYF

SEQ ID NO: 575273 - protein, 15 aa, Homo sapiens
  CDR3 for alpha chain variable domain of TCR clone 287637 (TRAV13-1, TRAJ44)
CAASRGGGTASKLTF

SEQ ID NO: 575274 - protein, 16 aa, Homo sapiens
  CDR3 for beta chain variable domain of TCR clone 287637 (TRBV12-4, TRBJ1-5)
CASSRPVGGSNQPQHF

SEQ ID NO: 575275 - protein, 16 aa, Homo sapiens
  CDR3 for alpha chain variable domain of TCR clone 287638 (TRAV38-1, TRAJ56)
CAFMKRQTGANSKLTF

SEQ ID NO: 575276 - protein, 14 aa, Homo sapiens
  CDR3 for beta chain variable domain of TCR clone 287638 (TRBV6-5, TRBJ1-2)
CASSYDGTGGGYTF

SEQ ID NO: 575277 - protein, 14 aa, Homo sapiens
  CDR3 for alpha chain variable domain of TCR clone 287639 (TRAV26-1, TRAJ48)
CIVRVPFGNEKLTF

SEQ ID NO: 575278 - protein, 16 aa, Homo sapiens
  CDR3 for beta chain variable domain of TCR clone 287639 (TRBV18, TRBJ2-1)
CASSTYLSIRGDEQFF

SEQ ID NO: 575279 - protein, 15 aa, Homo sapiens
  CDR3 for alpha chain variable domain of TCR clone 287640 (TRAV13-1, TRAJ52)
CATSSPSTSYGKLTF

SEQ ID NO: 575280 - protein, 13 aa, Homo sapiens
  CDR3 for beta chain variable domain of TCR clone 287640 (TRBV27, TRBJ2-5)
CASSLSSLETQYF

SEQ ID NO: 575281 - protein, 12 aa, Homo sapiens
  CDR3 for alpha chain variable domain of TCR clone 287641 (TRAV8-6, TRAJ11)
CAVSEGYSTLTF

SEQ ID NO: 575282 - protein, 17 aa, Homo sapiens
  CDR3 for beta chain variable domain of TCR clone 287641 (TRBV20-1, TRBJ2-1)
CSASSSGLAGSYNEQFF

SEQ ID NO: 575283 - protein, 13 aa, Homo sapiens
  CDR3 for alpha chain variable domain of TCR clone 287642 (TRAV12-3, TRAJ33)
CAMSVNSNYQLIG

SEQ ID NO: 575284 - protein, 13 aa, Homo sapiens
  CDR3 for beta chain variable domain of TCR clone 287642 (TRBV4-1, TRBJ2-2)
CASSQENTGELFF

SEQ ID NO: 575285 - protein, 12 aa, Homo sapiens
  CDR3 for alpha chain variable domain of TCR clone 287643 (TRAV12-2, TRAJ10)
WGVTGGGNKLTF

SEQ ID NO: 575286 - protein, 15 aa, Homo sapiens
  CDR3 for beta chain variable domain of TCR clone 287643 (TRBV11-3, TRBJ2-1)
CASSLAGQTYNEQFF

SEQ ID NO: 575287 - protein, 13 aa, Homo sapiens
  CDR3 for alpha chain variable domain of TCR clone 287644 (TRAV12-3, TRAJ9)
CAMRNTGGFKTIF

SEQ ID NO: 575288 - protein, 17 aa, Homo sapiens
  CDR3 for beta chain variable domain of TCR clone 287644 (TRBV4-3, TRBJ1-2)
CASSSRLQAGGSVGYTF

SEQ ID NO: 575289 - protein, 14 aa, Homo sapiens
  CDR3 for alpha chain variable domain of TCR clone 287645 (TRAV26-1, TRAJ38)
CIADNAGNNRKLIW

SEQ ID NO: 575290 - protein, 13 aa, Homo sapiens
  CDR3 for beta chain variable domain of TCR clone 287645 (TRBV7-9, TRBJ2-1)
CASSAGLYNEQFF

SEQ ID NO: 575291 - protein, 17 aa, Homo sapiens
  CDR3 for alpha chain variable domain of TCR clone 287646 (TRAV3, TRAJ6)
CAVRDGRRAGGSYIPTF

SEQ ID NO: 575292 - protein, 12 aa, Homo sapiens
  CDR3 for beta chain variable domain of TCR clone 287646 (TRBV19, TRBJ2-7)
CASTDRDYEQYF

SEQ ID NO: 575293 - protein, 13 aa, Homo sapiens
  CDR3 for alpha chain variable domain of TCR clone 287647 (TRAV12-2, TRAJ20)
CAVYPSNDYKLSF

SEQ ID NO: 575294 - protein, 15 aa, Homo sapiens
  CDR3 for beta chain variable domain of TCR clone 287647 (TRBV6-1, TRBJ2-5)
GASSEGWGIQETQYF

SEQ ID NO: 575295 - protein, 13 aa, Homo sapiens
  CDR3 for alpha chain variable domain of TCR clone 287648 (TRAV12-2, TRAJ20)
CAVYPSNDYKLSF

SEQ ID NO: 575296 - protein, 18 aa, Homo sapiens
  CDR3 for beta chain variable domain of TCR clone 287648 (TRBV18, TRBJ2-3)
CASSYTSGAAGGTDTQYF

SEQ ID NO: 575297 - protein, 13 aa, Homo sapiens
  CDR3 for alpha chain variable domain of TCR clone 287649 (TRAV2, TRAJ35)
CAVSCGFGNVLHC

SEQ ID NO: 575298 - protein, 13 aa, Homo sapiens
  CDR3 for beta chain variable domain of TCR clone 287649 (TRBV11-2, TRBJ2-5)
CASSFSSQETQYF

SEQ ID NO: 575299 - protein, 14 aa, Homo sapiens
  CDR3 for alpha chain variable domain of TCR clone 287650 (TRAV12-3, TRAJ10)
SHLPLTGGGNKLTF

SEQ ID NO: 575300 - protein, 15 aa, Homo sapiens
  CDR3 for beta chain variable domain of TCR clone 287650 (TRBV6-3, TRBJ2-7)
CANSSPGTVFYEQYF

SEQ ID NO: 575301 - protein, 14 aa, Homo sapiens
  CDR3 for alpha chain variable domain of TCR clone 287651 (TRAV13-1, TRAJ23)
CAASRLGRGGKLIF

SEQ ID NO: 575302 - protein, 13 aa, Homo sapiens
  CDR3 for beta chain variable domain of TCR clone 287651 (TRBV20-1, TRBJ1-1)
CSAPPGGGTEAFF

SEQ ID NO: 575303 - protein, 17 aa, Homo sapiens
  CDR3 for alpha chain variable domain of TCR clone 287652 (TRAV3, TRAJ42)
CAVRDRDYGGSQGNLIF

SEQ ID NO: 575304 - protein, 13 aa, Homo sapiens
  CDR3 for beta chain variable domain of TCR clone 287652 (TRBV20-1, TRBJ2-5)
CSARYAGEETQYF

SEQ ID NO: 575305 - protein, 18 aa, Homo sapiens
  CDR3 for alpha chain variable domain of TCR clone 287653 (TRAV29/DV5, TRAJ26)
CSVLLCSKRKPEGQNFVF

SEQ ID NO: 575306 - protein, 17 aa, Homo sapiens
  CDR3 for beta chain variable domain of TCR clone 287653 (TRBV20-1, TRBJ2-2)
CSASGSGQSGLTGELFF

SEQ ID NO: 575307 - protein, 14 aa, Homo sapiens
  CDR3 for alpha chain variable domain of TCR clone 287654 (TRAV8-4, TRAJ8)
CAVSLSTGFQKLVF

SEQ ID NO: 575308 - protein, 13 aa, Homo sapiens
  CDR3 for beta chain variable domain of TCR clone 287654 (TRBV7-9, TRBJ2-3)
CASSPGSTDTQYF

SEQ ID NO: 575309 - protein, 14 aa, Homo sapiens
  CDR3 for alpha chain variable domain of TCR clone 287655 (TRAV12-2, TRAJ40)
CAVKIPSGTYKNIF

SEQ ID NO: 575310 - protein, 14 aa, Homo sapiens
  CDR3 for beta chain variable domain of TCR clone 287655 (TRBV20-1, TRBJ1-1)
CSAQTRIGGTEAFL

SEQ ID NO: 575311 - protein, 11 aa, Homo sapiens
  CDR3 for alpha chain variable domain of TCR clone 287656 (TRAV27, TRAJ47)
SIVEYGHKLVF

SEQ ID NO: 575312 - protein, 18 aa, Homo sapiens
  CDR3 for beta chain variable domain of TCR clone 287656 (TRBV2, TRBJ2-1)
CASRGLAGGPRTYNEQFF

SEQ ID NO: 575313 - protein, 14 aa, Homo sapiens
  CDR3 for alpha chain variable domain of TCR clone 287657 (TRAV17, TRAJ16)
CATADFSDGQKLLF

SEQ ID NO: 575314 - protein, 13 aa, Homo sapiens
  CDR3 for beta chain variable domain of TCR clone 287657 (TRBV25-1, TRBJ2-5)
CASSESGRETQYF

SEQ ID NO: 575315 - protein, 13 aa, Homo sapiens
  CDR3 for alpha chain variable domain of TCR clone 287658 (TRAV1-2, TRAJ9)
CAALNTGGFKTIF

SEQ ID NO: 575316 - protein, 15 aa, Homo sapiens
  CDR3 for beta chain variable domain of TCR clone 287658 (TRBV19, TRBJ2-1)
CASSGGGTLYNEQFF

SEQ ID NO: 575317 - protein, 14 aa, Homo sapiens
  CDR3 for alpha chain variable domain of TCR clone 287659 (TRAV13-2, TRAJ17)
CAENSKAAGNKLTF

SEQ ID NO: 575318 - protein, 15 aa, Homo sapiens
  CDR3 for beta chain variable domain of TCR clone 287659 (TRBV7-3, TRBJ2-1)
CASSPTGGGEVEQFF

SEQ ID NO: 575319 - protein, 14 aa, Homo sapiens
  CDR3 for alpha chain variable domain of TCR clone 287660 (TRAV12-2, TRAJ40)
CAVKILSGAYKYIF

SEQ ID NO: 575320 - protein, 14 aa, Homo sapiens
  CDR3 for beta chain variable domain of TCR clone 287660 (TRBV20-1, TRBJ1-1)
CSAQTRIGGTEAFF

SEQ ID NO: 575321 - protein, 12 aa, Homo sapiens
  CDR3 for alpha chain variable domain of TCR clone 287661 (TRAV1-1, TRAJ24)
CAVRGSWGKFKF

SEQ ID NO: 575322 - protein, 14 aa, Homo sapiens
  CDR3 for beta chain variable domain of TCR clone 287661 (TRBV20-1, TRBJ2-3)
CSARGGTSTDTQYF

SEQ ID NO: 575323 - protein, 14 aa, Homo sapiens
  CDR3 for alpha chain variable domain of TCR clone 287662 (TRAV1-2, TRAJ16)
CAVNRFSDGQKLLF

SEQ ID NO: 575324 - protein, 16 aa, Homo sapiens
  CDR3 for beta chain variable domain of TCR clone 287662 (TRBV29-1, TRBJ2-7)
SAALKSWGLAGAKQYF

SEQ ID NO: 575325 - protein, 18 aa, Homo sapiens
  CDR3 for alpha chain variable domain of TCR clone 287663 (TRAV12-3, TRAJ52)
CAMSRTNAGGTSYGKLTF

SEQ ID NO: 575326 - protein, 17 aa, Homo sapiens
  CDR3 for beta chain variable domain of TCR clone 287663 (TRBV7-3, TRBJ2-3)
CASSLMKRMRGAHTQYF

SEQ ID NO: 575327 - protein, 10 aa, Homo sapiens
  CDR3 for alpha chain variable domain of TCR clone 287664 (TRAV1-2, TRAJ23)
CARQGGKLIF

SEQ ID NO: 575328 - protein, 16 aa, Homo sapiens
  CDR3 for beta chain variable domain of TCR clone 287664 (TRBV11-2, TRBJ1-1)
CASSLRQGGEHSKAFF

SEQ ID NO: 575329 - protein, 14 aa, Homo sapiens
  CDR3 for alpha chain variable domain of TCR clone 287665 (TRAV12-2, TRAJ13)
CAVKKTGGYQKVTF

SEQ ID NO: 575330 - protein, 13 aa, Homo sapiens
  CDR3 for beta chain variable domain of TCR clone 287665 (TRBV7-9, TRBJ2-4)
CATEGLAGNIQYF

SEQ ID NO: 575331 - protein, 15 aa, Homo sapiens
  CDR3 for alpha chain variable domain of TCR clone 287666 (TRAV3, TRAJ22)
CAVRDRGGSSRQLTF

SEQ ID NO: 575332 - protein, 13 aa, Homo sapiens
  CDR3 for beta chain variable domain of TCR clone 287666 (TRBV2, TRBJ1-5)
CATAGPGNQPQHF

SEQ ID NO: 575333 - protein, 12 aa, Homo sapiens
  CDR3 for alpha chain variable domain of TCR clone 287667 (TRAV2, TRAJ9)
CAVGAGSFKTIF

SEQ ID NO: 575334 - protein, 19 aa, Homo sapiens
  CDR3 for beta chain variable domain of TCR clone 287667 (TRBV7-9, TRBJ2-6)
CASSLESATVLPGANVLTF

SEQ ID NO: 575335 - protein, 17 aa, Homo sapiens
  CDR3 for alpha chain variable domain of TCR clone 287668 (TRAV17, TRAJ28)
CATDPRRGGAGGYQLTF

SEQ ID NO: 575336 - protein, 12 aa, Homo sapiens
  CDR3 for beta chain variable domain of TCR clone 287668 (TRBV12-4, TRBJ2-7)
CASSLGGYEQYF

SEQ ID NO: 575337 - protein, 15 aa, Homo sapiens
  CDR3 for alpha chain variable domain of TCR clone 287669 (TRAV38-1, TRAJ57)
CAFMDSQGGSEKLVF

SEQ ID NO: 575338 - protein, 16 aa, Homo sapiens
  CDR3 for beta chain variable domain of TCR clone 287669 (TRBV10-3, TRBJ2-1)
GAIRGGGGGDYSEQFF

SEQ ID NO: 575339 - protein, 14 aa, Homo sapiens
  CDR3 for alpha chain variable domain of TCR clone 287670 (TRAV12-1, TRAJ13)
CVVIDSGGYQKVTF

SEQ ID NO: 575340 - protein, 11 aa, Homo sapiens
  CDR3 for beta chain variable domain of TCR clone 287670 (TRBV29-1, TRBJ2-5)
CSEDRTGTQYF

SEQ ID NO: 575341 - protein, 14 aa, Homo sapiens
  CDR3 for alpha chain variable domain of TCR clone 287671 (TRAV1-2, TRAJ8)
CAVREDTGFQKLVF

SEQ ID NO: 575342 - protein, 16 aa, Homo sapiens
  CDR3 for beta chain variable domain of TCR clone 287671 (TRBV7-9, TRBJ2-1)
RASSDVAGGSYNEQFF

SEQ ID NO: 575343 - protein, 17 aa, Homo sapiens
  CDR3 for alpha chain variable domain of TCR clone 287672 (TRAV8-1, TRAJ43)
CAVTNDMRFGAGTRLTV

SEQ ID NO: 575344 - protein, 16 aa, Homo sapiens
  CDR3 for beta chain variable domain of TCR clone 287672 (TRBV29-1, TRBJ2-7)
CSVEDAEDGTAYEQYF

SEQ ID NO: 575345 - protein, 13 aa, Homo sapiens
  CDR3 for alpha chain variable domain of TCR clone 287673 (TRAV13-1, TRAJ6)
CAARRGGGYIPTF

SEQ ID NO: 575346 - protein, 13 aa, Homo sapiens
  CDR3 for beta chain variable domain of TCR clone 287673 (TRBV5-8, TRBJ1-2)
CAGSLGGNYGYTF

SEQ ID NO: 575347 - protein, 14 aa, Homo sapiens
  CDR3 for alpha chain variable domain of TCR clone 287674 (TRAV1-2, TRAJ8)
CAVREDTGFQKLVF

SEQ ID NO: 575348 - protein, 13 aa, Homo sapiens
  CDR3 for beta chain variable domain of TCR clone 287674 (TRBV7-9, TRBJ1-2)
CASSLKQNYGYSF

SEQ ID NO: 575349 - protein, 14 aa, Homo sapiens
  CDR3 for alpha chain variable domain of TCR clone 287675 (TRAV20, TRAJ22)
CAVALGGSARQLTF

SEQ ID NO: 575350 - protein, 20 aa, Homo sapiens
  CDR3 for beta chain variable domain of TCR clone 287675 (TRBV7-2, TRBJ1-1)
CASSFYICSARGGGNTEAFF

SEQ ID NO: 575351 - protein, 14 aa, Homo sapiens
  CDR3 for alpha chain variable domain of TCR clone 287676 (TRAV12-2, TRAJ36)
CAVKISTGANNLFF

SEQ ID NO: 575352 - protein, 15 aa, Homo sapiens
  CDR3 for beta chain variable domain of TCR clone 287676 (TRBV6-1, TRBJ2-1)
CASSELRGQYNEQFF

SEQ ID NO: 575353 - protein, 14 aa, Homo sapiens
  CDR3 for alpha chain variable domain of TCR clone 287677 (TRAV23/DV6, TRAJ8)
CAASKATGFQTLVF

SEQ ID NO: 575354 - protein, 15 aa, Homo sapiens
  CDR3 for beta chain variable domain of TCR clone 287677 (TRBV28, TRBJ2-3)
CASSPDRRGANTQYF

SEQ ID NO: 575355 - protein, 17 aa, Homo sapiens
  CDR3 for alpha chain variable domain of TCR clone 287678 (TRAV3, TRAJ42)
CAVRDRDYGGSQGNPIF

SEQ ID NO: 575356 - protein, 15 aa, Homo sapiens
  CDR3 for beta chain variable domain of TCR clone 287678 (TRBV6-6, TRBJ2-7)
RASSYSYGGSYEQYF

SEQ ID NO: 575357 - protein, 14 aa, Homo sapiens
  CDR3 for alpha chain variable domain of TCR clone 287679 (TRAV12-3, TRAJ56)
CAMSVTGANIKLTF

SEQ ID NO: 575358 - protein, 17 aa, Homo sapiens
  CDR3 for beta chain variable domain of TCR clone 287679 (TRBV20-1, TRBJ2-3)
CSASLLGRGGSADTQYF

SEQ ID NO: 575359 - protein, 13 aa, Homo sapiens
  CDR3 for alpha chain variable domain of TCR clone 287680 (TRAV27, TRAJ27)
CAGGITNAGKSPF

SEQ ID NO: 575360 - protein, 13 aa, Homo sapiens
  CDR3 for beta chain variable domain of TCR clone 287680 (TRBV20-1, TRBJ1-2)
CSASLGVGYGYTF

SEQ ID NO: 575361 - protein, 18 aa, Homo sapiens
  CDR3 for alpha chain variable domain of TCR clone 287681 (TRAV26-1, TRAJ45)
CCVLLHRGNGRRADGLTF

SEQ ID NO: 575362 - protein, 13 aa, Homo sapiens
  CDR3 for beta chain variable domain of TCR clone 287681 (TRBV7-6, TRBJ1-2)
CASSLVADYGYTF

SEQ ID NO: 575363 - protein, 16 aa, Homo sapiens
  CDR3 for alpha chain variable domain of TCR clone 287682 (TRAV4, TRAJ37)
CLVGWFGSSNTGKRIF

SEQ ID NO: 575364 - protein, 15 aa, Homo sapiens
  CDR3 for beta chain variable domain of TCR clone 287682 (TRBV12-4, TRBJ2-3)
CASSLAERPTDTQYF

SEQ ID NO: 575365 - protein, 12 aa, Homo sapiens
  CDR3 for alpha chain variable domain of TCR clone 287683 (TRAV3, TRAJ43)
CAVRDPNNDMRF

SEQ ID NO: 575366 - protein, 13 aa, Homo sapiens
  CDR3 for beta chain variable domain of TCR clone 287683 (TRBV28, TRBJ2-5)
CASSFAGGETQYF

SEQ ID NO: 575367 - protein, 16 aa, Homo sapiens
  CDR3 for alpha chain variable domain of TCR clone 287684 (TRAV3, TRAJ21)
CAVRDRSASTNFTLDL

SEQ ID NO: 575368 - protein, 16 aa, Homo sapiens
  CDR3 for beta chain variable domain of TCR clone 287684 (TRBV7-2, TRBJ2-5)
CASSLESAGGRETKYF

SEQ ID NO: 575369 - protein, 12 aa, Homo sapiens
  CDR3 for alpha chain variable domain of TCR clone 287685 (TRAV16, TRAJ10)
CSRTGGGNKLTF

SEQ ID NO: 575370 - protein, 15 aa, Homo sapiens
  CDR3 for beta chain variable domain of TCR clone 287685 (TRBV6-3, TRBJ2-7)
WASSSPGTVFYEQYF

SEQ ID NO: 575371 - protein, 14 aa, Homo sapiens
  CDR3 for alpha chain variable domain of TCR clone 287686 (TRAV12-2, TRAJ13)
CAVKKTGGYQKVTF

SEQ ID NO: 575372 - protein, 17 aa, Homo sapiens
  CDR3 for beta chain variable domain of TCR clone 287686 (TRBV11-3, TRBJ2-6)
CASKWGQGLSGANVLTF

SEQ ID NO: 575373 - protein, 18 aa, Homo sapiens
  CDR3 for alpha chain variable domain of TCR clone 287687 (TRAV26-2, TRAJ45)
CMLRVDKYSGGGADGLTF

SEQ ID NO: 575374 - protein, 14 aa, Homo sapiens
  CDR3 for beta chain variable domain of TCR clone 287687 (TRBV7-2, TRBJ2-7)
CASRSQGAAYEQYF

SEQ ID NO: 575375 - protein, 14 aa, Homo sapiens
  CDR3 for alpha chain variable domain of TCR clone 287688 (TRAV4, TRAJ13)
CLVGYFGGYQKVTF

SEQ ID NO: 575376 - protein, 13 aa, Homo sapiens
  CDR3 for beta chain variable domain of TCR clone 287688 (TRBV18, TRBJ1-1)
CASSGGRNTEAFF

SEQ ID NO: 575377 - protein, 14 aa, Homo sapiens
  CDR3 for alpha chain variable domain of TCR clone 287689 (TRAV12-2, TRAJ40)
CAVKIPSGAYKYIF

SEQ ID NO: 575378 - protein, 13 aa, Homo sapiens
  CDR3 for beta chain variable domain of TCR clone 287689 (TRBV20-1, TRBJ1-1)
QCTNTDWGTEAFF

SEQ ID NO: 575379 - protein, 14 aa, Homo sapiens
  CDR3 for alpha chain variable domain of TCR clone 287690 (TRAV26-1, TRAJ45)
WIEVTGGGADGLTF

SEQ ID NO: 575380 - protein, 13 aa, Homo sapiens
  CDR3 for beta chain variable domain of TCR clone 287690 (TRBV7-6, TRBJ1-2)
CASSLVADYGYTF

SEQ ID NO: 575381 - protein, 11 aa, Homo sapiens
  CDR3 for alpha chain variable domain of TCR clone 287691 (TRAV12-3, TRAJ27)
CAMANAGKSTF

SEQ ID NO: 575382 - protein, 14 aa, Homo sapiens
  CDR3 for beta chain variable domain of TCR clone 287691 (TRBV12-5, TRBJ2-5)
CASGSRTQQETQYF

SEQ ID NO: 575383 - protein, 13 aa, Homo sapiens
  CDR3 for alpha chain variable domain of TCR clone 287692 (TRAV13-1, TRAJ11)
CAAVLAGYSTLTF

SEQ ID NO: 575384 - protein, 11 aa, Homo sapiens
  CDR3 for beta chain variable domain of TCR clone 287692 (TRBV19, TRBJ1-1)
CASSIGSEAFF

SEQ ID NO: 575385 - protein, 23 aa, Homo sapiens
  CDR3 for alpha chain variable domain of TCR clone 287693 (TRAV26-1, TRAJ38)
CIADNAGNNHIQNPDPAVYQLRD

SEQ ID NO: 575386 - protein, 15 aa, Homo sapiens
  CDR3 for beta chain variable domain of TCR clone 287693 (TRBV7-9, TRBJ1-5)
CASSQGHQPNQPQHF

SEQ ID NO: 575387 - protein, 10 aa, Homo sapiens
  CDR3 for alpha chain variable domain of TCR clone 287694 (TRAV21, TRAJ20)
CAVNVGRLQA

SEQ ID NO: 575388 - protein, 15 aa, Homo sapiens
  CDR3 for beta chain variable domain of TCR clone 287694 (TRBV6-1, TRBJ2-5)
CASSEFPRMGETQYF

SEQ ID NO: 575389 - protein, 15 aa, Homo sapiens
  CDR3 for alpha chain variable domain of TCR clone 287695 (TRAV12-1, TRAJ43)
CVVNRGRYNNNDMRF

SEQ ID NO: 575390 - protein, 16 aa, Homo sapiens
  CDR3 for beta chain variable domain of TCR clone 287695 (TRBV19, TRBJ2-2)
CASRSPGTGATGELFF

SEQ ID NO: 575391 - protein, 15 aa, Homo sapiens
  CDR3 for alpha chain variable domain of TCR clone 287696 (TRAV34, TRAJ38)
CGADFTPGNKRKLIW

SEQ ID NO: 575392 - protein, 16 aa, Homo sapiens
  CDR3 for beta chain variable domain of TCR clone 287696 (TRBV12-5, TRBJ2-5)
CASGPRTSGNQETQYF

SEQ ID NO: 575393 - protein, 14 aa, Homo sapiens
  CDR3 for alpha chain variable domain of TCR clone 287697 (TRAV35, TRAJ53)
CAGNSGGSNYKMTF

SEQ ID NO: 575394 - protein, 11 aa, Homo sapiens
  CDR3 for beta chain variable domain of TCR clone 287697 (TRBV4-1, TRBJ1-4)
CASKENEKLFF

SEQ ID NO: 575395 - protein, 15 aa, Homo sapiens
  CDR3 for alpha chain variable domain of TCR clone 287698 (TRAV17, TRAJ57)
CATGPSQGGFEKLVF

SEQ ID NO: 575396 - protein, 16 aa, Homo sapiens
  CDR3 for beta chain variable domain of TCR clone 287698 (TRBV12-4, TRBJ1-5)
CASSRPVGGSNQPQHF

SEQ ID NO: 575397 - protein, 15 aa, Homo sapiens
  CDR3 for alpha chain variable domain of TCR clone 287699 (TRAV25, TRAJ52)
CAGRPGGTSYGKLTF

SEQ ID NO: 575398 - protein, 17 aa, Homo sapiens
  CDR3 for beta chain variable domain of TCR clone 287699 (TRBV7-8, TRBJ2-6)
CASSAGKGGAGANVLTF

SEQ ID NO: 575399 - protein, 12 aa, Homo sapiens
  CDR3 for alpha chain variable domain of TCR clone 287700 (TRAV12-2, TRAJ10)
WGVTGGGNKLTF

SEQ ID NO: 575400 - protein, 20 aa, Homo sapiens
  CDR3 for beta chain variable domain of TCR clone 287700 (TRBV19, TRBJ2-1)
WASSISRTVTSTRLNNEQFF

SEQ ID NO: 575401 - protein, 14 aa, Homo sapiens
  CDR3 for alpha chain variable domain of TCR clone 287701 (TRAV23/DV6, TRAJ10)
CAAAISGGGNKLTL

SEQ ID NO: 575402 - protein, 12 aa, Homo sapiens
  CDR3 for beta chain variable domain of TCR clone 287701 (TRBV28, TRBJ2-7)
CASSVPPYEQYF

SEQ ID NO: 575403 - protein, 17 aa, Homo sapiens
  CDR3 for alpha chain variable domain of TCR clone 287702 (TRAV14/DV4, TRAJ28)
CAMREVSSGAGSYQPTF

SEQ ID NO: 575404 - protein, 15 aa, Homo sapiens
  CDR3 for beta chain variable domain of TCR clone 287702 (TRBV11-2, TRBJ1-6)
CASTLRETGNSPLHF

SEQ ID NO: 575405 - protein, 14 aa, Homo sapiens
  CDR3 for alpha chain variable domain of TCR clone 287703 (TRAV12-2, TRAJ32)
CAHPESGATNKLIF

SEQ ID NO: 575406 - protein, 13 aa, Homo sapiens
  CDR3 for beta chain variable domain of TCR clone 287703 (TRBV4-2, TRBJ2-3)
CQQRNQSPGMQYF

SEQ ID NO: 575407 - protein, 14 aa, Homo sapiens
  CDR3 for alpha chain variable domain of TCR clone 287704 (TRAV1-2, TRAJ8)
CAVREDTGFQKLVF

SEQ ID NO: 575408 - protein, 14 aa, Homo sapiens
  CDR3 for beta chain variable domain of TCR clone 287704 (TRBV4-1, TRBJ1-6)
CASSPGSDSSPLHF

SEQ ID NO: 575409 - protein, 13 aa, Homo sapiens
  CDR3 for alpha chain variable domain of TCR clone 287705 (TRAV38-1, TRAJ20)
CAFMKPNDYKLSF

SEQ ID NO: 575410 - protein, 13 aa, Homo sapiens
  CDR3 for beta chain variable domain of TCR clone 287705 (TRBV24-1, TRBJ1-4)
CATNNGRSEKLFF

SEQ ID NO: 575411 - protein, 13 aa, Homo sapiens
  CDR3 for alpha chain variable domain of TCR clone 287706 (TRAV29/DV5, TRAJ33)
CAASVDSNYQLIW

SEQ ID NO: 575412 - protein, 13 aa, Homo sapiens
  CDR3 for beta chain variable domain of TCR clone 287706 (TRBV5-1, TRBJ1-5)
CASSLGSNQPQHF

SEQ ID NO: 575413 - protein, 13 aa, Homo sapiens
  CDR3 for alpha chain variable domain of TCR clone 287707 (TRAV36/DV7, TRAJ37)
CAVFSSNPGNLIF

SEQ ID NO: 575414 - protein, 15 aa, Homo sapiens
  CDR3 for beta chain variable domain of TCR clone 287707 (TRBV5-1, TRBJ2-2)
CASSSQGGNTGELFF

SEQ ID NO: 575415 - protein, 13 aa, Homo sapiens
  CDR3 for alpha chain variable domain of TCR clone 287708 (TRAV25, TRAJ30)
CAGRLDRDDKIIF

SEQ ID NO: 575416 - protein, 17 aa, Homo sapiens
  CDR3 for beta chain variable domain of TCR clone 287708 (TRBV7-9, TRBJ2-6)
CTSSFGAGYSGANVLTF

SEQ ID NO: 575417 - protein, 12 aa, Homo sapiens
  CDR3 for alpha chain variable domain of TCR clone 287709 (TRAV14/DV4, TRAJ43)
CAMREGLNDMRF

SEQ ID NO: 575418 - protein, 12 aa, Homo sapiens
  CDR3 for beta chain variable domain of TCR clone 287709 (TRBV7-8, TRBJ2-7)
CASSLGDREQYL

SEQ ID NO: 575419 - protein, 13 aa, Homo sapiens
  CDR3 for alpha chain variable domain of TCR clone 287710 (TRAV3, TRAJ20)
CAVRDTPRYKLSF

SEQ ID NO: 575420 - protein, 15 aa, Homo sapiens
  CDR3 for beta chain variable domain of TCR clone 287710 (TRBV6-1, TRBJ2-1)
CASSELRGQYNEQFF

SEQ ID NO: 575421 - protein, 13 aa, Homo sapiens
  CDR3 for alpha chain variable domain of TCR clone 287711 (TRAV36/DV7, TRAJ34)
CAVGEVNTDKLIF

SEQ ID NO: 575422 - protein, 14 aa, Homo sapiens
  CDR3 for beta chain variable domain of TCR clone 287711 (TRBV19, TRBJ2-1)
CASPTFVLSGEQFF

SEQ ID NO: 575423 - protein, 16 aa, Homo sapiens
  CDR3 for alpha chain variable domain of TCR clone 287712 (TRAV13-2, TRAJ37)
CAENIRGSSNTGKLIF

SEQ ID NO: 575424 - protein, 13 aa, Homo sapiens
  CDR3 for beta chain variable domain of TCR clone 287712 (TRBV7-9, TRBJ1-2)
CASSLKQNYGYTF

SEQ ID NO: 575425 - protein, 13 aa, Homo sapiens
  CDR3 for alpha chain variable domain of TCR clone 287713 (TRAV12-3, TRAJ4)
CNEQAGGYNKLIF

SEQ ID NO: 575426 - protein, 17 aa, Homo sapiens
  CDR3 for beta chain variable domain of TCR clone 287713 (TRBV5-1, TRBJ1-1)
CASSLSDLGGLKLSLDK

SEQ ID NO: 575427 - protein, 16 aa, Homo sapiens
  CDR3 for alpha chain variable domain of TCR clone 287714 (TRAV23/DV6, TRAJ57)
CAASSTLSQGGSEKLF

SEQ ID NO: 575428 - protein, 16 aa, Homo sapiens
  CDR3 for beta chain variable domain of TCR clone 287714 (TRBV5-4, TRBJ2-3)
CASQQPGAGGADTQYF

SEQ ID NO: 575429 - protein, 16 aa, Homo sapiens
  CDR3 for alpha chain variable domain of TCR clone 287715 (TRAV30, TRAJ24)
CGTEIADADSWGKFQF

SEQ ID NO: 575430 - protein, 14 aa, Homo sapiens
  CDR3 for beta chain variable domain of TCR clone 287715 (TRBV7-9, TRBJ2-4)
CASSLAMGGNIQYF

SEQ ID NO: 575431 - protein, 14 aa, Homo sapiens
  CDR3 for alpha chain variable domain of TCR clone 287716 (TRAV12-1, TRAJ17)
CVVNYKAEGNKLTF

SEQ ID NO: 575432 - protein, 15 aa, Homo sapiens
  CDR3 for beta chain variable domain of TCR clone 287716 (TRBV19, TRBJ1-1)
CASTSGQIQNTEAFF

SEQ ID NO: 575433 - protein, 13 aa, Homo sapiens
  CDR3 for alpha chain variable domain of TCR clone 287717 (TRAV21, TRAJ37)
CAVSSGNTGKLIF

SEQ ID NO: 575434 - protein, 17 aa, Homo sapiens
  CDR3 for beta chain variable domain of TCR clone 287717 (TRBV5-1, TRBJ2-5)
CASSLLGLAANPETQYF

SEQ ID NO: 575435 - protein, 13 aa, Homo sapiens
  CDR3 for alpha chain variable domain of TCR clone 287718 (TRAV12-1, TRAJ21)
CVVTLYNFNKFYF

SEQ ID NO: 575436 - protein, 20 aa, Homo sapiens
  CDR3 for beta chain variable domain of TCR clone 287718 (TRBV7-8, TRBJ2-1)
CAGSLAHRLAGVRSYNEQFF

SEQ ID NO: 575437 - protein, 15 aa, Homo sapiens
  CDR3 for alpha chain variable domain of TCR clone 287719 (TRAV35, TRAJ23)
CARPLGNNQGVKLIF

SEQ ID NO: 575438 - protein, 14 aa, Homo sapiens
  CDR3 for beta chain variable domain of TCR clone 287719 (TRBV7-9, TRBJ1-1)
CASTPLQSYTEAFF

SEQ ID NO: 575439 - protein, 14 aa, Homo sapiens
  CDR3 for alpha chain variable domain of TCR clone 287720 (TRAV12-1, TRAJ22)
WLAFSSGSSRQLTF

SEQ ID NO: 575440 - protein, 13 aa, Homo sapiens
  CDR3 for beta chain variable domain of TCR clone 287720 (TRBV15, TRBJ1-6)
CATPGGLNSPLHF

SEQ ID NO: 575441 - protein, 12 aa, Homo sapiens
  CDR3 for alpha chain variable domain of TCR clone 287721 (TRAV12-3, TRAJ17)
CAMTLTGNKLTF

SEQ ID NO: 575442 - protein, 14 aa, Homo sapiens
  CDR3 for beta chain variable domain of TCR clone 287721 (TRBV5-1, TRBJ1-2)
CASSPPGPHYGYTF

SEQ ID NO: 575443 - protein, 16 aa, Homo sapiens
  CDR3 for alpha chain variable domain of TCR clone 287722 (TRAV1-1, TRAJ28)
CAVRDDSGAGSYQLTF

SEQ ID NO: 575444 - protein, 14 aa, Homo sapiens
  CDR3 for beta chain variable domain of TCR clone 287722 (TRBV7-3, TRBJ2-2)
CASSSGGYTGELFF

SEQ ID NO: 575445 - protein, 14 aa, Homo sapiens
  CDR3 for alpha chain variable domain of TCR clone 287723 (TRAV38-1, TRAJ40)
CALRPTSGTYKYIF

SEQ ID NO: 575446 - protein, 14 aa, Homo sapiens
  CDR3 for beta chain variable domain of TCR clone 287723 (TRBV19, TRBJ2-1)
CASPTFVLRGEQFF

SEQ ID NO: 575447 - protein, 10 aa, Homo sapiens
  CDR3 for alpha chain variable domain of TCR clone 287724 (TRAV1-2, TRAJ23)
CAGQGGKLIF

SEQ ID NO: 575448 - protein, 18 aa, Homo sapiens
  CDR3 for beta chain variable domain of TCR clone 287724 (TRBV11-2, TRBJ1-1)
CASSLRQGENTRKLSLDK

SEQ ID NO: 575449 - protein, 17 aa, Homo sapiens
  CDR3 for alpha chain variable domain of TCR clone 287725 (TRAV13-1, TRAJ52)
CAAGRNAGGTSYGKLTF

SEQ ID NO: 575450 - protein, 12 aa, Homo sapiens
  CDR3 for beta chain variable domain of TCR clone 287725 (TRBV25-1, TRBJ2-6)
CARGGGANVLTF

SEQ ID NO: 575451 - protein, 15 aa, Homo sapiens
  CDR3 for alpha chain variable domain of TCR clone 287726 (TRAV35, TRAJ33)
CAGQPPRYSNYQLIW

SEQ ID NO: 575452 - protein, 14 aa, Homo sapiens
  CDR3 for beta chain variable domain of TCR clone 287726 (TRBV11-2, TRBJ2-3)
CASSRLARTDTQYF

SEQ ID NO: 575453 - protein, 14 aa, Homo sapiens
  CDR3 for alpha chain variable domain of TCR clone 287727 (TRAV16, TRAJ32)
CSKRYGGATNKLIF

SEQ ID NO: 575454 - protein, 12 aa, Homo sapiens
  CDR3 for beta chain variable domain of TCR clone 287727 (TRBV7-9, TRBJ2-7)
SATRTDAYEQYF

SEQ ID NO: 575455 - protein, 12 aa, Homo sapiens
  CDR3 for alpha chain variable domain of TCR clone 287728 (TRAV13-2, TRAJ8)
CFYEHRLSETLF

SEQ ID NO: 575456 - protein, 15 aa, Homo sapiens
  CDR3 for beta chain variable domain of TCR clone 287728 (TRBV19, TRBJ2-3)
CAAGDTNAPNDTQYS

SEQ ID NO: 575457 - protein, 15 aa, Homo sapiens
  CDR3 for alpha chain variable domain of TCR clone 287729 (TRAV8-3, TRAJ45)
CASSYSGGGADGLTF

SEQ ID NO: 575458 - protein, 15 aa, Homo sapiens
  CDR3 for beta chain variable domain of TCR clone 287729 (TRBV27, TRBJ1-4)
CASSPRHATNERLFF

SEQ ID NO: 575459 - protein, 14 aa, Homo sapiens
  CDR3 for alpha chain variable domain of TCR clone 287730 (TRAV2, TRAJ37)
CAVDFTSNTGKLIF

SEQ ID NO: 575460 - protein, 15 aa, Homo sapiens
  CDR3 for beta chain variable domain of TCR clone 287730 (TRBV20-1, TRBJ1-1)
CTASRGVTGNTAAFF

SEQ ID NO: 575461 - protein, 14 aa, Homo sapiens
  CDR3 for alpha chain variable domain of TCR clone 287731 (TRAV12-3, TRAJ33)
CAMSEEDSNYQLIW

SEQ ID NO: 575462 - protein, 14 aa, Homo sapiens
  CDR3 for beta chain variable domain of TCR clone 287731 (TRBV12-4, TRBJ1-1)
CASSSARGYTEAFF

SEQ ID NO: 575463 - protein, 16 aa, Homo sapiens
  CDR3 for alpha chain variable domain of TCR clone 287732 (TRAV17, TRAJ52)
CATSNAGGTIYGKLTF

SEQ ID NO: 575464 - protein, 13 aa, Homo sapiens
  CDR3 for beta chain variable domain of TCR clone 287732 (TRBV27, TRBJ1-6)
CASSLVLVSPLHF

SEQ ID NO: 575465 - protein, 13 aa, Homo sapiens
  CDR3 for alpha chain variable domain of TCR clone 287733 (TRAV2, TRAJ40)
CAVVTSGTYKYIF

SEQ ID NO: 575466 - protein, 14 aa, Homo sapiens
  CDR3 for beta chain variable domain of TCR clone 287733 (TRBV18, TRBJ1-2)
RVAIFLCANYGYTF

SEQ ID NO: 575467 - protein, 13 aa, Homo sapiens
  CDR3 for alpha chain variable domain of TCR clone 287734 (TRAV20, TRAJ54)
CAVQAGGDQKLVF

SEQ ID NO: 575468 - protein, 14 aa, Homo sapiens
  CDR3 for beta chain variable domain of TCR clone 287734 (TRBV20-1, TRBJ2-7)
CSAKTGTGGYEQYF

SEQ ID NO: 575469 - protein, 11 aa, Homo sapiens
  CDR3 for alpha chain variable domain of TCR clone 287735 (TRAV21, TRAJ34)
CAVTNTDNHIF

SEQ ID NO: 575470 - protein, 17 aa, Homo sapiens
  CDR3 for beta chain variable domain of TCR clone 287735 (TRBV20-1, TRBJ2-1)
CSARSPSGGPPTMSSSS

SEQ ID NO: 575471 - protein, 15 aa, Homo sapiens
  CDR3 for alpha chain variable domain of TCR clone 287736 (TRAV23/DV6, TRAJ18)
CAARYRGSTLGGLYL

SEQ ID NO: 575472 - protein, 16 aa, Homo sapiens
  CDR3 for beta chain variable domain of TCR clone 287736 (TRBV20-1, TRBJ1-2)
CSASMGQGVANYGYTF

SEQ ID NO: 575473 - protein, 14 aa, Homo sapiens
  CDR3 for alpha chain variable domain of TCR clone 287737 (TRAV12-2, TRAJ40)
CAVKIPSGPYKYIF

SEQ ID NO: 575474 - protein, 17 aa, Homo sapiens
  CDR3 for beta chain variable domain of TCR clone 287737 (TRBV13, TRBJ2-3)
CASSLSRVAGGRNTQYF

SEQ ID NO: 575475 - protein, 16 aa, Homo sapiens
  CDR3 for alpha chain variable domain of TCR clone 287738 (TRAV12-3, TRAJ53)
CAMSPGSGGGNYKMTF

SEQ ID NO: 575476 - protein, 11 aa, Homo sapiens
  CDR3 for beta chain variable domain of TCR clone 287738 (TRBV29-1, TRBJ2-5)
CSEDRTGTQYF

SEQ ID NO: 575477 - protein, 16 aa, Homo sapiens
  CDR3 for alpha chain variable domain of TCR clone 287739 (TRAV38-1, TRAJ32)
CAFMKGGGGATNKLIF

SEQ ID NO: 575478 - protein, 15 aa, Homo sapiens
  CDR3 for beta chain variable domain of TCR clone 287739 (TRBV11-3, TRBJ2-3)
CASLKDGREGDTQYF

SEQ ID NO: 575479 - protein, 18 aa, Homo sapiens
  CDR3 for alpha chain variable domain of TCR clone 287740 (TRAV17, TRAJ10)
CFLLLFYILTGGGNKLTF

SEQ ID NO: 575480 - protein, 18 aa, Homo sapiens
  CDR3 for beta chain variable domain of TCR clone 287740 (TRBV7-8, TRBJ2-1)
CASSPYLGQRGSNNEQFF

SEQ ID NO: 575481 - protein, 17 aa, Homo sapiens
  CDR3 for alpha chain variable domain of TCR clone 287741 (TRAV13-1, TRAJ52)
CAASPGAGCTSYGKLTF

SEQ ID NO: 575482 - protein, 15 aa, Homo sapiens
  CDR3 for beta chain variable domain of TCR clone 287741 (TRBV2, TRBJ2-1)
CASSELAGSYNEQFF

SEQ ID NO: 575483 - protein, 16 aa, Homo sapiens
  CDR3 for alpha chain variable domain of TCR clone 287742 (TRAV3, TRAJ37)
CAVRPRGSGNTGKLIF

SEQ ID NO: 575484 - protein, 15 aa, Homo sapiens
  CDR3 for beta chain variable domain of TCR clone 287742 (TRBV6-1, TRBJ2-3)
CASSERWDSTDTQYF

SEQ ID NO: 575485 - protein, 14 aa, Homo sapiens
  CDR3 for alpha chain variable domain of TCR clone 287743 (TRAV12-3, TRAJ10)
SHLPLTGGGNKLTF

SEQ ID NO: 575486 - protein, 14 aa, Homo sapiens
  CDR3 for beta chain variable domain of TCR clone 287743 (TRBV6-1, TRBJ1-3)
CASVQRGGGNTIYF

SEQ ID NO: 575487 - protein, 17 aa, Homo sapiens
  CDR3 for alpha chain variable domain of TCR clone 287744 (TRAV8-4, TRAJ10)
CAVSRPTLTGGGNKLTF

SEQ ID NO: 575488 - protein, 14 aa, Homo sapiens
  CDR3 for beta chain variable domain of TCR clone 287744 (TRBV18, TRBJ2-5)
CASSPGVSQETQYF

SEQ ID NO: 575489 - protein, 14 aa, Homo sapiens
  CDR3 for alpha chain variable domain of TCR clone 287745 (TRAV12-2, TRAJ44)
CAVNPAGTASKLTF

SEQ ID NO: 575490 - protein, 13 aa, Homo sapiens
  CDR3 for beta chain variable domain of TCR clone 287745 (TRBV20-1, TRBJ1-6)
CSAPWGVGSPLLF

SEQ ID NO: 575491 - protein, 15 aa, Homo sapiens
  CDR3 for alpha chain variable domain of TCR clone 287746 (TRAV26-1, TRAJ29)
CIVRVEGSGNTPLVF

SEQ ID NO: 575492 - protein, 14 aa, Homo sapiens
  CDR3 for beta chain variable domain of TCR clone 287746 (TRBV6-1, TRBJ1-3)
CASVQGGGGKTIYF

SEQ ID NO: 575493 - protein, 13 aa, Homo sapiens
  CDR3 for alpha chain variable domain of TCR clone 287747 (TRAV21, TRAJ27)
CAARPGNAGKSTF

SEQ ID NO: 575494 - protein, 15 aa, Homo sapiens
  CDR3 for beta chain variable domain of TCR clone 287747 (TRBV6-1, TRBJ2-3)
CAARRRGGITDTQYF

SEQ ID NO: 575495 - protein, 18 aa, Homo sapiens
  CDR3 for alpha chain variable domain of TCR clone 287748 (TRAV21, TRAJ52)
CAVRPSPAGGTSYGKLTF

SEQ ID NO: 575496 - protein, 11 aa, Homo sapiens
  CDR3 for beta chain variable domain of TCR clone 287748 (TRBV13, TRBJ2-2)
CASSPRTGEHT

SEQ ID NO: 575497 - protein, 14 aa, Homo sapiens
  CDR3 for alpha chain variable domain of TCR clone 287749 (TRAV1-2, TRAJ16)
CAVNRFSYGQKLLL

SEQ ID NO: 575498 - protein, 15 aa, Homo sapiens
  CDR3 for beta chain variable domain of TCR clone 287749 (TRBV9, TRBJ1-6)
CASSVAGTGDSPLHF

SEQ ID NO: 575499 - protein, 15 aa, Homo sapiens
  CDR3 for alpha chain variable domain of TCR clone 287750 (TRAV8-3, TRAJ27)
CAVGPSKTNAGKSTF

SEQ ID NO: 575500 - protein, 15 aa, Homo sapiens
  CDR3 for beta chain variable domain of TCR clone 287750 (TRBV7-6, TRBJ2-5)
CASSKPTGPQETQYF

SEQ ID NO: 575501 - protein, 13 aa, Homo sapiens
  CDR3 for alpha chain variable domain of TCR clone 287751 (TRAV12-1, TRAJ7)
CVVNMRGNNRLAF

SEQ ID NO: 575502 - protein, 15 aa, Homo sapiens
  CDR3 for beta chain variable domain of TCR clone 287751 (TRBV27, TRBJ2-3)
CASSLGLAATDTQYI

SEQ ID NO: 575503 - protein, 12 aa, Homo sapiens
  CDR3 for alpha chain variable domain of TCR clone 287752 (TRAV1-1, TRAJ9)
CAVDTGGFNTIF

SEQ ID NO: 575504 - protein, 16 aa, Homo sapiens
  CDR3 for beta chain variable domain of TCR clone 287752 (TRBV19, TRBJ2-2)
CASTIGARAGAGELFF

SEQ ID NO: 575505 - protein, 12 aa, Homo sapiens
  CDR3 for alpha chain variable domain of TCR clone 287753 (TRAV12-3, TRAJ17)
CAMTLTGNKLTF

SEQ ID NO: 575506 - protein, 13 aa, Homo sapiens
  CDR3 for beta chain variable domain of TCR clone 287753 (TRBV12-4, TRBJ1-1)
CASSLAGRAQAFF

SEQ ID NO: 575507 - protein, 14 aa, Homo sapiens
  CDR3 for alpha chain variable domain of TCR clone 287754 (TRAV1-1, TRAJ27)
CAVIYNTNAGKSTF

SEQ ID NO: 575508 - protein, 15 aa, Homo sapiens
  CDR3 for beta chain variable domain of TCR clone 287754 (TRBV6-3, TRBJ2-7)
CASSSPGTVYYEQYF

SEQ ID NO: 575509 - protein, 16 aa, Homo sapiens
  CDR3 for alpha chain variable domain of TCR clone 287755 (TRAV23/DV6, TRAJ21)
CAASSGGGTTSTNFTL

SEQ ID NO: 575510 - protein, 13 aa, Homo sapiens
  CDR3 for beta chain variable domain of TCR clone 287755 (TRBV7-8, TRBJ1-1)
CASSQDWGAEAFF

SEQ ID NO: 575511 - protein, 16 aa, Homo sapiens
  CDR3 for alpha chain variable domain of TCR clone 287756 (TRAV30, TRAJ24)
CGTEIVDADSCRKFQF

SEQ ID NO: 575512 - protein, 13 aa, Homo sapiens
  CDR3 for beta chain variable domain of TCR clone 287756 (TRBV12-4, TRBJ1-2)
CASSLRQGKGYTF

SEQ ID NO: 575513 - protein, 16 aa, Homo sapiens
  CDR3 for alpha chain variable domain of TCR clone 287757 (TRAV16, TRAJ52)
CALSGVGGTSYGKLTF

SEQ ID NO: 575514 - protein, 14 aa, Homo sapiens
  CDR3 for beta chain variable domain of TCR clone 287757 (TRBV19, TRBJ1-2)
CASSIQGQAYGYTF

SEQ ID NO: 575515 - protein, 12 aa, Homo sapiens
  CDR3 for alpha chain variable domain of TCR clone 287758 (TRAV12-1, TRAJ40)
CVAYSGTYKYIF

SEQ ID NO: 575516 - protein, 16 aa, Homo sapiens
  CDR3 for beta chain variable domain of TCR clone 287758 (TRBV13, TRBJ2-2)
CASSPRTGEHTGELFF

SEQ ID NO: 575517 - protein, 13 aa, Homo sapiens
  CDR3 for alpha chain variable domain of TCR clone 287759 (TRAV8-6, TRAJ49)
CAVITNTGNQFYF

SEQ ID NO: 575518 - protein, 14 aa, Homo sapiens
  CDR3 for beta chain variable domain of TCR clone 287759 (TRBV19, TRBJ2-1)
CAGPTFVLSGEQFF

SEQ ID NO: 575519 - protein, 14 aa, Homo sapiens
  CDR3 for alpha chain variable domain of TCR clone 287760 (TRAV2, TRAJ9)
CAVEDRSGGFKPIF

SEQ ID NO: 575520 - protein, 14 aa, Homo sapiens
  CDR3 for beta chain variable domain of TCR clone 287760 (TRBV7-3, TRBJ2-1)
CASSLAGGTNEQFF

SEQ ID NO: 575521 - protein, 13 aa, Homo sapiens
  CDR3 for alpha chain variable domain of TCR clone 287761 (TRAV21, TRAJ10)
CAVATGGGNKLTF

SEQ ID NO: 575522 - protein, 22 aa, Homo sapiens
  CDR3 for beta chain variable domain of TCR clone 287761 (TRBV19, TRBJ2-1)
CASSVRDRVTGTSGRIYNEQFF

SEQ ID NO: 575523 - protein, 13 aa, Homo sapiens
  CDR3 for alpha chain variable domain of TCR clone 287762 (TRAV21, TRAJ15)
CAVANQAGTALIF

SEQ ID NO: 575524 - protein, 16 aa, Homo sapiens
  CDR3 for beta chain variable domain of TCR clone 287762 (TRBV7-7, TRBJ2-1)
CASSLASGTSYNEQFF

SEQ ID NO: 575525 - protein, 14 aa, Homo sapiens
  CDR3 for alpha chain variable domain of TCR clone 287763 (TRAV26-1, TRAJ44)
CIARTTGTASKLTF

SEQ ID NO: 575526 - protein, 16 aa, Homo sapiens
  CDR3 for beta chain variable domain of TCR clone 287763 (TRBV12-5, TRBJ2-5)
CASGPRTSGNQETQYF

SEQ ID NO: 575527 - protein, 13 aa, Homo sapiens
  CDR3 for alpha chain variable domain of TCR clone 287764 (TRAV26-1, TRAJ33)
CIVRVKGNYPLIW

SEQ ID NO: 575528 - protein, 16 aa, Homo sapiens
  CDR3 for beta chain variable domain of TCR clone 287764 (TRBV15, TRBJ2-7)
CATSRDRGRRRGEQYF

SEQ ID NO: 575529 - protein, 13 aa, Homo sapiens
  CDR3 for alpha chain variable domain of TCR clone 287765 (TRAV30, TRAJ24)
CGTVTDSWGKLQC

SEQ ID NO: 575530 - protein, 14 aa, Homo sapiens
  CDR3 for beta chain variable domain of TCR clone 287765 (TRBV6-3, TRBJ2-2)
CASTYTPDTGELFF

SEQ ID NO: 575531 - protein, 11 aa, Homo sapiens
  CDR3 for alpha chain variable domain of TCR clone 287766 (TRAV12-3, TRAJ43)
CAMSVSNDMRF

SEQ ID NO: 575532 - protein, 14 aa, Homo sapiens
  CDR3 for beta chain variable domain of TCR clone 287766 (TRBV25-1, TRBJ2-5)
CASSESTGRETQYF

SEQ ID NO: 575533 - protein, 12 aa, Homo sapiens
  CDR3 for alpha chain variable domain of TCR clone 287767 (TRAV12-3, TRAJ5)
CAMDTGRRALTF

SEQ ID NO: 575534 - protein, 13 aa, Homo sapiens
  CDR3 for beta chain variable domain of TCR clone 287767 (TRBV4-1, TRBJ2-1)
CASSQEVQYEQFF

SEQ ID NO: 575535 - protein, 16 aa, Homo sapiens
  CDR3 for alpha chain variable domain of TCR clone 287768 (TRAV3, TRAJ10)
CAVRDMNAGGGNKLTF

SEQ ID NO: 575536 - protein, 13 aa, Homo sapiens
  CDR3 for beta chain variable domain of TCR clone 287768 (TRBV7-2, TRBJ2-2)
CASSLAVTGELFF

SEQ ID NO: 575537 - protein, 15 aa, Homo sapiens
  CDR3 for alpha chain variable domain of TCR clone 287769 (TRAV20, TRAJ41)
CAVQANSNSGYALNF

SEQ ID NO: 575538 - protein, 18 aa, Homo sapiens
  CDR3 for beta chain variable domain of TCR clone 287769 (TRBV7-9, TRBJ2-7)
RASSLTTSGSRTWYEQFF

SEQ ID NO: 575539 - protein, 16 aa, Homo sapiens
  CDR3 for alpha chain variable domain of TCR clone 287770 (TRAV3, TRAJ18)
CAVRDGRGSTLGRLYF

SEQ ID NO: 575540 - protein, 17 aa, Homo sapiens
  CDR3 for beta chain variable domain of TCR clone 287770 (TRBV5-1, TRBJ2-3)
CASSKIGIADRTDTQYF

SEQ ID NO: 575541 - protein, 13 aa, Homo sapiens
  CDR3 for alpha chain variable domain of TCR clone 287771 (TRAV35, TRAJ36)
CAGHRIGANNLFF

SEQ ID NO: 575542 - protein, 15 aa, Homo sapiens
  CDR3 for beta chain variable domain of TCR clone 287771 (TRBV20-1, TRBJ2-7)
CSARDRVSGMDEQYF

SEQ ID NO: 575543 - protein, 11 aa, Homo sapiens
  CDR3 for alpha chain variable domain of TCR clone 287772 (TRAV2, TRAJ13)
CASGGYQKVTF

SEQ ID NO: 575544 - protein, 14 aa, Homo sapiens
  CDR3 for beta chain variable domain of TCR clone 287772 (TRBV7-7, TRBJ2-2)
CASSKGENTGELFF

SEQ ID NO: 575545 - protein, 11 aa, Homo sapiens
  CDR3 for alpha chain variable domain of TCR clone 287773 (TRAV2, TRAJ13)
CASGDYQKVTF

SEQ ID NO: 575546 - protein, 17 aa, Homo sapiens
  CDR3 for beta chain variable domain of TCR clone 287773 (TRBV20-1, TRBJ2-2)
CSASGSGQGGLTGELFF

SEQ ID NO: 575547 - protein, 13 aa, Homo sapiens
  CDR3 for alpha chain variable domain of TCR clone 287774 (TRAV8-6, TRAJ54)
CAVSEEGAQKLVF

SEQ ID NO: 575548 - protein, 14 aa, Homo sapiens
  CDR3 for beta chain variable domain of TCR clone 287774 (TRBV7-8, TRBJ2-3)
CASSLEAGTDTQYF

SEQ ID NO: 575549 - protein, 17 aa, Homo sapiens
  CDR3 for alpha chain variable domain of TCR clone 287775 (TRAV8-6, TRAJ58)
CAVSSWVGETSGSRLTF

SEQ ID NO: 575550 - protein, 18 aa, Homo sapiens
  CDR3 for beta chain variable domain of TCR clone 287775 (TRBV20-1, TRBJ2-6)
CSAETTPTHGSGANGLTF

SEQ ID NO: 575551 - protein, 17 aa, Homo sapiens
  CDR3 for alpha chain variable domain of TCR clone 287776 (TRAV3, TRAJ42)
CAVRDRDYGGSQGNLIF

SEQ ID NO: 575552 - protein, 15 aa, Homo sapiens
  CDR3 for beta chain variable domain of TCR clone 287776 (TRBV6-6, TRBJ2-7)
CASSYSYAGSYEQYF

SEQ ID NO: 575553 - protein, 10 aa, Homo sapiens
  CDR3 for alpha chain variable domain of TCR clone 287777 (TRAV30, TRAJ32)
CGPEKDMVVL

SEQ ID NO: 575554 - protein, 13 aa, Homo sapiens
  CDR3 for beta chain variable domain of TCR clone 287777 (TRBV10-3, TRBJ2-7)
CASKLAVNYEQYF

SEQ ID NO: 575555 - protein, 16 aa, Homo sapiens
  CDR3 for alpha chain variable domain of TCR clone 287778 (TRAV30, TRAJ24)
CGTEMVDAYSWGKFQV

SEQ ID NO: 575556 - protein, 14 aa, Homo sapiens
  CDR3 for beta chain variable domain of TCR clone 287778 (TRBV12-5, TRBJ2-5)
CASGSRTHQETQYF

SEQ ID NO: 575557 - protein, 15 aa, Homo sapiens
  CDR3 for alpha chain variable domain of TCR clone 287779 (TRAV13-2, TRAJ24)
CAEILTTDSWGKLQF

SEQ ID NO: 575558 - protein, 20 aa, Homo sapiens
  CDR3 for beta chain variable domain of TCR clone 287779 (TRBV6-9, TRBJ1-3)
CASSWDRRRNLLNAGNTIYF

SEQ ID NO: 575559 - protein, 13 aa, Homo sapiens
  CDR3 for alpha chain variable domain of TCR clone 287780 (TRAV19, TRAJ57)
CALLQGGSEKLVF

SEQ ID NO: 575560 - protein, 20 aa, Homo sapiens
  CDR3 for beta chain variable domain of TCR clone 287780 (TRBV28, TRBJ2-1)
CASTPIGRSPGLAGGNEQFF

SEQ ID NO: 575561 - protein, 14 aa, Homo sapiens
  CDR3 for alpha chain variable domain of TCR clone 287781 (TRAV12-2, TRAJ17)
CAVLFKAAGNKLNF

SEQ ID NO: 575562 - protein, 14 aa, Homo sapiens
  CDR3 for beta chain variable domain of TCR clone 287781 (TRBV25-1, TRBJ1-1)
CASTHLGGNTEAFF

SEQ ID NO: 575563 - protein, 12 aa, Homo sapiens
  CDR3 for alpha chain variable domain of TCR clone 287782 (TRAV38-1, TRAJ32)
SAPLGATNKPIF

SEQ ID NO: 575564 - protein, 14 aa, Homo sapiens
  CDR3 for beta chain variable domain of TCR clone 287782 (TRBV29-1, TRBJ2-5)
CSVETSGSGETQYF

SEQ ID NO: 575565 - protein, 14 aa, Homo sapiens
  CDR3 for alpha chain variable domain of TCR clone 287783 (TRAV26-2, TRAJ11)
CIPRLNSGYSTLTF

SEQ ID NO: 575566 - protein, 16 aa, Homo sapiens
  CDR3 for beta chain variable domain of TCR clone 287783 (TRBV12-5, TRBJ2-5)
CASGPRTSGNQETQYF

SEQ ID NO: 575567 - protein, 20 aa, Homo sapiens
  CDR3 for alpha chain variable domain of TCR clone 287784 (TRAV1-1, TRAJ39)
CLFLLRCESSAYNAGNMLTF

SEQ ID NO: 575568 - protein, 13 aa, Homo sapiens
  CDR3 for beta chain variable domain of TCR clone 287784 (TRBV12-4, TRBJ1-5)
CASSPDRAQPQHF

SEQ ID NO: 575569 - protein, 16 aa, Homo sapiens
  CDR3 for alpha chain variable domain of TCR clone 287785 (TRAV38-1, TRAJ45)
CAFMKGSGGGADGLTF

SEQ ID NO: 575570 - protein, 15 aa, Homo sapiens
  CDR3 for beta chain variable domain of TCR clone 287785 (TRBV20-1, TRBJ2-7)
CSAREGRESLYEQYF

SEQ ID NO: 575571 - protein, 16 aa, Homo sapiens
  CDR3 for alpha chain variable domain of TCR clone 287786 (TRAV3, TRAJ37)
CAVRGKGSGNTGKLCF

SEQ ID NO: 575572 - protein, 21 aa, Homo sapiens
  CDR3 for beta chain variable domain of TCR clone 287786 (TRBV15, TRBJ2-1)
AWGTQPCTCVPPAEVDTARFF

SEQ ID NO: 575573 - protein, 16 aa, Homo sapiens
  CDR3 for alpha chain variable domain of TCR clone 287787 (TRAV8-2, TRAJ45)
CVVSEGTGGGADGLTF

SEQ ID NO: 575574 - protein, 15 aa, Homo sapiens
  CDR3 for beta chain variable domain of TCR clone 287787 (TRBV7-9, TRBJ2-5)
GASSLVAGGLETQYF

SEQ ID NO: 575575 - protein, 14 aa, Homo sapiens
  CDR3 for alpha chain variable domain of TCR clone 287788 (TRAV29/DV5, TRAJ36)
CAARRKTGANNLFF

SEQ ID NO: 575576 - protein, 13 aa, Homo sapiens
  CDR3 for beta chain variable domain of TCR clone 287788 (TRBV29-1, TRBJ1-3)
CSADVYSGNTIYF

SEQ ID NO: 575577 - protein, 12 aa, Homo sapiens
  CDR3 for alpha chain variable domain of TCR clone 287789 (TRAV1-2, TRAJ29)
CAVPPGNTPLVF

SEQ ID NO: 575578 - protein, 12 aa, Homo sapiens
  CDR3 for beta chain variable domain of TCR clone 287789 (TRBV12-4, TRBJ2-7)
CASSLGGYEQYF

SEQ ID NO: 575579 - protein, 14 aa, Homo sapiens
  CDR3 for alpha chain variable domain of TCR clone 287790 (TRAV12-2, TRAJ45)
CAVNIGGGADGLAF

SEQ ID NO: 575580 - protein, 19 aa, Homo sapiens
  CDR3 for beta chain variable domain of TCR clone 287790 (TRBV13, TRBJ2-6)
CASSLVHRDRGAGANVLTF

SEQ ID NO: 575581 - protein, 13 aa, Homo sapiens
  CDR3 for alpha chain variable domain of TCR clone 287791 (TRAV13-1, TRAJ5)
CAAEHTGRRALTF

SEQ ID NO: 575582 - protein, 13 aa, Homo sapiens
  CDR3 for beta chain variable domain of TCR clone 287791 (TRBV2, TRBJ1-4)
CASSRGTNEKLFF

SEQ ID NO: 575583 - protein, 12 aa, Homo sapiens
  CDR3 for alpha chain variable domain of TCR clone 287792 (TRAV12-2, TRAJ52)
IGGGTSYGKLTF

SEQ ID NO: 575584 - protein, 14 aa, Homo sapiens
  CDR3 for beta chain variable domain of TCR clone 287792 (TRBV12-5, TRBJ2-5)
CASGSRTHQETQYF

SEQ ID NO: 575585 - protein, 12 aa, Homo sapiens
  CDR3 for alpha chain variable domain of TCR clone 287793 (TRAV12-2, TRAJ10)
WGVTGGGNKLTF

SEQ ID NO: 575586 - protein, 16 aa, Homo sapiens
  CDR3 for beta chain variable domain of TCR clone 287793 (TRBV19, TRBJ1-1)
CASSPTRFWPGTEAFF

SEQ ID NO: 575587 - protein, 15 aa, Homo sapiens
  CDR3 for alpha chain variable domain of TCR clone 287794 (TRAV27, TRAJ38)
CAARRNAGNNRKLIW

SEQ ID NO: 575588 - protein, 14 aa, Homo sapiens
  CDR3 for beta chain variable domain of TCR clone 287794 (TRBV6-1, TRBJ1-3)
RASVQGGGGNTIYF

SEQ ID NO: 575589 - protein, 16 aa, Homo sapiens
  CDR3 for alpha chain variable domain of TCR clone 287795 (TRAV16, TRAJ42)
CARKMNYGGSQGNLIF

SEQ ID NO: 575590 - protein, 14 aa, Homo sapiens
  CDR3 for beta chain variable domain of TCR clone 287795 (TRBV20-1, TRBJ2-1)
CSALDRGTYNEQFF

SEQ ID NO: 575591 - protein, 11 aa, Homo sapiens
  CDR3 for alpha chain variable domain of TCR clone 287796 (TRAV35, TRAJ22)
CAGPGVGQLTF

SEQ ID NO: 575592 - protein, 18 aa, Homo sapiens
  CDR3 for beta chain variable domain of TCR clone 287796 (TRBV7-9, TRBJ2-7)
CASSLTTSGSRTWYEQYF

SEQ ID NO: 575593 - protein, 15 aa, Homo sapiens
  CDR3 for alpha chain variable domain of TCR clone 287797 (TRAV3, TRAJ36)
CAVRASQTGANNLFF

SEQ ID NO: 575594 - protein, 19 aa, Homo sapiens
  CDR3 for beta chain variable domain of TCR clone 287797 (TRBV28, TRBJ2-4)
CASSFQPGGPAHSKNIQYF

SEQ ID NO: 575595 - protein, 17 aa, Homo sapiens
  CDR3 for alpha chain variable domain of TCR clone 287798 (TRAV16, TRAJ58)
FITFLSNGETIGSRLTF

SEQ ID NO: 575596 - protein, 13 aa, Homo sapiens
  CDR3 for beta chain variable domain of TCR clone 287798 (TRBV20-1, TRBJ2-2)
CSASAAGTGELFF

SEQ ID NO: 575597 - protein, 14 aa, Homo sapiens
  CDR3 for alpha chain variable domain of TCR clone 287799 (TRAV1-2, TRAJ16)
CAVNRFSDGQKLLF

SEQ ID NO: 575598 - protein, 14 aa, Homo sapiens
  CDR3 for beta chain variable domain of TCR clone 287799 (TRBV12-4, TRBJ1-1)
CASSLGIGGTEAFF

SEQ ID NO: 575599 - protein, 11 aa, Homo sapiens
  CDR3 for alpha chain variable domain of TCR clone 287800 (TRAV4, TRAJ23)
CLVAPGGKLIF

SEQ ID NO: 575600 - protein, 15 aa, Homo sapiens
  CDR3 for beta chain variable domain of TCR clone 287800 (TRBV11-2, TRBJ2-1)
CASSLGTSGLNEQFF

SEQ ID NO: 575601 - protein, 11 aa, Homo sapiens
  CDR3 for alpha chain variable domain of TCR clone 287801 (TRAV1-2, TRAJ20)
CAVSNDYKLSF

SEQ ID NO: 575602 - protein, 16 aa, Homo sapiens
  CDR3 for beta chain variable domain of TCR clone 287801 (TRBV29-1, TRBJ2-6)
CSVEDITYSGANVPTF

SEQ ID NO: 575603 - protein, 15 aa, Homo sapiens
  CDR3 for alpha chain variable domain of TCR clone 287802 (TRAV26-1, TRAJ44)
CIVRIGTGTANKLTF

SEQ ID NO: 575604 - protein, 15 aa, Homo sapiens
  CDR3 for beta chain variable domain of TCR clone 287802 (TRBV7-6, TRBJ2-1)
CASSSLAGEGNEQFF

SEQ ID NO: 575605 - protein, 17 aa, Homo sapiens
  CDR3 for alpha chain variable domain of TCR clone 287803 (TRAV4, TRAJ13)
CLVGVQGSSGGYQKVTF

SEQ ID NO: 575606 - protein, 16 aa, Homo sapiens
  CDR3 for beta chain variable domain of TCR clone 287803 (TRBV12-4, TRBJ1-5)
CASRQPVEGSNQPQHF

SEQ ID NO: 575607 - protein, 18 aa, Homo sapiens
  CDR3 for alpha chain variable domain of TCR clone 287804 (TRAV20, TRAJ37)
CAGCSSNTQTNLWARDNF

SEQ ID NO: 575608 - protein, 11 aa, Homo sapiens
  CDR3 for beta chain variable domain of TCR clone 287804 (TRBV12-4, TRBJ2-3)
CASTATDTQYF

SEQ ID NO: 575609 - protein, 17 aa, Homo sapiens
  CDR3 for alpha chain variable domain of TCR clone 287805 (TRAV26-1, TRAJ58)
CIVRVGAEETSGSRLTF

SEQ ID NO: 575610 - protein, 18 aa, Homo sapiens
  CDR3 for beta chain variable domain of TCR clone 287805 (TRBV7-9, TRBJ2-7)
CASSLTTSGGRTWYEQYF

SEQ ID NO: 575611 - protein, 17 aa, Homo sapiens
  CDR3 for alpha chain variable domain of TCR clone 287806 (TRAV4, TRAJ18)
CLVGERSVGSTLGRLYF

SEQ ID NO: 575612 - protein, 16 aa, Homo sapiens
  CDR3 for beta chain variable domain of TCR clone 287806 (TRBV4-2, TRBJ1-1)
CASSPSPGRAATEAFF

SEQ ID NO: 575613 - protein, 13 aa, Homo sapiens
  CDR3 for alpha chain variable domain of TCR clone 287807 (TRAV21, TRAJ27)
CAAGPGNAGKSTF

SEQ ID NO: 575614 - protein, 14 aa, Homo sapiens
  CDR3 for beta chain variable domain of TCR clone 287807 (TRBV7-6, TRBJ2-3)
CASSLGTVTDAQYF

SEQ ID NO: 575615 - protein, 14 aa, Homo sapiens
  CDR3 for alpha chain variable domain of TCR clone 287808 (TRAV12-3, TRAJ10)
SHLPLTGGGNKLTF

SEQ ID NO: 575616 - protein, 13 aa, Homo sapiens
  CDR3 for beta chain variable domain of TCR clone 287808 (TRBV20-1, TRBJ1-6)
CSAPVGVGSPLHF

SEQ ID NO: 575617 - protein, 14 aa, Homo sapiens
  CDR3 for alpha chain variable domain of TCR clone 287809 (TRAV26-1, TRAJ34)
CIVRESYNTDKLIF

SEQ ID NO: 575618 - protein, 12 aa, Homo sapiens
  CDR3 for beta chain variable domain of TCR clone 287809 (TRBV19, TRBJ2-1)
CHLQGGIDEQFF

SEQ ID NO: 575619 - protein, 13 aa, Homo sapiens
  CDR3 for alpha chain variable domain of TCR clone 287810 (TRAV27, TRAJ43)
CAGAGNNNNDMRF

SEQ ID NO: 575620 - protein, 14 aa, Homo sapiens
  CDR3 for beta chain variable domain of TCR clone 287810 (TRBV7-2, TRBJ2-7)
CASRPQGAAYEQYF

SEQ ID NO: 575621 - protein, 16 aa, Homo sapiens
  CDR3 for alpha chain variable domain of TCR clone 287811 (TRAV30, TRAJ24)
CGTETVDADSWGKFQF

SEQ ID NO: 575622 - protein, 15 aa, Homo sapiens
  CDR3 for beta chain variable domain of TCR clone 287811 (TRBV11-3, TRBJ2-3)
CASLKDGREGDTQYF

SEQ ID NO: 575623 - protein, 14 aa, Homo sapiens
  CDR3 for alpha chain variable domain of TCR clone 287812 (TRAV13-1, TRAJ9)
CAASALTGGFKTTF

SEQ ID NO: 575624 - protein, 13 aa, Homo sapiens
  CDR3 for beta chain variable domain of TCR clone 287812 (TRBV20-1, TRBJ1-1)
CSAGTVGNAEAFF

SEQ ID NO: 575625 - protein, 13 aa, Homo sapiens
  CDR3 for alpha chain variable domain of TCR clone 287813 (TRAV8-3, TRAJ34)
CAVGGGNTDKPIF

SEQ ID NO: 575626 - protein, 16 aa, Homo sapiens
  CDR3 for beta chain variable domain of TCR clone 287813 (TRBV7-8, TRBJ1-4)
CASSLGVGTSNEKLFF

SEQ ID NO: 575627 - protein, 14 aa, Homo sapiens
  CDR3 for alpha chain variable domain of TCR clone 287814 (TRAV8-1, TRAJ5)
CALRTDTGRRALTF

SEQ ID NO: 575628 - protein, 14 aa, Homo sapiens
  CDR3 for beta chain variable domain of TCR clone 287814 (TRBV7-8, TRBJ2-3)
CASSFPDGQDTQYF

SEQ ID NO: 575629 - protein, 15 aa, Homo sapiens
  CDR3 for alpha chain variable domain of TCR clone 287815 (TRAV40, TRAJ45)
CLPGDLGGGADGLTF

SEQ ID NO: 575630 - protein, 13 aa, Homo sapiens
  CDR3 for beta chain variable domain of TCR clone 287815 (TRBV7-9, TRBJ1-2)
CASSLKQNYGYTF

SEQ ID NO: 575631 - protein, 14 aa, Homo sapiens
  CDR3 for alpha chain variable domain of TCR clone 287816 (TRAV2, TRAJ9)
CAVEDRSGGFKTIF

SEQ ID NO: 575632 - protein, 15 aa, Homo sapiens
  CDR3 for beta chain variable domain of TCR clone 287816 (TRBV7-2, TRBJ2-1)
CASSFQADEYNEQFF

SEQ ID NO: 575633 - protein, 14 aa, Homo sapiens
  CDR3 for alpha chain variable domain of TCR clone 287817 (TRAV12-3, TRAJ10)
SHLPLTGGGNKLTF

SEQ ID NO: 575634 - protein, 15 aa, Homo sapiens
  CDR3 for beta chain variable domain of TCR clone 287817 (TRBV7-3, TRBJ2-1)
CQQLQTSGRYNEQFF

SEQ ID NO: 575635 - protein, 13 aa, Homo sapiens
  CDR3 for alpha chain variable domain of TCR clone 287818 (TRAV5, TRAJ30)
CAESSTRDDKIIF

SEQ ID NO: 575636 - protein, 13 aa, Homo sapiens
  CDR3 for beta chain variable domain of TCR clone 287818 (TRBV7-9, TRBJ2-3)
CASSPGSTDTQYF

SEQ ID NO: 575637 - protein, 15 aa, Homo sapiens
  CDR3 for alpha chain variable domain of TCR clone 287819 (TRAV38-1, TRAJ37)
CAFIHGSGNQGKLIF

SEQ ID NO: 575638 - protein, 12 aa, Homo sapiens
  CDR3 for beta chain variable domain of TCR clone 287819 (TRBV7-9, TRBJ2-7)
CASSFGSYEQYF

SEQ ID NO: 575639 - protein, 12 aa, Homo sapiens
  CDR3 for alpha chain variable domain of TCR clone 287820 (TRAV9-2, TRAJ36)
CALKKGANNLFF

SEQ ID NO: 575640 - protein, 13 aa, Homo sapiens
  CDR3 for beta chain variable domain of TCR clone 287820 (TRBV10-3, TRBJ2-7)
CASKLAVNYEQYF

SEQ ID NO: 575641 - protein, 12 aa, Homo sapiens
  CDR3 for alpha chain variable domain of TCR clone 287821 (TRAV29/DV5, TRAJ49)
CAATDTGNQFYF

SEQ ID NO: 575642 - protein, 15 aa, Homo sapiens
  CDR3 for beta chain variable domain of TCR clone 287821 (TRBV19, TRBJ2-2)
CASRLTGADTGELFF

SEQ ID NO: 575643 - protein, 12 aa, Homo sapiens
  CDR3 for alpha chain variable domain of TCR clone 287822 (TRAV13-1, TRAJ48)
CAANFGNEKLTF

SEQ ID NO: 575644 - protein, 14 aa, Homo sapiens
  CDR3 for beta chain variable domain of TCR clone 287822 (TRBV6-1, TRBJ1-3)
CASVQGGGGNTMYF

SEQ ID NO: 575645 - protein, 14 aa, Homo sapiens
  CDR3 for alpha chain variable domain of TCR clone 287823 (TRAV17, TRAJ17)
CATVVRGAGNKLTF

SEQ ID NO: 575646 - protein, 14 aa, Homo sapiens
  CDR3 for beta chain variable domain of TCR clone 287823 (TRBV12-4, TRBJ2-7)
CASSFAGADYEQYF

SEQ ID NO: 575647 - protein, 14 aa, Homo sapiens
  CDR3 for alpha chain variable domain of TCR clone 287824 (TRAV20, TRAJ22)
CAVQVSGSARQLTF

SEQ ID NO: 575648 - protein, 15 aa, Homo sapiens
  CDR3 for beta chain variable domain of TCR clone 287824 (TRBV3-1, TRBJ2-5)
CASSANLGGPETQYF

SEQ ID NO: 575649 - protein, 13 aa, Homo sapiens
  CDR3 for alpha chain variable domain of TCR clone 287825 (TRAV8-6, TRAJ49)
CAVITNTGNQFYF

SEQ ID NO: 575650 - protein, 13 aa, Homo sapiens
  CDR3 for beta chain variable domain of TCR clone 287825 (TRBV27, TRBJ2-3)
CASSLSQGDTQYF

SEQ ID NO: 575651 - protein, 13 aa, Homo sapiens
  CDR3 for alpha chain variable domain of TCR clone 287826 (TRAV25, TRAJ30)
CAGRVDRDDKIIF

SEQ ID NO: 575652 - protein, 13 aa, Homo sapiens
  CDR3 for beta chain variable domain of TCR clone 287826 (TRBV23-1, TRBJ1-4)
CASRGKFNEKLFF

SEQ ID NO: 575653 - protein, 12 aa, Homo sapiens
  CDR3 for alpha chain variable domain of TCR clone 287827 (TRAV17, TRAJ29)
CYASSGNTPLVF

SEQ ID NO: 575654 - protein, 15 aa, Homo sapiens
  CDR3 for beta chain variable domain of TCR clone 287827 (TRBV7-9, TRBJ2-3)
CASSSSGGATDTQYF

SEQ ID NO: 575655 - protein, 15 aa, Homo sapiens
  CDR3 for alpha chain variable domain of TCR clone 287828 (TRAV3, TRAJ5)
CSVRDLDTGRIALTF

SEQ ID NO: 575656 - protein, 13 aa, Homo sapiens
  CDR3 for beta chain variable domain of TCR clone 287828 (TRBV12-4, TRBJ2-7)
CASSPTETYEQYF

SEQ ID NO: 575657 - protein, 14 aa, Homo sapiens
  CDR3 for alpha chain variable domain of TCR clone 287829 (TRAV3, TRAJ36)
CAVRDGTGANNLFF

SEQ ID NO: 575658 - protein, 16 aa, Homo sapiens
  CDR3 for beta chain variable domain of TCR clone 287829 (TRBV20-1, TRBJ2-6)
CIAREGPGVGANVLTF

SEQ ID NO: 575659 - protein, 12 aa, Homo sapiens
  CDR3 for alpha chain variable domain of TCR clone 287830 (TRAV13-1, TRAJ21)
CAAKEGFNKFYF

SEQ ID NO: 575660 - protein, 15 aa, Homo sapiens
  CDR3 for beta chain variable domain of TCR clone 287830 (TRBV5-1, TRBJ2-7)
CASSLDLTSSYEQYF

SEQ ID NO: 575661 - protein, 12 aa, Homo sapiens
  CDR3 for alpha chain variable domain of TCR clone 287831 (TRAV12-2, TRAJ13)
CAVGGGLPESYL

SEQ ID NO: 575662 - protein, 13 aa, Homo sapiens
  CDR3 for beta chain variable domain of TCR clone 287831 (TRBV12-4, TRBJ1-2)
CASRTDGNYGYTF

SEQ ID NO: 575663 - protein, 16 aa, Homo sapiens
  CDR3 for alpha chain variable domain of TCR clone 287832 (TRAV3, TRAJ37)
CAVRVRGSGNTGKLIF

SEQ ID NO: 575664 - protein, 15 aa, Homo sapiens
  CDR3 for beta chain variable domain of TCR clone 287832 (TRBV7-9, TRBJ1-5)
CASSQGHQPNQPQHF

SEQ ID NO: 575665 - protein, 15 aa, Homo sapiens
  CDR3 for alpha chain variable domain of TCR clone 287833 (TRAV23/DV6, TRAJ30)
CAASSQESRDDKIIF

SEQ ID NO: 575666 - protein, 11 aa, Homo sapiens
  CDR3 for beta chain variable domain of TCR clone 287833 (TRBV10-3, TRBJ2-7)
CAISEGLEQYF

SEQ ID NO: 575667 - protein, 15 aa, Homo sapiens
  CDR3 for alpha chain variable domain of TCR clone 287834 (TRAV25, TRAJ52)
CAGRPGGTSYGKLTF

SEQ ID NO: 575668 - protein, 14 aa, Homo sapiens
  CDR3 for beta chain variable domain of TCR clone 287834 (TRBV20-1, TRBJ1-1)
CSAQTRIGGTEAFF

SEQ ID NO: 575669 - protein, 16 aa, Homo sapiens
  CDR3 for alpha chain variable domain of TCR clone 287835 (TRAV27, TRAJ52)
CAGAPAGGTSYGKLTF

SEQ ID NO: 575670 - protein, 14 aa, Homo sapiens
  CDR3 for beta chain variable domain of TCR clone 287835 (TRBV27, TRBJ2-3)
CATWTSGRPWGQYF

SEQ ID NO: 575671 - protein, 15 aa, Homo sapiens
  CDR3 for alpha chain variable domain of TCR clone 287836 (TRAV3, TRAJ22)
CAVRDRGGSARQLIF

SEQ ID NO: 575672 - protein, 16 aa, Homo sapiens
  CDR3 for beta chain variable domain of TCR clone 287836 (TRBV5-4, TRBJ2-3)
FASQQPGAGGADTQYF

SEQ ID NO: 575673 - protein, 23 aa, Homo sapiens
  CDR3 for alpha chain variable domain of TCR clone 287837 (TRAV8-3, TRAJ38)
CAVGASNAGNNHNQNPDPAVYQL

SEQ ID NO: 575674 - protein, 15 aa, Homo sapiens
  CDR3 for beta chain variable domain of TCR clone 287837 (TRBV11-3, TRBJ1-3)
CASSLFGPSGNTIYF

SEQ ID NO: 575675 - protein, 15 aa, Homo sapiens
  CDR3 for alpha chain variable domain of TCR clone 287838 (TRAV20, TRAJ53)
CAVQASGGSNYKLPF

SEQ ID NO: 575676 - protein, 12 aa, Homo sapiens
  CDR3 for beta chain variable domain of TCR clone 287838 (TRBV7-6, TRBJ2-5)
CASSLSQETQYF

SEQ ID NO: 575677 - protein, 13 aa, Homo sapiens
  CDR3 for alpha chain variable domain of TCR clone 287839 (TRAV13-2, TRAJ40)
CAEFTSGTYKYIF

SEQ ID NO: 575678 - protein, 14 aa, Homo sapiens
  CDR3 for beta chain variable domain of TCR clone 287839 (TRBV10-2, TRBJ1-5)
CASSSTGRNQPQHF

SEQ ID NO: 575679 - protein, 12 aa, Homo sapiens
  CDR3 for alpha chain variable domain of TCR clone 287840 (TRAV27, TRAJ41)
CAGRNAGYALNF

SEQ ID NO: 575680 - protein, 13 aa, Homo sapiens
  CDR3 for beta chain variable domain of TCR clone 287840 (TRBV12-4, TRBJ1-1)
CASSPGTGFEAFF

SEQ ID NO: 575681 - protein, 14 aa, Homo sapiens
  CDR3 for alpha chain variable domain of TCR clone 287841 (TRAV1-2, TRAJ16)
CAVNRFSDSQKLLF

SEQ ID NO: 575682 - protein, 13 aa, Homo sapiens
  CDR3 for beta chain variable domain of TCR clone 287841 (TRBV19, TRBJ1-2)
CASSVPGQEGYTF

SEQ ID NO: 575683 - protein, 12 aa, Homo sapiens
  CDR3 for alpha chain variable domain of TCR clone 287842 (TRAV13-2, TRAJ23)
CAERHRGGKRIF

SEQ ID NO: 575684 - protein, 16 aa, Homo sapiens
  CDR3 for beta chain variable domain of TCR clone 287842 (TRBV12-5, TRBJ2-5)
CASGPRTSGNQETQYF

SEQ ID NO: 575685 - protein, 14 aa, Homo sapiens
  CDR3 for alpha chain variable domain of TCR clone 287843 (TRAV3, TRAJ7)
CAVREEEREQQTRF

SEQ ID NO: 575686 - protein, 13 aa, Homo sapiens
  CDR3 for beta chain variable domain of TCR clone 287843 (TRBV20-1, TRBJ1-1)
CSAGTVGNTEAFF

SEQ ID NO: 575687 - protein, 13 aa, Homo sapiens
  CDR3 for alpha chain variable domain of TCR clone 287844 (TRAV21, TRAJ27)
CAARPGNAGNSTF

SEQ ID NO: 575688 - protein, 14 aa, Homo sapiens
  CDR3 for beta chain variable domain of TCR clone 287844 (TRBV7-6, TRBJ2-3)
CASSLGTVTDAQYF

SEQ ID NO: 575689 - protein, 14 aa, Homo sapiens
  CDR3 for alpha chain variable domain of TCR clone 287845 (TRAV1-2, TRAJ8)
CAVREVTGFQKLVF

SEQ ID NO: 575690 - protein, 15 aa, Homo sapiens
  CDR3 for beta chain variable domain of TCR clone 287845 (TRBV7-3, TRBJ2-2)
CASSETGQGTGELFF

SEQ ID NO: 575691 - protein, 17 aa, Homo sapiens
  CDR3 for alpha chain variable domain of TCR clone 287846 (TRAV3, TRAJ42)
CAVRDRDYGGSQGNLIF

SEQ ID NO: 575692 - protein, 14 aa, Homo sapiens
  CDR3 for beta chain variable domain of TCR clone 287846 (TRBV7-9, TRBJ2-2)
CASSLGHRTGELFF

SEQ ID NO: 575693 - protein, 23 aa, Homo sapiens
  CDR3 for alpha chain variable domain of TCR clone 287847 (TRAV26-1, TRAJ38)
CIADNAGNNHIQNPDPAVYQLRN

SEQ ID NO: 575694 - protein, 16 aa, Homo sapiens
  CDR3 for beta chain variable domain of TCR clone 287847 (TRBV12-5, TRBJ2-5)
CASGPRTSGNQETQYF

SEQ ID NO: 575695 - protein, 14 aa, Homo sapiens
  CDR3 for alpha chain variable domain of TCR clone 287848 (TRAV27, TRAJ12)
CAGARMDSSYKLIF

SEQ ID NO: 575696 - protein, 18 aa, Homo sapiens
  CDR3 for beta chain variable domain of TCR clone 287848 (TRBV10-3, TRBJ2-7)
CAISESGRPSGGRVGQYF

SEQ ID NO: 575697 - protein, 14 aa, Homo sapiens
  CDR3 for alpha chain variable domain of TCR clone 287849 (TRAV3, TRAJ21)
CAVESQANFNKFYF

SEQ ID NO: 575698 - protein, 18 aa, Homo sapiens
  CDR3 for beta chain variable domain of TCR clone 287849 (TRBV4-1, TRBJ1-5)
CASSQDPRGQGLNQPQHF

SEQ ID NO: 575699 - protein, 16 aa, Homo sapiens
  CDR3 for alpha chain variable domain of TCR clone 287850 (TRAV12-1, TRAJ12)
CVVNTLLMDSSYKLIF

SEQ ID NO: 575700 - protein, 13 aa, Homo sapiens
  CDR3 for beta chain variable domain of TCR clone 287850 (TRBV11-2, TRBJ2-1)
CASSSEAYNEQSF

SEQ ID NO: 575701 - protein, 15 aa, Homo sapiens
  CDR3 for alpha chain variable domain of TCR clone 287851 (TRAV8-3, TRAJ40)
CAAPSLGSGTYKYIF

SEQ ID NO: 575702 - protein, 14 aa, Homo sapiens
  CDR3 for beta chain variable domain of TCR clone 287851 (TRBV19, TRBJ1-5)
CASRAPDSFLSQHF

SEQ ID NO: 575703 - protein, 14 aa, Homo sapiens
  CDR3 for alpha chain variable domain of TCR clone 287852 (TRAV12-2, TRAJ17)
CAVLFKAAVNKLTF

SEQ ID NO: 575704 - protein, 16 aa, Homo sapiens
  CDR3 for beta chain variable domain of TCR clone 287852 (TRBV7-3, TRBJ2-2)
GASSLKRGTLSGELFF

SEQ ID NO: 575705 - protein, 13 aa, Homo sapiens
  CDR3 for alpha chain variable domain of TCR clone 287853 (TRAV2, TRAJ40)
CAVVTSGTYKYIF

SEQ ID NO: 575706 - protein, 14 aa, Homo sapiens
  CDR3 for beta chain variable domain of TCR clone 287853 (TRBV28, TRBJ2-1)
CASTYYTAYSEQFF

SEQ ID NO: 575707 - protein, 14 aa, Homo sapiens
  CDR3 for alpha chain variable domain of TCR clone 287854 (TRAV1-2, TRAJ16)
CAVNRFSDGQKLIF

SEQ ID NO: 575708 - protein, 14 aa, Homo sapiens
  CDR3 for beta chain variable domain of TCR clone 287854 (TRBV18, TRBJ2-7)
CASSPRGGAYEQYF

SEQ ID NO: 575709 - protein, 14 aa, Homo sapiens
  CDR3 for alpha chain variable domain of TCR clone 287855 (TRAV12-3, TRAJ57)
CAMSAWGGSEKLVF

SEQ ID NO: 575710 - protein, 14 aa, Homo sapiens
  CDR3 for beta chain variable domain of TCR clone 287855 (TRBV11-2, TRBJ2-3)
CASSRLARTDTQYF

SEQ ID NO: 575711 - protein, 12 aa, Homo sapiens
  CDR3 for alpha chain variable domain of TCR clone 287856 (TRAV40, TRAJ20)
CLRGLNNYKLSF

SEQ ID NO: 575712 - protein, 14 aa, Homo sapiens
  CDR3 for beta chain variable domain of TCR clone 287856 (TRBV19, TRBJ2-1)
CASSSGRDYNEQFF

SEQ ID NO: 575713 - protein, 13 aa, Homo sapiens
  CDR3 for alpha chain variable domain of TCR clone 287857 (TRAV21, TRAJ26)
CAVLDNYGQNFVF

SEQ ID NO: 575714 - protein, 14 aa, Homo sapiens
  CDR3 for beta chain variable domain of TCR clone 287857 (TRBV7-3, TRBJ1-1)
CASSLKGGNTEAFF

SEQ ID NO: 575715 - protein, 12 aa, Homo sapiens
  CDR3 for alpha chain variable domain of TCR clone 287858 (TRAV12-3, TRAJ17)
CAMKLTGNKLTF

SEQ ID NO: 575716 - protein, 15 aa, Homo sapiens
  CDR3 for beta chain variable domain of TCR clone 287858 (TRBV12-4, TRBJ2-5)
CASSPPTGLQETQYF

SEQ ID NO: 575717 - protein, 14 aa, Homo sapiens
  CDR3 for alpha chain variable domain of TCR clone 287859 (TRAV26-1, TRAJ34)
CIVREAYNTDKLIF

SEQ ID NO: 575718 - protein, 13 aa, Homo sapiens
  CDR3 for beta chain variable domain of TCR clone 287859 (TRBV19, TRBJ2-1)
CATSRGVYNEQFF

SEQ ID NO: 575719 - protein, 18 aa, Homo sapiens
  CDR3 for alpha chain variable domain of TCR clone 287860 (TRAV21, TRAJ52)
CAVRPSPAGGTSYGKLTF

SEQ ID NO: 575720 - protein, 16 aa, Homo sapiens
  CDR3 for beta chain variable domain of TCR clone 287860 (TRBV13, TRBJ2-2)
CASSPRTGEHTGELIF

SEQ ID NO: 575721 - protein, 13 aa, Homo sapiens
  CDR3 for alpha chain variable domain of TCR clone 287861 (TRAV36/DV7, TRAJ49)
CAGDSNTGNQFYF

SEQ ID NO: 575722 - protein, 16 aa, Homo sapiens
  CDR3 for beta chain variable domain of TCR clone 287861 (TRBV13, TRBJ2-2)
CASSPRTGEHTGELFF

SEQ ID NO: 575723 - protein, 10 aa, Homo sapiens
  CDR3 for alpha chain variable domain of TCR clone 287862 (TRAV12-1, TRAJ37)
ARGKTGELIF

SEQ ID NO: 575724 - protein, 15 aa, Homo sapiens
  CDR3 for beta chain variable domain of TCR clone 287862 (TRBV7-2, TRBJ2-3)
CASSLEQGGTDTQYF

SEQ ID NO: 575725 - protein, 14 aa, Homo sapiens
  CDR3 for alpha chain variable domain of TCR clone 287863 (TRAV8-4, TRAJ16)
CAVSPVGRWPEAAL

SEQ ID NO: 575726 - protein, 11 aa, Homo sapiens
  CDR3 for beta chain variable domain of TCR clone 287863 (TRBV7-8, TRBJ2-7)
CASSLSLEQYF

SEQ ID NO: 575727 - protein, 14 aa, Homo sapiens
  CDR3 for alpha chain variable domain of TCR clone 287864 (TRAV1-2, TRAJ16)
CAVNRFSDGQKLLF

SEQ ID NO: 575728 - protein, 20 aa, Homo sapiens
  CDR3 for beta chain variable domain of TCR clone 287864 (TRBV5-1, TRBJ2-2)
CASSYSLPGLAVQNTGELFF

SEQ ID NO: 575729 - protein, 16 aa, Homo sapiens
  CDR3 for alpha chain variable domain of TCR clone 287865 (TRAV26-2, TRAJ57)
RILRDVGQGGSEKLVF

SEQ ID NO: 575730 - protein, 14 aa, Homo sapiens
  CDR3 for beta chain variable domain of TCR clone 287865 (TRBV28, TRBJ1-4)
CASSPQGTNEKLFF

SEQ ID NO: 575731 - protein, 14 aa, Homo sapiens
  CDR3 for alpha chain variable domain of TCR clone 287866 (TRAV12-2, TRAJ11)
CAVEGGSGYSTLTF

SEQ ID NO: 575732 - protein, 15 aa, Homo sapiens
  CDR3 for beta chain variable domain of TCR clone 287866 (TRBV11-3, TRBJ2-2)
CASSYFSTGTGELFF

SEQ ID NO: 575733 - protein, 14 aa, Homo sapiens
  CDR3 for alpha chain variable domain of TCR clone 287867 (TRAV4, TRAJ9)
CLVGSGTGGFKTIF

SEQ ID NO: 575734 - protein, 10 aa, Homo sapiens
  CDR3 for beta chain variable domain of TCR clone 287867 (TRBV7-9, TRBJ1-1)
CASSFTEAFF

SEQ ID NO: 575735 - protein, 12 aa, Homo sapiens
  CDR3 for alpha chain variable domain of TCR clone 287868 (TRAV27, TRAJ37)
CAYSGNTGKLIF

SEQ ID NO: 575736 - protein, 18 aa, Homo sapiens
  CDR3 for beta chain variable domain of TCR clone 287868 (TRBV7-9, TRBJ1-1)
CASSKPWDTMGMNTEAFF

SEQ ID NO: 575737 - protein, 12 aa, Homo sapiens
  CDR3 for alpha chain variable domain of TCR clone 287869 (TRAV13-1, TRAJ20)
CAASRGDYKLSF

SEQ ID NO: 575738 - protein, 14 aa, Homo sapiens
  CDR3 for beta chain variable domain of TCR clone 287869 (TRBV20-1, TRBJ1-1)
CSAQTRIGGTEAFF

SEQ ID NO: 575739 - protein, 14 aa, Homo sapiens
  CDR3 for alpha chain variable domain of TCR clone 287870 (TRAV1-2, TRAJ16)
CAVNRFSDGQKLLF

SEQ ID NO: 575740 - protein, 13 aa, Homo sapiens
  CDR3 for beta chain variable domain of TCR clone 287870 (TRBV19, TRBJ2-7)
CASRKAGGSEQYV

SEQ ID NO: 575741 - protein, 13 aa, Homo sapiens
  CDR3 for alpha chain variable domain of TCR clone 287871 (TRAV27, TRAJ57)
CAGVRGGSEKLVF

SEQ ID NO: 575742 - protein, 14 aa, Homo sapiens
  CDR3 for beta chain variable domain of TCR clone 287871 (TRBV20-1, TRBJ1-2)
CSGRKDGRAYGYTF

SEQ ID NO: 575743 - protein, 12 aa, Homo sapiens
  CDR3 for alpha chain variable domain of TCR clone 287872 (TRAV3, TRAJ27)
CAVRDKAGKSTF

SEQ ID NO: 575744 - protein, 16 aa, Homo sapiens
  CDR3 for beta chain variable domain of TCR clone 287872 (TRBV6-6, TRBJ2-1)
CASSWGGQGPYNEQFF

SEQ ID NO: 575745 - protein, 11 aa, Homo sapiens
  CDR3 for alpha chain variable domain of TCR clone 287873 (TRAV3, TRAJ21)
CAVGNSDKFYF

SEQ ID NO: 575746 - protein, 16 aa, Homo sapiens
  CDR3 for beta chain variable domain of TCR clone 287873 (TRBV19, TRBJ2-1)
CASSKAGPSSYNEQFF

SEQ ID NO: 575747 - protein, 16 aa, Homo sapiens
  CDR3 for alpha chain variable domain of TCR clone 287874 (TRAV26-1, )
CIDIQNPDPAVYQLRD

SEQ ID NO: 575748 - protein, 19 aa, Homo sapiens
  CDR3 for beta chain variable domain of TCR clone 287874 (TRBV19, TRBJ2-5)
RASSIGQVTDFFLGETQYF

SEQ ID NO: 575749 - protein, 14 aa, Homo sapiens
  CDR3 for alpha chain variable domain of TCR clone 287875 (TRAV12-1, TRAJ30)
CVPTGTNRDDKIIF

SEQ ID NO: 575750 - protein, 12 aa, Homo sapiens
  CDR3 for beta chain variable domain of TCR clone 287875 (TRBV7-9, TRBJ1-1)
CASSLEGTEAFF

SEQ ID NO: 575751 - protein, 16 aa, Homo sapiens
  CDR3 for alpha chain variable domain of TCR clone 287876 (TRAV3, TRAJ37)
CAVRPHGSGNTGKPIF

SEQ ID NO: 575752 - protein, 15 aa, Homo sapiens
  CDR3 for beta chain variable domain of TCR clone 287876 (TRBV6-1, TRBJ2-1)
CASSEAAYSYNEQFF

SEQ ID NO: 575753 - protein, 14 aa, Homo sapiens
  CDR3 for alpha chain variable domain of TCR clone 287877 (TRAV1-2, TRAJ16)
CAVNRFSDGQKLLF

SEQ ID NO: 575754 - protein, 15 aa, Homo sapiens
  CDR3 for beta chain variable domain of TCR clone 287877 (TRBV9, TRBJ1-6)
CTSSVAGTVDSPLHF

SEQ ID NO: 575755 - protein, 15 aa, Homo sapiens
  CDR3 for alpha chain variable domain of TCR clone 287878 (TRAV12-1, TRAJ42)
CVVTRDGGSQGNLIF

SEQ ID NO: 575756 - protein, 14 aa, Homo sapiens
  CDR3 for beta chain variable domain of TCR clone 287878 (TRBV11-2, TRBJ2-3)
CASILGGGANTQYF

SEQ ID NO: 575757 - protein, 16 aa, Homo sapiens
  CDR3 for alpha chain variable domain of TCR clone 287879 (TRAV3, TRAJ10)
CAVRDVRAGGGNKLTF

SEQ ID NO: 575758 - protein, 15 aa, Homo sapiens
  CDR3 for beta chain variable domain of TCR clone 287879 (TRBV20-1, TRBJ2-1)
CSAEGGLLAGDEQFS

SEQ ID NO: 575759 - protein, 13 aa, Homo sapiens
  CDR3 for alpha chain variable domain of TCR clone 287880 (TRAV12-1, TRAJ11)
CVGNRAGYGTLTF

SEQ ID NO: 575760 - protein, 15 aa, Homo sapiens
  CDR3 for beta chain variable domain of TCR clone 287880 (TRBV7-3, TRBJ2-2)
CASSETGQGTGELFF

SEQ ID NO: 575761 - protein, 17 aa, Homo sapiens
  CDR3 for alpha chain variable domain of TCR clone 287881 (TRAV8-4, TRAJ53)
CAVSGPRSEGSNYILTF

SEQ ID NO: 575762 - protein, 14 aa, Homo sapiens
  CDR3 for beta chain variable domain of TCR clone 287881 (TRBV7-3, TRBJ2-1)
CASSALAGGPEQFF

SEQ ID NO: 575763 - protein, 17 aa, Homo sapiens
  CDR3 for alpha chain variable domain of TCR clone 287882 (TRAV3, TRAJ6)
CAVRDGPRAGGSYIPTF

SEQ ID NO: 575764 - protein, 14 aa, Homo sapiens
  CDR3 for beta chain variable domain of TCR clone 287882 (TRBV20-1, TRBJ1-1)
CSARAVNGYTEAFF

SEQ ID NO: 575765 - protein, 16 aa, Homo sapiens
  CDR3 for alpha chain variable domain of TCR clone 287883 (TRAV30, TRAJ24)
CGTEIVDADIWGKFQF

SEQ ID NO: 575766 - protein, 14 aa, Homo sapiens
  CDR3 for beta chain variable domain of TCR clone 287883 (TRBV19, TRBJ2-7)
CASSIRLGDHEQYF

SEQ ID NO: 575767 - protein, 13 aa, Homo sapiens
  CDR3 for alpha chain variable domain of TCR clone 287884 (TRAV29/DV5, TRAJ43)
CAASAQGNNDMRF

SEQ ID NO: 575768 - protein, 16 aa, Homo sapiens
  CDR3 for beta chain variable domain of TCR clone 287884 (TRBV12-4, TRBJ2-1)
CASSFELAGGPDEQFF

SEQ ID NO: 575769 - protein, 13 aa, Homo sapiens
  CDR3 for alpha chain variable domain of TCR clone 287885 (TRAV26-1, TRAJ33)
CIVRVEGNYQLIW

SEQ ID NO: 575770 - protein, 13 aa, Homo sapiens
  CDR3 for beta chain variable domain of TCR clone 287885 (TRBV20-1, TRBJ1-1)
CSAPLGGGTEAFC

SEQ ID NO: 575771 - protein, 12 aa, Homo sapiens
  CDR3 for alpha chain variable domain of TCR clone 287886 (TRAV8-4, TRAJ43)
CAVSLNNNDMRF

SEQ ID NO: 575772 - protein, 15 aa, Homo sapiens
  CDR3 for beta chain variable domain of TCR clone 287886 (TRBV20-1, TRBJ2-7)
CSARDPVKGEGEQYF

SEQ ID NO: 575773 - protein, 15 aa, Homo sapiens
  CDR3 for alpha chain variable domain of TCR clone 287887 (TRAV8-2, TRAJ15)
CVVSRGNQAGTALIF

SEQ ID NO: 575774 - protein, 15 aa, Homo sapiens
  CDR3 for beta chain variable domain of TCR clone 287887 (TRBV12-4, TRBJ2-5)
CASSPPTGLQETQYF

SEQ ID NO: 575775 - protein, 13 aa, Homo sapiens
  CDR3 for alpha chain variable domain of TCR clone 287888 (TRAV12-3, TRAJ40)
CAMSDSGTYKYIF

SEQ ID NO: 575776 - protein, 17 aa, Homo sapiens
  CDR3 for beta chain variable domain of TCR clone 287888 (TRBV7-2, TRBJ2-2)
CASSPRGAGEGTGELFF

SEQ ID NO: 575777 - protein, 12 aa, Homo sapiens
  CDR3 for alpha chain variable domain of TCR clone 287889 (TRAV13-1, TRAJ3)
RAATGVQQCFQD

SEQ ID NO: 575778 - protein, 16 aa, Homo sapiens
  CDR3 for beta chain variable domain of TCR clone 287889 (TRBV7-3, TRBJ2-2)
CASSLKRGTLSGELFF

SEQ ID NO: 575779 - protein, 12 aa, Homo sapiens
  CDR3 for alpha chain variable domain of TCR clone 287890 (TRAV13-2, TRAJ8)
CAPWLGFQKLVF

SEQ ID NO: 575780 - protein, 17 aa, Homo sapiens
  CDR3 for beta chain variable domain of TCR clone 287890 (TRBV5-1, TRBJ2-2)
CASSEKPNFANTGELFF

SEQ ID NO: 575781 - protein, 11 aa, Homo sapiens
  CDR3 for alpha chain variable domain of TCR clone 287891 (TRAV21, TRAJ39)
LLVNAGNMLTF

SEQ ID NO: 575782 - protein, 18 aa, Homo sapiens
  CDR3 for beta chain variable domain of TCR clone 287891 (TRBV12-4, TRBJ2-2)
CASSLVAGTRGRTGELFF

SEQ ID NO: 575783 - protein, 14 aa, Homo sapiens
  CDR3 for alpha chain variable domain of TCR clone 287892 (TRAV1-2, TRAJ8)
CAVREDTGFQKLVF

SEQ ID NO: 575784 - protein, 12 aa, Homo sapiens
  CDR3 for beta chain variable domain of TCR clone 287892 (TRBV11-2, TRBJ2-2)
CASSLGGGELFV

SEQ ID NO: 575785 - protein, 14 aa, Homo sapiens
  CDR3 for alpha chain variable domain of TCR clone 287893 (TRAV12-2, TRAJ13)
CAVKKTWGYQKVTF

SEQ ID NO: 575786 - protein, 14 aa, Homo sapiens
  CDR3 for beta chain variable domain of TCR clone 287893 (TRBV12-5, TRBJ2-5)
CASGSRTHQETQDF

SEQ ID NO: 575787 - protein, 12 aa, Homo sapiens
  CDR3 for alpha chain variable domain of TCR clone 287894 (TRAV3, TRAJ20)
CAVRDPDYRLSF

SEQ ID NO: 575788 - protein, 12 aa, Homo sapiens
  CDR3 for beta chain variable domain of TCR clone 287894 (TRBV9, TRBJ2-1)
CQQRRAGGEQFF

SEQ ID NO: 575789 - protein, 16 aa, Homo sapiens
  CDR3 for alpha chain variable domain of TCR clone 287895 (TRAV26-2, TRAJ31)
CILRDSGLVANARLMF

SEQ ID NO: 575790 - protein, 14 aa, Homo sapiens
  CDR3 for beta chain variable domain of TCR clone 287895 (TRBV12-4, TRBJ2-1)
CASSLGQGASEQFV

SEQ ID NO: 575791 - protein, 12 aa, Homo sapiens
  CDR3 for alpha chain variable domain of TCR clone 287896 (TRAV21, TRAJ27)
CAANTNAGKSTF

SEQ ID NO: 575792 - protein, 15 aa, Homo sapiens
  CDR3 for beta chain variable domain of TCR clone 287896 (TRBV9, TRBJ1-6)
CASSVAGTGDSPLHF

SEQ ID NO: 575793 - protein, 14 aa, Homo sapiens
  CDR3 for alpha chain variable domain of TCR clone 287897 (TRAV26-1, TRAJ40)
CIVRLLSGTYKYIF

SEQ ID NO: 575794 - protein, 14 aa, Homo sapiens
  CDR3 for beta chain variable domain of TCR clone 287897 (TRBV25-1, TRBJ1-4)
CASSGGGQPENLFF

SEQ ID NO: 575795 - protein, 11 aa, Homo sapiens
  CDR3 for alpha chain variable domain of TCR clone 287898 (TRAV12-2, TRAJ31)
CAILNNARLMF

SEQ ID NO: 575796 - protein, 16 aa, Homo sapiens
  CDR3 for beta chain variable domain of TCR clone 287898 (TRBV19, TRBJ2-1)
CASSKAGPSSYNEQFF

SEQ ID NO: 575797 - protein, 10 aa, Homo sapiens
  CDR3 for alpha chain variable domain of TCR clone 287899 (TRAV36/DV7, TRAJ56)
CAGPAVELTF

SEQ ID NO: 575798 - protein, 13 aa, Homo sapiens
  CDR3 for beta chain variable domain of TCR clone 287899 (TRBV7-9, TRBJ2-7)
CASSFWSSYEQCV

SEQ ID NO: 575799 - protein, 15 aa, Homo sapiens
  CDR3 for alpha chain variable domain of TCR clone 287900 (TRAV1-2, TRAJ15)
CSVDVMGSAGTALIF

SEQ ID NO: 575800 - protein, 13 aa, Homo sapiens
  CDR3 for beta chain variable domain of TCR clone 287900 (TRBV20-1, TRBJ1-1)
CSAFDRENTEAFF

SEQ ID NO: 575801 - protein, 14 aa, Homo sapiens
  CDR3 for alpha chain variable domain of TCR clone 287901 (TRAV16, TRAJ26)
CALSSANYGQKFVF

SEQ ID NO: 575802 - protein, 15 aa, Homo sapiens
  CDR3 for beta chain variable domain of TCR clone 287901 (TRBV5-5, TRBJ1-6)
CASSLVIVGNSPLHF

SEQ ID NO: 575803 - protein, 13 aa, Homo sapiens
  CDR3 for alpha chain variable domain of TCR clone 287902 (TRAV13-1, TRAJ39)
CSKYSNAGNMLTF

SEQ ID NO: 575804 - protein, 16 aa, Homo sapiens
  CDR3 for beta chain variable domain of TCR clone 287902 (TRBV20-1, TRBJ1-4)
CSAPGQGLLNNEKLFF

SEQ ID NO: 575805 - protein, 14 aa, Homo sapiens
  CDR3 for alpha chain variable domain of TCR clone 287903 (TRAV23/DV6, TRAJ45)
CAASWGGGADGLTF

SEQ ID NO: 575806 - protein, 15 aa, Homo sapiens
  CDR3 for beta chain variable domain of TCR clone 287903 (TRBV4-2, TRBJ1-2)
CASSRNTGAGYGYTV

SEQ ID NO: 575807 - protein, 23 aa, Homo sapiens
  CDR3 for alpha chain variable domain of TCR clone 287904 (TRAV8-3, TRAJ38)
CAVGASNAGNNHTQNPDPAVYQL

SEQ ID NO: 575808 - protein, 15 aa, Homo sapiens
  CDR3 for beta chain variable domain of TCR clone 287904 (TRBV11-3, TRBJ1-3)
CASSLFGPSGNTIYF

SEQ ID NO: 575809 - protein, 14 aa, Homo sapiens
  CDR3 for alpha chain variable domain of TCR clone 287905 (TRAV12-1, TRAJ12)
CVVTRMDSSYKFIF

SEQ ID NO: 575810 - protein, 13 aa, Homo sapiens
  CDR3 for beta chain variable domain of TCR clone 287905 (TRBV20-1, TRBJ1-1)
CSARGGGNTEAVF

SEQ ID NO: 575811 - protein, 14 aa, Homo sapiens
  CDR3 for alpha chain variable domain of TCR clone 287906 (TRAV23/DV6, TRAJ3)
CAASMASSASKIIF

SEQ ID NO: 575812 - protein, 12 aa, Homo sapiens
  CDR3 for beta chain variable domain of TCR clone 287906 (TRBV29-1, TRBJ2-3)
CSVTGGADTQYF

SEQ ID NO: 575813 - protein, 22 aa, Homo sapiens
  CDR3 for alpha chain variable domain of TCR clone 287907 (TRAV13-1, TRAJ35)
CAASKGGFGNVLHCGSCNQVIV

SEQ ID NO: 575814 - protein, 13 aa, Homo sapiens
  CDR3 for beta chain variable domain of TCR clone 287907 (TRBV7-3, TRBJ1-1)
CASSQDWGAEAFF

SEQ ID NO: 575815 - protein, 16 aa, Homo sapiens
  CDR3 for alpha chain variable domain of TCR clone 287908 (TRAV12-2, TRAJ53)
CAMSPGSGGSNYKLTF

SEQ ID NO: 575816 - protein, 17 aa, Homo sapiens
  CDR3 for beta chain variable domain of TCR clone 287908 (TRBV20-1, TRBJ2-2)
CSASGSGQGGLTGELFF

SEQ ID NO: 575817 - protein, 14 aa, Homo sapiens
  CDR3 for alpha chain variable domain of TCR clone 287909 (TRAV1-2, TRAJ16)
CAVNRFSDGQKLLF

SEQ ID NO: 575818 - protein, 15 aa, Homo sapiens
  CDR3 for beta chain variable domain of TCR clone 287909 (TRBV29-1, TRBJ2-7)
CSVGFFDRGSYEQYF

SEQ ID NO: 575819 - protein, 15 aa, Homo sapiens
  CDR3 for alpha chain variable domain of TCR clone 287910 (TRAV12-1, TRAJ45)
CVVLSGGGGADGLTF

SEQ ID NO: 575820 - protein, 13 aa, Homo sapiens
  CDR3 for beta chain variable domain of TCR clone 287910 (TRBV7-3, TRBJ1-1)
CASSQDWGAEAVF

SEQ ID NO: 575821 - protein, 16 aa, Homo sapiens
  CDR3 for alpha chain variable domain of TCR clone 287911 (TRAV13-1, TRAJ18)
CAASRMRGSTLGRLYF

SEQ ID NO: 575822 - protein, 14 aa, Homo sapiens
  CDR3 for beta chain variable domain of TCR clone 287911 (TRBV19, TRBJ1-2)
CASSLQGQAYGYTF

SEQ ID NO: 575823 - protein, 17 aa, Homo sapiens
  CDR3 for alpha chain variable domain of TCR clone 287912 (TRAV3, TRAJ6)
CAVRDGPRAGGSYIPTF

SEQ ID NO: 575824 - protein, 15 aa, Homo sapiens
  CDR3 for beta chain variable domain of TCR clone 287912 (TRBV28, TRBJ2-1)
CASSIIAGGRGEQFF

SEQ ID NO: 575825 - protein, 14 aa, Homo sapiens
  CDR3 for alpha chain variable domain of TCR clone 287913 (TRAV2, TRAJ23)
CAVGLRNQGGKLIL

SEQ ID NO: 575826 - protein, 13 aa, Homo sapiens
  CDR3 for beta chain variable domain of TCR clone 287913 (TRBV12-4, TRBJ2-5)
CTSSPGTEETQYF

SEQ ID NO: 575827 - protein, 13 aa, Homo sapiens
  CDR3 for alpha chain variable domain of TCR clone 287914 (TRAV12-2, TRAJ20)
CAVYPSNDYKLSF

SEQ ID NO: 575828 - protein, 15 aa, Homo sapiens
  CDR3 for beta chain variable domain of TCR clone 287914 (TRBV27, TRBJ2-2)
CASSLEGPNTGELFF

SEQ ID NO: 575829 - protein, 14 aa, Homo sapiens
  CDR3 for alpha chain variable domain of TCR clone 287915 (TRAV26-2, TRAJ27)
CILRDISDAGKSTF

SEQ ID NO: 575830 - protein, 14 aa, Homo sapiens
  CDR3 for beta chain variable domain of TCR clone 287915 (TRBV10-3, TRBJ2-7)
CHKRTGLRSYEQYF

SEQ ID NO: 575831 - protein, 14 aa, Homo sapiens
  CDR3 for alpha chain variable domain of TCR clone 287916 (TRAV35, TRAJ33)
CAGSSQDSNYQLIW

SEQ ID NO: 575832 - protein, 15 aa, Homo sapiens
  CDR3 for beta chain variable domain of TCR clone 287916 (TRBV5-4, TRBJ2-6)
CASSSGRTGANVLTF

SEQ ID NO: 575833 - protein, 11 aa, Homo sapiens
  CDR3 for alpha chain variable domain of TCR clone 287917 (TRAV12-3, TRAJ17)
CMMLTGNKLTF

SEQ ID NO: 575834 - protein, 15 aa, Homo sapiens
  CDR3 for beta chain variable domain of TCR clone 287917 (TRBV20-1, TRBJ2-7)
CSARDRVSGMDEQYF

SEQ ID NO: 575835 - protein, 13 aa, Homo sapiens
  CDR3 for alpha chain variable domain of TCR clone 287918 (TRAV29/DV5, TRAJ29)
CAASAAGNTPLCF

SEQ ID NO: 575836 - protein, 16 aa, Homo sapiens
  CDR3 for beta chain variable domain of TCR clone 287918 (TRBV12-4, TRBJ2-5)
CASSFFVRGRQETQYF

SEQ ID NO: 575837 - protein, 12 aa, Homo sapiens
  CDR3 for alpha chain variable domain of TCR clone 287919 (TRAV21, TRAJ13)
PGPSGAFQKVTF

SEQ ID NO: 575838 - protein, 15 aa, Homo sapiens
  CDR3 for beta chain variable domain of TCR clone 287919 (TRBV7-9, TRBJ1-6)
CASSSPGRGNSPLHF

SEQ ID NO: 575839 - protein, 13 aa, Homo sapiens
  CDR3 for alpha chain variable domain of TCR clone 287920 (TRAV3, TRAJ27)
CAVRPFGAGKSTF

SEQ ID NO: 575840 - protein, 12 aa, Homo sapiens
  CDR3 for beta chain variable domain of TCR clone 287920 (TRBV6-1, TRBJ2-7)
CASSDYSYEQYF

SEQ ID NO: 575841 - protein, 14 aa, Homo sapiens
  CDR3 for alpha chain variable domain of TCR clone 287921 (TRAV20, TRAJ42)
CAVQAGGSPVNIIF

SEQ ID NO: 575842 - protein, 14 aa, Homo sapiens
  CDR3 for beta chain variable domain of TCR clone 287921 (TRBV28, TRBJ1-2)
CASRIQGANYGYTF

SEQ ID NO: 575843 - protein, 13 aa, Homo sapiens
  CDR3 for alpha chain variable domain of TCR clone 287922 (TRAV12-2, TRAJ20)
CAVYPSNDYKLSF

SEQ ID NO: 575844 - protein, 15 aa, Homo sapiens
  CDR3 for beta chain variable domain of TCR clone 287922 (TRBV27, TRBJ2-5)
CCSSLYPRGGETQYF

SEQ ID NO: 575845 - protein, 16 aa, Homo sapiens
  CDR3 for alpha chain variable domain of TCR clone 287923 (TRAV13-1, TRAJ48)
CAASIFGNFGNEKLTY

SEQ ID NO: 575846 - protein, 12 aa, Homo sapiens
  CDR3 for beta chain variable domain of TCR clone 287923 (TRBV14, TRBJ2-4)
CASSNLKSIQYF

SEQ ID NO: 575847 - protein, 13 aa, Homo sapiens
  CDR3 for alpha chain variable domain of TCR clone 287924 (TRAV35, TRAJ42)
CAGFPGSQGNLIF

SEQ ID NO: 575848 - protein, 16 aa, Homo sapiens
  CDR3 for beta chain variable domain of TCR clone 287924 (TRBV12-5, TRBJ2-5)
CASGPRTSGNQETQYF

SEQ ID NO: 575849 - protein, 15 aa, Homo sapiens
  CDR3 for alpha chain variable domain of TCR clone 287925 (TRAV12-1, TRAJ44)
CVADLPTGTASKLTF

SEQ ID NO: 575850 - protein, 13 aa, Homo sapiens
  CDR3 for beta chain variable domain of TCR clone 287925 (TRBV6-5, TRBJ2-5)
CACSPQGGETQYF

SEQ ID NO: 575851 - protein, 22 aa, Homo sapiens
  CDR3 for alpha chain variable domain of TCR clone 287926 (TRAV2, TRAJ38)
CAVEDFPNAGNNHIKNPDPAVY

SEQ ID NO: 575852 - protein, 14 aa, Homo sapiens
  CDR3 for beta chain variable domain of TCR clone 287926 (TRBV29-1, TRBJ1-4)
CSVSGRQGGEKLFF

SEQ ID NO: 575853 - protein, 11 aa, Homo sapiens
  CDR3 for alpha chain variable domain of TCR clone 287927 (TRAV4, TRAJ20)
CLVGDKVTTTS

SEQ ID NO: 575854 - protein, 15 aa, Homo sapiens
  CDR3 for beta chain variable domain of TCR clone 287927 (TRBV18, TRBJ2-7)
CASSPSSTGNYEQCF

SEQ ID NO: 575855 - protein, 14 aa, Homo sapiens
  CDR3 for alpha chain variable domain of TCR clone 287928 (TRAV1-1, TRAJ29)
CAVRAHSGNTPLVF

SEQ ID NO: 575856 - protein, 14 aa, Homo sapiens
  CDR3 for beta chain variable domain of TCR clone 287928 (TRBV25-1, TRBJ1-1)
CASTHLGGNTEAFF

SEQ ID NO: 575857 - protein, 13 aa, Homo sapiens
  CDR3 for alpha chain variable domain of TCR clone 287929 (TRAV1-2, TRAJ31)
CAVRPNNNGRLMF

SEQ ID NO: 575858 - protein, 15 aa, Homo sapiens
  CDR3 for beta chain variable domain of TCR clone 287929 (TRBV20-1, TRBJ2-5)
SAVLVGLAGGETQYF

SEQ ID NO: 575859 - protein, 14 aa, Homo sapiens
  CDR3 for alpha chain variable domain of TCR clone 287930 (TRAV1-2, TRAJ8)
CAVREDTGFQKLVF

SEQ ID NO: 575860 - protein, 12 aa, Homo sapiens
  CDR3 for beta chain variable domain of TCR clone 287930 (TRBV6-3, TRBJ2-7)
CASSLGDREQYF

SEQ ID NO: 575861 - protein, 12 aa, Homo sapiens
  CDR3 for alpha chain variable domain of TCR clone 287931 (TRAV17, TRAJ20)
CATDSNDYKLSF

SEQ ID NO: 575862 - protein, 17 aa, Homo sapiens
  CDR3 for beta chain variable domain of TCR clone 287931 (TRBV5-1, TRBJ2-2)
CASSLAGLSGGTGELVF

SEQ ID NO: 575863 - protein, 17 aa, Homo sapiens
  CDR3 for alpha chain variable domain of TCR clone 287932 (TRAV17, TRAJ52)
CATAPRAGGTSYGKLTF

SEQ ID NO: 575864 - protein, 16 aa, Homo sapiens
  CDR3 for beta chain variable domain of TCR clone 287932 (TRBV29-1, TRBJ2-7)
CSVEDAEDGTAYEQYF

SEQ ID NO: 575865 - protein, 10 aa, Homo sapiens
  CDR3 for alpha chain variable domain of TCR clone 287933 (TRAV30, TRAJ48)
CGIGNEKLTF

SEQ ID NO: 575866 - protein, 13 aa, Homo sapiens
  CDR3 for beta chain variable domain of TCR clone 287933 (TRBV5-7, TRBJ1-2)
CASSLIRAPGYTF

SEQ ID NO: 575867 - protein, 15 aa, Homo sapiens
  CDR3 for alpha chain variable domain of TCR clone 287934 (TRAV38-1, TRAJ37)
CAFIFGSGNTGKLIF

SEQ ID NO: 575868 - protein, 14 aa, Homo sapiens
  CDR3 for beta chain variable domain of TCR clone 287934 (TRBV6-1, TRBJ1-3)
CASVQGGGGNTIYF

SEQ ID NO: 575869 - protein, 16 aa, Homo sapiens
  CDR3 for alpha chain variable domain of TCR clone 287935 (TRAV2, TRAJ4)
CAVEDRFTGGYNKLIF

SEQ ID NO: 575870 - protein, 13 aa, Homo sapiens
  CDR3 for beta chain variable domain of TCR clone 287935 (TRBV7-7, TRBJ2-5)
CASSGSGQETQYF

SEQ ID NO: 575871 - protein, 17 aa, Homo sapiens
  CDR3 for alpha chain variable domain of TCR clone 287936 (TRAV3, TRAJ42)
CAVRARDYGGSQGNLIF

SEQ ID NO: 575872 - protein, 20 aa, Homo sapiens
  CDR3 for beta chain variable domain of TCR clone 287936 (TRBV28, TRBJ2-1)
CASTPIGRSPGLAGGNEQFF

SEQ ID NO: 575873 - protein, 15 aa, Homo sapiens
  CDR3 for alpha chain variable domain of TCR clone 287937 (TRAV35, TRAJ40)
CAGQLGTSGTYQFIF

SEQ ID NO: 575874 - protein, 14 aa, Homo sapiens
  CDR3 for beta chain variable domain of TCR clone 287937 (TRBV7-3, TRBJ2-1)
CASSLAGGTNEQFF

SEQ ID NO: 575875 - protein, 14 aa, Homo sapiens
  CDR3 for alpha chain variable domain of TCR clone 287938 (TRAV1-2, TRAJ16)
CAVNRFSDGQKLLF

SEQ ID NO: 575876 - protein, 15 aa, Homo sapiens
  CDR3 for beta chain variable domain of TCR clone 287938 (TRBV7-2, TRBJ2-2)
CASSSLTGGNGELFF

SEQ ID NO: 575877 - protein, 12 aa, Homo sapiens
  CDR3 for alpha chain variable domain of TCR clone 287939 (TRAV13-1, TRAJ3)
CAATGVQQCFQD

SEQ ID NO: 575878 - protein, 16 aa, Homo sapiens
  CDR3 for beta chain variable domain of TCR clone 287939 (TRBV7-3, TRBJ2-2)
CASILKRGTLSGELFF

SEQ ID NO: 575879 - protein, 15 aa, Homo sapiens
  CDR3 for alpha chain variable domain of TCR clone 287940 (TRAV25, TRAJ38)
CAGPLNAGNNRKLIW

SEQ ID NO: 575880 - protein, 15 aa, Homo sapiens
  CDR3 for beta chain variable domain of TCR clone 287940 (TRBV12-4, TRBJ2-1)
CASSLLATGNNEQFF

SEQ ID NO: 575881 - protein, 17 aa, Homo sapiens
  CDR3 for alpha chain variable domain of TCR clone 287941 (TRAV26-1, TRAJ46)
IASSESEKKSSGDKLTF

SEQ ID NO: 575882 - protein, 16 aa, Homo sapiens
  CDR3 for beta chain variable domain of TCR clone 287941 (TRBV5-5, TRBJ1-2)
CASSPTWGRGLYGYTF

SEQ ID NO: 575883 - protein, 18 aa, Homo sapiens
  CDR3 for alpha chain variable domain of TCR clone 287942 (TRAV21, TRAJ52)
CAVRPSPAGGTSYGELTF

SEQ ID NO: 575884 - protein, 15 aa, Homo sapiens
  CDR3 for beta chain variable domain of TCR clone 287942 (TRBV18, TRBJ1-5)
CASSPSDRSNQPQHF

SEQ ID NO: 575885 - protein, 11 aa, Homo sapiens
  CDR3 for alpha chain variable domain of TCR clone 287943 (TRAV13-1, TRAJ43)
CAANNNNDMRF

SEQ ID NO: 575886 - protein, 15 aa, Homo sapiens
  CDR3 for beta chain variable domain of TCR clone 287943 (TRBV6-1, TRBJ2-2)
CASSRLRGDTGELFF

SEQ ID NO: 575887 - protein, 14 aa, Homo sapiens
  CDR3 for alpha chain variable domain of TCR clone 287944 (TRAV38-1, TRAJ45)
CASHSGGGADGITF

SEQ ID NO: 575888 - protein, 16 aa, Homo sapiens
  CDR3 for beta chain variable domain of TCR clone 287944 (TRBV6-1, TRBJ2-5)
CASSETLDRGAETQYF

SEQ ID NO: 575889 - protein, 10 aa, Homo sapiens
  CDR3 for alpha chain variable domain of TCR clone 287945 (TRAV10, TRAJ38)
MAGNNRKLIW

SEQ ID NO: 575890 - protein, 12 aa, Homo sapiens
  CDR3 for beta chain variable domain of TCR clone 287945 (TRBV11-2, TRBJ2-2)
CASSLGGGELFF

SEQ ID NO: 575891 - protein, 16 aa, Homo sapiens
  CDR3 for alpha chain variable domain of TCR clone 287946 (TRAV30, TRAJ24)
CGTEIVDADSWGKFQF

SEQ ID NO: 575892 - protein, 12 aa, Homo sapiens
  CDR3 for beta chain variable domain of TCR clone 287946 (TRBV14, TRBJ2-5)
CASSQPKETQYF

SEQ ID NO: 575893 - protein, 11 aa, Homo sapiens
  CDR3 for alpha chain variable domain of TCR clone 287947 (TRAV12-3, TRAJ43)
CAMSVSNDMRF

SEQ ID NO: 575894 - protein, 13 aa, Homo sapiens
  CDR3 for beta chain variable domain of TCR clone 287947 (TRBV7-7, TRBJ2-3)
CASSLSRADTQYF

SEQ ID NO: 575895 - protein, 19 aa, Homo sapiens
  CDR3 for alpha chain variable domain of TCR clone 287948 (TRAV1-2, TRAJ26)
CLLPLYCERPDNYGQNFVF

SEQ ID NO: 575896 - protein, 12 aa, Homo sapiens
  CDR3 for beta chain variable domain of TCR clone 287948 (TRBV20-1, TRBJ2-1)
CSAQYTYNEQFF

SEQ ID NO: 575897 - protein, 18 aa, Homo sapiens
  CDR3 for alpha chain variable domain of TCR clone 287949 (TRAV26-2, TRAJ45)
CILRLWGYSGGGADGLTF

SEQ ID NO: 575898 - protein, 17 aa, Homo sapiens
  CDR3 for beta chain variable domain of TCR clone 287949 (TRBV28, TRBJ2-3)
CASIPTPAGGRVDTQYF

SEQ ID NO: 575899 - protein, 14 aa, Homo sapiens
  CDR3 for alpha chain variable domain of TCR clone 287950 (TRAV12-3, TRAJ33)
CAMSVPGSNYQFIW

SEQ ID NO: 575900 - protein, 12 aa, Homo sapiens
  CDR3 for beta chain variable domain of TCR clone 287950 (TRBV7-8, TRBJ2-7)
CASSLGDREQYF

SEQ ID NO: 575901 - protein, 12 aa, Homo sapiens
  CDR3 for alpha chain variable domain of TCR clone 287951 (TRAV25, TRAJ31)
CAGHLNNARLMF

SEQ ID NO: 575902 - protein, 12 aa, Homo sapiens
  CDR3 for beta chain variable domain of TCR clone 287951 (TRBV11-2, TRBJ2-2)
CASSLGGGELFF

SEQ ID NO: 575903 - protein, 12 aa, Homo sapiens
  CDR3 for alpha chain variable domain of TCR clone 287952 (TRAV16, TRAJ10)
CSRTGGGNKLTF

SEQ ID NO: 575904 - protein, 18 aa, Homo sapiens
  CDR3 for beta chain variable domain of TCR clone 287952 (TRBV25-1, TRBJ2-2)
CHPSLPGGQGAQNRELFF

SEQ ID NO: 575905 - protein, 12 aa, Homo sapiens
  CDR3 for alpha chain variable domain of TCR clone 287953 (TRAV17, TRAJ53)
CAFGGSNYKLTF

SEQ ID NO: 575906 - protein, 17 aa, Homo sapiens
  CDR3 for beta chain variable domain of TCR clone 287953 (TRBV7-3, TRBJ2-3)
CASSLMKRMRGADTQYF

SEQ ID NO: 575907 - protein, 14 aa, Homo sapiens
  CDR3 for alpha chain variable domain of TCR clone 287954 (TRAV17, TRAJ57)
CATDPQGGSEKLVF

SEQ ID NO: 575908 - protein, 14 aa, Homo sapiens
  CDR3 for beta chain variable domain of TCR clone 287954 (TRBV7-7, TRBJ2-2)
CATRQDSDTGELFF

SEQ ID NO: 575909 - protein, 12 aa, Homo sapiens
  CDR3 for alpha chain variable domain of TCR clone 287955 (TRAV22, TRAJ29)
CAPPSGNTPLVF

SEQ ID NO: 575910 - protein, 14 aa, Homo sapiens
  CDR3 for beta chain variable domain of TCR clone 287955 (TRBV11-2, TRBJ2-7)
CASSLGAGTYEQYF

SEQ ID NO: 575911 - protein, 11 aa, Homo sapiens
  CDR3 for alpha chain variable domain of TCR clone 287956 (TRAV13-1, TRAJ49)
CACMGGNQFYF

SEQ ID NO: 575912 - protein, 16 aa, Homo sapiens
  CDR3 for beta chain variable domain of TCR clone 287956 (TRBV11-2, TRBJ2-2)
CASSLRTGNLIGELFF

SEQ ID NO: 575913 - protein, 11 aa, Homo sapiens
  CDR3 for alpha chain variable domain of TCR clone 287957 (TRAV26-1, TRAJ37)
CIVRVGRKLIL

SEQ ID NO: 575914 - protein, 13 aa, Homo sapiens
  CDR3 for beta chain variable domain of TCR clone 287957 (TRBV14, TRBJ1-2)
CASSEDRRYGYTF

SEQ ID NO: 575915 - protein, 11 aa, Homo sapiens
  CDR3 for alpha chain variable domain of TCR clone 287958 (TRAV2, TRAJ20)
AAVYRDCKLSF

SEQ ID NO: 575916 - protein, 15 aa, Homo sapiens
  CDR3 for beta chain variable domain of TCR clone 287958 (TRBV9, TRBJ1-6)
CASSVAGTGDSPLHF

SEQ ID NO: 575917 - protein, 16 aa, Homo sapiens
  CDR3 for alpha chain variable domain of TCR clone 287959 (TRAV30, TRAJ24)
CGTEIVDADSWGKFQF

SEQ ID NO: 575918 - protein, 15 aa, Homo sapiens
  CDR3 for beta chain variable domain of TCR clone 287959 (TRBV7-9, TRBJ1-4)
CVSSARTGGNEKLFF

SEQ ID NO: 575919 - protein, 10 aa, Homo sapiens
  CDR3 for alpha chain variable domain of TCR clone 287960 (TRAV1-2, TRAJ31)
CAFFDARLMF

SEQ ID NO: 575920 - protein, 12 aa, Homo sapiens
  CDR3 for beta chain variable domain of TCR clone 287960 (TRBV11-2, TRBJ2-1)
CASSPGNNEQFF

SEQ ID NO: 575921 - protein, 11 aa, Homo sapiens
  CDR3 for alpha chain variable domain of TCR clone 287961 (TRAV12-1, TRAJ34)
CVVNKGREFIF

SEQ ID NO: 575922 - protein, 12 aa, Homo sapiens
  CDR3 for beta chain variable domain of TCR clone 287961 (TRBV2, TRBJ2-1)
CAYGPPCNEQFF

SEQ ID NO: 575923 - protein, 14 aa, Homo sapiens
  CDR3 for alpha chain variable domain of TCR clone 287962 (TRAV9-2, TRAJ39)
CALYIYNAGNMPTF

SEQ ID NO: 575924 - protein, 15 aa, Homo sapiens
  CDR3 for beta chain variable domain of TCR clone 287962 (TRBV12-4, TRBJ1-1)
CASSLAVSRGAEAFF

SEQ ID NO: 575925 - protein, 14 aa, Homo sapiens
  CDR3 for alpha chain variable domain of TCR clone 287963 (TRAV1-2, TRAJ29)
CAVRELTSATPLVF

SEQ ID NO: 575926 - protein, 13 aa, Homo sapiens
  CDR3 for beta chain variable domain of TCR clone 287963 (TRBV7-9, TRBJ2-3)
CASSPGSTDTQYF

SEQ ID NO: 575927 - protein, 11 aa, Homo sapiens
  CDR3 for alpha chain variable domain of TCR clone 287964 (TRAV21, TRAJ39)
LLVNAGNMLTF

SEQ ID NO: 575928 - protein, 18 aa, Homo sapiens
  CDR3 for beta chain variable domain of TCR clone 287964 (TRBV7-2, TRBJ2-7)
CASSLAGRGLAGGYEQYF

SEQ ID NO: 575929 - protein, 14 aa, Homo sapiens
  CDR3 for alpha chain variable domain of TCR clone 287965 (TRAV12-3, TRAJ42)
CAMNYGGRQGNLIF

SEQ ID NO: 575930 - protein, 17 aa, Homo sapiens
  CDR3 for beta chain variable domain of TCR clone 287965 (TRBV7-3, TRBJ2-3)
CASSLMKRMRGADTQYF

SEQ ID NO: 575931 - protein, 12 aa, Homo sapiens
  CDR3 for alpha chain variable domain of TCR clone 287966 (TRAV22, TRAJ22)
CAPGGSARQLTF

SEQ ID NO: 575932 - protein, 11 aa, Homo sapiens
  CDR3 for beta chain variable domain of TCR clone 287966 (TRBV29-1, TRBJ2-5)
CSEDRTGTQYF

SEQ ID NO: 575933 - protein, 11 aa, Homo sapiens
  CDR3 for alpha chain variable domain of TCR clone 287967 (TRAV17, TRAJ9)
CATTGGFKTIF

SEQ ID NO: 575934 - protein, 15 aa, Homo sapiens
  CDR3 for beta chain variable domain of TCR clone 287967 (TRBV7-2, TRBJ2-2)
CASSTRTGYTGELFF

SEQ ID NO: 575935 - protein, 14 aa, Homo sapiens
  CDR3 for alpha chain variable domain of TCR clone 287968 (TRAV3, TRAJ7)
CAVREEEREQQTRF

SEQ ID NO: 575936 - protein, 14 aa, Homo sapiens
  CDR3 for beta chain variable domain of TCR clone 287968 (TRBV7-8, TRBJ2-7)
CASSQETGSSTSGR

SEQ ID NO: 575937 - protein, 16 aa, Homo sapiens
  CDR3 for alpha chain variable domain of TCR clone 287969 (TRAV3, TRAJ37)
FAVRPHGSGNTGKLIF

SEQ ID NO: 575938 - protein, 13 aa, Homo sapiens
  CDR3 for beta chain variable domain of TCR clone 287969 (TRBV2, TRBJ1-5)
CASGTGWYQPQHF

SEQ ID NO: 575939 - protein, 14 aa, Homo sapiens
  CDR3 for alpha chain variable domain of TCR clone 287970 (TRAV1-1, TRAJ28)
CAAPSGAGSYQLTF

SEQ ID NO: 575940 - protein, 17 aa, Homo sapiens
  CDR3 for beta chain variable domain of TCR clone 287970 (TRBV4-1, TRBJ1-4)
CASSQEGPRGVEEKLFF

SEQ ID NO: 575941 - protein, 19 aa, Homo sapiens
  CDR3 for alpha chain variable domain of TCR clone 287971 (TRAV38-1, TRAJ53)
CAFMKHGLESGGSNYKLTF

SEQ ID NO: 575942 - protein, 15 aa, Homo sapiens
  CDR3 for beta chain variable domain of TCR clone 287971 (TRBV7-2, TRBJ1-3)
CASSLQAGCENTIYF

SEQ ID NO: 575943 - protein, 12 aa, Homo sapiens
  CDR3 for alpha chain variable domain of TCR clone 287972 (TRAV16, TRAJ10)
CSRTGGGNKLTF

SEQ ID NO: 575944 - protein, 15 aa, Homo sapiens
  CDR3 for beta chain variable domain of TCR clone 287972 (TRBV3-1, TRBJ2-1)
CASSTGDTNYNEQFF

SEQ ID NO: 575945 - protein, 15 aa, Homo sapiens
  CDR3 for alpha chain variable domain of TCR clone 287973 (TRAV1-2, TRAJ32)
CAVRGYGGATNKLIF

SEQ ID NO: 575946 - protein, 15 aa, Homo sapiens
  CDR3 for beta chain variable domain of TCR clone 287973 (TRBV25-1, TRBJ2-5)
CASSDTGTHQETQCF

SEQ ID NO: 575947 - protein, 15 aa, Homo sapiens
  CDR3 for alpha chain variable domain of TCR clone 287974 (TRAV17, TRAJ24)
CATAALTDSWGKLQF

SEQ ID NO: 575948 - protein, 17 aa, Homo sapiens
  CDR3 for beta chain variable domain of TCR clone 287974 (TRBV13, TRBJ2-3)
CASSLSRVAGGRNTQYF

SEQ ID NO: 575949 - protein, 11 aa, Homo sapiens
  CDR3 for alpha chain variable domain of TCR clone 287975 (TRAV21, TRAJ41)
CAVRSGYALNF

SEQ ID NO: 575950 - protein, 16 aa, Homo sapiens
  CDR3 for beta chain variable domain of TCR clone 287975 (TRBV24-1, TRBJ2-3)
CATSDPGTGATDTQYF

SEQ ID NO: 575951 - protein, 11 aa, Homo sapiens
  CDR3 for alpha chain variable domain of TCR clone 287976 (TRAV29/DV5, TRAJ49)
CAAVPGNQFYF

SEQ ID NO: 575952 - protein, 17 aa, Homo sapiens
  CDR3 for beta chain variable domain of TCR clone 287976 (TRBV4-2, TRBJ1-1)
CASTQFGGGSGNTEAFF

SEQ ID NO: 575953 - protein, 12 aa, Homo sapiens
  CDR3 for alpha chain variable domain of TCR clone 287977 (TRAV2, TRAJ5)
CALDTGRRALTF

SEQ ID NO: 575954 - protein, 14 aa, Homo sapiens
  CDR3 for beta chain variable domain of TCR clone 287977 (TRBV5-4, TRBJ1-1)
CASSLDSRRYEAFF

SEQ ID NO: 575955 - protein, 14 aa, Homo sapiens
  CDR3 for alpha chain variable domain of TCR clone 287978 (TRAV25, TRAJ35)
CARRMEGFGNVLHC

SEQ ID NO: 575956 - protein, 16 aa, Homo sapiens
  CDR3 for beta chain variable domain of TCR clone 287978 (TRBV5-1, TRBJ2-3)
CASSVFPMSSTDTQYF

SEQ ID NO: 575957 - protein, 14 aa, Homo sapiens
  CDR3 for alpha chain variable domain of TCR clone 287979 (TRAV17, TRAJ42)
CAQNYGGSQGNLIF

SEQ ID NO: 575958 - protein, 13 aa, Homo sapiens
  CDR3 for beta chain variable domain of TCR clone 287979 (TRBV20-1, TRBJ1-2)
CSVPRSGRYGYTF

SEQ ID NO: 575959 - protein, 15 aa, Homo sapiens
  CDR3 for alpha chain variable domain of TCR clone 287980 (TRAV12-2, TRAJ53)
CAVNGGGGSNYKLTF

SEQ ID NO: 575960 - protein, 19 aa, Homo sapiens
  CDR3 for beta chain variable domain of TCR clone 287980 (TRBV6-1, TRBJ1-3)
CASVQGGGWKHHIFWRGKL

SEQ ID NO: 575961 - protein, 11 aa, Homo sapiens
  CDR3 for alpha chain variable domain of TCR clone 287981 (TRAV1-2, TRAJ20)
CAVSNDYKLSF

SEQ ID NO: 575962 - protein, 16 aa, Homo sapiens
  CDR3 for beta chain variable domain of TCR clone 287981 (TRBV29-1, TRBJ2-6)
CSVENITYAGANVLTF

SEQ ID NO: 575963 - protein, 14 aa, Homo sapiens
  CDR3 for alpha chain variable domain of TCR clone 287982 (TRAV17, TRAJ54)
CATGANQGAQQLVF

SEQ ID NO: 575964 - protein, 12 aa, Homo sapiens
  CDR3 for beta chain variable domain of TCR clone 287982 (TRBV7-9, TRBJ2-7)
CASSIKREEQYF

SEQ ID NO: 575965 - protein, 12 aa, Homo sapiens
  CDR3 for alpha chain variable domain of TCR clone 287983 (TRAV17, TRAJ20)
CATQSNDYKRSF

SEQ ID NO: 575966 - protein, 13 aa, Homo sapiens
  CDR3 for beta chain variable domain of TCR clone 287983 (TRBV10-3, TRBJ1-1)
CAIIPEGGTEAFF

SEQ ID NO: 575967 - protein, 12 aa, Homo sapiens
  CDR3 for alpha chain variable domain of TCR clone 287984 (TRAV16, TRAJ10)
CSRTGGGNKLTF

SEQ ID NO: 575968 - protein, 16 aa, Homo sapiens
  CDR3 for beta chain variable domain of TCR clone 287984 (TRBV9, TRBJ2-1)
CASSVAAGVHYNEQFF

SEQ ID NO: 575969 - protein, 15 aa, Homo sapiens
  CDR3 for alpha chain variable domain of TCR clone 287985 (TRAV8-4, TRAJ8)
CAVSDLNTGFQKLVF

SEQ ID NO: 575970 - protein, 15 aa, Homo sapiens
  CDR3 for beta chain variable domain of TCR clone 287985 (TRBV6-3, TRBJ2-7)
CASSSPGTVFYEQYF

SEQ ID NO: 575971 - protein, 10 aa, Homo sapiens
  CDR3 for alpha chain variable domain of TCR clone 287986 (TRAV23/DV6, TRAJ57)
CAASSTLSQG

SEQ ID NO: 575972 - protein, 14 aa, Homo sapiens
  CDR3 for beta chain variable domain of TCR clone 287986 (TRBV28, TRBJ2-1)
RASSLNGRNNEQFF

SEQ ID NO: 575973 - protein, 13 aa, Homo sapiens
  CDR3 for alpha chain variable domain of TCR clone 287987 (TRAV13-1, TRAJ33)
CAASRAGNYQLIW

SEQ ID NO: 575974 - protein, 15 aa, Homo sapiens
  CDR3 for beta chain variable domain of TCR clone 287987 (TRBV2, TRBJ2-7)
CASSEQCFGRTRLTV

SEQ ID NO: 575975 - protein, 13 aa, Homo sapiens
  CDR3 for alpha chain variable domain of TCR clone 287988 (TRAV23/DV6, TRAJ22)
CAPYSGSARQLTF

SEQ ID NO: 575976 - protein, 15 aa, Homo sapiens
  CDR3 for beta chain variable domain of TCR clone 287988 (TRBV9, TRBJ1-6)
CASSVAGTGDSPLHF

SEQ ID NO: 575977 - protein, 13 aa, Homo sapiens
  CDR3 for alpha chain variable domain of TCR clone 287989 (TRAV13-1, TRAJ6)
CAASSGESYIPTF

SEQ ID NO: 575978 - protein, 15 aa, Homo sapiens
  CDR3 for beta chain variable domain of TCR clone 287989 (TRBV12-4, TRBJ2-5)
CASSPPTGLQETQYF

SEQ ID NO: 575979 - protein, 14 aa, Homo sapiens
  CDR3 for alpha chain variable domain of TCR clone 287990 (TRAV12-3, TRAJ10)
SHLPLTGGGNKLTF

SEQ ID NO: 575980 - protein, 16 aa, Homo sapiens
  CDR3 for beta chain variable domain of TCR clone 287990 (TRBV3-1, TRBJ1-2)
CASSQGQGVQRDGYTF

SEQ ID NO: 575981 - protein, 16 aa, Homo sapiens
  CDR3 for alpha chain variable domain of TCR clone 287991 (TRAV38-2/DV8, TRAJ9)
CAYRSLLNTGGFKTIF

SEQ ID NO: 575982 - protein, 13 aa, Homo sapiens
  CDR3 for beta chain variable domain of TCR clone 287991 (TRBV19, TRBJ1-2)
CASSVPGQDGYTF

SEQ ID NO: 575983 - protein, 14 aa, Homo sapiens
  CDR3 for alpha chain variable domain of TCR clone 287992 (TRAV12-3, TRAJ39)
CAMRIQNAGNMLTF

SEQ ID NO: 575984 - protein, 12 aa, Homo sapiens
  CDR3 for beta chain variable domain of TCR clone 287992 (TRBV18, TRBJ2-7)
CASSLDSYEQYF

SEQ ID NO: 575985 - protein, 18 aa, Homo sapiens
  CDR3 for alpha chain variable domain of TCR clone 287993 (TRAV16, TRAJ52)
CALSGVDGGGTSYGKLTF

SEQ ID NO: 575986 - protein, 15 aa, Homo sapiens
  CDR3 for beta chain variable domain of TCR clone 287993 (TRBV11-3, TRBJ2-3)
CASSAGTVVTNTQYF

SEQ ID NO: 575987 - protein, 14 aa, Homo sapiens
  CDR3 for alpha chain variable domain of TCR clone 287994 (TRAV12-2, TRAJ13)
CAVKKTGGYQKVTF

SEQ ID NO: 575988 - protein, 15 aa, Homo sapiens
  CDR3 for beta chain variable domain of TCR clone 287994 (TRBV6-3, TRBJ2-7)
CGSSSPGTVFYEQYF

SEQ ID NO: 575989 - protein, 17 aa, Homo sapiens
  CDR3 for alpha chain variable domain of TCR clone 287995 (TRAV8-2, TRAJ17)
CVVSDRRFKAAGNKLTF

SEQ ID NO: 575990 - protein, 18 aa, Homo sapiens
  CDR3 for beta chain variable domain of TCR clone 287995 (TRBV7-9, TRBJ2-7)
CASSLTTSGRRTWYEQYF

SEQ ID NO: 575991 - protein, 15 aa, Homo sapiens
  CDR3 for alpha chain variable domain of TCR clone 287996 (TRAV13-1, TRAJ17)
CAASIERAAGNKLTF

SEQ ID NO: 575992 - protein, 12 aa, Homo sapiens
  CDR3 for beta chain variable domain of TCR clone 287996 (TRBV11-2, TRBJ2-2)
CASSLGGGELFF

SEQ ID NO: 575993 - protein, 16 aa, Homo sapiens
  CDR3 for alpha chain variable domain of TCR clone 287997 (TRAV30, TRAJ24)
CGTEIVDADSWGKFQF

SEQ ID NO: 575994 - protein, 15 aa, Homo sapiens
  CDR3 for beta chain variable domain of TCR clone 287997 (TRBV5-1, TRBJ2-1)
CASGPPRAPYNEQFF

SEQ ID NO: 575995 - protein, 15 aa, Homo sapiens
  CDR3 for alpha chain variable domain of TCR clone 287998 (TRAV26-1, TRAJ23)
CIVRVAINQGGKLIF

SEQ ID NO: 575996 - protein, 14 aa, Homo sapiens
  CDR3 for beta chain variable domain of TCR clone 287998 (TRBV7-3, TRBJ2-1)
CASSLAGGTNEQFF

SEQ ID NO: 575997 - protein, 15 aa, Homo sapiens
  CDR3 for alpha chain variable domain of TCR clone 287999 (TRAV17, TRAJ48)
CATDETNFGNEKLTF

SEQ ID NO: 575998 - protein, 16 aa, Homo sapiens
  CDR3 for beta chain variable domain of TCR clone 287999 (TRBV7-2, TRBJ2-5)
CASSSKWLSGQETQYF

SEQ ID NO: 575999 - protein, 14 aa, Homo sapiens
  CDR3 for alpha chain variable domain of TCR clone 288000 (TRAV12-2, TRAJ13)
CAVKKTGGYQKVTC

SEQ ID NO: 576000 - protein, 13 aa, Homo sapiens
  CDR3 for beta chain variable domain of TCR clone 288000 (TRBV12-5, TRBJ2-3)
CASGDRQSDTQYF

SEQ ID NO: 576001 - protein, 12 aa, Homo sapiens
  CDR3 for alpha chain variable domain of TCR clone 288001 (TRAV17, TRAJ11)
CATDKGYSTLTF

SEQ ID NO: 576002 - protein, 14 aa, Homo sapiens
  CDR3 for beta chain variable domain of TCR clone 288001 (TRBV7-8, TRBJ2-3)
CASSLEAGTDTQYF

SEQ ID NO: 576003 - protein, 12 aa, Homo sapiens
  CDR3 for alpha chain variable domain of TCR clone 288002 (TRAV12-3, TRAJ40)
CAMSSGTYKYIF

SEQ ID NO: 576004 - protein, 15 aa, Homo sapiens
  CDR3 for beta chain variable domain of TCR clone 288002 (TRBV7-3, TRBJ2-2)
CASSETGQGTGELFY

SEQ ID NO: 576005 - protein, 17 aa, Homo sapiens
  CDR3 for alpha chain variable domain of TCR clone 288003 (TRAV3, TRAJ6)
CAVRDGPRAGGSYIPTF

SEQ ID NO: 576006 - protein, 17 aa, Homo sapiens
  CDR3 for beta chain variable domain of TCR clone 288003 (TRBV11-3, TRBJ2-5)
CASSLPGVRGGKETQYF

SEQ ID NO: 576007 - protein, 13 aa, Homo sapiens
  CDR3 for alpha chain variable domain of TCR clone 288004 (TRAV1-1, TRAJ33)
CAVRRDCNYQLIC

SEQ ID NO: 576008 - protein, 16 aa, Homo sapiens
  CDR3 for beta chain variable domain of TCR clone 288004 (TRBV6-1, TRBJ2-2)
CASSAFRGGDTGELFF

SEQ ID NO: 576009 - protein, 14 aa, Homo sapiens
  CDR3 for alpha chain variable domain of TCR clone 288005 (TRAV26-1, TRAJ45)
CIEVTGGGADGLTF

SEQ ID NO: 576010 - protein, 12 aa, Homo sapiens
  CDR3 for beta chain variable domain of TCR clone 288005 (TRBV7-6, TRBJ1-2)
CQQLSGRLWLHF

SEQ ID NO: 576011 - protein, 13 aa, Homo sapiens
  CDR3 for alpha chain variable domain of TCR clone 288006 (TRAV21, TRAJ57)
CAVTQGGSEKLVF

SEQ ID NO: 576012 - protein, 15 aa, Homo sapiens
  CDR3 for beta chain variable domain of TCR clone 288006 (TRBV7-9, TRBJ1-5)
CASSQGYQPNQPQHF

SEQ ID NO: 576013 - protein, 17 aa, Homo sapiens
  CDR3 for alpha chain variable domain of TCR clone 288007 (TRAV8-6, TRAJ8)
CAVKEGIENTGFRKLVF

SEQ ID NO: 576014 - protein, 12 aa, Homo sapiens
  CDR3 for beta chain variable domain of TCR clone 288007 (TRBV19, TRBJ1-4)
CASKDWPGGLFF

SEQ ID NO: 576015 - protein, 15 aa, Homo sapiens
  CDR3 for alpha chain variable domain of TCR clone 288008 (TRAV13-1, TRAJ45)
CAASGPGGGADGLTL

SEQ ID NO: 576016 - protein, 12 aa, Homo sapiens
  CDR3 for beta chain variable domain of TCR clone 288008 (TRBV11-2, TRBJ2-2)
CASSLGGGELFF

SEQ ID NO: 576017 - protein, 14 aa, Homo sapiens
  CDR3 for alpha chain variable domain of TCR clone 288009 (TRAV8-1, TRAJ24)
CVVNAADSWGKLQF

SEQ ID NO: 576018 - protein, 16 aa, Homo sapiens
  CDR3 for beta chain variable domain of TCR clone 288009 (TRBV4-3, TRBJ2-1)
CASSPALDRGVNEQFF

SEQ ID NO: 576019 - protein, 14 aa, Homo sapiens
  CDR3 for alpha chain variable domain of TCR clone 288010 (TRAV1-1, TRAJ28)
CAAPSGAGSYQLTF

SEQ ID NO: 576020 - protein, 15 aa, Homo sapiens
  CDR3 for beta chain variable domain of TCR clone 288010 (TRBV7-9, TRBJ1-5)
CASSQGHQPNQPQHF

SEQ ID NO: 576021 - protein, 13 aa, Homo sapiens
  CDR3 for alpha chain variable domain of TCR clone 288011 (TRAV12-1, TRAJ43)
CVVSHHNNNDTRF

SEQ ID NO: 576022 - protein, 14 aa, Homo sapiens
  CDR3 for beta chain variable domain of TCR clone 288011 (TRBV5-5, TRBJ2-2)
CASSLLGDTGELFF

SEQ ID NO: 576023 - protein, 14 aa, Homo sapiens
  CDR3 for alpha chain variable domain of TCR clone 288012 (TRAV17, TRAJ53)
CATDAGGSNYKLTF

SEQ ID NO: 576024 - protein, 16 aa, Homo sapiens
  CDR3 for beta chain variable domain of TCR clone 288012 (TRBV4-1, TRBJ1-1)
CASSQDAGMGNAVAFF

SEQ ID NO: 576025 - protein, 15 aa, Homo sapiens
  CDR3 for alpha chain variable domain of TCR clone 288013 (TRAV21, TRAJ10)
CAVPLLTGGGNKLTF

SEQ ID NO: 576026 - protein, 14 aa, Homo sapiens
  CDR3 for beta chain variable domain of TCR clone 288013 (TRBV12-4, TRBJ1-1)
CASSLGTGGTEAVF

SEQ ID NO: 576027 - protein, 15 aa, Homo sapiens
  CDR3 for alpha chain variable domain of TCR clone 288014 (TRAV13-1, TRAJ32)
CAASIYGGVTNKLIF

SEQ ID NO: 576028 - protein, 15 aa, Homo sapiens
  CDR3 for beta chain variable domain of TCR clone 288014 (TRBV12-4, TRBJ2-5)
CASSPPTGLQETQYF

SEQ ID NO: 576029 - protein, 14 aa, Homo sapiens
  CDR3 for alpha chain variable domain of TCR clone 288015 (TRAV1-1, TRAJ27)
CAVIYNTNACKSTF

SEQ ID NO: 576030 - protein, 15 aa, Homo sapiens
  CDR3 for beta chain variable domain of TCR clone 288015 (TRBV6-3, TRBJ2-7)
CASSSPGTVFYEQYF

SEQ ID NO: 576031 - protein, 16 aa, Homo sapiens
  CDR3 for alpha chain variable domain of TCR clone 288016 (TRAV12-3, TRAJ53)
CAMIPGSGGSNYKPTF

SEQ ID NO: 576032 - protein, 11 aa, Homo sapiens
  CDR3 for beta chain variable domain of TCR clone 288016 (TRBV29-1, TRBJ2-5)
CSEDRTGTQYF

SEQ ID NO: 576033 - protein, 13 aa, Homo sapiens
  CDR3 for alpha chain variable domain of TCR clone 288017 (TRAV12-2, TRAJ12)
CAVNWDSSYRLIF

SEQ ID NO: 576034 - protein, 14 aa, Homo sapiens
  CDR3 for beta chain variable domain of TCR clone 288017 (TRBV7-6, TRBJ2-3)
CASSLGTVTDTQYF

SEQ ID NO: 576035 - protein, 14 aa, Homo sapiens
  CDR3 for alpha chain variable domain of TCR clone 288018 (TRAV1-2, TRAJ16)
CAVNRFSDGQKLLF

SEQ ID NO: 576036 - protein, 12 aa, Homo sapiens
  CDR3 for beta chain variable domain of TCR clone 288018 (TRBV7-9, TRBJ2-7)
CASSLEGNEQYF

SEQ ID NO: 576037 - protein, 12 aa, Homo sapiens
  CDR3 for alpha chain variable domain of TCR clone 288019 (TRAV17, TRAJ28)
WDSGAGSYQLTF

SEQ ID NO: 576038 - protein, 13 aa, Homo sapiens
  CDR3 for beta chain variable domain of TCR clone 288019 (TRBV11-3, TRBJ1-1)
CAGSRQPNTEAFF

SEQ ID NO: 576039 - protein, 13 aa, Homo sapiens
  CDR3 for alpha chain variable domain of TCR clone 288020 (TRAV8-6, TRAJ49)
CAVITNTGNQFYF

SEQ ID NO: 576040 - protein, 15 aa, Homo sapiens
  CDR3 for beta chain variable domain of TCR clone 288020 (TRBV28, TRBJ2-1)
CASSIIAGGRSEQFF

SEQ ID NO: 576041 - protein, 14 aa, Homo sapiens
  CDR3 for alpha chain variable domain of TCR clone 288021 (TRAV8-1, TRAJ39)
CAVNASNAGNMLTF

SEQ ID NO: 576042 - protein, 16 aa, Homo sapiens
  CDR3 for beta chain variable domain of TCR clone 288021 (TRBV7-3, TRBJ2-2)
CASSLKRGTLSGELFF

SEQ ID NO: 576043 - protein, 16 aa, Homo sapiens
  CDR3 for alpha chain variable domain of TCR clone 288022 (TRAV3, TRAJ40)
CAVRDRIASGTYKYNF

SEQ ID NO: 576044 - protein, 13 aa, Homo sapiens
  CDR3 for beta chain variable domain of TCR clone 288022 (TRBV10-3, TRBJ2-7)
CASKLAVNYEQYF

SEQ ID NO: 576045 - protein, 14 aa, Homo sapiens
  CDR3 for alpha chain variable domain of TCR clone 288023 (TRAV4, TRAJ6)
CLVGEAGGSYIPTF

SEQ ID NO: 576046 - protein, 15 aa, Homo sapiens
  CDR3 for beta chain variable domain of TCR clone 288023 (TRBV11-3, TRBJ2-3)
CASLKDGREGDTQYF

SEQ ID NO: 576047 - protein, 13 aa, Homo sapiens
  CDR3 for alpha chain variable domain of TCR clone 288024 (TRAV35, TRAJ36)
CAGPRIGANNLFF

SEQ ID NO: 576048 - protein, 15 aa, Homo sapiens
  CDR3 for beta chain variable domain of TCR clone 288024 (TRBV28, TRBJ2-5)
CASRTPWSYQETQYF

SEQ ID NO: 576049 - protein, 10 aa, Homo sapiens
  CDR3 for alpha chain variable domain of TCR clone 288025 (TRAV23/DV6, TRAJ57)
CAASSTLSQG

SEQ ID NO: 576050 - protein, 18 aa, Homo sapiens
  CDR3 for beta chain variable domain of TCR clone 288025 (TRBV25-1, TRBJ1-1)
LSVPLGQHPPGGNTEAFF

SEQ ID NO: 576051 - protein, 11 aa, Homo sapiens
  CDR3 for alpha chain variable domain of TCR clone 288026 (TRAV8-3, TRAJ4)
AAAGGYNKLIF

SEQ ID NO: 576052 - protein, 15 aa, Homo sapiens
  CDR3 for beta chain variable domain of TCR clone 288026 (TRBV6-5, TRBJ2-1)
CASSYDAGAGNEQFF

SEQ ID NO: 576053 - protein, 14 aa, Homo sapiens
  CDR3 for alpha chain variable domain of TCR clone 288027 (TRAV8-1, TRAJ34)
CTVNPSYNTDKLIF

SEQ ID NO: 576054 - protein, 16 aa, Homo sapiens
  CDR3 for beta chain variable domain of TCR clone 288027 (TRBV7-2, TRBJ2-6)
CASSLAGRSGANVLTF

SEQ ID NO: 576055 - protein, 14 aa, Homo sapiens
  CDR3 for alpha chain variable domain of TCR clone 288028 (TRAV9-2, TRAJ39)
CALYIYNARNMLTF

SEQ ID NO: 576056 - protein, 14 aa, Homo sapiens
  CDR3 for beta chain variable domain of TCR clone 288028 (TRBV12-5, TRBJ2-5)
CASGSRTHQETQYF

SEQ ID NO: 576057 - protein, 18 aa, Homo sapiens
  CDR3 for alpha chain variable domain of TCR clone 288029 (TRAV13-1, TRAJ52)
CAASKRSAGGTSYGKLTF

SEQ ID NO: 576058 - protein, 14 aa, Homo sapiens
  CDR3 for beta chain variable domain of TCR clone 288029 (TRBV5-1, TRBJ2-5)
CASSLAGKQETQYF

SEQ ID NO: 576059 - protein, 15 aa, Homo sapiens
  CDR3 for alpha chain variable domain of TCR clone 288030 (TRAV13-1, TRAJ32)
CAASIYGGATNKLIF

SEQ ID NO: 576060 - protein, 17 aa, Homo sapiens
  CDR3 for beta chain variable domain of TCR clone 288030 (TRBV7-2, TRBJ2-2)
CASSPRGAGEGTGELFF

SEQ ID NO: 576061 - protein, 10 aa, Homo sapiens
  CDR3 for alpha chain variable domain of TCR clone 288031 (TRAV6, TRAJ13)
CVRTGTKLQG

SEQ ID NO: 576062 - protein, 14 aa, Homo sapiens
  CDR3 for beta chain variable domain of TCR clone 288031 (TRBV6-3, TRBJ2-7)
CASSYSGDHYEQYF

SEQ ID NO: 576063 - protein, 17 aa, Homo sapiens
  CDR3 for alpha chain variable domain of TCR clone 288032 (TRAV3, TRAJ6)
CAVRDGPRAGGSSIPTF

SEQ ID NO: 576064 - protein, 15 aa, Homo sapiens
  CDR3 for beta chain variable domain of TCR clone 288032 (TRBV5-8, TRBJ2-2)
FASSLDRGATGELFF

SEQ ID NO: 576065 - protein, 12 aa, Homo sapiens
  CDR3 for alpha chain variable domain of TCR clone 288033 (TRAV8-6, TRAJ8)
CAVTPGFQKLVF

SEQ ID NO: 576066 - protein, 16 aa, Homo sapiens
  CDR3 for beta chain variable domain of TCR clone 288033 (TRBV7-3, TRBJ2-2)
CASSSKRGTLSGELFF

SEQ ID NO: 576067 - protein, 16 aa, Homo sapiens
  CDR3 for alpha chain variable domain of TCR clone 288034 (TRAV16, TRAJ4)
SALSRMFSGGYNKLIF

SEQ ID NO: 576068 - protein, 12 aa, Homo sapiens
  CDR3 for beta chain variable domain of TCR clone 288034 (TRBV29-1, TRBJ2-3)
CSVTGGADTQYF

SEQ ID NO: 576069 - protein, 13 aa, Homo sapiens
  CDR3 for alpha chain variable domain of TCR clone 288035 (TRAV29/DV5, TRAJ31)
CAASRNNNARLMF

SEQ ID NO: 576070 - protein, 15 aa, Homo sapiens
  CDR3 for beta chain variable domain of TCR clone 288035 (TRBV5-7, TRBJ1-2)
CASSLGVAANYGYTF

SEQ ID NO: 576071 - protein, 13 aa, Homo sapiens
  CDR3 for alpha chain variable domain of TCR clone 288036 (TRAV23/DV6, TRAJ34)
CAAVENNTDKLIF

SEQ ID NO: 576072 - protein, 13 aa, Homo sapiens
  CDR3 for beta chain variable domain of TCR clone 288036 (TRBV29-1, TRBJ2-7)
CSVGPSGGYEQYF

SEQ ID NO: 576073 - protein, 17 aa, Homo sapiens
  CDR3 for alpha chain variable domain of TCR clone 288037 (TRAV4, TRAJ18)
CLVGERSVGSTLGRLSF

SEQ ID NO: 576074 - protein, 16 aa, Homo sapiens
  CDR3 for beta chain variable domain of TCR clone 288037 (TRBV4-2, TRBJ1-1)
CASSASPGRAAPEAFF

SEQ ID NO: 576075 - protein, 13 aa, Homo sapiens
  CDR3 for alpha chain variable domain of TCR clone 288038 (TRAV8-6, TRAJ7)
CAVSEYGNNRLAF

SEQ ID NO: 576076 - protein, 15 aa, Homo sapiens
  CDR3 for beta chain variable domain of TCR clone 288038 (TRBV9, TRBJ1-6)
CASSVAGTGDSPLHF

SEQ ID NO: 576077 - protein, 15 aa, Homo sapiens
  CDR3 for alpha chain variable domain of TCR clone 288039 (TRAV16, TRAJ4)
CALEDPSGSYNKLIF

SEQ ID NO: 576078 - protein, 15 aa, Homo sapiens
  CDR3 for beta chain variable domain of TCR clone 288039 (TRBV10-3, TRBJ2-1)
CAIRNGTSGHNEQFF

SEQ ID NO: 576079 - protein, 15 aa, Homo sapiens
  CDR3 for alpha chain variable domain of TCR clone 288040 (TRAV13-2, TRAJ58)
CVTAQKETSCSRLTF

SEQ ID NO: 576080 - protein, 14 aa, Homo sapiens
  CDR3 for beta chain variable domain of TCR clone 288040 (TRBV7-2, TRBJ2-3)
CASRRGIAADTQYF

SEQ ID NO: 576081 - protein, 17 aa, Homo sapiens
  CDR3 for alpha chain variable domain of TCR clone 288041 (TRAV3, TRAJ42)
CAVRDRDYGGSQGNLIF

SEQ ID NO: 576082 - protein, 15 aa, Homo sapiens
  CDR3 for beta chain variable domain of TCR clone 288041 (TRBV29-1, TRBJ1-2)
CSVVLEAGSNCGYTF

SEQ ID NO: 576083 - protein, 16 aa, Homo sapiens
  CDR3 for alpha chain variable domain of TCR clone 288042 (TRAV3, TRAJ37)
CAVRGKGSGKTGKLIF

SEQ ID NO: 576084 - protein, 13 aa, Homo sapiens
  CDR3 for beta chain variable domain of TCR clone 288042 (TRBV14, TRBJ2-7)
CASSQNRRYEQYF

SEQ ID NO: 576085 - protein, 18 aa, Homo sapiens
  CDR3 for alpha chain variable domain of TCR clone 288043 (TRAV21, TRAJ52)
CAVRPSPAGGTSYGMLTF

SEQ ID NO: 576086 - protein, 13 aa, Homo sapiens
  CDR3 for beta chain variable domain of TCR clone 288043 (TRBV7-3, TRBJ1-1)
CASSQDWGAEAFF

SEQ ID NO: 576087 - protein, 14 aa, Homo sapiens
  CDR3 for alpha chain variable domain of TCR clone 288044 (TRAV12-1, TRAJ16)
CVALPLSDGQKLLF

SEQ ID NO: 576088 - protein, 16 aa, Homo sapiens
  CDR3 for beta chain variable domain of TCR clone 288044 (TRBV19, TRBJ2-1)
CASSKAGPSSYNEQFF

SEQ ID NO: 576089 - protein, 12 aa, Homo sapiens
  CDR3 for alpha chain variable domain of TCR clone 288045 (TRAV1-1, TRAJ43)
CAPRVSSNGMRF

SEQ ID NO: 576090 - protein, 15 aa, Homo sapiens
  CDR3 for beta chain variable domain of TCR clone 288045 (TRBV5-1, TRBJ2-7)
CASSLGDVTTYEQYF

SEQ ID NO: 576091 - protein, 15 aa, Homo sapiens
  CDR3 for alpha chain variable domain of TCR clone 288046 (TRAV5, TRAJ33)
CAEAPAMDSNYQLIW

SEQ ID NO: 576092 - protein, 14 aa, Homo sapiens
  CDR3 for beta chain variable domain of TCR clone 288046 (TRBV6-1, TRBJ1-3)
CASVQGGGGNTIYF

SEQ ID NO: 576093 - protein, 14 aa, Homo sapiens
  CDR3 for alpha chain variable domain of TCR clone 288047 (TRAV26-1, TRAJ49)
RIVRLTNTGNQFYF

SEQ ID NO: 576094 - protein, 13 aa, Homo sapiens
  CDR3 for beta chain variable domain of TCR clone 288047 (TRBV10-1, TRBJ1-1)
CASQGQTNTEAFF

SEQ ID NO: 576095 - protein, 15 aa, Homo sapiens
  CDR3 for alpha chain variable domain of TCR clone 288048 (TRAV12-1, TRAJ6)
CVVNCPLRRKLPTYI

SEQ ID NO: 576096 - protein, 15 aa, Homo sapiens
  CDR3 for beta chain variable domain of TCR clone 288048 (TRBV7-9, TRBJ1-6)
CASSSPGRGNSPLLF

SEQ ID NO: 576097 - protein, 13 aa, Homo sapiens
  CDR3 for alpha chain variable domain of TCR clone 288049 (TRAV12-2, TRAJ30)
CAVNLNRYDKIIF

SEQ ID NO: 576098 - protein, 14 aa, Homo sapiens
  CDR3 for beta chain variable domain of TCR clone 288049 (TRBV7-2, TRBJ1-2)
CASSSQGAHYGYTF

SEQ ID NO: 576099 - protein, 14 aa, Homo sapiens
  CDR3 for alpha chain variable domain of TCR clone 288050 (TRAV17, TRAJ15)
CATTTNQAGTALIF

SEQ ID NO: 576100 - protein, 13 aa, Homo sapiens
  CDR3 for beta chain variable domain of TCR clone 288050 (TRBV11-2, TRBJ1-3)
FASSPTGGNTIYF

SEQ ID NO: 576101 - protein, 15 aa, Homo sapiens
  CDR3 for alpha chain variable domain of TCR clone 288051 (TRAV23/DV6, TRAJ44)
CAARTLTGTASKLTF

SEQ ID NO: 576102 - protein, 17 aa, Homo sapiens
  CDR3 for beta chain variable domain of TCR clone 288051 (TRBV24-1, TRBJ2-1)
CATSDVSTSGTYNEQFL

SEQ ID NO: 576103 - protein, 13 aa, Homo sapiens
  CDR3 for alpha chain variable domain of TCR clone 288052 (TRAV27, TRAJ6)
CAGGTRGSYIPTL

SEQ ID NO: 576104 - protein, 15 aa, Homo sapiens
  CDR3 for beta chain variable domain of TCR clone 288052 (TRBV5-5, TRBJ2-7)
CASSLAAPLSYEQYF

SEQ ID NO: 576105 - protein, 15 aa, Homo sapiens
  CDR3 for alpha chain variable domain of TCR clone 288053 (TRAV17, TRAJ56)
CATDANTGANSKLKF

SEQ ID NO: 576106 - protein, 14 aa, Homo sapiens
  CDR3 for beta chain variable domain of TCR clone 288053 (TRBV7-2, TRBJ2-7)
CASSPKTSFYEQYF

SEQ ID NO: 576107 - protein, 11 aa, Homo sapiens
  CDR3 for alpha chain variable domain of TCR clone 288054 (TRAV26-1, TRAJ37)
CIVRVGRKLIF

SEQ ID NO: 576108 - protein, 13 aa, Homo sapiens
  CDR3 for beta chain variable domain of TCR clone 288054 (TRBV7-3, TRBJ1-1)
CASRQDWGAEAFF

SEQ ID NO: 576109 - protein, 15 aa, Homo sapiens
  CDR3 for alpha chain variable domain of TCR clone 288055 (TRAV25, TRAJ53)
CPTSNSGGSNYKLTF

SEQ ID NO: 576110 - protein, 13 aa, Homo sapiens
  CDR3 for beta chain variable domain of TCR clone 288055 (TRBV28, TRBJ2-5)
CASSWGTQETQYF

SEQ ID NO: 576111 - protein, 14 aa, Homo sapiens
  CDR3 for alpha chain variable domain of TCR clone 288056 (TRAV12-3, TRAJ10)
SHLPLTGGGNKLTF

SEQ ID NO: 576112 - protein, 14 aa, Homo sapiens
  CDR3 for beta chain variable domain of TCR clone 288056 (TRBV19, TRBJ2-7)
CASTVQGRPYEQYV

SEQ ID NO: 576113 - protein, 15 aa, Homo sapiens
  CDR3 for alpha chain variable domain of TCR clone 288057 (TRAV14/DV4, TRAJ12)
CAMREGWDSRYKLIF

SEQ ID NO: 576114 - protein, 16 aa, Homo sapiens
  CDR3 for beta chain variable domain of TCR clone 288057 (TRBV2, TRBJ2-5)
CASSETQGVGEETQYF

SEQ ID NO: 576115 - protein, 15 aa, Homo sapiens
  CDR3 for alpha chain variable domain of TCR clone 288058 (TRAV21, TRAJ24)
CAARSSTDSWGKLQF

SEQ ID NO: 576116 - protein, 14 aa, Homo sapiens
  CDR3 for beta chain variable domain of TCR clone 288058 (TRBV7-9, TRBJ2-2)
CASSGLADTGGLFL

SEQ ID NO: 576117 - protein, 17 aa, Homo sapiens
  CDR3 for alpha chain variable domain of TCR clone 288059 (TRAV26-1, TRAJ47)
CIVPSLLYMKYGNKLVF

SEQ ID NO: 576118 - protein, 14 aa, Homo sapiens
  CDR3 for beta chain variable domain of TCR clone 288059 (TRBV7-3, TRBJ1-5)
RASSFSGCNQPQHF

SEQ ID NO: 576119 - protein, 16 aa, Homo sapiens
  CDR3 for alpha chain variable domain of TCR clone 288060 (TRAV8-3, TRAJ42)
CAVGEGNGGSQGNLIF

SEQ ID NO: 576120 - protein, 12 aa, Homo sapiens
  CDR3 for beta chain variable domain of TCR clone 288060 (TRBV11-2, TRBJ2-2)
CASSLGGGELFF

SEQ ID NO: 576121 - protein, 13 aa, Homo sapiens
  CDR3 for alpha chain variable domain of TCR clone 288061 (TRAV27, TRAJ6)
CAGGTRGSYIPTF

SEQ ID NO: 576122 - protein, 14 aa, Homo sapiens
  CDR3 for beta chain variable domain of TCR clone 288061 (TRBV19, TRBJ2-1)
CASSPGLAPNEQFF

SEQ ID NO: 576123 - protein, 10 aa, Homo sapiens
  CDR3 for alpha chain variable domain of TCR clone 288062 (TRAV23/DV6, TRAJ57)
CAASSTLSQG

SEQ ID NO: 576124 - protein, 12 aa, Homo sapiens
  CDR3 for beta chain variable domain of TCR clone 288062 (TRBV7-3, TRBJ2-1)
CASSFINNEQFF

SEQ ID NO: 576125 - protein, 12 aa, Homo sapiens
  CDR3 for alpha chain variable domain of TCR clone 288063 (TRAV13-1, TRAJ21)
CAAKEGFNKFYF

SEQ ID NO: 576126 - protein, 14 aa, Homo sapiens
  CDR3 for beta chain variable domain of TCR clone 288063 (TRBV7-9, TRBJ2-1)
CASSPRDSIYEQFF

SEQ ID NO: 576127 - protein, 14 aa, Homo sapiens
  CDR3 for alpha chain variable domain of TCR clone 288064 (TRAV6, TRAJ6)
CALDRAGGSYIPTF

SEQ ID NO: 576128 - protein, 13 aa, Homo sapiens
  CDR3 for beta chain variable domain of TCR clone 288064 (TRBV10-2, TRBJ2-7)
CASGASGGYEQYF

SEQ ID NO: 576129 - protein, 14 aa, Homo sapiens
  CDR3 for alpha chain variable domain of TCR clone 288065 (TRAV12-2, TRAJ13)
CAVKKTGGYQKVTF

SEQ ID NO: 576130 - protein, 10 aa, Homo sapiens
  CDR3 for beta chain variable domain of TCR clone 288065 (TRBV12-4, TRBJ1-2)
CASSFIWLHI

SEQ ID NO: 576131 - protein, 16 aa, Homo sapiens
  CDR3 for alpha chain variable domain of TCR clone 288066 (TRAV3, TRAJ17)
CAVRDGSPAAGNKLTF

SEQ ID NO: 576132 - protein, 13 aa, Homo sapiens
  CDR3 for beta chain variable domain of TCR clone 288066 (TRBV12-5, TRBJ2-3)
CASGDRQSDTQYF

SEQ ID NO: 576133 - protein, 13 aa, Homo sapiens
  CDR3 for alpha chain variable domain of TCR clone 288067 (TRAV3, TRAJ27)
CAVRPLGAGKSTF

SEQ ID NO: 576134 - protein, 13 aa, Homo sapiens
  CDR3 for beta chain variable domain of TCR clone 288067 (TRBV6-4, TRBJ1-5)
CASSADLNQPQHF

SEQ ID NO: 576135 - protein, 13 aa, Homo sapiens
  CDR3 for alpha chain variable domain of TCR clone 288068 (TRAV13-1, TRAJ11)
CAAVLAGYSTLTF

SEQ ID NO: 576136 - protein, 12 aa, Homo sapiens
  CDR3 for beta chain variable domain of TCR clone 288068 (TRBV11-2, TRBJ2-1)
CASSPGNNEQFF

SEQ ID NO: 576137 - protein, 12 aa, Homo sapiens
  CDR3 for alpha chain variable domain of TCR clone 288069 (TRAV23/DV6, TRAJ53)
CAASKLGSGGSH

SEQ ID NO: 576138 - protein, 18 aa, Homo sapiens
  CDR3 for beta chain variable domain of TCR clone 288069 (TRBV11-2, TRBJ2-3)
CASSLGGASRGAPNTQYF

SEQ ID NO: 576139 - protein, 15 aa, Homo sapiens
  CDR3 for alpha chain variable domain of TCR clone 288070 (TRAV30, TRAJ32)
CGTEILGGATNKLIF

SEQ ID NO: 576140 - protein, 13 aa, Homo sapiens
  CDR3 for beta chain variable domain of TCR clone 288070 (TRBV6-3, TRBJ2-7)
CASSFSGGYEHYF

SEQ ID NO: 576141 - protein, 13 aa, Homo sapiens
  CDR3 for alpha chain variable domain of TCR clone 288071 (TRAV13-1, TRAJ23)
CAASTILGGKLIF

SEQ ID NO: 576142 - protein, 14 aa, Homo sapiens
  CDR3 for beta chain variable domain of TCR clone 288071 (TRBV19, TRBJ2-1)
CASPTFVLSGEQFF

SEQ ID NO: 576143 - protein, 12 aa, Homo sapiens
  CDR3 for alpha chain variable domain of TCR clone 288072 (TRAV1-2, TRAJ8)
CAVRTGFQKLVF

SEQ ID NO: 576144 - protein, 16 aa, Homo sapiens
  CDR3 for beta chain variable domain of TCR clone 288072 (TRBV10-3, TRBJ2-1)
CAISGVGDGGGGEQFF

SEQ ID NO: 576145 - protein, 13 aa, Homo sapiens
  CDR3 for alpha chain variable domain of TCR clone 288073 (TRAV2, TRAJ40)
CAVVTSGTYKYIF

SEQ ID NO: 576146 - protein, 15 aa, Homo sapiens
  CDR3 for beta chain variable domain of TCR clone 288073 (TRBV4-3, TRBJ2-1)
CASSQMRGAHNEQFF

SEQ ID NO: 576147 - protein, 15 aa, Homo sapiens
  CDR3 for alpha chain variable domain of TCR clone 288074 (TRAV21, TRAJ53)
CATLNSGCSNYKLTF

SEQ ID NO: 576148 - protein, 14 aa, Homo sapiens
  CDR3 for beta chain variable domain of TCR clone 288074 (TRBV7-2, TRBJ2-7)
CASSPKTSFYEQYF

SEQ ID NO: 576149 - protein, 13 aa, Homo sapiens
  CDR3 for alpha chain variable domain of TCR clone 288075 (TRAV2, TRAJ40)
WAVVTSGTYKYIF

SEQ ID NO: 576150 - protein, 15 aa, Homo sapiens
  CDR3 for beta chain variable domain of TCR clone 288075 (TRBV11-3, TRBJ2-3)
CGSLKDGREGDTQYF

SEQ ID NO: 576151 - protein, 11 aa, Homo sapiens
  CDR3 for alpha chain variable domain of TCR clone 288076 (TRAV1-2, TRAJ31)
CAVNNNARLMF

SEQ ID NO: 576152 - protein, 15 aa, Homo sapiens
  CDR3 for beta chain variable domain of TCR clone 288076 (TRBV28, TRBJ2-1)
CARSIIAGGRSELFF

SEQ ID NO: 576153 - protein, 14 aa, Homo sapiens
  CDR3 for alpha chain variable domain of TCR clone 288077 (TRAV4, TRAJ6)
CLVGEAGGSYIPTF

SEQ ID NO: 576154 - protein, 17 aa, Homo sapiens
  CDR3 for beta chain variable domain of TCR clone 288077 (TRBV4-2, TRBJ1-1)
CASTQFGGGSGNTEAFF

SEQ ID NO: 576155 - protein, 11 aa, Homo sapiens
  CDR3 for alpha chain variable domain of TCR clone 288078 (TRAV2, TRAJ13)
CASGGYQKVTF

SEQ ID NO: 576156 - protein, 15 aa, Homo sapiens
  CDR3 for beta chain variable domain of TCR clone 288078 (TRBV7-3, TRBJ2-2)
CQQLKAGDLVRELFF

SEQ ID NO: 576157 - protein, 12 aa, Homo sapiens
  CDR3 for alpha chain variable domain of TCR clone 288079 (TRAV12-3, TRAJ17)
CAMTLTGNKLTF

SEQ ID NO: 576158 - protein, 16 aa, Homo sapiens
  CDR3 for beta chain variable domain of TCR clone 288079 (TRBV20-1, TRBJ1-2)
CSASMGRGVANYGYTF

SEQ ID NO: 576159 - protein, 12 aa, Homo sapiens
  CDR3 for alpha chain variable domain of TCR clone 288080 (TRAV8-3, TRAJ26)
CAGDNYGQNFVF

SEQ ID NO: 576160 - protein, 17 aa, Homo sapiens
  CDR3 for beta chain variable domain of TCR clone 288080 (TRBV5-1, TRBJ2-3)
CASSKIGLADRTDTQYF

SEQ ID NO: 576161 - protein, 14 aa, Homo sapiens
  CDR3 for alpha chain variable domain of TCR clone 288081 (TRAV38-1, TRAJ40)
CALRPTSGTYKYIF

SEQ ID NO: 576162 - protein, 13 aa, Homo sapiens
  CDR3 for beta chain variable domain of TCR clone 288081 (TRBV5-5, TRBJ1-2)
CASSFWRGEDDTF

SEQ ID NO: 576163 - protein, 15 aa, Homo sapiens
  CDR3 for alpha chain variable domain of TCR clone 288082 (TRAV38-1, TRAJ37)
CAFIFGSGNTGKLIF

SEQ ID NO: 576164 - protein, 14 aa, Homo sapiens
  CDR3 for beta chain variable domain of TCR clone 288082 (TRBV7-9, TRBJ2-7)
CASSLEGYEQYLGR

SEQ ID NO: 576165 - protein, 13 aa, Homo sapiens
  CDR3 for alpha chain variable domain of TCR clone 288083 (TRAV13-1, TRAJ39)
CAASIWAGNMLTF

SEQ ID NO: 576166 - protein, 13 aa, Homo sapiens
  CDR3 for beta chain variable domain of TCR clone 288083 (TRBV15, TRBJ1-6)
CATSGGLNSPLHF

SEQ ID NO: 576167 - protein, 15 aa, Homo sapiens
  CDR3 for alpha chain variable domain of TCR clone 288084 (TRAV17, TRAJ57)
CATGPSQGGSEKLAF

SEQ ID NO: 576168 - protein, 18 aa, Homo sapiens
  CDR3 for beta chain variable domain of TCR clone 288084 (TRBV7-9, TRBJ2-7)
CASSLTTSGSRTWYEQYF

SEQ ID NO: 576169 - protein, 12 aa, Homo sapiens
  CDR3 for alpha chain variable domain of TCR clone 288085 (TRAV23/DV6, TRAJ3)
CAARAPQQCFQD

SEQ ID NO: 576170 - protein, 17 aa, Homo sapiens
  CDR3 for beta chain variable domain of TCR clone 288085 (TRBV7-9, TRBJ2-3)
CASSTTVAGDLTDTQYF

SEQ ID NO: 576171 - protein, 16 aa, Homo sapiens
  CDR3 for alpha chain variable domain of TCR clone 288086 (TRAV12-3, TRAJ53)
CAMSVGSGGSNYKLTF

SEQ ID NO: 576172 - protein, 13 aa, Homo sapiens
  CDR3 for beta chain variable domain of TCR clone 288086 (TRBV7-6, TRBJ1-2)
CASSSVADYGYTF

SEQ ID NO: 576173 - protein, 14 aa, Homo sapiens
  CDR3 for alpha chain variable domain of TCR clone 288087 (TRAV2, TRAJ9)
CAGEDRSGGFKTIF

SEQ ID NO: 576174 - protein, 14 aa, Homo sapiens
  CDR3 for beta chain variable domain of TCR clone 288087 (TRBV7-3, TRBJ2-1)
CASSLAGGTNEQFF

SEQ ID NO: 576175 - protein, 14 aa, Homo sapiens
  CDR3 for alpha chain variable domain of TCR clone 288088 (TRAV16, TRAJ17)
CAPRIKAAGIKLTF

SEQ ID NO: 576176 - protein, 17 aa, Homo sapiens
  CDR3 for beta chain variable domain of TCR clone 288088 (TRBV7-2, TRBJ2-3)
CASSSYSGTRRADTQYF

SEQ ID NO: 576177 - protein, 15 aa, Homo sapiens
  CDR3 for alpha chain variable domain of TCR clone 288089 (TRAV25, TRAJ52)
CAGRPGGTSYGKLTF

SEQ ID NO: 576178 - protein, 15 aa, Homo sapiens
  CDR3 for beta chain variable domain of TCR clone 288089 (TRBV7-9, TRBJ2-2)
CASGPLDTFPGELFF

SEQ ID NO: 576179 - protein, 13 aa, Homo sapiens
  CDR3 for alpha chain variable domain of TCR clone 288090 (TRAV23/DV6, TRAJ58)
CAARLIRGSRLTF

SEQ ID NO: 576180 - protein, 16 aa, Homo sapiens
  CDR3 for beta chain variable domain of TCR clone 288090 (TRBV20-1, TRBJ2-1)
CSASASGYSSYNEQFF

SEQ ID NO: 576181 - protein, 12 aa, Homo sapiens
  CDR3 for alpha chain variable domain of TCR clone 288091 (TRAV12-3, TRAJ20)
CAMVRGDYKLSF

SEQ ID NO: 576182 - protein, 16 aa, Homo sapiens
  CDR3 for beta chain variable domain of TCR clone 288091 (TRBV13, TRBJ2-5)
CASSRGAGIRQETQYF

SEQ ID NO: 576183 - protein, 14 aa, Homo sapiens
  CDR3 for alpha chain variable domain of TCR clone 288092 (TRAV1-2, TRAJ16)
CAVNRFSDGQKMLF

SEQ ID NO: 576184 - protein, 15 aa, Homo sapiens
  CDR3 for beta chain variable domain of TCR clone 288092 (TRBV5-1, TRBJ1-1)
CASSLGEGENTEAFF

SEQ ID NO: 576185 - protein, 15 aa, Homo sapiens
  CDR3 for alpha chain variable domain of TCR clone 288093 (TRAV25, TRAJ52)
CAGRPGGTSYAKLTF

SEQ ID NO: 576186 - protein, 17 aa, Homo sapiens
  CDR3 for beta chain variable domain of TCR clone 288093 (TRBV7-8, TRBJ2-6)
CASSAGTGGAGANVLTF

SEQ ID NO: 576187 - protein, 16 aa, Homo sapiens
  CDR3 for alpha chain variable domain of TCR clone 288094 (TRAV3, TRAJ21)
CAVRDIERGNFNKFYF

SEQ ID NO: 576188 - protein, 19 aa, Homo sapiens
  CDR3 for beta chain variable domain of TCR clone 288094 (TRBV19, TRBJ2-5)
CASSIGQVTDFFLGETQYF

SEQ ID NO: 576189 - protein, 14 aa, Homo sapiens
  CDR3 for alpha chain variable domain of TCR clone 288095 (TRAV3, TRAJ37)
CAVKESGNTGKLIF

SEQ ID NO: 576190 - protein, 14 aa, Homo sapiens
  CDR3 for beta chain variable domain of TCR clone 288095 (TRBV2, TRBJ1-5)
CASSENRCGQPQHF

SEQ ID NO: 576191 - protein, 16 aa, Homo sapiens
  CDR3 for alpha chain variable domain of TCR clone 288096 (TRAV26-2, TRAJ48)
CILRPPFNFGNEKLTF

SEQ ID NO: 576192 - protein, 15 aa, Homo sapiens
  CDR3 for beta chain variable domain of TCR clone 288096 (TRBV7-9, TRBJ1-6)
CASSSPGRGNSPLHF

SEQ ID NO: 576193 - protein, 17 aa, Homo sapiens
  CDR3 for alpha chain variable domain of TCR clone 288097 (TRAV8-3, TRAJ42)
CAVGKGNYGGSQGNLIF

SEQ ID NO: 576194 - protein, 14 aa, Homo sapiens
  CDR3 for beta chain variable domain of TCR clone 288097 (TRBV2, TRBJ2-7)
CASSLTSGGYEQYF

SEQ ID NO: 576195 - protein, 16 aa, Homo sapiens
  CDR3 for alpha chain variable domain of TCR clone 288098 (TRAV3, TRAJ37)
CAVRGQGSGNTGKLIF

SEQ ID NO: 576196 - protein, 14 aa, Homo sapiens
  CDR3 for beta chain variable domain of TCR clone 288098 (TRBV7-7, TRBJ2-2)
CASSRDRSTGELFF

SEQ ID NO: 576197 - protein, 16 aa, Homo sapiens
  CDR3 for alpha chain variable domain of TCR clone 288099 (TRAV12-3, TRAJ53)
CAMSPGSGGSNHKLEF

SEQ ID NO: 576198 - protein, 17 aa, Homo sapiens
  CDR3 for beta chain variable domain of TCR clone 288099 (TRBV28, TRBJ2-5)
CASSTPEGDALQETQYF

SEQ ID NO: 576199 - protein, 17 aa, Homo sapiens
  CDR3 for alpha chain variable domain of TCR clone 288100 (TRAV3, TRAJ6)
CAVRDGPRAGGSYIPTF

SEQ ID NO: 576200 - protein, 13 aa, Homo sapiens
  CDR3 for beta chain variable domain of TCR clone 288100 (TRBV19, TRBJ2-7)
CESSIDRTYEQYF

SEQ ID NO: 576201 - protein, 10 aa, Homo sapiens
  CDR3 for alpha chain variable domain of TCR clone 288101 (TRAV2, TRAJ11)
CQRGYSTLTF

SEQ ID NO: 576202 - protein, 15 aa, Homo sapiens
  CDR3 for beta chain variable domain of TCR clone 288101 (TRBV19, TRBJ1-1)
CASTSGQIQNTEAFF

SEQ ID NO: 576203 - protein, 16 aa, Homo sapiens
  CDR3 for alpha chain variable domain of TCR clone 288102 (TRAV3, TRAJ10)
CAVRDMREGGGNKLTF

SEQ ID NO: 576204 - protein, 15 aa, Homo sapiens
  CDR3 for beta chain variable domain of TCR clone 288102 (TRBV11-2, TRBJ1-6)
CASTGFGTAVSPLHF

SEQ ID NO: 576205 - protein, 15 aa, Homo sapiens
  CDR3 for alpha chain variable domain of TCR clone 288103 (TRAV4, TRAJ10)
CLVGDEEGGGNKRTF

SEQ ID NO: 576206 - protein, 15 aa, Homo sapiens
  CDR3 for beta chain variable domain of TCR clone 288103 (TRBV7-2, TRBJ2-7)
CASSLTGQGTYEQYF

SEQ ID NO: 576207 - protein, 14 aa, Homo sapiens
  CDR3 for alpha chain variable domain of TCR clone 288104 (TRAV17, TRAJ57)
CATDPQGGSEKLGF

SEQ ID NO: 576208 - protein, 12 aa, Homo sapiens
  CDR3 for beta chain variable domain of TCR clone 288104 (TRBV2, TRBJ2-1)
CAYGPPGNEQFF

SEQ ID NO: 576209 - protein, 12 aa, Homo sapiens
  CDR3 for alpha chain variable domain of TCR clone 288105 (TRAV12-3, TRAJ17)
CAMTLTGNKPNF

SEQ ID NO: 576210 - protein, 15 aa, Homo sapiens
  CDR3 for beta chain variable domain of TCR clone 288105 (TRBV20-1, TRBJ2-7)
CSARDRVSGMDEQYF

SEQ ID NO: 576211 - protein, 13 aa, Homo sapiens
  CDR3 for alpha chain variable domain of TCR clone 288106 (TRAV16, TRAJ20)
RALGPSNDYKLSF

SEQ ID NO: 576212 - protein, 15 aa, Homo sapiens
  CDR3 for beta chain variable domain of TCR clone 288106 (TRBV5-1, TRBJ2-2)
CASSRVGSDTGELFF

SEQ ID NO: 576213 - protein, 14 aa, Homo sapiens
  CDR3 for alpha chain variable domain of TCR clone 288107 (TRAV13-1, TRAJ9)
CAASALTGGFKTIF

SEQ ID NO: 576214 - protein, 13 aa, Homo sapiens
  CDR3 for beta chain variable domain of TCR clone 288107 (TRBV20-1, TRBJ1-1)
CSAETVGNTEAFF

SEQ ID NO: 576215 - protein, 17 aa, Homo sapiens
  CDR3 for alpha chain variable domain of TCR clone 288108 (TRAV2, TRAJ36)
CAVEDRGNWGKQPLLWD

SEQ ID NO: 576216 - protein, 14 aa, Homo sapiens
  CDR3 for beta chain variable domain of TCR clone 288108 (TRBV7-9, TRBJ2-5)
CASSVDTAQETQYF

SEQ ID NO: 576217 - protein, 14 aa, Homo sapiens
  CDR3 for alpha chain variable domain of TCR clone 288109 (TRAV9-2, TRAJ39)
CALYIYNAGNMLTF

SEQ ID NO: 576218 - protein, 15 aa, Homo sapiens
  CDR3 for beta chain variable domain of TCR clone 288109 (TRBV6-1, TRBJ1-5)
CASSESGVSHQTQHF

SEQ ID NO: 576219 - protein, 12 aa, Homo sapiens
  CDR3 for alpha chain variable domain of TCR clone 288110 (TRAV23/DV6, TRAJ11)
CAASWGYSTLTF

SEQ ID NO: 576220 - protein, 15 aa, Homo sapiens
  CDR3 for beta chain variable domain of TCR clone 288110 (TRBV7-3, TRBJ2-1)
CASSPTGGGEVEQFF

SEQ ID NO: 576221 - protein, 12 aa, Homo sapiens
  CDR3 for alpha chain variable domain of TCR clone 288111 (TRAV12-2, TRAJ26)
CAVRVYGQNFVF

SEQ ID NO: 576222 - protein, 16 aa, Homo sapiens
  CDR3 for beta chain variable domain of TCR clone 288111 (TRBV6-1, TRBJ2-7)
CASSDLQGDASYEQYF

SEQ ID NO: 576223 - protein, 13 aa, Homo sapiens
  CDR3 for alpha chain variable domain of TCR clone 288112 (TRAV2, TRAJ40)
CAVVTSGTYKYIF

SEQ ID NO: 576224 - protein, 13 aa, Homo sapiens
  CDR3 for beta chain variable domain of TCR clone 288112 (TRBV7-8, TRBJ2-1)
CASTRDAVDEQFF

SEQ ID NO: 576225 - protein, 11 aa, Homo sapiens
  CDR3 for alpha chain variable domain of TCR clone 288113 (TRAV1-2, TRAJ20)
CAVSNDYKLSC

SEQ ID NO: 576226 - protein, 16 aa, Homo sapiens
  CDR3 for beta chain variable domain of TCR clone 288113 (TRBV29-1, TRBJ2-6)
CSVEDITYSGANVLTF

SEQ ID NO: 576227 - protein, 12 aa, Homo sapiens
  CDR3 for alpha chain variable domain of TCR clone 288114 (TRAV2, TRAJ3)
CAVRSSASKIIF

SEQ ID NO: 576228 - protein, 15 aa, Homo sapiens
  CDR3 for beta chain variable domain of TCR clone 288114 (TRBV5-1, TRBJ2-5)
CASSFKGGDQETQYF

SEQ ID NO: 576229 - protein, 14 aa, Homo sapiens
  CDR3 for alpha chain variable domain of TCR clone 288115 (TRAV2, TRAJ9)
CAVEDRSGGFKTIF

SEQ ID NO: 576230 - protein, 13 aa, Homo sapiens
  CDR3 for beta chain variable domain of TCR clone 288115 (TRBV7-2, TRBJ1-1)
CASNLKGAKVAFF

SEQ ID NO: 576231 - protein, 11 aa, Homo sapiens
  CDR3 for alpha chain variable domain of TCR clone 288116 (TRAV12-1, TRAJ8)
CVVTGFQQLVF

SEQ ID NO: 576232 - protein, 14 aa, Homo sapiens
  CDR3 for beta chain variable domain of TCR clone 288116 (TRBV19, TRBJ2-1)
CASGKSTQYNEQFF

SEQ ID NO: 576233 - protein, 13 aa, Homo sapiens
  CDR3 for alpha chain variable domain of TCR clone 288117 (TRAV2, TRAJ15)
CAVASLAGTALIF

SEQ ID NO: 576234 - protein, 15 aa, Homo sapiens
  CDR3 for beta chain variable domain of TCR clone 288117 (TRBV7-3, TRBJ2-2)
CASSETGQGTGELFF

SEQ ID NO: 576235 - protein, 13 aa, Homo sapiens
  CDR3 for alpha chain variable domain of TCR clone 288118 (TRAV12-3, TRAJ13)
CAMGTGGYTKVTF

SEQ ID NO: 576236 - protein, 14 aa, Homo sapiens
  CDR3 for beta chain variable domain of TCR clone 288118 (TRBV7-2, TRBJ2-5)
CASSTGGELKTQYF

SEQ ID NO: 576237 - protein, 13 aa, Homo sapiens
  CDR3 for alpha chain variable domain of TCR clone 288119 (TRAV1-1, TRAJ11)
CAVLNSGYSTLTF

SEQ ID NO: 576238 - protein, 17 aa, Homo sapiens
  CDR3 for beta chain variable domain of TCR clone 288119 (TRBV6-3, TRBJ2-2)
CASSYAGQGMNTGELFF

SEQ ID NO: 576239 - protein, 17 aa, Homo sapiens
  CDR3 for alpha chain variable domain of TCR clone 288120 (TRAV23/DV6, TRAJ53)
CAASKLGSGGSNYKLTF

SEQ ID NO: 576240 - protein, 15 aa, Homo sapiens
  CDR3 for beta chain variable domain of TCR clone 288120 (TRBV4-1, TRBJ2-7)
CASSQNTGRLYEQYF

SEQ ID NO: 576241 - protein, 13 aa, Homo sapiens
  CDR3 for alpha chain variable domain of TCR clone 288121 (TRAV21, TRAJ27)
CAARPGNAGNSTF

SEQ ID NO: 576242 - protein, 14 aa, Homo sapiens
  CDR3 for beta chain variable domain of TCR clone 288121 (TRBV20-1, TRBJ2-1)
CSAAGSGEYNEQFF

SEQ ID NO: 576243 - protein, 12 aa, Homo sapiens
  CDR3 for alpha chain variable domain of TCR clone 288122 (TRAV29/DV5, TRAJ34)
CAARHNTDKLIF

SEQ ID NO: 576244 - protein, 15 aa, Homo sapiens
  CDR3 for beta chain variable domain of TCR clone 288122 (TRBV19, TRBJ2-7)
CASSPAGSGEALMYF

SEQ ID NO: 576245 - protein, 14 aa, Homo sapiens
  CDR3 for alpha chain variable domain of TCR clone 288123 (TRAV8-4, TRAJ9)
CSLRINTGGFKTIF

SEQ ID NO: 576246 - protein, 15 aa, Homo sapiens
  CDR3 for beta chain variable domain of TCR clone 288123 (TRBV10-2, TRBJ2-6)
CASSEQGTGANGLTF

SEQ ID NO: 576247 - protein, 12 aa, Homo sapiens
  CDR3 for alpha chain variable domain of TCR clone 288124 (TRAV2, TRAJ24)
CAATDSWGKFQF

SEQ ID NO: 576248 - protein, 14 aa, Homo sapiens
  CDR3 for beta chain variable domain of TCR clone 288124 (TRBV7-2, TRBJ2-7)
CASSPKTNFYEQYF

SEQ ID NO: 576249 - protein, 12 aa, Homo sapiens
  CDR3 for alpha chain variable domain of TCR clone 288125 (TRAV8-1, TRAJ6)
CASSGGSYIPTF

SEQ ID NO: 576250 - protein, 12 aa, Homo sapiens
  CDR3 for beta chain variable domain of TCR clone 288125 (TRBV19, TRBJ1-1)
CASMNRYTEDFF

SEQ ID NO: 576251 - protein, 12 aa, Homo sapiens
  CDR3 for alpha chain variable domain of TCR clone 288126 (TRAV13-1, TRAJ52)
NAGGTSYGKLTF

SEQ ID NO: 576252 - protein, 18 aa, Homo sapiens
  CDR3 for beta chain variable domain of TCR clone 288126 (TRBV4-1, TRBJ1-4)
CASSPRTGGAWTNEKLFF

SEQ ID NO: 576253 - protein, 14 aa, Homo sapiens
  CDR3 for alpha chain variable domain of TCR clone 288127 (TRAV12-2, TRAJ13)
CAVKKTGGYQKDTF

SEQ ID NO: 576254 - protein, 13 aa, Homo sapiens
  CDR3 for beta chain variable domain of TCR clone 288127 (TRBV7-2, TRBJ2-5)
CASSQTSVETQYF

SEQ ID NO: 576255 - protein, 12 aa, Homo sapiens
  CDR3 for alpha chain variable domain of TCR clone 288128 (TRAV13-1, TRAJ21)
CAAQEGFNTFYF

SEQ ID NO: 576256 - protein, 13 aa, Homo sapiens
  CDR3 for beta chain variable domain of TCR clone 288128 (TRBV19, TRBJ1-2)
CASSVPGQDGYTF

SEQ ID NO: 576257 - protein, 13 aa, Homo sapiens
  CDR3 for alpha chain variable domain of TCR clone 288129 (TRAV8-4, TRAJ9)
CAVSETGGFTTIF

SEQ ID NO: 576258 - protein, 14 aa, Homo sapiens
  CDR3 for beta chain variable domain of TCR clone 288129 (TRBV13, TRBJ2-5)
CASSLERVGETQYF

SEQ ID NO: 576259 - protein, 11 aa, Homo sapiens
  CDR3 for alpha chain variable domain of TCR clone 288130 (TRAV12-3, TRAJ49)
CAANTGNQFYF

SEQ ID NO: 576260 - protein, 14 aa, Homo sapiens
  CDR3 for beta chain variable domain of TCR clone 288130 (TRBV25-1, TRBJ1-1)
CASTHLGGNTGAFF

SEQ ID NO: 576261 - protein, 16 aa, Homo sapiens
  CDR3 for alpha chain variable domain of TCR clone 288131 (TRAV3, TRAJ37)
CVVRGKGSGNTGKLIF

SEQ ID NO: 576262 - protein, 15 aa, Homo sapiens
  CDR3 for beta chain variable domain of TCR clone 288131 (TRBV20-1, TRBJ2-1)
CSARGGTRYYNEQFF

SEQ ID NO: 576263 - protein, 12 aa, Homo sapiens
  CDR3 for alpha chain variable domain of TCR clone 288132 (TRAV17, TRAJ12)
CATLRSSYKLIF

SEQ ID NO: 576264 - protein, 14 aa, Homo sapiens
  CDR3 for beta chain variable domain of TCR clone 288132 (TRBV2, TRBJ2-7)
CASTVGRSSYEQYF

SEQ ID NO: 576265 - protein, 16 aa, Homo sapiens
  CDR3 for alpha chain variable domain of TCR clone 288133 (TRAV12-2, TRAJ18)
CAVTTDRGSTLGRLYF

SEQ ID NO: 576266 - protein, 16 aa, Homo sapiens
  CDR3 for beta chain variable domain of TCR clone 288133 (TRBV20-1, TRBJ2-3)
CSARLLASGNTDTQYF

SEQ ID NO: 576267 - protein, 14 aa, Homo sapiens
  CDR3 for alpha chain variable domain of TCR clone 288134 (TRAV12-3, TRAJ10)
SHLPLTGGGNKLTF

SEQ ID NO: 576268 - protein, 16 aa, Homo sapiens
  CDR3 for beta chain variable domain of TCR clone 288134 (TRBV4-1, TRBJ1-4)
CASSQDLRRGGEKLCF

SEQ ID NO: 576269 - protein, 18 aa, Homo sapiens
  CDR3 for alpha chain variable domain of TCR clone 288135 (TRAV12-3, TRAJ52)
CAMSRTNASGTSYGKLTF

SEQ ID NO: 576270 - protein, 12 aa, Homo sapiens
  CDR3 for beta chain variable domain of TCR clone 288135 (TRBV7-8, TRBJ2-7)
CASSLGDREQYF

SEQ ID NO: 576271 - protein, 11 aa, Homo sapiens
  CDR3 for alpha chain variable domain of TCR clone 288136 (TRAV2, TRAJ33)
CAVESNYQLIW

SEQ ID NO: 576272 - protein, 11 aa, Homo sapiens
  CDR3 for beta chain variable domain of TCR clone 288136 (TRBV5-6, TRBJ2-5)
CASSLERTQYF

SEQ ID NO: 576273 - protein, 18 aa, Homo sapiens
  CDR3 for alpha chain variable domain of TCR clone 288137 (TRAV21, TRAJ52)
CAVRPSPAGGTSCGKLTF

SEQ ID NO: 576274 - protein, 16 aa, Homo sapiens
  CDR3 for beta chain variable domain of TCR clone 288137 (TRBV13, TRBJ2-3)
CQQPLQGSGGRNTQYF

SEQ ID NO: 576275 - protein, 13 aa, Homo sapiens
  CDR3 for alpha chain variable domain of TCR clone 288138 (TRAV13-1, TRAJ5)
CAASDTGRRALTF

SEQ ID NO: 576276 - protein, 12 aa, Homo sapiens
  CDR3 for beta chain variable domain of TCR clone 288138 (TRBV28, TRBJ2-3)
CASSLYRHTQYF

SEQ ID NO: 576277 - protein, 17 aa, Homo sapiens
  CDR3 for alpha chain variable domain of TCR clone 288139 (TRAV12-2, TRAJ52)
CAANHYAGGTSYGKLTF

SEQ ID NO: 576278 - protein, 16 aa, Homo sapiens
  CDR3 for beta chain variable domain of TCR clone 288139 (TRBV18, TRBJ1-5)
CASSPSTGNSNQPQHF

SEQ ID NO: 576279 - protein, 14 aa, Homo sapiens
  CDR3 for alpha chain variable domain of TCR clone 288140 (TRAV12-1, TRAJ13)
CVVIDSGGDQKVTF

SEQ ID NO: 576280 - protein, 17 aa, Homo sapiens
  CDR3 for beta chain variable domain of TCR clone 288140 (TRBV15, TRBJ1-5)
CATSRAPPGTRNQPQHF

SEQ ID NO: 576281 - protein, 13 aa, Homo sapiens
  CDR3 for alpha chain variable domain of TCR clone 288141 (TRAV8-4, TRAJ44)
CAVCTGTASKLTF

SEQ ID NO: 576282 - protein, 14 aa, Homo sapiens
  CDR3 for beta chain variable domain of TCR clone 288141 (TRBV4-2, TRBJ2-1)
CASGLDRAYNEQFF

SEQ ID NO: 576283 - protein, 13 aa, Homo sapiens
  CDR3 for alpha chain variable domain of TCR clone 288142 (TRAV12-2, TRAJ33)
CGDAPDSNYQLIW

SEQ ID NO: 576284 - protein, 14 aa, Homo sapiens
  CDR3 for beta chain variable domain of TCR clone 288142 (TRBV27, TRBJ1-1)
CASTHLGGNTEAVF

SEQ ID NO: 576285 - protein, 11 aa, Homo sapiens
  CDR3 for alpha chain variable domain of TCR clone 288143 (TRAV35, TRAJ34)
CGARNTDKLIF

SEQ ID NO: 576286 - protein, 14 aa, Homo sapiens
  CDR3 for beta chain variable domain of TCR clone 288143 (TRBV5-1, TRBJ2-7)
CASSRGESLYEQYF

SEQ ID NO: 576287 - protein, 22 aa, Homo sapiens
  CDR3 for alpha chain variable domain of TCR clone 288144 (TRAV8-2, TRAJ45)
HLTKPSAHMSDAAEYSADGLTF

SEQ ID NO: 576288 - protein, 15 aa, Homo sapiens
  CDR3 for beta chain variable domain of TCR clone 288144 (TRBV12-4, TRBJ2-5)
CASSPPTGLQETQYF

SEQ ID NO: 576289 - protein, 15 aa, Homo sapiens
  CDR3 for alpha chain variable domain of TCR clone 288145 (TRAV34, TRAJ38)
CGADFTPGNNRKLIW

SEQ ID NO: 576290 - protein, 22 aa, Homo sapiens
  CDR3 for beta chain variable domain of TCR clone 288145 (TRBV12-5, TRBJ2-5)
CASGPRTSSNSQENPVLRARHA

SEQ ID NO: 576291 - protein, 12 aa, Homo sapiens
  CDR3 for alpha chain variable domain of TCR clone 288146 (TRAV12-1, TRAJ40)
CVVYSGTYKYIF

SEQ ID NO: 576292 - protein, 14 aa, Homo sapiens
  CDR3 for beta chain variable domain of TCR clone 288146 (TRBV25-1, TRBJ1-4)
CASSGGGQPEKLFF

SEQ ID NO: 576293 - protein, 15 aa, Homo sapiens
  CDR3 for alpha chain variable domain of TCR clone 288147 (TRAV21, TRAJ52)
CAVRGGGTSYGKLTF

SEQ ID NO: 576294 - protein, 15 aa, Homo sapiens
  CDR3 for beta chain variable domain of TCR clone 288147 (TRBV18, TRBJ1-5)
CARSPSDRSNQPQHF

SEQ ID NO: 576295 - protein, 15 aa, Homo sapiens
  CDR3 for alpha chain variable domain of TCR clone 288148 (TRAV3, TRAJ5)
CAVRDLDTGRRALTF

SEQ ID NO: 576296 - protein, 12 aa, Homo sapiens
  CDR3 for beta chain variable domain of TCR clone 288148 (TRBV11-2, TRBJ2-2)
CASSLPTGELFF

SEQ ID NO: 576297 - protein, 10 aa, Homo sapiens
  CDR3 for alpha chain variable domain of TCR clone 288149 (TRAV12-3, TRAJ18)
CAMSAAAQPW

SEQ ID NO: 576298 - protein, 13 aa, Homo sapiens
  CDR3 for beta chain variable domain of TCR clone 288149 (TRBV15, TRBJ1-6)
CATSGGLNSPLHF

SEQ ID NO: 576299 - protein, 13 aa, Homo sapiens
  CDR3 for alpha chain variable domain of TCR clone 288150 (TRAV1-2, TRAJ9)
CAVLNTGGFKTIF

SEQ ID NO: 576300 - protein, 14 aa, Homo sapiens
  CDR3 for beta chain variable domain of TCR clone 288150 (TRBV25-1, TRBJ2-7)
CASSEYGRGYEQYF

SEQ ID NO: 576301 - protein, 20 aa, Homo sapiens
  CDR3 for alpha chain variable domain of TCR clone 288151 (TRAV12-3, TRAJ41)
SLFIRDSQPSDSATPEALNF

SEQ ID NO: 576302 - protein, 13 aa, Homo sapiens
  CDR3 for beta chain variable domain of TCR clone 288151 (TRBV10-3, TRBJ2-3)
CTIRDTGADTQYF

SEQ ID NO: 576303 - protein, 15 aa, Homo sapiens
  CDR3 for alpha chain variable domain of TCR clone 288152 (TRAV21, TRAJ52)
CAVRGGGTSYGKLTF

SEQ ID NO: 576304 - protein, 15 aa, Homo sapiens
  CDR3 for beta chain variable domain of TCR clone 288152 (TRBV18, TRBJ1-5)
CASSPYDRSNQPQHF

SEQ ID NO: 576305 - protein, 15 aa, Homo sapiens
  CDR3 for alpha chain variable domain of TCR clone 288153 (TRAV3, TRAJ3)
CAVRDRDSSASKIIF

SEQ ID NO: 576306 - protein, 18 aa, Homo sapiens
  CDR3 for beta chain variable domain of TCR clone 288153 (TRBV25-1, TRBJ1-2)
CASSGIQNGQGLIFGYAF

SEQ ID NO: 576307 - protein, 14 aa, Homo sapiens
  CDR3 for alpha chain variable domain of TCR clone 288154 (TRAV13-1, TRAJ3)
CAASKSSSASTIIF

SEQ ID NO: 576308 - protein, 13 aa, Homo sapiens
  CDR3 for beta chain variable domain of TCR clone 288154 (TRBV25-1, TRBJ2-5)
CASSESGRETQYF

SEQ ID NO: 576309 - protein, 12 aa, Homo sapiens
  CDR3 for alpha chain variable domain of TCR clone 288155 (TRAV12-3, TRAJ20)
CAMVRGDYKLSF

SEQ ID NO: 576310 - protein, 13 aa, Homo sapiens
  CDR3 for beta chain variable domain of TCR clone 288155 (TRBV7-9, TRBJ2-5)
CASLPSGRETQYF

SEQ ID NO: 576311 - protein, 14 aa, Homo sapiens
  CDR3 for alpha chain variable domain of TCR clone 288156 (TRAV2, TRAJ9)
CAVEDRRGGFKTIF

SEQ ID NO: 576312 - protein, 15 aa, Homo sapiens
  CDR3 for beta chain variable domain of TCR clone 288156 (TRBV10-3, TRBJ2-1)
CAIRNGTSGHNEQFF

SEQ ID NO: 576313 - protein, 12 aa, Homo sapiens
  CDR3 for alpha chain variable domain of TCR clone 288157 (TRAV12-3, TRAJ17)
CAMTLTGNKLTF

SEQ ID NO: 576314 - protein, 11 aa, Homo sapiens
  CDR3 for beta chain variable domain of TCR clone 288157 (TRBV12-4, TRBJ2-2)
CTSSSAGELFF

SEQ ID NO: 576315 - protein, 12 aa, Homo sapiens
  CDR3 for alpha chain variable domain of TCR clone 288158 (TRAV13-1, TRAJ49)
CAASPMGNQFYF

SEQ ID NO: 576316 - protein, 16 aa, Homo sapiens
  CDR3 for beta chain variable domain of TCR clone 288158 (TRBV19, TRBJ2-3)
CASSPGAASRTDTQYF

SEQ ID NO: 576317 - protein, 17 aa, Homo sapiens
  CDR3 for alpha chain variable domain of TCR clone 288159 (TRAV13-1, TRAJ28)
CAASPPYSGAGSYQLTF

SEQ ID NO: 576318 - protein, 12 aa, Homo sapiens
  CDR3 for beta chain variable domain of TCR clone 288159 (TRBV11-2, TRBJ2-2)
RASSLPTGELFF

SEQ ID NO: 576319 - protein, 13 aa, Homo sapiens
  CDR3 for alpha chain variable domain of TCR clone 288160 (TRAV12-3, TRAJ33)
CAMSVNSNYQLIW

SEQ ID NO: 576320 - protein, 20 aa, Homo sapiens
  CDR3 for beta chain variable domain of TCR clone 288160 (TRBV18, TRBJ2-5)
CASSPSASDSSSGCKIPSTS

SEQ ID NO: 576321 - protein, 13 aa, Homo sapiens
  CDR3 for alpha chain variable domain of TCR clone 288161 (TRAV12-1, TRAJ39)
CVVPQRAGNMLTF

SEQ ID NO: 576322 - protein, 17 aa, Homo sapiens
  CDR3 for beta chain variable domain of TCR clone 288161 (TRBV4-1, TRBJ2-5)
CASSRDLTGGPIETQYF

SEQ ID NO: 576323 - protein, 17 aa, Homo sapiens
  CDR3 for alpha chain variable domain of TCR clone 288162 (TRAV3, TRAJ6)
CAVRDGPRAGGSYIPTV

SEQ ID NO: 576324 - protein, 16 aa, Homo sapiens
  CDR3 for beta chain variable domain of TCR clone 288162 (TRBV7-8, TRBJ2-3)
CASSTEGQRETDTQYF

SEQ ID NO: 576325 - protein, 16 aa, Homo sapiens
  CDR3 for alpha chain variable domain of TCR clone 288163 (TRAV30, TRAJ24)
CGTEIVDADSLGKFQF

SEQ ID NO: 576326 - protein, 14 aa, Homo sapiens
  CDR3 for beta chain variable domain of TCR clone 288163 (TRBV12-5, TRBJ2-5)
CASGSRTNQETQYF

SEQ ID NO: 576327 - protein, 18 aa, Homo sapiens
  CDR3 for alpha chain variable domain of TCR clone 288164 (TRAV8-3, TRAJ4)
WVRDPTSNDPGGYDKLIF

SEQ ID NO: 576328 - protein, 13 aa, Homo sapiens
  CDR3 for beta chain variable domain of TCR clone 288164 (TRBV20-1, TRBJ1-2)
CSATGIQGSGYTF

SEQ ID NO: 576329 - protein, 14 aa, Homo sapiens
  CDR3 for alpha chain variable domain of TCR clone 288165 (TRAV12-3, TRAJ57)
CAMSAWGGSEKLVF

SEQ ID NO: 576330 - protein, 14 aa, Homo sapiens
  CDR3 for beta chain variable domain of TCR clone 288165 (TRBV18, TRBJ2-5)
CSSSPGVSQETQYF

SEQ ID NO: 576331 - protein, 11 aa, Homo sapiens
  CDR3 for alpha chain variable domain of TCR clone 288166 (TRAV4, TRAJ23)
CLVAPGGKLIF

SEQ ID NO: 576332 - protein, 15 aa, Homo sapiens
  CDR3 for beta chain variable domain of TCR clone 288166 (TRBV6-3, TRBJ2-7)
CASSSPGTVFYEQYF

SEQ ID NO: 576333 - protein, 17 aa, Homo sapiens
  CDR3 for alpha chain variable domain of TCR clone 288167 (TRAV3, TRAJ42)
CDVRDRDYGGSQGNLIF

SEQ ID NO: 576334 - protein, 12 aa, Homo sapiens
  CDR3 for beta chain variable domain of TCR clone 288167 (TRBV29-1, TRBJ2-2)
CSVDKYTGELFF

SEQ ID NO: 576335 - protein, 12 aa, Homo sapiens
  CDR3 for alpha chain variable domain of TCR clone 288168 (TRAV8-3, TRAJ26)
WAGDNYGQNFVF

SEQ ID NO: 576336 - protein, 12 aa, Homo sapiens
  CDR3 for beta chain variable domain of TCR clone 288168 (TRBV11-2, TRBJ2-1)
CASSPGDNEQFF

SEQ ID NO: 576337 - protein, 14 aa, Homo sapiens
  CDR3 for alpha chain variable domain of TCR clone 288169 (TRAV26-1, TRAJ49)
CIVRLTNTGNQFYF

SEQ ID NO: 576338 - protein, 11 aa, Homo sapiens
  CDR3 for beta chain variable domain of TCR clone 288169 (TRBV29-1, TRBJ2-5)
CIEDRTGTQYF

SEQ ID NO: 576339 - protein, 16 aa, Homo sapiens
  CDR3 for alpha chain variable domain of TCR clone 288170 (TRAV3, TRAJ6)
CAVRDGMGRGKLHTYI

SEQ ID NO: 576340 - protein, 15 aa, Homo sapiens
  CDR3 for beta chain variable domain of TCR clone 288170 (TRBV9, TRBJ2-1)
CGSSLAGSSYNEQFF

SEQ ID NO: 576341 - protein, 14 aa, Homo sapiens
  CDR3 for alpha chain variable domain of TCR clone 288171 (TRAV12-1, TRAJ12)
CVVIAMDSSYKLIF

SEQ ID NO: 576342 - protein, 15 aa, Homo sapiens
  CDR3 for beta chain variable domain of TCR clone 288171 (TRBV6-3, TRBJ2-7)
CASSSPGTVFYEQYF

SEQ ID NO: 576343 - protein, 18 aa, Homo sapiens
  CDR3 for alpha chain variable domain of TCR clone 288172 (TRAV1-1, TRAJ12)
CLLLLRCERGDSGYKLIF

SEQ ID NO: 576344 - protein, 15 aa, Homo sapiens
  CDR3 for beta chain variable domain of TCR clone 288172 (TRBV18, TRBJ2-5)
RASTDRGPRQETQYF

SEQ ID NO: 576345 - protein, 14 aa, Homo sapiens
  CDR3 for alpha chain variable domain of TCR clone 288173 (TRAV38-1, TRAJ43)
CAFMKHNSGRHALW

SEQ ID NO: 576346 - protein, 11 aa, Homo sapiens
  CDR3 for beta chain variable domain of TCR clone 288173 (TRBV7-9, TRBJ2-3)
CASSYTDTQYF

SEQ ID NO: 576347 - protein, 13 aa, Homo sapiens
  CDR3 for alpha chain variable domain of TCR clone 288174 (TRAV21, TRAJ12)
CAVLMDSSYKLIF

SEQ ID NO: 576348 - protein, 14 aa, Homo sapiens
  CDR3 for beta chain variable domain of TCR clone 288174 (TRBV18, TRBJ2-5)
CASSPGVSQETQYF

SEQ ID NO: 576349 - protein, 16 aa, Homo sapiens
  CDR3 for alpha chain variable domain of TCR clone 288175 (TRAV13-2, TRAJ37)
CAENIRGSSNTGKLIF

SEQ ID NO: 576350 - protein, 17 aa, Homo sapiens
  CDR3 for beta chain variable domain of TCR clone 288175 (TRBV11-2, TRBJ2-1)
CASRLYPPGVEYNEQFF

SEQ ID NO: 576351 - protein, 15 aa, Homo sapiens
  CDR3 for alpha chain variable domain of TCR clone 288176 (TRAV16, TRAJ20)
CALRGGLRADYKLSF

SEQ ID NO: 576352 - protein, 16 aa, Homo sapiens
  CDR3 for beta chain variable domain of TCR clone 288176 (TRBV11-3, TRBJ2-2)
CASSSRTSPGTGELFF

SEQ ID NO: 576353 - protein, 23 aa, Homo sapiens
  CDR3 for alpha chain variable domain of TCR clone 288177 (TRAV1-1, TRAJ11)
LPQELQMKDSASYFCAGYSTLTF

SEQ ID NO: 576354 - protein, 15 aa, Homo sapiens
  CDR3 for beta chain variable domain of TCR clone 288177 (TRBV6-5, TRBJ2-1)
CASRGDFDSYNEQFF

SEQ ID NO: 576355 - protein, 14 aa, Homo sapiens
  CDR3 for alpha chain variable domain of TCR clone 288178 (TRAV2, TRAJ9)
CAVVDRSGGFKTIF

SEQ ID NO: 576356 - protein, 15 aa, Homo sapiens
  CDR3 for beta chain variable domain of TCR clone 288178 (TRBV28, TRBJ2-5)
CASSPPWSYQETQYF

SEQ ID NO: 576357 - protein, 12 aa, Homo sapiens
  CDR3 for alpha chain variable domain of TCR clone 288179 (TRAV13-1, TRAJ26)
QVQDNYGQNFVF

SEQ ID NO: 576358 - protein, 14 aa, Homo sapiens
  CDR3 for beta chain variable domain of TCR clone 288179 (TRBV6-1, TRBJ1-3)
CASVQGGGGNTIYF

SEQ ID NO: 576359 - protein, 13 aa, Homo sapiens
  CDR3 for alpha chain variable domain of TCR clone 288180 (TRAV8-4, TRAJ54)
CAVRIQGAQKLVF

SEQ ID NO: 576360 - protein, 17 aa, Homo sapiens
  CDR3 for beta chain variable domain of TCR clone 288180 (TRBV4-1, TRBJ2-7)
CASSRDPLGVRGGEQYF

SEQ ID NO: 576361 - protein, 14 aa, Homo sapiens
  CDR3 for alpha chain variable domain of TCR clone 288181 (TRAV13-1, TRAJ13)
CAASGVGGYQQVTF

SEQ ID NO: 576362 - protein, 17 aa, Homo sapiens
  CDR3 for beta chain variable domain of TCR clone 288181 (TRBV15, TRBJ1-5)
CATSRAPPGTRNQPQHF

SEQ ID NO: 576363 - protein, 16 aa, Homo sapiens
  CDR3 for alpha chain variable domain of TCR clone 288182 (TRAV16, TRAJ4)
CITLLPFSGGYNKLIF

SEQ ID NO: 576364 - protein, 14 aa, Homo sapiens
  CDR3 for beta chain variable domain of TCR clone 288182 (TRBV19, TRBJ2-7)
CASSMGQGAIEQYF

SEQ ID NO: 576365 - protein, 13 aa, Homo sapiens
  CDR3 for alpha chain variable domain of TCR clone 288183 (TRAV21, TRAJ36)
CAVIKTGANNLFF

SEQ ID NO: 576366 - protein, 13 aa, Homo sapiens
  CDR3 for beta chain variable domain of TCR clone 288183 (TRBV29-1, TRBJ2-3)
CSATRWGRDTQYF

SEQ ID NO: 576367 - protein, 22 aa, Homo sapiens
  CDR3 for alpha chain variable domain of TCR clone 288184 (TRAV1-2, TRAJ8)
CAVREDTGFQKLVFELAPDLLS

SEQ ID NO: 576368 - protein, 16 aa, Homo sapiens
  CDR3 for beta chain variable domain of TCR clone 288184 (TRBV20-1, TRBJ2-4)
CSARAILAGQGDIQYF

SEQ ID NO: 576369 - protein, 16 aa, Homo sapiens
  CDR3 for alpha chain variable domain of TCR clone 288185 (TRAV30, TRAJ24)
CGTEIVDADSWWKFQF

SEQ ID NO: 576370 - protein, 14 aa, Homo sapiens
  CDR3 for beta chain variable domain of TCR clone 288185 (TRBV12-5, TRBJ2-5)
CASGSRTQKETQDF

SEQ ID NO: 576371 - protein, 15 aa, Homo sapiens
  CDR3 for alpha chain variable domain of TCR clone 288186 (TRAV3, TRAJ22)
CAVRDRGGSARQLTF

SEQ ID NO: 576372 - protein, 12 aa, Homo sapiens
  CDR3 for beta chain variable domain of TCR clone 288186 (TRBV11-2, TRBJ2-4)
CASSSASGSEYF

SEQ ID NO: 576373 - protein, 17 aa, Homo sapiens
  CDR3 for alpha chain variable domain of TCR clone 288187 (TRAV4, TRAJ13)
CLVGVQGSSGGYQKVTF

SEQ ID NO: 576374 - protein, 17 aa, Homo sapiens
  CDR3 for beta chain variable domain of TCR clone 288187 (TRBV11-2, TRBJ2-1)
CASSLYPPGVEYNEQFF

SEQ ID NO: 576375 - protein, 16 aa, Homo sapiens
  CDR3 for alpha chain variable domain of TCR clone 288188 (TRAV12-1, TRAJ48)
CVVNMVPNFGNEKLTF

SEQ ID NO: 576376 - protein, 18 aa, Homo sapiens
  CDR3 for beta chain variable domain of TCR clone 288188 (TRBV11-2, TRBJ2-6)
CAGSLNPFLGTGANVLTF

SEQ ID NO: 576377 - protein, 16 aa, Homo sapiens
  CDR3 for alpha chain variable domain of TCR clone 288189 (TRAV17, TRAJ48)
CATDASTNFGNEKLTF

SEQ ID NO: 576378 - protein, 14 aa, Homo sapiens
  CDR3 for beta chain variable domain of TCR clone 288189 (TRBV20-1, TRBJ2-7)
CSARADRRGYEQYF

SEQ ID NO: 576379 - protein, 13 aa, Homo sapiens
  CDR3 for alpha chain variable domain of TCR clone 288190 (TRAV13-1, TRAJ15)
CAALPGAGTALIF

SEQ ID NO: 576380 - protein, 16 aa, Homo sapiens
  CDR3 for beta chain variable domain of TCR clone 288190 (TRBV12-5, TRBJ2-5)
CASGPRTSGNQETQYF

SEQ ID NO: 576381 - protein, 12 aa, Homo sapiens
  CDR3 for alpha chain variable domain of TCR clone 288191 (TRAV16, TRAJ8)
CAPLGGFKKLVF

SEQ ID NO: 576382 - protein, 15 aa, Homo sapiens
  CDR3 for beta chain variable domain of TCR clone 288191 (TRBV6-1, TRBJ1-5)
CASIPDRLGNQPQHF

SEQ ID NO: 576383 - protein, 12 aa, Homo sapiens
  CDR3 for alpha chain variable domain of TCR clone 288192 (TRAV26-1, TRAJ48)
CISVFGNEKLTF

SEQ ID NO: 576384 - protein, 17 aa, Homo sapiens
  CDR3 for beta chain variable domain of TCR clone 288192 (TRBV7-6, TRBJ2-1)
CASSFGLAGGTYNEQFF

SEQ ID NO: 576385 - protein, 11 aa, Homo sapiens
  CDR3 for alpha chain variable domain of TCR clone 288193 (TRAV20, TRAJ23)
CACYQGGKLIF

SEQ ID NO: 576386 - protein, 16 aa, Homo sapiens
  CDR3 for beta chain variable domain of TCR clone 288193 (TRBV7-8, TRBJ2-5)
CASSFGGQPAQETQYF

SEQ ID NO: 576387 - protein, 12 aa, Homo sapiens
  CDR3 for alpha chain variable domain of TCR clone 288194 (TRAV12-3, TRAJ17)
CAMTLTGNKLTF

SEQ ID NO: 576388 - protein, 12 aa, Homo sapiens
  CDR3 for beta chain variable domain of TCR clone 288194 (TRBV11-2, TRBJ2-7)
CASSVPTYEQYF

SEQ ID NO: 576389 - protein, 16 aa, Homo sapiens
  CDR3 for alpha chain variable domain of TCR clone 288195 (TRAV27, TRAJ13)
CAGAKSDSGGYQKVTF

SEQ ID NO: 576390 - protein, 14 aa, Homo sapiens
  CDR3 for beta chain variable domain of TCR clone 288195 (TRBV6-5, TRBJ1-6)
CASSHRVSNSPLHF

SEQ ID NO: 576391 - protein, 14 aa, Homo sapiens
  CDR3 for alpha chain variable domain of TCR clone 288196 (TRAV16, TRAJ26)
CALSSANYGQNFVF

SEQ ID NO: 576392 - protein, 15 aa, Homo sapiens
  CDR3 for beta chain variable domain of TCR clone 288196 (TRBV7-9, TRBJ1-5)
CASSQGHQPNQPQHF

SEQ ID NO: 576393 - protein, 12 aa, Homo sapiens
  CDR3 for alpha chain variable domain of TCR clone 288197 (TRAV22, TRAJ22)
CAPGGSARQLTF

SEQ ID NO: 576394 - protein, 12 aa, Homo sapiens
  CDR3 for beta chain variable domain of TCR clone 288197 (TRBV7-6, TRBJ2-3)
CASSTGTDTQYF

SEQ ID NO: 576395 - protein, 16 aa, Homo sapiens
  CDR3 for alpha chain variable domain of TCR clone 288198 (TRAV30, TRAJ24)
CGTEIVDADSWGKFQF

SEQ ID NO: 576396 - protein, 12 aa, Homo sapiens
  CDR3 for beta chain variable domain of TCR clone 288198 (TRBV7-8, TRBJ2-7)
CASSLAGYEQYF

SEQ ID NO: 576397 - protein, 15 aa, Homo sapiens
  CDR3 for alpha chain variable domain of TCR clone 288199 (TRAV12-1, TRAJ4)
CVVNPFSGGYNKLIF

SEQ ID NO: 576398 - protein, 13 aa, Homo sapiens
  CDR3 for beta chain variable domain of TCR clone 288199 (TRBV4-2, TRBJ1-1)
CASSQAGNTEAFF

SEQ ID NO: 576399 - protein, 14 aa, Homo sapiens
  CDR3 for alpha chain variable domain of TCR clone 288200 (TRAV3, TRAJ33)
CAVRDMGSNYQLIW

SEQ ID NO: 576400 - protein, 18 aa, Homo sapiens
  CDR3 for beta chain variable domain of TCR clone 288200 (TRBV12-4, TRBJ2-2)
CASSLVAGTRGRTGELFF

SEQ ID NO: 576401 - protein, 13 aa, Homo sapiens
  CDR3 for alpha chain variable domain of TCR clone 288201 (TRAV8-3, TRAJ44)
CAVVPGTASKLTF

SEQ ID NO: 576402 - protein, 17 aa, Homo sapiens
  CDR3 for beta chain variable domain of TCR clone 288201 (TRBV11-2, TRBJ2-1)
CASSLYPPGVEYNEQFF

SEQ ID NO: 576403 - protein, 17 aa, Homo sapiens
  CDR3 for alpha chain variable domain of TCR clone 288202 (TRAV38-2/DV8, TRAJ57)
CAYRSFLTQGGSEKLVF

SEQ ID NO: 576404 - protein, 15 aa, Homo sapiens
  CDR3 for beta chain variable domain of TCR clone 288202 (TRBV5-1, TRBJ1-1)
CASSWTGRGNTEAFF

SEQ ID NO: 576405 - protein, 13 aa, Homo sapiens
  CDR3 for alpha chain variable domain of TCR clone 288203 (TRAV27, TRAJ41)
CAGEGNAGYALNF

SEQ ID NO: 576406 - protein, 17 aa, Homo sapiens
  CDR3 for beta chain variable domain of TCR clone 288203 (TRBV7-2, TRBJ2-1)
CASSLYPPGVEYNEQFF

SEQ ID NO: 576407 - protein, 14 aa, Homo sapiens
  CDR3 for alpha chain variable domain of TCR clone 288204 (TRAV1-1, TRAJ35)
CAVRSIGFGNVLHC

SEQ ID NO: 576408 - protein, 15 aa, Homo sapiens
  CDR3 for beta chain variable domain of TCR clone 288204 (TRBV20-1, TRBJ1-1)
CSASRGVTGNTEAFF

SEQ ID NO: 576409 - protein, 13 aa, Homo sapiens
  CDR3 for alpha chain variable domain of TCR clone 288205 (TRAV8-6, TRAJ49)
CAVITNTGNQFYF

SEQ ID NO: 576410 - protein, 12 aa, Homo sapiens
  CDR3 for beta chain variable domain of TCR clone 288205 (TRBV11-2, TRBJ2-2)
CACSLGGGELFF

SEQ ID NO: 576411 - protein, 15 aa, Homo sapiens
  CDR3 for alpha chain variable domain of TCR clone 288206 (TRAV26-1, TRAJ39)
CIVRVVGDAGNMLTF

SEQ ID NO: 576412 - protein, 14 aa, Homo sapiens
  CDR3 for beta chain variable domain of TCR clone 288206 (TRBV9, TRBJ2-7)
CASSVGVGSYEQYF

SEQ ID NO: 576413 - protein, 12 aa, Homo sapiens
  CDR3 for alpha chain variable domain of TCR clone 288207 (TRAV12-1, TRAJ16)
CVVFRDGQKLLF

SEQ ID NO: 576414 - protein, 16 aa, Homo sapiens
  CDR3 for beta chain variable domain of TCR clone 288207 (TRBV6-6, TRBJ2-5)
CASSYGPGGQKETQYF

SEQ ID NO: 576415 - protein, 11 aa, Homo sapiens
  CDR3 for alpha chain variable domain of TCR clone 288208 (TRAV1-1, TRAJ30)
CAQNRDDKIIF

SEQ ID NO: 576416 - protein, 14 aa, Homo sapiens
  CDR3 for beta chain variable domain of TCR clone 288208 (TRBV19, TRBJ2-1)
CASKDPSSYNEQFF

SEQ ID NO: 576417 - protein, 13 aa, Homo sapiens
  CDR3 for alpha chain variable domain of TCR clone 288209 (TRAV1-2, TRAJ39)
CAVKDNAGNMPTF

SEQ ID NO: 576418 - protein, 14 aa, Homo sapiens
  CDR3 for beta chain variable domain of TCR clone 288209 (TRBV9, TRBJ2-1)
CASSPRTSFHEQFF

SEQ ID NO: 576419 - protein, 14 aa, Homo sapiens
  CDR3 for alpha chain variable domain of TCR clone 288210 (TRAV23/DV6, TRAJ58)
CAGMRETGGSRLTF

SEQ ID NO: 576420 - protein, 13 aa, Homo sapiens
  CDR3 for beta chain variable domain of TCR clone 288210 (TRBV28, TRBJ2-7)
CASRSSGVYEQYF

SEQ ID NO: 576421 - protein, 11 aa, Homo sapiens
  CDR3 for alpha chain variable domain of TCR clone 288211 (TRAV1-1, TRAJ23)
CAVRQGGKLIF

SEQ ID NO: 576422 - protein, 14 aa, Homo sapiens
  CDR3 for beta chain variable domain of TCR clone 288211 (TRBV2, TRBJ2-1)
CASSDRAYYNEQFF

SEQ ID NO: 576423 - protein, 14 aa, Homo sapiens
  CDR3 for alpha chain variable domain of TCR clone 288212 (TRAV17, TRAJ54)
CATDANQGAQKLVF

SEQ ID NO: 576424 - protein, 14 aa, Homo sapiens
  CDR3 for beta chain variable domain of TCR clone 288212 (TRBV6-1, TRBJ1-3)
CASVQGGGGDTIYF

SEQ ID NO: 576425 - protein, 11 aa, Homo sapiens
  CDR3 for alpha chain variable domain of TCR clone 288213 (TRAV21, TRAJ11)
CAVNGYSTLTF

SEQ ID NO: 576426 - protein, 15 aa, Homo sapiens
  CDR3 for beta chain variable domain of TCR clone 288213 (TRBV6-3, TRBJ2-7)
SASSSPGTVFYEQYF

SEQ ID NO: 576427 - protein, 15 aa, Homo sapiens
  CDR3 for alpha chain variable domain of TCR clone 288214 (TRAV8-4, TRAJ47)
CAVSDPEEYGNKLVF

SEQ ID NO: 576428 - protein, 15 aa, Homo sapiens
  CDR3 for beta chain variable domain of TCR clone 288214 (TRBV12-4, TRBJ2-5)
CASSPPTGLQETQYF

SEQ ID NO: 576429 - protein, 16 aa, Homo sapiens
  CDR3 for alpha chain variable domain of TCR clone 288215 (TRAV30, TRAJ24)
CGTEIGDADSWGKFKF

SEQ ID NO: 576430 - protein, 14 aa, Homo sapiens
  CDR3 for beta chain variable domain of TCR clone 288215 (TRBV7-2, TRBJ2-7)
CASSPKTSFYEQYF

SEQ ID NO: 576431 - protein, 14 aa, Homo sapiens
  CDR3 for alpha chain variable domain of TCR clone 288216 (TRAV26-2, TRAJ54)
CILRDVRGAQKLVF

SEQ ID NO: 576432 - protein, 12 aa, Homo sapiens
  CDR3 for beta chain variable domain of TCR clone 288216 (TRBV24-1, TRBJ1-1)
CATSDSDRGAFL

SEQ ID NO: 576433 - protein, 10 aa, Homo sapiens
  CDR3 for alpha chain variable domain of TCR clone 288217 (TRAV3, TRAJ3)
CAVVQQCFQD

SEQ ID NO: 576434 - protein, 14 aa, Homo sapiens
  CDR3 for beta chain variable domain of TCR clone 288217 (TRBV11-2, TRBJ2-5)
CASSRTGGIETQYF

SEQ ID NO: 576435 - protein, 13 aa, Homo sapiens
  CDR3 for alpha chain variable domain of TCR clone 288218 (TRAV12-1, TRAJ26)
CVVRRNYGQNFVF

SEQ ID NO: 576436 - protein, 14 aa, Homo sapiens
  CDR3 for beta chain variable domain of TCR clone 288218 (TRBV7-2, TRBJ1-1)
CASSFLTGTTEAFF

SEQ ID NO: 576437 - protein, 14 aa, Homo sapiens
  CDR3 for alpha chain variable domain of TCR clone 288219 (TRAV2, TRAJ9)
CAVEDRRGGFKTIF

SEQ ID NO: 576438 - protein, 13 aa, Homo sapiens
  CDR3 for beta chain variable domain of TCR clone 288219 (TRBV7-3, TRBJ1-1)
CASSQDWGAEAFL

SEQ ID NO: 576439 - protein, 13 aa, Homo sapiens
  CDR3 for alpha chain variable domain of TCR clone 288220 (TRAV3, TRAJ20)
CCEALCNDYKLSF

SEQ ID NO: 576440 - protein, 15 aa, Homo sapiens
  CDR3 for beta chain variable domain of TCR clone 288220 (TRBV19, TRBJ2-6)
CASVRRDSGANVLTF

SEQ ID NO: 576441 - protein, 16 aa, Homo sapiens
  CDR3 for alpha chain variable domain of TCR clone 288221 (TRAV27, TRAJ48)
TAAQPGDTGLYLPLTF

SEQ ID NO: 576442 - protein, 15 aa, Homo sapiens
  CDR3 for beta chain variable domain of TCR clone 288221 (TRBV11-3, TRBJ2-3)
CASLKDGREGDTQYF

SEQ ID NO: 576443 - protein, 18 aa, Homo sapiens
  CDR3 for alpha chain variable domain of TCR clone 288222 (TRAV26-1, TRAJ23)
CIVRVGLEVWNQGGKLNF

SEQ ID NO: 576444 - protein, 14 aa, Homo sapiens
  CDR3 for beta chain variable domain of TCR clone 288222 (TRBV7-6, TRBJ2-3)
CASSLGTVTDTQYF

SEQ ID NO: 576445 - protein, 12 aa, Homo sapiens
  CDR3 for alpha chain variable domain of TCR clone 288223 (TRAV4, TRAJ26)
CLVGDYGQNFVF

SEQ ID NO: 576446 - protein, 16 aa, Homo sapiens
  CDR3 for beta chain variable domain of TCR clone 288223 (TRBV7-2, TRBJ1-2)
CASSSNKDRRGHGYTF

SEQ ID NO: 576447 - protein, 13 aa, Homo sapiens
  CDR3 for alpha chain variable domain of TCR clone 288224 (TRAV20, TRAJ45)
CGYSGGGADGLTF

SEQ ID NO: 576448 - protein, 15 aa, Homo sapiens
  CDR3 for beta chain variable domain of TCR clone 288224 (TRBV27, TRBJ2-7)
CASSTAGTGAYEQYF

SEQ ID NO: 576449 - protein, 12 aa, Homo sapiens
  CDR3 for alpha chain variable domain of TCR clone 288225 (TRAV13-1, TRAJ21)
GAAKEGFNKFYF

SEQ ID NO: 576450 - protein, 15 aa, Homo sapiens
  CDR3 for beta chain variable domain of TCR clone 288225 (TRBV7-7, TRBJ2-5)
CASSQLERAEETQYF

SEQ ID NO: 576451 - protein, 11 aa, Homo sapiens
  CDR3 for alpha chain variable domain of TCR clone 288226 (TRAV2, TRAJ13)
CASGGYQKVTF

SEQ ID NO: 576452 - protein, 15 aa, Homo sapiens
  CDR3 for beta chain variable domain of TCR clone 288226 (TRBV5-4, TRBJ2-7)
CASSRFGTGPYEQYF

SEQ ID NO: 576453 - protein, 12 aa, Homo sapiens
  CDR3 for alpha chain variable domain of TCR clone 288227 (TRAV20, TRAJ39)
CDVGNAGNMLTF

SEQ ID NO: 576454 - protein, 16 aa, Homo sapiens
  CDR3 for beta chain variable domain of TCR clone 288227 (TRBV15, TRBJ1-2)
CATSRGPRTGGGGYTF

SEQ ID NO: 576455 - protein, 14 aa, Homo sapiens
  CDR3 for alpha chain variable domain of TCR clone 288228 (TRAV12-1, TRAJ26)
CVVKGSNYGQNFVF

SEQ ID NO: 576456 - protein, 17 aa, Homo sapiens
  CDR3 for beta chain variable domain of TCR clone 288228 (TRBV11-2, TRBJ2-6)
CASSRRDIFSGANVLTF

SEQ ID NO: 576457 - protein, 13 aa, Homo sapiens
  CDR3 for alpha chain variable domain of TCR clone 288229 (TRAV12-2, TRAJ50)
CAVIVTSYDKVIF

SEQ ID NO: 576458 - protein, 14 aa, Homo sapiens
  CDR3 for beta chain variable domain of TCR clone 288229 (TRBV27, TRBJ1-2)
CASSLAGATHGYTF

SEQ ID NO: 576459 - protein, 16 aa, Homo sapiens
  CDR3 for alpha chain variable domain of TCR clone 288230 (TRAV3, TRAJ10)
CAVRDMRAEGGNKLNF

SEQ ID NO: 576460 - protein, 15 aa, Homo sapiens
  CDR3 for beta chain variable domain of TCR clone 288230 (TRBV5-1, TRBJ2-1)
CASSPPRAPYNEQFF

SEQ ID NO: 576461 - protein, 15 aa, Homo sapiens
  CDR3 for alpha chain variable domain of TCR clone 288231 (TRAV26-2, TRAJ48)
CILRDQDFGNEKLTF

SEQ ID NO: 576462 - protein, 15 aa, Homo sapiens
  CDR3 for beta chain variable domain of TCR clone 288231 (TRBV19, TRBJ1-5)
CASSIVWADNQPQHF

SEQ ID NO: 576463 - protein, 12 aa, Homo sapiens
  CDR3 for alpha chain variable domain of TCR clone 288232 (TRAV10, TRAJ34)
CVVSGKHRQAHL

SEQ ID NO: 576464 - protein, 20 aa, Homo sapiens
  CDR3 for beta chain variable domain of TCR clone 288232 (TRBV7-8, TRBJ2-2)
CASSHLFPGPTIHITGELFF

SEQ ID NO: 576465 - protein, 11 aa, Homo sapiens
  CDR3 for alpha chain variable domain of TCR clone 288233 (TRAV2, TRAJ33)
CAVESNYQLIW

SEQ ID NO: 576466 - protein, 12 aa, Homo sapiens
  CDR3 for beta chain variable domain of TCR clone 288233 (TRBV7-6, TRBJ2-7)
CASSLADSEQYF

SEQ ID NO: 576467 - protein, 13 aa, Homo sapiens
  CDR3 for alpha chain variable domain of TCR clone 288234 (TRAV13-2, TRAJ11)
CAEGDSGYSTLTF

SEQ ID NO: 576468 - protein, 12 aa, Homo sapiens
  CDR3 for beta chain variable domain of TCR clone 288234 (TRBV7-9, TRBJ1-1)
CASSLEGTESFF

SEQ ID NO: 576469 - protein, 14 aa, Homo sapiens
  CDR3 for alpha chain variable domain of TCR clone 288235 (TRAV13-1, TRAJ44)
CAAKATGTASKLTF

SEQ ID NO: 576470 - protein, 13 aa, Homo sapiens
  CDR3 for beta chain variable domain of TCR clone 288235 (TRBV12-4, TRBJ2-5)
CASRLAVQETQYF

SEQ ID NO: 576471 - protein, 14 aa, Homo sapiens
  CDR3 for alpha chain variable domain of TCR clone 288236 (TRAV12-2, TRAJ13)
CAVQKTGGYQKVTF

SEQ ID NO: 576472 - protein, 14 aa, Homo sapiens
  CDR3 for beta chain variable domain of TCR clone 288236 (TRBV7-6, TRBJ2-3)
CASSLGTVTDTQYF

SEQ ID NO: 576473 - protein, 10 aa, Homo sapiens
  CDR3 for alpha chain variable domain of TCR clone 288237 (TRAV30, TRAJ16)
CGTGGQKLLF

SEQ ID NO: 576474 - protein, 12 aa, Homo sapiens
  CDR3 for beta chain variable domain of TCR clone 288237 (TRBV29-1, TRBJ2-3)
CSVTGGADTQYF

SEQ ID NO: 576475 - protein, 15 aa, Homo sapiens
  CDR3 for alpha chain variable domain of TCR clone 288238 (TRAV12-2, TRAJ5)
CAVNGKDTGRRALTF

SEQ ID NO: 576476 - protein, 15 aa, Homo sapiens
  CDR3 for beta chain variable domain of TCR clone 288238 (TRBV28, TRBJ2-7)
CASSPGGRGFYEQYF

SEQ ID NO: 576477 - protein, 15 aa, Homo sapiens
  CDR3 for alpha chain variable domain of TCR clone 288239 (TRAV2, TRAJ15)
CAVEDREQAGTALIV

SEQ ID NO: 576478 - protein, 14 aa, Homo sapiens
  CDR3 for beta chain variable domain of TCR clone 288239 (TRBV11-2, TRBJ2-7)
CASSLGAGAYEQYF

SEQ ID NO: 576479 - protein, 16 aa, Homo sapiens
  CDR3 for alpha chain variable domain of TCR clone 288240 (TRAV21, TRAJ45)
CAVTMYSGGGADGLTF

SEQ ID NO: 576480 - protein, 14 aa, Homo sapiens
  CDR3 for beta chain variable domain of TCR clone 288240 (TRBV6-1, TRBJ1-3)
CASVQGGGGNTIYF

SEQ ID NO: 576481 - protein, 11 aa, Homo sapiens
  CDR3 for alpha chain variable domain of TCR clone 288241 (TRAV3, TRAJ21)
CAVGNFNKFYL

SEQ ID NO: 576482 - protein, 16 aa, Homo sapiens
  CDR3 for beta chain variable domain of TCR clone 288241 (TRBV19, TRBJ2-1)
CASGKAGPSSYNEQFF

SEQ ID NO: 576483 - protein, 13 aa, Homo sapiens
  CDR3 for alpha chain variable domain of TCR clone 288242 (TRAV26-1, TRAJ33)
CIVRVDSNYQLIW

SEQ ID NO: 576484 - protein, 14 aa, Homo sapiens
  CDR3 for beta chain variable domain of TCR clone 288242 (TRBV7-3, TRBJ2-1)
CASSLAGGTNEQFF

SEQ ID NO: 576485 - protein, 12 aa, Homo sapiens
  CDR3 for alpha chain variable domain of TCR clone 288243 (TRAV12-1, TRAJ40)
CVVYSGTYKYIF

SEQ ID NO: 576486 - protein, 18 aa, Homo sapiens
  CDR3 for beta chain variable domain of TCR clone 288243 (TRBV12-4, TRBJ2-2)
CASRPFGAGALNTGELFF

SEQ ID NO: 576487 - protein, 17 aa, Homo sapiens
  CDR3 for alpha chain variable domain of TCR clone 288244 (TRAV26-1, TRAJ48)
CCVLLHRQSRGDEKLTF

SEQ ID NO: 576488 - protein, 14 aa, Homo sapiens
  CDR3 for beta chain variable domain of TCR clone 288244 (TRBV7-2, TRBJ2-7)
CASRSQGAAYEQYF

SEQ ID NO: 576489 - protein, 13 aa, Homo sapiens
  CDR3 for alpha chain variable domain of TCR clone 288245 (TRAV24, TRAJ44)
CALLTGTASKLTF

SEQ ID NO: 576490 - protein, 14 aa, Homo sapiens
  CDR3 for beta chain variable domain of TCR clone 288245 (TRBV7-2, TRBJ2-7)
CASSLYPGRYEQYF

SEQ ID NO: 576491 - protein, 15 aa, Homo sapiens
  CDR3 for alpha chain variable domain of TCR clone 288246 (TRAV29/DV5, TRAJ40)
CAAIAQGSGTYKYIL

SEQ ID NO: 576492 - protein, 15 aa, Homo sapiens
  CDR3 for beta chain variable domain of TCR clone 288246 (TRBV7-2, TRBJ2-3)
CASSLAGAFIDTQYF

SEQ ID NO: 576493 - protein, 14 aa, Homo sapiens
  CDR3 for alpha chain variable domain of TCR clone 288247 (TRAV12-2, TRAJ17)
CAVNIKAAGNKLTF

SEQ ID NO: 576494 - protein, 12 aa, Homo sapiens
  CDR3 for beta chain variable domain of TCR clone 288247 (TRBV11-2, TRBJ2-1)
CASSPGNNEQFF

SEQ ID NO: 576495 - protein, 16 aa, Homo sapiens
  CDR3 for alpha chain variable domain of TCR clone 288248 (TRAV13-1, TRAJ37)
CAASSLGSSNTGKLIF

SEQ ID NO: 576496 - protein, 13 aa, Homo sapiens
  CDR3 for beta chain variable domain of TCR clone 288248 (TRBV12-4, TRBJ1-1)
CASSPGTGFEAFF

SEQ ID NO: 576497 - protein, 16 aa, Homo sapiens
  CDR3 for alpha chain variable domain of TCR clone 288249 (TRAV8-3, TRAJ13)
CALGAYPSGGYRKVTF

SEQ ID NO: 576498 - protein, 15 aa, Homo sapiens
  CDR3 for beta chain variable domain of TCR clone 288249 (TRBV19, TRBJ1-5)
CASSIVWADNQPQHF

SEQ ID NO: 576499 - protein, 16 aa, Homo sapiens
  CDR3 for alpha chain variable domain of TCR clone 288250 (TRAV3, TRAJ21)
SAVRDIERGNFNKFYF

SEQ ID NO: 576500 - protein, 14 aa, Homo sapiens
  CDR3 for beta chain variable domain of TCR clone 288250 (TRBV12-4, TRBJ2-5)
CASSLSSGRETQYF

SEQ ID NO: 576501 - protein, 17 aa, Homo sapiens
  CDR3 for alpha chain variable domain of TCR clone 288251 (TRAV3, TRAJ38)
CAVRDCLNAGNNRKLIW

SEQ ID NO: 576502 - protein, 16 aa, Homo sapiens
  CDR3 for beta chain variable domain of TCR clone 288251 (TRBV6-5, TRBJ2-1)
CASSCSLSGGYNEQFF

SEQ ID NO: 576503 - protein, 14 aa, Homo sapiens
  CDR3 for alpha chain variable domain of TCR clone 288252 (TRAV1-2, TRAJ16)
CAVNRFSDGQKLLF

SEQ ID NO: 576504 - protein, 13 aa, Homo sapiens
  CDR3 for beta chain variable domain of TCR clone 288252 (TRBV5-5, TRBJ1-2)
CASSFWRGEDYTL

SEQ ID NO: 576505 - protein, 13 aa, Homo sapiens
  CDR3 for alpha chain variable domain of TCR clone 288253 (TRAV27, TRAJ58)
CAGAETSGSRLTF

SEQ ID NO: 576506 - protein, 13 aa, Homo sapiens
  CDR3 for beta chain variable domain of TCR clone 288253 (TRBV7-2, TRBJ2-1)
CASNRDGWNEQFF

SEQ ID NO: 576507 - protein, 14 aa, Homo sapiens
  CDR3 for alpha chain variable domain of TCR clone 288254 (TRAV1-2, TRAJ16)
CAVNRFSDGQKLLF

SEQ ID NO: 576508 - protein, 14 aa, Homo sapiens
  CDR3 for beta chain variable domain of TCR clone 288254 (TRBV11-1, TRBJ2-7)
CASSFRQGSYEQYV

SEQ ID NO: 576509 - protein, 15 aa, Homo sapiens
  CDR3 for alpha chain variable domain of TCR clone 288255 (TRAV12-3, TRAJ10)
CASYILTGGGNKLTF

SEQ ID NO: 576510 - protein, 14 aa, Homo sapiens
  CDR3 for beta chain variable domain of TCR clone 288255 (TRBV18, TRBJ2-1)
CASSPQGRFNEQFF

SEQ ID NO: 576511 - protein, 12 aa, Homo sapiens
  CDR3 for alpha chain variable domain of TCR clone 288256 (TRAV12-2, TRAJ39)
CRNNNAGNMLTF

SEQ ID NO: 576512 - protein, 13 aa, Homo sapiens
  CDR3 for beta chain variable domain of TCR clone 288256 (TRBV2, TRBJ1-5)
CAAAGPGNQPQHF

SEQ ID NO: 576513 - protein, 14 aa, Homo sapiens
  CDR3 for alpha chain variable domain of TCR clone 288257 (TRAV12-3, TRAJ10)
SHLPLTGGGNKLTF

SEQ ID NO: 576514 - protein, 15 aa, Homo sapiens
  CDR3 for beta chain variable domain of TCR clone 288257 (TRBV29-1, TRBJ2-6)
CSVGDRGSGDNVLTF

SEQ ID NO: 576515 - protein, 12 aa, Homo sapiens
  CDR3 for alpha chain variable domain of TCR clone 288258 (TRAV1-1, TRAJ39)
CAVPVVGNMLTF

SEQ ID NO: 576516 - protein, 16 aa, Homo sapiens
  CDR3 for beta chain variable domain of TCR clone 288258 (TRBV29-1, TRBJ2-7)
CSVEVVGTSGSYEQYF

SEQ ID NO: 576517 - protein, 13 aa, Homo sapiens
  CDR3 for alpha chain variable domain of TCR clone 288259 (TRAV12-1, TRAJ16)
CVVNGPDGQKLLF

SEQ ID NO: 576518 - protein, 15 aa, Homo sapiens
  CDR3 for beta chain variable domain of TCR clone 288259 (TRBV7-2, TRBJ2-1)
CASSSRTSREDEQFF

SEQ ID NO: 576519 - protein, 15 aa, Homo sapiens
  CDR3 for alpha chain variable domain of TCR clone 288260 (TRAV2, TRAJ9)
CAVEDRGTGGFNTIF

SEQ ID NO: 576520 - protein, 13 aa, Homo sapiens
  CDR3 for beta chain variable domain of TCR clone 288260 (TRBV20-1, TRBJ1-1)
CSARGGGNTEAFF

SEQ ID NO: 576521 - protein, 16 aa, Homo sapiens
  CDR3 for alpha chain variable domain of TCR clone 288261 (TRAV12-3, TRAJ53)
CAMSPGSGGSNYKLTF

SEQ ID NO: 576522 - protein, 11 aa, Homo sapiens
  CDR3 for beta chain variable domain of TCR clone 288261 (TRBV29-1, TRBJ2-5)
CSEDRTGTQAF

SEQ ID NO: 576523 - protein, 11 aa, Homo sapiens
  CDR3 for alpha chain variable domain of TCR clone 288262 (TRAV35, TRAJ30)
CAPGGDDKIIF

SEQ ID NO: 576524 - protein, 13 aa, Homo sapiens
  CDR3 for beta chain variable domain of TCR clone 288262 (TRBV7-6, TRBJ2-1)
CQPLGGGADEQFF

SEQ ID NO: 576525 - protein, 18 aa, Homo sapiens
  CDR3 for alpha chain variable domain of TCR clone 288263 (TRAV26-2, TRAJ45)
FILRGDKYSGGGADGLTF

SEQ ID NO: 576526 - protein, 14 aa, Homo sapiens
  CDR3 for beta chain variable domain of TCR clone 288263 (TRBV7-2, TRBJ2-7)
CASRSQGAAYEQYF

SEQ ID NO: 576527 - protein, 14 aa, Homo sapiens
  CDR3 for alpha chain variable domain of TCR clone 288264 (TRAV12-2, TRAJ17)
RAALFKAAGNKLTF

SEQ ID NO: 576528 - protein, 16 aa, Homo sapiens
  CDR3 for beta chain variable domain of TCR clone 288264 (TRBV20-1, TRBJ2-2)
CSASASGIPGAGELFF

SEQ ID NO: 576529 - protein, 14 aa, Homo sapiens
  CDR3 for alpha chain variable domain of TCR clone 288265 (TRAV26-1, TRAJ38)
CIADNAGNNRKLIW

SEQ ID NO: 576530 - protein, 15 aa, Homo sapiens
  CDR3 for beta chain variable domain of TCR clone 288265 (TRBV20-1, TRBJ1-2)
CSAAGEGARIYGYTF

SEQ ID NO: 576531 - protein, 16 aa, Homo sapiens
  CDR3 for alpha chain variable domain of TCR clone 288266 (TRAV1-2, TRAJ10)
CAVRGVLTGGGNKLTF

SEQ ID NO: 576532 - protein, 15 aa, Homo sapiens
  CDR3 for beta chain variable domain of TCR clone 288266 (TRBV5-1, TRBJ2-1)
CASKGLAGVYNEQFF

SEQ ID NO: 576533 - protein, 17 aa, Homo sapiens
  CDR3 for alpha chain variable domain of TCR clone 288267 (TRAV3, TRAJ6)
CAVRDGPRAGGSYIPTF

SEQ ID NO: 576534 - protein, 13 aa, Homo sapiens
  CDR3 for beta chain variable domain of TCR clone 288267 (TRBV2, TRBJ1-5)
CASGTGGYQPQHF

SEQ ID NO: 576535 - protein, 15 aa, Homo sapiens
  CDR3 for alpha chain variable domain of TCR clone 288268 (TRAV21, TRAJ24)
CAARSSPDSWGKLQF

SEQ ID NO: 576536 - protein, 15 aa, Homo sapiens
  CDR3 for beta chain variable domain of TCR clone 288268 (TRBV5-1, TRBJ2-1)
CASSPPRAPYNEQFF

SEQ ID NO: 576537 - protein, 16 aa, Homo sapiens
  CDR3 for alpha chain variable domain of TCR clone 288269 (TRAV3, TRAJ10)
CAVRDMRAGGGNKLTF

SEQ ID NO: 576538 - protein, 14 aa, Homo sapiens
  CDR3 for beta chain variable domain of TCR clone 288269 (TRBV5-1, TRBJ1-2)
CASSLEPVNYGYTF

SEQ ID NO: 576539 - protein, 13 aa, Homo sapiens
  CDR3 for alpha chain variable domain of TCR clone 288270 (TRAV27, TRAJ45)
CRSSGGGADGLTF

SEQ ID NO: 576540 - protein, 14 aa, Homo sapiens
  CDR3 for beta chain variable domain of TCR clone 288270 (TRBV7-9, TRBJ2-1)
CASSSMVGFDEQFF

SEQ ID NO: 576541 - protein, 16 aa, Homo sapiens
  CDR3 for alpha chain variable domain of TCR clone 288271 (TRAV17, TRAJ17)
CATAFQEEAAGNKLTF

SEQ ID NO: 576542 - protein, 12 aa, Homo sapiens
  CDR3 for beta chain variable domain of TCR clone 288271 (TRBV4-2, TRBJ2-5)
CASGGAQETQYF

SEQ ID NO: 576543 - protein, 13 aa, Homo sapiens
  CDR3 for alpha chain variable domain of TCR clone 288272 (TRAV12-2, TRAJ20)
CAVYPSNDYKLSF

SEQ ID NO: 576544 - protein, 13 aa, Homo sapiens
  CDR3 for beta chain variable domain of TCR clone 288272 (TRBV11-2, TRBJ1-5)
CASSLDRNQPQHF

SEQ ID NO: 576545 - protein, 14 aa, Homo sapiens
  CDR3 for alpha chain variable domain of TCR clone 288273 (TRAV41, TRAJ48)
CAVRPHFGNEKLTF

SEQ ID NO: 576546 - protein, 12 aa, Homo sapiens
  CDR3 for beta chain variable domain of TCR clone 288273 (TRBV5-4, TRBJ2-5)
CASSSTRETQYF

SEQ ID NO: 576547 - protein, 13 aa, Homo sapiens
  CDR3 for alpha chain variable domain of TCR clone 288274 (TRAV12-2, TRAJ15)
CAVFNQAGTALIF

SEQ ID NO: 576548 - protein, 15 aa, Homo sapiens
  CDR3 for beta chain variable domain of TCR clone 288274 (TRBV7-8, TRBJ1-5)
CASSRGGSADQPQHF

SEQ ID NO: 576549 - protein, 14 aa, Homo sapiens
  CDR3 for alpha chain variable domain of TCR clone 288275 (TRAV1-2, TRAJ16)
CAVNRFSDGQKLLF

SEQ ID NO: 576550 - protein, 16 aa, Homo sapiens
  CDR3 for beta chain variable domain of TCR clone 288275 (TRBV18, TRBJ2-7)
CVGLGWGGVCGLCLGR

SEQ ID NO: 576551 - protein, 11 aa, Homo sapiens
  CDR3 for alpha chain variable domain of TCR clone 288276 (TRAV1-1, TRAJ23)
CAVRQGGRLIF

SEQ ID NO: 576552 - protein, 13 aa, Homo sapiens
  CDR3 for beta chain variable domain of TCR clone 288276 (TRBV7-8, TRBJ2-2)
CASSHLFPGPLSI

SEQ ID NO: 576553 - protein, 15 aa, Homo sapiens
  CDR3 for alpha chain variable domain of TCR clone 288277 (TRAV3, TRAJ3)
CAVRDRDSSASKIIF

SEQ ID NO: 576554 - protein, 14 aa, Homo sapiens
  CDR3 for beta chain variable domain of TCR clone 288277 (TRBV5-1, TRBJ2-7)
CASSRGESLYEQYF

SEQ ID NO: 576555 - protein, 12 aa, Homo sapiens
  CDR3 for alpha chain variable domain of TCR clone 288278 (TRAV3, TRAJ17)
CAVRSCRQQANF

SEQ ID NO: 576556 - protein, 15 aa, Homo sapiens
  CDR3 for beta chain variable domain of TCR clone 288278 (TRBV7-3, TRBJ2-1)
CASSSRSSGRNEQFF

SEQ ID NO: 576557 - protein, 21 aa, Homo sapiens
  CDR3 for alpha chain variable domain of TCR clone 288279 (TRAV8-3, TRAJ32)
CAVEVVLQTSSSLELALCLLS

SEQ ID NO: 576558 - protein, 15 aa, Homo sapiens
  CDR3 for beta chain variable domain of TCR clone 288279 (TRBV6-5, TRBJ2-1)
CASSYDAGAGNEQFF

SEQ ID NO: 576559 - protein, 11 aa, Homo sapiens
  CDR3 for alpha chain variable domain of TCR clone 288280 (TRAV12-2, TRAJ23)
CARGRGGKLIF

SEQ ID NO: 576560 - protein, 14 aa, Homo sapiens
  CDR3 for beta chain variable domain of TCR clone 288280 (TRBV28, TRBJ2-5)
CARSLGDRAETQYF

SEQ ID NO: 576561 - protein, 10 aa, Homo sapiens
  CDR3 for alpha chain variable domain of TCR clone 288281 (TRAV2, TRAJ34)
CAVVNDKLIF

SEQ ID NO: 576562 - protein, 14 aa, Homo sapiens
  CDR3 for beta chain variable domain of TCR clone 288281 (TRBV4-1, TRBJ2-2)
CASSQAVNTGELFF

SEQ ID NO: 576563 - protein, 12 aa, Homo sapiens
  CDR3 for alpha chain variable domain of TCR clone 288282 (TRAV1-2, TRAJ42)
CVAGGSQGNLIF

SEQ ID NO: 576564 - protein, 14 aa, Homo sapiens
  CDR3 for beta chain variable domain of TCR clone 288282 (TRBV5-4, TRBJ2-5)
CASILVRGQETQYF

SEQ ID NO: 576565 - protein, 12 aa, Homo sapiens
  CDR3 for alpha chain variable domain of TCR clone 288283 (TRAV12-1, TRAJ40)
CVVYSGTYKYIF

SEQ ID NO: 576566 - protein, 13 aa, Homo sapiens
  CDR3 for beta chain variable domain of TCR clone 288283 (TRBV4-1, TRBJ2-1)
CASSQAGGDEQFF

SEQ ID NO: 576567 - protein, 12 aa, Homo sapiens
  CDR3 for alpha chain variable domain of TCR clone 288284 (TRAV12-1, TRAJ34)
CVVAGATDKLIF

SEQ ID NO: 576568 - protein, 15 aa, Homo sapiens
  CDR3 for beta chain variable domain of TCR clone 288284 (TRBV12-4, TRBJ2-5)
CASSLSGAFQETQYF

SEQ ID NO: 576569 - protein, 13 aa, Homo sapiens
  CDR3 for alpha chain variable domain of TCR clone 288285 (TRAV29/DV5, TRAJ40)
CAVVTSGTYKSIF

SEQ ID NO: 576570 - protein, 14 aa, Homo sapiens
  CDR3 for beta chain variable domain of TCR clone 288285 (TRBV19, TRBJ2-1)
CASPTFVLSGEQFF

SEQ ID NO: 576571 - protein, 18 aa, Homo sapiens
  CDR3 for alpha chain variable domain of TCR clone 288286 (TRAV26-2, TRAJ45)
CILRVDKYSGGGADGLTF

SEQ ID NO: 576572 - protein, 12 aa, Homo sapiens
  CDR3 for beta chain variable domain of TCR clone 288286 (TRBV3-1, TRBJ2-1)
CASSQGSSGQFF

SEQ ID NO: 576573 - protein, 14 aa, Homo sapiens
  CDR3 for alpha chain variable domain of TCR clone 288287 (TRAV1-2, TRAJ16)
CAVNRFSDCQKLLF

SEQ ID NO: 576574 - protein, 14 aa, Homo sapiens
  CDR3 for beta chain variable domain of TCR clone 288287 (TRBV19, TRBJ2-1)
CASPTFVLSGEQFF

SEQ ID NO: 576575 - protein, 14 aa, Homo sapiens
  CDR3 for alpha chain variable domain of TCR clone 288288 (TRAV8-4, TRAJ16)
CAVSPVGRWPESAL

SEQ ID NO: 576576 - protein, 15 aa, Homo sapiens
  CDR3 for beta chain variable domain of TCR clone 288288 (TRBV11-3, TRBJ2-7)
CASSPGPASSYEQYF

SEQ ID NO: 576577 - protein, 14 aa, Homo sapiens
  CDR3 for alpha chain variable domain of TCR clone 288289 (TRAV12-2, TRAJ33)
CAVKRARSNYQLIW

SEQ ID NO: 576578 - protein, 12 aa, Homo sapiens
  CDR3 for beta chain variable domain of TCR clone 288289 (TRBV19, TRBJ1-4)
CASKDWPGGLFF

SEQ ID NO: 576579 - protein, 17 aa, Homo sapiens
  CDR3 for alpha chain variable domain of TCR clone 288290 (TRAV3, TRAJ6)
CAVRDGPRAGGSYIPTF

SEQ ID NO: 576580 - protein, 16 aa, Homo sapiens
  CDR3 for beta chain variable domain of TCR clone 288290 (TRBV7-9, TRBJ1-2)
CASSLGFSSGEDGYTL

SEQ ID NO: 576581 - protein, 13 aa, Homo sapiens
  CDR3 for alpha chain variable domain of TCR clone 288291 (TRAV8-2, TRAJ26)
CVVTLLLGSEFFL

SEQ ID NO: 576582 - protein, 15 aa, Homo sapiens
  CDR3 for beta chain variable domain of TCR clone 288291 (TRBV11-2, TRBJ2-2)
CASSSDRVNAGELFF

SEQ ID NO: 576583 - protein, 16 aa, Homo sapiens
  CDR3 for alpha chain variable domain of TCR clone 288292 (TRAV30, TRAJ24)
CGTEIVDADSWGKFQF

SEQ ID NO: 576584 - protein, 13 aa, Homo sapiens
  CDR3 for beta chain variable domain of TCR clone 288292 (TRBV7-9, TRBJ1-2)
CASSVKQNYGYTF

SEQ ID NO: 576585 - protein, 16 aa, Homo sapiens
  CDR3 for alpha chain variable domain of TCR clone 288293 (TRAV1-2, TRAJ10)
CAVRGVLTGGGNKLTF

SEQ ID NO: 576586 - protein, 15 aa, Homo sapiens
  CDR3 for beta chain variable domain of TCR clone 288293 (TRBV27, TRBJ2-7)
RASSPIVTGAYEQYF

SEQ ID NO: 576587 - protein, 13 aa, Homo sapiens
  CDR3 for alpha chain variable domain of TCR clone 288294 (TRAV12-2, TRAJ15)
CAVFNQAGTALIF

SEQ ID NO: 576588 - protein, 13 aa, Homo sapiens
  CDR3 for beta chain variable domain of TCR clone 288294 (TRBV7-8, TRBJ1-1)
CASSQDWGAEAFF

SEQ ID NO: 576589 - protein, 18 aa, Homo sapiens
  CDR3 for alpha chain variable domain of TCR clone 288295 (TRAV12-3, TRAJ52)
CAMSVAGAGGTSYGKLTF

SEQ ID NO: 576590 - protein, 15 aa, Homo sapiens
  CDR3 for beta chain variable domain of TCR clone 288295 (TRBV27, TRBJ1-6)
CASSFDRGLGSPLHF

SEQ ID NO: 576591 - protein, 15 aa, Homo sapiens
  CDR3 for alpha chain variable domain of TCR clone 288296 (TRAV8-4, TRAJ9)
CAVSDRETGGFKTIF

SEQ ID NO: 576592 - protein, 13 aa, Homo sapiens
  CDR3 for beta chain variable domain of TCR clone 288296 (TRBV9, TRBJ2-1)
CASSPSGGSEQYF

SEQ ID NO: 576593 - protein, 14 aa, Homo sapiens
  CDR3 for alpha chain variable domain of TCR clone 288297 (TRAV13-1, TRAJ35)
CAASKGGFGSVLHC

SEQ ID NO: 576594 - protein, 12 aa, Homo sapiens
  CDR3 for beta chain variable domain of TCR clone 288297 (TRBV11-2, TRBJ2-2)
CASSLGGGELFF

SEQ ID NO: 576595 - protein, 17 aa, Homo sapiens
  CDR3 for alpha chain variable domain of TCR clone 288298 (TRAV1-2, TRAJ27)
CAVRDNTGDTNAGKSTF

SEQ ID NO: 576596 - protein, 14 aa, Homo sapiens
  CDR3 for beta chain variable domain of TCR clone 288298 (TRBV13, TRBJ2-3)
CASSLGGPQRPQYF

SEQ ID NO: 576597 - protein, 12 aa, Homo sapiens
  CDR3 for alpha chain variable domain of TCR clone 288299 (TRAV21, TRAJ49)
CAVSWTGNQFYF

SEQ ID NO: 576598 - protein, 18 aa, Homo sapiens
  CDR3 for beta chain variable domain of TCR clone 288299 (TRBV7-8, TRBJ2-1)
WASSPAEGLAGGLNEQFF

SEQ ID NO: 576599 - protein, 14 aa, Homo sapiens
  CDR3 for alpha chain variable domain of TCR clone 288300 (TRAV21, TRAJ15)
CAVSLNQAGTALIF

SEQ ID NO: 576600 - protein, 11 aa, Homo sapiens
  CDR3 for beta chain variable domain of TCR clone 288300 (TRBV20-1, TRBJ2-7)
CSTRTSYEQYF

SEQ ID NO: 576601 - protein, 13 aa, Homo sapiens
  CDR3 for alpha chain variable domain of TCR clone 288301 (TRAV13-2, TRAJ48)
CAEMDFGNEKLTF

SEQ ID NO: 576602 - protein, 15 aa, Homo sapiens
  CDR3 for beta chain variable domain of TCR clone 288301 (TRBV18, TRBJ2-3)
CASSPLAGETDTQYF

SEQ ID NO: 576603 - protein, 16 aa, Homo sapiens
  CDR3 for alpha chain variable domain of TCR clone 288302 (TRAV3, TRAJ37)
CAVRGKGSGNTGKLIF

SEQ ID NO: 576604 - protein, 11 aa, Homo sapiens
  CDR3 for beta chain variable domain of TCR clone 288302 (TRBV18, TRBJ2-5)
CASSPRETQYF

SEQ ID NO: 576605 - protein, 14 aa, Homo sapiens
  CDR3 for alpha chain variable domain of TCR clone 288303 (TRAV38-1, TRAJ45)
CAYYSGGGADGLTF

SEQ ID NO: 576606 - protein, 18 aa, Homo sapiens
  CDR3 for beta chain variable domain of TCR clone 288303 (TRBV7-6, TRBJ2-1)
CASSPRTSGMSSYNEQFF

SEQ ID NO: 576607 - protein, 11 aa, Homo sapiens
  CDR3 for alpha chain variable domain of TCR clone 288304 (TRAV2, TRAJ13)
CASGGYQKVTF

SEQ ID NO: 576608 - protein, 15 aa, Homo sapiens
  CDR3 for beta chain variable domain of TCR clone 288304 (TRBV11-2, TRBJ1-1)
CASSSRSSLLLSLDK

SEQ ID NO: 576609 - protein, 12 aa, Homo sapiens
  CDR3 for alpha chain variable domain of TCR clone 288305 (TRAV23/DV6, TRAJ30)
WSASKGDDKIIF

SEQ ID NO: 576610 - protein, 18 aa, Homo sapiens
  CDR3 for beta chain variable domain of TCR clone 288305 (TRBV10-3, TRBJ2-3)
CAISESRVGPMRGDTQYF

SEQ ID NO: 576611 - protein, 12 aa, Homo sapiens
  CDR3 for alpha chain variable domain of TCR clone 288306 (TRAV16, TRAJ26)
CALRSYGQNFVF

SEQ ID NO: 576612 - protein, 13 aa, Homo sapiens
  CDR3 for beta chain variable domain of TCR clone 288306 (TRBV12-4, TRBJ1-1)
CASSPATSFEAFF

SEQ ID NO: 576613 - protein, 14 aa, Homo sapiens
  CDR3 for alpha chain variable domain of TCR clone 288307 (TRAV34, TRAJ44)
CGSDGTGTASKLTF

SEQ ID NO: 576614 - protein, 15 aa, Homo sapiens
  CDR3 for beta chain variable domain of TCR clone 288307 (TRBV5-1, TRBJ2-1)
CASSPPRAPYNEQFF

SEQ ID NO: 576615 - protein, 14 aa, Homo sapiens
  CDR3 for alpha chain variable domain of TCR clone 288308 (TRAV1-2, TRAJ17)
CALRRGAAGNKLTF

SEQ ID NO: 576616 - protein, 13 aa, Homo sapiens
  CDR3 for beta chain variable domain of TCR clone 288308 (TRBV9, TRBJ2-1)
CARSVGQGGEQFF

SEQ ID NO: 576617 - protein, 16 aa, Homo sapiens
  CDR3 for alpha chain variable domain of TCR clone 288309 (TRAV30, TRAJ24)
CGTEIVDADSWGKFQF

SEQ ID NO: 576618 - protein, 14 aa, Homo sapiens
  CDR3 for beta chain variable domain of TCR clone 288309 (TRBV5-8, TRBJ2-3)
CASSLGQGTDTQYF

SEQ ID NO: 576619 - protein, 10 aa, Homo sapiens
  CDR3 for alpha chain variable domain of TCR clone 288310 (TRAV13-2, TRAJ49)
CADTGNQFYF

SEQ ID NO: 576620 - protein, 14 aa, Homo sapiens
  CDR3 for beta chain variable domain of TCR clone 288310 (TRBV25-1, TRBJ1-1)
CASTHLGGNTEAFF

SEQ ID NO: 576621 - protein, 13 aa, Homo sapiens
  CDR3 for alpha chain variable domain of TCR clone 288311 (TRAV21, TRAJ27)
WAARPGNAGKSTF

SEQ ID NO: 576622 - protein, 11 aa, Homo sapiens
  CDR3 for beta chain variable domain of TCR clone 288311 (TRBV11-2, TRBJ2-2)
CASSLPGELFF

SEQ ID NO: 576623 - protein, 13 aa, Homo sapiens
  CDR3 for alpha chain variable domain of TCR clone 288312 (TRAV3, TRAJ20)
CAVRPLNDYKLSF

SEQ ID NO: 576624 - protein, 12 aa, Homo sapiens
  CDR3 for beta chain variable domain of TCR clone 288312 (TRBV6-1, TRBJ2-1)
CATYGINNEQFF

SEQ ID NO: 576625 - protein, 12 aa, Homo sapiens
  CDR3 for alpha chain variable domain of TCR clone 288313 (TRAV4, TRAJ6)
CLAPGGRYIPTF

SEQ ID NO: 576626 - protein, 17 aa, Homo sapiens
  CDR3 for beta chain variable domain of TCR clone 288313 (TRBV20-1, TRBJ2-2)
CSASGSGQGGLTGELFF

SEQ ID NO: 576627 - protein, 15 aa, Homo sapiens
  CDR3 for alpha chain variable domain of TCR clone 288314 (TRAV12-1, TRAJ44)
CVVDTPQGTASKLTF

SEQ ID NO: 576628 - protein, 14 aa, Homo sapiens
  CDR3 for beta chain variable domain of TCR clone 288314 (TRBV7-9, TRBJ2-1)
CASSPRDSLYEQFC

SEQ ID NO: 576629 - protein, 18 aa, Homo sapiens
  CDR3 for alpha chain variable domain of TCR clone 288315 (TRAV3, TRAJ17)
CAVRARRGGRSCRQQANF

SEQ ID NO: 576630 - protein, 14 aa, Homo sapiens
  CDR3 for beta chain variable domain of TCR clone 288315 (TRBV4-1, TRBJ2-2)
CSSSQAVNTGELFF

SEQ ID NO: 576631 - protein, 15 aa, Homo sapiens
  CDR3 for alpha chain variable domain of TCR clone 288316 (TRAV17, TRAJ57)
CATGPSQGGSEKLVL

SEQ ID NO: 576632 - protein, 13 aa, Homo sapiens
  CDR3 for beta chain variable domain of TCR clone 288316 (TRBV27, TRBJ1-4)
CASSLMGDEKLFF

SEQ ID NO: 576633 - protein, 16 aa, Homo sapiens
  CDR3 for alpha chain variable domain of TCR clone 288317 (TRAV30, TRAJ24)
CGTEIVDADSWGKFQF

SEQ ID NO: 576634 - protein, 13 aa, Homo sapiens
  CDR3 for beta chain variable domain of TCR clone 288317 (TRBV7-3, TRBJ1-1)
CASSQDWGAGAFF

SEQ ID NO: 576635 - protein, 13 aa, Homo sapiens
  CDR3 for alpha chain variable domain of TCR clone 288318 (TRAV30, TRAJ34)
CDTVGYNTDKLIF

SEQ ID NO: 576636 - protein, 16 aa, Homo sapiens
  CDR3 for beta chain variable domain of TCR clone 288318 (TRBV7-9, TRBJ1-2)
CASSLGFSSGEDGYTF

SEQ ID NO: 576637 - protein, 15 aa, Homo sapiens
  CDR3 for alpha chain variable domain of TCR clone 288319 (TRAV1-2, TRAJ38)
CAVRENAGNNRKLIR

SEQ ID NO: 576638 - protein, 13 aa, Homo sapiens
  CDR3 for beta chain variable domain of TCR clone 288319 (TRBV27, TRBJ1-2)
CASSPSHRGRYTF

SEQ ID NO: 576639 - protein, 15 aa, Homo sapiens
  CDR3 for alpha chain variable domain of TCR clone 288320 (TRAV27, TRAJ38)
CAARRNAGNNRKPIW

SEQ ID NO: 576640 - protein, 13 aa, Homo sapiens
  CDR3 for beta chain variable domain of TCR clone 288320 (TRBV12-5, TRBJ2-3)
CASGYRQSDTQYF

SEQ ID NO: 576641 - protein, 18 aa, Homo sapiens
  CDR3 for alpha chain variable domain of TCR clone 288321 (TRAV12-3, TRAJ52)
CAMSVGGAGGASYGKLTF

SEQ ID NO: 576642 - protein, 15 aa, Homo sapiens
  CDR3 for beta chain variable domain of TCR clone 288321 (TRBV27, TRBJ1-6)
CASSFDKGLGSPLHF

SEQ ID NO: 576643 - protein, 12 aa, Homo sapiens
  CDR3 for alpha chain variable domain of TCR clone 288322 (TRAV14/DV4, TRAJ9)
CAMNPGGFKTIF

SEQ ID NO: 576644 - protein, 12 aa, Homo sapiens
  CDR3 for beta chain variable domain of TCR clone 288322 (TRBV28, TRBJ2-1)
CASSVQINEQFF

SEQ ID NO: 576645 - protein, 12 aa, Homo sapiens
  CDR3 for alpha chain variable domain of TCR clone 288323 (TRAV21, TRAJ11)
CAATSGYSTLTF

SEQ ID NO: 576646 - protein, 22 aa, Homo sapiens
  CDR3 for beta chain variable domain of TCR clone 288323 (TRBV6-1, TRBJ1-3)
CASVQGGGWKHHIFWRGKLAHC

SEQ ID NO: 576647 - protein, 14 aa, Homo sapiens
  CDR3 for alpha chain variable domain of TCR clone 288324 (TRAV12-3, TRAJ23)
CAMKMSNQGGKLIF

SEQ ID NO: 576648 - protein, 14 aa, Homo sapiens
  CDR3 for beta chain variable domain of TCR clone 288324 (TRBV25-1, TRBJ1-1)
CASTHLGGNTEAFF

SEQ ID NO: 576649 - protein, 13 aa, Homo sapiens
  CDR3 for alpha chain variable domain of TCR clone 288325 (TRAV12-3, TRAJ21)
CAPGPHNFNKFYF

SEQ ID NO: 576650 - protein, 14 aa, Homo sapiens
  CDR3 for beta chain variable domain of TCR clone 288325 (TRBV4-2, TRBJ2-3)
CASSQERGTDTQYF

SEQ ID NO: 576651 - protein, 18 aa, Homo sapiens
  CDR3 for alpha chain variable domain of TCR clone 288326 (TRAV26-1, TRAJ23)
CIVRVGLEVWNQGGKLIF

SEQ ID NO: 576652 - protein, 18 aa, Homo sapiens
  CDR3 for beta chain variable domain of TCR clone 288326 (TRBV4-1, TRBJ1-5)
CASSQDPRGQGLNQPQHF

SEQ ID NO: 576653 - protein, 13 aa, Homo sapiens
  CDR3 for alpha chain variable domain of TCR clone 288327 (TRAV1-2, TRAJ33)
CAVSEDSNYQLIW

SEQ ID NO: 576654 - protein, 16 aa, Homo sapiens
  CDR3 for beta chain variable domain of TCR clone 288327 (TRBV4-2, TRBJ2-7)
CASSQDRVERGYEQYF

SEQ ID NO: 576655 - protein, 14 aa, Homo sapiens
  CDR3 for alpha chain variable domain of TCR clone 288328 (TRAV13-1, TRAJ9)
CAASALTGSFKTIF

SEQ ID NO: 576656 - protein, 13 aa, Homo sapiens
  CDR3 for beta chain variable domain of TCR clone 288328 (TRBV20-1, TRBJ1-1)
CSAGTVGNAEAFF

SEQ ID NO: 576657 - protein, 14 aa, Homo sapiens
  CDR3 for alpha chain variable domain of TCR clone 288329 (TRAV3, TRAJ8)
CAVSLNTGFQKLVF

SEQ ID NO: 576658 - protein, 14 aa, Homo sapiens
  CDR3 for beta chain variable domain of TCR clone 288329 (TRBV6-6, TRBJ1-5)
CASVDSGSNQHQHF

SEQ ID NO: 576659 - protein, 14 aa, Homo sapiens
  CDR3 for alpha chain variable domain of TCR clone 288330 (TRAV8-3, TRAJ39)
CAAGAWGAGNMLTF

SEQ ID NO: 576660 - protein, 16 aa, Homo sapiens
  CDR3 for beta chain variable domain of TCR clone 288330 (TRBV7-2, TRBJ1-3)
CASSSGRVLSGNTIYF

SEQ ID NO: 576661 - protein, 11 aa, Homo sapiens
  CDR3 for alpha chain variable domain of TCR clone 288331 (TRAV2, TRAJ33)
CAVDSNYQLIW

SEQ ID NO: 576662 - protein, 16 aa, Homo sapiens
  CDR3 for beta chain variable domain of TCR clone 288331 (TRBV5-1, TRBJ2-7)
CASSLEGLAGLYEQYF

SEQ ID NO: 576663 - protein, 10 aa, Homo sapiens
  CDR3 for alpha chain variable domain of TCR clone 288332 (TRAV3, TRAJ21)
CGGQLQQILL

SEQ ID NO: 576664 - protein, 17 aa, Homo sapiens
  CDR3 for beta chain variable domain of TCR clone 288332 (TRBV24-1, TRBJ2-1)
CATSDVSTSGTYNEQFF

SEQ ID NO: 576665 - protein, 15 aa, Homo sapiens
  CDR3 for alpha chain variable domain of TCR clone 288333 (TRAV38-2/DV8, TRAJ40)
CAYRSATSGTYKYIF

SEQ ID NO: 576666 - protein, 14 aa, Homo sapiens
  CDR3 for beta chain variable domain of TCR clone 288333 (TRBV7-6, TRBJ2-3)
CASSLGTVTDTQYF

SEQ ID NO: 576667 - protein, 14 aa, Homo sapiens
  CDR3 for alpha chain variable domain of TCR clone 288334 (TRAV9-2, TRAJ39)
CALYIYNAGNMLTF

SEQ ID NO: 576668 - protein, 17 aa, Homo sapiens
  CDR3 for beta chain variable domain of TCR clone 288334 (TRBV5-1, TRBJ2-5)
CASSTVALGQNQETQYF

SEQ ID NO: 576669 - protein, 14 aa, Homo sapiens
  CDR3 for alpha chain variable domain of TCR clone 288335 (TRAV1-2, TRAJ8)
CAVREDTGFQKLVF

SEQ ID NO: 576670 - protein, 19 aa, Homo sapiens
  CDR3 for beta chain variable domain of TCR clone 288335 (TRBV14, TRBJ2-1)
WASSQDQLWEAPEYNEQFF

SEQ ID NO: 576671 - protein, 12 aa, Homo sapiens
  CDR3 for alpha chain variable domain of TCR clone 288336 (TRAV3, TRAJ43)
CAVRDPNNDLRF

SEQ ID NO: 576672 - protein, 12 aa, Homo sapiens
  CDR3 for beta chain variable domain of TCR clone 288336 (TRBV24-1, TRBJ1-1)
CATSDSDRGAFF

SEQ ID NO: 576673 - protein, 12 aa, Homo sapiens
  CDR3 for alpha chain variable domain of TCR clone 288337 (TRAV25, TRAJ11)
CAGYSGYSTLTF

SEQ ID NO: 576674 - protein, 15 aa, Homo sapiens
  CDR3 for beta chain variable domain of TCR clone 288337 (TRBV10-1, TRBJ2-3)
CASSATSGGFDTQYF

SEQ ID NO: 576675 - protein, 14 aa, Homo sapiens
  CDR3 for alpha chain variable domain of TCR clone 288338 (TRAV13-1, TRAJ40)
CAASMTSGTYKYIF

SEQ ID NO: 576676 - protein, 15 aa, Homo sapiens
  CDR3 for beta chain variable domain of TCR clone 288338 (TRBV12-4, TRBJ2-5)
CASSGTGQAQETQYF

SEQ ID NO: 576677 - protein, 14 aa, Homo sapiens
  CDR3 for alpha chain variable domain of TCR clone 288339 (TRAV12-2, TRAJ23)
CAVGGYNQGGKLIF

SEQ ID NO: 576678 - protein, 15 aa, Homo sapiens
  CDR3 for beta chain variable domain of TCR clone 288339 (TRBV20-1, TRBJ2-3)
CSASSGGPRTDTQYV

SEQ ID NO: 576679 - protein, 23 aa, Homo sapiens
  CDR3 for alpha chain variable domain of TCR clone 288340 (TRAV26-1, )
CIADNAGNNNIQNPDPAVYQLRD

SEQ ID NO: 576680 - protein, 13 aa, Homo sapiens
  CDR3 for beta chain variable domain of TCR clone 288340 (TRBV7-9, TRBJ1-2)
CASSLKQNYGYTF

SEQ ID NO: 576681 - protein, 16 aa, Homo sapiens
  CDR3 for alpha chain variable domain of TCR clone 288341 (TRAV38-1, TRAJ32)
CAFMPFLGGATNKLIF

SEQ ID NO: 576682 - protein, 16 aa, Homo sapiens
  CDR3 for beta chain variable domain of TCR clone 288341 (TRBV5-4, TRBJ2-3)
CASSFGAGEGTDTQYF

SEQ ID NO: 576683 - protein, 17 aa, Homo sapiens
  CDR3 for alpha chain variable domain of TCR clone 288342 (TRAV3, TRAJ6)
CAVRDGPRAGGSYIPTL

SEQ ID NO: 576684 - protein, 14 aa, Homo sapiens
  CDR3 for beta chain variable domain of TCR clone 288342 (TRBV7-2, TRBJ2-7)
CASSPKTSYYEQYF

SEQ ID NO: 576685 - protein, 14 aa, Homo sapiens
  CDR3 for alpha chain variable domain of TCR clone 288343 (TRAV12-2, TRAJ15)
CAPHTGQAGTALIF

SEQ ID NO: 576686 - protein, 15 aa, Homo sapiens
  CDR3 for beta chain variable domain of TCR clone 288343 (TRBV7-9, TRBJ1-6)
CASSSPGRGNSPLHF

SEQ ID NO: 576687 - protein, 11 aa, Homo sapiens
  CDR3 for alpha chain variable domain of TCR clone 288344 (TRAV27, TRAJ20)
CAGLNDYKLSF

SEQ ID NO: 576688 - protein, 15 aa, Homo sapiens
  CDR3 for beta chain variable domain of TCR clone 288344 (TRBV10-3, TRBJ2-3)
CAISLTSGGTDTQYF

SEQ ID NO: 576689 - protein, 14 aa, Homo sapiens
  CDR3 for alpha chain variable domain of TCR clone 288345 (TRAV1-2, TRAJ8)
CAVREDTGFQKLVF

SEQ ID NO: 576690 - protein, 13 aa, Homo sapiens
  CDR3 for beta chain variable domain of TCR clone 288345 (TRBV4-2, TRBJ2-2)
CASGDRGTGELFL

SEQ ID NO: 576691 - protein, 14 aa, Homo sapiens
  CDR3 for alpha chain variable domain of TCR clone 288346 (TRAV12-2, TRAJ13)
CAVKKTGGYQKVTF

SEQ ID NO: 576692 - protein, 13 aa, Homo sapiens
  CDR3 for beta chain variable domain of TCR clone 288346 (TRBV7-3, TRBJ2-1)
CASSLDSYNEQFF

SEQ ID NO: 576693 - protein, 12 aa, Homo sapiens
  CDR3 for alpha chain variable domain of TCR clone 288347 (TRAV12-3, TRAJ17)
CAMTLTGNKLTF

SEQ ID NO: 576694 - protein, 13 aa, Homo sapiens
  CDR3 for beta chain variable domain of TCR clone 288347 (TRBV7-9, TRBJ1-2)
CPSSLKQNYGYTF

SEQ ID NO: 576695 - protein, 13 aa, Homo sapiens
  CDR3 for alpha chain variable domain of TCR clone 288348 (TRAV23/DV6, TRAJ12)
CAPRGDSSNKLIF

SEQ ID NO: 576696 - protein, 12 aa, Homo sapiens
  CDR3 for beta chain variable domain of TCR clone 288348 (TRBV7-6, TRBJ2-5)
CASSLSQETQYF

SEQ ID NO: 576697 - protein, 13 aa, Homo sapiens
  CDR3 for alpha chain variable domain of TCR clone 288349 (TRAV26-1, TRAJ36)
CIVVGTGANNLFF

SEQ ID NO: 576698 - protein, 13 aa, Homo sapiens
  CDR3 for beta chain variable domain of TCR clone 288349 (TRBV6-1, TRBJ1-2)
CASSELTGYGYTF

SEQ ID NO: 576699 - protein, 16 aa, Homo sapiens
  CDR3 for alpha chain variable domain of TCR clone 288350 (TRAV17, TRAJ28)
CASYVYSGAGSYQLTF

SEQ ID NO: 576700 - protein, 15 aa, Homo sapiens
  CDR3 for beta chain variable domain of TCR clone 288350 (TRBV4-2, TRBJ2-1)
CASSPSGGLYNEQFF

SEQ ID NO: 576701 - protein, 13 aa, Homo sapiens
  CDR3 for alpha chain variable domain of TCR clone 288351 (TRAV8-4, TRAJ48)
CAVSLFGNEKLTF

SEQ ID NO: 576702 - protein, 16 aa, Homo sapiens
  CDR3 for beta chain variable domain of TCR clone 288351 (TRBV19, TRBJ1-6)
CARRLEGNLHNSPLHF

SEQ ID NO: 576703 - protein, 13 aa, Homo sapiens
  CDR3 for alpha chain variable domain of TCR clone 288352 (TRAV13-1, TRAJ8)
CAASIRGVQKLVF

SEQ ID NO: 576704 - protein, 14 aa, Homo sapiens
  CDR3 for beta chain variable domain of TCR clone 288352 (TRBV7-2, TRBJ2-1)
CASSLVQGRNEQFF

SEQ ID NO: 576705 - protein, 10 aa, Homo sapiens
  CDR3 for alpha chain variable domain of TCR clone 288353 (TRAV8-4, TRAJ43)
CAVSADDMRF

SEQ ID NO: 576706 - protein, 15 aa, Homo sapiens
  CDR3 for beta chain variable domain of TCR clone 288353 (TRBV5-1, TRBJ2-3)
CASSVTCGSTDTQYF

SEQ ID NO: 576707 - protein, 17 aa, Homo sapiens
  CDR3 for alpha chain variable domain of TCR clone 288354 (TRAV8-2, TRAJ17)
CVVSDRRFKAAGNKLTF

SEQ ID NO: 576708 - protein, 18 aa, Homo sapiens
  CDR3 for beta chain variable domain of TCR clone 288354 (TRBV7-9, TRBJ2-7)
CASSLTTSWSRTWYEQYF

SEQ ID NO: 576709 - protein, 11 aa, Homo sapiens
  CDR3 for alpha chain variable domain of TCR clone 288355 (TRAV2, TRAJ13)
CASGGYQKVTF

SEQ ID NO: 576710 - protein, 13 aa, Homo sapiens
  CDR3 for beta chain variable domain of TCR clone 288355 (TRBV20-1, TRBJ2-2)
CSARAAGTGELFF

SEQ ID NO: 576711 - protein, 13 aa, Homo sapiens
  CDR3 for alpha chain variable domain of TCR clone 288356 (TRAV12-2, TRAJ50)
CAVIVTSYDKVIF

SEQ ID NO: 576712 - protein, 14 aa, Homo sapiens
  CDR3 for beta chain variable domain of TCR clone 288356 (TRBV9, TRBJ2-1)
CASSVDRRGKEQFF

SEQ ID NO: 576713 - protein, 11 aa, Homo sapiens
  CDR3 for alpha chain variable domain of TCR clone 288357 (TRAV35, TRAJ30)
CAPGGEDKIIF

SEQ ID NO: 576714 - protein, 13 aa, Homo sapiens
  CDR3 for beta chain variable domain of TCR clone 288357 (TRBV7-6, TRBJ2-1)
CQQLGGGADEQFF

SEQ ID NO: 576715 - protein, 13 aa, Homo sapiens
  CDR3 for alpha chain variable domain of TCR clone 288358 (TRAV8-6, TRAJ13)
CAVSSGGNQKVTF

SEQ ID NO: 576716 - protein, 15 aa, Homo sapiens
  CDR3 for beta chain variable domain of TCR clone 288358 (TRBV7-9, TRBJ2-7)
CASSLPMGQANEQYF

SEQ ID NO: 576717 - protein, 14 aa, Homo sapiens
  CDR3 for alpha chain variable domain of TCR clone 288359 (TRAV3, TRAJ16)
CAVSLFSDGQKLLF

SEQ ID NO: 576718 - protein, 13 aa, Homo sapiens
  CDR3 for beta chain variable domain of TCR clone 288359 (TRBV6-4, TRBJ1-5)
CASSADLNQPQHF

SEQ ID NO: 576719 - protein, 14 aa, Homo sapiens
  CDR3 for alpha chain variable domain of TCR clone 288360 (TRAV12-1, TRAJ6)
CVVPTSGGSYIPTF

SEQ ID NO: 576720 - protein, 16 aa, Homo sapiens
  CDR3 for beta chain variable domain of TCR clone 288360 (TRBV7-2, TRBJ2-1)
CASSLVARGPYNEQFF

SEQ ID NO: 576721 - protein, 14 aa, Homo sapiens
  CDR3 for alpha chain variable domain of TCR clone 288361 (TRAV35, TRAJ24)
CAGPRRDSWGKLQF

SEQ ID NO: 576722 - protein, 12 aa, Homo sapiens
  CDR3 for beta chain variable domain of TCR clone 288361 (TRBV12-4, TRBJ2-3)
CASILGQDTQYF

SEQ ID NO: 576723 - protein, 13 aa, Homo sapiens
  CDR3 for alpha chain variable domain of TCR clone 288362 (TRAV2, TRAJ29)
CAAQNSGNTPLVF

SEQ ID NO: 576724 - protein, 13 aa, Homo sapiens
  CDR3 for beta chain variable domain of TCR clone 288362 (TRBV7-2, TRBJ1-4)
CASSLAGLEKLFF

SEQ ID NO: 576725 - protein, 11 aa, Homo sapiens
  CDR3 for alpha chain variable domain of TCR clone 288363 (TRAV12-1, TRAJ30)
CVVNGQDKFIF

SEQ ID NO: 576726 - protein, 12 aa, Homo sapiens
  CDR3 for beta chain variable domain of TCR clone 288363 (TRBV27, TRBJ2-2)
CASKLVTGELFF

SEQ ID NO: 576727 - protein, 13 aa, Homo sapiens
  CDR3 for alpha chain variable domain of TCR clone 288364 (TRAV8-3, TRAJ28)
CAVGAVGSYQLTF

SEQ ID NO: 576728 - protein, 13 aa, Homo sapiens
  CDR3 for beta chain variable domain of TCR clone 288364 (TRBV7-9, TRBJ2-7)
CASSSPSGSEQYF

SEQ ID NO: 576729 - protein, 12 aa, Homo sapiens
  CDR3 for alpha chain variable domain of TCR clone 288365 (TRAV20, TRAJ54)
CAVQEGAQTLVF

SEQ ID NO: 576730 - protein, 17 aa, Homo sapiens
  CDR3 for beta chain variable domain of TCR clone 288365 (TRBV13, TRBJ2-3)
CASSLSRVAGGRNTQYF

SEQ ID NO: 576731 - protein, 15 aa, Homo sapiens
  CDR3 for alpha chain variable domain of TCR clone 288366 (TRAV30, TRAJ32)
CGTEILGGATNKLIS

SEQ ID NO: 576732 - protein, 13 aa, Homo sapiens
  CDR3 for beta chain variable domain of TCR clone 288366 (TRBV6-3, TRBJ2-7)
CASSFSGGYEQYF

SEQ ID NO: 576733 - protein, 22 aa, Homo sapiens
  CDR3 for alpha chain variable domain of TCR clone 288367 (TRAV13-1, TRAJ35)
CAASKGGFGNVQHCGSGPQVIV

SEQ ID NO: 576734 - protein, 13 aa, Homo sapiens
  CDR3 for beta chain variable domain of TCR clone 288367 (TRBV7-3, TRBJ1-1)
CASSQEWGAEAFF

SEQ ID NO: 576735 - protein, 17 aa, Homo sapiens
  CDR3 for alpha chain variable domain of TCR clone 288368 (TRAV3, TRAJ6)
CAVRDGPRAGGSYIPTF

SEQ ID NO: 576736 - protein, 17 aa, Homo sapiens
  CDR3 for beta chain variable domain of TCR clone 288368 (TRBV20-1, TRBJ2-1)
CSAPPRLAGTIYNEQFF

SEQ ID NO: 576737 - protein, 14 aa, Homo sapiens
  CDR3 for alpha chain variable domain of TCR clone 288369 (TRAV12-2, TRAJ44)
CAVNPAGTASKLTF

SEQ ID NO: 576738 - protein, 14 aa, Homo sapiens
  CDR3 for beta chain variable domain of TCR clone 288369 (TRBV20-1, TRBJ1-6)
SAVPPWGLDHPSTF

SEQ ID NO: 576739 - protein, 16 aa, Homo sapiens
  CDR3 for alpha chain variable domain of TCR clone 288370 (TRAV12-1, TRAJ48)
CVVNMVSNFGNEKLTF

SEQ ID NO: 576740 - protein, 18 aa, Homo sapiens
  CDR3 for beta chain variable domain of TCR clone 288370 (TRBV11-3, TRBJ2-6)
CASSLNPFLGTGADVLTF

SEQ ID NO: 576741 - protein, 18 aa, Homo sapiens
  CDR3 for alpha chain variable domain of TCR clone 288371 (TRAV16, TRAJ52)
CALSGVDAGGTSYVKLTF

SEQ ID NO: 576742 - protein, 15 aa, Homo sapiens
  CDR3 for beta chain variable domain of TCR clone 288371 (TRBV11-3, TRBJ2-3)
CASSAGTVVTNTQYF

SEQ ID NO: 576743 - protein, 16 aa, Homo sapiens
  CDR3 for alpha chain variable domain of TCR clone 288372 (TRAV16, TRAJ4)
CALSRMFSGGYNKQIF

SEQ ID NO: 576744 - protein, 17 aa, Homo sapiens
  CDR3 for beta chain variable domain of TCR clone 288372 (TRBV24-1, TRBJ2-1)
CATSDVSTSGTYNEQFF

SEQ ID NO: 576745 - protein, 11 aa, Homo sapiens
  CDR3 for alpha chain variable domain of TCR clone 288373 (TRAV12-1, TRAJ15)
CVVNAGTALIF

SEQ ID NO: 576746 - protein, 12 aa, Homo sapiens
  CDR3 for beta chain variable domain of TCR clone 288373 (TRBV18, TRBJ2-1)
CASSSDEDEQFF

SEQ ID NO: 576747 - protein, 16 aa, Homo sapiens
  CDR3 for alpha chain variable domain of TCR clone 288374 (TRAV12-2, TRAJ40)
CAVIRGGTSGTYKYIF

SEQ ID NO: 576748 - protein, 15 aa, Homo sapiens
  CDR3 for beta chain variable domain of TCR clone 288374 (TRBV4-1, TRBJ2-7)
CASSQQGQGFDEQYF

SEQ ID NO: 576749 - protein, 19 aa, Homo sapiens
  CDR3 for alpha chain variable domain of TCR clone 288375 (TRAV2, TRAJ20)
ILQVREADAAVYRDCKLSF

SEQ ID NO: 576750 - protein, 16 aa, Homo sapiens
  CDR3 for beta chain variable domain of TCR clone 288375 (TRBV11-2, TRBJ2-7)
CASSPTTGGVSYEQYF

SEQ ID NO: 576751 - protein, 10 aa, Homo sapiens
  CDR3 for alpha chain variable domain of TCR clone 288376 (TRAV1-2, TRAJ20)
CALNDYKLSF

SEQ ID NO: 576752 - protein, 14 aa, Homo sapiens
  CDR3 for beta chain variable domain of TCR clone 288376 (TRBV19, TRBJ2-1)
CASPTFVLIGEQFF

SEQ ID NO: 576753 - protein, 15 aa, Homo sapiens
  CDR3 for alpha chain variable domain of TCR clone 288377 (TRAV29/DV5, TRAJ42)
CAAKTDGGSQGTLIF

SEQ ID NO: 576754 - protein, 12 aa, Homo sapiens
  CDR3 for beta chain variable domain of TCR clone 288377 (TRBV11-2, TRBJ2-1)
CASSPGNNEQFF

SEQ ID NO: 576755 - protein, 11 aa, Homo sapiens
  CDR3 for alpha chain variable domain of TCR clone 288378 (TRAV35, TRAJ34)
CWARNTDKLIF

SEQ ID NO: 576756 - protein, 13 aa, Homo sapiens
  CDR3 for beta chain variable domain of TCR clone 288378 (TRBV19, TRBJ2-7)
CASSIDRTYVQYF

SEQ ID NO: 576757 - protein, 16 aa, Homo sapiens
  CDR3 for alpha chain variable domain of TCR clone 288379 (TRAV30, TRAJ24)
CGTEIVDADSWGKFQF

SEQ ID NO: 576758 - protein, 13 aa, Homo sapiens
  CDR3 for beta chain variable domain of TCR clone 288379 (TRBV10-3, TRBJ2-7)
CASKVAVNYEQYF

SEQ ID NO: 576759 - protein, 15 aa, Homo sapiens
  CDR3 for alpha chain variable domain of TCR clone 288380 (TRAV8-6, TRAJ49)
CAVSRASNTGNQCYF

SEQ ID NO: 576760 - protein, 12 aa, Homo sapiens
  CDR3 for beta chain variable domain of TCR clone 288380 (TRBV18, TRBJ2-3)
CASSPLSDTQYF

SEQ ID NO: 576761 - protein, 11 aa, Homo sapiens
  CDR3 for alpha chain variable domain of TCR clone 288381 (TRAV1-1, TRAJ23)
RAVRQGGKLIF

SEQ ID NO: 576762 - protein, 20 aa, Homo sapiens
  CDR3 for beta chain variable domain of TCR clone 288381 (TRBV7-8, TRBJ2-2)
CASSHLFPGPTVHITGELFF

SEQ ID NO: 576763 - protein, 14 aa, Homo sapiens
  CDR3 for alpha chain variable domain of TCR clone 288382 (TRAV13-1, TRAJ44)
CAAKATGTASKLTF

SEQ ID NO: 576764 - protein, 15 aa, Homo sapiens
  CDR3 for beta chain variable domain of TCR clone 288382 (TRBV28, TRBJ2-3)
CASSPDRQGANTQYF

SEQ ID NO: 576765 - protein, 15 aa, Homo sapiens
  CDR3 for alpha chain variable domain of TCR clone 288383 (TRAV12-1, TRAJ44)
CVADLPTGTASKLTF

SEQ ID NO: 576766 - protein, 15 aa, Homo sapiens
  CDR3 for beta chain variable domain of TCR clone 288383 (TRBV6-5, TRBJ1-1)
CASTLRLGSGTEAFF

SEQ ID NO: 576767 - protein, 13 aa, Homo sapiens
  CDR3 for alpha chain variable domain of TCR clone 288384 (TRAV12-3, TRAJ13)
CAMGTGGYQKVTF

SEQ ID NO: 576768 - protein, 15 aa, Homo sapiens
  CDR3 for beta chain variable domain of TCR clone 288384 (TRBV7-2, TRBJ2-1)
CASTHGTGICNEQFF

SEQ ID NO: 576769 - protein, 12 aa, Homo sapiens
  CDR3 for alpha chain variable domain of TCR clone 288385 (TRAV12-1, TRAJ40)
CVVYSGTYKYIF

SEQ ID NO: 576770 - protein, 14 aa, Homo sapiens
  CDR3 for beta chain variable domain of TCR clone 288385 (TRBV28, TRBJ2-7)
CASSGLAEPAEQYF

SEQ ID NO: 576771 - protein, 18 aa, Homo sapiens
  CDR3 for alpha chain variable domain of TCR clone 288386 (TRAV21, TRAJ52)
CAVRPSPAGGTSYGKLTF

SEQ ID NO: 576772 - protein, 15 aa, Homo sapiens
  CDR3 for beta chain variable domain of TCR clone 288386 (TRBV7-3, TRBJ1-6)
CASSSPGRGNSPLHC

SEQ ID NO: 576773 - protein, 16 aa, Homo sapiens
  CDR3 for alpha chain variable domain of TCR clone 288387 (TRAV12-2, TRAJ18)
CAVATDRGSTLGRLYF

SEQ ID NO: 576774 - protein, 14 aa, Homo sapiens
  CDR3 for beta chain variable domain of TCR clone 288387 (TRBV4-2, TRBJ1-5)
CASSQDSIKQPQHF

SEQ ID NO: 576775 - protein, 15 aa, Homo sapiens
  CDR3 for alpha chain variable domain of TCR clone 288388 (TRAV21, TRAJ53)
CATLNSGGSNYKLTF

SEQ ID NO: 576776 - protein, 12 aa, Homo sapiens
  CDR3 for beta chain variable domain of TCR clone 288388 (TRBV14, TRBJ2-4)
CASSNLKGIQYF

SEQ ID NO: 576777 - protein, 13 aa, Homo sapiens
  CDR3 for alpha chain variable domain of TCR clone 288389 (TRAV21, TRAJ57)
CSVTQCGSEKLVF

SEQ ID NO: 576778 - protein, 16 aa, Homo sapiens
  CDR3 for beta chain variable domain of TCR clone 288389 (TRBV29-1, TRBJ2-7)
CSVEDAEDGTAYEQYF

SEQ ID NO: 576779 - protein, 15 aa, Homo sapiens
  CDR3 for alpha chain variable domain of TCR clone 288390 (TRAV8-4, TRAJ6)
CAVSAPSVGSYIPTF

SEQ ID NO: 576780 - protein, 15 aa, Homo sapiens
  CDR3 for beta chain variable domain of TCR clone 288390 (TRBV7-3, TRBJ2-2)
CASKANGANTGELFF

SEQ ID NO: 576781 - protein, 14 aa, Homo sapiens
  CDR3 for alpha chain variable domain of TCR clone 288391 (TRAV2, TRAJ37)
CAVDFTSNTGKLIF

SEQ ID NO: 576782 - protein, 18 aa, Homo sapiens
  CDR3 for beta chain variable domain of TCR clone 288391 (TRBV6-6, TRBJ1-3)
CASSHSKWDSISGNTIYF

SEQ ID NO: 576783 - protein, 12 aa, Homo sapiens
  CDR3 for alpha chain variable domain of TCR clone 288392 (TRAV13-2, TRAJ23)
CAERHRGGNLTF

SEQ ID NO: 576784 - protein, 14 aa, Homo sapiens
  CDR3 for beta chain variable domain of TCR clone 288392 (TRBV9, TRBJ1-5)
CASSGGDTNQPQHF

SEQ ID NO: 576785 - protein, 13 aa, Homo sapiens
  CDR3 for alpha chain variable domain of TCR clone 288393 (TRAV2, TRAJ15)
CAVASQAGTALIF

SEQ ID NO: 576786 - protein, 15 aa, Homo sapiens
  CDR3 for beta chain variable domain of TCR clone 288393 (TRBV19, TRBJ2-4)
CASRGPRRGENIQYF

SEQ ID NO: 576787 - protein, 15 aa, Homo sapiens
  CDR3 for alpha chain variable domain of TCR clone 288394 (TRAV21, TRAJ53)
CATLNSGGSNYKLTF

SEQ ID NO: 576788 - protein, 15 aa, Homo sapiens
  CDR3 for beta chain variable domain of TCR clone 288394 (TRBV6-3, TRBJ2-7)
CASSSPGTVVYEQYF

SEQ ID NO: 576789 - protein, 14 aa, Homo sapiens
  CDR3 for alpha chain variable domain of TCR clone 288395 (TRAV17, TRAJ11)
CATDTSRVYSTLTF

SEQ ID NO: 576790 - protein, 13 aa, Homo sapiens
  CDR3 for beta chain variable domain of TCR clone 288395 (TRBV19, TRBJ2-5)
CASRDSRRETQYF

SEQ ID NO: 576791 - protein, 10 aa, Homo sapiens
  CDR3 for alpha chain variable domain of TCR clone 288396 (TRAV2, TRAJ15)
RGQAGTARIF

SEQ ID NO: 576792 - protein, 12 aa, Homo sapiens
  CDR3 for beta chain variable domain of TCR clone 288396 (TRBV11-2, TRBJ2-2)
CASSLGGGELFF

SEQ ID NO: 576793 - protein, 11 aa, Homo sapiens
  CDR3 for alpha chain variable domain of TCR clone 288397 (TRAV27, TRAJ24)
CARDSWGKLQF

SEQ ID NO: 576794 - protein, 13 aa, Homo sapiens
  CDR3 for beta chain variable domain of TCR clone 288397 (TRBV24-1, TRBJ2-5)
CATSDADRETQYF

SEQ ID NO: 576795 - protein, 15 aa, Homo sapiens
  CDR3 for alpha chain variable domain of TCR clone 288398 (TRAV3, TRAJ22)
CAVRDRGGSARQMTF

SEQ ID NO: 576796 - protein, 15 aa, Homo sapiens
  CDR3 for beta chain variable domain of TCR clone 288398 (TRBV27, TRBJ2-1)
CASSNGGGSSNEQFF

SEQ ID NO: 576797 - protein, 13 aa, Homo sapiens
  CDR3 for alpha chain variable domain of TCR clone 288399 (TRAV12-2, TRAJ13)
CREEDWGYQKVTF

SEQ ID NO: 576798 - protein, 13 aa, Homo sapiens
  CDR3 for beta chain variable domain of TCR clone 288399 (TRBV10-3, TRBJ2-7)
CASKLAVNYEQYF

SEQ ID NO: 576799 - protein, 14 aa, Homo sapiens
  CDR3 for alpha chain variable domain of TCR clone 288400 (TRAV2, TRAJ9)
CAVEDRRGGFKTIF

SEQ ID NO: 576800 - protein, 17 aa, Homo sapiens
  CDR3 for beta chain variable domain of TCR clone 288400 (TRBV7-8, TRBJ2-6)
CASSAGTGGAGANVLTF

SEQ ID NO: 576801 - protein, 12 aa, Homo sapiens
  CDR3 for alpha chain variable domain of TCR clone 288401 (TRAV13-1, TRAJ21)
CAAKEGFNKFYF

SEQ ID NO: 576802 - protein, 13 aa, Homo sapiens
  CDR3 for beta chain variable domain of TCR clone 288401 (TRBV20-1, TRBJ2-7)
CSATHTSGYEQYF

SEQ ID NO: 576803 - protein, 16 aa, Homo sapiens
  CDR3 for alpha chain variable domain of TCR clone 288402 (TRAV3, TRAJ37)
CAVRGKGSGNTGKLIF

SEQ ID NO: 576804 - protein, 15 aa, Homo sapiens
  CDR3 for beta chain variable domain of TCR clone 288402 (TRBV7-3, TRBJ2-1)
CASSRIGTGSSEQFF

SEQ ID NO: 576805 - protein, 16 aa, Homo sapiens
  CDR3 for alpha chain variable domain of TCR clone 288403 (TRAV14/DV4, TRAJ52)
CAMRYAGGTSYGKLTF

SEQ ID NO: 576806 - protein, 13 aa, Homo sapiens
  CDR3 for beta chain variable domain of TCR clone 288403 (TRBV7-3, TRBJ1-1)
CASSQDWGAEAFC

SEQ ID NO: 576807 - protein, 16 aa, Homo sapiens
  CDR3 for alpha chain variable domain of TCR clone 288404 (TRAV3, TRAJ37)
CAVRGKWSGNTGKLIF

SEQ ID NO: 576808 - protein, 15 aa, Homo sapiens
  CDR3 for beta chain variable domain of TCR clone 288404 (TRBV20-1, TRBJ2-1)
CSARGGTRYYNEQFF

SEQ ID NO: 576809 - protein, 15 aa, Homo sapiens
  CDR3 for alpha chain variable domain of TCR clone 288405 (TRAV26-1, TRAJ29)
CIVRVEGSGNTPLVF

SEQ ID NO: 576810 - protein, 16 aa, Homo sapiens
  CDR3 for beta chain variable domain of TCR clone 288405 (TRBV4-1, TRBJ2-3)
CASSQSTSGAEDTQYF

SEQ ID NO: 576811 - protein, 15 aa, Homo sapiens
  CDR3 for alpha chain variable domain of TCR clone 288406 (TRAV17, TRAJ57)
CATGPSQGGTEKLVF

SEQ ID NO: 576812 - protein, 15 aa, Homo sapiens
  CDR3 for beta chain variable domain of TCR clone 288406 (TRBV6-5, TRBJ2-1)
CASSYDAGAGNEQFF

SEQ ID NO: 576813 - protein, 14 aa, Homo sapiens
  CDR3 for alpha chain variable domain of TCR clone 288407 (TRAV12-2, TRAJ49)
CAVTLGLYGNQFYF

SEQ ID NO: 576814 - protein, 15 aa, Homo sapiens
  CDR3 for beta chain variable domain of TCR clone 288407 (TRBV7-3, TRBJ2-1)
CASSLSSGSFDEQFF

SEQ ID NO: 576815 - protein, 10 aa, Homo sapiens
  CDR3 for alpha chain variable domain of TCR clone 288408 (TRAV1-2, TRAJ31)
CAFFDAILMF

SEQ ID NO: 576816 - protein, 13 aa, Homo sapiens
  CDR3 for beta chain variable domain of TCR clone 288408 (TRBV20-1, TRBJ2-2)
CSASAAGTGELFF

SEQ ID NO: 576817 - protein, 14 aa, Homo sapiens
  CDR3 for alpha chain variable domain of TCR clone 288409 (TRAV3, TRAJ37)
CALKESGNTGKLIF

SEQ ID NO: 576818 - protein, 14 aa, Homo sapiens
  CDR3 for beta chain variable domain of TCR clone 288409 (TRBV2, TRBJ1-5)
CASSENRGGQPQHF

SEQ ID NO: 576819 - protein, 16 aa, Homo sapiens
  CDR3 for alpha chain variable domain of TCR clone 288410 (TRAV8-1, TRAJ40)
CAVNGGGRSGTYEYIF

SEQ ID NO: 576820 - protein, 15 aa, Homo sapiens
  CDR3 for beta chain variable domain of TCR clone 288410 (TRBV27, TRBJ2-5)
CASSPPGQGAETQYF

SEQ ID NO: 576821 - protein, 14 aa, Homo sapiens
  CDR3 for alpha chain variable domain of TCR clone 288411 (TRAV1-2, TRAJ16)
CAVNRFSDGQTLLF

SEQ ID NO: 576822 - protein, 14 aa, Homo sapiens
  CDR3 for beta chain variable domain of TCR clone 288411 (TRBV2, TRBJ2-5)
CASKKATGLETQYF

SEQ ID NO: 576823 - protein, 11 aa, Homo sapiens
  CDR3 for alpha chain variable domain of TCR clone 288412 (TRAV2, TRAJ13)
CASGGYQKVTF

SEQ ID NO: 576824 - protein, 13 aa, Homo sapiens
  CDR3 for beta chain variable domain of TCR clone 288412 (TRBV20-1, TRBJ1-1)
CCAPLGGGTEAFF

SEQ ID NO: 576825 - protein, 14 aa, Homo sapiens
  CDR3 for alpha chain variable domain of TCR clone 288413 (TRAV12-2, TRAJ29)
CAARRNSGNTPLVF

SEQ ID NO: 576826 - protein, 13 aa, Homo sapiens
  CDR3 for beta chain variable domain of TCR clone 288413 (TRBV12-4, TRBJ2-1)
CASSHYTDNEQFF

SEQ ID NO: 576827 - protein, 13 aa, Homo sapiens
  CDR3 for alpha chain variable domain of TCR clone 288414 (TRAV17, TRAJ26)
CATVDNHGQYSVF

SEQ ID NO: 576828 - protein, 16 aa, Homo sapiens
  CDR3 for beta chain variable domain of TCR clone 288414 (TRBV2, TRBJ2-1)
CASSVGGSLSYNEQFF

SEQ ID NO: 576829 - protein, 13 aa, Homo sapiens
  CDR3 for alpha chain variable domain of TCR clone 288415 (TRAV13-1, TRAJ21)
CAASKYNFNKFYF

SEQ ID NO: 576830 - protein, 21 aa, Homo sapiens
  CDR3 for beta chain variable domain of TCR clone 288415 (TRBV27, TRBJ1-4)
CASSLMGDEKLFWQWNPALCL

SEQ ID NO: 576831 - protein, 14 aa, Homo sapiens
  CDR3 for alpha chain variable domain of TCR clone 288416 (TRAV1-2, TRAJ16)
CAVNRFSDGQKLLF

SEQ ID NO: 576832 - protein, 12 aa, Homo sapiens
  CDR3 for beta chain variable domain of TCR clone 288416 (TRBV24-1, TRBJ1-1)
CATLDPDTEAFF

SEQ ID NO: 576833 - protein, 12 aa, Homo sapiens
  CDR3 for alpha chain variable domain of TCR clone 288417 (TRAV1-1, TRAJ39)
CAVPVVGNMLTF

SEQ ID NO: 576834 - protein, 13 aa, Homo sapiens
  CDR3 for beta chain variable domain of TCR clone 288417 (TRBV12-4, TRBJ1-2)
CASSLRQGKGYTF

SEQ ID NO: 576835 - protein, 14 aa, Homo sapiens
  CDR3 for alpha chain variable domain of TCR clone 288418 (TRAV21, TRAJ10)
CAVALTGGGHKPTF

SEQ ID NO: 576836 - protein, 13 aa, Homo sapiens
  CDR3 for beta chain variable domain of TCR clone 288418 (TRBV7-2, TRBJ1-6)
CASSLGSNSPLHF

SEQ ID NO: 576837 - protein, 11 aa, Homo sapiens
  CDR3 for alpha chain variable domain of TCR clone 288419 (TRAV2, TRAJ13)
CASGGYQKVTF

SEQ ID NO: 576838 - protein, 19 aa, Homo sapiens
  CDR3 for beta chain variable domain of TCR clone 288419 (TRBV23-1, TRBJ2-7)
CASGDRRLAGAPTSSTSGR

SEQ ID NO: 576839 - protein, 15 aa, Homo sapiens
  CDR3 for alpha chain variable domain of TCR clone 288420 (TRAV3, TRAJ5)
CAVRDLDTGRRALTF

SEQ ID NO: 576840 - protein, 12 aa, Homo sapiens
  CDR3 for beta chain variable domain of TCR clone 288420 (TRBV7-6, TRBJ2-5)
CASSLSQETQYF

SEQ ID NO: 576841 - protein, 12 aa, Homo sapiens
  CDR3 for alpha chain variable domain of TCR clone 288421 (TRAV25, TRAJ11)
CAGASGYSTLTF

SEQ ID NO: 576842 - protein, 17 aa, Homo sapiens
  CDR3 for beta chain variable domain of TCR clone 288421 (TRBV5-8, TRBJ2-3)
CASSLSRVAGGRNTQYF

SEQ ID NO: 576843 - protein, 13 aa, Homo sapiens
  CDR3 for alpha chain variable domain of TCR clone 288422 (TRAV12-3, TRAJ29)
CAMTLSGSTPLVF

SEQ ID NO: 576844 - protein, 15 aa, Homo sapiens
  CDR3 for beta chain variable domain of TCR clone 288422 (TRBV5-1, TRBJ2-6)
CASSLDPSGANVLTF

SEQ ID NO: 576845 - protein, 14 aa, Homo sapiens
  CDR3 for alpha chain variable domain of TCR clone 288423 (TRAV1-2, TRAJ16)
CAVNRFSDGQKLLF

SEQ ID NO: 576846 - protein, 15 aa, Homo sapiens
  CDR3 for beta chain variable domain of TCR clone 288423 (TRBV9, TRBJ1-6)
CASSVAGTGDLPLHL

SEQ ID NO: 576847 - protein, 14 aa, Homo sapiens
  CDR3 for alpha chain variable domain of TCR clone 288424 (TRAV8-3, TRAJ33)
CAVGGMDSNYQLIW

SEQ ID NO: 576848 - protein, 15 aa, Homo sapiens
  CDR3 for beta chain variable domain of TCR clone 288424 (TRBV4-1, TRBJ1-1)
CASSQAPGLNTEAFF

SEQ ID NO: 576849 - protein, 13 aa, Homo sapiens
  CDR3 for alpha chain variable domain of TCR clone 288425 (TRAV13-1, TRAJ5)
GAAEHTGRRALTF

SEQ ID NO: 576850 - protein, 16 aa, Homo sapiens
  CDR3 for beta chain variable domain of TCR clone 288425 (TRBV7-9, TRBJ1-2)
CASSLGFSSGEDGYTF

SEQ ID NO: 576851 - protein, 12 aa, Homo sapiens
  CDR3 for alpha chain variable domain of TCR clone 288426 (TRAV12-3, TRAJ20)
CAMVRGDYKLSF

SEQ ID NO: 576852 - protein, 14 aa, Homo sapiens
  CDR3 for beta chain variable domain of TCR clone 288426 (TRBV20-1, TRBJ2-7)
GSAISREASYEQYY

SEQ ID NO: 576853 - protein, 16 aa, Homo sapiens
  CDR3 for alpha chain variable domain of TCR clone 288427 (TRAV20, TRAJ10)
CAVLRGLTGGGNKLTF

SEQ ID NO: 576854 - protein, 12 aa, Homo sapiens
  CDR3 for beta chain variable domain of TCR clone 288427 (TRBV11-2, TRBJ2-2)
CASSLPTGELFF

SEQ ID NO: 576855 - protein, 15 aa, Homo sapiens
  CDR3 for alpha chain variable domain of TCR clone 288428 (TRAV12-3, TRAJ6)
CAMSATTGGSYIPTF

SEQ ID NO: 576856 - protein, 15 aa, Homo sapiens
  CDR3 for beta chain variable domain of TCR clone 288428 (TRBV5-1, TRBJ2-7)
CASSLSGGPAREQYF

SEQ ID NO: 576857 - protein, 12 aa, Homo sapiens
  CDR3 for alpha chain variable domain of TCR clone 288429 (TRAV17, TRAJ20)
CATYSNDYKLSF

SEQ ID NO: 576858 - protein, 11 aa, Homo sapiens
  CDR3 for beta chain variable domain of TCR clone 288429 (TRBV4-1, TRBJ2-2)
CASEHIGELFF

SEQ ID NO: 576859 - protein, 16 aa, Homo sapiens
  CDR3 for alpha chain variable domain of TCR clone 288430 (TRAV8-6, TRAJ28)
CAVTSKPGAGRYQLTF

SEQ ID NO: 576860 - protein, 16 aa, Homo sapiens
  CDR3 for beta chain variable domain of TCR clone 288430 (TRBV12-4, TRBJ2-5)
CASSWRPSGDLETQYF

SEQ ID NO: 576861 - protein, 15 aa, Homo sapiens
  CDR3 for alpha chain variable domain of TCR clone 288431 (TRAV12-1, TRAJ44)
CVADLPTGTASKLTF

SEQ ID NO: 576862 - protein, 13 aa, Homo sapiens
  CDR3 for beta chain variable domain of TCR clone 288431 (TRBV5-1, TRBJ1-2)
CASSSTGVYGYTF

SEQ ID NO: 576863 - protein, 13 aa, Homo sapiens
  CDR3 for alpha chain variable domain of TCR clone 288432 (TRAV1-2, TRAJ9)
CAVLNTGVFKTIF

SEQ ID NO: 576864 - protein, 14 aa, Homo sapiens
  CDR3 for beta chain variable domain of TCR clone 288432 (TRBV20-1, TRBJ2-3)
CSARGGTSTDTRYF

SEQ ID NO: 576865 - protein, 14 aa, Homo sapiens
  CDR3 for alpha chain variable domain of TCR clone 288433 (TRAV1-2, TRAJ16)
CAVNRFSDGQKLLF

SEQ ID NO: 576866 - protein, 17 aa, Homo sapiens
  CDR3 for beta chain variable domain of TCR clone 288433 (TRBV7-8, TRBJ2-6)
CASSAGTGGPGANVLTF

SEQ ID NO: 576867 - protein, 14 aa, Homo sapiens
  CDR3 for alpha chain variable domain of TCR clone 288434 (TRAV12-3, TRAJ10)
SHLPLTGGGNKLTF

SEQ ID NO: 576868 - protein, 15 aa, Homo sapiens
  CDR3 for beta chain variable domain of TCR clone 288434 (TRBV12-4, TRBJ2-1)
CASSRGLAEYNEQFF

SEQ ID NO: 576869 - protein, 15 aa, Homo sapiens
  CDR3 for alpha chain variable domain of TCR clone 288435 (TRAV13-1, TRAJ45)
CAASGSGGGADGLTF

SEQ ID NO: 576870 - protein, 12 aa, Homo sapiens
  CDR3 for beta chain variable domain of TCR clone 288435 (TRBV11-2, TRBJ2-2)
CASSLGGGELFF

SEQ ID NO: 576871 - protein, 20 aa, Homo sapiens
  CDR3 for alpha chain variable domain of TCR clone 288436 (TRAV12-1, TRAJ42)
SSVIQPPTSVKGGSQGNLIF

SEQ ID NO: 576872 - protein, 18 aa, Homo sapiens
  CDR3 for beta chain variable domain of TCR clone 288436 (TRBV11-2, TRBJ2-3)
CASSLGGASRGAPNTHYF

SEQ ID NO: 576873 - protein, 15 aa, Homo sapiens
  CDR3 for alpha chain variable domain of TCR clone 288437 (TRAV8-3, TRAJ15)
CAVGAPNQAGTALIL

SEQ ID NO: 576874 - protein, 14 aa, Homo sapiens
  CDR3 for beta chain variable domain of TCR clone 288437 (TRBV20-1, TRBJ2-1)
CNPNDEASYNEQFF

SEQ ID NO: 576875 - protein, 14 aa, Homo sapiens
  CDR3 for alpha chain variable domain of TCR clone 288438 (TRAV12-2, TRAJ17)
CAVLFKAAGNKLTF

SEQ ID NO: 576876 - protein, 14 aa, Homo sapiens
  CDR3 for beta chain variable domain of TCR clone 288438 (TRBV15, TRBJ1-5)
CATSREQSNQPQHF

SEQ ID NO: 576877 - protein, 13 aa, Homo sapiens
  CDR3 for alpha chain variable domain of TCR clone 288439 (TRAV12-2, TRAJ48)
CAAPNFGNEKLTF

SEQ ID NO: 576878 - protein, 15 aa, Homo sapiens
  CDR3 for beta chain variable domain of TCR clone 288439 (TRBV28, TRBJ2-1)
CASSIIAGGRSEQFF

SEQ ID NO: 576879 - protein, 13 aa, Homo sapiens
  CDR3 for alpha chain variable domain of TCR clone 288440 (TRAV17, TRAJ9)
CATEYTGGFKTIF

SEQ ID NO: 576880 - protein, 16 aa, Homo sapiens
  CDR3 for beta chain variable domain of TCR clone 288440 (TRBV7-7, TRBJ2-1)
CASSLASGTSYNEQFS

SEQ ID NO: 576881 - protein, 15 aa, Homo sapiens
  CDR3 for alpha chain variable domain of TCR clone 288441 (TRAV3, TRAJ20)
CAVRDIKLSDYKLSF

SEQ ID NO: 576882 - protein, 15 aa, Homo sapiens
  CDR3 for beta chain variable domain of TCR clone 288441 (TRBV7-9, TRBJ1-6)
GASSSPGRGNSPLHF

SEQ ID NO: 576883 - protein, 15 aa, Homo sapiens
  CDR3 for alpha chain variable domain of TCR clone 288442 (TRAV17, TRAJ42)
CATAHYGGSQGNLIF

SEQ ID NO: 576884 - protein, 13 aa, Homo sapiens
  CDR3 for beta chain variable domain of TCR clone 288442 (TRBV7-2, TRBJ1-5)
CASSFARNQPQHF

SEQ ID NO: 576885 - protein, 12 aa, Homo sapiens
  CDR3 for alpha chain variable domain of TCR clone 288443 (TRAV12-2, TRAJ7)
CAVMRGNNRLAF

SEQ ID NO: 576886 - protein, 17 aa, Homo sapiens
  CDR3 for beta chain variable domain of TCR clone 288443 (TRBV7-9, TRBJ2-3)
CASSPTVAGDLPDTQYF

SEQ ID NO: 576887 - protein, 14 aa, Homo sapiens
  CDR3 for alpha chain variable domain of TCR clone 288444 (TRAV12-1, TRAJ13)
CVVIDSGGYQKVTF

SEQ ID NO: 576888 - protein, 13 aa, Homo sapiens
  CDR3 for beta chain variable domain of TCR clone 288444 (TRBV20-1, TRBJ1-1)
CSAPPGGHTEAFS

SEQ ID NO: 576889 - protein, 14 aa, Homo sapiens
  CDR3 for alpha chain variable domain of TCR clone 288445 (TRAV12-1, TRAJ29)
CVVNGGSGNTPLVF

SEQ ID NO: 576890 - protein, 13 aa, Homo sapiens
  CDR3 for beta chain variable domain of TCR clone 288445 (TRBV7-9, TRBJ2-3)
CASSPGSTDTQYF

SEQ ID NO: 576891 - protein, 16 aa, Homo sapiens
  CDR3 for alpha chain variable domain of TCR clone 288446 (TRAV16, TRAJ4)
CALSRMFSGGYNKLIF

SEQ ID NO: 576892 - protein, 14 aa, Homo sapiens
  CDR3 for beta chain variable domain of TCR clone 288446 (TRBV7-3, TRBJ2-1)
CASSLAGGTNEQFF

SEQ ID NO: 576893 - protein, 12 aa, Homo sapiens
  CDR3 for alpha chain variable domain of TCR clone 288447 (TRAV26-1, TRAJ36)
CIVRVRADNLFF

SEQ ID NO: 576894 - protein, 17 aa, Homo sapiens
  CDR3 for beta chain variable domain of TCR clone 288447 (TRBV7-4, TRBJ1-1)
CISVPAAYIGLSTEAFF

SEQ ID NO: 576895 - protein, 12 aa, Homo sapiens
  CDR3 for alpha chain variable domain of TCR clone 288448 (TRAV2, TRAJ31)
CALEDNNARLMF

SEQ ID NO: 576896 - protein, 15 aa, Homo sapiens
  CDR3 for beta chain variable domain of TCR clone 288448 (TRBV28, TRBJ1-5)
CASSRTGGYVQPQHF

SEQ ID NO: 576897 - protein, 17 aa, Homo sapiens
  CDR3 for alpha chain variable domain of TCR clone 288449 (TRAV3, TRAJ38)
CAVRDCLNAGNNRKLIW

SEQ ID NO: 576898 - protein, 15 aa, Homo sapiens
  CDR3 for beta chain variable domain of TCR clone 288449 (TRBV27, TRBJ2-1)
CASSNGGRSSNEHFF

SEQ ID NO: 576899 - protein, 16 aa, Homo sapiens
  CDR3 for alpha chain variable domain of TCR clone 288450 (TRAV30, TRAJ24)
CGTGIVDADSWGKFQF

SEQ ID NO: 576900 - protein, 14 aa, Homo sapiens
  CDR3 for beta chain variable domain of TCR clone 288450 (TRBV12-5, TRBJ2-5)
CASGSRTHQETQYV

SEQ ID NO: 576901 - protein, 13 aa, Homo sapiens
  CDR3 for alpha chain variable domain of TCR clone 288451 (TRAV35, TRAJ36)
CARPRIGANDLFF

SEQ ID NO: 576902 - protein, 15 aa, Homo sapiens
  CDR3 for beta chain variable domain of TCR clone 288451 (TRBV28, TRBJ2-5)
CASSPPWSYQETQYF

SEQ ID NO: 576903 - protein, 13 aa, Homo sapiens
  CDR3 for alpha chain variable domain of TCR clone 288452 (TRAV17, TRAJ9)
CATAITGGFKTIF

SEQ ID NO: 576904 - protein, 16 aa, Homo sapiens
  CDR3 for beta chain variable domain of TCR clone 288452 (TRBV15, TRBJ2-1)
CATSRNLVGGYNEQFF

SEQ ID NO: 576905 - protein, 14 aa, Homo sapiens
  CDR3 for alpha chain variable domain of TCR clone 288453 (TRAV25, TRAJ35)
CARRMEGFGNVLHC

SEQ ID NO: 576906 - protein, 14 aa, Homo sapiens
  CDR3 for beta chain variable domain of TCR clone 288453 (TRBV7-2, TRBJ1-2)
CASSQTGSTYGYTF

SEQ ID NO: 576907 - protein, 15 aa, Homo sapiens
  CDR3 for alpha chain variable domain of TCR clone 288454 (TRAV3, TRAJ22)
CAVRYRGGSARQLTF

SEQ ID NO: 576908 - protein, 14 aa, Homo sapiens
  CDR3 for beta chain variable domain of TCR clone 288454 (TRBV19, TRBJ2-1)
CASSRLASINEQFF

SEQ ID NO: 576909 - protein, 13 aa, Homo sapiens
  CDR3 for alpha chain variable domain of TCR clone 288455 (TRAV12-2, TRAJ49)
CAVKPNTGNQFYF

SEQ ID NO: 576910 - protein, 14 aa, Homo sapiens
  CDR3 for beta chain variable domain of TCR clone 288455 (TRBV19, TRBJ2-1)
CASPTFVLSGEQFF

SEQ ID NO: 576911 - protein, 12 aa, Homo sapiens
  CDR3 for alpha chain variable domain of TCR clone 288456 (TRAV40, TRAJ34)
CLPLIQADKLIF

SEQ ID NO: 576912 - protein, 17 aa, Homo sapiens
  CDR3 for beta chain variable domain of TCR clone 288456 (TRBV7-9, TRBJ2-1)
CASSYPGWQGAQGEQFF

SEQ ID NO: 576913 - protein, 13 aa, Homo sapiens
  CDR3 for alpha chain variable domain of TCR clone 288457 (TRAV27, TRAJ29)
CAGAHSGNTPLVF

SEQ ID NO: 576914 - protein, 14 aa, Homo sapiens
  CDR3 for beta chain variable domain of TCR clone 288457 (TRBV7-9, TRBJ2-7)
CASSIGQGAREQYF

SEQ ID NO: 576915 - protein, 12 aa, Homo sapiens
  CDR3 for alpha chain variable domain of TCR clone 288458 (TRAV3, TRAJ31)
CAVRDGNARLMF

SEQ ID NO: 576916 - protein, 16 aa, Homo sapiens
  CDR3 for beta chain variable domain of TCR clone 288458 (TRBV20-1, TRBJ1-2)
CSASMGQGVANYGYTF

SEQ ID NO: 576917 - protein, 14 aa, Homo sapiens
  CDR3 for alpha chain variable domain of TCR clone 288459 (TRAV1-2, TRAJ16)
CAVNRFSDGQKLLF

SEQ ID NO: 576918 - protein, 16 aa, Homo sapiens
  CDR3 for beta chain variable domain of TCR clone 288459 (TRBV19, TRBJ2-1)
CASSKAGPSSYNEQFV

SEQ ID NO: 576919 - protein, 15 aa, Homo sapiens
  CDR3 for alpha chain variable domain of TCR clone 288460 (TRAV17, TRAJ35)
CATAFVIGYGNVLHC

SEQ ID NO: 576920 - protein, 15 aa, Homo sapiens
  CDR3 for beta chain variable domain of TCR clone 288460 (TRBV7-9, TRBJ2-7)
CASSLALAEAYEQYF

SEQ ID NO: 576921 - protein, 11 aa, Homo sapiens
  CDR3 for alpha chain variable domain of TCR clone 288461 (TRAV17, TRAJ31)
CATSNSARLMF

SEQ ID NO: 576922 - protein, 16 aa, Homo sapiens
  CDR3 for beta chain variable domain of TCR clone 288461 (TRBV7-8, TRBJ2-4)
FSSSSLRTLAKNIQYF

SEQ ID NO: 576923 - protein, 18 aa, Homo sapiens
  CDR3 for alpha chain variable domain of TCR clone 288462 (TRAV26-2, TRAJ45)
CILRGDKYSGGGADGLTF

SEQ ID NO: 576924 - protein, 17 aa, Homo sapiens
  CDR3 for beta chain variable domain of TCR clone 288462 (TRBV25-1, TRBJ2-1)
CASSAYGQGRGVYEQFF

SEQ ID NO: 576925 - protein, 13 aa, Homo sapiens
  CDR3 for alpha chain variable domain of TCR clone 288463 (TRAV13-2, TRAJ48)
CAEVDFGNEKLTF

SEQ ID NO: 576926 - protein, 14 aa, Homo sapiens
  CDR3 for beta chain variable domain of TCR clone 288463 (TRBV19, TRBJ1-5)
CASGTEVYNQPQHF

SEQ ID NO: 576927 - protein, 14 aa, Homo sapiens
  CDR3 for alpha chain variable domain of TCR clone 288464 (TRAV35, TRAJ33)
CAGSPQDSNYQLIW

SEQ ID NO: 576928 - protein, 15 aa, Homo sapiens
  CDR3 for beta chain variable domain of TCR clone 288464 (TRBV20-1, TRBJ2-7)
CSAESGTSGAYEQYS

SEQ ID NO: 576929 - protein, 13 aa, Homo sapiens
  CDR3 for alpha chain variable domain of TCR clone 288465 (TRAV27, TRAJ49)
CAPRPYTGNQFYF

SEQ ID NO: 576930 - protein, 16 aa, Homo sapiens
  CDR3 for beta chain variable domain of TCR clone 288465 (TRBV4-1, TRBJ1-2)
CASSQGAGQVLYGYSF

SEQ ID NO: 576931 - protein, 16 aa, Homo sapiens
  CDR3 for alpha chain variable domain of TCR clone 288466 (TRAV16, TRAJ4)
CALSRMFSGGYNKLIF

SEQ ID NO: 576932 - protein, 15 aa, Homo sapiens
  CDR3 for beta chain variable domain of TCR clone 288466 (TRBV4-1, TRBJ1-4)
CAGSDTGGTNEKLFF

SEQ ID NO: 576933 - protein, 13 aa, Homo sapiens
  CDR3 for alpha chain variable domain of TCR clone 288467 (TRAV21, TRAJ27)
CAALNTNAGKSTF

SEQ ID NO: 576934 - protein, 15 aa, Homo sapiens
  CDR3 for beta chain variable domain of TCR clone 288467 (TRBV20-1, TRBJ2-7)
CSARKGLAESYEQNF

SEQ ID NO: 576935 - protein, 15 aa, Homo sapiens
  CDR3 for alpha chain variable domain of TCR clone 288468 (TRAV13-1, TRAJ36)
CAASIRQTGANNLFF

SEQ ID NO: 576936 - protein, 15 aa, Homo sapiens
  CDR3 for beta chain variable domain of TCR clone 288468 (TRBV7-3, TRBJ2-2)
CASSETGQGTGELFF

SEQ ID NO: 576937 - protein, 14 aa, Homo sapiens
  CDR3 for alpha chain variable domain of TCR clone 288469 (TRAV9-2, TRAJ39)
CALYIYNAGNILTF

SEQ ID NO: 576938 - protein, 14 aa, Homo sapiens
  CDR3 for beta chain variable domain of TCR clone 288469 (TRBV9, TRBJ2-7)
CASGPLRAVGEQYF

SEQ ID NO: 576939 - protein, 15 aa, Homo sapiens
  CDR3 for alpha chain variable domain of TCR clone 288470 (TRAV12-3, TRAJ42)
CAMSGHGGSQGNLIF

SEQ ID NO: 576940 - protein, 15 aa, Homo sapiens
  CDR3 for beta chain variable domain of TCR clone 288470 (TRBV27, TRBJ2-1)
CASSNGGGASNEQFF

SEQ ID NO: 576941 - protein, 13 aa, Homo sapiens
  CDR3 for alpha chain variable domain of TCR clone 288471 (TRAV21, TRAJ27)
CAARPGHAGKSTF

SEQ ID NO: 576942 - protein, 14 aa, Homo sapiens
  CDR3 for beta chain variable domain of TCR clone 288471 (TRBV7-3, TRBJ2-2)
CASSSGGYTGELFF

SEQ ID NO: 576943 - protein, 22 aa, Homo sapiens
  CDR3 for alpha chain variable domain of TCR clone 288472 (TRAV34, TRAJ40)
PAQPCRHLPLWSGPSGTYKYIF

SEQ ID NO: 576944 - protein, 17 aa, Homo sapiens
  CDR3 for beta chain variable domain of TCR clone 288472 (TRBV27, TRBJ2-6)
CASSLTGFASGANVLTF

SEQ ID NO: 576945 - protein, 15 aa, Homo sapiens
  CDR3 for alpha chain variable domain of TCR clone 288473 (TRAV35, TRAJ23)
CAGPLGNNQGVKLIF

SEQ ID NO: 576946 - protein, 14 aa, Homo sapiens
  CDR3 for beta chain variable domain of TCR clone 288473 (TRBV7-9, TRBJ1-1)
CASTPLQSYTEAFF

SEQ ID NO: 576947 - protein, 17 aa, Homo sapiens
  CDR3 for alpha chain variable domain of TCR clone 288474 (TRAV4, TRAJ13)
CLVGVQGSSGGYQKVTF

SEQ ID NO: 576948 - protein, 18 aa, Homo sapiens
  CDR3 for beta chain variable domain of TCR clone 288474 (TRBV15, TRBJ2-3)
CATSRDGARSWDTYTQYL

SEQ ID NO: 576949 - protein, 17 aa, Homo sapiens
  CDR3 for alpha chain variable domain of TCR clone 288475 (TRAV3, TRAJ6)
CAVRDGPMAGGSYIPTF

SEQ ID NO: 576950 - protein, 14 aa, Homo sapiens
  CDR3 for beta chain variable domain of TCR clone 288475 (TRBV7-2, TRBJ2-7)
CASSPRTSFYEQYF

SEQ ID NO: 576951 - protein, 14 aa, Homo sapiens
  CDR3 for alpha chain variable domain of TCR clone 288476 (TRAV1-2, TRAJ16)
CAVNRFSDGQKLLF

SEQ ID NO: 576952 - protein, 13 aa, Homo sapiens
  CDR3 for beta chain variable domain of TCR clone 288476 (TRBV19, TRBJ1-2)
CASSVPGQGGYTF

SEQ ID NO: 576953 - protein, 14 aa, Homo sapiens
  CDR3 for alpha chain variable domain of TCR clone 288477 (TRAV16, TRAJ17)
CALSGRAAGNKLTF

SEQ ID NO: 576954 - protein, 13 aa, Homo sapiens
  CDR3 for beta chain variable domain of TCR clone 288477 (TRBV12-4, TRBJ2-2)
CASSITGSGELFF

SEQ ID NO: 576955 - protein, 15 aa, Homo sapiens
  CDR3 for alpha chain variable domain of TCR clone 288478 (TRAV12-2, TRAJ53)
CAVNGGGGSNYKLTF

SEQ ID NO: 576956 - protein, 13 aa, Homo sapiens
  CDR3 for beta chain variable domain of TCR clone 288478 (TRBV3-1, TRBJ1-1)
CVSSPGVITEAFF

SEQ ID NO: 576957 - protein, 19 aa, Homo sapiens
  CDR3 for alpha chain variable domain of TCR clone 288479 (TRAV3, TRAJ6)
CAVRDRNPSRSGGSYIPTF

SEQ ID NO: 576958 - protein, 15 aa, Homo sapiens
  CDR3 for beta chain variable domain of TCR clone 288479 (TRBV18, TRBJ2-7)
CASSPTFMDSYAQYF

SEQ ID NO: 576959 - protein, 12 aa, Homo sapiens
  CDR3 for alpha chain variable domain of TCR clone 288480 (TRAV12-3, TRAJ17)
CAMTLTGSKLTF

SEQ ID NO: 576960 - protein, 14 aa, Homo sapiens
  CDR3 for beta chain variable domain of TCR clone 288480 (TRBV20-1, TRBJ1-3)
CSASPTGAGNTIYF

SEQ ID NO: 576961 - protein, 11 aa, Homo sapiens
  CDR3 for alpha chain variable domain of TCR clone 288481 (TRAV2, TRAJ23)
RAVETRGKLIF

SEQ ID NO: 576962 - protein, 10 aa, Homo sapiens
  CDR3 for beta chain variable domain of TCR clone 288481 (TRBV2, TRBJ2-3)
EGQNTDTQYF

SEQ ID NO: 576963 - protein, 17 aa, Homo sapiens
  CDR3 for alpha chain variable domain of TCR clone 288482 (TRAV3, TRAJ6)
CAVRDGPRAGGSYIPTF

SEQ ID NO: 576964 - protein, 14 aa, Homo sapiens
  CDR3 for beta chain variable domain of TCR clone 288482 (TRBV20-1, TRBJ2-7)
CSAKRGRSSYDQYF

SEQ ID NO: 576965 - protein, 23 aa, Homo sapiens
  CDR3 for alpha chain variable domain of TCR clone 288483 (TRAV26-1, TRAJ38)
CIADNAGNNHIQNPHPAVYQLRD

SEQ ID NO: 576966 - protein, 12 aa, Homo sapiens
  CDR3 for beta chain variable domain of TCR clone 288483 (TRBV11-2, TRBJ2-2)
CASSLGGGELFF

SEQ ID NO: 576967 - protein, 14 aa, Homo sapiens
  CDR3 for alpha chain variable domain of TCR clone 288484 (TRAV12-2, TRAJ11)
CAVEGGSGYSTLTF

SEQ ID NO: 576968 - protein, 14 aa, Homo sapiens
  CDR3 for beta chain variable domain of TCR clone 288484 (TRBV19, TRBJ2-2)
CASSTLHRSGELFF

SEQ ID NO: 576969 - protein, 15 aa, Homo sapiens
  CDR3 for alpha chain variable domain of TCR clone 288485 (TRAV17, TRAJ13)
CAKDAGSGGYQKVTF

SEQ ID NO: 576970 - protein, 17 aa, Homo sapiens
  CDR3 for beta chain variable domain of TCR clone 288485 (TRBV11-2, TRBJ2-1)
CASSLYPPGAEYNEQFF

SEQ ID NO: 576971 - protein, 17 aa, Homo sapiens
  CDR3 for alpha chain variable domain of TCR clone 288486 (TRAV3, TRAJ28)
CAVRDAYSGAGSYQLTF

SEQ ID NO: 576972 - protein, 18 aa, Homo sapiens
  CDR3 for beta chain variable domain of TCR clone 288486 (TRBV27, TRBJ2-1)
CASGNRAVGVGSKNEQFF

SEQ ID NO: 576973 - protein, 12 aa, Homo sapiens
  CDR3 for alpha chain variable domain of TCR clone 288487 (TRAV13-1, TRAJ21)
CAAKEGFYKFYF

SEQ ID NO: 576974 - protein, 16 aa, Homo sapiens
  CDR3 for beta chain variable domain of TCR clone 288487 (TRBV5-4, TRBJ2-3)
CASQQPGAGGADTQYF

SEQ ID NO: 576975 - protein, 12 aa, Homo sapiens
  CDR3 for alpha chain variable domain of TCR clone 288488 (TRAV12-3, TRAJ17)
CAMTLTGNKLTF

SEQ ID NO: 576976 - protein, 12 aa, Homo sapiens
  CDR3 for beta chain variable domain of TCR clone 288488 (TRBV2, TRBJ2-1)
CAYRPPGNEQFF

SEQ ID NO: 576977 - protein, 13 aa, Homo sapiens
  CDR3 for alpha chain variable domain of TCR clone 288489 (TRAV12-3, TRAJ58)
CAMSVTSGSRLTF

SEQ ID NO: 576978 - protein, 15 aa, Homo sapiens
  CDR3 for beta chain variable domain of TCR clone 288489 (TRBV20-1, TRBJ2-7)
CSARDRVSGMDEQYF

SEQ ID NO: 576979 - protein, 14 aa, Homo sapiens
  CDR3 for alpha chain variable domain of TCR clone 288490 (TRAV1-2, TRAJ29)
CAVRELTSATPLVF

SEQ ID NO: 576980 - protein, 16 aa, Homo sapiens
  CDR3 for beta chain variable domain of TCR clone 288490 (TRBV7-9, TRBJ2-1)
CASSDVAGGSYNEQFF

SEQ ID NO: 576981 - protein, 13 aa, Homo sapiens
  CDR3 for alpha chain variable domain of TCR clone 288491 (TRAV35, TRAJ48)
CAGHEFGNEKLTF

SEQ ID NO: 576982 - protein, 14 aa, Homo sapiens
  CDR3 for beta chain variable domain of TCR clone 288491 (TRBV7-2, TRBJ1-1)
CASSFLTGTTEAFF

SEQ ID NO: 576983 - protein, 18 aa, Homo sapiens
  CDR3 for alpha chain variable domain of TCR clone 288492 (TRAV8-3, TRAJ4)
WVRDPASNDPGGYNKLIF

SEQ ID NO: 576984 - protein, 13 aa, Homo sapiens
  CDR3 for beta chain variable domain of TCR clone 288492 (TRBV20-1, TRBJ1-2)
CSATGIQGSGYTF

SEQ ID NO: 576985 - protein, 12 aa, Homo sapiens
  CDR3 for alpha chain variable domain of TCR clone 288493 (TRAV12-3, TRAJ17)
CAMTITGNKLTF

SEQ ID NO: 576986 - protein, 15 aa, Homo sapiens
  CDR3 for beta chain variable domain of TCR clone 288493 (TRBV20-1, TRBJ2-7)
SSARDRVAGMDEQYF

SEQ ID NO: 576987 - protein, 14 aa, Homo sapiens
  CDR3 for alpha chain variable domain of TCR clone 288494 (TRAV13-1, TRAJ35)
CAASKGGFGNVLHC

SEQ ID NO: 576988 - protein, 15 aa, Homo sapiens
  CDR3 for beta chain variable domain of TCR clone 288494 (TRBV6-1, TRBJ2-2)
CASSAGQGYTGELFF

SEQ ID NO: 576989 - protein, 17 aa, Homo sapiens
  CDR3 for alpha chain variable domain of TCR clone 288495 (TRAV14/DV4, TRAJ4)
CAMREASGRGVYNKLIV

SEQ ID NO: 576990 - protein, 14 aa, Homo sapiens
  CDR3 for beta chain variable domain of TCR clone 288495 (TRBV19, TRBJ2-7)
CASSMGQGAIEQYF

SEQ ID NO: 576991 - protein, 14 aa, Homo sapiens
  CDR3 for alpha chain variable domain of TCR clone 288496 (TRAV38-1, TRAJ29)
CAFITPSANTPLVF

SEQ ID NO: 576992 - protein, 14 aa, Homo sapiens
  CDR3 for beta chain variable domain of TCR clone 288496 (TRBV18, TRBJ2-7)
CASSPRGGAYEQYF

SEQ ID NO: 576993 - protein, 14 aa, Homo sapiens
  CDR3 for alpha chain variable domain of TCR clone 288497 (TRAV12-3, TRAJ22)
CAMSLFGSAKQLTF

SEQ ID NO: 576994 - protein, 11 aa, Homo sapiens
  CDR3 for beta chain variable domain of TCR clone 288497 (TRBV12-4, TRBJ2-2)
CASSYAGELFF

SEQ ID NO: 576995 - protein, 13 aa, Homo sapiens
  CDR3 for alpha chain variable domain of TCR clone 288498 (TRAV8-3, TRAJ36)
CAVGATRATNLFF

SEQ ID NO: 576996 - protein, 15 aa, Homo sapiens
  CDR3 for beta chain variable domain of TCR clone 288498 (TRBV7-2, TRBJ1-2)
CASSPRAGWNYGYTF

SEQ ID NO: 576997 - protein, 16 aa, Homo sapiens
  CDR3 for alpha chain variable domain of TCR clone 288499 (TRAV30, TRAJ24)
CGTEIVDADSWGKFQF

SEQ ID NO: 576998 - protein, 15 aa, Homo sapiens
  CDR3 for beta chain variable domain of TCR clone 288499 (TRBV7-7, TRBJ2-1)
CASSRGGASYNEQFF

SEQ ID NO: 576999 - protein, 12 aa, Homo sapiens
  CDR3 for alpha chain variable domain of TCR clone 288500 (TRAV12-1, TRAJ9)
CVVHTGGFKTIF

SEQ ID NO: 577000 - protein, 14 aa, Homo sapiens
  CDR3 for beta chain variable domain of TCR clone 288500 (TRBV7-2, TRBJ2-7)
CASSPKTSFYEQNF

SEQ ID NO: 577001 - protein, 17 aa, Homo sapiens
  CDR3 for alpha chain variable domain of TCR clone 288501 (TRAV3, TRAJ6)
CAVKDGPRAGGSYIPTF

SEQ ID NO: 577002 - protein, 14 aa, Homo sapiens
  CDR3 for beta chain variable domain of TCR clone 288501 (TRBV12-4, TRBJ1-1)
CASSLGTGGTEAFF

SEQ ID NO: 577003 - protein, 14 aa, Homo sapiens
  CDR3 for alpha chain variable domain of TCR clone 288502 (TRAV38-1, TRAJ45)
CAYYSGGGADGLTF

SEQ ID NO: 577004 - protein, 20 aa, Homo sapiens
  CDR3 for beta chain variable domain of TCR clone 288502 (TRBV28, TRBJ2-1)
YASTPTGRSPGLAGGNEQFF

SEQ ID NO: 577005 - protein, 14 aa, Homo sapiens
  CDR3 for alpha chain variable domain of TCR clone 288503 (TRAV12-2, TRAJ17)
CAVNIKAAGNKLPF

SEQ ID NO: 577006 - protein, 16 aa, Homo sapiens
  CDR3 for beta chain variable domain of TCR clone 288503 (TRBV20-1, TRBJ2-6)
CSASSQGYDGANVLTF

SEQ ID NO: 577007 - protein, 14 aa, Homo sapiens
  CDR3 for alpha chain variable domain of TCR clone 288504 (TRAV12-1, TRAJ9)
CVVNRRTGGFKTIF

SEQ ID NO: 577008 - protein, 16 aa, Homo sapiens
  CDR3 for beta chain variable domain of TCR clone 288504 (TRBV4-1, TRBJ2-3)
CASSQATSGAEDTQYF

SEQ ID NO: 577009 - protein, 16 aa, Homo sapiens
  CDR3 for alpha chain variable domain of TCR clone 288505 (TRAV30, TRAJ24)
CGTEIVDADSWGKFQF

SEQ ID NO: 577010 - protein, 15 aa, Homo sapiens
  CDR3 for beta chain variable domain of TCR clone 288505 (TRBV15, TRBJ1-5)
CATSRAPVSNQPQHF

SEQ ID NO: 577011 - protein, 15 aa, Homo sapiens
  CDR3 for alpha chain variable domain of TCR clone 288506 (TRAV26-2, TRAJ13)
CILRDLSGGYQNVTF

SEQ ID NO: 577012 - protein, 11 aa, Homo sapiens
  CDR3 for beta chain variable domain of TCR clone 288506 (TRBV7-9, TRBJ2-5)
CASSLSATQYF

SEQ ID NO: 577013 - protein, 14 aa, Homo sapiens
  CDR3 for alpha chain variable domain of TCR clone 288507 (TRAV26-1, TRAJ38)
CIADNAGNNRKLIW

SEQ ID NO: 577014 - protein, 13 aa, Homo sapiens
  CDR3 for beta chain variable domain of TCR clone 288507 (TRBV11-2, TRBJ2-7)
CASSGTRPYEQYF

SEQ ID NO: 577015 - protein, 14 aa, Homo sapiens
  CDR3 for alpha chain variable domain of TCR clone 288508 (TRAV21, TRAJ10)
CAVALTGGGHKLTF

SEQ ID NO: 577016 - protein, 13 aa, Homo sapiens
  CDR3 for beta chain variable domain of TCR clone 288508 (TRBV7-2, TRBJ1-6)
CASSLGSNSPLHF

SEQ ID NO: 577017 - protein, 13 aa, Homo sapiens
  CDR3 for alpha chain variable domain of TCR clone 288509 (TRAV13-1, TRAJ49)
CAAMLYTGNQFYF

SEQ ID NO: 577018 - protein, 15 aa, Homo sapiens
  CDR3 for beta chain variable domain of TCR clone 288509 (TRBV12-4, TRBJ1-5)
CASTRGSCFGQHQHF

SEQ ID NO: 577019 - protein, 16 aa, Homo sapiens
  CDR3 for alpha chain variable domain of TCR clone 288510 (TRAV3, TRAJ10)
CAVRDMRAGGGNKLTF

SEQ ID NO: 577020 - protein, 14 aa, Homo sapiens
  CDR3 for beta chain variable domain of TCR clone 288510 (TRBV25-1, TRBJ1-1)
CASTHPGGNTEAFF

SEQ ID NO: 577021 - protein, 16 aa, Homo sapiens
  CDR3 for alpha chain variable domain of TCR clone 288511 (TRAV30, TRAJ24)
CGTEIVDADSWGKFQF

SEQ ID NO: 577022 - protein, 15 aa, Homo sapiens
  CDR3 for beta chain variable domain of TCR clone 288511 (TRBV14, TRBJ2-3)
CASSQEMLAGATQYF

SEQ ID NO: 577023 - protein, 15 aa, Homo sapiens
  CDR3 for alpha chain variable domain of TCR clone 288512 (TRAV3, TRAJ22)
CAVRDRGGSARQLTV

SEQ ID NO: 577024 - protein, 13 aa, Homo sapiens
  CDR3 for beta chain variable domain of TCR clone 288512 (TRBV7-3, TRBJ2-1)
CASSPVAYNEQFF

SEQ ID NO: 577025 - protein, 18 aa, Homo sapiens
  CDR3 for alpha chain variable domain of TCR clone 288513 (TRAV29/DV5, TRAJ52)
QCTSVQQADGTSNGKLTF

SEQ ID NO: 577026 - protein, 13 aa, Homo sapiens
  CDR3 for beta chain variable domain of TCR clone 288513 (TRBV7-2, TRBJ1-1)
CASNLKGAKVAFF

SEQ ID NO: 577027 - protein, 16 aa, Homo sapiens
  CDR3 for alpha chain variable domain of TCR clone 288514 (TRAV30, TRAJ24)
CGTEIVDADSWGKFRF

SEQ ID NO: 577028 - protein, 12 aa, Homo sapiens
  CDR3 for beta chain variable domain of TCR clone 288514 (TRBV11-2, TRBJ2-2)
CASSLPTGELFF

SEQ ID NO: 577029 - protein, 12 aa, Homo sapiens
  CDR3 for alpha chain variable domain of TCR clone 288515 (TRAV8-4, TRAJ43)
CAVSVNNNDIRL

SEQ ID NO: 577030 - protein, 14 aa, Homo sapiens
  CDR3 for beta chain variable domain of TCR clone 288515 (TRBV11-2, TRBJ1-2)
CASSLGTANYGYTF

SEQ ID NO: 577031 - protein, 14 aa, Homo sapiens
  CDR3 for alpha chain variable domain of TCR clone 288516 (TRAV1-2, TRAJ16)
CAVSRFSDGQKLLF

SEQ ID NO: 577032 - protein, 17 aa, Homo sapiens
  CDR3 for beta chain variable domain of TCR clone 288516 (TRBV7-8, TRBJ2-6)
CASSAGTGGAGANVLTF

SEQ ID NO: 577033 - protein, 18 aa, Homo sapiens
  CDR3 for alpha chain variable domain of TCR clone 288517 (TRAV21, TRAJ53)
CAVKGGENSGGSNYKLTF

SEQ ID NO: 577034 - protein, 15 aa, Homo sapiens
  CDR3 for beta chain variable domain of TCR clone 288517 (TRBV20-1, TRBJ2-7)
CSARDRVSGMDEQYF

SEQ ID NO: 577035 - protein, 18 aa, Homo sapiens
  CDR3 for alpha chain variable domain of TCR clone 288518 (TRAV12-3, TRAJ52)
CAMSRTNAGVTSYGKLTF

SEQ ID NO: 577036 - protein, 15 aa, Homo sapiens
  CDR3 for beta chain variable domain of TCR clone 288518 (TRBV19, TRBJ1-2)
CASSVGQVLNYGYTF

SEQ ID NO: 577037 - protein, 18 aa, Homo sapiens
  CDR3 for alpha chain variable domain of TCR clone 288519 (TRAV21, TRAJ52)
CAVRPSPAGGTSYGKLTF

SEQ ID NO: 577038 - protein, 17 aa, Homo sapiens
  CDR3 for beta chain variable domain of TCR clone 288519 (TRBV13, TRBJ2-3)
CASTPSRVAGGRNTQYF

SEQ ID NO: 577039 - protein, 11 aa, Homo sapiens
  CDR3 for alpha chain variable domain of TCR clone 288520 (TRAV21, TRAJ11)
CAVNGYSTLTF

SEQ ID NO: 577040 - protein, 11 aa, Homo sapiens
  CDR3 for beta chain variable domain of TCR clone 288520 (TRBV19, TRBJ1-1)
CSSSTGSGAFF

SEQ ID NO: 577041 - protein, 14 aa, Homo sapiens
  CDR3 for alpha chain variable domain of TCR clone 288521 (TRAV2, TRAJ29)
FAVTPPSGNTPLVF

SEQ ID NO: 577042 - protein, 13 aa, Homo sapiens
  CDR3 for beta chain variable domain of TCR clone 288521 (TRBV11-2, TRBJ2-1)
CASSLGLAGGRFF

SEQ ID NO: 577043 - protein, 14 aa, Homo sapiens
  CDR3 for alpha chain variable domain of TCR clone 288522 (TRAV1-2, TRAJ8)
CAVREDTGFQKLVF

SEQ ID NO: 577044 - protein, 15 aa, Homo sapiens
  CDR3 for beta chain variable domain of TCR clone 288522 (TRBV4-3, TRBJ2-7)
CASSQGDWGDYEQYF

SEQ ID NO: 577045 - protein, 11 aa, Homo sapiens
  CDR3 for alpha chain variable domain of TCR clone 288523 (TRAV2, TRAJ33)
CAVDSNYQLIW

SEQ ID NO: 577046 - protein, 15 aa, Homo sapiens
  CDR3 for beta chain variable domain of TCR clone 288523 (TRBV3-1, TRBJ2-1)
CASSQDYTPRGEQFF

SEQ ID NO: 577047 - protein, 15 aa, Homo sapiens
  CDR3 for alpha chain variable domain of TCR clone 288524 (TRAV17, TRAJ57)
CATGPSQGGSEKLVF

SEQ ID NO: 577048 - protein, 15 aa, Homo sapiens
  CDR3 for beta chain variable domain of TCR clone 288524 (TRBV19, TRBJ2-1)
CASNARVGAYNEQFF

SEQ ID NO: 577049 - protein, 14 aa, Homo sapiens
  CDR3 for alpha chain variable domain of TCR clone 288525 (TRAV12-2, TRAJ12)
CAVINRDSSYKLIF

SEQ ID NO: 577050 - protein, 13 aa, Homo sapiens
  CDR3 for beta chain variable domain of TCR clone 288525 (TRBV3-1, TRBJ2-2)
CASLARGSGELFF

SEQ ID NO: 577051 - protein, 17 aa, Homo sapiens
  CDR3 for alpha chain variable domain of TCR clone 288526 (TRAV3, TRAJ42)
CAVRDRDYGGSKGNLIF

SEQ ID NO: 577052 - protein, 12 aa, Homo sapiens
  CDR3 for beta chain variable domain of TCR clone 288526 (TRBV2, TRBJ1-5)
CASARAGQPQHF

SEQ ID NO: 577053 - protein, 16 aa, Homo sapiens
  CDR3 for alpha chain variable domain of TCR clone 288527 (TRAV3, TRAJ10)
CAVRDMRAGGGNKPTF

SEQ ID NO: 577054 - protein, 14 aa, Homo sapiens
  CDR3 for beta chain variable domain of TCR clone 288527 (TRBV19, TRBJ2-1)
CASPTFVLSGEQFF

SEQ ID NO: 577055 - protein, 12 aa, Homo sapiens
  CDR3 for alpha chain variable domain of TCR clone 288528 (TRAV36/DV7, TRAJ37)
CACYGNTGKLIF

SEQ ID NO: 577056 - protein, 14 aa, Homo sapiens
  CDR3 for beta chain variable domain of TCR clone 288528 (TRBV18, TRBJ1-2)
RVAIFLCANYGYTF

SEQ ID NO: 577057 - protein, 16 aa, Homo sapiens
  CDR3 for alpha chain variable domain of TCR clone 288529 (TRAV30, TRAJ24)
CGTEIVDADSWGKFQF

SEQ ID NO: 577058 - protein, 13 aa, Homo sapiens
  CDR3 for beta chain variable domain of TCR clone 288529 (TRBV5-1, TRBJ2-1)
CASSLGSYNEQFF

SEQ ID NO: 577059 - protein, 14 aa, Homo sapiens
  CDR3 for alpha chain variable domain of TCR clone 288530 (TRAV13-1, TRAJ44)
CAAKATGTASKLTL

SEQ ID NO: 577060 - protein, 13 aa, Homo sapiens
  CDR3 for beta chain variable domain of TCR clone 288530 (TRBV15, TRBJ1-6)
CATSGGLNSPLHF

SEQ ID NO: 577061 - protein, 14 aa, Homo sapiens
  CDR3 for alpha chain variable domain of TCR clone 288531 (TRAV23/DV6, TRAJ53)
CAARSGGSNYKLTF

SEQ ID NO: 577062 - protein, 13 aa, Homo sapiens
  CDR3 for beta chain variable domain of TCR clone 288531 (TRBV12-5, TRBJ2-3)
CASQNRGTDTQYF

SEQ ID NO: 577063 - protein, 12 aa, Homo sapiens
  CDR3 for alpha chain variable domain of TCR clone 288532 (TRAV1-2, TRAJ11)
CAVRGVYSTLTF

SEQ ID NO: 577064 - protein, 11 aa, Homo sapiens
  CDR3 for beta chain variable domain of TCR clone 288532 (TRBV6-3, TRBJ2-3)
CATGQADTQYF

SEQ ID NO: 577065 - protein, 16 aa, Homo sapiens
  CDR3 for alpha chain variable domain of TCR clone 288533 (TRAV21, TRAJ52)
CAVTNAGGTSYGKLTF

SEQ ID NO: 577066 - protein, 13 aa, Homo sapiens
  CDR3 for beta chain variable domain of TCR clone 288533 (TRBV20-1, TRBJ2-3)
CSARRAGTETQYF

SEQ ID NO: 577067 - protein, 13 aa, Homo sapiens
  CDR3 for alpha chain variable domain of TCR clone 288534 (TRAV17, TRAJ9)
CATDYTGGFKTIF

SEQ ID NO: 577068 - protein, 15 aa, Homo sapiens
  CDR3 for beta chain variable domain of TCR clone 288534 (TRBV7-2, TRBJ1-2)
CASSPRAGWNYGYTF

SEQ ID NO: 577069 - protein, 15 aa, Homo sapiens
  CDR3 for alpha chain variable domain of TCR clone 288535 (TRAV22, TRAJ28)
CAAWRSGAGSYQLTF

SEQ ID NO: 577070 - protein, 15 aa, Homo sapiens
  CDR3 for beta chain variable domain of TCR clone 288535 (TRBV14, TRBJ1-1)
CASSQDGMGRREAFF

SEQ ID NO: 577071 - protein, 14 aa, Homo sapiens
  CDR3 for alpha chain variable domain of TCR clone 288536 (TRAV1-1, TRAJ34)
CAVSPSYNTVKLIF

SEQ ID NO: 577072 - protein, 15 aa, Homo sapiens
  CDR3 for beta chain variable domain of TCR clone 288536 (TRBV6-3, TRBJ2-7)
CASSSPGTVFYEQYF

SEQ ID NO: 577073 - protein, 11 aa, Homo sapiens
  CDR3 for alpha chain variable domain of TCR clone 288537 (TRAV27, TRAJ43)
CAGANNNDMRF

SEQ ID NO: 577074 - protein, 16 aa, Homo sapiens
  CDR3 for beta chain variable domain of TCR clone 288537 (TRBV7-2, TRBJ2-6)
CASSLAGRSGANVLTF

SEQ ID NO: 577075 - protein, 11 aa, Homo sapiens
  CDR3 for alpha chain variable domain of TCR clone 288538 (TRAV21, TRAJ34)
CAHYNTDKLIF

SEQ ID NO: 577076 - protein, 13 aa, Homo sapiens
  CDR3 for beta chain variable domain of TCR clone 288538 (TRBV7-6, TRBJ1-2)
GASSLVADYGYTF

SEQ ID NO: 577077 - protein, 14 aa, Homo sapiens
  CDR3 for alpha chain variable domain of TCR clone 288539 (TRAV1-2, TRAJ16)
CAVNRFSDSQKLLF

SEQ ID NO: 577078 - protein, 14 aa, Homo sapiens
  CDR3 for beta chain variable domain of TCR clone 288539 (TRBV15, TRBJ2-3)
CATRSGTSTDTQYF

SEQ ID NO: 577079 - protein, 16 aa, Homo sapiens
  CDR3 for alpha chain variable domain of TCR clone 288540 (TRAV4, TRAJ32)
CLVVPEEGGATNKLIF

SEQ ID NO: 577080 - protein, 12 aa, Homo sapiens
  CDR3 for beta chain variable domain of TCR clone 288540 (TRBV12-5, TRBJ2-5)
CASGQGVETQYF

SEQ ID NO: 577081 - protein, 16 aa, Homo sapiens
  CDR3 for alpha chain variable domain of TCR clone 288541 (TRAV17, TRAJ22)
CATGPISSGPARQLTF

SEQ ID NO: 577082 - protein, 13 aa, Homo sapiens
  CDR3 for beta chain variable domain of TCR clone 288541 (TRBV11-2, TRBJ2-1)
CASSLGLAGGRFF

SEQ ID NO: 577083 - protein, 15 aa, Homo sapiens
  CDR3 for alpha chain variable domain of TCR clone 288542 (TRAV8-3, TRAJ37)
CAVGAMASNTGKLIF

SEQ ID NO: 577084 - protein, 15 aa, Homo sapiens
  CDR3 for beta chain variable domain of TCR clone 288542 (TRBV5-4, TRBJ2-3)
CASSLAGRVTDTQYF

SEQ ID NO: 577085 - protein, 14 aa, Homo sapiens
  CDR3 for alpha chain variable domain of TCR clone 288543 (TRAV12-1, TRAJ3)
CVVILYSSASKIIF

SEQ ID NO: 577086 - protein, 15 aa, Homo sapiens
  CDR3 for beta chain variable domain of TCR clone 288543 (TRBV7-9, TRBJ2-1)
CASSLGWGRANEQFF

SEQ ID NO: 577087 - protein, 11 aa, Homo sapiens
  CDR3 for alpha chain variable domain of TCR clone 288544 (TRAV2, TRAJ33)
CAVESNYQLIW

SEQ ID NO: 577088 - protein, 15 aa, Homo sapiens
  CDR3 for beta chain variable domain of TCR clone 288544 (TRBV19, TRBJ2-7)
CASSPAGSGEALRYF

SEQ ID NO: 577089 - protein, 14 aa, Homo sapiens
  CDR3 for alpha chain variable domain of TCR clone 288545 (TRAV35, TRAJ13)
CAGSPSGGYQKVTF

SEQ ID NO: 577090 - protein, 13 aa, Homo sapiens
  CDR3 for beta chain variable domain of TCR clone 288545 (TRBV29-1, TRBJ1-1)
CSVEDSRNTEAFF

SEQ ID NO: 577091 - protein, 12 aa, Homo sapiens
  CDR3 for alpha chain variable domain of TCR clone 288546 (TRAV12-3, TRAJ17)
CAMTRTGNKLTF

SEQ ID NO: 577092 - protein, 14 aa, Homo sapiens
  CDR3 for beta chain variable domain of TCR clone 288546 (TRBV20-1, TRBJ1-3)
CSASPTGAGNTIYF

SEQ ID NO: 577093 - protein, 12 aa, Homo sapiens
  CDR3 for alpha chain variable domain of TCR clone 288547 (TRAV9-2, TRAJ26)
CALRGYGQHFVF

SEQ ID NO: 577094 - protein, 12 aa, Homo sapiens
  CDR3 for beta chain variable domain of TCR clone 288547 (TRBV29-1, TRBJ2-3)
CSVTGGADTQYF

SEQ ID NO: 577095 - protein, 14 aa, Homo sapiens
  CDR3 for alpha chain variable domain of TCR clone 288548 (TRAV1-2, TRAJ8)
CAVREDTGFQKFVF

SEQ ID NO: 577096 - protein, 15 aa, Homo sapiens
  CDR3 for beta chain variable domain of TCR clone 288548 (TRBV9, TRBJ1-6)
CASSVAGTGDSPLHF

SEQ ID NO: 577097 - protein, 12 aa, Homo sapiens
  CDR3 for alpha chain variable domain of TCR clone 288549 (TRAV12-1, TRAJ40)
CVFYSGTYKYIF

SEQ ID NO: 577098 - protein, 13 aa, Homo sapiens
  CDR3 for beta chain variable domain of TCR clone 288549 (TRBV20-1, TRBJ1-1)
CSAGTVGNTEAFF

SEQ ID NO: 577099 - protein, 14 aa, Homo sapiens
  CDR3 for alpha chain variable domain of TCR clone 288550 (TRAV12-2, TRAJ53)
CRERGGGSNDKLTF

SEQ ID NO: 577100 - protein, 14 aa, Homo sapiens
  CDR3 for beta chain variable domain of TCR clone 288550 (TRBV19, TRBJ2-2)
CASSTLHRSGELFF

SEQ ID NO: 577101 - protein, 18 aa, Homo sapiens
  CDR3 for alpha chain variable domain of TCR clone 288551 (TRAV26-1, TRAJ57)
CIVRVALRFQGGSDKLVF

SEQ ID NO: 577102 - protein, 15 aa, Homo sapiens
  CDR3 for beta chain variable domain of TCR clone 288551 (TRBV27, TRBJ2-1)
CASSNGGGSSNEQFF

SEQ ID NO: 577103 - protein, 14 aa, Homo sapiens
  CDR3 for alpha chain variable domain of TCR clone 288552 (TRAV21, TRAJ35)
CAVMPIGFGNVLHC

SEQ ID NO: 577104 - protein, 13 aa, Homo sapiens
  CDR3 for beta chain variable domain of TCR clone 288552 (TRBV23-1, TRBJ1-4)
CAGRGKFNEKLFF

SEQ ID NO: 577105 - protein, 10 aa, Homo sapiens
  CDR3 for alpha chain variable domain of TCR clone 288553 (TRAV30, TRAJ48)
CGIGNEKLTF

SEQ ID NO: 577106 - protein, 12 aa, Homo sapiens
  CDR3 for beta chain variable domain of TCR clone 288553 (TRBV11-2, TRBJ2-2)
CASSLPTRELFF

SEQ ID NO: 577107 - protein, 10 aa, Homo sapiens
  CDR3 for alpha chain variable domain of TCR clone 288554 (TRAV12-2, TRAJ48)
CAVTSEQLTF

SEQ ID NO: 577108 - protein, 14 aa, Homo sapiens
  CDR3 for beta chain variable domain of TCR clone 288554 (TRBV7-6, TRBJ2-3)
CASSLGTVTDTQYF

SEQ ID NO: 577109 - protein, 14 aa, Homo sapiens
  CDR3 for alpha chain variable domain of TCR clone 288555 (TRAV21, TRAJ37)
CAVKGPSNTGKLIF

SEQ ID NO: 577110 - protein, 13 aa, Homo sapiens
  CDR3 for beta chain variable domain of TCR clone 288555 (TRBV7-2, TRBJ2-5)
CASSQTSVEAQYF

SEQ ID NO: 577111 - protein, 14 aa, Homo sapiens
  CDR3 for alpha chain variable domain of TCR clone 288556 (TRAV17, TRAJ6)
CATDASGGSYIPTF

SEQ ID NO: 577112 - protein, 13 aa, Homo sapiens
  CDR3 for beta chain variable domain of TCR clone 288556 (TRBV27, TRBJ2-7)
CASSSGDSYEQYF

SEQ ID NO: 577113 - protein, 17 aa, Homo sapiens
  CDR3 for alpha chain variable domain of TCR clone 288557 (TRAV3, TRAJ38)
CALRDCLNAGNNRKLIW

SEQ ID NO: 577114 - protein, 13 aa, Homo sapiens
  CDR3 for beta chain variable domain of TCR clone 288557 (TRBV23-1, TRBJ1-4)
CASRGKFNEKLFF

SEQ ID NO: 577115 - protein, 11 aa, Homo sapiens
  CDR3 for alpha chain variable domain of TCR clone 288558 (TRAV2, TRAJ13)
CASGGYQKVTF

SEQ ID NO: 577116 - protein, 13 aa, Homo sapiens
  CDR3 for beta chain variable domain of TCR clone 288558 (TRBV25-1, TRBJ2-6)
CAGRGPGANVLTF

SEQ ID NO: 577117 - protein, 16 aa, Homo sapiens
  CDR3 for alpha chain variable domain of TCR clone 288559 (TRAV3, TRAJ18)
CSVRDGRGSTLGRLYF

SEQ ID NO: 577118 - protein, 15 aa, Homo sapiens
  CDR3 for beta chain variable domain of TCR clone 288559 (TRBV7-9, TRBJ1-6)
CASSSPGRGNSPLHF

SEQ ID NO: 577119 - protein, 13 aa, Homo sapiens
  CDR3 for alpha chain variable domain of TCR clone 288560 (TRAV16, TRAJ31)
CALSAHNNARLMF

SEQ ID NO: 577120 - protein, 17 aa, Homo sapiens
  CDR3 for beta chain variable domain of TCR clone 288560 (TRBV12-4, TRBJ2-1)
CAISPGLAGGRINEQFF

SEQ ID NO: 577121 - protein, 13 aa, Homo sapiens
  CDR3 for alpha chain variable domain of TCR clone 288561 (TRAV12-2, TRAJ34)
CAVRGYNTDKLIF

SEQ ID NO: 577122 - protein, 17 aa, Homo sapiens
  CDR3 for beta chain variable domain of TCR clone 288561 (TRBV20-1, TRBJ2-1)
CSASSSGLAGSYNEQFF

SEQ ID NO: 577123 - protein, 15 aa, Homo sapiens
  CDR3 for alpha chain variable domain of TCR clone 288562 (TRAV3, TRAJ3)
CAVRDMSSSASKIIF

SEQ ID NO: 577124 - protein, 13 aa, Homo sapiens
  CDR3 for beta chain variable domain of TCR clone 288562 (TRBV20-1, TRBJ2-2)
CSASAAGTGELFF

SEQ ID NO: 577125 - protein, 14 aa, Homo sapiens
  CDR3 for alpha chain variable domain of TCR clone 288563 (TRAV13-1, TRAJ44)
CAAKATGTASKLTF

SEQ ID NO: 577126 - protein, 13 aa, Homo sapiens
  CDR3 for beta chain variable domain of TCR clone 288563 (TRBV7-8, TRBJ2-7)
RRVRLTEMGEQYF

SEQ ID NO: 577127 - protein, 17 aa, Homo sapiens
  CDR3 for alpha chain variable domain of TCR clone 288564 (TRAV3, TRAJ6)
CAVRDGPRAGGSYILTF

SEQ ID NO: 577128 - protein, 20 aa, Homo sapiens
  CDR3 for beta chain variable domain of TCR clone 288564 (TRBV28, TRBJ2-1)
CASTPIGRSLGLAGGNEQFF

SEQ ID NO: 577129 - protein, 13 aa, Homo sapiens
  CDR3 for alpha chain variable domain of TCR clone 288565 (TRAV8-6, TRAJ49)
CAVITNTGNQFYF

SEQ ID NO: 577130 - protein, 11 aa, Homo sapiens
  CDR3 for beta chain variable domain of TCR clone 288565 (TRBV19, TRBJ2-7)
CASSILGEQYF

SEQ ID NO: 577131 - protein, 14 aa, Homo sapiens
  CDR3 for alpha chain variable domain of TCR clone 288566 (TRAV13-1, TRAJ40)
CAARSTSGTYKYIF

SEQ ID NO: 577132 - protein, 15 aa, Homo sapiens
  CDR3 for beta chain variable domain of TCR clone 288566 (TRBV18, TRBJ1-5)
CASPETGGNNQPQHF

SEQ ID NO: 577133 - protein, 11 aa, Homo sapiens
  CDR3 for alpha chain variable domain of TCR clone 288567 (TRAV13-1, TRAJ20)
CAASNDYKLSF

SEQ ID NO: 577134 - protein, 13 aa, Homo sapiens
  CDR3 for beta chain variable domain of TCR clone 288567 (TRBV27, TRBJ1-1)
CASSLSIGAEAFF

SEQ ID NO: 577135 - protein, 15 aa, Homo sapiens
  CDR3 for alpha chain variable domain of TCR clone 288568 (TRAV21, TRAJ24)
CAARSSTDSWGKLQF

SEQ ID NO: 577136 - protein, 15 aa, Homo sapiens
  CDR3 for beta chain variable domain of TCR clone 288568 (TRBV11-2, TRBJ2-1)
CASSLGTSGLNEQFF

SEQ ID NO: 577137 - protein, 12 aa, Homo sapiens
  CDR3 for alpha chain variable domain of TCR clone 288569 (TRAV12-2, TRAJ10)
WGVTGGGNKLTF

SEQ ID NO: 577138 - protein, 15 aa, Homo sapiens
  CDR3 for beta chain variable domain of TCR clone 288569 (TRBV27, TRBJ2-7)
CASSTAGTGSYEQYF

SEQ ID NO: 577139 - protein, 14 aa, Homo sapiens
  CDR3 for alpha chain variable domain of TCR clone 288570 (TRAV9-2, TRAJ39)
FALYIYNAGNMLTF

SEQ ID NO: 577140 - protein, 16 aa, Homo sapiens
  CDR3 for beta chain variable domain of TCR clone 288570 (TRBV7-7, TRBJ2-1)
CASSLASGTSYNEQFF

SEQ ID NO: 577141 - protein, 12 aa, Homo sapiens
  CDR3 for alpha chain variable domain of TCR clone 288571 (TRAV12-3, TRAJ32)
CAMGGATNKLIF

SEQ ID NO: 577142 - protein, 14 aa, Homo sapiens
  CDR3 for beta chain variable domain of TCR clone 288571 (TRBV11-2, TRBJ2-5)
CASSRTGGIETQYF

SEQ ID NO: 577143 - protein, 15 aa, Homo sapiens
  CDR3 for alpha chain variable domain of TCR clone 288572 (TRAV17, TRAJ16)
CATALRFSVGQKLPF

SEQ ID NO: 577144 - protein, 16 aa, Homo sapiens
  CDR3 for beta chain variable domain of TCR clone 288572 (TRBV5-1, TRBJ1-1)
CASSSGGNSLNTEAFF

SEQ ID NO: 577145 - protein, 13 aa, Homo sapiens
  CDR3 for alpha chain variable domain of TCR clone 288573 (TRAV21, TRAJ36)
CAVIKTGANNLFF

SEQ ID NO: 577146 - protein, 13 aa, Homo sapiens
  CDR3 for beta chain variable domain of TCR clone 288573 (TRBV29-1, TRBJ2-3)
CSATWGGRDTQYF

SEQ ID NO: 577147 - protein, 14 aa, Homo sapiens
  CDR3 for alpha chain variable domain of TCR clone 288574 (TRAV17, TRAJ31)
CATVLRNNNARLMF

SEQ ID NO: 577148 - protein, 12 aa, Homo sapiens
  CDR3 for beta chain variable domain of TCR clone 288574 (TRBV5-1, TRBJ1-2)
CASSQDTYGDTF

SEQ ID NO: 577149 - protein, 15 aa, Homo sapiens
  CDR3 for alpha chain variable domain of TCR clone 288575 (TRAV2, TRAJ37)
CAVEDGSSNTGKLIF

SEQ ID NO: 577150 - protein, 14 aa, Homo sapiens
  CDR3 for beta chain variable domain of TCR clone 288575 (TRBV19, TRBJ2-1)
CASPTFVLSGEQFF

SEQ ID NO: 577151 - protein, 16 aa, Homo sapiens
  CDR3 for alpha chain variable domain of TCR clone 288576 (TRAV12-1, TRAJ42)
CVVTPYYGGSQGNLIF

SEQ ID NO: 577152 - protein, 15 aa, Homo sapiens
  CDR3 for beta chain variable domain of TCR clone 288576 (TRBV2, TRBJ2-1)
CATQARLVMIGEQFF

SEQ ID NO: 577153 - protein, 15 aa, Homo sapiens
  CDR3 for alpha chain variable domain of TCR clone 288577 (TRAV4, TRAJ35)
CLVGDEWALGMCCIA

SEQ ID NO: 577154 - protein, 14 aa, Homo sapiens
  CDR3 for beta chain variable domain of TCR clone 288577 (TRBV7-3, TRBJ2-1)
CASSLAGGTNEQFF

SEQ ID NO: 577155 - protein, 14 aa, Homo sapiens
  CDR3 for alpha chain variable domain of TCR clone 288578 (TRAV12-2, TRAJ24)
CAVTPADSWGKCQF

SEQ ID NO: 577156 - protein, 13 aa, Homo sapiens
  CDR3 for beta chain variable domain of TCR clone 288578 (TRBV7-9, TRBJ2-2)
CASSLDPTGELFF

SEQ ID NO: 577157 - protein, 14 aa, Homo sapiens
  CDR3 for alpha chain variable domain of TCR clone 288579 (TRAV1-1, TRAJ35)
CTVRSIGFGNVLHC

SEQ ID NO: 577158 - protein, 14 aa, Homo sapiens
  CDR3 for beta chain variable domain of TCR clone 288579 (TRBV5-7, TRBJ2-7)
CASSGGLSSYEQYF

SEQ ID NO: 577159 - protein, 13 aa, Homo sapiens
  CDR3 for alpha chain variable domain of TCR clone 288580 (TRAV2, TRAJ13)
TTVLPGGYQKVTF

SEQ ID NO: 577160 - protein, 11 aa, Homo sapiens
  CDR3 for beta chain variable domain of TCR clone 288580 (TRBV12-4, TRBJ2-3)
CASTATDTQYF

SEQ ID NO: 577161 - protein, 10 aa, Homo sapiens
  CDR3 for alpha chain variable domain of TCR clone 288581 (TRAV38-2/DV8, TRAJ40)
CASGTYKYIF

SEQ ID NO: 577162 - protein, 15 aa, Homo sapiens
  CDR3 for beta chain variable domain of TCR clone 288581 (TRBV19, TRBJ2-7)
CASSIGGGLVNEQYF

SEQ ID NO: 577163 - protein, 17 aa, Homo sapiens
  CDR3 for alpha chain variable domain of TCR clone 288582 (TRAV3, TRAJ6)
CAVRDGPGAGGSYIPTF

SEQ ID NO: 577164 - protein, 14 aa, Homo sapiens
  CDR3 for beta chain variable domain of TCR clone 288582 (TRBV11-2, TRBJ1-5)
CASSLDRGRQPQHF

SEQ ID NO: 577165 - protein, 13 aa, Homo sapiens
  CDR3 for alpha chain variable domain of TCR clone 288583 (TRAV8-2, TRAJ49)
CVVTPNTGNQFYF

SEQ ID NO: 577166 - protein, 14 aa, Homo sapiens
  CDR3 for beta chain variable domain of TCR clone 288583 (TRBV7-9, TRBJ1-1)
CASTPLQSYTEAFF

SEQ ID NO: 577167 - protein, 12 aa, Homo sapiens
  CDR3 for alpha chain variable domain of TCR clone 288584 (TRAV12-2, TRAJ21)
CAVRYNFNKFYF

SEQ ID NO: 577168 - protein, 14 aa, Homo sapiens
  CDR3 for beta chain variable domain of TCR clone 288584 (TRBV28, TRBJ2-1)
CASSYYTAYNEQFV

SEQ ID NO: 577169 - protein, 15 aa, Homo sapiens
  CDR3 for alpha chain variable domain of TCR clone 288585 (TRAV3, TRAJ5)
CAVRDLDTGRRGLTF

SEQ ID NO: 577170 - protein, 12 aa, Homo sapiens
  CDR3 for beta chain variable domain of TCR clone 288585 (TRBV27, TRBJ2-2)
CASKLFTGELFF

SEQ ID NO: 577171 - protein, 14 aa, Homo sapiens
  CDR3 for alpha chain variable domain of TCR clone 288586 (TRAV8-3, TRAJ4)
WAVGAAGGYNKLIF

SEQ ID NO: 577172 - protein, 15 aa, Homo sapiens
  CDR3 for beta chain variable domain of TCR clone 288586 (TRBV11-3, TRBJ2-3)
CASLKDGREGDTQYF

SEQ ID NO: 577173 - protein, 15 aa, Homo sapiens
  CDR3 for alpha chain variable domain of TCR clone 288587 (TRAV21, TRAJ53)
CATLNSGGSNYKPTF

SEQ ID NO: 577174 - protein, 15 aa, Homo sapiens
  CDR3 for beta chain variable domain of TCR clone 288587 (TRBV7-2, TRBJ2-7)
CASSTPGLTRGEQYF

SEQ ID NO: 577175 - protein, 13 aa, Homo sapiens
  CDR3 for alpha chain variable domain of TCR clone 288588 (TRAV1-2, TRAJ9)
CAALNTGGFKTIF

SEQ ID NO: 577176 - protein, 13 aa, Homo sapiens
  CDR3 for beta chain variable domain of TCR clone 288588 (TRBV28, TRBJ2-5)
CASSWGTQETQYF

SEQ ID NO: 577177 - protein, 14 aa, Homo sapiens
  CDR3 for alpha chain variable domain of TCR clone 288589 (TRAV1-2, TRAJ16)
CAVNRFSDGQKLLF

SEQ ID NO: 577178 - protein, 15 aa, Homo sapiens
  CDR3 for beta chain variable domain of TCR clone 288589 (TRBV5-5, TRBJ1-4)
CARSLVVRSNEKLFF

SEQ ID NO: 577179 - protein, 13 aa, Homo sapiens
  CDR3 for alpha chain variable domain of TCR clone 288590 (TRAV30, TRAJ34)
CGTVGHNTDKLIF

SEQ ID NO: 577180 - protein, 16 aa, Homo sapiens
  CDR3 for beta chain variable domain of TCR clone 288590 (TRBV7-9, TRBJ1-2)
CASSLGFSAGEDGYTF

SEQ ID NO: 577181 - protein, 13 aa, Homo sapiens
  CDR3 for alpha chain variable domain of TCR clone 288591 (TRAV17, TRAJ9)
CATDGTGGFKTIF

SEQ ID NO: 577182 - protein, 14 aa, Homo sapiens
  CDR3 for beta chain variable domain of TCR clone 288591 (TRBV4-2, TRBJ1-2)
CASSPGGSNYGYTF

SEQ ID NO: 577183 - protein, 12 aa, Homo sapiens
  CDR3 for alpha chain variable domain of TCR clone 288592 (TRAV8-6, TRAJ50)
CAVETSYDKLIF

SEQ ID NO: 577184 - protein, 15 aa, Homo sapiens
  CDR3 for beta chain variable domain of TCR clone 288592 (TRBV9, TRBJ2-3)
CASSKSGNRADTQYF

SEQ ID NO: 577185 - protein, 14 aa, Homo sapiens
  CDR3 for alpha chain variable domain of TCR clone 288593 (TRAV26-1, TRAJ26)
CIVSDYNYGQNFVF

SEQ ID NO: 577186 - protein, 14 aa, Homo sapiens
  CDR3 for beta chain variable domain of TCR clone 288593 (TRBV19, TRBJ2-1)
CASPTFVLSGEQFF

SEQ ID NO: 577187 - protein, 14 aa, Homo sapiens
  CDR3 for alpha chain variable domain of TCR clone 288594 (TRAV25, TRAJ22)
CAVRSSGSARQLTF

SEQ ID NO: 577188 - protein, 16 aa, Homo sapiens
  CDR3 for beta chain variable domain of TCR clone 288594 (TRBV4-2, TRBJ1-1)
CASSPSPRRAAPEAFF

SEQ ID NO: 577189 - protein, 14 aa, Homo sapiens
  CDR3 for alpha chain variable domain of TCR clone 288595 (TRAV35, TRAJ13)
CAGRSPGRYQKVTF

SEQ ID NO: 577190 - protein, 14 aa, Homo sapiens
  CDR3 for beta chain variable domain of TCR clone 288595 (TRBV19, TRBJ2-2)
CASSMVGLSGELFF

SEQ ID NO: 577191 - protein, 12 aa, Homo sapiens
  CDR3 for alpha chain variable domain of TCR clone 288596 (TRAV3, TRAJ20)
CAVRDPDYKLSF

SEQ ID NO: 577192 - protein, 13 aa, Homo sapiens
  CDR3 for beta chain variable domain of TCR clone 288596 (TRBV7-7, TRBJ2-2)
CASSLTSAGELFF

SEQ ID NO: 577193 - protein, 12 aa, Homo sapiens
  CDR3 for alpha chain variable domain of TCR clone 288597 (TRAV2, TRAJ9)
CAVGAGGFKTIF

SEQ ID NO: 577194 - protein, 13 aa, Homo sapiens
  CDR3 for beta chain variable domain of TCR clone 288597 (TRBV28, TRBJ1-2)
CASSRGQVYGYTF

SEQ ID NO: 577195 - protein, 15 aa, Homo sapiens
  CDR3 for alpha chain variable domain of TCR clone 288598 (TRAV26-1, TRAJ29)
CIVRVEGSGNTPLVF

SEQ ID NO: 577196 - protein, 19 aa, Homo sapiens
  CDR3 for beta chain variable domain of TCR clone 288598 (TRBV4-3, TRBJ2-7)
CASSQEFIGWQVTPYEQYF

SEQ ID NO: 577197 - protein, 15 aa, Homo sapiens
  CDR3 for alpha chain variable domain of TCR clone 288599 (TRAV26-1, TRAJ29)
CIVRVEGSGNTPLVF

SEQ ID NO: 577198 - protein, 15 aa, Homo sapiens
  CDR3 for beta chain variable domain of TCR clone 288599 (TRBV7-9, TRBJ1-6)
CASSSPGRGNSTLYF

SEQ ID NO: 577199 - protein, 14 aa, Homo sapiens
  CDR3 for alpha chain variable domain of TCR clone 288600 (TRAV4, TRAJ17)
CLVGDMAAGNKLPF

SEQ ID NO: 577200 - protein, 15 aa, Homo sapiens
  CDR3 for beta chain variable domain of TCR clone 288600 (TRBV5-5, TRBJ1-5)
CASSSTPGSNQPQHF

SEQ ID NO: 577201 - protein, 16 aa, Homo sapiens
  CDR3 for alpha chain variable domain of TCR clone 288601 (TRAV17, TRAJ52)
CATGIIGGTSYGKLTF

SEQ ID NO: 577202 - protein, 13 aa, Homo sapiens
  CDR3 for beta chain variable domain of TCR clone 288601 (TRBV15, TRBJ1-6)
CATSGGLNSPLHF

SEQ ID NO: 577203 - protein, 13 aa, Homo sapiens
  CDR3 for alpha chain variable domain of TCR clone 288602 (TRAV1-2, TRAJ11)
CAVRREGYSTLTF

SEQ ID NO: 577204 - protein, 17 aa, Homo sapiens
  CDR3 for beta chain variable domain of TCR clone 288602 (TRBV4-1, TRBJ2-7)
CASSQPTSGSRGYEQYF

SEQ ID NO: 577205 - protein, 18 aa, Homo sapiens
  CDR3 for alpha chain variable domain of TCR clone 288603 (TRAV2, TRAJ20)
LQVREADAAVYRDCKLSF

SEQ ID NO: 577206 - protein, 15 aa, Homo sapiens
  CDR3 for beta chain variable domain of TCR clone 288603 (TRBV7-2, TRBJ2-1)
CASSSGLAGGNEQFF

SEQ ID NO: 577207 - protein, 13 aa, Homo sapiens
  CDR3 for alpha chain variable domain of TCR clone 288604 (TRAV26-2, TRAJ54)
CVPRVGGAQKLVF

SEQ ID NO: 577208 - protein, 16 aa, Homo sapiens
  CDR3 for beta chain variable domain of TCR clone 288604 (TRBV4-1, TRBJ1-1)
CASSSMSERPNTEAFF

SEQ ID NO: 577209 - protein, 12 aa, Homo sapiens
  CDR3 for alpha chain variable domain of TCR clone 288605 (TRAV21, TRAJ49)
CAVRWTGNQFYF

SEQ ID NO: 577210 - protein, 18 aa, Homo sapiens
  CDR3 for beta chain variable domain of TCR clone 288605 (TRBV7-8, TRBJ2-1)
CASSPAEGLAGGLNEQFF

SEQ ID NO: 577211 - protein, 13 aa, Homo sapiens
  CDR3 for alpha chain variable domain of TCR clone 288606 (TRAV16, TRAJ34)
CALMGYNTDKLIF

SEQ ID NO: 577212 - protein, 13 aa, Homo sapiens
  CDR3 for beta chain variable domain of TCR clone 288606 (TRBV6-1, TRBJ2-1)
CASREDGGHEQFF

SEQ ID NO: 577213 - protein, 14 aa, Homo sapiens
  CDR3 for alpha chain variable domain of TCR clone 288607 (TRAV26-1, TRAJ38)
CIADNAGNNRKLIS

SEQ ID NO: 577214 - protein, 15 aa, Homo sapiens
  CDR3 for beta chain variable domain of TCR clone 288607 (TRBV20-1, TRBJ2-7)
CSARDRVSGMDEQYF

SEQ ID NO: 577215 - protein, 23 aa, Homo sapiens
  CDR3 for alpha chain variable domain of TCR clone 288608 (TRAV26-1, )
CIADNAGNNYIQNPDPAVYQLRD

SEQ ID NO: 577216 - protein, 13 aa, Homo sapiens
  CDR3 for beta chain variable domain of TCR clone 288608 (TRBV20-1, TRBJ1-1)
CSARGGRNTEAFF

SEQ ID NO: 577217 - protein, 12 aa, Homo sapiens
  CDR3 for alpha chain variable domain of TCR clone 288609 (TRAV12-3, TRAJ20)
CAMVRGDYKLSS

SEQ ID NO: 577218 - protein, 16 aa, Homo sapiens
  CDR3 for beta chain variable domain of TCR clone 288609 (TRBV6-5, TRBJ2-1)
CASSYSLSGGYNEQFF

SEQ ID NO: 577219 - protein, 18 aa, Homo sapiens
  CDR3 for alpha chain variable domain of TCR clone 288610 (TRAV16, TRAJ45)
CAQASYPSSGGGADGLTF

SEQ ID NO: 577220 - protein, 20 aa, Homo sapiens
  CDR3 for beta chain variable domain of TCR clone 288610 (TRBV28, TRBJ2-1)
CASTPIGRSPGLAGGNEQFF

SEQ ID NO: 577221 - protein, 16 aa, Homo sapiens
  CDR3 for alpha chain variable domain of TCR clone 288611 (TRAV3, TRAJ37)
CAVRPHGSDNTGKLIF

SEQ ID NO: 577222 - protein, 17 aa, Homo sapiens
  CDR3 for beta chain variable domain of TCR clone 288611 (TRBV20-1, TRBJ2-1)
CSASSSGLAGSYNEQFF

SEQ ID NO: 577223 - protein, 14 aa, Homo sapiens
  CDR3 for alpha chain variable domain of TCR clone 288612 (TRAV13-1, TRAJ9)
CAASDLTGGFKTIF

SEQ ID NO: 577224 - protein, 16 aa, Homo sapiens
  CDR3 for beta chain variable domain of TCR clone 288612 (TRBV7-8, TRBJ2-4)
CASSAERTLAKNIQYF

SEQ ID NO: 577225 - protein, 15 aa, Homo sapiens
  CDR3 for alpha chain variable domain of TCR clone 288613 (TRAV1-2, TRAJ9)
CAVRDDGTGGFKTIF

SEQ ID NO: 577226 - protein, 16 aa, Homo sapiens
  CDR3 for beta chain variable domain of TCR clone 288613 (TRBV7-2, TRBJ1-6)
CASSSFESSYNSTLLF

SEQ ID NO: 577227 - protein, 23 aa, Homo sapiens
  CDR3 for alpha chain variable domain of TCR clone 288614 (TRAV8-4, TRAJ38)
CARLNAGNNHIQHPDPAVYQLRD

SEQ ID NO: 577228 - protein, 14 aa, Homo sapiens
  CDR3 for beta chain variable domain of TCR clone 288614 (TRBV7-8, TRBJ2-3)
CASSLEAGTDTQYF

SEQ ID NO: 577229 - protein, 14 aa, Homo sapiens
  CDR3 for alpha chain variable domain of TCR clone 288615 (TRAV1-2, TRAJ8)
CAVREDTGFQKLVF

SEQ ID NO: 577230 - protein, 15 aa, Homo sapiens
  CDR3 for beta chain variable domain of TCR clone 288615 (TRBV6-3, TRBJ2-7)
CASISPGTVFYGQYF

SEQ ID NO: 577231 - protein, 16 aa, Homo sapiens
  CDR3 for alpha chain variable domain of TCR clone 288616 (TRAV13-2, TRAJ31)
CAENARLMFGDGTQLV

SEQ ID NO: 577232 - protein, 14 aa, Homo sapiens
  CDR3 for beta chain variable domain of TCR clone 288616 (TRBV7-9, TRBJ2-1)
CASSLGVADNEQFF

SEQ ID NO: 577233 - protein, 11 aa, Homo sapiens
  CDR3 for alpha chain variable domain of TCR clone 288617 (TRAV12-3, TRAJ27)
CAMANAGKSTF

SEQ ID NO: 577234 - protein, 14 aa, Homo sapiens
  CDR3 for beta chain variable domain of TCR clone 288617 (TRBV7-3, TRBJ1-1)
CASSLGTGYTEAFF

SEQ ID NO: 577235 - protein, 15 aa, Homo sapiens
  CDR3 for alpha chain variable domain of TCR clone 288618 (TRAV26-1, TRAJ56)
CIVRVATGANSKLTF

SEQ ID NO: 577236 - protein, 15 aa, Homo sapiens
  CDR3 for beta chain variable domain of TCR clone 288618 (TRBV11-3, TRBJ2-3)
CASLKNGREGDTQYF

SEQ ID NO: 577237 - protein, 11 aa, Homo sapiens
  CDR3 for alpha chain variable domain of TCR clone 288619 (TRAV1-2, TRAJ20)
CAVCNDYKLSF

SEQ ID NO: 577238 - protein, 16 aa, Homo sapiens
  CDR3 for beta chain variable domain of TCR clone 288619 (TRBV29-1, TRBJ2-6)
CSVEDITYSGANVLTF

SEQ ID NO: 577239 - protein, 12 aa, Homo sapiens
  CDR3 for alpha chain variable domain of TCR clone 288620 (TRAV12-3, TRAJ17)
RAMTLTGNKLTF

SEQ ID NO: 577240 - protein, 15 aa, Homo sapiens
  CDR3 for beta chain variable domain of TCR clone 288620 (TRBV20-1, TRBJ2-7)
CSARDRVSGRDEQYF

SEQ ID NO: 577241 - protein, 16 aa, Homo sapiens
  CDR3 for alpha chain variable domain of TCR clone 288621 (TRAV30, TRAJ24)
CGTEIEDADSWGKFQF

SEQ ID NO: 577242 - protein, 16 aa, Homo sapiens
  CDR3 for beta chain variable domain of TCR clone 288621 (TRBV2, TRBJ1-3)
CASSGGAGRSGNTIYF

SEQ ID NO: 577243 - protein, 17 aa, Homo sapiens
  CDR3 for alpha chain variable domain of TCR clone 288622 (TRAV26-1, TRAJ37)
CIVRVITVSSNTGKLIF

SEQ ID NO: 577244 - protein, 15 aa, Homo sapiens
  CDR3 for beta chain variable domain of TCR clone 288622 (TRBV4-1, TRBJ1-4)
CASSDTGGTNEKLFF

SEQ ID NO: 577245 - protein, 16 aa, Homo sapiens
  CDR3 for alpha chain variable domain of TCR clone 288623 (TRAV12-2, TRAJ32)
CAVNLGQGGATNKLIF

SEQ ID NO: 577246 - protein, 15 aa, Homo sapiens
  CDR3 for beta chain variable domain of TCR clone 288623 (TRBV4-3, TRBJ2-7)
CASSQGGRGIYEQYF

SEQ ID NO: 577247 - protein, 13 aa, Homo sapiens
  CDR3 for alpha chain variable domain of TCR clone 288624 (TRAV8-2, TRAJ47)
CGVSEREGNKLVF

SEQ ID NO: 577248 - protein, 16 aa, Homo sapiens
  CDR3 for beta chain variable domain of TCR clone 288624 (TRBV5-1, TRBJ1-1)
GASSKTGTEVGTEAFF

SEQ ID NO: 577249 - protein, 12 aa, Homo sapiens
  CDR3 for alpha chain variable domain of TCR clone 288625 (TRAV16, TRAJ10)
CSRTGGGNKLTF

SEQ ID NO: 577250 - protein, 16 aa, Homo sapiens
  CDR3 for beta chain variable domain of TCR clone 288625 (TRBV27, TRBJ2-5)
CASSSQTSGFQETQYF

SEQ ID NO: 577251 - protein, 12 aa, Homo sapiens
  CDR3 for alpha chain variable domain of TCR clone 288626 (TRAV26-2, TRAJ21)
CILKGNFNKFYF

SEQ ID NO: 577252 - protein, 14 aa, Homo sapiens
  CDR3 for beta chain variable domain of TCR clone 288626 (TRBV7-9, TRBJ1-1)
CASTPLPSYTEAFF

SEQ ID NO: 577253 - protein, 13 aa, Homo sapiens
  CDR3 for alpha chain variable domain of TCR clone 288627 (TRAV21, TRAJ20)
CAVGLRLDYKLSF

SEQ ID NO: 577254 - protein, 13 aa, Homo sapiens
  CDR3 for beta chain variable domain of TCR clone 288627 (TRBV6-1, TRBJ1-1)
CASSRQGNTEAFF

SEQ ID NO: 577255 - protein, 12 aa, Homo sapiens
  CDR3 for alpha chain variable domain of TCR clone 288628 (TRAV8-3, TRAJ20)
CAVGANDYKLSF

SEQ ID NO: 577256 - protein, 13 aa, Homo sapiens
  CDR3 for beta chain variable domain of TCR clone 288628 (TRBV7-3, TRBJ1-2)
CASSLKRGYGYTF

SEQ ID NO: 577257 - protein, 15 aa, Homo sapiens
  CDR3 for alpha chain variable domain of TCR clone 288629 (TRAV3, TRAJ22)
CAVRDRGGSARQLTF

SEQ ID NO: 577258 - protein, 13 aa, Homo sapiens
  CDR3 for beta chain variable domain of TCR clone 288629 (TRBV12-4, TRBJ1-2)
CASSLRQGKGYIF

SEQ ID NO: 577259 - protein, 12 aa, Homo sapiens
  CDR3 for alpha chain variable domain of TCR clone 288630 (TRAV1-2, TRAJ33)
CAALDSNYQLIW

SEQ ID NO: 577260 - protein, 13 aa, Homo sapiens
  CDR3 for beta chain variable domain of TCR clone 288630 (TRBV19, TRBJ2-7)
CASRKAGGSERYF

SEQ ID NO: 577261 - protein, 15 aa, Homo sapiens
  CDR3 for alpha chain variable domain of TCR clone 288631 (TRAV3, TRAJ9)
CAVKDSNTGGFKTIF

SEQ ID NO: 577262 - protein, 16 aa, Homo sapiens
  CDR3 for beta chain variable domain of TCR clone 288631 (TRBV15, TRBJ2-5)
CATSPTTGQGMETQYF

SEQ ID NO: 577263 - protein, 10 aa, Homo sapiens
  CDR3 for alpha chain variable domain of TCR clone 288632 (TRAV1-2, TRAJ23)
CAGQGGKLIF

SEQ ID NO: 577264 - protein, 13 aa, Homo sapiens
  CDR3 for beta chain variable domain of TCR clone 288632 (TRBV7-3, TRBJ1-1)
CASSQDWGAEAFF

SEQ ID NO: 577265 - protein, 14 aa, Homo sapiens
  CDR3 for alpha chain variable domain of TCR clone 288633 (TRAV26-1, TRAJ43)
TAVYYCRKPYDMRF

SEQ ID NO: 577266 - protein, 15 aa, Homo sapiens
  CDR3 for beta chain variable domain of TCR clone 288633 (TRBV7-9, TRBJ1-6)
CASSSPGRGNSPLHF

SEQ ID NO: 577267 - protein, 15 aa, Homo sapiens
  CDR3 for alpha chain variable domain of TCR clone 288634 (TRAV8-3, TRAJ11)
CAVGRLNSGYSTRTF

SEQ ID NO: 577268 - protein, 16 aa, Homo sapiens
  CDR3 for beta chain variable domain of TCR clone 288634 (TRBV28, TRBJ2-1)
CASSLWGRTSGTLQFF

SEQ ID NO: 577269 - protein, 21 aa, Homo sapiens
  CDR3 for alpha chain variable domain of TCR clone 288635 (TRAV8-3, TRAJ10)
CAVGHTPGRRKQTHLWDRHSA

SEQ ID NO: 577270 - protein, 10 aa, Homo sapiens
  CDR3 for beta chain variable domain of TCR clone 288635 (TRBV20-1, TRBJ2-5)
CSARFETQYF

SEQ ID NO: 577271 - protein, 18 aa, Homo sapiens
  CDR3 for alpha chain variable domain of TCR clone 288636 (TRAV13-1, TRAJ52)
CAASKRSAGGTSYGKLTF

SEQ ID NO: 577272 - protein, 15 aa, Homo sapiens
  CDR3 for beta chain variable domain of TCR clone 288636 (TRBV7-2, TRBJ2-1)
CASTHGTGIYNEQFF

SEQ ID NO: 577273 - protein, 14 aa, Homo sapiens
  CDR3 for alpha chain variable domain of TCR clone 288637 (TRAV2, TRAJ3)
CAVRPYSSASKIIF

SEQ ID NO: 577274 - protein, 19 aa, Homo sapiens
  CDR3 for beta chain variable domain of TCR clone 288637 (TRBV2, TRBJ2-2)
CASSQPGLAGGGNTGELFF

SEQ ID NO: 577275 - protein, 14 aa, Homo sapiens
  CDR3 for alpha chain variable domain of TCR clone 288638 (TRAV13-1, TRAJ24)
CAASRTDSWGKLQF

SEQ ID NO: 577276 - protein, 14 aa, Homo sapiens
  CDR3 for beta chain variable domain of TCR clone 288638 (TRBV7-9, TRBJ1-5)
CQQPRSPANQPQHF

SEQ ID NO: 577277 - protein, 15 aa, Homo sapiens
  CDR3 for alpha chain variable domain of TCR clone 288639 (TRAV3, TRAJ13)
CAVRVYSGGYPKVTF

SEQ ID NO: 577278 - protein, 15 aa, Homo sapiens
  CDR3 for beta chain variable domain of TCR clone 288639 (TRBV7-2, TRBJ2-1)
CASSSGLAGGNEQFF

SEQ ID NO: 577279 - protein, 13 aa, Homo sapiens
  CDR3 for alpha chain variable domain of TCR clone 288640 (TRAV8-1, TRAJ28)
CAVSGAGSYQLTF

SEQ ID NO: 577280 - protein, 15 aa, Homo sapiens
  CDR3 for beta chain variable domain of TCR clone 288640 (TRBV2, TRBJ2-3)
CASSDFEKATDTQYF

SEQ ID NO: 577281 - protein, 13 aa, Homo sapiens
  CDR3 for alpha chain variable domain of TCR clone 288641 (TRAV3, TRAJ21)
CAVREPDFNKFYF

SEQ ID NO: 577282 - protein, 17 aa, Homo sapiens
  CDR3 for beta chain variable domain of TCR clone 288641 (TRBV10-3, TRBJ2-2)
CAISESGAGGLVGELFF

SEQ ID NO: 577283 - protein, 15 aa, Homo sapiens
  CDR3 for alpha chain variable domain of TCR clone 288642 (TRAV2, TRAJ13)
CATPSYSGGYQKVPF

SEQ ID NO: 577284 - protein, 14 aa, Homo sapiens
  CDR3 for beta chain variable domain of TCR clone 288642 (TRBV4-2, TRBJ2-1)
CASGLDRAYNEQFF

SEQ ID NO: 577285 - protein, 14 aa, Homo sapiens
  CDR3 for alpha chain variable domain of TCR clone 288643 (TRAV23/DV6, TRAJ37)
CAASTSSNTGKLIF

SEQ ID NO: 577286 - protein, 16 aa, Homo sapiens
  CDR3 for beta chain variable domain of TCR clone 288643 (TRBV7-9, TRBJ2-1)
CASRDVAGGSYNEQFF

SEQ ID NO: 577287 - protein, 12 aa, Homo sapiens
  CDR3 for alpha chain variable domain of TCR clone 288644 (TRAV12-3, TRAJ17)
FAMTLTGNKLTF

SEQ ID NO: 577288 - protein, 14 aa, Homo sapiens
  CDR3 for beta chain variable domain of TCR clone 288644 (TRBV25-1, TRBJ1-1)
CASTHLGGNTEAFF

SEQ ID NO: 577289 - protein, 15 aa, Homo sapiens
  CDR3 for alpha chain variable domain of TCR clone 288645 (TRAV13-1, TRAJ32)
CAASIYCGATNKLIF

SEQ ID NO: 577290 - protein, 17 aa, Homo sapiens
  CDR3 for beta chain variable domain of TCR clone 288645 (TRBV7-3, TRBJ2-5)
CASSLGSGRSGSETQYF

SEQ ID NO: 577291 - protein, 13 aa, Homo sapiens
  CDR3 for alpha chain variable domain of TCR clone 288646 (TRAV10, TRAJ45)
CVGSGGGADRLPF

SEQ ID NO: 577292 - protein, 15 aa, Homo sapiens
  CDR3 for beta chain variable domain of TCR clone 288646 (TRBV5-1, TRBJ2-7)
CASSLYPDGGYEQYF

SEQ ID NO: 577293 - protein, 16 aa, Homo sapiens
  CDR3 for alpha chain variable domain of TCR clone 288647 (TRAV36/DV7, TRAJ33)
WRPGNKVQDSNYQLIW

SEQ ID NO: 577294 - protein, 13 aa, Homo sapiens
  CDR3 for beta chain variable domain of TCR clone 288647 (TRBV28, TRBJ2-1)
CASSPLPSSEQFF

SEQ ID NO: 577295 - protein, 17 aa, Homo sapiens
  CDR3 for alpha chain variable domain of TCR clone 288648 (TRAV3, TRAJ6)
CAVRDGPRAGGSYITKF

SEQ ID NO: 577296 - protein, 16 aa, Homo sapiens
  CDR3 for beta chain variable domain of TCR clone 288648 (TRBV12-4, TRBJ1-5)
CASSRPVGGSNQPQHF

SEQ ID NO: 577297 - protein, 12 aa, Homo sapiens
  CDR3 for alpha chain variable domain of TCR clone 288649 (TRAV12-3, TRAJ17)
CAMTLTGNKTTF

SEQ ID NO: 577298 - protein, 13 aa, Homo sapiens
  CDR3 for beta chain variable domain of TCR clone 288649 (TRBV7-9, TRBJ2-3)
CASSPGSTDTQYF

SEQ ID NO: 577299 - protein, 10 aa, Homo sapiens
  CDR3 for alpha chain variable domain of TCR clone 288650 (TRAV8-4, TRAJ43)
CAVSADDMRF

SEQ ID NO: 577300 - protein, 16 aa, Homo sapiens
  CDR3 for beta chain variable domain of TCR clone 288650 (TRBV20-1, TRBJ2-1)
CSARDHLAGGRGEQFF

SEQ ID NO: 577301 - protein, 14 aa, Homo sapiens
  CDR3 for alpha chain variable domain of TCR clone 288651 (TRAV12-2, TRAJ17)
CAVLFKAAGNKLTF

SEQ ID NO: 577302 - protein, 16 aa, Homo sapiens
  CDR3 for beta chain variable domain of TCR clone 288651 (TRBV28, TRBJ2-1)
CASSSPEYPRDNEQFF

SEQ ID NO: 577303 - protein, 14 aa, Homo sapiens
  CDR3 for alpha chain variable domain of TCR clone 288652 (TRAV17, TRAJ6)
CATPAMGGSYITTF

SEQ ID NO: 577304 - protein, 13 aa, Homo sapiens
  CDR3 for beta chain variable domain of TCR clone 288652 (TRBV6-3, TRBJ1-1)
CASSYGRGSGAFF

SEQ ID NO: 577305 - protein, 13 aa, Homo sapiens
  CDR3 for alpha chain variable domain of TCR clone 288653 (TRAV20, TRAJ31)
CAVQAWNNARLMF

SEQ ID NO: 577306 - protein, 16 aa, Homo sapiens
  CDR3 for beta chain variable domain of TCR clone 288653 (TRBV6-6, TRBJ2-1)
CASSWGGQGPYNEQFF

SEQ ID NO: 577307 - protein, 14 aa, Homo sapiens
  CDR3 for alpha chain variable domain of TCR clone 288654 (TRAV1-2, TRAJ16)
CAVNRFSDGQKLLF

SEQ ID NO: 577308 - protein, 13 aa, Homo sapiens
  CDR3 for beta chain variable domain of TCR clone 288654 (TRBV12-4, TRBJ2-1)
CASRRGATYGQFF

SEQ ID NO: 577309 - protein, 14 aa, Homo sapiens
  CDR3 for alpha chain variable domain of TCR clone 288655 (TRAV27, TRAJ36)
CAGPPKRGANNLFF

SEQ ID NO: 577310 - protein, 15 aa, Homo sapiens
  CDR3 for beta chain variable domain of TCR clone 288655 (TRBV18, TRBJ2-7)
CASSPAATTNYEQYF

SEQ ID NO: 577311 - protein, 14 aa, Homo sapiens
  CDR3 for alpha chain variable domain of TCR clone 288656 (TRAV29/DV5, TRAJ40)
CAASLAPGTYKYIF

SEQ ID NO: 577312 - protein, 13 aa, Homo sapiens
  CDR3 for beta chain variable domain of TCR clone 288656 (TRBV12-4, TRBJ1-5)
CASSPDRAQPQHF

SEQ ID NO: 577313 - protein, 12 aa, Homo sapiens
  CDR3 for alpha chain variable domain of TCR clone 288657 (TRAV21, TRAJ39)
CAADNAGNVLTF

SEQ ID NO: 577314 - protein, 13 aa, Homo sapiens
  CDR3 for beta chain variable domain of TCR clone 288657 (TRBV12-4, TRBJ1-1)
CASSPGTGFEAFF

SEQ ID NO: 577315 - protein, 13 aa, Homo sapiens
  CDR3 for alpha chain variable domain of TCR clone 288658 (TRAV27, TRAJ41)
CAGEGNSGYALNF

SEQ ID NO: 577316 - protein, 14 aa, Homo sapiens
  CDR3 for beta chain variable domain of TCR clone 288658 (TRBV12-4, TRBJ2-3)
CASSGQGSTDTQYF

SEQ ID NO: 577317 - protein, 14 aa, Homo sapiens
  CDR3 for alpha chain variable domain of TCR clone 288659 (TRAV14/DV4, TRAJ26)
CAMREGTYGQNFVF

SEQ ID NO: 577318 - protein, 16 aa, Homo sapiens
  CDR3 for beta chain variable domain of TCR clone 288659 (TRBV9, TRBJ1-2)
CASSVEEKVSPYGYIF

SEQ ID NO: 577319 - protein, 12 aa, Homo sapiens
  CDR3 for alpha chain variable domain of TCR clone 288660 (TRAV13-1, TRAJ21)
CAAKEGFNKFYF

SEQ ID NO: 577320 - protein, 12 aa, Homo sapiens
  CDR3 for beta chain variable domain of TCR clone 288660 (TRBV6-5, TRBJ2-3)
CASSDTTDTQYF

SEQ ID NO: 577321 - protein, 15 aa, Homo sapiens
  CDR3 for alpha chain variable domain of TCR clone 288661 (TRAV3, TRAJ3)
CAVRDLSSRSSKIIF

SEQ ID NO: 577322 - protein, 14 aa, Homo sapiens
  CDR3 for beta chain variable domain of TCR clone 288661 (TRBV19, TRBJ2-1)
CASPTFVLSGEQFF

SEQ ID NO: 577323 - protein, 15 aa, Homo sapiens
  CDR3 for alpha chain variable domain of TCR clone 288662 (TRAV3, TRAJ9)
CSVRDSNTGGFKTIF

SEQ ID NO: 577324 - protein, 16 aa, Homo sapiens
  CDR3 for beta chain variable domain of TCR clone 288662 (TRBV15, TRBJ2-5)
CATSPTTGQGMETQYF

SEQ ID NO: 577325 - protein, 14 aa, Homo sapiens
  CDR3 for alpha chain variable domain of TCR clone 288663 (TRAV21, TRAJ12)
CAVRNGDSSYKLIF

SEQ ID NO: 577326 - protein, 13 aa, Homo sapiens
  CDR3 for beta chain variable domain of TCR clone 288663 (TRBV28, TRBJ2-5)
CASSFAGGETQYF

SEQ ID NO: 577327 - protein, 18 aa, Homo sapiens
  CDR3 for alpha chain variable domain of TCR clone 288664 (TRAV1-2, TRAJ8)
CLLPLCCERGHGSQKLVF

SEQ ID NO: 577328 - protein, 15 aa, Homo sapiens
  CDR3 for beta chain variable domain of TCR clone 288664 (TRBV6-3, TRBJ2-7)
CASSSPGTVFYEQYF

SEQ ID NO: 577329 - protein, 17 aa, Homo sapiens
  CDR3 for alpha chain variable domain of TCR clone 288665 (TRAV3, TRAJ6)
CAVRDGPRAGGSYIPTF

SEQ ID NO: 577330 - protein, 16 aa, Homo sapiens
  CDR3 for beta chain variable domain of TCR clone 288665 (TRBV27, TRBJ2-2)
CASSFRGLVRTGEMFF

SEQ ID NO: 577331 - protein, 14 aa, Homo sapiens
  CDR3 for alpha chain variable domain of TCR clone 288666 (TRAV9-2, TRAJ39)
CALYIYNAGNMLTF

SEQ ID NO: 577332 - protein, 12 aa, Homo sapiens
  CDR3 for beta chain variable domain of TCR clone 288666 (TRBV3-1, TRBJ2-1)
CASSQGSSEQFF

SEQ ID NO: 577333 - protein, 12 aa, Homo sapiens
  CDR3 for alpha chain variable domain of TCR clone 288667 (TRAV12-3, TRAJ17)
CAMTLTGNKLTF

SEQ ID NO: 577334 - protein, 17 aa, Homo sapiens
  CDR3 for beta chain variable domain of TCR clone 288667 (TRBV20-1, TRBJ2-2)
CSASGSGQGGLTGELLF

SEQ ID NO: 577335 - protein, 12 aa, Homo sapiens
  CDR3 for alpha chain variable domain of TCR clone 288668 (TRAV8-3, TRAJ26)
CAGDNYGQNFVF

SEQ ID NO: 577336 - protein, 15 aa, Homo sapiens
  CDR3 for beta chain variable domain of TCR clone 288668 (TRBV9, TRBJ2-1)
CASSLAGSSYHEQFF

SEQ ID NO: 577337 - protein, 10 aa, Homo sapiens
  CDR3 for alpha chain variable domain of TCR clone 288669 (TRAV16, TRAJ26)
CAPEELWSEF

SEQ ID NO: 577338 - protein, 13 aa, Homo sapiens
  CDR3 for beta chain variable domain of TCR clone 288669 (TRBV24-1, TRBJ2-2)
CATSDWSTGELFF

SEQ ID NO: 577339 - protein, 15 aa, Homo sapiens
  CDR3 for alpha chain variable domain of TCR clone 288670 (TRAV12-2, TRAJ53)
CAVNGGGGSNYKLTF

SEQ ID NO: 577340 - protein, 15 aa, Homo sapiens
  CDR3 for beta chain variable domain of TCR clone 288670 (TRBV3-1, TRBJ2-1)
CASSQDPGNYNEQFF

SEQ ID NO: 577341 - protein, 14 aa, Homo sapiens
  CDR3 for alpha chain variable domain of TCR clone 288671 (TRAV26-1, TRAJ21)
CIVRVVYNFHKFYF

SEQ ID NO: 577342 - protein, 17 aa, Homo sapiens
  CDR3 for beta chain variable domain of TCR clone 288671 (TRBV11-2, TRBJ2-1)
CASSLYPPGVEYNEQFF

SEQ ID NO: 577343 - protein, 14 aa, Homo sapiens
  CDR3 for alpha chain variable domain of TCR clone 288672 (TRAV26-1, TRAJ21)
CIAHTTSTNITLNL

SEQ ID NO: 577344 - protein, 15 aa, Homo sapiens
  CDR3 for beta chain variable domain of TCR clone 288672 (TRBV20-1, TRBJ2-7)
CSARDRVSGMDEQYF

SEQ ID NO: 577345 - protein, 13 aa, Homo sapiens
  CDR3 for alpha chain variable domain of TCR clone 288673 (TRAV21, TRAJ27)
CAARPGNAGRSTF

SEQ ID NO: 577346 - protein, 15 aa, Homo sapiens
  CDR3 for beta chain variable domain of TCR clone 288673 (TRBV2, TRBJ2-3)
CASSDAGGPPDTHYF

SEQ ID NO: 577347 - protein, 18 aa, Homo sapiens
  CDR3 for alpha chain variable domain of TCR clone 288674 (TRAV13-2, TRAJ52)
CAETPLNAGGTSYGKLTF

SEQ ID NO: 577348 - protein, 17 aa, Homo sapiens
  CDR3 for beta chain variable domain of TCR clone 288674 (TRBV11-2, TRBJ2-1)
CASSLYPPGVEYNEQFF

SEQ ID NO: 577349 - protein, 13 aa, Homo sapiens
  CDR3 for alpha chain variable domain of TCR clone 288675 (TRAV1-2, TRAJ18)
CAVRDMGDRGSTL

SEQ ID NO: 577350 - protein, 16 aa, Homo sapiens
  CDR3 for beta chain variable domain of TCR clone 288675 (TRBV29-1, TRBJ1-2)
CSVEANRDIANYGYTF

SEQ ID NO: 577351 - protein, 15 aa, Homo sapiens
  CDR3 for alpha chain variable domain of TCR clone 288676 (TRAV21, TRAJ53)
CATLNSGGSNYNLTF

SEQ ID NO: 577352 - protein, 14 aa, Homo sapiens
  CDR3 for beta chain variable domain of TCR clone 288676 (TRBV7-2, TRBJ2-7)
CASRSQGSAYEQYF

SEQ ID NO: 577353 - protein, 12 aa, Homo sapiens
  CDR3 for alpha chain variable domain of TCR clone 288677 (TRAV12-1, TRAJ40)
CVVYSGTYKYIF

SEQ ID NO: 577354 - protein, 13 aa, Homo sapiens
  CDR3 for beta chain variable domain of TCR clone 288677 (TRBV11-2, TRBJ1-5)
CASSFARNQPQHF

SEQ ID NO: 577355 - protein, 16 aa, Homo sapiens
  CDR3 for alpha chain variable domain of TCR clone 288678 (TRAV3, TRAJ10)
CAVRDMRAGGGNKLTF

SEQ ID NO: 577356 - protein, 17 aa, Homo sapiens
  CDR3 for beta chain variable domain of TCR clone 288678 (TRBV6-5, TRBJ2-4)
CASRPTPGQGPKNIQYF

SEQ ID NO: 577357 - protein, 21 aa, Homo sapiens
  CDR3 for alpha chain variable domain of TCR clone 288679 (TRAV13-1, TRAJ37)
CAATPKEIKHRQNNLWARDNF

SEQ ID NO: 577358 - protein, 13 aa, Homo sapiens
  CDR3 for beta chain variable domain of TCR clone 288679 (TRBV20-1, TRBJ2-7)
CSATSEDSYEQYF

SEQ ID NO: 577359 - protein, 15 aa, Homo sapiens
  CDR3 for alpha chain variable domain of TCR clone 288680 (TRAV2, TRAJ9)
CAVEDRGTGGFKTIF

SEQ ID NO: 577360 - protein, 17 aa, Homo sapiens
  CDR3 for beta chain variable domain of TCR clone 288680 (TRBV24-1, TRBJ2-3)
TSVPPVIPGQGRHTLYF

SEQ ID NO: 577361 - protein, 16 aa, Homo sapiens
  CDR3 for alpha chain variable domain of TCR clone 288681 (TRAV8-6, TRAJ28)
CAVTSKPGAGSYQLTF

SEQ ID NO: 577362 - protein, 13 aa, Homo sapiens
  CDR3 for beta chain variable domain of TCR clone 288681 (TRBV10-3, TRBJ2-7)
CASKLAVNYEQYF

SEQ ID NO: 577363 - protein, 16 aa, Homo sapiens
  CDR3 for alpha chain variable domain of TCR clone 288682 (TRAV21, TRAJ37)
CAVRTAGSSNTGKLIF

SEQ ID NO: 577364 - protein, 14 aa, Homo sapiens
  CDR3 for beta chain variable domain of TCR clone 288682 (TRBV2, TRBJ2-1)
CASSVGRSGNEQFF

SEQ ID NO: 577365 - protein, 17 aa, Homo sapiens
  CDR3 for alpha chain variable domain of TCR clone 288683 (TRAV36/DV7, TRAJ52)
CAVAQRAGGTSYGKLTF

SEQ ID NO: 577366 - protein, 14 aa, Homo sapiens
  CDR3 for beta chain variable domain of TCR clone 288683 (TRBV7-2, TRBJ2-7)
CASSTKTSFYEQYF

SEQ ID NO: 577367 - protein, 18 aa, Homo sapiens
  CDR3 for alpha chain variable domain of TCR clone 288684 (TRAV12-3, TRAJ52)
CAMSVGGAGGTSYGKLTF

SEQ ID NO: 577368 - protein, 14 aa, Homo sapiens
  CDR3 for beta chain variable domain of TCR clone 288684 (TRBV7-2, TRBJ2-7)
CDSRSQGAAYEQYF

SEQ ID NO: 577369 - protein, 13 aa, Homo sapiens
  CDR3 for alpha chain variable domain of TCR clone 288685 (TRAV26-1, TRAJ30)
CIVRVESNDKIIL

SEQ ID NO: 577370 - protein, 16 aa, Homo sapiens
  CDR3 for beta chain variable domain of TCR clone 288685 (TRBV13, TRBJ2-3)
CQQPLQGSGGRNTQYF

SEQ ID NO: 577371 - protein, 14 aa, Homo sapiens
  CDR3 for alpha chain variable domain of TCR clone 288686 (TRAV8-4, TRAJ8)
CAVIGKTGFQKLVF

SEQ ID NO: 577372 - protein, 16 aa, Homo sapiens
  CDR3 for beta chain variable domain of TCR clone 288686 (TRBV9, TRBJ2-1)
CASSVEGDGSYNEQFF

SEQ ID NO: 577373 - protein, 14 aa, Homo sapiens
  CDR3 for alpha chain variable domain of TCR clone 288687 (TRAV12-3, TRAJ20)
CAMSARRGDYKLSF

SEQ ID NO: 577374 - protein, 14 aa, Homo sapiens
  CDR3 for beta chain variable domain of TCR clone 288687 (TRBV7-3, TRBJ2-3)
CASSPSTRTDTQYF

SEQ ID NO: 577375 - protein, 11 aa, Homo sapiens
  CDR3 for alpha chain variable domain of TCR clone 288688 (TRAV35, TRAJ30)
CAGERDDKIIF

SEQ ID NO: 577376 - protein, 13 aa, Homo sapiens
  CDR3 for beta chain variable domain of TCR clone 288688 (TRBV15, TRBJ2-5)
CHQRGQGTRDQYF

SEQ ID NO: 577377 - protein, 14 aa, Homo sapiens
  CDR3 for alpha chain variable domain of TCR clone 288689 (TRAV12-3, TRAJ10)
SHLPLTGGGNKLTF

SEQ ID NO: 577378 - protein, 14 aa, Homo sapiens
  CDR3 for beta chain variable domain of TCR clone 288689 (TRBV15, TRBJ2-2)
CATSSGWNTGELFF

SEQ ID NO: 577379 - protein, 14 aa, Homo sapiens
  CDR3 for alpha chain variable domain of TCR clone 288690 (TRAV13-2, TRAJ17)
CAENSKATGNKLTF

SEQ ID NO: 577380 - protein, 20 aa, Homo sapiens
  CDR3 for beta chain variable domain of TCR clone 288690 (TRBV28, TRBJ2-1)
FASTPIGRSPGLAGGNEQFF

SEQ ID NO: 577381 - protein, 11 aa, Homo sapiens
  CDR3 for alpha chain variable domain of TCR clone 288691 (TRAV2, TRAJ13)
CASGGYQKVTF

SEQ ID NO: 577382 - protein, 14 aa, Homo sapiens
  CDR3 for beta chain variable domain of TCR clone 288691 (TRBV28, TRBJ2-7)
CASSLYGGTYEQYF

SEQ ID NO: 577383 - protein, 15 aa, Homo sapiens
  CDR3 for alpha chain variable domain of TCR clone 288692 (TRAV3, TRAJ4)
CAVRDGTGGYNKLIF

SEQ ID NO: 577384 - protein, 11 aa, Homo sapiens
  CDR3 for beta chain variable domain of TCR clone 288692 (TRBV27, TRBJ2-2)
CASSSRGIEHR

SEQ ID NO: 577385 - protein, 14 aa, Homo sapiens
  CDR3 for alpha chain variable domain of TCR clone 288693 (TRAV38-1, TRAJ40)
CALRSTSGTYKYIF

SEQ ID NO: 577386 - protein, 14 aa, Homo sapiens
  CDR3 for beta chain variable domain of TCR clone 288693 (TRBV25-1, TRBJ1-1)
CASTHLGGNIEAFF

SEQ ID NO: 577387 - protein, 12 aa, Homo sapiens
  CDR3 for alpha chain variable domain of TCR clone 288694 (TRAV13-1, TRAJ9)
CSSHTGGFKTIF

SEQ ID NO: 577388 - protein, 18 aa, Homo sapiens
  CDR3 for beta chain variable domain of TCR clone 288694 (TRBV11-2, TRBJ2-3)
CASSLGGASRGAPNTQYF

SEQ ID NO: 577389 - protein, 17 aa, Homo sapiens
  CDR3 for alpha chain variable domain of TCR clone 288695 (TRAV13-1, TRAJ52)
CAAGRNAGGTSYRKVTF

SEQ ID NO: 577390 - protein, 13 aa, Homo sapiens
  CDR3 for beta chain variable domain of TCR clone 288695 (TRBV7-2, TRBJ1-1)
CASNLKGAKVAFF

SEQ ID NO: 577391 - protein, 14 aa, Homo sapiens
  CDR3 for alpha chain variable domain of TCR clone 288696 (TRAV20, TRAJ10)
CAVRVEGGGNKLTF

SEQ ID NO: 577392 - protein, 17 aa, Homo sapiens
  CDR3 for beta chain variable domain of TCR clone 288696 (TRBV11-2, TRBJ2-1)
CASSLYPPGVEYNEQFF

SEQ ID NO: 577393 - protein, 13 aa, Homo sapiens
  CDR3 for alpha chain variable domain of TCR clone 288697 (TRAV12-2, TRAJ37)
CAGGSGNTSKLIF

SEQ ID NO: 577394 - protein, 18 aa, Homo sapiens
  CDR3 for beta chain variable domain of TCR clone 288697 (TRBV28, TRBJ2-1)
CASSSTSGRANSYNEQFF

SEQ ID NO: 577395 - protein, 16 aa, Homo sapiens
  CDR3 for alpha chain variable domain of TCR clone 288698 (TRAV3, TRAJ37)
CAVRPHGSGNTGKLIF

SEQ ID NO: 577396 - protein, 15 aa, Homo sapiens
  CDR3 for beta chain variable domain of TCR clone 288698 (TRBV20-1, TRBJ2-7)
CSARARVSGMDKQYF

SEQ ID NO: 577397 - protein, 13 aa, Homo sapiens
  CDR3 for alpha chain variable domain of TCR clone 288699 (TRAV26-1, TRAJ36)
CIVVGTGANNIFF

SEQ ID NO: 577398 - protein, 16 aa, Homo sapiens
  CDR3 for beta chain variable domain of TCR clone 288699 (TRBV10-3, TRBJ2-1)
CAISGVGDGGGGEQFF

SEQ ID NO: 577399 - protein, 14 aa, Homo sapiens
  CDR3 for alpha chain variable domain of TCR clone 288700 (TRAV13-1, TRAJ44)
CAAKATGNASKLTF

SEQ ID NO: 577400 - protein, 14 aa, Homo sapiens
  CDR3 for beta chain variable domain of TCR clone 288700 (TRBV19, TRBJ2-2)
CASSTLHRSGELFF

SEQ ID NO: 577401 - protein, 15 aa, Homo sapiens
  CDR3 for alpha chain variable domain of TCR clone 288701 (TRAV8-3, TRAJ45)
CASSYSGVGADGLTF

SEQ ID NO: 577402 - protein, 13 aa, Homo sapiens
  CDR3 for beta chain variable domain of TCR clone 288701 (TRBV12-4, TRBJ2-3)
CASSSPLGGTQYF

SEQ ID NO: 577403 - protein, 13 aa, Homo sapiens
  CDR3 for alpha chain variable domain of TCR clone 288702 (TRAV21, TRAJ27)
FAALPGSAGKSTF

SEQ ID NO: 577404 - protein, 14 aa, Homo sapiens
  CDR3 for beta chain variable domain of TCR clone 288702 (TRBV7-6, TRBJ2-3)
CASSLGTVTDTQYF

SEQ ID NO: 577405 - protein, 15 aa, Homo sapiens
  CDR3 for alpha chain variable domain of TCR clone 288703 (TRAV23/DV6, TRAJ18)
CAARYRGSTLGRLYF

SEQ ID NO: 577406 - protein, 15 aa, Homo sapiens
  CDR3 for beta chain variable domain of TCR clone 288703 (TRBV27, TRBJ2-1)
CASSNGGGSSNEQFF

SEQ ID NO: 577407 - protein, 15 aa, Homo sapiens
  CDR3 for alpha chain variable domain of TCR clone 288704 (TRAV8-3, TRAJ45)
CASSYSGGGADGLTF

SEQ ID NO: 577408 - protein, 19 aa, Homo sapiens
  CDR3 for beta chain variable domain of TCR clone 288704 (TRBV7-9, TRBJ2-2)
CASSTRPGAKTTNTGELFF

SEQ ID NO: 577409 - protein, 11 aa, Homo sapiens
  CDR3 for alpha chain variable domain of TCR clone 288705 (TRAV3, TRAJ21)
CAVCNFNKFYF

SEQ ID NO: 577410 - protein, 15 aa, Homo sapiens
  CDR3 for beta chain variable domain of TCR clone 288705 (TRBV19, TRBJ1-2)
CASSVGQVLNYGYTF

SEQ ID NO: 577411 - protein, 11 aa, Homo sapiens
  CDR3 for alpha chain variable domain of TCR clone 288706 (TRAV3, TRAJ21)
CAVGNFNKFYL

SEQ ID NO: 577412 - protein, 14 aa, Homo sapiens
  CDR3 for beta chain variable domain of TCR clone 288706 (TRBV7-2, TRBJ2-7)
CASSPKTSFYEQYF

SEQ ID NO: 577413 - protein, 14 aa, Homo sapiens
  CDR3 for alpha chain variable domain of TCR clone 288707 (TRAV35, TRAJ33)
CAGSSQDSNYQLNW

SEQ ID NO: 577414 - protein, 15 aa, Homo sapiens
  CDR3 for beta chain variable domain of TCR clone 288707 (TRBV5-1, TRBJ1-4)
FAPAAWKDGNEKLFF

SEQ ID NO: 577415 - protein, 16 aa, Homo sapiens
  CDR3 for alpha chain variable domain of TCR clone 288708 (TRAV30, TRAJ24)
CGTEIVDADCWGKFQF

SEQ ID NO: 577416 - protein, 13 aa, Homo sapiens
  CDR3 for beta chain variable domain of TCR clone 288708 (TRBV4-2, TRBJ1-1)
CASSQAGNTEAFF

SEQ ID NO: 577417 - protein, 17 aa, Homo sapiens
  CDR3 for alpha chain variable domain of TCR clone 288709 (TRAV3, TRAJ42)
CAVRDRDYGGSQGNLIF

SEQ ID NO: 577418 - protein, 13 aa, Homo sapiens
  CDR3 for beta chain variable domain of TCR clone 288709 (TRBV7-2, TRBJ1-6)
CASSLKFDSPLHF

SEQ ID NO: 577419 - protein, 14 aa, Homo sapiens
  CDR3 for alpha chain variable domain of TCR clone 288710 (TRAV21, TRAJ35)
WAVMPIGFGNVLHC

SEQ ID NO: 577420 - protein, 12 aa, Homo sapiens
  CDR3 for beta chain variable domain of TCR clone 288710 (TRBV7-9, TRBJ2-7)
CASSIKREEQYF

SEQ ID NO: 577421 - protein, 13 aa, Homo sapiens
  CDR3 for alpha chain variable domain of TCR clone 288711 (TRAV21, TRAJ27)
CAARPGNAGKSTF

SEQ ID NO: 577422 - protein, 12 aa, Homo sapiens
  CDR3 for beta chain variable domain of TCR clone 288711 (TRBV6-1, TRBJ2-5)
CASSEGRETQYF

SEQ ID NO: 577423 - protein, 15 aa, Homo sapiens
  CDR3 for alpha chain variable domain of TCR clone 288712 (TRAV13-1, TRAJ52)
CAATSPRTSSGKLTF

SEQ ID NO: 577424 - protein, 12 aa, Homo sapiens
  CDR3 for beta chain variable domain of TCR clone 288712 (TRBV7-8, TRBJ2-7)
CASSLGDREQYF

SEQ ID NO: 577425 - protein, 15 aa, Homo sapiens
  CDR3 for alpha chain variable domain of TCR clone 288713 (TRAV26-1, TRAJ29)
CIVRVEETGNTPLVF

SEQ ID NO: 577426 - protein, 15 aa, Homo sapiens
  CDR3 for beta chain variable domain of TCR clone 288713 (TRBV7-9, TRBJ1-5)
CASSQGHQPNQPQHF

SEQ ID NO: 577427 - protein, 15 aa, Homo sapiens
  CDR3 for alpha chain variable domain of TCR clone 288714 (TRAV17, TRAJ23)
CSTDAEDNQGGKLSF

SEQ ID NO: 577428 - protein, 12 aa, Homo sapiens
  CDR3 for beta chain variable domain of TCR clone 288714 (TRBV2, TRBJ2-1)
CAKREGYNKQFF

SEQ ID NO: 577429 - protein, 13 aa, Homo sapiens
  CDR3 for alpha chain variable domain of TCR clone 288715 (TRAV12-3, TRAJ9)
CAMRNTGGFKTIF

SEQ ID NO: 577430 - protein, 14 aa, Homo sapiens
  CDR3 for beta chain variable domain of TCR clone 288715 (TRBV11-2, TRBJ2-7)
CASSSSGEGYEQYF

SEQ ID NO: 577431 - protein, 14 aa, Homo sapiens
  CDR3 for alpha chain variable domain of TCR clone 288716 (TRAV12-3, TRAJ10)
SHLPLTGGGNKLTF

SEQ ID NO: 577432 - protein, 14 aa, Homo sapiens
  CDR3 for beta chain variable domain of TCR clone 288716 (TRBV4-2, TRBJ2-1)
CASGLGRAYNEQFF

SEQ ID NO: 577433 - protein, 15 aa, Homo sapiens
  CDR3 for alpha chain variable domain of TCR clone 288717 (TRAV4, TRAJ39)
CLVGPHNNAGNMLTF

SEQ ID NO: 577434 - protein, 14 aa, Homo sapiens
  CDR3 for beta chain variable domain of TCR clone 288717 (TRBV19, TRBJ2-7)
CASNFRDTFTGMYF

SEQ ID NO: 577435 - protein, 15 aa, Homo sapiens
  CDR3 for alpha chain variable domain of TCR clone 288718 (TRAV21, TRAJ53)
CATLNSGGSNYKLTF

SEQ ID NO: 577436 - protein, 15 aa, Homo sapiens
  CDR3 for beta chain variable domain of TCR clone 288718 (TRBV11-3, TRBJ2-3)
CASSAGAVVTNTQYF

SEQ ID NO: 577437 - protein, 13 aa, Homo sapiens
  CDR3 for alpha chain variable domain of TCR clone 288719 (TRAV1-2, TRAJ9)
CAALNTGGFKTIF

SEQ ID NO: 577438 - protein, 13 aa, Homo sapiens
  CDR3 for beta chain variable domain of TCR clone 288719 (TRBV19, TRBJ1-2)
CASSVPGQDSYSF

SEQ ID NO: 577439 - protein, 12 aa, Homo sapiens
  CDR3 for alpha chain variable domain of TCR clone 288720 (TRAV3, TRAJ20)
CAVRDPDYKLSF

SEQ ID NO: 577440 - protein, 15 aa, Homo sapiens
  CDR3 for beta chain variable domain of TCR clone 288720 (TRBV28, TRBJ2-1)
CASSIIAGGRSEQFF

SEQ ID NO: 577441 - protein, 12 aa, Homo sapiens
  CDR3 for alpha chain variable domain of TCR clone 288721 (TRAV30, TRAJ39)
CGRGNAGNMLTF

SEQ ID NO: 577442 - protein, 14 aa, Homo sapiens
  CDR3 for beta chain variable domain of TCR clone 288721 (TRBV7-6, TRBJ2-3)
CASSLGTVTDTQYF

SEQ ID NO: 577443 - protein, 10 aa, Homo sapiens
  CDR3 for alpha chain variable domain of TCR clone 288722 (TRAV16, TRAJ22)
PAMYLRQLTF

SEQ ID NO: 577444 - protein, 15 aa, Homo sapiens
  CDR3 for beta chain variable domain of TCR clone 288722 (TRBV7-9, TRBJ1-6)
CASSSPGCGNSPLHF

SEQ ID NO: 577445 - protein, 16 aa, Homo sapiens
  CDR3 for alpha chain variable domain of TCR clone 288723 (TRAV16, TRAJ4)
CALSRIFSGGYNKLIF

SEQ ID NO: 577446 - protein, 16 aa, Homo sapiens
  CDR3 for beta chain variable domain of TCR clone 288723 (TRBV24-1, TRBJ2-3)
CATSNPGTGATDTQYF

SEQ ID NO: 577447 - protein, 14 aa, Homo sapiens
  CDR3 for alpha chain variable domain of TCR clone 288724 (TRAV12-2, TRAJ17)
CAVLLKAAGNKLTF

SEQ ID NO: 577448 - protein, 14 aa, Homo sapiens
  CDR3 for beta chain variable domain of TCR clone 288724 (TRBV15, TRBJ1-2)
CATSRDFDRGGYTF

SEQ ID NO: 577449 - protein, 13 aa, Homo sapiens
  CDR3 for alpha chain variable domain of TCR clone 288725 (TRAV21, TRAJ27)
CAARPGNAGKSTF

SEQ ID NO: 577450 - protein, 13 aa, Homo sapiens
  CDR3 for beta chain variable domain of TCR clone 288725 (TRBV7-6, TRBJ2-3)
CASSLGTVTYAVF

SEQ ID NO: 577451 - protein, 15 aa, Homo sapiens
  CDR3 for alpha chain variable domain of TCR clone 288726 (TRAV21, TRAJ24)
CAARSSTDSWGKLQF

SEQ ID NO: 577452 - protein, 15 aa, Homo sapiens
  CDR3 for beta chain variable domain of TCR clone 288726 (TRBV12-4, TRBJ1-5)
CASTQGTGPLQPQHF

SEQ ID NO: 577453 - protein, 14 aa, Homo sapiens
  CDR3 for alpha chain variable domain of TCR clone 288727 (TRAV1-2, TRAJ16)
CAVNRFSDGQKLLF

SEQ ID NO: 577454 - protein, 15 aa, Homo sapiens
  CDR3 for beta chain variable domain of TCR clone 288727 (TRBV19, TRBJ2-1)
CASSPPGQGPNEQFF

SEQ ID NO: 577455 - protein, 14 aa, Homo sapiens
  CDR3 for alpha chain variable domain of TCR clone 288728 (TRAV13-1, TRAJ9)
CAASALTGGFKTIF

SEQ ID NO: 577456 - protein, 17 aa, Homo sapiens
  CDR3 for beta chain variable domain of TCR clone 288728 (TRBV28, TRBJ2-5)
CASSRQGGLAGAETQYF

SEQ ID NO: 577457 - protein, 13 aa, Homo sapiens
  CDR3 for alpha chain variable domain of TCR clone 288729 (TRAV24, TRAJ15)
CAFKDQAGTDLIF

SEQ ID NO: 577458 - protein, 14 aa, Homo sapiens
  CDR3 for beta chain variable domain of TCR clone 288729 (TRBV2, TRBJ2-1)
CASSLSGSQGEQFF

SEQ ID NO: 577459 - protein, 11 aa, Homo sapiens
  CDR3 for alpha chain variable domain of TCR clone 288730 (TRAV1-2, TRAJ31)
CAVNNNARLMF

SEQ ID NO: 577460 - protein, 13 aa, Homo sapiens
  CDR3 for beta chain variable domain of TCR clone 288730 (TRBV6-6, TRBJ1-5)
CASSRGSNQPQHF

SEQ ID NO: 577461 - protein, 14 aa, Homo sapiens
  CDR3 for alpha chain variable domain of TCR clone 288731 (TRAV8-3, TRAJ4)
CAVCADGGYNKLIF

SEQ ID NO: 577462 - protein, 15 aa, Homo sapiens
  CDR3 for beta chain variable domain of TCR clone 288731 (TRBV6-5, TRBJ2-1)
CASSYDAGAGNEQFF

SEQ ID NO: 577463 - protein, 13 aa, Homo sapiens
  CDR3 for alpha chain variable domain of TCR clone 288732 (TRAV8-1, TRAJ39)
CAGLNNAGNMLTS

SEQ ID NO: 577464 - protein, 17 aa, Homo sapiens
  CDR3 for beta chain variable domain of TCR clone 288732 (TRBV19, TRBJ2-3)
CASSIDPAGGGTDTQYF

SEQ ID NO: 577465 - protein, 16 aa, Homo sapiens
  CDR3 for alpha chain variable domain of TCR clone 288733 (TRAV8-3, TRAJ44)
CAVGASNTGTASKLTF

SEQ ID NO: 577466 - protein, 14 aa, Homo sapiens
  CDR3 for beta chain variable domain of TCR clone 288733 (TRBV7-8, TRBJ2-7)
CASSPGLADYEQYF

SEQ ID NO: 577467 - protein, 17 aa, Homo sapiens
  CDR3 for alpha chain variable domain of TCR clone 288734 (TRAV3, TRAJ37)
CAVRDMRTPGNTGKLIF

SEQ ID NO: 577468 - protein, 14 aa, Homo sapiens
  CDR3 for beta chain variable domain of TCR clone 288734 (TRBV7-2, TRBJ2-7)
CASSPKTSCYEQYF

SEQ ID NO: 577469 - protein, 12 aa, Homo sapiens
  CDR3 for alpha chain variable domain of TCR clone 288735 (TRAV3, TRAJ20)
CAVRDGDYKLSF

SEQ ID NO: 577470 - protein, 13 aa, Homo sapiens
  CDR3 for beta chain variable domain of TCR clone 288735 (TRBV9, TRBJ2-1)
CASSVGQGGERFF

SEQ ID NO: 577471 - protein, 18 aa, Homo sapiens
  CDR3 for alpha chain variable domain of TCR clone 288736 (TRAV16, TRAJ52)
CALSGVDAGGTSHGKLTF

SEQ ID NO: 577472 - protein, 15 aa, Homo sapiens
  CDR3 for beta chain variable domain of TCR clone 288736 (TRBV11-3, TRBJ2-3)
CASSAGTVVTNTQYF

SEQ ID NO: 577473 - protein, 12 aa, Homo sapiens
  CDR3 for alpha chain variable domain of TCR clone 288737 (TRAV21, TRAJ31)
CAVWGNNARLMF

SEQ ID NO: 577474 - protein, 16 aa, Homo sapiens
  CDR3 for beta chain variable domain of TCR clone 288737 (TRBV4-2, TRBJ2-1)
CASSQETATPYNEQFF

SEQ ID NO: 577475 - protein, 14 aa, Homo sapiens
  CDR3 for alpha chain variable domain of TCR clone 288738 (TRAV12-3, TRAJ10)
SHLPLTGGGNKLSF

SEQ ID NO: 577476 - protein, 16 aa, Homo sapiens
  CDR3 for beta chain variable domain of TCR clone 288738 (TRBV5-8, TRBJ2-2)
CASSLINPGGAGELFF

SEQ ID NO: 577477 - protein, 11 aa, Homo sapiens
  CDR3 for alpha chain variable domain of TCR clone 288739 (TRAV12-3, TRAJ27)
CAMANEGKSTF

SEQ ID NO: 577478 - protein, 13 aa, Homo sapiens
  CDR3 for beta chain variable domain of TCR clone 288739 (TRBV20-1, TRBJ1-1)
CSARVGGNTEAFV

SEQ ID NO: 577479 - protein, 16 aa, Homo sapiens
  CDR3 for alpha chain variable domain of TCR clone 288740 (TRAV16, TRAJ4)
CALSRMFSGGYNKLIF

SEQ ID NO: 577480 - protein, 14 aa, Homo sapiens
  CDR3 for beta chain variable domain of TCR clone 288740 (TRBV4-2, TRBJ2-1)
CASGLDRAYNEQLF

SEQ ID NO: 577481 - protein, 14 aa, Homo sapiens
  CDR3 for alpha chain variable domain of TCR clone 288741 (TRAV9-2, TRAJ39)
CALYIYNAGNMLTF

SEQ ID NO: 577482 - protein, 16 aa, Homo sapiens
  CDR3 for beta chain variable domain of TCR clone 288741 (TRBV11-2, TRBJ1-2)
CASSLDRGGNNYGYTF

SEQ ID NO: 577483 - protein, 16 aa, Homo sapiens
  CDR3 for alpha chain variable domain of TCR clone 288742 (TRAV27, TRAJ53)
CAAPEGSGGNNYKLTF

SEQ ID NO: 577484 - protein, 14 aa, Homo sapiens
  CDR3 for beta chain variable domain of TCR clone 288742 (TRBV4-3, TRBJ1-5)
CASSQGGQGWPQHF

SEQ ID NO: 577485 - protein, 14 aa, Homo sapiens
  CDR3 for alpha chain variable domain of TCR clone 288743 (TRAV12-2, TRAJ13)
CAVKKAGGYQKVTF

SEQ ID NO: 577486 - protein, 15 aa, Homo sapiens
  CDR3 for beta chain variable domain of TCR clone 288743 (TRBV27, TRBJ2-1)
CASSNGGWSSNEQFF

SEQ ID NO: 577487 - protein, 12 aa, Homo sapiens
  CDR3 for alpha chain variable domain of TCR clone 288744 (TRAV12-2, TRAJ4)
GWPEGGYNKLIF

SEQ ID NO: 577488 - protein, 13 aa, Homo sapiens
  CDR3 for beta chain variable domain of TCR clone 288744 (TRBV7-2, TRBJ2-2)
CASSSVRAGELFF

SEQ ID NO: 577489 - protein, 17 aa, Homo sapiens
  CDR3 for alpha chain variable domain of TCR clone 288745 (TRAV3, TRAJ6)
CAVRDGPRAGGSYIPTF

SEQ ID NO: 577490 - protein, 16 aa, Homo sapiens
  CDR3 for beta chain variable domain of TCR clone 288745 (TRBV7-9, TRBJ1-3)
CASSQNSGLRMGTIYF

SEQ ID NO: 577491 - protein, 16 aa, Homo sapiens
  CDR3 for alpha chain variable domain of TCR clone 288746 (TRAV12-3, TRAJ53)
CAMSPGSGGSNYKLTF

SEQ ID NO: 577492 - protein, 13 aa, Homo sapiens
  CDR3 for beta chain variable domain of TCR clone 288746 (TRBV7-3, TRBJ1-1)
CASSQDWGSEAFF

SEQ ID NO: 577493 - protein, 14 aa, Homo sapiens
  CDR3 for alpha chain variable domain of TCR clone 288747 (TRAV16, TRAJ32)
CALKSGGATNKLIF

SEQ ID NO: 577494 - protein, 19 aa, Homo sapiens
  CDR3 for beta chain variable domain of TCR clone 288747 (TRBV2, TRBJ2-2)
CASSQPGLAGGGNTGELFF

SEQ ID NO: 577495 - protein, 14 aa, Homo sapiens
  CDR3 for alpha chain variable domain of TCR clone 288748 (TRAV2, TRAJ9)
CAVEDRSGGFKTIF

SEQ ID NO: 577496 - protein, 16 aa, Homo sapiens
  CDR3 for beta chain variable domain of TCR clone 288748 (TRBV20-1, TRBJ2-2)
CSARSAGGLGTGELFF

SEQ ID NO: 577497 - protein, 16 aa, Homo sapiens
  CDR3 for alpha chain variable domain of TCR clone 288749 (TRAV30, TRAJ24)
CGTEIVDAESWGKFQF

SEQ ID NO: 577498 - protein, 15 aa, Homo sapiens
  CDR3 for beta chain variable domain of TCR clone 288749 (TRBV5-4, TRBJ2-1)
CASSFSGGSYNEQFF

SEQ ID NO: 577499 - protein, 14 aa, Homo sapiens
  CDR3 for alpha chain variable domain of TCR clone 288750 (TRAV3, TRAJ36)
CAVRDGTGANNLFF

SEQ ID NO: 577500 - protein, 16 aa, Homo sapiens
  CDR3 for beta chain variable domain of TCR clone 288750 (TRBV7-3, TRBJ2-5)
CASIQPGGSVQESQYF

SEQ ID NO: 577501 - protein, 13 aa, Homo sapiens
  CDR3 for alpha chain variable domain of TCR clone 288751 (TRAV13-1, TRAJ39)
CSKYSNAGNMLTF

SEQ ID NO: 577502 - protein, 12 aa, Homo sapiens
  CDR3 for beta chain variable domain of TCR clone 288751 (TRBV12-4, TRBJ2-1)
CASSLVRVEQFF

SEQ ID NO: 577503 - protein, 17 aa, Homo sapiens
  CDR3 for alpha chain variable domain of TCR clone 288752 (TRAV8-6, TRAJ52)
CAVTRNAGGTSYGKLTF

SEQ ID NO: 577504 - protein, 16 aa, Homo sapiens
  CDR3 for beta chain variable domain of TCR clone 288752 (TRBV7-6, TRBJ2-7)
CASSGGTGALSYEQYF

SEQ ID NO: 577505 - protein, 13 aa, Homo sapiens
  CDR3 for alpha chain variable domain of TCR clone 288753 (TRAV26-1, TRAJ34)
CIVRDHNTDKLIF

SEQ ID NO: 577506 - protein, 15 aa, Homo sapiens
  CDR3 for beta chain variable domain of TCR clone 288753 (TRBV4-1, TRBJ2-7)
CASSQEWGPSYEQYF

SEQ ID NO: 577507 - protein, 11 aa, Homo sapiens
  CDR3 for alpha chain variable domain of TCR clone 288754 (TRAV3, TRAJ17)
PRGAAGNKLTF

SEQ ID NO: 577508 - protein, 15 aa, Homo sapiens
  CDR3 for beta chain variable domain of TCR clone 288754 (TRBV19, TRBJ2-1)
CASSSPGVHLDEQFF

SEQ ID NO: 577509 - protein, 11 aa, Homo sapiens
  CDR3 for alpha chain variable domain of TCR clone 288755 (TRAV17, TRAJ36)
CAPTGANNLFF

SEQ ID NO: 577510 - protein, 14 aa, Homo sapiens
  CDR3 for beta chain variable domain of TCR clone 288755 (TRBV20-1, TRBJ2-3)
CSARGGTSTDTQYF

SEQ ID NO: 577511 - protein, 17 aa, Homo sapiens
  CDR3 for alpha chain variable domain of TCR clone 288756 (TRAV8-6, TRAJ58)
CAVSSWVGATSGPRLTL

SEQ ID NO: 577512 - protein, 15 aa, Homo sapiens
  CDR3 for beta chain variable domain of TCR clone 288756 (TRBV6-5, TRBJ2-1)
CASSYDAGAGNEQFF

SEQ ID NO: 577513 - protein, 14 aa, Homo sapiens
  CDR3 for alpha chain variable domain of TCR clone 288757 (TRAV35, TRAJ50)
CAGHRKTSYDKVIF

SEQ ID NO: 577514 - protein, 13 aa, Homo sapiens
  CDR3 for beta chain variable domain of TCR clone 288757 (TRBV7-7, TRBJ2-3)
CASSLSRADTKDF

SEQ ID NO: 577515 - protein, 12 aa, Homo sapiens
  CDR3 for alpha chain variable domain of TCR clone 288758 (TRAV12-2, TRAJ29)
CAVDSGNTPLVF

SEQ ID NO: 577516 - protein, 13 aa, Homo sapiens
  CDR3 for beta chain variable domain of TCR clone 288758 (TRBV11-2, TRBJ1-1)
CASSVETSTEAFF

SEQ ID NO: 577517 - protein, 12 aa, Homo sapiens
  CDR3 for alpha chain variable domain of TCR clone 288759 (TRAV4, TRAJ34)
CLVGEGTGKLIF

SEQ ID NO: 577518 - protein, 13 aa, Homo sapiens
  CDR3 for beta chain variable domain of TCR clone 288759 (TRBV2, TRBJ2-7)
CATSMGLVYEQYF

SEQ ID NO: 577519 - protein, 21 aa, Homo sapiens
  CDR3 for alpha chain variable domain of TCR clone 288760 (TRAV1-1, TRAJ6)
CAVWREEATSLHLEEEPALLF

SEQ ID NO: 577520 - protein, 15 aa, Homo sapiens
  CDR3 for beta chain variable domain of TCR clone 288760 (TRBV6-6, TRBJ2-1)
CATRQGVSSYNEQFF

SEQ ID NO: 577521 - protein, 13 aa, Homo sapiens
  CDR3 for alpha chain variable domain of TCR clone 288761 (TRAV16, TRAJ28)
CALTGAGSYQLTF

SEQ ID NO: 577522 - protein, 16 aa, Homo sapiens
  CDR3 for beta chain variable domain of TCR clone 288761 (TRBV28, TRBJ1-5)
CASSLTGQGWNQPQHC

SEQ ID NO: 577523 - protein, 12 aa, Homo sapiens
  CDR3 for alpha chain variable domain of TCR clone 288762 (TRAV12-3, TRAJ4)
CAMTGAGTRLAI

SEQ ID NO: 577524 - protein, 14 aa, Homo sapiens
  CDR3 for beta chain variable domain of TCR clone 288762 (TRBV10-3, TRBJ1-1)
CAISDTDRGVEAFF

SEQ ID NO: 577525 - protein, 15 aa, Homo sapiens
  CDR3 for alpha chain variable domain of TCR clone 288763 (TRAV3, TRAJ42)
CAVRGGTGSQGNLIF

SEQ ID NO: 577526 - protein, 14 aa, Homo sapiens
  CDR3 for beta chain variable domain of TCR clone 288763 (TRBV19, TRBJ1-2)
CASGSLFASDVYTF

SEQ ID NO: 577527 - protein, 12 aa, Homo sapiens
  CDR3 for alpha chain variable domain of TCR clone 288764 (TRAV12-3, TRAJ4)
CAMTGAGTRLAV

SEQ ID NO: 577528 - protein, 14 aa, Homo sapiens
  CDR3 for beta chain variable domain of TCR clone 288764 (TRBV10-3, TRBJ1-1)
CAISDIDRGVEAFF

SEQ ID NO: 577529 - protein, 17 aa, Homo sapiens
  CDR3 for alpha chain variable domain of TCR clone 288765 (TRAV26-1, TRAJ28)
CIVRVPDSGAGSYQLTF

SEQ ID NO: 577530 - protein, 14 aa, Homo sapiens
  CDR3 for beta chain variable domain of TCR clone 288765 (TRBV19, TRBJ2-1)
CASPTFVLSGEQFF

SEQ ID NO: 577531 - protein, 11 aa, Homo sapiens
  CDR3 for alpha chain variable domain of TCR clone 288766 (TRAV2, TRAJ33)
CAVESNSQLIW

SEQ ID NO: 577532 - protein, 15 aa, Homo sapiens
  CDR3 for beta chain variable domain of TCR clone 288766 (TRBV19, TRBJ1-1)
CASTSGQIQDTEAFF

SEQ ID NO: 577533 - protein, 12 aa, Homo sapiens
  CDR3 for alpha chain variable domain of TCR clone 288767 (TRAV36/DV7, TRAJ37)
CACYGNTGKLIF

SEQ ID NO: 577534 - protein, 15 aa, Homo sapiens
  CDR3 for beta chain variable domain of TCR clone 288767 (TRBV19, TRBJ2-7)
CASSIGRTFSYEQYF

SEQ ID NO: 577535 - protein, 16 aa, Homo sapiens
  CDR3 for alpha chain variable domain of TCR clone 288768 (TRAV3, TRAJ21)
CSVRDIERGNFNKFYF

SEQ ID NO: 577536 - protein, 14 aa, Homo sapiens
  CDR3 for beta chain variable domain of TCR clone 288768 (TRBV19, TRBJ1-5)
CASSKMTGPQPQHF

SEQ ID NO: 577537 - protein, 15 aa, Homo sapiens
  CDR3 for alpha chain variable domain of TCR clone 288769 (TRAV3, TRAJ3)
CAVRDMSSRASKITF

SEQ ID NO: 577538 - protein, 14 aa, Homo sapiens
  CDR3 for beta chain variable domain of TCR clone 288769 (TRBV19, TRBJ2-1)
CASPTFVLSGEQFF

SEQ ID NO: 577539 - protein, 16 aa, Homo sapiens
  CDR3 for alpha chain variable domain of TCR clone 288770 (TRAV17, TRAJ28)
CTTDEYSGAGRYQLTF

SEQ ID NO: 577540 - protein, 13 aa, Homo sapiens
  CDR3 for beta chain variable domain of TCR clone 288770 (TRBV7-9, TRBJ1-2)
CASRTGPNYGYTF

SEQ ID NO: 577541 - protein, 15 aa, Homo sapiens
  CDR3 for alpha chain variable domain of TCR clone 288771 (TRAV2, TRAJ44)
CAVEAYTGTASKLTF

SEQ ID NO: 577542 - protein, 17 aa, Homo sapiens
  CDR3 for beta chain variable domain of TCR clone 288771 (TRBV12-4, TRBJ2-1)
CASSPGLAGGRIYEQFF

SEQ ID NO: 577543 - protein, 13 aa, Homo sapiens
  CDR3 for alpha chain variable domain of TCR clone 288772 (TRAV17, TRAJ9)
CATDGTGGFKTIF

SEQ ID NO: 577544 - protein, 11 aa, Homo sapiens
  CDR3 for beta chain variable domain of TCR clone 288772 (TRBV12-4, TRBJ2-3)
CASTATDTQYF

SEQ ID NO: 577545 - protein, 14 aa, Homo sapiens
  CDR3 for alpha chain variable domain of TCR clone 288773 (TRAV13-1, TRAJ44)
CAAKATGTASKLTF

SEQ ID NO: 577546 - protein, 16 aa, Homo sapiens
  CDR3 for beta chain variable domain of TCR clone 288773 (TRBV7-8, TRBJ2-6)
CASRVGDSSGANVLTF

SEQ ID NO: 577547 - protein, 15 aa, Homo sapiens
  CDR3 for alpha chain variable domain of TCR clone 288774 (TRAV12-3, TRAJ49)
CAMAVTPNTGNQFYS

SEQ ID NO: 577548 - protein, 18 aa, Homo sapiens
  CDR3 for beta chain variable domain of TCR clone 288774 (TRBV4-1, TRBJ1-5)
CASSPDPRGQGLNQPQHF

SEQ ID NO: 577549 - protein, 15 aa, Homo sapiens
  CDR3 for alpha chain variable domain of TCR clone 288775 (TRAV8-3, TRAJ11)
CAVGLLNSGYSTLTF

SEQ ID NO: 577550 - protein, 14 aa, Homo sapiens
  CDR3 for beta chain variable domain of TCR clone 288775 (TRBV4-1, TRBJ2-5)
CASSRSGSGETKYF

SEQ ID NO: 577551 - protein, 15 aa, Homo sapiens
  CDR3 for alpha chain variable domain of TCR clone 288776 (TRAV8-3, TRAJ45)
CASSYSGGGADGLPS

SEQ ID NO: 577552 - protein, 13 aa, Homo sapiens
  CDR3 for beta chain variable domain of TCR clone 288776 (TRBV10-3, TRBJ2-7)
CASKLAVNYEQYF

SEQ ID NO: 577553 - protein, 14 aa, Homo sapiens
  CDR3 for alpha chain variable domain of TCR clone 288777 (TRAV16, TRAJ15)
CALSFNQAGTALIF

SEQ ID NO: 577554 - protein, 16 aa, Homo sapiens
  CDR3 for beta chain variable domain of TCR clone 288777 (TRBV9, TRBJ2-7)
CASSAGPDGSPYEQYF

SEQ ID NO: 577555 - protein, 16 aa, Homo sapiens
  CDR3 for alpha chain variable domain of TCR clone 288778 (TRAV16, TRAJ4)
CALSRMFSGGDNKLIF

SEQ ID NO: 577556 - protein, 14 aa, Homo sapiens
  CDR3 for beta chain variable domain of TCR clone 288778 (TRBV4-1, TRBJ2-2)
CASSQAVNTGELFF

SEQ ID NO: 577557 - protein, 17 aa, Homo sapiens
  CDR3 for alpha chain variable domain of TCR clone 288779 (TRAV36/DV7, TRAJ52)
CAVAQRAGGTSYGKLTF

SEQ ID NO: 577558 - protein, 13 aa, Homo sapiens
  CDR3 for beta chain variable domain of TCR clone 288779 (TRBV2, TRBJ2-3)
CASILAGGQGQYF

SEQ ID NO: 577559 - protein, 11 aa, Homo sapiens
  CDR3 for alpha chain variable domain of TCR clone 288780 (TRAV12-1, TRAJ15)
CVVNAGTALIF

SEQ ID NO: 577560 - protein, 13 aa, Homo sapiens
  CDR3 for beta chain variable domain of TCR clone 288780 (TRBV7-9, TRBJ1-2)
CASSLKQNYGYTF

SEQ ID NO: 577561 - protein, 13 aa, Homo sapiens
  CDR3 for alpha chain variable domain of TCR clone 288781 (TRAV26-1, TRAJ34)
CIVRPWITDKRIF

SEQ ID NO: 577562 - protein, 14 aa, Homo sapiens
  CDR3 for beta chain variable domain of TCR clone 288781 (TRBV7-2, TRBJ2-7)
CASRSQGAAYEQYF

SEQ ID NO: 577563 - protein, 12 aa, Homo sapiens
  CDR3 for alpha chain variable domain of TCR clone 288782 (TRAV13-2, TRAJ23)
CAERHRGGKLIF

SEQ ID NO: 577564 - protein, 19 aa, Homo sapiens
  CDR3 for beta chain variable domain of TCR clone 288782 (TRBV19, TRBJ2-5)
CASSIGQVTGVFLGETQYF

SEQ ID NO: 577565 - protein, 17 aa, Homo sapiens
  CDR3 for alpha chain variable domain of TCR clone 288783 (TRAV3, TRAJ6)
CAVRDGARAGGSYIPTF

SEQ ID NO: 577566 - protein, 14 aa, Homo sapiens
  CDR3 for beta chain variable domain of TCR clone 288783 (TRBV7-2, TRBJ2-7)
CASSPKTSFYEQDF

SEQ ID NO: 577567 - protein, 15 aa, Homo sapiens
  CDR3 for alpha chain variable domain of TCR clone 288784 (TRAV20, TRAJ50)
CAVRQMKTSYDKVIF

SEQ ID NO: 577568 - protein, 17 aa, Homo sapiens
  CDR3 for beta chain variable domain of TCR clone 288784 (TRBV28, TRBJ2-7)
CASSARHRASGVYEQYF

SEQ ID NO: 577569 - protein, 14 aa, Homo sapiens
  CDR3 for alpha chain variable domain of TCR clone 288785 (TRAV12-2, TRAJ17)
CAVLFNAAGNKLTF

SEQ ID NO: 577570 - protein, 15 aa, Homo sapiens
  CDR3 for beta chain variable domain of TCR clone 288785 (TRBV5-1, TRBJ2-7)
CASSLDLTSSYEQYF

SEQ ID NO: 577571 - protein, 15 aa, Homo sapiens
  CDR3 for alpha chain variable domain of TCR clone 288786 (TRAV8-2, TRAJ40)
CAVLGTTSGTYKYIF

SEQ ID NO: 577572 - protein, 16 aa, Homo sapiens
  CDR3 for beta chain variable domain of TCR clone 288786 (TRBV7-3, TRBJ2-1)
CASSLEGDRSYNEQFF

SEQ ID NO: 577573 - protein, 14 aa, Homo sapiens
  CDR3 for alpha chain variable domain of TCR clone 288787 (TRAV23/DV6, TRAJ8)
CAASKATGFQKLVF

SEQ ID NO: 577574 - protein, 15 aa, Homo sapiens
  CDR3 for beta chain variable domain of TCR clone 288787 (TRBV28, TRBJ2-3)
CASSPARQGANTQYF

SEQ ID NO: 577575 - protein, 18 aa, Homo sapiens
  CDR3 for alpha chain variable domain of TCR clone 288788 (TRAV21, TRAJ52)
CAVRPSPAGGTSYGKRTF

SEQ ID NO: 577576 - protein, 14 aa, Homo sapiens
  CDR3 for beta chain variable domain of TCR clone 288788 (TRBV7-2, TRBJ2-1)
CASSLEGGYNEQFF

SEQ ID NO: 577577 - protein, 12 aa, Homo sapiens
  CDR3 for alpha chain variable domain of TCR clone 288789 (TRAV27, TRAJ35)
CAGADFGNVLHC

SEQ ID NO: 577578 - protein, 15 aa, Homo sapiens
  CDR3 for beta chain variable domain of TCR clone 288789 (TRBV6-1, TRBJ2-1)
CQHLRQGSSYNEQFF

SEQ ID NO: 577579 - protein, 14 aa, Homo sapiens
  CDR3 for alpha chain variable domain of TCR clone 288790 (TRAV29/DV5, TRAJ36)
CAARRKTGANNLFF

SEQ ID NO: 577580 - protein, 17 aa, Homo sapiens
  CDR3 for beta chain variable domain of TCR clone 288790 (TRBV5-1, TRBJ2-5)
CASSLLGLAANQETQYF

SEQ ID NO: 577581 - protein, 13 aa, Homo sapiens
  CDR3 for alpha chain variable domain of TCR clone 288791 (TRAV36/DV7, TRAJ48)
CAVPNFGNEKLTS

SEQ ID NO: 577582 - protein, 15 aa, Homo sapiens
  CDR3 for beta chain variable domain of TCR clone 288791 (TRBV4-3, TRBJ2-3)
CASSLGTRSSDTQYF

SEQ ID NO: 577583 - protein, 15 aa, Homo sapiens
  CDR3 for alpha chain variable domain of TCR clone 288792 (TRAV8-3, TRAJ45)
CASSYSGGGADGLTF

SEQ ID NO: 577584 - protein, 13 aa, Homo sapiens
  CDR3 for beta chain variable domain of TCR clone 288792 (TRBV10-3, TRBJ2-7)
CASKLSVNYEHYF

SEQ ID NO: 577585 - protein, 16 aa, Homo sapiens
  CDR3 for alpha chain variable domain of TCR clone 288793 (TRAV3, TRAJ10)
CAVRDMRAGGGNKLTF

SEQ ID NO: 577586 - protein, 15 aa, Homo sapiens
  CDR3 for beta chain variable domain of TCR clone 288793 (TRBV2, TRBJ2-1)
CASRESGGAYNEQFF

SEQ ID NO: 577587 - protein, 16 aa, Homo sapiens
  CDR3 for alpha chain variable domain of TCR clone 288794 (TRAV8-3, TRAJ13)
CTVGAYPSGGYRKVTF

SEQ ID NO: 577588 - protein, 13 aa, Homo sapiens
  CDR3 for beta chain variable domain of TCR clone 288794 (TRBV7-9, TRBJ1-2)
CASSLKQNYGYTF

SEQ ID NO: 577589 - protein, 11 aa, Homo sapiens
  CDR3 for alpha chain variable domain of TCR clone 288795 (TRAV1-2, TRAJ40)
CAVPGTYKYIF

SEQ ID NO: 577590 - protein, 17 aa, Homo sapiens
  CDR3 for beta chain variable domain of TCR clone 288795 (TRBV7-8, TRBJ2-6)
RASSAGTGGAGANVLTF

SEQ ID NO: 577591 - protein, 21 aa, Homo sapiens
  CDR3 for alpha chain variable domain of TCR clone 288796 (TRAV1-1, TRAJ6)
CLLLLRCERLERTGGSYIPTF

SEQ ID NO: 577592 - protein, 14 aa, Homo sapiens
  CDR3 for beta chain variable domain of TCR clone 288796 (TRBV19, TRBJ2-3)
CASSIDLGGDTQYF

SEQ ID NO: 577593 - protein, 10 aa, Homo sapiens
  CDR3 for alpha chain variable domain of TCR clone 288797 (TRAV36/DV7, TRAJ48)
CAVGNEKLTF

SEQ ID NO: 577594 - protein, 15 aa, Homo sapiens
  CDR3 for beta chain variable domain of TCR clone 288797 (TRBV6-5, TRBJ1-4)
CASSSVGGAGEKLFS

SEQ ID NO: 577595 - protein, 14 aa, Homo sapiens
  CDR3 for alpha chain variable domain of TCR clone 288798 (TRAV25, TRAJ23)
CSGQGDNQGGKLIF

SEQ ID NO: 577596 - protein, 12 aa, Homo sapiens
  CDR3 for beta chain variable domain of TCR clone 288798 (TRBV7-9, TRBJ1-1)
CASSLVRGEAFF

SEQ ID NO: 577597 - protein, 14 aa, Homo sapiens
  CDR3 for alpha chain variable domain of TCR clone 288799 (TRAV26-1, TRAJ34)
CVVRVAYNTDKPIF

SEQ ID NO: 577598 - protein, 15 aa, Homo sapiens
  CDR3 for beta chain variable domain of TCR clone 288799 (TRBV20-1, TRBJ2-7)
CSARVPAAYFYEQYF

SEQ ID NO: 577599 - protein, 14 aa, Homo sapiens
  CDR3 for alpha chain variable domain of TCR clone 288800 (TRAV8-1, TRAJ24)
CAVNAADSWGKLQF

SEQ ID NO: 577600 - protein, 15 aa, Homo sapiens
  CDR3 for beta chain variable domain of TCR clone 288800 (TRBV20-1, TRBJ2-7)
CSARDRVSGMDEQYF

SEQ ID NO: 577601 - protein, 16 aa, Homo sapiens
  CDR3 for alpha chain variable domain of TCR clone 288801 (TRAV3, TRAJ37)
CAVRGKGSGNTGTLIF

SEQ ID NO: 577602 - protein, 14 aa, Homo sapiens
  CDR3 for beta chain variable domain of TCR clone 288801 (TRBV7-2, TRBJ2-7)
CASSPKTSFYEQYF

SEQ ID NO: 577603 - protein, 14 aa, Homo sapiens
  CDR3 for alpha chain variable domain of TCR clone 288802 (TRAV20, TRAJ17)
CAVQARAAGNKLTF

SEQ ID NO: 577604 - protein, 13 aa, Homo sapiens
  CDR3 for beta chain variable domain of TCR clone 288802 (TRBV19, TRBJ1-2)
CASSPTLNDGYTF

SEQ ID NO: 577605 - protein, 15 aa, Homo sapiens
  CDR3 for alpha chain variable domain of TCR clone 288803 (TRAV17, TRAJ22)
CGTVAPSGSARQLTF

SEQ ID NO: 577606 - protein, 16 aa, Homo sapiens
  CDR3 for beta chain variable domain of TCR clone 288803 (TRBV10-3, TRBJ2-7)
CAISADFADRPYEQYF

SEQ ID NO: 577607 - protein, 14 aa, Homo sapiens
  CDR3 for alpha chain variable domain of TCR clone 288804 (TRAV12-2, TRAJ13)
CAVKKTGGYQEVTF

SEQ ID NO: 577608 - protein, 16 aa, Homo sapiens
  CDR3 for beta chain variable domain of TCR clone 288804 (TRBV28, TRBJ2-2)
CASSLEGGSNTGELFF

SEQ ID NO: 577609 - protein, 17 aa, Homo sapiens
  CDR3 for alpha chain variable domain of TCR clone 288805 (TRAV35, TRAJ47)
GLLDCRTHTEYGNKLVF

SEQ ID NO: 577610 - protein, 11 aa, Homo sapiens
  CDR3 for beta chain variable domain of TCR clone 288805 (TRBV29-1, TRBJ1-1)
CSVQVGTRTFF

SEQ ID NO: 577611 - protein, 11 aa, Homo sapiens
  CDR3 for alpha chain variable domain of TCR clone 288806 (TRAV4, TRAJ31)
CIVGLNARLMF

SEQ ID NO: 577612 - protein, 16 aa, Homo sapiens
  CDR3 for beta chain variable domain of TCR clone 288806 (TRBV15, TRBJ2-6)
CATSVNGGFLANVLTF

SEQ ID NO: 577613 - protein, 13 aa, Homo sapiens
  CDR3 for alpha chain variable domain of TCR clone 288807 (TRAV8-3, TRAJ43)
CAVGADNNNDMSF

SEQ ID NO: 577614 - protein, 13 aa, Homo sapiens
  CDR3 for beta chain variable domain of TCR clone 288807 (TRBV4-2, TRBJ1-1)
CASSQAGNTEAFF

SEQ ID NO: 577615 - protein, 12 aa, Homo sapiens
  CDR3 for alpha chain variable domain of TCR clone 288808 (TRAV1-1, TRAJ30)
CAVRGRDDKIIF

SEQ ID NO: 577616 - protein, 17 aa, Homo sapiens
  CDR3 for beta chain variable domain of TCR clone 288808 (TRBV20-1, TRBJ2-1)
CSASASGLAGSYNEQFF

SEQ ID NO: 577617 - protein, 16 aa, Homo sapiens
  CDR3 for alpha chain variable domain of TCR clone 288809 (TRAV3, TRAJ10)
CAVRDIRAGGGNRLTF

SEQ ID NO: 577618 - protein, 13 aa, Homo sapiens
  CDR3 for beta chain variable domain of TCR clone 288809 (TRBV20-1, TRBJ1-1)
CNARGGGNTEAFF

SEQ ID NO: 577619 - protein, 21 aa, Homo sapiens
  CDR3 for alpha chain variable domain of TCR clone 288810 (TRAV1-1, TRAJ6)
CLLLLRCERLERTGGSYIPTF

SEQ ID NO: 577620 - protein, 16 aa, Homo sapiens
  CDR3 for beta chain variable domain of TCR clone 288810 (TRBV10-2, TRBJ2-7)
CISAPAGLAGGYEQYF

SEQ ID NO: 577621 - protein, 13 aa, Homo sapiens
  CDR3 for alpha chain variable domain of TCR clone 288811 (TRAV8-3, TRAJ43)
CAVVPYNNNDMRF

SEQ ID NO: 577622 - protein, 17 aa, Homo sapiens
  CDR3 for beta chain variable domain of TCR clone 288811 (TRBV7-7, TRBJ1-1)
CASIGDRPNLWVTEAFF

SEQ ID NO: 577623 - protein, 14 aa, Homo sapiens
  CDR3 for alpha chain variable domain of TCR clone 288812 (TRAV8-3, TRAJ6)
CAVGSSGGSYIPTF

SEQ ID NO: 577624 - protein, 15 aa, Homo sapiens
  CDR3 for beta chain variable domain of TCR clone 288812 (TRBV12-4, TRBJ2-5)
CASSPPTGLQETQYF

SEQ ID NO: 577625 - protein, 13 aa, Homo sapiens
  CDR3 for alpha chain variable domain of TCR clone 288813 (TRAV8-3, TRAJ44)
CAVVPGSASKLTF

SEQ ID NO: 577626 - protein, 11 aa, Homo sapiens
  CDR3 for beta chain variable domain of TCR clone 288813 (TRBV7-9, TRBJ1-6)
CASSSNSPLHF

SEQ ID NO: 577627 - protein, 18 aa, Homo sapiens
  CDR3 for alpha chain variable domain of TCR clone 288814 (TRAV21, TRAJ52)
CAVRPSPAGGTSYGKLTF

SEQ ID NO: 577628 - protein, 17 aa, Homo sapiens
  CDR3 for beta chain variable domain of TCR clone 288814 (TRBV7-2, TRBJ2-3)
CASSLEARGTSTDTQYF

SEQ ID NO: 577629 - protein, 12 aa, Homo sapiens
  CDR3 for alpha chain variable domain of TCR clone 288815 (TRAV3, TRAJ27)
CAVRDKAGKSTF

SEQ ID NO: 577630 - protein, 14 aa, Homo sapiens
  CDR3 for beta chain variable domain of TCR clone 288815 (TRBV15, TRBJ2-5)
CATSIGGLGETQYS

SEQ ID NO: 577631 - protein, 15 aa, Homo sapiens
  CDR3 for alpha chain variable domain of TCR clone 288816 (TRAV8-6, TRAJ11)
CAVNFMNSGYSTLTF

SEQ ID NO: 577632 - protein, 17 aa, Homo sapiens
  CDR3 for beta chain variable domain of TCR clone 288816 (TRBV3-1, TRBJ2-5)
CASSNWGCTSGQETQYF

SEQ ID NO: 577633 - protein, 14 aa, Homo sapiens
  CDR3 for alpha chain variable domain of TCR clone 288817 (TRAV26-1, TRAJ38)
CIADNAGNNRKLSW

SEQ ID NO: 577634 - protein, 12 aa, Homo sapiens
  CDR3 for beta chain variable domain of TCR clone 288817 (TRBV29-1, TRBJ2-3)
CSVTGGADTQYF

SEQ ID NO: 577635 - protein, 14 aa, Homo sapiens
  CDR3 for alpha chain variable domain of TCR clone 288818 (TRAV12-3, TRAJ10)
SHLPLTGGGNKLTF

SEQ ID NO: 577636 - protein, 12 aa, Homo sapiens
  CDR3 for beta chain variable domain of TCR clone 288818 (TRBV12-4, TRBJ1-3)
CASSFSGNTIYV

SEQ ID NO: 577637 - protein, 13 aa, Homo sapiens
  CDR3 for alpha chain variable domain of TCR clone 288819 (TRAV36/DV7, TRAJ37)
CAVFSSNTGKLIF

SEQ ID NO: 577638 - protein, 16 aa, Homo sapiens
  CDR3 for beta chain variable domain of TCR clone 288819 (TRBV3-1, TRBJ2-5)
CASSPGQFNGFRTQYF

SEQ ID NO: 577639 - protein, 17 aa, Homo sapiens
  CDR3 for alpha chain variable domain of TCR clone 288820 (TRAV8-4, TRAJ11)
CAGSDRGENSGYSTLTF

SEQ ID NO: 577640 - protein, 14 aa, Homo sapiens
  CDR3 for beta chain variable domain of TCR clone 288820 (TRBV20-1, TRBJ2-1)
CSPNDEASYNEQFF

SEQ ID NO: 577641 - protein, 13 aa, Homo sapiens
  CDR3 for alpha chain variable domain of TCR clone 288821 (TRAV12-1, TRAJ13)
CVVALLGYQKVTF

SEQ ID NO: 577642 - protein, 12 aa, Homo sapiens
  CDR3 for beta chain variable domain of TCR clone 288821 (TRBV20-1, TRBJ2-5)
QCYPDRQETQYF

SEQ ID NO: 577643 - protein, 13 aa, Homo sapiens
  CDR3 for alpha chain variable domain of TCR clone 288822 (TRAV38-2/DV8, TRAJ34)
CAYRNYNTDKLIF

SEQ ID NO: 577644 - protein, 12 aa, Homo sapiens
  CDR3 for beta chain variable domain of TCR clone 288822 (TRBV7-3, TRBJ2-1)
CASSFQSGPQFF

SEQ ID NO: 577645 - protein, 14 aa, Homo sapiens
  CDR3 for alpha chain variable domain of TCR clone 288823 (TRAV12-1, TRAJ54)
CVVNIYQGAQKLVF

SEQ ID NO: 577646 - protein, 13 aa, Homo sapiens
  CDR3 for beta chain variable domain of TCR clone 288823 (TRBV2, TRBJ2-3)
CASGRGRTDTQYF

SEQ ID NO: 577647 - protein, 13 aa, Homo sapiens
  CDR3 for alpha chain variable domain of TCR clone 288824 (TRAV20, TRAJ20)
CAVQALNDYKPSF

SEQ ID NO: 577648 - protein, 13 aa, Homo sapiens
  CDR3 for beta chain variable domain of TCR clone 288824 (TRBV7-9, TRBJ1-4)
CASSLPGIEKLFF

SEQ ID NO: 577649 - protein, 13 aa, Homo sapiens
  CDR3 for alpha chain variable domain of TCR clone 288825 (TRAV35, TRAJ42)
CAGFPGSQGNLIF

SEQ ID NO: 577650 - protein, 17 aa, Homo sapiens
  CDR3 for beta chain variable domain of TCR clone 288825 (TRBV7-2, TRBJ2-3)
CASSLAGGLAGTAGQYF

SEQ ID NO: 577651 - protein, 13 aa, Homo sapiens
  CDR3 for alpha chain variable domain of TCR clone 288826 (TRAV12-2, TRAJ42)
CAVKRGSQGTLIF

SEQ ID NO: 577652 - protein, 12 aa, Homo sapiens
  CDR3 for beta chain variable domain of TCR clone 288826 (TRBV5-7, TRBJ1-2)
CASSLVQNGYTF

SEQ ID NO: 577653 - protein, 13 aa, Homo sapiens
  CDR3 for alpha chain variable domain of TCR clone 288827 (TRAV13-1, TRAJ49)
CAAMLYTGNQFYF

SEQ ID NO: 577654 - protein, 15 aa, Homo sapiens
  CDR3 for beta chain variable domain of TCR clone 288827 (TRBV18, TRBJ2-3)
CASSPLGGETDTQYF

SEQ ID NO: 577655 - protein, 12 aa, Homo sapiens
  CDR3 for alpha chain variable domain of TCR clone 288828 (TRAV27, TRAJ37)
CADSGSTGRLIF

SEQ ID NO: 577656 - protein, 18 aa, Homo sapiens
  CDR3 for beta chain variable domain of TCR clone 288828 (TRBV7-9, TRBJ1-1)
CASSKPWDTMGMNTEAFF

SEQ ID NO: 577657 - protein, 16 aa, Homo sapiens
  CDR3 for alpha chain variable domain of TCR clone 288829 (TRAV3, TRAJ18)
CAVRDGRGSTLGRLYF

SEQ ID NO: 577658 - protein, 17 aa, Homo sapiens
  CDR3 for beta chain variable domain of TCR clone 288829 (TRBV5-1, TRBJ2-3)
CASSKIGLAYRTDTQYF

SEQ ID NO: 577659 - protein, 16 aa, Homo sapiens
  CDR3 for alpha chain variable domain of TCR clone 288830 (TRAV3, TRAJ37)
CAVRGKGSGNTGKLTF

SEQ ID NO: 577660 - protein, 15 aa, Homo sapiens
  CDR3 for beta chain variable domain of TCR clone 288830 (TRBV7-9, TRBJ2-2)
CASGPLDTFPGELFF

SEQ ID NO: 577661 - protein, 13 aa, Homo sapiens
  CDR3 for alpha chain variable domain of TCR clone 288831 (TRAV35, TRAJ36)
CAGPRIGANNLFF

SEQ ID NO: 577662 - protein, 15 aa, Homo sapiens
  CDR3 for beta chain variable domain of TCR clone 288831 (TRBV28, TRBJ2-5)
CASCPPWSYQETQYF

SEQ ID NO: 577663 - protein, 13 aa, Homo sapiens
  CDR3 for alpha chain variable domain of TCR clone 288832 (TRAV2, TRAJ47)
CAVDREYGNKLGF

SEQ ID NO: 577664 - protein, 17 aa, Homo sapiens
  CDR3 for beta chain variable domain of TCR clone 288832 (TRBV15, TRBJ1-5)
CATSRVRGIYSNQPQHF

SEQ ID NO: 577665 - protein, 14 aa, Homo sapiens
  CDR3 for alpha chain variable domain of TCR clone 288833 (TRAV9-2, TRAJ36)
CALPWRTRANNLFF

SEQ ID NO: 577666 - protein, 14 aa, Homo sapiens
  CDR3 for beta chain variable domain of TCR clone 288833 (TRBV2, TRBJ1-2)
CASSELQVNYGYTF

SEQ ID NO: 577667 - protein, 16 aa, Homo sapiens
  CDR3 for alpha chain variable domain of TCR clone 288834 (TRAV3, TRAJ10)
CAVRDMRAGGGNKLTF

SEQ ID NO: 577668 - protein, 15 aa, Homo sapiens
  CDR3 for beta chain variable domain of TCR clone 288834 (TRBV7-9, TRBJ2-2)
CASGPLDTFPGELFF

SEQ ID NO: 577669 - protein, 15 aa, Homo sapiens
  CDR3 for alpha chain variable domain of TCR clone 288835 (TRAV3, TRAJ5)
CAVRDRDTGRRALTF

SEQ ID NO: 577670 - protein, 13 aa, Homo sapiens
  CDR3 for beta chain variable domain of TCR clone 288835 (TRBV12-4, TRBJ2-7)
CASSPTDTYEQYF

SEQ ID NO: 577671 - protein, 17 aa, Homo sapiens
  CDR3 for alpha chain variable domain of TCR clone 288836 (TRAV3, TRAJ6)
CAVRDGPRAGGSYIPTF

SEQ ID NO: 577672 - protein, 16 aa, Homo sapiens
  CDR3 for beta chain variable domain of TCR clone 288836 (TRBV4-1, TRBJ2-7)
CASSLTAGQATYEQYF

SEQ ID NO: 577673 - protein, 15 aa, Homo sapiens
  CDR3 for alpha chain variable domain of TCR clone 288837 (TRAV8-3, TRAJ45)
CALSYSGGGADGLTF

SEQ ID NO: 577674 - protein, 13 aa, Homo sapiens
  CDR3 for beta chain variable domain of TCR clone 288837 (TRBV10-3, TRBJ2-7)
CASKRAVNYEQYF

SEQ ID NO: 577675 - protein, 16 aa, Homo sapiens
  CDR3 for alpha chain variable domain of TCR clone 288838 (TRAV36/DV7, TRAJ30)
CAVETYGLDRDDKIIF

SEQ ID NO: 577676 - protein, 14 aa, Homo sapiens
  CDR3 for beta chain variable domain of TCR clone 288838 (TRBV27, TRBJ2-1)
CASRHLGGGKEQFF

SEQ ID NO: 577677 - protein, 13 aa, Homo sapiens
  CDR3 for alpha chain variable domain of TCR clone 288839 (TRAV8-3, TRAJ28)
CAVGAVGSYQLTF

SEQ ID NO: 577678 - protein, 15 aa, Homo sapiens
  CDR3 for beta chain variable domain of TCR clone 288839 (TRBV4-1, TRBJ2-1)
CASSQVAVTSDEQFF

SEQ ID NO: 577679 - protein, 14 aa, Homo sapiens
  CDR3 for alpha chain variable domain of TCR clone 288840 (TRAV13-1, TRAJ35)
CAARKGGFGNVLHC

SEQ ID NO: 577680 - protein, 13 aa, Homo sapiens
  CDR3 for beta chain variable domain of TCR clone 288840 (TRBV7-3, TRBJ1-1)
CACSQDWGAEAFF

SEQ ID NO: 577681 - protein, 17 aa, Homo sapiens
  CDR3 for alpha chain variable domain of TCR clone 288841 (TRAV26-1, TRAJ47)
CIVPSLLYMEYGNKLVF

SEQ ID NO: 577682 - protein, 14 aa, Homo sapiens
  CDR3 for beta chain variable domain of TCR clone 288841 (TRBV7-3, TRBJ1-5)
RASSFSGCNRPQHF

SEQ ID NO: 577683 - protein, 15 aa, Homo sapiens
  CDR3 for alpha chain variable domain of TCR clone 288842 (TRAV25, TRAJ53)
CPTSNSGGSNYKLTF

SEQ ID NO: 577684 - protein, 15 aa, Homo sapiens
  CDR3 for beta chain variable domain of TCR clone 288842 (TRBV11-2, TRBJ1-3)
CASSLSPLVRDTIYF

SEQ ID NO: 577685 - protein, 14 aa, Homo sapiens
  CDR3 for alpha chain variable domain of TCR clone 288843 (TRAV13-1, TRAJ44)
CAAKATGTASTLTF

SEQ ID NO: 577686 - protein, 22 aa, Homo sapiens
  CDR3 for beta chain variable domain of TCR clone 288843 (TRBV19, TRBJ2-1)
CASSVRDRVTGTSGRIYNEQFF

SEQ ID NO: 577687 - protein, 12 aa, Homo sapiens
  CDR3 for alpha chain variable domain of TCR clone 288844 (TRAV38-1, TRAJ47)
CAFETYGNKLVF

SEQ ID NO: 577688 - protein, 14 aa, Homo sapiens
  CDR3 for beta chain variable domain of TCR clone 288844 (TRBV20-1, TRBJ2-2)
CSATDTANTGELFF

SEQ ID NO: 577689 - protein, 17 aa, Homo sapiens
  CDR3 for alpha chain variable domain of TCR clone 288845 (TRAV3, TRAJ38)
CAVRDCLNAGNNRKLIW

SEQ ID NO: 577690 - protein, 12 aa, Homo sapiens
  CDR3 for beta chain variable domain of TCR clone 288845 (TRBV4-2, TRBJ2-5)
CASGGAQETQYF

SEQ ID NO: 577691 - protein, 16 aa, Homo sapiens
  CDR3 for alpha chain variable domain of TCR clone 288846 (TRAV16, TRAJ52)
CALSAAGGTSYGKLTF

SEQ ID NO: 577692 - protein, 15 aa, Homo sapiens
  CDR3 for beta chain variable domain of TCR clone 288846 (TRBV2, TRBJ2-3)
CASSDFDKATDTQYF

SEQ ID NO: 577693 - protein, 15 aa, Homo sapiens
  CDR3 for alpha chain variable domain of TCR clone 288847 (TRAV21, TRAJ53)
CATLNSGGSNYKLTF

SEQ ID NO: 577694 - protein, 15 aa, Homo sapiens
  CDR3 for beta chain variable domain of TCR clone 288847 (TRBV27, TRBJ2-1)
CVSSNGGGSSNEQFF

SEQ ID NO: 577695 - protein, 15 aa, Homo sapiens
  CDR3 for alpha chain variable domain of TCR clone 288848 (TRAV3, TRAJ12)
CAVRDISDSSYKLIF

SEQ ID NO: 577696 - protein, 15 aa, Homo sapiens
  CDR3 for beta chain variable domain of TCR clone 288848 (TRBV27, TRBJ2-7)
CASSLRNEQGYEQYF

SEQ ID NO: 577697 - protein, 16 aa, Homo sapiens
  CDR3 for alpha chain variable domain of TCR clone 288849 (TRAV14/DV4, TRAJ54)
CAMREGRIQEAQKLVF

SEQ ID NO: 577698 - protein, 17 aa, Homo sapiens
  CDR3 for beta chain variable domain of TCR clone 288849 (TRBV20-1, TRBJ2-1)
CSARDRRRASSYNEQFF

SEQ ID NO: 577699 - protein, 15 aa, Homo sapiens
  CDR3 for alpha chain variable domain of TCR clone 288850 (TRAV38-1, TRAJ30)
CAFMMSYGGDDKILF

SEQ ID NO: 577700 - protein, 16 aa, Homo sapiens
  CDR3 for beta chain variable domain of TCR clone 288850 (TRBV7-9, TRBJ2-7)
CASSFGLAGPSYEQYF

SEQ ID NO: 577701 - protein, 20 aa, Homo sapiens
  CDR3 for alpha chain variable domain of TCR clone 288851 (TRAV12-2, TRAJ52)
SPVIQPPTSFRRTSYGKLTF

SEQ ID NO: 577702 - protein, 11 aa, Homo sapiens
  CDR3 for beta chain variable domain of TCR clone 288851 (TRBV11-2, TRBJ2-2)
CASSLPGELFF

SEQ ID NO: 577703 - protein, 14 aa, Homo sapiens
  CDR3 for alpha chain variable domain of TCR clone 288852 (TRAV1-2, TRAJ16)
CAVNRFSDGQKLLF

SEQ ID NO: 577704 - protein, 15 aa, Homo sapiens
  CDR3 for beta chain variable domain of TCR clone 288852 (TRBV7-3, TRBJ2-2)
CASSETGQGTGELFF

SEQ ID NO: 577705 - protein, 14 aa, Homo sapiens
  CDR3 for alpha chain variable domain of TCR clone 288853 (TRAV1-2, TRAJ16)
CAVNRFSDCQKLLF

SEQ ID NO: 577706 - protein, 14 aa, Homo sapiens
  CDR3 for beta chain variable domain of TCR clone 288853 (TRBV7-9, TRBJ2-2)
CASSLGHRTGELFF

SEQ ID NO: 577707 - protein, 14 aa, Homo sapiens
  CDR3 for alpha chain variable domain of TCR clone 288854 (TRAV26-1, TRAJ38)
CIADNAGNNRKLIW

SEQ ID NO: 577708 - protein, 14 aa, Homo sapiens
  CDR3 for beta chain variable domain of TCR clone 288854 (TRBV13, TRBJ2-5)
CASSWGTAQETQYF

SEQ ID NO: 577709 - protein, 12 aa, Homo sapiens
  CDR3 for alpha chain variable domain of TCR clone 288855 (TRAV2, TRAJ9)
CAVGAGGFKTIF

SEQ ID NO: 577710 - protein, 13 aa, Homo sapiens
  CDR3 for beta chain variable domain of TCR clone 288855 (TRBV2, TRBJ1-4)
CASSERAGEKLFF

SEQ ID NO: 577711 - protein, 13 aa, Homo sapiens
  CDR3 for alpha chain variable domain of TCR clone 288856 (TRAV20, TRAJ17)
CAVLRDAGNKLTF

SEQ ID NO: 577712 - protein, 12 aa, Homo sapiens
  CDR3 for beta chain variable domain of TCR clone 288856 (TRBV7-8, TRBJ2-7)
CASSLGDREQYF

SEQ ID NO: 577713 - protein, 13 aa, Homo sapiens
  CDR3 for alpha chain variable domain of TCR clone 288857 (TRAV3, TRAJ21)
CAVREPDFNKFYF

SEQ ID NO: 577714 - protein, 17 aa, Homo sapiens
  CDR3 for beta chain variable domain of TCR clone 288857 (TRBV7-8, TRBJ2-6)
CASCAGTGGAGANVLTF

SEQ ID NO: 577715 - protein, 13 aa, Homo sapiens
  CDR3 for alpha chain variable domain of TCR clone 288858 (TRAV21, TRAJ20)
CAVGLRVDYKLSF

SEQ ID NO: 577716 - protein, 15 aa, Homo sapiens
  CDR3 for beta chain variable domain of TCR clone 288858 (TRBV11-2, TRBJ2-1)
CASSKNRGLIYEQFF

SEQ ID NO: 577717 - protein, 13 aa, Homo sapiens
  CDR3 for alpha chain variable domain of TCR clone 288859 (TRAV26-1, TRAJ48)
CIVRVVGDEKLTF

SEQ ID NO: 577718 - protein, 19 aa, Homo sapiens
  CDR3 for beta chain variable domain of TCR clone 288859 (TRBV11-3, TRBJ2-2)
CASSTRPGAETTNTGELFF

SEQ ID NO: 577719 - protein, 14 aa, Homo sapiens
  CDR3 for alpha chain variable domain of TCR clone 288860 (TRAV1-2, TRAJ16)
CAVNRFSDGQNLLF

SEQ ID NO: 577720 - protein, 15 aa, Homo sapiens
  CDR3 for beta chain variable domain of TCR clone 288860 (TRBV4-2, TRBJ1-1)
CASSQQGAGDTEAFF

SEQ ID NO: 577721 - protein, 14 aa, Homo sapiens
  CDR3 for alpha chain variable domain of TCR clone 288861 (TRAV13-1, TRAJ5)
PFPKPDTGRRALTF

SEQ ID NO: 577722 - protein, 17 aa, Homo sapiens
  CDR3 for beta chain variable domain of TCR clone 288861 (TRBV24-1, TRBJ2-1)
CATSDFSTSGTYNEQFF

SEQ ID NO: 577723 - protein, 13 aa, Homo sapiens
  CDR3 for alpha chain variable domain of TCR clone 288862 (TRAV1-2, TRAJ9)
CAALNTGGFKTIF

SEQ ID NO: 577724 - protein, 15 aa, Homo sapiens
  CDR3 for beta chain variable domain of TCR clone 288862 (TRBV11-2, TRBJ2-2)
CASSSDRVNAGELFF

SEQ ID NO: 577725 - protein, 12 aa, Homo sapiens
  CDR3 for alpha chain variable domain of TCR clone 288863 (TRAV8-6, TRAJ11)
CAVSSGYSPLTF

SEQ ID NO: 577726 - protein, 11 aa, Homo sapiens
  CDR3 for beta chain variable domain of TCR clone 288863 (TRBV20-1, TRBJ1-5)
CSAQGDQPQHF

SEQ ID NO: 577727 - protein, 16 aa, Homo sapiens
  CDR3 for alpha chain variable domain of TCR clone 288864 (TRAV12-2, TRAJ50)
CAVGTATKTSYDKVIF

SEQ ID NO: 577728 - protein, 12 aa, Homo sapiens
  CDR3 for beta chain variable domain of TCR clone 288864 (TRBV12-4, TRBJ1-5)
CASSLGRQPKHF

SEQ ID NO: 577729 - protein, 15 aa, Homo sapiens
  CDR3 for alpha chain variable domain of TCR clone 288865 (TRAV3, TRAJ20)
CAVRDIKLSDYKLSF

SEQ ID NO: 577730 - protein, 18 aa, Homo sapiens
  CDR3 for beta chain variable domain of TCR clone 288865 (TRBV20-1, TRBJ2-5)
CSQTGDSGRLGGEETQYF

SEQ ID NO: 577731 - protein, 14 aa, Homo sapiens
  CDR3 for alpha chain variable domain of TCR clone 288866 (TRAV12-3, TRAJ10)
SHLPLPGGGNKLTF

SEQ ID NO: 577732 - protein, 14 aa, Homo sapiens
  CDR3 for beta chain variable domain of TCR clone 288866 (TRBV19, TRBJ2-7)
CASSIRLGDHEQYF

SEQ ID NO: 577733 - protein, 10 aa, Homo sapiens
  CDR3 for alpha chain variable domain of TCR clone 288867 (TRAV26-1, TRAJ40)
CIAGTYIYIF

SEQ ID NO: 577734 - protein, 15 aa, Homo sapiens
  CDR3 for beta chain variable domain of TCR clone 288867 (TRBV19, TRBJ2-1)
CASSSPGVPLDEQFF

SEQ ID NO: 577735 - protein, 15 aa, Homo sapiens
  CDR3 for alpha chain variable domain of TCR clone 288868 (TRAV8-3, TRAJ45)
CALSYSGGGADGLTF

SEQ ID NO: 577736 - protein, 13 aa, Homo sapiens
  CDR3 for beta chain variable domain of TCR clone 288868 (TRBV10-3, TRBJ2-7)
CASKLSVNYEQYF

SEQ ID NO: 577737 - protein, 14 aa, Homo sapiens
  CDR3 for alpha chain variable domain of TCR clone 288869 (TRAV1-2, TRAJ16)
CAVNRFSDGQKLLF

SEQ ID NO: 577738 - protein, 16 aa, Homo sapiens
  CDR3 for beta chain variable domain of TCR clone 288869 (TRBV20-1, TRBJ1-4)
CSAPGQGLLTNEKLFG

SEQ ID NO: 577739 - protein, 17 aa, Homo sapiens
  CDR3 for alpha chain variable domain of TCR clone 288870 (TRAV3, TRAJ6)
CAVRDGLRAGGSYIPTF

SEQ ID NO: 577740 - protein, 18 aa, Homo sapiens
  CDR3 for beta chain variable domain of TCR clone 288870 (TRBV25-1, TRBJ1-2)
CASSGLQNGQGLIFGYTF

SEQ ID NO: 577741 - protein, 18 aa, Homo sapiens
  CDR3 for alpha chain variable domain of TCR clone 288871 (TRAV26-1, TRAJ23)
CIVRVGLEVWNQGGKLIF

SEQ ID NO: 577742 - protein, 14 aa, Homo sapiens
  CDR3 for beta chain variable domain of TCR clone 288871 (TRBV7-2, TRBJ1-2)
CASSQTGSTYGYTF

SEQ ID NO: 577743 - protein, 14 aa, Homo sapiens
  CDR3 for alpha chain variable domain of TCR clone 288872 (TRAV38-1, TRAJ45)
CAYYSGGGADGLTF

SEQ ID NO: 577744 - protein, 20 aa, Homo sapiens
  CDR3 for beta chain variable domain of TCR clone 288872 (TRBV28, TRBJ2-1)
CASTPLGRSPGLAGGNEQFF

SEQ ID NO: 577745 - protein, 14 aa, Homo sapiens
  CDR3 for alpha chain variable domain of TCR clone 288873 (TRAV21, TRAJ45)
CAVSSGGDADGLTF

SEQ ID NO: 577746 - protein, 15 aa, Homo sapiens
  CDR3 for beta chain variable domain of TCR clone 288873 (TRBV9, TRBJ1-6)
CASSVAGTGDSPLHF

SEQ ID NO: 577747 - protein, 12 aa, Homo sapiens
  CDR3 for alpha chain variable domain of TCR clone 288874 (TRAV13-2, TRAJ8)
CAERTGFQQLVF

SEQ ID NO: 577748 - protein, 14 aa, Homo sapiens
  CDR3 for beta chain variable domain of TCR clone 288874 (TRBV11-2, TRBJ2-5)
CASSRTGGIETQYF

SEQ ID NO: 577749 - protein, 11 aa, Homo sapiens
  CDR3 for alpha chain variable domain of TCR clone 288875 (TRAV12-2, TRAJ49)
CALPGGNHLYF

SEQ ID NO: 577750 - protein, 13 aa, Homo sapiens
  CDR3 for beta chain variable domain of TCR clone 288875 (TRBV4-1, TRBJ1-1)
CASSQLGTGEAFF

SEQ ID NO: 577751 - protein, 14 aa, Homo sapiens
  CDR3 for alpha chain variable domain of TCR clone 288876 (TRAV20, TRAJ22)
CAVALGGSARQLTY

SEQ ID NO: 577752 - protein, 15 aa, Homo sapiens
  CDR3 for beta chain variable domain of TCR clone 288876 (TRBV7-2, TRBJ1-1)
CASSFAGDRDTEAFF

SEQ ID NO: 577753 - protein, 14 aa, Homo sapiens
  CDR3 for alpha chain variable domain of TCR clone 288877 (TRAV26-1, TRAJ29)
CIVRGTSGNTPLVF

SEQ ID NO: 577754 - protein, 13 aa, Homo sapiens
  CDR3 for beta chain variable domain of TCR clone 288877 (TRBV7-9, TRBJ1-2)
CASSLKQNYGYTF

SEQ ID NO: 577755 - protein, 14 aa, Homo sapiens
  CDR3 for alpha chain variable domain of TCR clone 288878 (TRAV17, TRAJ45)
CATASGGGADRLTF

SEQ ID NO: 577756 - protein, 15 aa, Homo sapiens
  CDR3 for beta chain variable domain of TCR clone 288878 (TRBV11-2, TRBJ2-1)
CDSSRNRGLMYEQFF

SEQ ID NO: 577757 - protein, 15 aa, Homo sapiens
  CDR3 for alpha chain variable domain of TCR clone 288879 (TRAV8-3, TRAJ20)
CAVEAKGSNDYKISF

SEQ ID NO: 577758 - protein, 14 aa, Homo sapiens
  CDR3 for beta chain variable domain of TCR clone 288879 (TRBV6-1, TRBJ1-3)
CASVQGGGGNTIYF

SEQ ID NO: 577759 - protein, 15 aa, Homo sapiens
  CDR3 for alpha chain variable domain of TCR clone 288880 (TRAV12-1, TRAJ37)
CVVNGGSGNTGKLIF

SEQ ID NO: 577760 - protein, 12 aa, Homo sapiens
  CDR3 for beta chain variable domain of TCR clone 288880 (TRBV11-2, TRBJ2-1)
CASSPGNNEQFF

SEQ ID NO: 577761 - protein, 12 aa, Homo sapiens
  CDR3 for alpha chain variable domain of TCR clone 288881 (TRAV1-1, TRAJ39)
CAVPVVGNMLTF

SEQ ID NO: 577762 - protein, 18 aa, Homo sapiens
  CDR3 for beta chain variable domain of TCR clone 288881 (TRBV7-9, TRBJ2-7)
CASSLTTSGSRTWYEQNF

SEQ ID NO: 577763 - protein, 15 aa, Homo sapiens
  CDR3 for alpha chain variable domain of TCR clone 288882 (TRAV8-1, TRAJ6)
CAVNANPGGSYIPTF

SEQ ID NO: 577764 - protein, 13 aa, Homo sapiens
  CDR3 for beta chain variable domain of TCR clone 288882 (TRBV19, TRBJ1-1)
CASSPSNGGEAFF

SEQ ID NO: 577765 - protein, 16 aa, Homo sapiens
  CDR3 for alpha chain variable domain of TCR clone 288883 (TRAV30, TRAJ24)
CGTEIVDADSWGKFQF

SEQ ID NO: 577766 - protein, 13 aa, Homo sapiens
  CDR3 for beta chain variable domain of TCR clone 288883 (TRBV10-3, TRBJ1-2)
CAIGERDSYGYTF

SEQ ID NO: 577767 - protein, 14 aa, Homo sapiens
  CDR3 for alpha chain variable domain of TCR clone 288884 (TRAV2, TRAJ9)
CAVEDRSGGFKTIF

SEQ ID NO: 577768 - protein, 15 aa, Homo sapiens
  CDR3 for beta chain variable domain of TCR clone 288884 (TRBV19, TRBJ2-1)
CASSSPGVPLHEQFF

SEQ ID NO: 577769 - protein, 17 aa, Homo sapiens
  CDR3 for alpha chain variable domain of TCR clone 288885 (TRAV2, TRAJ22)
ILQVREADAAEQRQLTF

SEQ ID NO: 577770 - protein, 16 aa, Homo sapiens
  CDR3 for beta chain variable domain of TCR clone 288885 (TRBV2, TRBJ2-5)
CASSETQGVGEETQFF

SEQ ID NO: 577771 - protein, 12 aa, Homo sapiens
  CDR3 for alpha chain variable domain of TCR clone 288886 (TRAV13-1, TRAJ21)
CAAKEGFNKFYF

SEQ ID NO: 577772 - protein, 15 aa, Homo sapiens
  CDR3 for beta chain variable domain of TCR clone 288886 (TRBV6-1, TRBJ2-7)
CASSESMGDFYEQYF

SEQ ID NO: 577773 - protein, 12 aa, Homo sapiens
  CDR3 for alpha chain variable domain of TCR clone 288887 (TRAV26-1, TRAJ48)
CIAVFGNEKLTF

SEQ ID NO: 577774 - protein, 13 aa, Homo sapiens
  CDR3 for beta chain variable domain of TCR clone 288887 (TRBV7-9, TRBJ2-7)
CASSFAGAYEQYF

SEQ ID NO: 577775 - protein, 13 aa, Homo sapiens
  CDR3 for alpha chain variable domain of TCR clone 288888 (TRAV13-1, TRAJ6)
CARGSGGSYIPTF

SEQ ID NO: 577776 - protein, 17 aa, Homo sapiens
  CDR3 for beta chain variable domain of TCR clone 288888 (TRBV7-8, TRBJ2-1)
CASSPTTGTLAYNEQFF

SEQ ID NO: 577777 - protein, 16 aa, Homo sapiens
  CDR3 for alpha chain variable domain of TCR clone 288889 (TRAV3, TRAJ40)
CAVRDRIASGTYKYIF

SEQ ID NO: 577778 - protein, 12 aa, Homo sapiens
  CDR3 for beta chain variable domain of TCR clone 288889 (TRBV12-4, TRBJ2-3)
CASSTLPDTQYF

SEQ ID NO: 577779 - protein, 15 aa, Homo sapiens
  CDR3 for alpha chain variable domain of TCR clone 288890 (TRAV12-1, TRAJ37)
CVVNILGGNTGKLIF

SEQ ID NO: 577780 - protein, 12 aa, Homo sapiens
  CDR3 for beta chain variable domain of TCR clone 288890 (TRBV2, TRBJ2-7)
CASSRVGYEQYF

SEQ ID NO: 577781 - protein, 11 aa, Homo sapiens
  CDR3 for alpha chain variable domain of TCR clone 288891 (TRAV21, TRAJ34)
CAVTNTDKLIF

SEQ ID NO: 577782 - protein, 16 aa, Homo sapiens
  CDR3 for beta chain variable domain of TCR clone 288891 (TRBV7-8, TRBJ2-2)
CASSLARTGVTGELFF

SEQ ID NO: 577783 - protein, 14 aa, Homo sapiens
  CDR3 for alpha chain variable domain of TCR clone 288892 (TRAV8-3, TRAJ39)
CAVGANNAVNMLTF

SEQ ID NO: 577784 - protein, 15 aa, Homo sapiens
  CDR3 for beta chain variable domain of TCR clone 288892 (TRBV4-3, TRBJ1-1)
CASSQELGRGTEAFF

SEQ ID NO: 577785 - protein, 18 aa, Homo sapiens
  CDR3 for alpha chain variable domain of TCR clone 288893 (TRAV13-1, TRAJ45)
CAASIGVYSGGGADGLTF

SEQ ID NO: 577786 - protein, 14 aa, Homo sapiens
  CDR3 for beta chain variable domain of TCR clone 288893 (TRBV19, TRBJ2-1)
CASPTFVLSGEQFF

SEQ ID NO: 577787 - protein, 18 aa, Homo sapiens
  CDR3 for alpha chain variable domain of TCR clone 288894 (TRAV21, TRAJ52)
CAVRPSPAGGTSYRKLTF

SEQ ID NO: 577788 - protein, 16 aa, Homo sapiens
  CDR3 for beta chain variable domain of TCR clone 288894 (TRBV7-3, TRBJ2-1)
CASSLEGYRSYNEQFF

SEQ ID NO: 577789 - protein, 14 aa, Homo sapiens
  CDR3 for alpha chain variable domain of TCR clone 288895 (TRAV6, TRAJ18)
CAPHRGSTLGRLYF

SEQ ID NO: 577790 - protein, 15 aa, Homo sapiens
  CDR3 for beta chain variable domain of TCR clone 288895 (TRBV20-1, TRBJ2-7)
CSARDRVSGMDEQYF

SEQ ID NO: 577791 - protein, 11 aa, Homo sapiens
  CDR3 for alpha chain variable domain of TCR clone 288896 (TRAV1-1, TRAJ23)
CAVRQGGKLIF

SEQ ID NO: 577792 - protein, 13 aa, Homo sapiens
  CDR3 for beta chain variable domain of TCR clone 288896 (TRBV14, TRBJ2-7)
CASSQDRRYEQYF

SEQ ID NO: 577793 - protein, 14 aa, Homo sapiens
  CDR3 for alpha chain variable domain of TCR clone 288897 (TRAV16, TRAJ33)
CALSAMDSNYQLIW

SEQ ID NO: 577794 - protein, 13 aa, Homo sapiens
  CDR3 for beta chain variable domain of TCR clone 288897 (TRBV11-2, TRBJ2-5)
CASSSTGEETQYF

SEQ ID NO: 577795 - protein, 19 aa, Homo sapiens
  CDR3 for alpha chain variable domain of TCR clone 288898 (TRAV2, TRAJ20)
ILQVREADAAVYRDCKLSF

SEQ ID NO: 577796 - protein, 13 aa, Homo sapiens
  CDR3 for beta chain variable domain of TCR clone 288898 (TRBV15, TRBJ1-6)
CATSRGLSSPLHF

SEQ ID NO: 577797 - protein, 11 aa, Homo sapiens
  CDR3 for alpha chain variable domain of TCR clone 288899 (TRAV12-1, TRAJ26)
CVVAYGQNFVF

SEQ ID NO: 577798 - protein, 16 aa, Homo sapiens
  CDR3 for beta chain variable domain of TCR clone 288899 (TRBV12-4, TRBJ2-3)
CASSLRLAETTDTQYF

SEQ ID NO: 577799 - protein, 18 aa, Homo sapiens
  CDR3 for alpha chain variable domain of TCR clone 288900 (TRAV21, TRAJ52)
CAVMPSPAGGTSFGKLTF

SEQ ID NO: 577800 - protein, 14 aa, Homo sapiens
  CDR3 for beta chain variable domain of TCR clone 288900 (TRBV4-1, TRBJ2-2)
CASSQAVNTGELFF

SEQ ID NO: 577801 - protein, 11 aa, Homo sapiens
  CDR3 for alpha chain variable domain of TCR clone 288901 (TRAV12-2, TRAJ23)
CARGRGGKLIF

SEQ ID NO: 577802 - protein, 18 aa, Homo sapiens
  CDR3 for beta chain variable domain of TCR clone 288901 (TRBV28, TRBJ2-5)
CASSLGDRADPVLRARHA

SEQ ID NO: 577803 - protein, 16 aa, Homo sapiens
  CDR3 for alpha chain variable domain of TCR clone 288902 (TRAV1-2, TRAJ10)
CAVRGVLTGGGNKLTF

SEQ ID NO: 577804 - protein, 13 aa, Homo sapiens
  CDR3 for beta chain variable domain of TCR clone 288902 (TRBV2, TRBJ2-7)
CASTGGSSYEQYF

SEQ ID NO: 577805 - protein, 12 aa, Homo sapiens
  CDR3 for alpha chain variable domain of TCR clone 288903 (TRAV12-1, TRAJ20)
CVAHFNDYKLSF

SEQ ID NO: 577806 - protein, 16 aa, Homo sapiens
  CDR3 for beta chain variable domain of TCR clone 288903 (TRBV19, TRBJ2-2)
CASRSPGTGATGELFF

SEQ ID NO: 577807 - protein, 15 aa, Homo sapiens
  CDR3 for alpha chain variable domain of TCR clone 288904 (TRAV35, TRAJ40)
CAGQLGTSGTYKYIF

SEQ ID NO: 577808 - protein, 14 aa, Homo sapiens
  CDR3 for beta chain variable domain of TCR clone 288904 (TRBV7-3, TRBJ2-1)
CARRLAGGTNEQFF

SEQ ID NO: 577809 - protein, 11 aa, Homo sapiens
  CDR3 for alpha chain variable domain of TCR clone 288905 (TRAV2, TRAJ13)
CAYGGYQKVTF

SEQ ID NO: 577810 - protein, 11 aa, Homo sapiens
  CDR3 for beta chain variable domain of TCR clone 288905 (TRBV6-3, TRBJ2-3)
CATGQADTQYF

SEQ ID NO: 577811 - protein, 14 aa, Homo sapiens
  CDR3 for alpha chain variable domain of TCR clone 288906 (TRAV8-3, TRAJ30)
CAVGDMNRDEKIIF

SEQ ID NO: 577812 - protein, 17 aa, Homo sapiens
  CDR3 for beta chain variable domain of TCR clone 288906 (TRBV19, TRBJ2-2)
CASSRNPGGFGTGELFF

SEQ ID NO: 577813 - protein, 14 aa, Homo sapiens
  CDR3 for alpha chain variable domain of TCR clone 288907 (TRAV21, TRAJ35)
CAVMPIGSGNVLHC

SEQ ID NO: 577814 - protein, 13 aa, Homo sapiens
  CDR3 for beta chain variable domain of TCR clone 288907 (TRBV23-1, TRBJ1-4)
CASRGKFNEKLFF

SEQ ID NO: 577815 - protein, 16 aa, Homo sapiens
  CDR3 for alpha chain variable domain of TCR clone 288908 (TRAV12-1, TRAJ42)
CVVTPYYGGSQGNLIF

SEQ ID NO: 577816 - protein, 12 aa, Homo sapiens
  CDR3 for beta chain variable domain of TCR clone 288908 (TRBV7-9, TRBJ1-5)
CASSPQGQPQHF

SEQ ID NO: 577817 - protein, 11 aa, Homo sapiens
  CDR3 for alpha chain variable domain of TCR clone 288909 (TRAV2, TRAJ13)
CASGGYQKVTF

SEQ ID NO: 577818 - protein, 14 aa, Homo sapiens
  CDR3 for beta chain variable domain of TCR clone 288909 (TRBV7-3, TRBJ2-7)
CASSLAGGTNEQFF

SEQ ID NO: 577819 - protein, 14 aa, Homo sapiens
  CDR3 for alpha chain variable domain of TCR clone 288910 (TRAV12-1, TRAJ42)
CVVIYGGSQGNRIF

SEQ ID NO: 577820 - protein, 17 aa, Homo sapiens
  CDR3 for beta chain variable domain of TCR clone 288910 (TRBV3-1, TRBJ2-6)
CASSPNTGPAGANVLTF

SEQ ID NO: 577821 - protein, 14 aa, Homo sapiens
  CDR3 for alpha chain variable domain of TCR clone 288911 (TRAV12-2, TRAJ40)
CAVKIPSGTYKYIF

SEQ ID NO: 577822 - protein, 13 aa, Homo sapiens
  CDR3 for beta chain variable domain of TCR clone 288911 (TRBV7-9, TRBJ1-2)
CASSLKQTYGYTF

SEQ ID NO: 577823 - protein, 13 aa, Homo sapiens
  CDR3 for alpha chain variable domain of TCR clone 288912 (TRAV8-4, TRAJ48)
CAVSLFGNEKLTF

SEQ ID NO: 577824 - protein, 16 aa, Homo sapiens
  CDR3 for beta chain variable domain of TCR clone 288912 (TRBV19, TRBJ2-1)
CASSKAGPSSYNEQFF

SEQ ID NO: 577825 - protein, 15 aa, Homo sapiens
  CDR3 for alpha chain variable domain of TCR clone 288913 (TRAV38-2/DV8, TRAJ57)
CAYKSGLGGSEKLVF

SEQ ID NO: 577826 - protein, 12 aa, Homo sapiens
  CDR3 for beta chain variable domain of TCR clone 288913 (TRBV5-1, TRBJ1-2)
CASSQDTYGYTF

SEQ ID NO: 577827 - protein, 14 aa, Homo sapiens
  CDR3 for alpha chain variable domain of TCR clone 288914 (TRAV17, TRAJ22)
CATSPSGSARQLTF

SEQ ID NO: 577828 - protein, 15 aa, Homo sapiens
  CDR3 for beta chain variable domain of TCR clone 288914 (TRBV4-1, TRBJ2-5)
CASSRGDLYQETQYF

SEQ ID NO: 577829 - protein, 14 aa, Homo sapiens
  CDR3 for alpha chain variable domain of TCR clone 288915 (TRAV1-2, TRAJ16)
CAVNRFSDGQKLLF

SEQ ID NO: 577830 - protein, 16 aa, Homo sapiens
  CDR3 for beta chain variable domain of TCR clone 288915 (TRBV7-9, TRBJ2-2)
CASSLSGFWVTGELFF

SEQ ID NO: 577831 - protein, 12 aa, Homo sapiens
  CDR3 for alpha chain variable domain of TCR clone 288916 (TRAV21, TRAJ31)
CAVWGNNARLMF

SEQ ID NO: 577832 - protein, 16 aa, Homo sapiens
  CDR3 for beta chain variable domain of TCR clone 288916 (TRBV27, TRBJ2-5)
CASSYGAGGQKETQYF

SEQ ID NO: 577833 - protein, 14 aa, Homo sapiens
  CDR3 for alpha chain variable domain of TCR clone 288917 (TRAV8-2, TRAJ4)
CVVSTSGGYNKLIF

SEQ ID NO: 577834 - protein, 15 aa, Homo sapiens
  CDR3 for beta chain variable domain of TCR clone 288917 (TRBV4-1, TRBJ1-4)
CDSSDTGGTNEKLFF

SEQ ID NO: 577835 - protein, 13 aa, Homo sapiens
  CDR3 for alpha chain variable domain of TCR clone 288918 (TRAV20, TRAJ31)
CAVQAWNNARLMF

SEQ ID NO: 577836 - protein, 16 aa, Homo sapiens
  CDR3 for beta chain variable domain of TCR clone 288918 (TRBV6-6, TRBJ2-1)
CASSWGGQGPYIEQFF

SEQ ID NO: 577837 - protein, 15 aa, Homo sapiens
  CDR3 for alpha chain variable domain of TCR clone 288919 (TRAV21, TRAJ34)
CAVRGLAYNTDKLIF

SEQ ID NO: 577838 - protein, 13 aa, Homo sapiens
  CDR3 for beta chain variable domain of TCR clone 288919 (TRBV10-3, TRBJ2-7)
CASKLAVNYKQYF

SEQ ID NO: 577839 - protein, 16 aa, Homo sapiens
  CDR3 for alpha chain variable domain of TCR clone 288920 (TRAV17, TRAJ9)
CATGEWGGAGGFNTIF

SEQ ID NO: 577840 - protein, 12 aa, Homo sapiens
  CDR3 for beta chain variable domain of TCR clone 288920 (TRBV11-2, TRBJ2-1)
CASSPGNNEQFF

SEQ ID NO: 577841 - protein, 13 aa, Homo sapiens
  CDR3 for alpha chain variable domain of TCR clone 288921 (TRAV12-3, TRAJ43)
CAMIRPNNNDMRF

SEQ ID NO: 577842 - protein, 13 aa, Homo sapiens
  CDR3 for beta chain variable domain of TCR clone 288921 (TRBV7-3, TRBJ2-5)
CASSFRGGETQYF

SEQ ID NO: 577843 - protein, 15 aa, Homo sapiens
  CDR3 for alpha chain variable domain of TCR clone 288922 (TRAV13-1, TRAJ27)
CAARELNTNAGQSTF

SEQ ID NO: 577844 - protein, 14 aa, Homo sapiens
  CDR3 for beta chain variable domain of TCR clone 288922 (TRBV6-5, TRBJ1-2)
CASSYTRDRGRYTF

SEQ ID NO: 577845 - protein, 15 aa, Homo sapiens
  CDR3 for alpha chain variable domain of TCR clone 288923 (TRAV26-1, TRAJ9)
CIVRESNTGGFKTIF

SEQ ID NO: 577846 - protein, 13 aa, Homo sapiens
  CDR3 for beta chain variable domain of TCR clone 288923 (TRBV2, TRBJ1-4)
CASSERAGEKLFF

SEQ ID NO: 577847 - protein, 14 aa, Homo sapiens
  CDR3 for alpha chain variable domain of TCR clone 288924 (TRAV1-2, TRAJ16)
CAVNRFSDGQKLLF

SEQ ID NO: 577848 - protein, 14 aa, Homo sapiens
  CDR3 for beta chain variable domain of TCR clone 288924 (TRBV19, TRBJ2-1)
CASSSGRDYNEQFF

SEQ ID NO: 577849 - protein, 13 aa, Homo sapiens
  CDR3 for alpha chain variable domain of TCR clone 288925 (TRAV8-3, TRAJ6)
CAVGSGGSYIPTF

SEQ ID NO: 577850 - protein, 14 aa, Homo sapiens
  CDR3 for beta chain variable domain of TCR clone 288925 (TRBV11-2, TRBJ1-1)
CASSTQRGRTEAFI

SEQ ID NO: 577851 - protein, 11 aa, Homo sapiens
  CDR3 for alpha chain variable domain of TCR clone 288926 (TRAV13-1, TRAJ23)
CAASSRGKLIF

SEQ ID NO: 577852 - protein, 13 aa, Homo sapiens
  CDR3 for beta chain variable domain of TCR clone 288926 (TRBV7-3, TRBJ2-5)
CASSFRGGETQYC

SEQ ID NO: 577853 - protein, 14 aa, Homo sapiens
  CDR3 for alpha chain variable domain of TCR clone 288927 (TRAV17, TRAJ34)
CATDSLEGTDKLIF

SEQ ID NO: 577854 - protein, 14 aa, Homo sapiens
  CDR3 for beta chain variable domain of TCR clone 288927 (TRBV25-1, TRBJ1-1)
CASTHLGGNTEAFF

SEQ ID NO: 577855 - protein, 16 aa, Homo sapiens
  CDR3 for alpha chain variable domain of TCR clone 288928 (TRAV30, TRAJ24)
CGTEIVDADSWGKFQF

SEQ ID NO: 577856 - protein, 15 aa, Homo sapiens
  CDR3 for beta chain variable domain of TCR clone 288928 (TRBV18, TRBJ2-1)
CASLPDRGRDNERFF

SEQ ID NO: 577857 - protein, 10 aa, Homo sapiens
  CDR3 for alpha chain variable domain of TCR clone 288929 (TRAV23/DV6, TRAJ57)
CAASSTLSQD

SEQ ID NO: 577858 - protein, 14 aa, Homo sapiens
  CDR3 for beta chain variable domain of TCR clone 288929 (TRBV25-1, TRBJ1-1)
CASTQLGGNTEAFF

SEQ ID NO: 577859 - protein, 11 aa, Homo sapiens
  CDR3 for alpha chain variable domain of TCR clone 288930 (TRAV12-3, TRAJ27)
CAMANAGKSTF

SEQ ID NO: 577860 - protein, 16 aa, Homo sapiens
  CDR3 for beta chain variable domain of TCR clone 288930 (TRBV10-2, TRBJ1-5)
CASSRDRDYSNQPQHF

SEQ ID NO: 577861 - protein, 17 aa, Homo sapiens
  CDR3 for alpha chain variable domain of TCR clone 288931 (TRAV4, TRAJ18)
FLVGERSVGTTLGRLYF

SEQ ID NO: 577862 - protein, 16 aa, Homo sapiens
  CDR3 for beta chain variable domain of TCR clone 288931 (TRBV4-2, TRBJ1-1)
CASSPSPGRAAPEAFF

SEQ ID NO: 577863 - protein, 14 aa, Homo sapiens
  CDR3 for alpha chain variable domain of TCR clone 288932 (TRAV35, TRAJ33)
CSGSSQDRNYQLIW

SEQ ID NO: 577864 - protein, 15 aa, Homo sapiens
  CDR3 for beta chain variable domain of TCR clone 288932 (TRBV20-1, TRBJ2-7)
CSAESGTSGAYEQYF

SEQ ID NO: 577865 - protein, 14 aa, Homo sapiens
  CDR3 for alpha chain variable domain of TCR clone 288933 (TRAV13-1, TRAJ44)
CAAKATGTASKLTF

SEQ ID NO: 577866 - protein, 11 aa, Homo sapiens
  CDR3 for beta chain variable domain of TCR clone 288933 (TRBV7-8, TRBJ2-7)
CASSLSLEQYF

SEQ ID NO: 577867 - protein, 10 aa, Homo sapiens
  CDR3 for alpha chain variable domain of TCR clone 288934 (TRAV1-2, TRAJ23)
CAGQGGKLIF

SEQ ID NO: 577868 - protein, 16 aa, Homo sapiens
  CDR3 for beta chain variable domain of TCR clone 288934 (TRBV11-2, TRBJ1-1)
CASSLRQGGEHSRAFF

SEQ ID NO: 577869 - protein, 16 aa, Homo sapiens
  CDR3 for alpha chain variable domain of TCR clone 288935 (TRAV12-1, TRAJ48)
CVVNMRDNFGNEKLTF

SEQ ID NO: 577870 - protein, 16 aa, Homo sapiens
  CDR3 for beta chain variable domain of TCR clone 288935 (TRBV7-6, TRBJ2-1)
CASSAVVAGTYNEQFF

SEQ ID NO: 577871 - protein, 12 aa, Homo sapiens
  CDR3 for alpha chain variable domain of TCR clone 288936 (TRAV8-3, TRAJ20)
CAVDFNDYKLSF

SEQ ID NO: 577872 - protein, 17 aa, Homo sapiens
  CDR3 for beta chain variable domain of TCR clone 288936 (TRBV7-8, TRBJ2-6)
CASSAGTGGAGANVLIF

SEQ ID NO: 577873 - protein, 19 aa, Homo sapiens
  CDR3 for alpha chain variable domain of TCR clone 288937 (TRAV2, TRAJ20)
ILQVREADAAVYRYCKLSF

SEQ ID NO: 577874 - protein, 13 aa, Homo sapiens
  CDR3 for beta chain variable domain of TCR clone 288937 (TRBV15, TRBJ1-6)
CATSGGLNSPLHF

SEQ ID NO: 577875 - protein, 14 aa, Homo sapiens
  CDR3 for alpha chain variable domain of TCR clone 288938 (TRAV13-1, TRAJ44)
CAAKATGTASKLTF

SEQ ID NO: 577876 - protein, 15 aa, Homo sapiens
  CDR3 for beta chain variable domain of TCR clone 288938 (TRBV10-3, TRBJ2-1)
RAISDVQDRAYEQFF

SEQ ID NO: 577877 - protein, 11 aa, Homo sapiens
  CDR3 for alpha chain variable domain of TCR clone 288939 (TRAV2, TRAJ23)
CAVETRGKLIF

SEQ ID NO: 577878 - protein, 14 aa, Homo sapiens
  CDR3 for beta chain variable domain of TCR clone 288939 (TRBV2, TRBJ2-3)
CASSEGQNTDAQYF

SEQ ID NO: 577879 - protein, 14 aa, Homo sapiens
  CDR3 for alpha chain variable domain of TCR clone 288940 (TRAV23/DV6, TRAJ4)
CAAPSSGGYNKLIF

SEQ ID NO: 577880 - protein, 16 aa, Homo sapiens
  CDR3 for beta chain variable domain of TCR clone 288940 (TRBV5-5, TRBJ1-2)
CASSPTWGRGLYGYTF

SEQ ID NO: 577881 - protein, 14 aa, Homo sapiens
  CDR3 for alpha chain variable domain of TCR clone 288941 (TRAV17, TRAJ6)
CATDASGGSYIPTF

SEQ ID NO: 577882 - protein, 19 aa, Homo sapiens
  CDR3 for beta chain variable domain of TCR clone 288941 (TRBV4-3, TRBJ2-7)
CASSLEFIGWQVTPYEQYF

SEQ ID NO: 577883 - protein, 15 aa, Homo sapiens
  CDR3 for alpha chain variable domain of TCR clone 288942 (TRAV13-1, TRAJ44)
CAASRGGGTASKLTF

SEQ ID NO: 577884 - protein, 15 aa, Homo sapiens
  CDR3 for beta chain variable domain of TCR clone 288942 (TRBV7-9, TRBJ2-2)
CASGPLDTFPGELFF

SEQ ID NO: 577885 - protein, 17 aa, Homo sapiens
  CDR3 for alpha chain variable domain of TCR clone 288943 (TRAV3, TRAJ6)
CAVRDGSRAGGSYIPTF

SEQ ID NO: 577886 - protein, 17 aa, Homo sapiens
  CDR3 for beta chain variable domain of TCR clone 288943 (TRBV15, TRBJ1-5)
CATSRAPPGTRNQPQHF

SEQ ID NO: 577887 - protein, 12 aa, Homo sapiens
  CDR3 for alpha chain variable domain of TCR clone 288944 (TRAV12-3, TRAJ17)
CAMTLTGNKLTS

SEQ ID NO: 577888 - protein, 13 aa, Homo sapiens
  CDR3 for beta chain variable domain of TCR clone 288944 (TRBV10-3, TRBJ2-7)
CASKLAVNYEQYF

SEQ ID NO: 577889 - protein, 11 aa, Homo sapiens
  CDR3 for alpha chain variable domain of TCR clone 288945 (TRAV2, TRAJ13)
CASGGYQKVTF

SEQ ID NO: 577890 - protein, 14 aa, Homo sapiens
  CDR3 for beta chain variable domain of TCR clone 288945 (TRBV6-1, TRBJ2-1)
CATFTSGQNNEQFF

SEQ ID NO: 577891 - protein, 13 aa, Homo sapiens
  CDR3 for alpha chain variable domain of TCR clone 288946 (TRAV8-4, TRAJ36)
CAGSVAGANNLFF

SEQ ID NO: 577892 - protein, 15 aa, Homo sapiens
  CDR3 for beta chain variable domain of TCR clone 288946 (TRBV7-2, TRBJ2-5)
CASSLEGRGVETQYF

SEQ ID NO: 577893 - protein, 15 aa, Homo sapiens
  CDR3 for alpha chain variable domain of TCR clone 288947 (TRAV25, TRAJ52)
CAGRPGGTSYGKLTF

SEQ ID NO: 577894 - protein, 12 aa, Homo sapiens
  CDR3 for beta chain variable domain of TCR clone 288947 (TRBV7-9, TRBJ2-7)
CASSIKREEQYF

SEQ ID NO: 577895 - protein, 13 aa, Homo sapiens
  CDR3 for alpha chain variable domain of TCR clone 288948 (TRAV2, TRAJ29)
CAVLNSGNTPLVF

SEQ ID NO: 577896 - protein, 14 aa, Homo sapiens
  CDR3 for beta chain variable domain of TCR clone 288948 (TRBV7-9, TRBJ2-7)
CASSLQQGGYEQYF

SEQ ID NO: 577897 - protein, 14 aa, Homo sapiens
  CDR3 for alpha chain variable domain of TCR clone 288949 (TRAV20, TRAJ32)
CCGRYGGATNKLNF

SEQ ID NO: 577898 - protein, 16 aa, Homo sapiens
  CDR3 for beta chain variable domain of TCR clone 288949 (TRBV19, TRBJ2-2)
GASRSPGTGATGELFF

SEQ ID NO: 577899 - protein, 18 aa, Homo sapiens
  CDR3 for alpha chain variable domain of TCR clone 288950 (TRAV26-1, TRAJ5)
CIVRVVPPRDPGRRALTF

SEQ ID NO: 577900 - protein, 15 aa, Homo sapiens
  CDR3 for beta chain variable domain of TCR clone 288950 (TRBV7-9, TRBJ2-7)
CASSLPMGQANEQYF

SEQ ID NO: 577901 - protein, 14 aa, Homo sapiens
  CDR3 for alpha chain variable domain of TCR clone 288951 (TRAV2, TRAJ9)
CAVEDRGGGFKTIF

SEQ ID NO: 577902 - protein, 14 aa, Homo sapiens
  CDR3 for beta chain variable domain of TCR clone 288951 (TRBV19, TRBJ2-1)
CARGARSFQWEQFF

SEQ ID NO: 577903 - protein, 13 aa, Homo sapiens
  CDR3 for alpha chain variable domain of TCR clone 288952 (TRAV13-1, TRAJ37)
CAARSGNTGKLIF

SEQ ID NO: 577904 - protein, 12 aa, Homo sapiens
  CDR3 for beta chain variable domain of TCR clone 288952 (TRBV7-3, TRBJ2-1)
CASSFINNEQFF

SEQ ID NO: 577905 - protein, 17 aa, Homo sapiens
  CDR3 for alpha chain variable domain of TCR clone 288953 (TRAV3, TRAJ7)
CAVRDMSPLEGTTDSLL

SEQ ID NO: 577906 - protein, 17 aa, Homo sapiens
  CDR3 for beta chain variable domain of TCR clone 288953 (TRBV7-8, TRBJ2-6)
CASSAGTGGAGANVLTF

SEQ ID NO: 577907 - protein, 16 aa, Homo sapiens
  CDR3 for alpha chain variable domain of TCR clone 288954 (TRAV38-1, TRAJ42)
CAFMKLGGGSQGNLIF

SEQ ID NO: 577908 - protein, 15 aa, Homo sapiens
  CDR3 for beta chain variable domain of TCR clone 288954 (TRBV7-9, TRBJ1-4)
CASSARTGGNEKLFF

SEQ ID NO: 577909 - protein, 22 aa, Homo sapiens
  CDR3 for alpha chain variable domain of TCR clone 288955 (TRAV2, TRAJ38)
CAVEDFPNAGNNHIQNPDPAVY

SEQ ID NO: 577910 - protein, 14 aa, Homo sapiens
  CDR3 for beta chain variable domain of TCR clone 288955 (TRBV29-1, TRBJ1-4)
CSVSGRQGGEKLFF

SEQ ID NO: 577911 - protein, 15 aa, Homo sapiens
  CDR3 for alpha chain variable domain of TCR clone 288956 (TRAV27, TRAJ38)
CAARRNAGNNRKLIW

SEQ ID NO: 577912 - protein, 13 aa, Homo sapiens
  CDR3 for beta chain variable domain of TCR clone 288956 (TRBV20-1, TRBJ1-1)
CSARGGGSTEAFF

SEQ ID NO: 577913 - protein, 14 aa, Homo sapiens
  CDR3 for alpha chain variable domain of TCR clone 288957 (TRAV12-2, TRAJ40)
CAVKIPSGTYKYIF

SEQ ID NO: 577914 - protein, 14 aa, Homo sapiens
  CDR3 for beta chain variable domain of TCR clone 288957 (TRBV18, TRBJ2-5)
CASSPLRVQETQYC

SEQ ID NO: 577915 - protein, 17 aa, Homo sapiens
  CDR3 for alpha chain variable domain of TCR clone 288958 (TRAV3, TRAJ38)
CAVRDCLNAGNNRKLIW

SEQ ID NO: 577916 - protein, 13 aa, Homo sapiens
  CDR3 for beta chain variable domain of TCR clone 288958 (TRBV4-2, TRBJ1-1)
CASSQAGNTEAFF

SEQ ID NO: 577917 - protein, 11 aa, Homo sapiens
  CDR3 for alpha chain variable domain of TCR clone 288959 (TRAV35, TRAJ30)
CAPGGDDKIIF

SEQ ID NO: 577918 - protein, 18 aa, Homo sapiens
  CDR3 for beta chain variable domain of TCR clone 288959 (TRBV7-6, TRBJ2-1)
GHVSVCQQLGGGADEQFF

SEQ ID NO: 577919 - protein, 14 aa, Homo sapiens
  CDR3 for alpha chain variable domain of TCR clone 288960 (TRAV1-2, TRAJ16)
CAVNRFSDGQKLLF

SEQ ID NO: 577920 - protein, 17 aa, Homo sapiens
  CDR3 for beta chain variable domain of TCR clone 288960 (TRBV10-1, TRBJ2-1)
CASSPQRAGGPFNEQFF

SEQ ID NO: 577921 - protein, 14 aa, Homo sapiens
  CDR3 for alpha chain variable domain of TCR clone 288961 (TRAV12-1, TRAJ9)
CVVNRRTGGFKTIF

SEQ ID NO: 577922 - protein, 13 aa, Homo sapiens
  CDR3 for beta chain variable domain of TCR clone 288961 (TRBV5-7, TRBJ2-1)
CASSVVESVEQFF

SEQ ID NO: 577923 - protein, 16 aa, Homo sapiens
  CDR3 for alpha chain variable domain of TCR clone 288962 (TRAV12-2, TRAJ40)
CAAIRGGTSGTYKYIF

SEQ ID NO: 577924 - protein, 14 aa, Homo sapiens
  CDR3 for beta chain variable domain of TCR clone 288962 (TRBV20-1, TRBJ2-5)
CSARDGRAGETQYF

SEQ ID NO: 577925 - protein, 12 aa, Homo sapiens
  CDR3 for alpha chain variable domain of TCR clone 288963 (TRAV13-1, TRAJ9)
CASHTGGFKTVF

SEQ ID NO: 577926 - protein, 18 aa, Homo sapiens
  CDR3 for beta chain variable domain of TCR clone 288963 (TRBV11-2, TRBJ2-3)
CASSLGGASRGAPNTQYC

SEQ ID NO: 577927 - protein, 21 aa, Homo sapiens
  CDR3 for alpha chain variable domain of TCR clone 288964 (TRAV12-1, TRAJ32)
SSVIQPPTSMNYGGATNKLIL

SEQ ID NO: 577928 - protein, 18 aa, Homo sapiens
  CDR3 for beta chain variable domain of TCR clone 288964 (TRBV20-1, TRBJ2-3)
CSASGLAGGPGTTDTQYF

SEQ ID NO: 577929 - protein, 11 aa, Homo sapiens
  CDR3 for alpha chain variable domain of TCR clone 288965 (TRAV12-1, TRAJ26)
CVVAYGQNFLF

SEQ ID NO: 577930 - protein, 15 aa, Homo sapiens
  CDR3 for beta chain variable domain of TCR clone 288965 (TRBV12-4, TRBJ2-5)
CASSGTGQAQETQYF

SEQ ID NO: 577931 - protein, 17 aa, Homo sapiens
  CDR3 for alpha chain variable domain of TCR clone 288966 (TRAV3, TRAJ42)
CAVRDRDYGGSQGNLIF

SEQ ID NO: 577932 - protein, 18 aa, Homo sapiens
  CDR3 for beta chain variable domain of TCR clone 288966 (TRBV20-1, TRBJ2-3)
CSASGGAGGPGTTDTQYV

SEQ ID NO: 577933 - protein, 15 aa, Homo sapiens
  CDR3 for alpha chain variable domain of TCR clone 288967 (TRAV3, TRAJ29)
CAVRDLYSGNTPLVF

SEQ ID NO: 577934 - protein, 21 aa, Homo sapiens
  CDR3 for beta chain variable domain of TCR clone 288967 (TRBV24-1, TRBJ2-5)
ESAIPNQTALYFCATRETQYF

SEQ ID NO: 577935 - protein, 13 aa, Homo sapiens
  CDR3 for alpha chain variable domain of TCR clone 288968 (TRAV20, TRAJ37)
CAGCSSNTGKLIF

SEQ ID NO: 577936 - protein, 17 aa, Homo sapiens
  CDR3 for beta chain variable domain of TCR clone 288968 (TRBV27, TRBJ2-1)
CASSLGGLRGSYNEQFF

SEQ ID NO: 577937 - protein, 15 aa, Homo sapiens
  CDR3 for alpha chain variable domain of TCR clone 288969 (TRAV19, TRAJ45)
CALSASGGGADGLTF

SEQ ID NO: 577938 - protein, 15 aa, Homo sapiens
  CDR3 for beta chain variable domain of TCR clone 288969 (TRBV13, TRBJ1-5)
CASSRTGRGHQPQHC

SEQ ID NO: 577939 - protein, 18 aa, Homo sapiens
  CDR3 for alpha chain variable domain of TCR clone 288970 (TRAV8-4, TRAJ52)
CAVTRANAGGTSYGKLTF

SEQ ID NO: 577940 - protein, 15 aa, Homo sapiens
  CDR3 for beta chain variable domain of TCR clone 288970 (TRBV6-3, TRBJ2-7)
CASSSPGTVFYEQYF

SEQ ID NO: 577941 - protein, 16 aa, Homo sapiens
  CDR3 for alpha chain variable domain of TCR clone 288971 (TRAV26-1, TRAJ23)
CIVRVHPYNQGGKLIF

SEQ ID NO: 577942 - protein, 16 aa, Homo sapiens
  CDR3 for beta chain variable domain of TCR clone 288971 (TRBV20-1, TRBJ1-2)
CSASMGQGVANYGYTF

SEQ ID NO: 577943 - protein, 11 aa, Homo sapiens
  CDR3 for alpha chain variable domain of TCR clone 288972 (TRAV2, TRAJ23)
CAVETRGKLIF

SEQ ID NO: 577944 - protein, 14 aa, Homo sapiens
  CDR3 for beta chain variable domain of TCR clone 288972 (TRBV4-1, TRBJ2-2)
CASSQAVNTGELFF

SEQ ID NO: 577945 - protein, 16 aa, Homo sapiens
  CDR3 for alpha chain variable domain of TCR clone 288973 (TRAV12-2, TRAJ10)
CAVNRVLTGGGNKLTF

SEQ ID NO: 577946 - protein, 16 aa, Homo sapiens
  CDR3 for beta chain variable domain of TCR clone 288973 (TRBV25-1, TRBJ2-7)
CASSELTGGGIYEQYF

SEQ ID NO: 577947 - protein, 18 aa, Homo sapiens
  CDR3 for alpha chain variable domain of TCR clone 288974 (TRAV21, TRAJ52)
CAVRPSPAGGTSYGTLTF

SEQ ID NO: 577948 - protein, 17 aa, Homo sapiens
  CDR3 for beta chain variable domain of TCR clone 288974 (TRBV20-1, TRBJ2-2)
CSASGSGQGGLTGELFF

SEQ ID NO: 577949 - protein, 10 aa, Homo sapiens
  CDR3 for alpha chain variable domain of TCR clone 288975 (TRAV1-2, TRAJ20)
CALNDYKLSF

SEQ ID NO: 577950 - protein, 16 aa, Homo sapiens
  CDR3 for beta chain variable domain of TCR clone 288975 (TRBV20-1, TRBJ1-1)
CSARALTHGMNTEAFF

SEQ ID NO: 577951 - protein, 12 aa, Homo sapiens
  CDR3 for alpha chain variable domain of TCR clone 288976 (TRAV12-1, TRAJ40)
CVVYSGTYKYIF

SEQ ID NO: 577952 - protein, 12 aa, Homo sapiens
  CDR3 for beta chain variable domain of TCR clone 288976 (TRBV11-2, TRBJ2-3)
GAARGAPNTQYF

SEQ ID NO: 577953 - protein, 12 aa, Homo sapiens
  CDR3 for alpha chain variable domain of TCR clone 288977 (TRAV12-2, TRAJ10)
WGVTGGGNKLTS

SEQ ID NO: 577954 - protein, 15 aa, Homo sapiens
  CDR3 for beta chain variable domain of TCR clone 288977 (TRBV20-1, TRBJ2-7)
CSARDRVSGMDEQYF

SEQ ID NO: 577955 - protein, 23 aa, Homo sapiens
  CDR3 for alpha chain variable domain of TCR clone 288978 (TRAV12-2, TRAJ36)
SLLIRDSQPSDSATLERANNLFF

SEQ ID NO: 577956 - protein, 17 aa, Homo sapiens
  CDR3 for beta chain variable domain of TCR clone 288978 (TRBV3-1, TRBJ2-3)
CASSQRLDRGHTDTQYF

SEQ ID NO: 577957 - protein, 14 aa, Homo sapiens
  CDR3 for alpha chain variable domain of TCR clone 288979 (TRAV8-3, TRAJ4)
CAVGASGGYNKLIF

SEQ ID NO: 577958 - protein, 15 aa, Homo sapiens
  CDR3 for beta chain variable domain of TCR clone 288979 (TRBV4-3, TRBJ2-2)
RSSHLQGSGTGELFF

SEQ ID NO: 577959 - protein, 15 aa, Homo sapiens
  CDR3 for alpha chain variable domain of TCR clone 288980 (TRAV17, TRAJ56)
CATEPFTGANSKLTI

SEQ ID NO: 577960 - protein, 14 aa, Homo sapiens
  CDR3 for beta chain variable domain of TCR clone 288980 (TRBV19, TRBJ2-1)
CASPTFVLSGEQFF

SEQ ID NO: 577961 - protein, 12 aa, Homo sapiens
  CDR3 for alpha chain variable domain of TCR clone 288981 (TRAV12-1, TRAJ23)
CVVNNQGGKLIF

SEQ ID NO: 577962 - protein, 15 aa, Homo sapiens
  CDR3 for beta chain variable domain of TCR clone 288981 (TRBV6-3, TRBJ2-7)
CASSSPGTVFYEQYF

SEQ ID NO: 577963 - protein, 16 aa, Homo sapiens
  CDR3 for alpha chain variable domain of TCR clone 288982 (TRAV30, TRAJ24)
CVTEIVDADSWGKFQF

SEQ ID NO: 577964 - protein, 13 aa, Homo sapiens
  CDR3 for beta chain variable domain of TCR clone 288982 (TRBV28, TRBJ2-5)
CASSFAGGETQYF

SEQ ID NO: 577965 - protein, 14 aa, Homo sapiens
  CDR3 for alpha chain variable domain of TCR clone 288983 (TRAV9-2, TRAJ39)
CALYIYNAGNMLTF

SEQ ID NO: 577966 - protein, 14 aa, Homo sapiens
  CDR3 for beta chain variable domain of TCR clone 288983 (TRBV18, TRBJ1-1)
CASSPPTGRTGAFF

SEQ ID NO: 577967 - protein, 14 aa, Homo sapiens
  CDR3 for alpha chain variable domain of TCR clone 288984 (TRAV13-1, TRAJ40)
CAASMTSGTYKYIF

SEQ ID NO: 577968 - protein, 15 aa, Homo sapiens
  CDR3 for beta chain variable domain of TCR clone 288984 (TRBV7-3, TRBJ2-1)
CASSPAGGGQVEQFF

SEQ ID NO: 577969 - protein, 13 aa, Homo sapiens
  CDR3 for alpha chain variable domain of TCR clone 288985 (TRAV27, TRAJ54)
CAGAGQGAQKLVF

SEQ ID NO: 577970 - protein, 15 aa, Homo sapiens
  CDR3 for beta chain variable domain of TCR clone 288985 (TRBV7-2, TRBJ2-2)
CASRRPGQNTGELFF

SEQ ID NO: 577971 - protein, 19 aa, Homo sapiens
  CDR3 for alpha chain variable domain of TCR clone 288986 (TRAV1-2, TRAJ26)
CLLPLCCERPDNCGQNFVF

SEQ ID NO: 577972 - protein, 11 aa, Homo sapiens
  CDR3 for beta chain variable domain of TCR clone 288986 (TRBV29-1, TRBJ2-5)
CSEDRTGTQYF

SEQ ID NO: 577973 - protein, 12 aa, Homo sapiens
  CDR3 for alpha chain variable domain of TCR clone 288987 (TRAV12-3, TRAJ17)
CAMTLTGNKLTF

SEQ ID NO: 577974 - protein, 15 aa, Homo sapiens
  CDR3 for beta chain variable domain of TCR clone 288987 (TRBV11-3, TRBJ2-3)
CDSLKDGREGDTQYF

SEQ ID NO: 577975 - protein, 13 aa, Homo sapiens
  CDR3 for alpha chain variable domain of TCR clone 288988 (TRAV16, TRAJ20)
CALGPSNDYKLSS

SEQ ID NO: 577976 - protein, 15 aa, Homo sapiens
  CDR3 for beta chain variable domain of TCR clone 288988 (TRBV5-1, TRBJ2-2)
CASSRVGSDTGELFF

SEQ ID NO: 577977 - protein, 13 aa, Homo sapiens
  CDR3 for alpha chain variable domain of TCR clone 288989 (TRAV27, TRAJ43)
CAGAGNNNNDMRF

SEQ ID NO: 577978 - protein, 14 aa, Homo sapiens
  CDR3 for beta chain variable domain of TCR clone 288989 (TRBV7-2, TRBJ2-7)
CASRSQGAAHEQYF

SEQ ID NO: 577979 - protein, 16 aa, Homo sapiens
  CDR3 for alpha chain variable domain of TCR clone 288990 (TRAV1-2, TRAJ10)
CAVRRVLTGGGNKLTF

SEQ ID NO: 577980 - protein, 13 aa, Homo sapiens
  CDR3 for beta chain variable domain of TCR clone 288990 (TRBV12-4, TRBJ1-1)
CASSPGTGFEAFF

SEQ ID NO: 577981 - protein, 14 aa, Homo sapiens
  CDR3 for alpha chain variable domain of TCR clone 288991 (TRAV17, TRAJ45)
CATASGGGADGLTF

SEQ ID NO: 577982 - protein, 13 aa, Homo sapiens
  CDR3 for beta chain variable domain of TCR clone 288991 (TRBV2, TRBJ2-5)
CASGTPYQETQYF

SEQ ID NO: 577983 - protein, 14 aa, Homo sapiens
  CDR3 for alpha chain variable domain of TCR clone 288992 (TRAV1-2, TRAJ16)
CAVNRFSYGQKLLF

SEQ ID NO: 577984 - protein, 15 aa, Homo sapiens
  CDR3 for beta chain variable domain of TCR clone 288992 (TRBV7-2, TRBJ2-1)
CASSSGLAGGNEQFF

SEQ ID NO: 577985 - protein, 16 aa, Homo sapiens
  CDR3 for alpha chain variable domain of TCR clone 288993 (TRAV12-2, TRAJ52)
CRLANAGGTRYGKLTF

SEQ ID NO: 577986 - protein, 13 aa, Homo sapiens
  CDR3 for beta chain variable domain of TCR clone 288993 (TRBV10-3, TRBJ2-7)
CASKLAVNYEQYF

SEQ ID NO: 577987 - protein, 16 aa, Homo sapiens
  CDR3 for alpha chain variable domain of TCR clone 288994 (TRAV30, TRAJ24)
CGTEIVDADSWGKFQF

SEQ ID NO: 577988 - protein, 14 aa, Homo sapiens
  CDR3 for beta chain variable domain of TCR clone 288994 (TRBV12-5, TRBJ2-5)
CASGTRTHQETQHF

SEQ ID NO: 577989 - protein, 17 aa, Homo sapiens
  CDR3 for alpha chain variable domain of TCR clone 288995 (TRAV12-3, TRAJ18)
CAMIRADRGPTLGRLSF

SEQ ID NO: 577990 - protein, 14 aa, Homo sapiens
  CDR3 for beta chain variable domain of TCR clone 288995 (TRBV5-7, TRBJ1-6)
CASTPWPADSPLHF

SEQ ID NO: 577991 - protein, 14 aa, Homo sapiens
  CDR3 for alpha chain variable domain of TCR clone 288996 (TRAV3, TRAJ9)
CAVRLNTGGFKTIF

SEQ ID NO: 577992 - protein, 14 aa, Homo sapiens
  CDR3 for beta chain variable domain of TCR clone 288996 (TRBV7-2, TRBJ2-7)
CASRSQGAAYEQYF

SEQ ID NO: 577993 - protein, 15 aa, Homo sapiens
  CDR3 for alpha chain variable domain of TCR clone 288997 (TRAV27, TRAJ38)
CAARRNAGNNRNLIW

SEQ ID NO: 577994 - protein, 13 aa, Homo sapiens
  CDR3 for beta chain variable domain of TCR clone 288997 (TRBV12-5, TRBJ2-3)
CVSGDRPSDTQYF

SEQ ID NO: 577995 - protein, 10 aa, Homo sapiens
  CDR3 for alpha chain variable domain of TCR clone 288998 (TRAV21, TRAJ31)
CAVDNARLMV

SEQ ID NO: 577996 - protein, 13 aa, Homo sapiens
  CDR3 for beta chain variable domain of TCR clone 288998 (TRBV4-1, TRBJ1-1)
CASSRKMNTEAFF

SEQ ID NO: 577997 - protein, 11 aa, Homo sapiens
  CDR3 for alpha chain variable domain of TCR clone 288999 (TRAV20, TRAJ34)
CTRDNTDKLIF

SEQ ID NO: 577998 - protein, 15 aa, Homo sapiens
  CDR3 for beta chain variable domain of TCR clone 288999 (TRBV2, TRBJ2-1)
CASSVTSEGTDEQSF

SEQ ID NO: 577999 - protein, 15 aa, Homo sapiens
  CDR3 for alpha chain variable domain of TCR clone 289000 (TRAV12-3, TRAJ11)
CAMSEENSGYSTLTF

SEQ ID NO: 578000 - protein, 14 aa, Homo sapiens
  CDR3 for beta chain variable domain of TCR clone 289000 (TRBV20-1, TRBJ1-1)
CSAQTRIGGTEAFF

SEQ ID NO: 578001 - protein, 16 aa, Homo sapiens
  CDR3 for alpha chain variable domain of TCR clone 289001 (TRAV29/DV5, TRAJ36)
CAASAGVETGANNLFF

SEQ ID NO: 578002 - protein, 15 aa, Homo sapiens
  CDR3 for beta chain variable domain of TCR clone 289001 (TRBV27, TRBJ2-7)
CASSTAGTGSYEQYF

SEQ ID NO: 578003 - protein, 12 aa, Homo sapiens
  CDR3 for alpha chain variable domain of TCR clone 289002 (TRAV12-2, TRAJ9)
CAVYNGGFKTIF

SEQ ID NO: 578004 - protein, 14 aa, Homo sapiens
  CDR3 for beta chain variable domain of TCR clone 289002 (TRBV6-1, TRBJ1-5)
CASSETGMEQPQQF

SEQ ID NO: 578005 - protein, 13 aa, Homo sapiens
  CDR3 for alpha chain variable domain of TCR clone 289003 (TRAV1-2, TRAJ26)
CAVRPNYGQNFVF

SEQ ID NO: 578006 - protein, 14 aa, Homo sapiens
  CDR3 for beta chain variable domain of TCR clone 289003 (TRBV19, TRBJ2-1)
CASPTFVLSGEQFF

SEQ ID NO: 578007 - protein, 13 aa, Homo sapiens
  CDR3 for alpha chain variable domain of TCR clone 289004 (TRAV12-3, TRAJ5)
CAMIYTGRRALTF

SEQ ID NO: 578008 - protein, 16 aa, Homo sapiens
  CDR3 for beta chain variable domain of TCR clone 289004 (TRBV27, TRBJ2-2)
CASSFRGLVRTGELFF

SEQ ID NO: 578009 - protein, 14 aa, Homo sapiens
  CDR3 for alpha chain variable domain of TCR clone 289005 (TRAV38-1, TRAJ43)
CAFMKHNNINDMRF

SEQ ID NO: 578010 - protein, 17 aa, Homo sapiens
  CDR3 for beta chain variable domain of TCR clone 289005 (TRBV7-7, TRBJ1-4)
CASSLVGQGASNEKLFF

SEQ ID NO: 578011 - protein, 11 aa, Homo sapiens
  CDR3 for alpha chain variable domain of TCR clone 289006 (TRAV13-2, TRAJ20)
CAENMSYKLSF

SEQ ID NO: 578012 - protein, 13 aa, Homo sapiens
  CDR3 for beta chain variable domain of TCR clone 289006 (TRBV20-1, TRBJ2-5)
SSARYTGEETQYV

SEQ ID NO: 578013 - protein, 15 aa, Homo sapiens
  CDR3 for alpha chain variable domain of TCR clone 289007 (TRAV27, TRAJ38)
CAARRNAGTNRKLIG

SEQ ID NO: 578014 - protein, 13 aa, Homo sapiens
  CDR3 for beta chain variable domain of TCR clone 289007 (TRBV12-5, TRBJ2-3)
CASGDRQSDTQYF

SEQ ID NO: 578015 - protein, 14 aa, Homo sapiens
  CDR3 for alpha chain variable domain of TCR clone 289008 (TRAV4, TRAJ23)
CLVGPYNQGGKLIF

SEQ ID NO: 578016 - protein, 18 aa, Homo sapiens
  CDR3 for beta chain variable domain of TCR clone 289008 (TRBV6-5, TRBJ2-6)
CASRTPGQGKTGANVLTF

SEQ ID NO: 578017 - protein, 15 aa, Homo sapiens
  CDR3 for alpha chain variable domain of TCR clone 289009 (TRAV13-1, TRAJ57)
QVPPLSQGGSEKLVF

SEQ ID NO: 578018 - protein, 17 aa, Homo sapiens
  CDR3 for beta chain variable domain of TCR clone 289009 (TRBV7-3, TRBJ2-3)
CASSLVKRMRGADTQYF

SEQ ID NO: 578019 - protein, 16 aa, Homo sapiens
  CDR3 for alpha chain variable domain of TCR clone 289010 (TRAV20, TRAJ52)
CAVLPDGGTSCGKLTF

SEQ ID NO: 578020 - protein, 12 aa, Homo sapiens
  CDR3 for beta chain variable domain of TCR clone 289010 (TRBV19, TRBJ2-1)
CASSQISNEQFF

SEQ ID NO: 578021 - protein, 18 aa, Homo sapiens
  CDR3 for alpha chain variable domain of TCR clone 289011 (TRAV21, TRAJ53)
CAVKGGENRGGSKYKLTF

SEQ ID NO: 578022 - protein, 14 aa, Homo sapiens
  CDR3 for beta chain variable domain of TCR clone 289011 (TRBV6-1, TRBJ1-5)
CASSAGAGSQPQHF

SEQ ID NO: 578023 - protein, 16 aa, Homo sapiens
  CDR3 for alpha chain variable domain of TCR clone 289012 (TRAV30, TRAJ24)
CGTEIVDADSWGKFQV

SEQ ID NO: 578024 - protein, 13 aa, Homo sapiens
  CDR3 for beta chain variable domain of TCR clone 289012 (TRBV10-3, TRBJ2-7)
CASKLAVNYEQYF

SEQ ID NO: 578025 - protein, 13 aa, Homo sapiens
  CDR3 for alpha chain variable domain of TCR clone 289013 (TRAV8-3, TRAJ36)
CAVGATGANNLFF

SEQ ID NO: 578026 - protein, 15 aa, Homo sapiens
  CDR3 for beta chain variable domain of TCR clone 289013 (TRBV7-2, TRBJ1-2)
CASSPRAGWNYVYAF

SEQ ID NO: 578027 - protein, 11 aa, Homo sapiens
  CDR3 for alpha chain variable domain of TCR clone 289014 (TRAV21, TRAJ34)
CAVTNTDKLIF

SEQ ID NO: 578028 - protein, 16 aa, Homo sapiens
  CDR3 for beta chain variable domain of TCR clone 289014 (TRBV18, TRBJ1-1)
CASSPGVGGRGGEAYF

SEQ ID NO: 578029 - protein, 14 aa, Homo sapiens
  CDR3 for alpha chain variable domain of TCR clone 289015 (TRAV35, TRAJ50)
CAGHRKTSYDKLIF

SEQ ID NO: 578030 - protein, 17 aa, Homo sapiens
  CDR3 for beta chain variable domain of TCR clone 289015 (TRBV7-8, TRBJ2-6)
CASSAGTGGAGANNLTI

SEQ ID NO: 578031 - protein, 14 aa, Homo sapiens
  CDR3 for alpha chain variable domain of TCR clone 289016 (TRAV23/DV6, TRAJ22)
CAASVSGSARKLTF

SEQ ID NO: 578032 - protein, 16 aa, Homo sapiens
  CDR3 for beta chain variable domain of TCR clone 289016 (TRBV19, TRBJ2-2)
CASSFPGQGLAGELFF

SEQ ID NO: 578033 - protein, 15 aa, Homo sapiens
  CDR3 for alpha chain variable domain of TCR clone 289017 (TRAV3, TRAJ22)
CAVRDRGGSARQLTF

SEQ ID NO: 578034 - protein, 14 aa, Homo sapiens
  CDR3 for beta chain variable domain of TCR clone 289017 (TRBV20-1, TRBJ2-5)
CSAHRQGLWETQYF

SEQ ID NO: 578035 - protein, 16 aa, Homo sapiens
  CDR3 for alpha chain variable domain of TCR clone 289018 (TRAV3, TRAJ27)
CAVRDPQGTNAAQSTF

SEQ ID NO: 578036 - protein, 15 aa, Homo sapiens
  CDR3 for beta chain variable domain of TCR clone 289018 (TRBV20-1, TRBJ2-7)
CSARDRVSGMDEQYF

SEQ ID NO: 578037 - protein, 14 aa, Homo sapiens
  CDR3 for alpha chain variable domain of TCR clone 289019 (TRAV1-2, TRAJ16)
CAVNRFSDGQKLLF

SEQ ID NO: 578038 - protein, 14 aa, Homo sapiens
  CDR3 for beta chain variable domain of TCR clone 289019 (TRBV4-3, TRBJ1-4)
CASSPLQRNEKLFF

SEQ ID NO: 578039 - protein, 13 aa, Homo sapiens
  CDR3 for alpha chain variable domain of TCR clone 289020 (TRAV21, TRAJ27)
CAARPCNAGKSTF

SEQ ID NO: 578040 - protein, 13 aa, Homo sapiens
  CDR3 for beta chain variable domain of TCR clone 289020 (TRBV18, TRBJ2-7)
CASQSGGGYEQYF

SEQ ID NO: 578041 - protein, 12 aa, Homo sapiens
  CDR3 for alpha chain variable domain of TCR clone 289021 (TRAV12-1, TRAJ31)
CVMNRNNARLMF

SEQ ID NO: 578042 - protein, 15 aa, Homo sapiens
  CDR3 for beta chain variable domain of TCR clone 289021 (TRBV10-3, TRBJ2-3)
CAISEALSSTDTQYF

SEQ ID NO: 578043 - protein, 16 aa, Homo sapiens
  CDR3 for alpha chain variable domain of TCR clone 289022 (TRAV1-2, TRAJ10)
CAVRGVLTGGGIKLTF

SEQ ID NO: 578044 - protein, 12 aa, Homo sapiens
  CDR3 for beta chain variable domain of TCR clone 289022 (TRBV7-8, TRBJ2-7)
CASSLGDREQYF

SEQ ID NO: 578045 - protein, 16 aa, Homo sapiens
  CDR3 for alpha chain variable domain of TCR clone 289023 (TRAV30, TRAJ24)
CGTEIVDADSWGEFPF

SEQ ID NO: 578046 - protein, 14 aa, Homo sapiens
  CDR3 for beta chain variable domain of TCR clone 289023 (TRBV12-5, TRBJ2-5)
CASGSRTHQETQYF

SEQ ID NO: 578047 - protein, 18 aa, Homo sapiens
  CDR3 for alpha chain variable domain of TCR clone 289024 (TRAV3, TRAJ32)
CAVRDIRGYVGATNKLIF

SEQ ID NO: 578048 - protein, 15 aa, Homo sapiens
  CDR3 for beta chain variable domain of TCR clone 289024 (TRBV12-4, TRBJ2-2)
CASSLWVRHTGELFF

SEQ ID NO: 578049 - protein, 12 aa, Homo sapiens
  CDR3 for alpha chain variable domain of TCR clone 289025 (TRAV12-2, TRAJ36)
CAAPRGANNLFF

SEQ ID NO: 578050 - protein, 15 aa, Homo sapiens
  CDR3 for beta chain variable domain of TCR clone 289025 (TRBV4-1, TRBJ1-4)
CASSDTGGTNEKLFF

SEQ ID NO: 578051 - protein, 13 aa, Homo sapiens
  CDR3 for alpha chain variable domain of TCR clone 289026 (TRAV8-3, TRAJ43)
CAVGPDNNNDMRF

SEQ ID NO: 578052 - protein, 14 aa, Homo sapiens
  CDR3 for beta chain variable domain of TCR clone 289026 (TRBV10-3, TRBJ1-3)
CAIRGQRAGNTIYF

SEQ ID NO: 578053 - protein, 19 aa, Homo sapiens
  CDR3 for alpha chain variable domain of TCR clone 289027 (TRAV26-1, TRAJ52)
CIVRARRNAGGTSYGKLTF

SEQ ID NO: 578054 - protein, 15 aa, Homo sapiens
  CDR3 for beta chain variable domain of TCR clone 289027 (TRBV12-4, TRBJ2-5)
CASSPPTGLQETQYF

SEQ ID NO: 578055 - protein, 16 aa, Homo sapiens
  CDR3 for alpha chain variable domain of TCR clone 289028 (TRAV27, TRAJ34)
CAGGGGEIITPTSSSL

SEQ ID NO: 578056 - protein, 15 aa, Homo sapiens
  CDR3 for beta chain variable domain of TCR clone 289028 (TRBV9, TRBJ1-4)
CASSVGGSTNEKLFF

SEQ ID NO: 578057 - protein, 16 aa, Homo sapiens
  CDR3 for alpha chain variable domain of TCR clone 289029 (TRAV36/DV7, TRAJ33)
WSPGNKVQDSNYQLIW

SEQ ID NO: 578058 - protein, 16 aa, Homo sapiens
  CDR3 for beta chain variable domain of TCR clone 289029 (TRBV9, TRBJ2-1)
CASSVGGGGNYNEQFF

SEQ ID NO: 578059 - protein, 10 aa, Homo sapiens
  CDR3 for alpha chain variable domain of TCR clone 289030 (TRAV8-4, TRAJ43)
CAVTFGDIRF

SEQ ID NO: 578060 - protein, 16 aa, Homo sapiens
  CDR3 for beta chain variable domain of TCR clone 289030 (TRBV20-1, TRBJ1-2)
CSASMGQGVANYGYTF

SEQ ID NO: 578061 - protein, 14 aa, Homo sapiens
  CDR3 for alpha chain variable domain of TCR clone 289031 (TRAV13-1, TRAJ35)
CAASKGGFGNVLHC

SEQ ID NO: 578062 - protein, 13 aa, Homo sapiens
  CDR3 for beta chain variable domain of TCR clone 289031 (TRBV7-3, TRBJ1-1)
CASSQDWDAEAFF

SEQ ID NO: 578063 - protein, 14 aa, Homo sapiens
  CDR3 for alpha chain variable domain of TCR clone 289032 (TRAV23/DV6, TRAJ17)
CAARGRAAGNKLTF

SEQ ID NO: 578064 - protein, 13 aa, Homo sapiens
  CDR3 for beta chain variable domain of TCR clone 289032 (TRBV28, TRBJ2-2)
CASIRESTGELFF

SEQ ID NO: 578065 - protein, 14 aa, Homo sapiens
  CDR3 for alpha chain variable domain of TCR clone 289033 (TRAV12-1, TRAJ3)
CVVILYSSASKIIF

SEQ ID NO: 578066 - protein, 15 aa, Homo sapiens
  CDR3 for beta chain variable domain of TCR clone 289033 (TRBV7-9, TRBJ1-6)
CASSSPGRGNSPLHF

SEQ ID NO: 578067 - protein, 13 aa, Homo sapiens
  CDR3 for alpha chain variable domain of TCR clone 289034 (TRAV21, TRAJ27)
CAALNTNAGKSTF

SEQ ID NO: 578068 - protein, 18 aa, Homo sapiens
  CDR3 for beta chain variable domain of TCR clone 289034 (TRBV11-2, TRBJ2-7)
CASSWRTVQTGQSYEQYF

SEQ ID NO: 578069 - protein, 15 aa, Homo sapiens
  CDR3 for alpha chain variable domain of TCR clone 289035 (TRAV13-2, TRAJ23)
CAETALWGQGGKLIF

SEQ ID NO: 578070 - protein, 16 aa, Homo sapiens
  CDR3 for beta chain variable domain of TCR clone 289035 (TRBV5-1, TRBJ2-2)
CASSWQGATNTGELFF

SEQ ID NO: 578071 - protein, 15 aa, Homo sapiens
  CDR3 for alpha chain variable domain of TCR clone 289036 (TRAV4, TRAJ39)
CLVGPNNNAGNMLTF

SEQ ID NO: 578072 - protein, 14 aa, Homo sapiens
  CDR3 for beta chain variable domain of TCR clone 289036 (TRBV13, TRBJ2-2)
CASSFQGGAGELFF

SEQ ID NO: 578073 - protein, 14 aa, Homo sapiens
  CDR3 for alpha chain variable domain of TCR clone 289037 (TRAV21, TRAJ37)
CAVKGSSNTGKLIF

SEQ ID NO: 578074 - protein, 14 aa, Homo sapiens
  CDR3 for beta chain variable domain of TCR clone 289037 (TRBV7-2, TRBJ2-1)
CASIRGGARNEQFF

SEQ ID NO: 578075 - protein, 12 aa, Homo sapiens
  CDR3 for alpha chain variable domain of TCR clone 289038 (TRAV8-3, TRAJ20)
CAVDFNDYKLSF

SEQ ID NO: 578076 - protein, 19 aa, Homo sapiens
  CDR3 for beta chain variable domain of TCR clone 289038 (TRBV7-2, TRBJ2-3)
CASSFLSRNWGGGTDTQYF

SEQ ID NO: 578077 - protein, 15 aa, Homo sapiens
  CDR3 for alpha chain variable domain of TCR clone 289039 (TRAV2, TRAJ9)
CAVEDRGTGGVKTIF

SEQ ID NO: 578078 - protein, 13 aa, Homo sapiens
  CDR3 for beta chain variable domain of TCR clone 289039 (TRBV4-1, TRBJ2-2)
RQQPSGEHRELFF

SEQ ID NO: 578079 - protein, 16 aa, Homo sapiens
  CDR3 for alpha chain variable domain of TCR clone 289040 (TRAV30, TRAJ24)
CGTEIVDADSWGKFQF

SEQ ID NO: 578080 - protein, 14 aa, Homo sapiens
  CDR3 for beta chain variable domain of TCR clone 289040 (TRBV7-2, TRBJ1-2)
CASSQTESTYGYTF

SEQ ID NO: 578081 - protein, 13 aa, Homo sapiens
  CDR3 for alpha chain variable domain of TCR clone 289041 (TRAV8-3, TRAJ4)
WVFYSGGYNKLIF

SEQ ID NO: 578082 - protein, 14 aa, Homo sapiens
  CDR3 for beta chain variable domain of TCR clone 289041 (TRBV7-9, TRBJ2-3)
CASSLEDGTDTLYF

SEQ ID NO: 578083 - protein, 14 aa, Homo sapiens
  CDR3 for alpha chain variable domain of TCR clone 289042 (TRAV3, TRAJ8)
CAALMNTGFLKLVF

SEQ ID NO: 578084 - protein, 15 aa, Homo sapiens
  CDR3 for beta chain variable domain of TCR clone 289042 (TRBV28, TRBJ2-5)
CASSLGLGNQETQYF

SEQ ID NO: 578085 - protein, 14 aa, Homo sapiens
  CDR3 for alpha chain variable domain of TCR clone 289043 (TRAV23/DV6, TRAJ57)
CAASNQGGTEKLVF

SEQ ID NO: 578086 - protein, 13 aa, Homo sapiens
  CDR3 for beta chain variable domain of TCR clone 289043 (TRBV11-2, TRBJ2-7)
CASSSYPSYEQYF

SEQ ID NO: 578087 - protein, 13 aa, Homo sapiens
  CDR3 for alpha chain variable domain of TCR clone 289044 (TRAV21, TRAJ20)
CAVGLRVDYKLSF

SEQ ID NO: 578088 - protein, 16 aa, Homo sapiens
  CDR3 for beta chain variable domain of TCR clone 289044 (TRBV4-1, TRBJ2-1)
CASSPYAGGHDNEQFF

SEQ ID NO: 578089 - protein, 14 aa, Homo sapiens
  CDR3 for alpha chain variable domain of TCR clone 289045 (TRAV14/DV4, TRAJ41)
CARGGPDSGYAINF

SEQ ID NO: 578090 - protein, 15 aa, Homo sapiens
  CDR3 for beta chain variable domain of TCR clone 289045 (TRBV19, TRBJ2-1)
CASSIQATSYNEQFF

SEQ ID NO: 578091 - protein, 15 aa, Homo sapiens
  CDR3 for alpha chain variable domain of TCR clone 289046 (TRAV3, TRAJ20)
CAVRDIRLSDYKLGF

SEQ ID NO: 578092 - protein, 15 aa, Homo sapiens
  CDR3 for beta chain variable domain of TCR clone 289046 (TRBV7-9, TRBJ1-6)
CASSSPGRGNSTLHF

SEQ ID NO: 578093 - protein, 13 aa, Homo sapiens
  CDR3 for alpha chain variable domain of TCR clone 289047 (TRAV27, TRAJ41)
CAGEGNSGYALNF

SEQ ID NO: 578094 - protein, 13 aa, Homo sapiens
  CDR3 for beta chain variable domain of TCR clone 289047 (TRBV7-8, TRBJ2-1)
CASSLERLGEQFF

SEQ ID NO: 578095 - protein, 14 aa, Homo sapiens
  CDR3 for alpha chain variable domain of TCR clone 289048 (TRAV1-2, TRAJ16)
CAVNRFSDGQKLLF

SEQ ID NO: 578096 - protein, 17 aa, Homo sapiens
  CDR3 for beta chain variable domain of TCR clone 289048 (TRBV4-2, TRBJ1-1)
CASTQCGGGSGNTEAFF

SEQ ID NO: 578097 - protein, 15 aa, Homo sapiens
  CDR3 for alpha chain variable domain of TCR clone 289049 (TRAV27, TRAJ43)
PLPLCRSNQGNKLVF

SEQ ID NO: 578098 - protein, 14 aa, Homo sapiens
  CDR3 for beta chain variable domain of TCR clone 289049 (TRBV11-2, TRBJ1-2)
CASSLGTANYGYTF

SEQ ID NO: 578099 - protein, 14 aa, Homo sapiens
  CDR3 for alpha chain variable domain of TCR clone 289050 (TRAV26-1, TRAJ38)
CIADNAGTNRKLIL

SEQ ID NO: 578100 - protein, 13 aa, Homo sapiens
  CDR3 for beta chain variable domain of TCR clone 289050 (TRBV20-1, TRBJ1-1)
CSARGGGNTEAFF

SEQ ID NO: 578101 - protein, 11 aa, Homo sapiens
  CDR3 for alpha chain variable domain of TCR clone 289051 (TRAV21, TRAJ11)
CAVNGYSTPTF

SEQ ID NO: 578102 - protein, 11 aa, Homo sapiens
  CDR3 for beta chain variable domain of TCR clone 289051 (TRBV19, TRBJ1-1)
CAGSIGSEAFF

SEQ ID NO: 578103 - protein, 14 aa, Homo sapiens
  CDR3 for alpha chain variable domain of TCR clone 289052 (TRAV8-3, TRAJ4)
CAVGAAGGYTKLIF

SEQ ID NO: 578104 - protein, 15 aa, Homo sapiens
  CDR3 for beta chain variable domain of TCR clone 289052 (TRBV5-1, TRBJ2-1)
CASSPPRAPYNEQFF

SEQ ID NO: 578105 - protein, 13 aa, Homo sapiens
  CDR3 for alpha chain variable domain of TCR clone 289053 (TRAV20, TRAJ37)
CAGCASNTGKLIF

SEQ ID NO: 578106 - protein, 11 aa, Homo sapiens
  CDR3 for beta chain variable domain of TCR clone 289053 (TRBV12-4, TRBJ2-3)
CASSATDTQYF

SEQ ID NO: 578107 - protein, 13 aa, Homo sapiens
  CDR3 for alpha chain variable domain of TCR clone 289054 (TRAV1-1, TRAJ13)
CAVNSGGYQKVTF

SEQ ID NO: 578108 - protein, 12 aa, Homo sapiens
  CDR3 for beta chain variable domain of TCR clone 289054 (TRBV11-2, TRBJ2-2)
CASSLGGGELFF

SEQ ID NO: 578109 - protein, 12 aa, Homo sapiens
  CDR3 for alpha chain variable domain of TCR clone 289055 (TRAV29/DV5, TRAJ49)
CAATETGNQFYF

SEQ ID NO: 578110 - protein, 12 aa, Homo sapiens
  CDR3 for beta chain variable domain of TCR clone 289055 (TRBV12-4, TRBJ2-7)
CASSLGGYEQYF

SEQ ID NO: 578111 - protein, 12 aa, Homo sapiens
  CDR3 for alpha chain variable domain of TCR clone 289056 (TRAV8-6, TRAJ36)
CAVSDCLGQTTS

SEQ ID NO: 578112 - protein, 15 aa, Homo sapiens
  CDR3 for beta chain variable domain of TCR clone 289056 (TRBV6-1, TRBJ2-3)
CASSERGGITDTQYY

SEQ ID NO: 578113 - protein, 15 aa, Homo sapiens
  CDR3 for alpha chain variable domain of TCR clone 289057 (TRAV2, TRAJ11)
CAVGGRHSGYSTLTF

SEQ ID NO: 578114 - protein, 14 aa, Homo sapiens
  CDR3 for beta chain variable domain of TCR clone 289057 (TRBV20-1, TRBJ2-1)
CSAQIGGSANEQFF

SEQ ID NO: 578115 - protein, 14 aa, Homo sapiens
  CDR3 for alpha chain variable domain of TCR clone 289058 (TRAV38-1, TRAJ40)
CSLRPTSGTYKYIF

SEQ ID NO: 578116 - protein, 14 aa, Homo sapiens
  CDR3 for beta chain variable domain of TCR clone 289058 (TRBV25-1, TRBJ1-1)
CASTHLGENTEAFF

SEQ ID NO: 578117 - protein, 12 aa, Homo sapiens
  CDR3 for alpha chain variable domain of TCR clone 289059 (TRAV3, TRAJ20)
CAASDGAYKLSF

SEQ ID NO: 578118 - protein, 13 aa, Homo sapiens
  CDR3 for beta chain variable domain of TCR clone 289059 (TRBV9, TRBJ2-1)
CASSVGQGGEQFF

SEQ ID NO: 578119 - protein, 13 aa, Homo sapiens
  CDR3 for alpha chain variable domain of TCR clone 289060 (TRAV3, TRAJ5)
CAVRDTGRRALTF

SEQ ID NO: 578120 - protein, 14 aa, Homo sapiens
  CDR3 for beta chain variable domain of TCR clone 289060 (TRBV7-2, TRBJ2-7)
CASSPKTSFYEQYF

SEQ ID NO: 578121 - protein, 11 aa, Homo sapiens
  CDR3 for alpha chain variable domain of TCR clone 289061 (TRAV12-1, TRAJ30)
CVVNGQDKIIC

SEQ ID NO: 578122 - protein, 15 aa, Homo sapiens
  CDR3 for beta chain variable domain of TCR clone 289061 (TRBV27, TRBJ2-2)
CTSVPANSSPGSCFF

SEQ ID NO: 578123 - protein, 16 aa, Homo sapiens
  CDR3 for alpha chain variable domain of TCR clone 289062 (TRAV30, TRAJ24)
CGTEIVDADSWGKFQF

SEQ ID NO: 578124 - protein, 16 aa, Homo sapiens
  CDR3 for beta chain variable domain of TCR clone 289062 (TRBV20-1, TRBJ2-1)
CSARDLKQGMNNEQFF

SEQ ID NO: 578125 - protein, 16 aa, Homo sapiens
  CDR3 for alpha chain variable domain of TCR clone 289063 (TRAV26-1, TRAJ53)
CIVRVAMGGSNYKPTF

SEQ ID NO: 578126 - protein, 12 aa, Homo sapiens
  CDR3 for beta chain variable domain of TCR clone 289063 (TRBV7-9, TRBJ1-5)
CASSPQGQPQHF

SEQ ID NO: 578127 - protein, 15 aa, Homo sapiens
  CDR3 for alpha chain variable domain of TCR clone 289064 (TRAV27, TRAJ38)
CAGRFNAGKNRKLIW

SEQ ID NO: 578128 - protein, 13 aa, Homo sapiens
  CDR3 for beta chain variable domain of TCR clone 289064 (TRBV20-1, TRBJ1-1)
CSARVGGNTEAFF

SEQ ID NO: 578129 - protein, 14 aa, Homo sapiens
  CDR3 for alpha chain variable domain of TCR clone 289065 (TRAV17, TRAJ16)
CATADFSDGQKLLF

SEQ ID NO: 578130 - protein, 12 aa, Homo sapiens
  CDR3 for beta chain variable domain of TCR clone 289065 (TRBV7-8, TRBJ2-7)
CASSLGDREQYF

SEQ ID NO: 578131 - protein, 10 aa, Homo sapiens
  CDR3 for alpha chain variable domain of TCR clone 289066 (TRAV23/DV6, TRAJ43)
CAAAVAAFEQ

SEQ ID NO: 578132 - protein, 13 aa, Homo sapiens
  CDR3 for beta chain variable domain of TCR clone 289066 (TRBV12-4, TRBJ1-2)
CASSLRQGKGYTF

SEQ ID NO: 578133 - protein, 16 aa, Homo sapiens
  CDR3 for alpha chain variable domain of TCR clone 289067 (TRAV3, TRAJ10)
CAVRDMRAGGGNKLTF

SEQ ID NO: 578134 - protein, 16 aa, Homo sapiens
  CDR3 for beta chain variable domain of TCR clone 289067 (TRBV5-1, TRBJ2-1)
CASSPGTSGEYNEQFF

SEQ ID NO: 578135 - protein, 16 aa, Homo sapiens
  CDR3 for alpha chain variable domain of TCR clone 289068 (TRAV12-3, TRAJ53)
CAMSPGSGGSHYKLTF

SEQ ID NO: 578136 - protein, 13 aa, Homo sapiens
  CDR3 for beta chain variable domain of TCR clone 289068 (TRBV7-3, TRBJ1-1)
CASSQDWGAEAFF

SEQ ID NO: 578137 - protein, 14 aa, Homo sapiens
  CDR3 for alpha chain variable domain of TCR clone 289069 (TRAV12-1, TRAJ3)
CVVILYSSASKIIF

SEQ ID NO: 578138 - protein, 13 aa, Homo sapiens
  CDR3 for beta chain variable domain of TCR clone 289069 (TRBV2, TRBJ1-1)
CASRWTVNTEAFF

SEQ ID NO: 578139 - protein, 12 aa, Homo sapiens
  CDR3 for alpha chain variable domain of TCR clone 289070 (TRAV13-1, TRAJ21)
CAAKEGLNKFYF

SEQ ID NO: 578140 - protein, 17 aa, Homo sapiens
  CDR3 for beta chain variable domain of TCR clone 289070 (TRBV19, TRBJ2-7)
CASSISFYDSYPYEQYF

SEQ ID NO: 578141 - protein, 15 aa, Homo sapiens
  CDR3 for alpha chain variable domain of TCR clone 289071 (TRAV3, TRAJ22)
CAVRDRGGSSRQLPF

SEQ ID NO: 578142 - protein, 16 aa, Homo sapiens
  CDR3 for beta chain variable domain of TCR clone 289071 (TRBV5-4, TRBJ2-3)
CASQQPGAGGADTQYF

SEQ ID NO: 578143 - protein, 13 aa, Homo sapiens
  CDR3 for alpha chain variable domain of TCR clone 289072 (TRAV38-2/DV8, TRAJ34)
CAYRTWNTDKLIF

SEQ ID NO: 578144 - protein, 17 aa, Homo sapiens
  CDR3 for beta chain variable domain of TCR clone 289072 (TRBV13, TRBJ2-3)
CASSLSRVAGGRNTQYF

SEQ ID NO: 578145 - protein, 14 aa, Homo sapiens
  CDR3 for alpha chain variable domain of TCR clone 289073 (TRAV38-1, TRAJ11)
CAFMKHEGYSTRTF

SEQ ID NO: 578146 - protein, 12 aa, Homo sapiens
  CDR3 for beta chain variable domain of TCR clone 289073 (TRBV10-3, TRBJ2-3)
CAISESPQARVF

SEQ ID NO: 578147 - protein, 12 aa, Homo sapiens
  CDR3 for alpha chain variable domain of TCR clone 289074 (TRAV26-1, TRAJ48)
CIAVFGNEKLTF

SEQ ID NO: 578148 - protein, 17 aa, Homo sapiens
  CDR3 for beta chain variable domain of TCR clone 289074 (TRBV7-6, TRBJ2-1)
CASIFGLAGGTYNEQFF

SEQ ID NO: 578149 - protein, 14 aa, Homo sapiens
  CDR3 for alpha chain variable domain of TCR clone 289075 (TRAV13-2, TRAJ43)
CVEIPTYNNNDMRF

SEQ ID NO: 578150 - protein, 15 aa, Homo sapiens
  CDR3 for beta chain variable domain of TCR clone 289075 (TRBV7-9, TRBJ2-2)
CASGPLDTFPGELFF

SEQ ID NO: 578151 - protein, 14 aa, Homo sapiens
  CDR3 for alpha chain variable domain of TCR clone 289076 (TRAV12-2, TRAJ13)
CAVKKTGGYQKVTF

SEQ ID NO: 578152 - protein, 16 aa, Homo sapiens
  CDR3 for beta chain variable domain of TCR clone 289076 (TRBV4-2, TRBJ2-4)
CASSQELRRAKNSQYF

SEQ ID NO: 578153 - protein, 14 aa, Homo sapiens
  CDR3 for alpha chain variable domain of TCR clone 289077 (TRAV8-4, TRAJ5)
CAVSTDTGRRALTF

SEQ ID NO: 578154 - protein, 16 aa, Homo sapiens
  CDR3 for beta chain variable domain of TCR clone 289077 (TRBV11-1, TRBJ2-1)
HQQLGGGRGVYNEQFF

SEQ ID NO: 578155 - protein, 17 aa, Homo sapiens
  CDR3 for alpha chain variable domain of TCR clone 289078 (TRAV26-2, TRAJ42)
CILRDVGYGGSQGNLIF

SEQ ID NO: 578156 - protein, 14 aa, Homo sapiens
  CDR3 for beta chain variable domain of TCR clone 289078 (TRBV4-1, TRBJ2-2)
CASSQAVNTGELFF

SEQ ID NO: 578157 - protein, 16 aa, Homo sapiens
  CDR3 for alpha chain variable domain of TCR clone 289079 (TRAV17, TRAJ52)
CATSNAGGTSYGKLTF

SEQ ID NO: 578158 - protein, 11 aa, Homo sapiens
  CDR3 for beta chain variable domain of TCR clone 289079 (TRBV24-1, TRBJ2-3)
CATASTDTQYF

SEQ ID NO: 578159 - protein, 12 aa, Homo sapiens
  CDR3 for alpha chain variable domain of TCR clone 289080 (TRAV3, TRAJ43)
CAVRDPNNDMRF

SEQ ID NO: 578160 - protein, 15 aa, Homo sapiens
  CDR3 for beta chain variable domain of TCR clone 289080 (TRBV6-5, TRBJ2-1)
CASSDDAGASNEQFF

SEQ ID NO: 578161 - protein, 15 aa, Homo sapiens
  CDR3 for alpha chain variable domain of TCR clone 289081 (TRAV36/DV7, TRAJ53)
CAVEGSGGSNYKLTF

SEQ ID NO: 578162 - protein, 16 aa, Homo sapiens
  CDR3 for beta chain variable domain of TCR clone 289081 (TRBV6-4, TRBJ2-2)
CASSLSGFWVTGELFF

SEQ ID NO: 578163 - protein, 13 aa, Homo sapiens
  CDR3 for alpha chain variable domain of TCR clone 289082 (TRAV3, TRAJ20)
CCEAFCNDYKLSF

SEQ ID NO: 578164 - protein, 16 aa, Homo sapiens
  CDR3 for beta chain variable domain of TCR clone 289082 (TRBV10-3, TRBJ2-7)
CAISADFADRPYEQYF

SEQ ID NO: 578165 - protein, 14 aa, Homo sapiens
  CDR3 for alpha chain variable domain of TCR clone 289083 (TRAV12-1, TRAJ24)
CVVRSTDSWGKFQF

SEQ ID NO: 578166 - protein, 13 aa, Homo sapiens
  CDR3 for beta chain variable domain of TCR clone 289083 (TRBV2, TRBJ2-3)
RASILAGGQEQYF

SEQ ID NO: 578167 - protein, 15 aa, Homo sapiens
  CDR3 for alpha chain variable domain of TCR clone 289084 (TRAV2, TRAJ24)
CAVVRLKNSWGKLQF

SEQ ID NO: 578168 - protein, 15 aa, Homo sapiens
  CDR3 for beta chain variable domain of TCR clone 289084 (TRBV7-7, TRBJ2-3)
CQQPGTSGSTDTQYF

SEQ ID NO: 578169 - protein, 14 aa, Homo sapiens
  CDR3 for alpha chain variable domain of TCR clone 289085 (TRAV38-1, TRAJ40)
CALRHTSRTYKYIF

SEQ ID NO: 578170 - protein, 14 aa, Homo sapiens
  CDR3 for beta chain variable domain of TCR clone 289085 (TRBV25-1, TRBJ1-1)
CASTHLGGNTEAFF

SEQ ID NO: 578171 - protein, 11 aa, Homo sapiens
  CDR3 for alpha chain variable domain of TCR clone 289086 (TRAV12-2, TRAJ49)
CALQGGNQFYI

SEQ ID NO: 578172 - protein, 13 aa, Homo sapiens
  CDR3 for beta chain variable domain of TCR clone 289086 (TRBV4-1, TRBJ1-1)
CASSQLGTGEAFF

SEQ ID NO: 578173 - protein, 12 aa, Homo sapiens
  CDR3 for alpha chain variable domain of TCR clone 289087 (TRAV8-3, TRAJ26)
CAGDNYGQNFVF

SEQ ID NO: 578174 - protein, 16 aa, Homo sapiens
  CDR3 for beta chain variable domain of TCR clone 289087 (TRBV28, TRBJ2-6)
CASSNRRGSGANVLTF

SEQ ID NO: 578175 - protein, 17 aa, Homo sapiens
  CDR3 for alpha chain variable domain of TCR clone 289088 (TRAV26-1, TRAJ58)
CIVRVGAEETSGSRLTF

SEQ ID NO: 578176 - protein, 18 aa, Homo sapiens
  CDR3 for beta chain variable domain of TCR clone 289088 (TRBV7-9, TRBJ2-7)
CASSLITSGSRTWYEQYF

SEQ ID NO: 578177 - protein, 13 aa, Homo sapiens
  CDR3 for alpha chain variable domain of TCR clone 289089 (TRAV12-2, TRAJ39)
CAVNNNAGNMLTF

SEQ ID NO: 578178 - protein, 16 aa, Homo sapiens
  CDR3 for beta chain variable domain of TCR clone 289089 (TRBV28, TRBJ2-7)
CASSLFFETGGPEQYF

SEQ ID NO: 578179 - protein, 13 aa, Homo sapiens
  CDR3 for alpha chain variable domain of TCR clone 289090 (TRAV12-1, TRAJ29)
FVVRNSGNTPLVF

SEQ ID NO: 578180 - protein, 14 aa, Homo sapiens
  CDR3 for beta chain variable domain of TCR clone 289090 (TRBV7-2, TRBJ2-7)
CASRSQGAAYEQYF

SEQ ID NO: 578181 - protein, 17 aa, Homo sapiens
  CDR3 for alpha chain variable domain of TCR clone 289091 (TRAV4, TRAJ31)
CLVARMPDSCLEMELSW

SEQ ID NO: 578182 - protein, 15 aa, Homo sapiens
  CDR3 for beta chain variable domain of TCR clone 289091 (TRBV7-8, TRBJ1-2)
CASSLVRDGGLGYAF

SEQ ID NO: 578183 - protein, 13 aa, Homo sapiens
  CDR3 for alpha chain variable domain of TCR clone 289092 (TRAV12-1, TRAJ13)
CVVGTGGYQKVTF

SEQ ID NO: 578184 - protein, 12 aa, Homo sapiens
  CDR3 for beta chain variable domain of TCR clone 289092 (TRBV20-1, TRBJ2-5)
CSDPRSQETQYF

SEQ ID NO: 578185 - protein, 17 aa, Homo sapiens
  CDR3 for alpha chain variable domain of TCR clone 289093 (TRAV3, TRAJ6)
CAVRDGPRAGGSYIPTF

SEQ ID NO: 578186 - protein, 12 aa, Homo sapiens
  CDR3 for beta chain variable domain of TCR clone 289093 (TRBV18, TRBJ2-7)
CASSPRSWEQYF

SEQ ID NO: 578187 - protein, 16 aa, Homo sapiens
  CDR3 for alpha chain variable domain of TCR clone 289094 (TRAV21, TRAJ37)
CAVRPRGSSNTGKLIF

SEQ ID NO: 578188 - protein, 16 aa, Homo sapiens
  CDR3 for beta chain variable domain of TCR clone 289094 (TRBV2, TRBJ2-1)
CASSGGGSLSYNEQFF

SEQ ID NO: 578189 - protein, 14 aa, Homo sapiens
  CDR3 for alpha chain variable domain of TCR clone 289095 (TRAV12-3, TRAJ53)
CGATSGGSNYKLTF

SEQ ID NO: 578190 - protein, 13 aa, Homo sapiens
  CDR3 for beta chain variable domain of TCR clone 289095 (TRBV19, TRBJ1-5)
CASSKQDGQPQHF

SEQ ID NO: 578191 - protein, 13 aa, Homo sapiens
  CDR3 for alpha chain variable domain of TCR clone 289096 (TRAV21, TRAJ27)
CAARPGNAGKSTF

SEQ ID NO: 578192 - protein, 14 aa, Homo sapiens
  CDR3 for beta chain variable domain of TCR clone 289096 (TRBV12-4, TRBJ2-5)
CASSLWQKQETQYF

SEQ ID NO: 578193 - protein, 17 aa, Homo sapiens
  CDR3 for alpha chain variable domain of TCR clone 289097 (TRAV8-2, TRAJ17)
CVVSDRRFKAAGNKQTF

SEQ ID NO: 578194 - protein, 18 aa, Homo sapiens
  CDR3 for beta chain variable domain of TCR clone 289097 (TRBV7-9, TRBJ2-7)
CASSLTTSGSRTWYEQYF

SEQ ID NO: 578195 - protein, 16 aa, Homo sapiens
  CDR3 for alpha chain variable domain of TCR clone 289098 (TRAV12-1, TRAJ53)
CVGTSVAGGSNYKLTF

SEQ ID NO: 578196 - protein, 16 aa, Homo sapiens
  CDR3 for beta chain variable domain of TCR clone 289098 (TRBV6-6, TRBJ2-3)
CASSYSHAGSTDTQYF

SEQ ID NO: 578197 - protein, 13 aa, Homo sapiens
  CDR3 for alpha chain variable domain of TCR clone 289099 (TRAV36/DV7, TRAJ37)
CAAPFRNTGKLIF

SEQ ID NO: 578198 - protein, 14 aa, Homo sapiens
  CDR3 for beta chain variable domain of TCR clone 289099 (TRBV4-2, TRBJ2-1)
CASGLDRAYNEQFF

SEQ ID NO: 578199 - protein, 19 aa, Homo sapiens
  CDR3 for alpha chain variable domain of TCR clone 289100 (TRAV2, TRAJ20)
ILQVREADAAVYRDCKLSF

SEQ ID NO: 578200 - protein, 13 aa, Homo sapiens
  CDR3 for beta chain variable domain of TCR clone 289100 (TRBV20-1, TRBJ1-1)
CSARLGQGTEAFF

SEQ ID NO: 578201 - protein, 17 aa, Homo sapiens
  CDR3 for alpha chain variable domain of TCR clone 289101 (TRAV3, TRAJ42)
CAVRDRDYGGSQGNLLF

SEQ ID NO: 578202 - protein, 15 aa, Homo sapiens
  CDR3 for beta chain variable domain of TCR clone 289101 (TRBV6-3, TRBJ2-7)
CASSSPGTVFYEQYF

SEQ ID NO: 578203 - protein, 16 aa, Homo sapiens
  CDR3 for alpha chain variable domain of TCR clone 289102 (TRAV26-1, TRAJ56)
CIVGVAETGANSKLTF

SEQ ID NO: 578204 - protein, 17 aa, Homo sapiens
  CDR3 for beta chain variable domain of TCR clone 289102 (TRBV11-2, TRBJ2-1)
CASSLYPPGVEYNEQFF

SEQ ID NO: 578205 - protein, 13 aa, Homo sapiens
  CDR3 for alpha chain variable domain of TCR clone 289103 (TRAV27, TRAJ49)
CAPRPYTGNQFYF

SEQ ID NO: 578206 - protein, 15 aa, Homo sapiens
  CDR3 for beta chain variable domain of TCR clone 289103 (TRBV11-2, TRBJ1-6)
CASSLDPWAVSPLHF

SEQ ID NO: 578207 - protein, 13 aa, Homo sapiens
  CDR3 for alpha chain variable domain of TCR clone 289104 (TRAV6, TRAJ3)
CSTGYSSASKIIF

SEQ ID NO: 578208 - protein, 13 aa, Homo sapiens
  CDR3 for beta chain variable domain of TCR clone 289104 (TRBV14, TRBJ1-2)
CASSQQGYYGDTF

SEQ ID NO: 578209 - protein, 14 aa, Homo sapiens
  CDR3 for alpha chain variable domain of TCR clone 289105 (TRAV1-2, TRAJ16)
CAVNRFSDGQKLLF

SEQ ID NO: 578210 - protein, 15 aa, Homo sapiens
  CDR3 for beta chain variable domain of TCR clone 289105 (TRBV19, TRBJ2-7)
CASSTGLAGTYEQYF

SEQ ID NO: 578211 - protein, 12 aa, Homo sapiens
  CDR3 for alpha chain variable domain of TCR clone 289106 (TRAV12-3, TRAJ17)
CAMTLTSNKLTF

SEQ ID NO: 578212 - protein, 15 aa, Homo sapiens
  CDR3 for beta chain variable domain of TCR clone 289106 (TRBV6-6, TRBJ2-5)
CASSPGGGLEETQYF

SEQ ID NO: 578213 - protein, 16 aa, Homo sapiens
  CDR3 for alpha chain variable domain of TCR clone 289107 (TRAV20, TRAJ53)
CAVRRGSGGSNYKLTF

SEQ ID NO: 578214 - protein, 12 aa, Homo sapiens
  CDR3 for beta chain variable domain of TCR clone 289107 (TRBV29-1, TRBJ2-3)
CSVLLGADTQYF

SEQ ID NO: 578215 - protein, 17 aa, Homo sapiens
  CDR3 for alpha chain variable domain of TCR clone 289108 (TRAV8-3, TRAJ50)
CAVGAVDTETSYEKVIF

SEQ ID NO: 578216 - protein, 13 aa, Homo sapiens
  CDR3 for beta chain variable domain of TCR clone 289108 (TRBV7-9, TRBJ2-2)
CASSSAGTWELFF

SEQ ID NO: 578217 - protein, 16 aa, Homo sapiens
  CDR3 for alpha chain variable domain of TCR clone 289109 (TRAV3, TRAJ37)
CAVRVRGSGNTGKLIF

SEQ ID NO: 578218 - protein, 12 aa, Homo sapiens
  CDR3 for beta chain variable domain of TCR clone 289109 (TRBV12-4, TRBJ2-3)
CASSTLPDTQYF

SEQ ID NO: 578219 - protein, 15 aa, Homo sapiens
  CDR3 for alpha chain variable domain of TCR clone 289110 (TRAV3, TRAJ22)
CAVRDRGGSARQLTF

SEQ ID NO: 578220 - protein, 17 aa, Homo sapiens
  CDR3 for beta chain variable domain of TCR clone 289110 (TRBV5-4, TRBJ2-3)
CASSLSRVAGGRNTQYF

SEQ ID NO: 578221 - protein, 11 aa, Homo sapiens
  CDR3 for alpha chain variable domain of TCR clone 289111 (TRAV1-1, TRAJ23)
CAVRQGGKRIF

SEQ ID NO: 578222 - protein, 13 aa, Homo sapiens
  CDR3 for beta chain variable domain of TCR clone 289111 (TRBV12-5, TRBJ2-3)
CASGDRQSDTQYF

SEQ ID NO: 578223 - protein, 13 aa, Homo sapiens
  CDR3 for alpha chain variable domain of TCR clone 289112 (TRAV1-2, TRAJ39)
CAVKDNAGNMLTF

SEQ ID NO: 578224 - protein, 13 aa, Homo sapiens
  CDR3 for beta chain variable domain of TCR clone 289112 (TRBV13, TRBJ2-5)
CASSPEVGETQYF

SEQ ID NO: 578225 - protein, 12 aa, Homo sapiens
  CDR3 for alpha chain variable domain of TCR clone 289113 (TRAV12-1, TRAJ34)
CVVAGATDKLIF

SEQ ID NO: 578226 - protein, 12 aa, Homo sapiens
  CDR3 for beta chain variable domain of TCR clone 289113 (TRBV7-9, TRBJ1-1)
CASSLLRGEAFF

SEQ ID NO: 578227 - protein, 13 aa, Homo sapiens
  CDR3 for alpha chain variable domain of TCR clone 289114 (TRAV35, TRAJ44)
CAGLSGTASKLTF

SEQ ID NO: 578228 - protein, 16 aa, Homo sapiens
  CDR3 for beta chain variable domain of TCR clone 289114 (TRBV7-8, TRBJ2-1)
CASSRLPGILYNEQFF

SEQ ID NO: 578229 - protein, 16 aa, Homo sapiens
  CDR3 for alpha chain variable domain of TCR clone 289115 (TRAV14/DV4, TRAJ53)
CAMREGGGGSNYKLTL

SEQ ID NO: 578230 - protein, 14 aa, Homo sapiens
  CDR3 for beta chain variable domain of TCR clone 289115 (TRBV12-5, TRBJ2-5)
CASGSRTHQETQYF

SEQ ID NO: 578231 - protein, 11 aa, Homo sapiens
  CDR3 for alpha chain variable domain of TCR clone 289116 (TRAV35, TRAJ30)
CAGPGDDKIIF

SEQ ID NO: 578232 - protein, 14 aa, Homo sapiens
  CDR3 for beta chain variable domain of TCR clone 289116 (TRBV7-6, TRBJ1-6)
CASGQAGGGSPLLF

SEQ ID NO: 578233 - protein, 16 aa, Homo sapiens
  CDR3 for alpha chain variable domain of TCR clone 289117 (TRAV8-6, TRAJ4)
CAVSPTFSGGYNKLIF

SEQ ID NO: 578234 - protein, 14 aa, Homo sapiens
  CDR3 for beta chain variable domain of TCR clone 289117 (TRBV29-1, TRBJ2-2)
CSVGTSGAPGELFF

SEQ ID NO: 578235 - protein, 13 aa, Homo sapiens
  CDR3 for alpha chain variable domain of TCR clone 289118 (TRAV5, TRAJ30)
CAEIANRDDKIIF

SEQ ID NO: 578236 - protein, 14 aa, Homo sapiens
  CDR3 for beta chain variable domain of TCR clone 289118 (TRBV7-2, TRBJ2-7)
CASSPKTSFYEQYF

SEQ ID NO: 578237 - protein, 11 aa, Homo sapiens
  CDR3 for alpha chain variable domain of TCR clone 289119 (TRAV4, TRAJ23)
CLVAPGGKLIF

SEQ ID NO: 578238 - protein, 14 aa, Homo sapiens
  CDR3 for beta chain variable domain of TCR clone 289119 (TRBV28, TRBJ1-1)
CASSFLRENTEAFF

SEQ ID NO: 578239 - protein, 12 aa, Homo sapiens
  CDR3 for alpha chain variable domain of TCR clone 289120 (TRAV12-3, TRAJ5)
CAMDTGRRALTF

SEQ ID NO: 578240 - protein, 13 aa, Homo sapiens
  CDR3 for beta chain variable domain of TCR clone 289120 (TRBV7-7, TRBJ2-2)
CASSLTSAGELFV

SEQ ID NO: 578241 - protein, 14 aa, Homo sapiens
  CDR3 for alpha chain variable domain of TCR clone 289121 (TRAV26-2, TRAJ21)
CILRETSTNFTLDL

SEQ ID NO: 578242 - protein, 14 aa, Homo sapiens
  CDR3 for beta chain variable domain of TCR clone 289121 (TRBV7-9, TRBJ1-1)
CASTPLQSYTEAFF

SEQ ID NO: 578243 - protein, 14 aa, Homo sapiens
  CDR3 for alpha chain variable domain of TCR clone 289122 (TRAV16, TRAJ39)
CALSKNNAGNMLTF

SEQ ID NO: 578244 - protein, 17 aa, Homo sapiens
  CDR3 for beta chain variable domain of TCR clone 289122 (TRBV28, TRBJ2-5)
CASSTPEGDALQETQYF

SEQ ID NO: 578245 - protein, 14 aa, Homo sapiens
  CDR3 for alpha chain variable domain of TCR clone 289123 (TRAV3, TRAJ17)
CAVRDAAAGTKLTF

SEQ ID NO: 578246 - protein, 15 aa, Homo sapiens
  CDR3 for beta chain variable domain of TCR clone 289123 (TRBV4-1, TRBJ1-4)
CASSDTGGTNEKLFF

SEQ ID NO: 578247 - protein, 14 aa, Homo sapiens
  CDR3 for alpha chain variable domain of TCR clone 289124 (TRAV12-2, TRAJ17)
CAVLFKAAANKLTF

SEQ ID NO: 578248 - protein, 15 aa, Homo sapiens
  CDR3 for beta chain variable domain of TCR clone 289124 (TRBV20-1, TRBJ2-7)
CSARDRVSGMDEQYF

SEQ ID NO: 578249 - protein, 12 aa, Homo sapiens
  CDR3 for alpha chain variable domain of TCR clone 289125 (TRAV12-1, TRAJ9)
CVVNTGGFKTIF

SEQ ID NO: 578250 - protein, 13 aa, Homo sapiens
  CDR3 for beta chain variable domain of TCR clone 289125 (TRBV7-2, TRBJ2-5)
CASSQTSVETQYF

SEQ ID NO: 578251 - protein, 16 aa, Homo sapiens
  CDR3 for alpha chain variable domain of TCR clone 289126 (TRAV21, TRAJ37)
CAVRTAGSSDTGKLIF

SEQ ID NO: 578252 - protein, 13 aa, Homo sapiens
  CDR3 for beta chain variable domain of TCR clone 289126 (TRBV7-9, TRBJ2-5)
CASLLSGRETQYF

SEQ ID NO: 578253 - protein, 13 aa, Homo sapiens
  CDR3 for alpha chain variable domain of TCR clone 289127 (TRAV13-1, TRAJ11)
CAAVLAGYSTLTF

SEQ ID NO: 578254 - protein, 17 aa, Homo sapiens
  CDR3 for beta chain variable domain of TCR clone 289127 (TRBV25-1, TRBJ2-7)
CASSDAIVVFSSYEQYF

SEQ ID NO: 578255 - protein, 11 aa, Homo sapiens
  CDR3 for alpha chain variable domain of TCR clone 289128 (TRAV12-2, TRAJ39)
CSVNNMLTFGG

SEQ ID NO: 578256 - protein, 16 aa, Homo sapiens
  CDR3 for beta chain variable domain of TCR clone 289128 (TRBV5-3, TRBJ2-2)
CARSFGTGTNTGELFF

SEQ ID NO: 578257 - protein, 14 aa, Homo sapiens
  CDR3 for alpha chain variable domain of TCR clone 289129 (TRAV3, TRAJ34)
CAVRDINNTDKLIF

SEQ ID NO: 578258 - protein, 15 aa, Homo sapiens
  CDR3 for beta chain variable domain of TCR clone 289129 (TRBV20-1, TRBJ1-1)
CSARGGGNTEAFLDK

SEQ ID NO: 578259 - protein, 17 aa, Homo sapiens
  CDR3 for alpha chain variable domain of TCR clone 289130 (TRAV13-1, TRAJ31)
CAPRDRLMFGDGTQLVE

SEQ ID NO: 578260 - protein, 12 aa, Homo sapiens
  CDR3 for beta chain variable domain of TCR clone 289130 (TRBV7-9, TRBJ2-7)
CASSLEGYEQYF

SEQ ID NO: 578261 - protein, 12 aa, Homo sapiens
  CDR3 for alpha chain variable domain of TCR clone 289131 (TRAV12-2, TRAJ10)
WGVTGGGNKLTF

SEQ ID NO: 578262 - protein, 15 aa, Homo sapiens
  CDR3 for beta chain variable domain of TCR clone 289131 (TRBV28, TRBJ2-1)
CASSLDTSSYNEQFF

SEQ ID NO: 578263 - protein, 12 aa, Homo sapiens
  CDR3 for alpha chain variable domain of TCR clone 289132 (TRAV8-2, TRAJ5)
CVVSDIWRALTF

SEQ ID NO: 578264 - protein, 14 aa, Homo sapiens
  CDR3 for beta chain variable domain of TCR clone 289132 (TRBV19, TRBJ2-7)
CASNFRDTFTGMYF

SEQ ID NO: 578265 - protein, 12 aa, Homo sapiens
  CDR3 for alpha chain variable domain of TCR clone 289133 (TRAV8-3, TRAJ20)
CAVGANDYKLSF

SEQ ID NO: 578266 - protein, 16 aa, Homo sapiens
  CDR3 for beta chain variable domain of TCR clone 289133 (TRBV13, TRBJ2-3)
CQQPLQGRGGRNTQYF

SEQ ID NO: 578267 - protein, 14 aa, Homo sapiens
  CDR3 for alpha chain variable domain of TCR clone 289134 (TRAV17, TRAJ57)
CATDPQGGSEKLVF

SEQ ID NO: 578268 - protein, 15 aa, Homo sapiens
  CDR3 for beta chain variable domain of TCR clone 289134 (TRBV5-1, TRBJ2-7)
CASSLNGGPAREQYF

SEQ ID NO: 578269 - protein, 14 aa, Homo sapiens
  CDR3 for alpha chain variable domain of TCR clone 289135 (TRAV35, TRAJ50)
CAGHRKTSYDKVIF

SEQ ID NO: 578270 - protein, 17 aa, Homo sapiens
  CDR3 for beta chain variable domain of TCR clone 289135 (TRBV7-8, TRBJ2-6)
CANSAGTGGAGANGLTF

SEQ ID NO: 578271 - protein, 18 aa, Homo sapiens
  CDR3 for alpha chain variable domain of TCR clone 289136 (TRAV13-1, TRAJ52)
CAASKRSAGGTNYGKLTF

SEQ ID NO: 578272 - protein, 13 aa, Homo sapiens
  CDR3 for beta chain variable domain of TCR clone 289136 (TRBV12-4, TRBJ1-2)
CASSLRQGKGYTF

SEQ ID NO: 578273 - protein, 19 aa, Homo sapiens
  CDR3 for alpha chain variable domain of TCR clone 289137 (TRAV27, TRAJ53)
ASTSVQSRNSGGSNYKLTF

SEQ ID NO: 578274 - protein, 14 aa, Homo sapiens
  CDR3 for beta chain variable domain of TCR clone 289137 (TRBV7-3, TRBJ2-3)
CASSSTGVTDTQYF

SEQ ID NO: 578275 - protein, 14 aa, Homo sapiens
  CDR3 for alpha chain variable domain of TCR clone 289138 (TRAV6, TRAJ37)
CALGSQGNPGRLIF

SEQ ID NO: 578276 - protein, 15 aa, Homo sapiens
  CDR3 for beta chain variable domain of TCR clone 289138 (TRBV2, TRBJ2-1)
CASSEEREGDNEQFF

SEQ ID NO: 578277 - protein, 14 aa, Homo sapiens
  CDR3 for alpha chain variable domain of TCR clone 289139 (TRAV8-2, TRAJ4)
WVVSPSGGYNKLIF

SEQ ID NO: 578278 - protein, 14 aa, Homo sapiens
  CDR3 for beta chain variable domain of TCR clone 289139 (TRBV10-3, TRBJ2-2)
CAISEVSHSGELFF

SEQ ID NO: 578279 - protein, 16 aa, Homo sapiens
  CDR3 for alpha chain variable domain of TCR clone 289140 (TRAV26-1, TRAJ40)
CIVRVGTTSGTYKYIF

SEQ ID NO: 578280 - protein, 12 aa, Homo sapiens
  CDR3 for beta chain variable domain of TCR clone 289140 (TRBV7-8, TRBJ2-5)
CASSPSVQTQYF

SEQ ID NO: 578281 - protein, 14 aa, Homo sapiens
  CDR3 for alpha chain variable domain of TCR clone 289141 (TRAV2, TRAJ9)
CAVENRSGGFKTIF

SEQ ID NO: 578282 - protein, 12 aa, Homo sapiens
  CDR3 for beta chain variable domain of TCR clone 289141 (TRBV7-3, TRBJ1-1)
CQQPGLGAEAFF

SEQ ID NO: 578283 - protein, 14 aa, Homo sapiens
  CDR3 for alpha chain variable domain of TCR clone 289142 (TRAV1-2, TRAJ8)
CAVREDTGFQKLVF

SEQ ID NO: 578284 - protein, 14 aa, Homo sapiens
  CDR3 for beta chain variable domain of TCR clone 289142 (TRBV29-1, TRBJ2-5)
CSVETSGSGETQYL

SEQ ID NO: 578285 - protein, 18 aa, Homo sapiens
  CDR3 for alpha chain variable domain of TCR clone 289143 (TRAV21, TRAJ52)
CAVRPSPAGGTSYGKLTF

SEQ ID NO: 578286 - protein, 16 aa, Homo sapiens
  CDR3 for beta chain variable domain of TCR clone 289143 (TRBV4-3, TRBJ2-2)
CASSQLQGSGTGELFF

SEQ ID NO: 578287 - protein, 14 aa, Homo sapiens
  CDR3 for alpha chain variable domain of TCR clone 289144 (TRAV12-3, TRAJ10)
SHLPLTGGGNKLTF

SEQ ID NO: 578288 - protein, 15 aa, Homo sapiens
  CDR3 for beta chain variable domain of TCR clone 289144 (TRBV7-9, TRBJ1-4)
CASSRTGGFNEKLCF

SEQ ID NO: 578289 - protein, 12 aa, Homo sapiens
  CDR3 for alpha chain variable domain of TCR clone 289145 (TRAV27, TRAJ9)
CAGESGGFKTIF

SEQ ID NO: 578290 - protein, 15 aa, Homo sapiens
  CDR3 for beta chain variable domain of TCR clone 289145 (TRBV7-2, TRBJ1-2)
CASSPRAGWNYGYTF

SEQ ID NO: 578291 - protein, 14 aa, Homo sapiens
  CDR3 for alpha chain variable domain of TCR clone 289146 (TRAV25, TRAJ35)
CARRMEGFGNVLHC

SEQ ID NO: 578292 - protein, 13 aa, Homo sapiens
  CDR3 for beta chain variable domain of TCR clone 289146 (TRBV7-2, TRBJ1-4)
CAGSLAVLEKLFF

SEQ ID NO: 578293 - protein, 12 aa, Homo sapiens
  CDR3 for alpha chain variable domain of TCR clone 289147 (TRAV29/DV5, TRAJ49)
CAATDTGNQFYL

SEQ ID NO: 578294 - protein, 12 aa, Homo sapiens
  CDR3 for beta chain variable domain of TCR clone 289147 (TRBV12-4, TRBJ2-7)
CASSVGGYEQYF

SEQ ID NO: 578295 - protein, 23 aa, Homo sapiens
  CDR3 for alpha chain variable domain of TCR clone 289148 (TRAV12-2, TRAJ36)
SLLIRDSQPSDSATLERANNLFF

SEQ ID NO: 578296 - protein, 17 aa, Homo sapiens
  CDR3 for beta chain variable domain of TCR clone 289148 (TRBV20-1, TRBJ2-2)
CSASGSGQGGLTGELFF

SEQ ID NO: 578297 - protein, 14 aa, Homo sapiens
  CDR3 for alpha chain variable domain of TCR clone 289149 (TRAV12-1, TRAJ9)
CVVNRRTGGFKTIF

SEQ ID NO: 578298 - protein, 12 aa, Homo sapiens
  CDR3 for beta chain variable domain of TCR clone 289149 (TRBV7-2, TRBJ1-5)
CASSLWSQPQHF

SEQ ID NO: 578299 - protein, 14 aa, Homo sapiens
  CDR3 for alpha chain variable domain of TCR clone 289150 (TRAV2, TRAJ37)
CAVDVTSNTGKLIF

SEQ ID NO: 578300 - protein, 12 aa, Homo sapiens
  CDR3 for beta chain variable domain of TCR clone 289150 (TRBV29-1, TRBJ2-3)
CSVTGGADTQYF

SEQ ID NO: 578301 - protein, 16 aa, Homo sapiens
  CDR3 for alpha chain variable domain of TCR clone 289151 (TRAV16, TRAJ4)
LALSRMFSGCYNKLIF

SEQ ID NO: 578302 - protein, 16 aa, Homo sapiens
  CDR3 for beta chain variable domain of TCR clone 289151 (TRBV24-1, TRBJ2-3)
CATSDPGTGATDTQYF

SEQ ID NO: 578303 - protein, 14 aa, Homo sapiens
  CDR3 for alpha chain variable domain of TCR clone 289152 (TRAV13-2, TRAJ9)
CAENSFTGGFKTIF

SEQ ID NO: 578304 - protein, 13 aa, Homo sapiens
  CDR3 for beta chain variable domain of TCR clone 289152 (TRBV19, TRBJ2-7)
CASSIDRAYEQYF

SEQ ID NO: 578305 - protein, 14 aa, Homo sapiens
  CDR3 for alpha chain variable domain of TCR clone 289153 (TRAV1-2, TRAJ27)
CAGRSGTNAGKSTF

SEQ ID NO: 578306 - protein, 15 aa, Homo sapiens
  CDR3 for beta chain variable domain of TCR clone 289153 (TRBV18, TRBJ2-7)
CASSPLQGRTYEQYF

SEQ ID NO: 578307 - protein, 13 aa, Homo sapiens
  CDR3 for alpha chain variable domain of TCR clone 289154 (TRAV12-3, TRAJ9)
CAMRTTGGFKTIF

SEQ ID NO: 578308 - protein, 14 aa, Homo sapiens
  CDR3 for beta chain variable domain of TCR clone 289154 (TRBV11-2, TRBJ2-7)
CASSSTGEGYEQYF

SEQ ID NO: 578309 - protein, 13 aa, Homo sapiens
  CDR3 for alpha chain variable domain of TCR clone 289155 (TRAV12-3, TRAJ9)
CAMRNTGGFKTIF

SEQ ID NO: 578310 - protein, 12 aa, Homo sapiens
  CDR3 for beta chain variable domain of TCR clone 289155 (TRBV11-2, TRBJ2-5)
CASSPPAETQYF

SEQ ID NO: 578311 - protein, 14 aa, Homo sapiens
  CDR3 for alpha chain variable domain of TCR clone 289156 (TRAV21, TRAJ35)
CAVMPIGFGNVLHC

SEQ ID NO: 578312 - protein, 12 aa, Homo sapiens
  CDR3 for beta chain variable domain of TCR clone 289156 (TRBV7-9, TRBJ2-7)
CASSIMREEQYF

SEQ ID NO: 578313 - protein, 11 aa, Homo sapiens
  CDR3 for alpha chain variable domain of TCR clone 289157 (TRAV12-2, TRAJ31)
CAVTRLARPMF

SEQ ID NO: 578314 - protein, 15 aa, Homo sapiens
  CDR3 for beta chain variable domain of TCR clone 289157 (TRBV19, TRBJ2-7)
CASSIGGGLVNEQYF

SEQ ID NO: 578315 - protein, 17 aa, Homo sapiens
  CDR3 for alpha chain variable domain of TCR clone 289158 (TRAV12-2, TRAJ53)
CAPLTDAQEGSNYKLTF

SEQ ID NO: 578316 - protein, 12 aa, Homo sapiens
  CDR3 for beta chain variable domain of TCR clone 289158 (TRBV11-2, TRBJ2-2)
CASSLGGGELFF

SEQ ID NO: 578317 - protein, 14 aa, Homo sapiens
  CDR3 for alpha chain variable domain of TCR clone 289159 (TRAV1-2, TRAJ16)
CAVNRFSDGQKLLF

SEQ ID NO: 578318 - protein, 12 aa, Homo sapiens
  CDR3 for beta chain variable domain of TCR clone 289159 (TRBV28, TRBJ2-6)
CATQAGTNVLTF

SEQ ID NO: 578319 - protein, 14 aa, Homo sapiens
  CDR3 for alpha chain variable domain of TCR clone 289160 (TRAV1-2, TRAJ16)
CAVNRFSDGQKLLF

SEQ ID NO: 578320 - protein, 15 aa, Homo sapiens
  CDR3 for beta chain variable domain of TCR clone 289160 (TRBV9, TRBJ1-6)
CASSVAGTGESPLLF

SEQ ID NO: 578321 - protein, 14 aa, Homo sapiens
  CDR3 for alpha chain variable domain of TCR clone 289161 (TRAV1-2, TRAJ16)
CAVNRCSDGQKLLF

SEQ ID NO: 578322 - protein, 13 aa, Homo sapiens
  CDR3 for beta chain variable domain of TCR clone 289161 (TRBV27, TRBJ1-1)
CASSLSIGAEAFF

SEQ ID NO: 578323 - protein, 14 aa, Homo sapiens
  CDR3 for alpha chain variable domain of TCR clone 289162 (TRAV12-3, TRAJ53)
CAMSGGGSKYKLTF

SEQ ID NO: 578324 - protein, 13 aa, Homo sapiens
  CDR3 for beta chain variable domain of TCR clone 289162 (TRBV3-1, TRBJ1-1)
CASSRQGETEAFF

SEQ ID NO: 578325 - protein, 14 aa, Homo sapiens
  CDR3 for alpha chain variable domain of TCR clone 289163 (TRAV12-1, TRAJ6)
CVVKRSGGSYIPTF

SEQ ID NO: 578326 - protein, 13 aa, Homo sapiens
  CDR3 for beta chain variable domain of TCR clone 289163 (TRBV4-2, TRBJ1-1)
CASSQAGNTEAFF

SEQ ID NO: 578327 - protein, 13 aa, Homo sapiens
  CDR3 for alpha chain variable domain of TCR clone 289164 (TRAV12-3, TRAJ40)
CSMSDSGTYKYIF

SEQ ID NO: 578328 - protein, 14 aa, Homo sapiens
  CDR3 for beta chain variable domain of TCR clone 289164 (TRBV7-2, TRBJ1-5)
CASSTQGAGQPQHF

SEQ ID NO: 578329 - protein, 14 aa, Homo sapiens
  CDR3 for alpha chain variable domain of TCR clone 289165 (TRAV26-1, TRAJ40)
CIVRLLSGTYKYIF

SEQ ID NO: 578330 - protein, 13 aa, Homo sapiens
  CDR3 for beta chain variable domain of TCR clone 289165 (TRBV3-1, TRBJ1-1)
RASSQLQGAEAFF

SEQ ID NO: 578331 - protein, 11 aa, Homo sapiens
  CDR3 for alpha chain variable domain of TCR clone 289166 (TRAV12-1, TRAJ21)
CVVNNFNKFYF

SEQ ID NO: 578332 - protein, 14 aa, Homo sapiens
  CDR3 for beta chain variable domain of TCR clone 289166 (TRBV19, TRBJ1-2)
CASSIGAGSYGYTF

SEQ ID NO: 578333 - protein, 13 aa, Homo sapiens
  CDR3 for alpha chain variable domain of TCR clone 289167 (TRAV13-2, TRAJ15)
CAESNQAGTALIF

SEQ ID NO: 578334 - protein, 14 aa, Homo sapiens
  CDR3 for beta chain variable domain of TCR clone 289167 (TRBV4-1, TRBJ2-2)
CASSQAVNTGELFF

SEQ ID NO: 578335 - protein, 15 aa, Homo sapiens
  CDR3 for alpha chain variable domain of TCR clone 289168 (TRAV17, TRAJ57)
CATGPSPGGSEQLVF

SEQ ID NO: 578336 - protein, 15 aa, Homo sapiens
  CDR3 for beta chain variable domain of TCR clone 289168 (TRBV25-1, TRBJ1-4)
CASSPGDSTNEKLFF

SEQ ID NO: 578337 - protein, 16 aa, Homo sapiens
  CDR3 for alpha chain variable domain of TCR clone 289169 (TRAV20, TRAJ38)
CAVQASNAGNNRKLIW

SEQ ID NO: 578338 - protein, 13 aa, Homo sapiens
  CDR3 for beta chain variable domain of TCR clone 289169 (TRBV4-2, TRBJ1-1)
CASSQAGNTEAFF

SEQ ID NO: 578339 - protein, 16 aa, Homo sapiens
  CDR3 for alpha chain variable domain of TCR clone 289170 (TRAV21, TRAJ52)
CAVTNAGGTSYGKLTF

SEQ ID NO: 578340 - protein, 11 aa, Homo sapiens
  CDR3 for beta chain variable domain of TCR clone 289170 (TRBV11-2, TRBJ1-1)
CASSINTEAFF

SEQ ID NO: 578341 - protein, 14 aa, Homo sapiens
  CDR3 for alpha chain variable domain of TCR clone 289171 (TRAV2, TRAJ9)
CAVEDRSGGFKTIF

SEQ ID NO: 578342 - protein, 15 aa, Homo sapiens
  CDR3 for beta chain variable domain of TCR clone 289171 (TRBV28, TRBJ2-1)
CASSPPGLADHEQFF

SEQ ID NO: 578343 - protein, 16 aa, Homo sapiens
  CDR3 for alpha chain variable domain of TCR clone 289172 (TRAV13-1, TRAJ48)
CAASIFGNFGNEKLTF

SEQ ID NO: 578344 - protein, 14 aa, Homo sapiens
  CDR3 for beta chain variable domain of TCR clone 289172 (TRBV24-1, TRBJ1-1)
CATSITRGDTEAFF

SEQ ID NO: 578345 - protein, 15 aa, Homo sapiens
  CDR3 for alpha chain variable domain of TCR clone 289173 (TRAV27, TRAJ28)
CAGASQGAGSYQLTF

SEQ ID NO: 578346 - protein, 16 aa, Homo sapiens
  CDR3 for beta chain variable domain of TCR clone 289173 (TRBV6-6, TRBJ2-6)
CASNPGAGNGANDLTF

SEQ ID NO: 578347 - protein, 14 aa, Homo sapiens
  CDR3 for alpha chain variable domain of TCR clone 289174 (TRAV8-2, TRAJ37)
CVVSISGNTGKLIF

SEQ ID NO: 578348 - protein, 13 aa, Homo sapiens
  CDR3 for beta chain variable domain of TCR clone 289174 (TRBV7-8, TRBJ2-7)
RRARLTEMGEQYF

SEQ ID NO: 578349 - protein, 14 aa, Homo sapiens
  CDR3 for alpha chain variable domain of TCR clone 289175 (TRAV1-2, TRAJ8)
CAVRGDRGFQKLVF

SEQ ID NO: 578350 - protein, 15 aa, Homo sapiens
  CDR3 for beta chain variable domain of TCR clone 289175 (TRBV6-3, TRBJ2-7)
CASSSPGTVFYEQYF

SEQ ID NO: 578351 - protein, 15 aa, Homo sapiens
  CDR3 for alpha chain variable domain of TCR clone 289176 (TRAV8-3, TRAJ45)
CASSDLGGGADGLTF

SEQ ID NO: 578352 - protein, 13 aa, Homo sapiens
  CDR3 for beta chain variable domain of TCR clone 289176 (TRBV10-3, TRBJ2-7)
CASKLAVSYEQYF

SEQ ID NO: 578353 - protein, 21 aa, Homo sapiens
  CDR3 for alpha chain variable domain of TCR clone 289177 (TRAV12-1, TRAJ32)
SSVIQPPTSMNYSGATNKLIF

SEQ ID NO: 578354 - protein, 15 aa, Homo sapiens
  CDR3 for beta chain variable domain of TCR clone 289177 (TRBV7-9, TRBJ2-2)
CASGPLDTFPGELFF

SEQ ID NO: 578355 - protein, 13 aa, Homo sapiens
  CDR3 for alpha chain variable domain of TCR clone 289178 (TRAV13-2, TRAJ53)
CAENMGSNYKLTF

SEQ ID NO: 578356 - protein, 13 aa, Homo sapiens
  CDR3 for beta chain variable domain of TCR clone 289178 (TRBV4-1, TRBJ2-2)
CASSQENTGQLFF

SEQ ID NO: 578357 - protein, 10 aa, Homo sapiens
  CDR3 for alpha chain variable domain of TCR clone 289179 (TRAV21, TRAJ43)
CAVRIGDMRF

SEQ ID NO: 578358 - protein, 13 aa, Homo sapiens
  CDR3 for beta chain variable domain of TCR clone 289179 (TRBV20-1, TRBJ2-7)
CSAPRLADYEQYF

SEQ ID NO: 578359 - protein, 14 aa, Homo sapiens
  CDR3 for alpha chain variable domain of TCR clone 289180 (TRAV14/DV4, TRAJ54)
CAMREAPGAQKLVI

SEQ ID NO: 578360 - protein, 15 aa, Homo sapiens
  CDR3 for beta chain variable domain of TCR clone 289180 (TRBV5-1, TRBJ2-7)
CASSLTGGPAREQYF

SEQ ID NO: 578361 - protein, 10 aa, Homo sapiens
  CDR3 for alpha chain variable domain of TCR clone 289181 (TRAV1-2, TRAJ20)
CACNEYKLSF

SEQ ID NO: 578362 - protein, 16 aa, Homo sapiens
  CDR3 for beta chain variable domain of TCR clone 289181 (TRBV20-1, TRBJ2-1)
CSARDLKQGMNNEQFF

SEQ ID NO: 578363 - protein, 15 aa, Homo sapiens
  CDR3 for alpha chain variable domain of TCR clone 289182 (TRAV2, TRAJ15)
CAVEDRNQAGTALIF

SEQ ID NO: 578364 - protein, 13 aa, Homo sapiens
  CDR3 for beta chain variable domain of TCR clone 289182 (TRBV10-3, TRBJ2-7)
CPSKLAVNYEQYF

SEQ ID NO: 578365 - protein, 12 aa, Homo sapiens
  CDR3 for alpha chain variable domain of TCR clone 289183 (TRAV13-1, TRAJ21)
CAAKEGFNKFYF

SEQ ID NO: 578366 - protein, 15 aa, Homo sapiens
  CDR3 for beta chain variable domain of TCR clone 289183 (TRBV19, TRBJ2-4)
CASRGPRRGENIQYF

SEQ ID NO: 578367 - protein, 14 aa, Homo sapiens
  CDR3 for alpha chain variable domain of TCR clone 289184 (TRAV12-2, TRAJ17)
CAVLLKAAGNKLTF

SEQ ID NO: 578368 - protein, 14 aa, Homo sapiens
  CDR3 for beta chain variable domain of TCR clone 289184 (TRBV19, TRBJ2-3)
CASSAPRGTDTQYF

SEQ ID NO: 578369 - protein, 13 aa, Homo sapiens
  CDR3 for alpha chain variable domain of TCR clone 289185 (TRAV27, TRAJ42)
CAGARGSQVNLIF

SEQ ID NO: 578370 - protein, 16 aa, Homo sapiens
  CDR3 for beta chain variable domain of TCR clone 289185 (TRBV10-3, TRBJ2-2)
CASSLKRGTLSGELFF

SEQ ID NO: 578371 - protein, 15 aa, Homo sapiens
  CDR3 for alpha chain variable domain of TCR clone 289186 (TRAV41, TRAJ57)
CVPNDTGGGSEKLVF

SEQ ID NO: 578372 - protein, 13 aa, Homo sapiens
  CDR3 for beta chain variable domain of TCR clone 289186 (TRBV4-1, TRBJ1-1)
CASSLRGRTEAFF

SEQ ID NO: 578373 - protein, 14 aa, Homo sapiens
  CDR3 for alpha chain variable domain of TCR clone 289187 (TRAV8-6, TRAJ17)
CAVRKKAAGNKLTF

SEQ ID NO: 578374 - protein, 19 aa, Homo sapiens
  CDR3 for beta chain variable domain of TCR clone 289187 (TRBV6-6, TRBJ1-3)
CASSYGYEGQDLSGNTMYF

SEQ ID NO: 578375 - protein, 16 aa, Homo sapiens
  CDR3 for alpha chain variable domain of TCR clone 289188 (TRAV30, TRAJ24)
CGTEIVDADSWGKFQF

SEQ ID NO: 578376 - protein, 15 aa, Homo sapiens
  CDR3 for beta chain variable domain of TCR clone 289188 (TRBV28, TRBJ2-1)
CASSRIAGGRSEQFF

SEQ ID NO: 578377 - protein, 11 aa, Homo sapiens
  CDR3 for alpha chain variable domain of TCR clone 289189 (TRAV8-6, TRAJ42)
CAVRGRKPRRS

SEQ ID NO: 578378 - protein, 13 aa, Homo sapiens
  CDR3 for beta chain variable domain of TCR clone 289189 (TRBV7-3, TRBJ1-1)
CASSQDWGAEAFL

SEQ ID NO: 578379 - protein, 16 aa, Homo sapiens
  CDR3 for alpha chain variable domain of TCR clone 289190 (TRAV17, TRAJ36)
CAKVSLNWGKQPLLWD

SEQ ID NO: 578380 - protein, 13 aa, Homo sapiens
  CDR3 for beta chain variable domain of TCR clone 289190 (TRBV4-1, TRBJ1-1)
CASSQLGTGEAFL

SEQ ID NO: 578381 - protein, 14 aa, Homo sapiens
  CDR3 for alpha chain variable domain of TCR clone 289191 (TRAV1-2, TRAJ8)
WAVREDTGFQKLVF

SEQ ID NO: 578382 - protein, 13 aa, Homo sapiens
  CDR3 for beta chain variable domain of TCR clone 289191 (TRBV29-1, TRBJ1-1)
CSVGDSRNTEAFF

SEQ ID NO: 578383 - protein, 12 aa, Homo sapiens
  CDR3 for alpha chain variable domain of TCR clone 289192 (TRAV12-3, TRAJ17)
CAMTLTGNKLTF

SEQ ID NO: 578384 - protein, 14 aa, Homo sapiens
  CDR3 for beta chain variable domain of TCR clone 289192 (TRBV12-4, TRBJ2-1)
CASSLGQGASEQFF

SEQ ID NO: 578385 - protein, 14 aa, Homo sapiens
  CDR3 for alpha chain variable domain of TCR clone 289193 (TRAV38-1, TRAJ43)
CAFMKHNNNNDMRF

SEQ ID NO: 578386 - protein, 17 aa, Homo sapiens
  CDR3 for beta chain variable domain of TCR clone 289193 (TRBV7-7, TRBJ1-4)
CASSLVGQGASKEKLFF

SEQ ID NO: 578387 - protein, 11 aa, Homo sapiens
  CDR3 for alpha chain variable domain of TCR clone 289194 (TRAV12-2, TRAJ31)
CAILNNARLMF

SEQ ID NO: 578388 - protein, 16 aa, Homo sapiens
  CDR3 for beta chain variable domain of TCR clone 289194 (TRBV13, TRBJ2-2)
CASGPRTGEHTGELFF

SEQ ID NO: 578389 - protein, 14 aa, Homo sapiens
  CDR3 for alpha chain variable domain of TCR clone 289195 (TRAV16, TRAJ32)
CALKSGGATNKLIF

SEQ ID NO: 578390 - protein, 13 aa, Homo sapiens
  CDR3 for beta chain variable domain of TCR clone 289195 (TRBV15, TRBJ1-6)
CATSGSLNSPLHF

SEQ ID NO: 578391 - protein, 16 aa, Homo sapiens
  CDR3 for alpha chain variable domain of TCR clone 289196 (TRAV26-1, )
CIDIQNPDPAVYQLTD

SEQ ID NO: 578392 - protein, 19 aa, Homo sapiens
  CDR3 for beta chain variable domain of TCR clone 289196 (TRBV19, TRBJ2-5)
CASSIGRVTDFFLGETQYF

SEQ ID NO: 578393 - protein, 19 aa, Homo sapiens
  CDR3 for alpha chain variable domain of TCR clone 289197 (TRAV30, TRAJ52)
CGTEANTNAGGTSYGKLTF

SEQ ID NO: 578394 - protein, 14 aa, Homo sapiens
  CDR3 for beta chain variable domain of TCR clone 289197 (TRBV7-2, TRBJ2-7)
CASSLPPGQGPQYF

SEQ ID NO: 578395 - protein, 13 aa, Homo sapiens
  CDR3 for alpha chain variable domain of TCR clone 289198 (TRAV3, TRAJ21)
CAAREPDSNKFYF

SEQ ID NO: 578396 - protein, 13 aa, Homo sapiens
  CDR3 for beta chain variable domain of TCR clone 289198 (TRBV9, TRBJ2-1)
CASSPSGGNEQFF

SEQ ID NO: 578397 - protein, 13 aa, Homo sapiens
  CDR3 for alpha chain variable domain of TCR clone 289199 (TRAV13-1, TRAJ10)
CAAAAGGGNKLTF

SEQ ID NO: 578398 - protein, 14 aa, Homo sapiens
  CDR3 for beta chain variable domain of TCR clone 289199 (TRBV12-4, TRBJ2-7)
CASSPAGLKYEQYF

SEQ ID NO: 578399 - protein, 12 aa, Homo sapiens
  CDR3 for alpha chain variable domain of TCR clone 289200 (TRAV21, TRAJ27)
CAANTNAGKSTF

SEQ ID NO: 578400 - protein, 14 aa, Homo sapiens
  CDR3 for beta chain variable domain of TCR clone 289200 (TRBV10-3, TRBJ2-1)
CAISSDLAYNEQFF

SEQ ID NO: 578401 - protein, 14 aa, Homo sapiens
  CDR3 for alpha chain variable domain of TCR clone 289201 (TRAV12-1, TRAJ12)
VVVNPMDSSYKLIF

SEQ ID NO: 578402 - protein, 13 aa, Homo sapiens
  CDR3 for beta chain variable domain of TCR clone 289201 (TRBV28, TRBJ2-2)
CASVRESTGELFF

SEQ ID NO: 578403 - protein, 14 aa, Homo sapiens
  CDR3 for alpha chain variable domain of TCR clone 289202 (TRAV1-2, TRAJ16)
CAVNRFSDGQKLLF

SEQ ID NO: 578404 - protein, 13 aa, Homo sapiens
  CDR3 for beta chain variable domain of TCR clone 289202 (TRBV7-9, TRBJ1-2)
CVSSLKQNYGYTF

SEQ ID NO: 578405 - protein, 11 aa, Homo sapiens
  CDR3 for alpha chain variable domain of TCR clone 289203 (TRAV12-3, TRAJ49)
CAMSSGNQFYF

SEQ ID NO: 578406 - protein, 17 aa, Homo sapiens
  CDR3 for beta chain variable domain of TCR clone 289203 (TRBV5-7, TRBJ2-7)
CASSLWRVLPGSYEQYF

SEQ ID NO: 578407 - protein, 15 aa, Homo sapiens
  CDR3 for alpha chain variable domain of TCR clone 289204 (TRAV27, TRAJ38)
CAARRNAGNNRKLVW

SEQ ID NO: 578408 - protein, 13 aa, Homo sapiens
  CDR3 for beta chain variable domain of TCR clone 289204 (TRBV7-3, TRBJ1-1)
CASSQDWGAEAFF

SEQ ID NO: 578409 - protein, 14 aa, Homo sapiens
  CDR3 for alpha chain variable domain of TCR clone 289205 (TRAV8-3, TRAJ4)
CAVGASGGYNKLIF

SEQ ID NO: 578410 - protein, 17 aa, Homo sapiens
  CDR3 for beta chain variable domain of TCR clone 289205 (TRBV3-1, TRBJ2-2)
CASSQFRDKVDTGELFF

SEQ ID NO: 578411 - protein, 14 aa, Homo sapiens
  CDR3 for alpha chain variable domain of TCR clone 289206 (TRAV12-3, TRAJ10)
SHLPLTGGGNKLTF

SEQ ID NO: 578412 - protein, 14 aa, Homo sapiens
  CDR3 for beta chain variable domain of TCR clone 289206 (TRBV12-4, TRBJ2-5)
CASSSTEGTKTQYF

SEQ ID NO: 578413 - protein, 14 aa, Homo sapiens
  CDR3 for alpha chain variable domain of TCR clone 289207 (TRAV13-2, TRAJ37)
CAEKISGNTGKLIF

SEQ ID NO: 578414 - protein, 17 aa, Homo sapiens
  CDR3 for beta chain variable domain of TCR clone 289207 (TRBV20-1, TRBJ2-2)
CSASGSGQGGLTGELFF

SEQ ID NO: 578415 - protein, 14 aa, Homo sapiens
  CDR3 for alpha chain variable domain of TCR clone 289208 (TRAV8-2, TRAJ4)
CVVSPSGGYNKLIF

SEQ ID NO: 578416 - protein, 15 aa, Homo sapiens
  CDR3 for beta chain variable domain of TCR clone 289208 (TRBV6-6, TRBJ2-7)
CASSYSYGGSYEQDF

SEQ ID NO: 578417 - protein, 18 aa, Homo sapiens
  CDR3 for alpha chain variable domain of TCR clone 289209 (TRAV26-2, TRAJ45)
CILRVDKYSGGGADGPTF

SEQ ID NO: 578418 - protein, 20 aa, Homo sapiens
  CDR3 for beta chain variable domain of TCR clone 289209 (TRBV7-8, TRBJ2-2)
CASSHLFPGPTIHITGELFF

SEQ ID NO: 578419 - protein, 14 aa, Homo sapiens
  CDR3 for alpha chain variable domain of TCR clone 289210 (TRAV12-3, TRAJ10)
SHLPLTGGGNTLTF

SEQ ID NO: 578420 - protein, 16 aa, Homo sapiens
  CDR3 for beta chain variable domain of TCR clone 289210 (TRBV7-3, TRBJ2-2)
CASSLKRGTLSGELFF

SEQ ID NO: 578421 - protein, 13 aa, Homo sapiens
  CDR3 for alpha chain variable domain of TCR clone 289211 (TRAV21, TRAJ27)
CAARPGNAGKSPF

SEQ ID NO: 578422 - protein, 15 aa, Homo sapiens
  CDR3 for beta chain variable domain of TCR clone 289211 (TRBV2, TRBJ2-3)
CASSDAGGPPDTQYF

SEQ ID NO: 578423 - protein, 23 aa, Homo sapiens
  CDR3 for alpha chain variable domain of TCR clone 289212 (TRAV30, TRAJ29)
PAQLLRDLLLWHRAFSGNTPLVF

SEQ ID NO: 578424 - protein, 15 aa, Homo sapiens
  CDR3 for beta chain variable domain of TCR clone 289212 (TRBV5-1, TRBJ2-2)
CASSLFGQNTGELFF

SEQ ID NO: 578425 - protein, 14 aa, Homo sapiens
  CDR3 for alpha chain variable domain of TCR clone 289213 (TRAV12-1, TRAJ27)
CGEHIRTNAGKSTF

SEQ ID NO: 578426 - protein, 14 aa, Homo sapiens
  CDR3 for beta chain variable domain of TCR clone 289213 (TRBV4-1, TRBJ2-2)
CASSQAVNTGELFF

SEQ ID NO: 578427 - protein, 16 aa, Homo sapiens
  CDR3 for alpha chain variable domain of TCR clone 289214 (TRAV26-1, TRAJ37)
CIVRGDSSGNTGKLIF

SEQ ID NO: 578428 - protein, 15 aa, Homo sapiens
  CDR3 for beta chain variable domain of TCR clone 289214 (TRBV6-3, TRBJ2-7)
CASSSPGTVFYEQYF

SEQ ID NO: 578429 - protein, 14 aa, Homo sapiens
  CDR3 for alpha chain variable domain of TCR clone 289215 (TRAV1-1, TRAJ27)
CAVRDTTNAGKSTF

SEQ ID NO: 578430 - protein, 17 aa, Homo sapiens
  CDR3 for beta chain variable domain of TCR clone 289215 (TRBV13, TRBJ2-3)
CASSLSRVAGGRNTQYF

SEQ ID NO: 578431 - protein, 15 aa, Homo sapiens
  CDR3 for alpha chain variable domain of TCR clone 289216 (TRAV12-1, TRAJ4)
CMVNPFSGGYNKLIF

SEQ ID NO: 578432 - protein, 13 aa, Homo sapiens
  CDR3 for beta chain variable domain of TCR clone 289216 (TRBV20-1, TRBJ1-2)
CSARGTADYGYTF

SEQ ID NO: 578433 - protein, 11 aa, Homo sapiens
  CDR3 for alpha chain variable domain of TCR clone 289217 (TRAV1-2, TRAJ20)
CAVANDYKLSF

SEQ ID NO: 578434 - protein, 18 aa, Homo sapiens
  CDR3 for beta chain variable domain of TCR clone 289217 (TRBV20-1, TRBJ2-6)
CSAETTPTRGSGANALTF

SEQ ID NO: 578435 - protein, 12 aa, Homo sapiens
  CDR3 for alpha chain variable domain of TCR clone 289218 (TRAV3, TRAJ31)
CAVRDGNARLMF

SEQ ID NO: 578436 - protein, 18 aa, Homo sapiens
  CDR3 for beta chain variable domain of TCR clone 289218 (TRBV7-2, TRBJ2-3)
CASSLKRGGSGITDTQHF

SEQ ID NO: 578437 - protein, 15 aa, Homo sapiens
  CDR3 for alpha chain variable domain of TCR clone 289219 (TRAV21, TRAJ53)
CATLNSGGSNYKRTF

SEQ ID NO: 578438 - protein, 13 aa, Homo sapiens
  CDR3 for beta chain variable domain of TCR clone 289219 (TRBV11-2, TRBJ2-7)
CASSLGDSYEQYF

SEQ ID NO: 578439 - protein, 14 aa, Homo sapiens
  CDR3 for alpha chain variable domain of TCR clone 289220 (TRAV21, TRAJ45)
CAVSSGGGADGLTF

SEQ ID NO: 578440 - protein, 13 aa, Homo sapiens
  CDR3 for beta chain variable domain of TCR clone 289220 (TRBV24-1, TRBJ2-2)
CATSDWSTGELFF

SEQ ID NO: 578441 - protein, 14 aa, Homo sapiens
  CDR3 for alpha chain variable domain of TCR clone 289221 (TRAV12-1, TRAJ23)
CVVIVYNQGGKLIF

SEQ ID NO: 578442 - protein, 15 aa, Homo sapiens
  CDR3 for beta chain variable domain of TCR clone 289221 (TRBV20-1, TRBJ1-5)
CSAKPPRQGPQPQHF

SEQ ID NO: 578443 - protein, 14 aa, Homo sapiens
  CDR3 for alpha chain variable domain of TCR clone 289222 (TRAV17, TRAJ12)
CATDEKDSSYKLIF

SEQ ID NO: 578444 - protein, 16 aa, Homo sapiens
  CDR3 for beta chain variable domain of TCR clone 289222 (TRBV11-2, TRBJ2-1)
CASSRRLAGVYNEQFF

SEQ ID NO: 578445 - protein, 14 aa, Homo sapiens
  CDR3 for alpha chain variable domain of TCR clone 289223 (TRAV38-1, TRAJ40)
CALRPTSGTYKYIF

SEQ ID NO: 578446 - protein, 14 aa, Homo sapiens
  CDR3 for beta chain variable domain of TCR clone 289223 (TRBV25-1, TRBJ1-1)
CASNYLGGNTEAFF

SEQ ID NO: 578447 - protein, 13 aa, Homo sapiens
  CDR3 for alpha chain variable domain of TCR clone 289224 (TRAV6, TRAJ16)
CALDDSDGQKLLF

SEQ ID NO: 578448 - protein, 14 aa, Homo sapiens
  CDR3 for beta chain variable domain of TCR clone 289224 (TRBV12-4, TRBJ2-5)
CASSLWQKQETQYF

SEQ ID NO: 578449 - protein, 15 aa, Homo sapiens
  CDR3 for alpha chain variable domain of TCR clone 289225 (TRAV4, TRAJ39)
CLVGPNNNAGNMLTF

SEQ ID NO: 578450 - protein, 15 aa, Homo sapiens
  CDR3 for beta chain variable domain of TCR clone 289225 (TRBV7-9, TRBJ1-6)
CASSSPGCGNSPLHF

SEQ ID NO: 578451 - protein, 14 aa, Homo sapiens
  CDR3 for alpha chain variable domain of TCR clone 289226 (TRAV29/DV5, TRAJ36)
CAARRKTGANNPFF

SEQ ID NO: 578452 - protein, 14 aa, Homo sapiens
  CDR3 for beta chain variable domain of TCR clone 289226 (TRBV12-5, TRBJ2-5)
CASGSRSHQETQYF

SEQ ID NO: 578453 - protein, 12 aa, Homo sapiens
  CDR3 for alpha chain variable domain of TCR clone 289227 (TRAV3, TRAJ20)
CAVKDPDYKLSF

SEQ ID NO: 578454 - protein, 14 aa, Homo sapiens
  CDR3 for beta chain variable domain of TCR clone 289227 (TRBV4-2, TRBJ2-1)
CASGLDRAYNEQFF

SEQ ID NO: 578455 - protein, 12 aa, Homo sapiens
  CDR3 for alpha chain variable domain of TCR clone 289228 (TRAV13-1, TRAJ21)
CAAKEGFNKFYF

SEQ ID NO: 578456 - protein, 13 aa, Homo sapiens
  CDR3 for beta chain variable domain of TCR clone 289228 (TRBV5-5, TRBJ2-7)
CASSLIGDYEQYF

SEQ ID NO: 578457 - protein, 14 aa, Homo sapiens
  CDR3 for alpha chain variable domain of TCR clone 289229 (TRAV16, TRAJ3)
CALCQYSIASKIIF

SEQ ID NO: 578458 - protein, 14 aa, Homo sapiens
  CDR3 for beta chain variable domain of TCR clone 289229 (TRBV6-3, TRBJ2-1)
CASLHSAYYNEQFF

SEQ ID NO: 578459 - protein, 16 aa, Homo sapiens
  CDR3 for alpha chain variable domain of TCR clone 289230 (TRAV2, TRAJ42)
TTVLPRDGGSQGNLIF

SEQ ID NO: 578460 - protein, 14 aa, Homo sapiens
  CDR3 for beta chain variable domain of TCR clone 289230 (TRBV28, TRBJ2-1)
CASSLNGRNNEQFF

SEQ ID NO: 578461 - protein, 13 aa, Homo sapiens
  CDR3 for alpha chain variable domain of TCR clone 289231 (TRAV27, TRAJ41)
CAGEGNSGYAPNF

SEQ ID NO: 578462 - protein, 13 aa, Homo sapiens
  CDR3 for beta chain variable domain of TCR clone 289231 (TRBV20-1, TRBJ1-1)
CSARVGGNTEAFF

SEQ ID NO: 578463 - protein, 17 aa, Homo sapiens
  CDR3 for alpha chain variable domain of TCR clone 289232 (TRAV3, TRAJ6)
CAVRDGPRAGGSYIPTF

SEQ ID NO: 578464 - protein, 12 aa, Homo sapiens
  CDR3 for beta chain variable domain of TCR clone 289232 (TRBV11-2, TRBJ2-7)
CASSLPTYEQYF

SEQ ID NO: 578465 - protein, 15 aa, Homo sapiens
  CDR3 for alpha chain variable domain of TCR clone 289233 (TRAV1-2, TRAJ39)
CAVRDRDNAGNMLTF

SEQ ID NO: 578466 - protein, 15 aa, Homo sapiens
  CDR3 for beta chain variable domain of TCR clone 289233 (TRBV13, TRBJ1-3)
CASSPNRGSGNTMCF

SEQ ID NO: 578467 - protein, 12 aa, Homo sapiens
  CDR3 for alpha chain variable domain of TCR clone 289234 (TRAV12-3, TRAJ4)
CAMTGAGTRLAV

SEQ ID NO: 578468 - protein, 16 aa, Homo sapiens
  CDR3 for beta chain variable domain of TCR clone 289234 (TRBV2, TRBJ2-1)
CASRLNTASAYNEQFF

SEQ ID NO: 578469 - protein, 12 aa, Homo sapiens
  CDR3 for alpha chain variable domain of TCR clone 289235 (TRAV12-3, TRAJ17)
CAMTLTGNKLTF

SEQ ID NO: 578470 - protein, 15 aa, Homo sapiens
  CDR3 for beta chain variable domain of TCR clone 289235 (TRBV20-1, TRBJ2-7)
CSDRDRVSGTDEQYF

SEQ ID NO: 578471 - protein, 15 aa, Homo sapiens
  CDR3 for alpha chain variable domain of TCR clone 289236 (TRAV26-1, TRAJ29)
CIVRVEGSGNTPLVF

SEQ ID NO: 578472 - protein, 14 aa, Homo sapiens
  CDR3 for beta chain variable domain of TCR clone 289236 (TRBV6-1, TRBJ1-3)
CASVQGGGGNAIYF

SEQ ID NO: 578473 - protein, 18 aa, Homo sapiens
  CDR3 for alpha chain variable domain of TCR clone 289237 (TRAV12-3, TRAJ52)
CAMSVGGAGGTSYGKLTF

SEQ ID NO: 578474 - protein, 13 aa, Homo sapiens
  CDR3 for beta chain variable domain of TCR clone 289237 (TRBV2, TRBJ2-7)
CASTGGSSYEQYF

SEQ ID NO: 578475 - protein, 14 aa, Homo sapiens
  CDR3 for alpha chain variable domain of TCR clone 289238 (TRAV12-3, TRAJ58)
CAMCTETSGSRLTF

SEQ ID NO: 578476 - protein, 15 aa, Homo sapiens
  CDR3 for beta chain variable domain of TCR clone 289238 (TRBV11-3, TRBJ2-3)
CASLKDGREGDTQYF

SEQ ID NO: 578477 - protein, 13 aa, Homo sapiens
  CDR3 for alpha chain variable domain of TCR clone 289239 (TRAV12-2, TRAJ17)
CREIKAAGNKLTF

SEQ ID NO: 578478 - protein, 15 aa, Homo sapiens
  CDR3 for beta chain variable domain of TCR clone 289239 (TRBV20-1, TRBJ2-7)
CSAESGTSGAYEQYF

SEQ ID NO: 578479 - protein, 14 aa, Homo sapiens
  CDR3 for alpha chain variable domain of TCR clone 289240 (TRAV4, TRAJ20)
CLVGDFINDYKLSF

SEQ ID NO: 578480 - protein, 15 aa, Homo sapiens
  CDR3 for beta chain variable domain of TCR clone 289240 (TRBV9, TRBJ1-6)
CASSVAGTGDSPLLF

SEQ ID NO: 578481 - protein, 15 aa, Homo sapiens
  CDR3 for alpha chain variable domain of TCR clone 289241 (TRAV27, TRAJ28)
YAGAYSGAGSYQLTF

SEQ ID NO: 578482 - protein, 16 aa, Homo sapiens
  CDR3 for beta chain variable domain of TCR clone 289241 (TRBV4-3, TRBJ2-1)
CASSPALDRGVNEQFF

SEQ ID NO: 578483 - protein, 16 aa, Homo sapiens
  CDR3 for alpha chain variable domain of TCR clone 289242 (TRAV16, TRAJ52)
CALSAAGGTSYGKLTF

SEQ ID NO: 578484 - protein, 15 aa, Homo sapiens
  CDR3 for beta chain variable domain of TCR clone 289242 (TRBV5-1, TRBJ2-1)
CASSPPRAPYNGRFF

SEQ ID NO: 578485 - protein, 14 aa, Homo sapiens
  CDR3 for alpha chain variable domain of TCR clone 289243 (TRAV12-2, TRAJ45)
CAVNIGGGADGLTF

SEQ ID NO: 578486 - protein, 13 aa, Homo sapiens
  CDR3 for beta chain variable domain of TCR clone 289243 (TRBV19, TRBJ2-2)
CASSRWSTGELFF

SEQ ID NO: 578487 - protein, 14 aa, Homo sapiens
  CDR3 for alpha chain variable domain of TCR clone 289244 (TRAV12-1, TRAJ30)
CVVRGMNRDDKIIF

SEQ ID NO: 578488 - protein, 14 aa, Homo sapiens
  CDR3 for beta chain variable domain of TCR clone 289244 (TRBV7-2, TRBJ2-1)
CASSPTSGNRRQFF

SEQ ID NO: 578489 - protein, 14 aa, Homo sapiens
  CDR3 for alpha chain variable domain of TCR clone 289245 (TRAV12-2, TRAJ17)
CAVLFKAAGNKLTF

SEQ ID NO: 578490 - protein, 15 aa, Homo sapiens
  CDR3 for beta chain variable domain of TCR clone 289245 (TRBV6-1, TRBJ2-1)
CASSELRGQYNEQFF

SEQ ID NO: 578491 - protein, 12 aa, Homo sapiens
  CDR3 for alpha chain variable domain of TCR clone 289246 (TRAV27, TRAJ13)
CAGAGGDQKVTF

SEQ ID NO: 578492 - protein, 15 aa, Homo sapiens
  CDR3 for beta chain variable domain of TCR clone 289246 (TRBV20-1, TRBJ2-6)
CSARDRGPGANVLTF

SEQ ID NO: 578493 - protein, 10 aa, Homo sapiens
  CDR3 for alpha chain variable domain of TCR clone 289247 (TRAV26-1, TRAJ40)
CIAGTYKYIF

SEQ ID NO: 578494 - protein, 15 aa, Homo sapiens
  CDR3 for beta chain variable domain of TCR clone 289247 (TRBV19, TRBJ2-1)
CASSSPGVPLDEEFF

SEQ ID NO: 578495 - protein, 14 aa, Homo sapiens
  CDR3 for alpha chain variable domain of TCR clone 289248 (TRAV12-2, TRAJ44)
CAVNKAGTASKLTF

SEQ ID NO: 578496 - protein, 16 aa, Homo sapiens
  CDR3 for beta chain variable domain of TCR clone 289248 (TRBV2, TRBJ1-4)
CASNLLQGATNEKLFF

SEQ ID NO: 578497 - protein, 10 aa, Homo sapiens
  CDR3 for alpha chain variable domain of TCR clone 289249 (TRAV12-2, TRAJ10)
CAAWTGVETH

SEQ ID NO: 578498 - protein, 15 aa, Homo sapiens
  CDR3 for beta chain variable domain of TCR clone 289249 (TRBV6-3, TRBJ2-7)
CASSSPGTVFYEQYF

SEQ ID NO: 578499 - protein, 15 aa, Homo sapiens
  CDR3 for alpha chain variable domain of TCR clone 289250 (TRAV27, TRAJ38)
SAARRNAGNNRKLIL

SEQ ID NO: 578500 - protein, 13 aa, Homo sapiens
  CDR3 for beta chain variable domain of TCR clone 289250 (TRBV12-5, TRBJ2-3)
CASGDRQSDTQYF

SEQ ID NO: 578501 - protein, 14 aa, Homo sapiens
  CDR3 for alpha chain variable domain of TCR clone 289251 (TRAV17, TRAJ16)
CATGDFSDGQKLLF

SEQ ID NO: 578502 - protein, 15 aa, Homo sapiens
  CDR3 for beta chain variable domain of TCR clone 289251 (TRBV18, TRBJ2-1)
CASSPPSASYNEQLF

SEQ ID NO: 578503 - protein, 10 aa, Homo sapiens
  CDR3 for alpha chain variable domain of TCR clone 289252 (TRAV13-1, TRAJ7)
LIGGNNRLAF

SEQ ID NO: 578504 - protein, 12 aa, Homo sapiens
  CDR3 for beta chain variable domain of TCR clone 289252 (TRBV2, TRBJ2-1)
CAYGPPGNEQFF

SEQ ID NO: 578505 - protein, 12 aa, Homo sapiens
  CDR3 for alpha chain variable domain of TCR clone 289253 (TRAV16, TRAJ26)
CALRSYGQNFVF

SEQ ID NO: 578506 - protein, 13 aa, Homo sapiens
  CDR3 for beta chain variable domain of TCR clone 289253 (TRBV15, TRBJ2-7)
CATSTTGHYEQYF

SEQ ID NO: 578507 - protein, 12 aa, Homo sapiens
  CDR3 for alpha chain variable domain of TCR clone 289254 (TRAV12-1, TRAJ40)
CVVPSGTYKYIF

SEQ ID NO: 578508 - protein, 12 aa, Homo sapiens
  CDR3 for beta chain variable domain of TCR clone 289254 (TRBV12-4, TRBJ2-7)
CASSLGGYEQYF

SEQ ID NO: 578509 - protein, 14 aa, Homo sapiens
  CDR3 for alpha chain variable domain of TCR clone 289255 (TRAV17, TRAJ57)
CATDPQGGSEKLVF

SEQ ID NO: 578510 - protein, 14 aa, Homo sapiens
  CDR3 for beta chain variable domain of TCR clone 289255 (TRBV7-9, TRBJ2-1)
CASSPRDSLYEQFF

SEQ ID NO: 578511 - protein, 14 aa, Homo sapiens
  CDR3 for alpha chain variable domain of TCR clone 289256 (TRAV12-2, TRAJ13)
CAVKKTGGDQKVTF

SEQ ID NO: 578512 - protein, 15 aa, Homo sapiens
  CDR3 for beta chain variable domain of TCR clone 289256 (TRBV12-4, TRBJ2-5)
CASSPPTGLQETQYF

SEQ ID NO: 578513 - protein, 14 aa, Homo sapiens
  CDR3 for alpha chain variable domain of TCR clone 289257 (TRAV12-2, TRAJ48)
CAVNAFFGNEKLTF

SEQ ID NO: 578514 - protein, 13 aa, Homo sapiens
  CDR3 for beta chain variable domain of TCR clone 289257 (TRBV28, TRBJ2-7)
CAGAQQGLDEQCF

SEQ ID NO: 578515 - protein, 14 aa, Homo sapiens
  CDR3 for alpha chain variable domain of TCR clone 289258 (TRAV38-1, TRAJ40)
CALRPTSGTYKYIF

SEQ ID NO: 578516 - protein, 13 aa, Homo sapiens
  CDR3 for beta chain variable domain of TCR clone 289258 (TRBV20-1, TRBJ2-7)
CSATHTSGYEQYF

SEQ ID NO: 578517 - protein, 15 aa, Homo sapiens
  CDR3 for alpha chain variable domain of TCR clone 289259 (TRAV38-1, TRAJ37)
CAFIHGSGNTGKLIF

SEQ ID NO: 578518 - protein, 12 aa, Homo sapiens
  CDR3 for beta chain variable domain of TCR clone 289259 (TRBV7-9, TRBJ2-7)
CASSFGSYEQFF

SEQ ID NO: 578519 - protein, 13 aa, Homo sapiens
  CDR3 for alpha chain variable domain of TCR clone 289260 (TRAV21, TRAJ3)
CAVTGSSASKIIF

SEQ ID NO: 578520 - protein, 16 aa, Homo sapiens
  CDR3 for beta chain variable domain of TCR clone 289260 (TRBV28, TRBJ2-7)
CASSPWVATGDLSQYF

SEQ ID NO: 578521 - protein, 14 aa, Homo sapiens
  CDR3 for alpha chain variable domain of TCR clone 289261 (TRAV1-2, TRAJ8)
CAEREDTGFQKLVF

SEQ ID NO: 578522 - protein, 15 aa, Homo sapiens
  CDR3 for beta chain variable domain of TCR clone 289261 (TRBV5-7, TRBJ2-3)
CASSPGLATTDTQYF

SEQ ID NO: 578523 - protein, 16 aa, Homo sapiens
  CDR3 for alpha chain variable domain of TCR clone 289262 (TRAV12-1, TRAJ45)
CVVIRYSGGGADGLSF

SEQ ID NO: 578524 - protein, 12 aa, Homo sapiens
  CDR3 for beta chain variable domain of TCR clone 289262 (TRBV6-5, TRBJ2-2)
CASRQITGELFF

SEQ ID NO: 578525 - protein, 13 aa, Homo sapiens
  CDR3 for alpha chain variable domain of TCR clone 289263 (TRAV12-1, TRAJ42)
CGGVGGSPGNLIF

SEQ ID NO: 578526 - protein, 15 aa, Homo sapiens
  CDR3 for beta chain variable domain of TCR clone 289263 (TRBV5-4, TRBJ1-4)
CASSSFGTGNEKLFF

SEQ ID NO: 578527 - protein, 14 aa, Homo sapiens
  CDR3 for alpha chain variable domain of TCR clone 289264 (TRAV1-2, TRAJ16)
CAVNRFSDGQRLLF

SEQ ID NO: 578528 - protein, 15 aa, Homo sapiens
  CDR3 for beta chain variable domain of TCR clone 289264 (TRBV9, TRBJ1-6)
SASSVAGTGDSPLHF

SEQ ID NO: 578529 - protein, 14 aa, Homo sapiens
  CDR3 for alpha chain variable domain of TCR clone 289265 (TRAV12-2, TRAJ13)
CAGKKTGGYQKVTF

SEQ ID NO: 578530 - protein, 17 aa, Homo sapiens
  CDR3 for beta chain variable domain of TCR clone 289265 (TRBV13, TRBJ2-3)
CASSLSRVAGGRNTQYF

SEQ ID NO: 578531 - protein, 10 aa, Homo sapiens
  CDR3 for alpha chain variable domain of TCR clone 289266 (TRAV21, TRAJ31)
CAVDNAGLMF

SEQ ID NO: 578532 - protein, 13 aa, Homo sapiens
  CDR3 for beta chain variable domain of TCR clone 289266 (TRBV10-3, TRBJ2-7)
CASKLAVNYEQYF

SEQ ID NO: 578533 - protein, 16 aa, Homo sapiens
  CDR3 for alpha chain variable domain of TCR clone 289267 (TRAV26-2, TRAJ45)
CTTASPIGGGADGLTF

SEQ ID NO: 578534 - protein, 19 aa, Homo sapiens
  CDR3 for beta chain variable domain of TCR clone 289267 (TRBV28, TRBJ2-1)
CQHPYWTVTGTSGGNEQFF

SEQ ID NO: 578535 - protein, 12 aa, Homo sapiens
  CDR3 for alpha chain variable domain of TCR clone 289268 (TRAV23/DV6, TRAJ27)
CAARKSAGKSTF

SEQ ID NO: 578536 - protein, 14 aa, Homo sapiens
  CDR3 for beta chain variable domain of TCR clone 289268 (TRBV25-1, TRBJ1-1)
CASTHLGGNTEAFF

SEQ ID NO: 578537 - protein, 15 aa, Homo sapiens
  CDR3 for alpha chain variable domain of TCR clone 289269 (TRAV12-2, TRAJ56)
CAVNPFTGANSKLTF

SEQ ID NO: 578538 - protein, 13 aa, Homo sapiens
  CDR3 for beta chain variable domain of TCR clone 289269 (TRBV12-4, TRBJ2-7)
CASSPTETYEQYF

SEQ ID NO: 578539 - protein, 14 aa, Homo sapiens
  CDR3 for alpha chain variable domain of TCR clone 289270 (TRAV4, TRAJ6)
CLVGEAGGSYIPTF

SEQ ID NO: 578540 - protein, 16 aa, Homo sapiens
  CDR3 for beta chain variable domain of TCR clone 289270 (TRBV7-6, TRBJ2-1)
CASSLNEVPSYNEQFF

SEQ ID NO: 578541 - protein, 14 aa, Homo sapiens
  CDR3 for alpha chain variable domain of TCR clone 289271 (TRAV12-1, TRAJ12)
CVVTRMDSSYKLIF

SEQ ID NO: 578542 - protein, 14 aa, Homo sapiens
  CDR3 for beta chain variable domain of TCR clone 289271 (TRBV20-1, TRBJ2-3)
CSARGGTSTDTQYF

SEQ ID NO: 578543 - protein, 10 aa, Homo sapiens
  CDR3 for alpha chain variable domain of TCR clone 289272 (TRAV23/DV6, TRAJ57)
CAASATLPQG

SEQ ID NO: 578544 - protein, 14 aa, Homo sapiens
  CDR3 for beta chain variable domain of TCR clone 289272 (TRBV25-1, TRBJ1-1)
CASTHLGGNTEAFF

SEQ ID NO: 578545 - protein, 14 aa, Homo sapiens
  CDR3 for alpha chain variable domain of TCR clone 289273 (TRAV12-2, TRAJ13)
CAVKKTGGYQKVTF

SEQ ID NO: 578546 - protein, 12 aa, Homo sapiens
  CDR3 for beta chain variable domain of TCR clone 289273 (TRBV6-5, TRBJ2-7)
CASSDRQNEQYF

SEQ ID NO: 578547 - protein, 16 aa, Homo sapiens
  CDR3 for alpha chain variable domain of TCR clone 289274 (TRAV27, TRAJ52)
CAGAPAGGTSYGKLTF

SEQ ID NO: 578548 - protein, 12 aa, Homo sapiens
  CDR3 for beta chain variable domain of TCR clone 289274 (TRBV27, TRBJ2-1)
CASRGCYNEQFF

SEQ ID NO: 578549 - protein, 13 aa, Homo sapiens
  CDR3 for alpha chain variable domain of TCR clone 289275 (TRAV17, TRAJ26)
CATVDNYGQNFVF

SEQ ID NO: 578550 - protein, 15 aa, Homo sapiens
  CDR3 for beta chain variable domain of TCR clone 289275 (TRBV2, TRBJ2-1)
CQQCGGSLSYNEQFF

SEQ ID NO: 578551 - protein, 14 aa, Homo sapiens
  CDR3 for alpha chain variable domain of TCR clone 289276 (TRAV8-6, TRAJ34)
CAVKTQRNTDKLIF

SEQ ID NO: 578552 - protein, 14 aa, Homo sapiens
  CDR3 for beta chain variable domain of TCR clone 289276 (TRBV28, TRBJ2-5)
CASSLGDRAETQYF

SEQ ID NO: 578553 - protein, 13 aa, Homo sapiens
  CDR3 for alpha chain variable domain of TCR clone 289277 (TRAV1-1, TRAJ31)
CASYLHNNARLMF

SEQ ID NO: 578554 - protein, 14 aa, Homo sapiens
  CDR3 for beta chain variable domain of TCR clone 289277 (TRBV4-1, TRBJ2-5)
CASSRSGSGETQYF

SEQ ID NO: 578555 - protein, 15 aa, Homo sapiens
  CDR3 for alpha chain variable domain of TCR clone 289278 (TRAV1-2, TRAJ32)
CALRGYGGATNKLIF

SEQ ID NO: 578556 - protein, 15 aa, Homo sapiens
  CDR3 for beta chain variable domain of TCR clone 289278 (TRBV25-1, TRBJ2-5)
CASSDTGTHQETQYF

SEQ ID NO: 578557 - protein, 14 aa, Homo sapiens
  CDR3 for alpha chain variable domain of TCR clone 289279 (TRAV8-2, TRAJ11)
GVVSEKSGYSTLTF

SEQ ID NO: 578558 - protein, 16 aa, Homo sapiens
  CDR3 for beta chain variable domain of TCR clone 289279 (TRBV28, TRBJ2-1)
CASISPEYPRDNEQFF

SEQ ID NO: 578559 - protein, 13 aa, Homo sapiens
  CDR3 for alpha chain variable domain of TCR clone 289280 (TRAV12-3, TRAJ33)
CAMSVNSNYQLIW

SEQ ID NO: 578560 - protein, 14 aa, Homo sapiens
  CDR3 for beta chain variable domain of TCR clone 289280 (TRBV11-2, TRBJ2-3)
CASSRLARTDTQYF

SEQ ID NO: 578561 - protein, 12 aa, Homo sapiens
  CDR3 for alpha chain variable domain of TCR clone 289281 (TRAV13-2, TRAJ23)
CAERHRGGELIF

SEQ ID NO: 578562 - protein, 19 aa, Homo sapiens
  CDR3 for beta chain variable domain of TCR clone 289281 (TRBV19, TRBJ2-5)
CASSIGQVTDFFLGETQYF

SEQ ID NO: 578563 - protein, 16 aa, Homo sapiens
  CDR3 for alpha chain variable domain of TCR clone 289282 (TRAV8-3, TRAJ22)
CAVDLLCPGSARQLTF

SEQ ID NO: 578564 - protein, 14 aa, Homo sapiens
  CDR3 for beta chain variable domain of TCR clone 289282 (TRBV11-2, TRBJ2-7)
CASSLELEGYEQYF

SEQ ID NO: 578565 - protein, 14 aa, Homo sapiens
  CDR3 for alpha chain variable domain of TCR clone 289283 (TRAV1-2, TRAJ6)
CAVSLSGGSDIPTF

SEQ ID NO: 578566 - protein, 15 aa, Homo sapiens
  CDR3 for beta chain variable domain of TCR clone 289283 (TRBV28, TRBJ2-7)
CASSPGGGGFYEQYF

SEQ ID NO: 578567 - protein, 13 aa, Homo sapiens
  CDR3 for alpha chain variable domain of TCR clone 289284 (TRAV17, TRAJ8)
CATGPVGFPKLVF

SEQ ID NO: 578568 - protein, 15 aa, Homo sapiens
  CDR3 for beta chain variable domain of TCR clone 289284 (TRBV20-1, TRBJ2-5)
CSAGRLPSGQETQYF

SEQ ID NO: 578569 - protein, 12 aa, Homo sapiens
  CDR3 for alpha chain variable domain of TCR clone 289285 (TRAV12-3, TRAJ17)
CAMKLTGNKLTF

SEQ ID NO: 578570 - protein, 18 aa, Homo sapiens
  CDR3 for beta chain variable domain of TCR clone 289285 (TRBV4-3, TRBJ1-6)
CASSQETPASSYNSPLHF

SEQ ID NO: 578571 - protein, 12 aa, Homo sapiens
  CDR3 for alpha chain variable domain of TCR clone 289286 (TRAV12-3, TRAJ29)
CAAREGNTPLVF

SEQ ID NO: 578572 - protein, 16 aa, Homo sapiens
  CDR3 for beta chain variable domain of TCR clone 289286 (TRBV2, TRBJ2-7)
CASSEPWTGPSYEQYF

SEQ ID NO: 578573 - protein, 14 aa, Homo sapiens
  CDR3 for alpha chain variable domain of TCR clone 289287 (TRAV8-4, TRAJ8)
CAVSLNSVFQKLVF

SEQ ID NO: 578574 - protein, 13 aa, Homo sapiens
  CDR3 for beta chain variable domain of TCR clone 289287 (TRBV7-9, TRBJ2-3)
CASSPGSTDTQYF

SEQ ID NO: 578575 - protein, 17 aa, Homo sapiens
  CDR3 for alpha chain variable domain of TCR clone 289288 (TRAV4, TRAJ42)
CLVGVLNYGGSQGNLIF

SEQ ID NO: 578576 - protein, 17 aa, Homo sapiens
  CDR3 for beta chain variable domain of TCR clone 289288 (TRBV20-1, TRBJ2-2)
CSASGSGQGGLTGELFF

SEQ ID NO: 578577 - protein, 14 aa, Homo sapiens
  CDR3 for alpha chain variable domain of TCR clone 289289 (TRAV17, TRAJ12)
CATDEKDNSYKLIF

SEQ ID NO: 578578 - protein, 16 aa, Homo sapiens
  CDR3 for beta chain variable domain of TCR clone 289289 (TRBV11-2, TRBJ2-1)
CASSPRLAGVYNEQFF

SEQ ID NO: 578579 - protein, 16 aa, Homo sapiens
  CDR3 for alpha chain variable domain of TCR clone 289290 (TRAV3, TRAJ18)
CAVRDGRGSTLGRLYF

SEQ ID NO: 578580 - protein, 16 aa, Homo sapiens
  CDR3 for beta chain variable domain of TCR clone 289290 (TRBV28, TRBJ1-6)
CASSPLGGEDNSPLHF

SEQ ID NO: 578581 - protein, 13 aa, Homo sapiens
  CDR3 for alpha chain variable domain of TCR clone 289291 (TRAV30, TRAJ24)
CGTVTDSWGTLQF

SEQ ID NO: 578582 - protein, 15 aa, Homo sapiens
  CDR3 for beta chain variable domain of TCR clone 289291 (TRBV4-1, TRBJ2-1)
CASSQDPGNYNEQFF

SEQ ID NO: 578583 - protein, 13 aa, Homo sapiens
  CDR3 for alpha chain variable domain of TCR clone 289292 (TRAV8-3, TRAJ20)
CAVRRPNDYKLSF

SEQ ID NO: 578584 - protein, 14 aa, Homo sapiens
  CDR3 for beta chain variable domain of TCR clone 289292 (TRBV12-5, TRBJ2-5)
CASGSRTHQETQYF

SEQ ID NO: 578585 - protein, 12 aa, Homo sapiens
  CDR3 for alpha chain variable domain of TCR clone 289293 (TRAV21, TRAJ11)
CAVRGGNSTLTF

SEQ ID NO: 578586 - protein, 15 aa, Homo sapiens
  CDR3 for beta chain variable domain of TCR clone 289293 (TRBV6-1, TRBJ2-7)
CATSEPIAATTEQYF

SEQ ID NO: 578587 - protein, 17 aa, Homo sapiens
  CDR3 for alpha chain variable domain of TCR clone 289294 (TRAV8-6, TRAJ58)
CAVSSWVGETSGSRLTF

SEQ ID NO: 578588 - protein, 13 aa, Homo sapiens
  CDR3 for beta chain variable domain of TCR clone 289294 (TRBV7-9, TRBJ1-2)
CASSPSNFWGYTF

SEQ ID NO: 578589 - protein, 10 aa, Homo sapiens
  CDR3 for alpha chain variable domain of TCR clone 289295 (TRAV13-1, TRAJ34)
CADINRQAHL

SEQ ID NO: 578590 - protein, 13 aa, Homo sapiens
  CDR3 for beta chain variable domain of TCR clone 289295 (TRBV4-2, TRBJ1-1)
CASSQAGNTEAFF

SEQ ID NO: 578591 - protein, 16 aa, Homo sapiens
  CDR3 for alpha chain variable domain of TCR clone 289296 (TRAV3, TRAJ37)
CAVRVKGYGNTGKLIF

SEQ ID NO: 578592 - protein, 13 aa, Homo sapiens
  CDR3 for beta chain variable domain of TCR clone 289296 (TRBV10-3, TRBJ1-2)
CAISERDSYGYTF

SEQ ID NO: 578593 - protein, 15 aa, Homo sapiens
  CDR3 for alpha chain variable domain of TCR clone 289297 (TRAV17, TRAJ57)
CATGPSQGGYEKLVF

SEQ ID NO: 578594 - protein, 17 aa, Homo sapiens
  CDR3 for beta chain variable domain of TCR clone 289297 (TRBV20-1, TRBJ2-1)
CSASSSGLAGSYNEQFF

SEQ ID NO: 578595 - protein, 15 aa, Homo sapiens
  CDR3 for alpha chain variable domain of TCR clone 289298 (TRAV8-3, TRAJ34)
EAAEYFFAIPGKLIF

SEQ ID NO: 578596 - protein, 15 aa, Homo sapiens
  CDR3 for beta chain variable domain of TCR clone 289298 (TRBV5-6, TRBJ2-1)
CASSRRLAGDNEQFF

SEQ ID NO: 578597 - protein, 17 aa, Homo sapiens
  CDR3 for alpha chain variable domain of TCR clone 289299 (TRAV17, TRAJ52)
CAPERPSGGTSYGKLTF

SEQ ID NO: 578598 - protein, 15 aa, Homo sapiens
  CDR3 for beta chain variable domain of TCR clone 289299 (TRBV5-1, TRBJ2-1)
CASSLVANSYNEQFF

SEQ ID NO: 578599 - protein, 12 aa, Homo sapiens
  CDR3 for alpha chain variable domain of TCR clone 289300 (TRAV12-1, TRAJ6)
CVVSERSYIPTF

SEQ ID NO: 578600 - protein, 16 aa, Homo sapiens
  CDR3 for beta chain variable domain of TCR clone 289300 (TRBV7-3, TRBJ2-1)
CISVPAAYGLAGDQFF

SEQ ID NO: 578601 - protein, 11 aa, Homo sapiens
  CDR3 for alpha chain variable domain of TCR clone 289301 (TRAV13-1, TRAJ49)
CACVGGNQFYF

SEQ ID NO: 578602 - protein, 16 aa, Homo sapiens
  CDR3 for beta chain variable domain of TCR clone 289301 (TRBV11-2, TRBJ2-2)
CASSLRTGNLIGELFS

SEQ ID NO: 578603 - protein, 16 aa, Homo sapiens
  CDR3 for alpha chain variable domain of TCR clone 289302 (TRAV2, TRAJ4)
CDVEDRFSGGYNKLIF

SEQ ID NO: 578604 - protein, 13 aa, Homo sapiens
  CDR3 for beta chain variable domain of TCR clone 289302 (TRBV7-7, TRBJ2-5)
CASSRSGQETQYF

SEQ ID NO: 578605 - protein, 12 aa, Homo sapiens
  CDR3 for alpha chain variable domain of TCR clone 289303 (TRAV8-4, TRAJ43)
CAVSVNNNDMRF

SEQ ID NO: 578606 - protein, 18 aa, Homo sapiens
  CDR3 for beta chain variable domain of TCR clone 289303 (TRBV5-6, TRBJ2-2)
CASSLGASGGLNTGELFF

SEQ ID NO: 578607 - protein, 17 aa, Homo sapiens
  CDR3 for alpha chain variable domain of TCR clone 289304 (TRAV3, TRAJ6)
CAVRDGPRAGGSYRPTF

SEQ ID NO: 578608 - protein, 15 aa, Homo sapiens
  CDR3 for beta chain variable domain of TCR clone 289304 (TRBV7-6, TRBJ2-3)
CASSPIIYSTDTQYF

SEQ ID NO: 578609 - protein, 14 aa, Homo sapiens
  CDR3 for alpha chain variable domain of TCR clone 289305 (TRAV1-2, TRAJ16)
CAVNRFSDGQQLLF

SEQ ID NO: 578610 - protein, 13 aa, Homo sapiens
  CDR3 for beta chain variable domain of TCR clone 289305 (TRBV20-1, TRBJ1-1)
CSARLGQGTEAFF

SEQ ID NO: 578611 - protein, 16 aa, Homo sapiens
  CDR3 for alpha chain variable domain of TCR clone 289306 (TRAV3, TRAJ10)
CAVRDMRAGGGNKRTF

SEQ ID NO: 578612 - protein, 16 aa, Homo sapiens
  CDR3 for beta chain variable domain of TCR clone 289306 (TRBV12-4, TRBJ1-5)
CASSRPVGGSNQPQHF

SEQ ID NO: 578613 - protein, 16 aa, Homo sapiens
  CDR3 for alpha chain variable domain of TCR clone 289307 (TRAV12-1, TRAJ48)
CVVNMVSNFGNEKLTF

SEQ ID NO: 578614 - protein, 18 aa, Homo sapiens
  CDR3 for beta chain variable domain of TCR clone 289307 (TRBV11-2, TRBJ2-6)
CASSLNPFLGTGVNVLTF

SEQ ID NO: 578615 - protein, 13 aa, Homo sapiens
  CDR3 for alpha chain variable domain of TCR clone 289308 (TRAV8-2, TRAJ9)
CVVLNTGGFKTIF

SEQ ID NO: 578616 - protein, 16 aa, Homo sapiens
  CDR3 for beta chain variable domain of TCR clone 289308 (TRBV20-1, TRBJ2-2)
CSAILLGAGDTGELFF

SEQ ID NO: 578617 - protein, 12 aa, Homo sapiens
  CDR3 for alpha chain variable domain of TCR clone 289309 (TRAV16, TRAJ10)
CSRTGGGNKLTF

SEQ ID NO: 578618 - protein, 15 aa, Homo sapiens
  CDR3 for beta chain variable domain of TCR clone 289309 (TRBV6-3, TRBJ2-7)
CASSSPETAFYEQYF

SEQ ID NO: 578619 - protein, 14 aa, Homo sapiens
  CDR3 for alpha chain variable domain of TCR clone 289310 (TRAV26-1, TRAJ26)
CIVRATFLGQNLVF

SEQ ID NO: 578620 - protein, 16 aa, Homo sapiens
  CDR3 for beta chain variable domain of TCR clone 289310 (TRBV12-4, TRBJ2-7)
CASRSTGTGPSYEQYF

SEQ ID NO: 578621 - protein, 13 aa, Homo sapiens
  CDR3 for alpha chain variable domain of TCR clone 289311 (TRAV8-3, TRAJ28)
CAVGAVGSYQLTF

SEQ ID NO: 578622 - protein, 15 aa, Homo sapiens
  CDR3 for beta chain variable domain of TCR clone 289311 (TRBV7-9, TRBJ1-5)
CGSSQGHQPNQPQHF

SEQ ID NO: 578623 - protein, 14 aa, Homo sapiens
  CDR3 for alpha chain variable domain of TCR clone 289312 (TRAV1-2, TRAJ16)
CAVNRFSDDQKLLF

SEQ ID NO: 578624 - protein, 15 aa, Homo sapiens
  CDR3 for beta chain variable domain of TCR clone 289312 (TRBV11-3, TRBJ2-3)
CASLKDGREGDTQYF

SEQ ID NO: 578625 - protein, 14 aa, Homo sapiens
  CDR3 for alpha chain variable domain of TCR clone 289313 (TRAV1-2, TRAJ16)
CAVNRFSDGQKLLF

SEQ ID NO: 578626 - protein, 13 aa, Homo sapiens
  CDR3 for beta chain variable domain of TCR clone 289313 (TRBV29-1, TRBJ1-1)
CSVGDSRDTEAFF

SEQ ID NO: 578627 - protein, 18 aa, Homo sapiens
  CDR3 for alpha chain variable domain of TCR clone 289314 (TRAV17, TRAJ45)
CATSLDLYSGGGADGLTF

SEQ ID NO: 578628 - protein, 15 aa, Homo sapiens
  CDR3 for beta chain variable domain of TCR clone 289314 (TRBV11-2, TRBJ2-1)
CAGSKNRGLIYEQFF

SEQ ID NO: 578629 - protein, 12 aa, Homo sapiens
  CDR3 for alpha chain variable domain of TCR clone 289315 (TRAV13-1, TRAJ40)
CAASWATYKYIF

SEQ ID NO: 578630 - protein, 15 aa, Homo sapiens
  CDR3 for beta chain variable domain of TCR clone 289315 (TRBV7-8, TRBJ2-1)
CASSSRLATYNEQFF

SEQ ID NO: 578631 - protein, 10 aa, Homo sapiens
  CDR3 for alpha chain variable domain of TCR clone 289316 (TRAV26-2, TRAJ22)
LQGSARQLTF

SEQ ID NO: 578632 - protein, 13 aa, Homo sapiens
  CDR3 for beta chain variable domain of TCR clone 289316 (TRBV5-1, TRBJ2-1)
CASSVGSYNEQFF

SEQ ID NO: 578633 - protein, 14 aa, Homo sapiens
  CDR3 for alpha chain variable domain of TCR clone 289317 (TRAV29/DV5, TRAJ20)
CAATIRPNDYKLSF

SEQ ID NO: 578634 - protein, 14 aa, Homo sapiens
  CDR3 for beta chain variable domain of TCR clone 289317 (TRBV5-4, TRBJ1-1)
CASSLDSRRDEAFF

SEQ ID NO: 578635 - protein, 14 aa, Homo sapiens
  CDR3 for alpha chain variable domain of TCR clone 289318 (TRAV12-1, TRAJ43)
CVVNGRSNNNDMRF

SEQ ID NO: 578636 - protein, 13 aa, Homo sapiens
  CDR3 for beta chain variable domain of TCR clone 289318 (TRBV10-3, TRBJ2-7)
CASKLSVNYEQYF

SEQ ID NO: 578637 - protein, 11 aa, Homo sapiens
  CDR3 for alpha chain variable domain of TCR clone 289319 (TRAV3, TRAJ17)
PRGAAGNKLNF

SEQ ID NO: 578638 - protein, 16 aa, Homo sapiens
  CDR3 for beta chain variable domain of TCR clone 289319 (TRBV7-6, TRBJ2-1)
CASSAPRPSSYNEQFF

SEQ ID NO: 578639 - protein, 15 aa, Homo sapiens
  CDR3 for alpha chain variable domain of TCR clone 289320 (TRAV17, TRAJ57)
CATGPSQGVSEKLVF

SEQ ID NO: 578640 - protein, 15 aa, Homo sapiens
  CDR3 for beta chain variable domain of TCR clone 289320 (TRBV25-1, TRBJ1-4)
CASSPGDSTNEKLFF

SEQ ID NO: 578641 - protein, 15 aa, Homo sapiens
  CDR3 for alpha chain variable domain of TCR clone 289321 (TRAV21, TRAJ53)
CATLNSGGSNYKLTF

SEQ ID NO: 578642 - protein, 15 aa, Homo sapiens
  CDR3 for beta chain variable domain of TCR clone 289321 (TRBV5-1, TRBJ1-1)
CASSLGQGRFAEAFF

SEQ ID NO: 578643 - protein, 20 aa, Homo sapiens
  CDR3 for alpha chain variable domain of TCR clone 289322 (TRAV25, TRAJ21)
TATQTTDVGTYPLSFNKFYF

SEQ ID NO: 578644 - protein, 14 aa, Homo sapiens
  CDR3 for beta chain variable domain of TCR clone 289322 (TRBV6-1, TRBJ2-1)
CASAMDGFYNEQFF

SEQ ID NO: 578645 - protein, 13 aa, Homo sapiens
  CDR3 for alpha chain variable domain of TCR clone 289323 (TRAV3, TRAJ27)
CAVRPLGAGKSTF

SEQ ID NO: 578646 - protein, 15 aa, Homo sapiens
  CDR3 for beta chain variable domain of TCR clone 289323 (TRBV7-6, TRBJ2-1)
CASSSLAGEGNEQFF

SEQ ID NO: 578647 - protein, 13 aa, Homo sapiens
  CDR3 for alpha chain variable domain of TCR clone 289324 (TRAV8-3, TRAJ28)
CAVGAVGSYQLTF

SEQ ID NO: 578648 - protein, 13 aa, Homo sapiens
  CDR3 for beta chain variable domain of TCR clone 289324 (TRBV12-4, TRBJ1-2)
CASSLRQGKGYTF

SEQ ID NO: 578649 - protein, 17 aa, Homo sapiens
  CDR3 for alpha chain variable domain of TCR clone 289325 (TRAV35, TRAJ47)
GLLDCRTHTEYGNKLVF

SEQ ID NO: 578650 - protein, 11 aa, Homo sapiens
  CDR3 for beta chain variable domain of TCR clone 289325 (TRBV29-1, TRBJ1-1)
CSVEVGTRTVF

SEQ ID NO: 578651 - protein, 21 aa, Homo sapiens
  CDR3 for alpha chain variable domain of TCR clone 289326 (TRAV25, TRAJ7)
TATQTTYVGTYFCPWNNRLAF

SEQ ID NO: 578652 - protein, 14 aa, Homo sapiens
  CDR3 for beta chain variable domain of TCR clone 289326 (TRBV11-2, TRBJ2-2)
CASSLGLRVRELFF

SEQ ID NO: 578653 - protein, 17 aa, Homo sapiens
  CDR3 for alpha chain variable domain of TCR clone 289327 (TRAV12-2, TRAJ48)
CASNEKLTFGTGTRLTI

SEQ ID NO: 578654 - protein, 21 aa, Homo sapiens
  CDR3 for beta chain variable domain of TCR clone 289327 (TRBV6-3, TRBJ1-5)
CASSYELGQGVNYPLNQPQHF

SEQ ID NO: 578655 - protein, 16 aa, Homo sapiens
  CDR3 for alpha chain variable domain of TCR clone 289328 (TRAV12-3, TRAJ53)
CALSPGSGGSNYKLTF

SEQ ID NO: 578656 - protein, 17 aa, Homo sapiens
  CDR3 for beta chain variable domain of TCR clone 289328 (TRBV28, TRBJ2-5)
CASSTPEGDALQETQYF

SEQ ID NO: 578657 - protein, 17 aa, Homo sapiens
  CDR3 for alpha chain variable domain of TCR clone 289329 (TRAV38-1, TRAJ28)
CAFMKPTSGAGSYQLTF

SEQ ID NO: 578658 - protein, 15 aa, Homo sapiens
  CDR3 for beta chain variable domain of TCR clone 289329 (TRBV6-1, TRBJ2-3)
CASSERGGITDTQYF

SEQ ID NO: 578659 - protein, 15 aa, Homo sapiens
  CDR3 for alpha chain variable domain of TCR clone 289330 (TRAV8-3, TRAJ45)
CASWYSGGGADGLTF

SEQ ID NO: 578660 - protein, 17 aa, Homo sapiens
  CDR3 for beta chain variable domain of TCR clone 289330 (TRBV7-8, TRBJ1-2)
CASSLRPLQGHLYGYTF

SEQ ID NO: 578661 - protein, 12 aa, Homo sapiens
  CDR3 for alpha chain variable domain of TCR clone 289331 (TRAV12-3, TRAJ3)
CAIDSSASKIIF

SEQ ID NO: 578662 - protein, 14 aa, Homo sapiens
  CDR3 for beta chain variable domain of TCR clone 289331 (TRBV7-9, TRBJ2-1)
CASSLVVGADEQFF

SEQ ID NO: 578663 - protein, 13 aa, Homo sapiens
  CDR3 for alpha chain variable domain of TCR clone 289332 (TRAV13-2, TRAJ53)
CAENMGSNYKLTF

SEQ ID NO: 578664 - protein, 15 aa, Homo sapiens
  CDR3 for beta chain variable domain of TCR clone 289332 (TRBV5-1, TRBJ2-1)
CASKGLAGVYNEQFF

SEQ ID NO: 578665 - protein, 15 aa, Homo sapiens
  CDR3 for alpha chain variable domain of TCR clone 289333 (TRAV17, TRAJ57)
CATGPSQCGSEKLVF

SEQ ID NO: 578666 - protein, 17 aa, Homo sapiens
  CDR3 for beta chain variable domain of TCR clone 289333 (TRBV20-1, TRBJ2-1)
CSASSSGLAGSYNEQFF

SEQ ID NO: 578667 - protein, 12 aa, Homo sapiens
  CDR3 for alpha chain variable domain of TCR clone 289334 (TRAV8-2, TRAJ45)
CVQGGGADGLTF

SEQ ID NO: 578668 - protein, 14 aa, Homo sapiens
  CDR3 for beta chain variable domain of TCR clone 289334 (TRBV12-4, TRBJ2-3)
CASSGQGSTDTQYF

SEQ ID NO: 578669 - protein, 14 aa, Homo sapiens
  CDR3 for alpha chain variable domain of TCR clone 289335 (TRAV1-2, TRAJ8)
CAVREDTVFQKLVF

SEQ ID NO: 578670 - protein, 11 aa, Homo sapiens
  CDR3 for beta chain variable domain of TCR clone 289335 (TRBV11-3, TRBJ2-7)
CASSRTYEQYF

SEQ ID NO: 578671 - protein, 15 aa, Homo sapiens
  CDR3 for alpha chain variable domain of TCR clone 289336 (TRAV27, TRAJ38)
CAARRNAGNHRKLMW

SEQ ID NO: 578672 - protein, 13 aa, Homo sapiens
  CDR3 for beta chain variable domain of TCR clone 289336 (TRBV12-5, TRBJ2-3)
CASGDRQSDTQYF

SEQ ID NO: 578673 - protein, 16 aa, Homo sapiens
  CDR3 for alpha chain variable domain of TCR clone 289337 (TRAV30, TRAJ24)
CGTEIVDADSCGKFQF

SEQ ID NO: 578674 - protein, 13 aa, Homo sapiens
  CDR3 for beta chain variable domain of TCR clone 289337 (TRBV11-2, TRBJ2-5)
CASSSTGEETHYF

SEQ ID NO: 578675 - protein, 14 aa, Homo sapiens
  CDR3 for alpha chain variable domain of TCR clone 289338 (TRAV21, TRAJ52)
CGRAGGTSYGKLTF

SEQ ID NO: 578676 - protein, 14 aa, Homo sapiens
  CDR3 for beta chain variable domain of TCR clone 289338 (TRBV19, TRBJ1-2)
CASSVLGYNCGYTF

SEQ ID NO: 578677 - protein, 17 aa, Homo sapiens
  CDR3 for alpha chain variable domain of TCR clone 289339 (TRAV3, TRAJ42)
CAVRDRDYGGSQGNLIF

SEQ ID NO: 578678 - protein, 17 aa, Homo sapiens
  CDR3 for beta chain variable domain of TCR clone 289339 (TRBV7-9, TRBJ2-2)
CASSLGVAGMNTGELFF

SEQ ID NO: 578679 - protein, 21 aa, Homo sapiens
  CDR3 for alpha chain variable domain of TCR clone 289340 (TRAV12-3, TRAJ9)
CAMSAMEASKLSLEQEQDYLL

SEQ ID NO: 578680 - protein, 14 aa, Homo sapiens
  CDR3 for beta chain variable domain of TCR clone 289340 (TRBV6-1, TRBJ2-7)
CASSERVNPYEQYF

SEQ ID NO: 578681 - protein, 14 aa, Homo sapiens
  CDR3 for alpha chain variable domain of TCR clone 289341 (TRAV1-1, TRAJ27)
CAVISNTNAGKSTF

SEQ ID NO: 578682 - protein, 13 aa, Homo sapiens
  CDR3 for beta chain variable domain of TCR clone 289341 (TRBV12-5, TRBJ1-2)
CASGVRTGNGYTF

SEQ ID NO: 578683 - protein, 14 aa, Homo sapiens
  CDR3 for alpha chain variable domain of TCR clone 289342 (TRAV1-2, TRAJ16)
CAVNRFSDGQKLLF

SEQ ID NO: 578684 - protein, 15 aa, Homo sapiens
  CDR3 for beta chain variable domain of TCR clone 289342 (TRBV20-1, TRBJ1-5)
CSAFKNGQRNQPQHF

SEQ ID NO: 578685 - protein, 12 aa, Homo sapiens
  CDR3 for alpha chain variable domain of TCR clone 289343 (TRAV13-1, TRAJ49)
CAASPMGNQFYF

SEQ ID NO: 578686 - protein, 13 aa, Homo sapiens
  CDR3 for beta chain variable domain of TCR clone 289343 (TRBV24-1, TRBJ2-2)
CATRAWSPGELFF

SEQ ID NO: 578687 - protein, 14 aa, Homo sapiens
  CDR3 for alpha chain variable domain of TCR clone 289344 (TRAV8-4, TRAJ13)
CAVTLSGGYQKVTF

SEQ ID NO: 578688 - protein, 14 aa, Homo sapiens
  CDR3 for beta chain variable domain of TCR clone 289344 (TRBV6-5, TRBJ2-7)
CASSPHRGLREQYF

SEQ ID NO: 578689 - protein, 10 aa, Homo sapiens
  CDR3 for alpha chain variable domain of TCR clone 289345 (TRAV1-2, TRAJ20)
CAVTDYKLSF

SEQ ID NO: 578690 - protein, 14 aa, Homo sapiens
  CDR3 for beta chain variable domain of TCR clone 289345 (TRBV12-5, TRBJ2-5)
CASGSRTHQETQYF

SEQ ID NO: 578691 - protein, 10 aa, Homo sapiens
  CDR3 for alpha chain variable domain of TCR clone 289346 (TRAV1-2, TRAJ23)
CAGQGGKLIF

SEQ ID NO: 578692 - protein, 16 aa, Homo sapiens
  CDR3 for beta chain variable domain of TCR clone 289346 (TRBV11-2, TRBJ2-7)
CASSPTTGGVSYEQYF

SEQ ID NO: 578693 - protein, 12 aa, Homo sapiens
  CDR3 for alpha chain variable domain of TCR clone 289347 (TRAV35, TRAJ28)
GVEGAGSYQLTF

SEQ ID NO: 578694 - protein, 15 aa, Homo sapiens
  CDR3 for beta chain variable domain of TCR clone 289347 (TRBV12-4, TRBJ2-5)
CASSPPTGLQETQYF

SEQ ID NO: 578695 - protein, 17 aa, Homo sapiens
  CDR3 for alpha chain variable domain of TCR clone 289348 (TRAV14/DV4, TRAJ4)
CAMREASGRGGYNKLIV

SEQ ID NO: 578696 - protein, 14 aa, Homo sapiens
  CDR3 for beta chain variable domain of TCR clone 289348 (TRBV19, TRBJ2-7)
CASSMGQGAIEQYF

SEQ ID NO: 578697 - protein, 14 aa, Homo sapiens
  CDR3 for alpha chain variable domain of TCR clone 289349 (TRAV35, TRAJ13)
CAGSPSGGYQKVTF

SEQ ID NO: 578698 - protein, 17 aa, Homo sapiens
  CDR3 for beta chain variable domain of TCR clone 289349 (TRBV7-6, TRBJ2-5)
CASSPGLVDPWGETQYF

SEQ ID NO: 578699 - protein, 11 aa, Homo sapiens
  CDR3 for alpha chain variable domain of TCR clone 289350 (TRAV20, TRAJ23)
CACNQGGKLIF

SEQ ID NO: 578700 - protein, 14 aa, Homo sapiens
  CDR3 for beta chain variable domain of TCR clone 289350 (TRBV12-5, TRBJ2-5)
CASGSRTHQETQYF

SEQ ID NO: 578701 - protein, 15 aa, Homo sapiens
  CDR3 for alpha chain variable domain of TCR clone 289351 (TRAV17, TRAJ57)
GATGPSQGGSEKLVF

SEQ ID NO: 578702 - protein, 15 aa, Homo sapiens
  CDR3 for beta chain variable domain of TCR clone 289351 (TRBV19, TRBJ2-4)
CASRGPRRGENIQYF

SEQ ID NO: 578703 - protein, 12 aa, Homo sapiens
  CDR3 for alpha chain variable domain of TCR clone 289352 (TRAV36/DV7, TRAJ54)
CAVVRGAQKLVF

SEQ ID NO: 578704 - protein, 13 aa, Homo sapiens
  CDR3 for beta chain variable domain of TCR clone 289352 (TRBV12-4, TRBJ1-5)
CASSPDRAQPQHF

SEQ ID NO: 578705 - protein, 14 aa, Homo sapiens
  CDR3 for alpha chain variable domain of TCR clone 289353 (TRAV13-1, TRAJ39)
CAASKNNAGNMLTF

SEQ ID NO: 578706 - protein, 14 aa, Homo sapiens
  CDR3 for beta chain variable domain of TCR clone 289353 (TRBV2, TRBJ2-7)
CASSLTSGGYEQYF

SEQ ID NO: 578707 - protein, 23 aa, Homo sapiens
  CDR3 for alpha chain variable domain of TCR clone 289354 (TRAV26-1, TRAJ38)
CIADNAGNNHIQSPDPAVYQLTD

SEQ ID NO: 578708 - protein, 13 aa, Homo sapiens
  CDR3 for beta chain variable domain of TCR clone 289354 (TRBV20-1, TRBJ1-1)
CSARGGGNTEAFF

SEQ ID NO: 578709 - protein, 12 aa, Homo sapiens
  CDR3 for alpha chain variable domain of TCR clone 289355 (TRAV2, TRAJ9)
CAVDTGGFKTIF

SEQ ID NO: 578710 - protein, 17 aa, Homo sapiens
  CDR3 for beta chain variable domain of TCR clone 289355 (TRBV18, TRBJ2-1)
CASSPPLTASSYNEQFF

SEQ ID NO: 578711 - protein, 14 aa, Homo sapiens
  CDR3 for alpha chain variable domain of TCR clone 289356 (TRAV12-2, TRAJ13)
CAVKKTGGYQKVTF

SEQ ID NO: 578712 - protein, 14 aa, Homo sapiens
  CDR3 for beta chain variable domain of TCR clone 289356 (TRBV2, TRBJ2-1)
CASSDRAYYNEQFF

SEQ ID NO: 578713 - protein, 16 aa, Homo sapiens
  CDR3 for alpha chain variable domain of TCR clone 289357 (TRAV1-2, TRAJ10)
CAVRGVRTGGGNKLTF

SEQ ID NO: 578714 - protein, 17 aa, Homo sapiens
  CDR3 for beta chain variable domain of TCR clone 289357 (TRBV15, TRBJ1-5)
CATSRAPPGTRNQPQHF

SEQ ID NO: 578715 - protein, 17 aa, Homo sapiens
  CDR3 for alpha chain variable domain of TCR clone 289358 (TRAV3, TRAJ6)
CAVRDGPRAGGSYIPTF

SEQ ID NO: 578716 - protein, 15 aa, Homo sapiens
  CDR3 for beta chain variable domain of TCR clone 289358 (TRBV7-3, TRBJ2-1)
CQQLAPSGSYNEQFF

SEQ ID NO: 578717 - protein, 17 aa, Homo sapiens
  CDR3 for alpha chain variable domain of TCR clone 289359 (TRAV3, TRAJ6)
WSVRDGPRAGGSYIPTF

SEQ ID NO: 578718 - protein, 14 aa, Homo sapiens
  CDR3 for beta chain variable domain of TCR clone 289359 (TRBV7-2, TRBJ2-7)
CASSPKTSFYEQYF

SEQ ID NO: 578719 - protein, 14 aa, Homo sapiens
  CDR3 for alpha chain variable domain of TCR clone 289360 (TRAV12-3, TRAJ10)
SHLPLTGGGNKLNF

SEQ ID NO: 578720 - protein, 13 aa, Homo sapiens
  CDR3 for beta chain variable domain of TCR clone 289360 (TRBV20-1, TRBJ1-5)
CSASQQVVQPQHF

SEQ ID NO: 578721 - protein, 13 aa, Homo sapiens
  CDR3 for alpha chain variable domain of TCR clone 289361 (TRAV13-2, TRAJ53)
FAENMGSNYKLKF

SEQ ID NO: 578722 - protein, 13 aa, Homo sapiens
  CDR3 for beta chain variable domain of TCR clone 289361 (TRBV4-1, TRBJ2-2)
CASSQENTGELFF

SEQ ID NO: 578723 - protein, 16 aa, Homo sapiens
  CDR3 for alpha chain variable domain of TCR clone 289362 (TRAV12-3, TRAJ21)
CAMSHYTTSTNFTLDL

SEQ ID NO: 578724 - protein, 14 aa, Homo sapiens
  CDR3 for beta chain variable domain of TCR clone 289362 (TRBV4-2, TRBJ2-1)
CASGLDRAYNEQFF

SEQ ID NO: 578725 - protein, 15 aa, Homo sapiens
  CDR3 for alpha chain variable domain of TCR clone 289363 (TRAV2, TRAJ9)
CAVEDRGTGGFKTIY

SEQ ID NO: 578726 - protein, 16 aa, Homo sapiens
  CDR3 for beta chain variable domain of TCR clone 289363 (TRBV24-1, TRBJ2-3)
CATSDPGTGATDTQYF

SEQ ID NO: 578727 - protein, 15 aa, Homo sapiens
  CDR3 for alpha chain variable domain of TCR clone 289364 (TRAV21, TRAJ57)
CAVIITQCGSEKLVF

SEQ ID NO: 578728 - protein, 14 aa, Homo sapiens
  CDR3 for beta chain variable domain of TCR clone 289364 (TRBV5-1, TRBJ2-2)
CASSLIWIPGELFF

SEQ ID NO: 578729 - protein, 11 aa, Homo sapiens
  CDR3 for alpha chain variable domain of TCR clone 289365 (TRAV13-1, TRAJ43)
CAAHNNNDMRF

SEQ ID NO: 578730 - protein, 15 aa, Homo sapiens
  CDR3 for beta chain variable domain of TCR clone 289365 (TRBV9, TRBJ1-6)
CASSVAGTGDSPLHF

SEQ ID NO: 578731 - protein, 17 aa, Homo sapiens
  CDR3 for alpha chain variable domain of TCR clone 289366 (TRAV3, TRAJ7)
CSVRDMSPLEGTTDSLL

SEQ ID NO: 578732 - protein, 17 aa, Homo sapiens
  CDR3 for beta chain variable domain of TCR clone 289366 (TRBV15, TRBJ1-2)
CATSGREIDVVNYGYTF

SEQ ID NO: 578733 - protein, 15 aa, Homo sapiens
  CDR3 for alpha chain variable domain of TCR clone 289367 (TRAV3, TRAJ13)
CAVRVYSGGYQKVTF

SEQ ID NO: 578734 - protein, 13 aa, Homo sapiens
  CDR3 for beta chain variable domain of TCR clone 289367 (TRBV27, TRBJ2-7)
CASSSRHRYEQYF

SEQ ID NO: 578735 - protein, 11 aa, Homo sapiens
  CDR3 for alpha chain variable domain of TCR clone 289368 (TRAV17, TRAJ9)
CATTGGFKTIF

SEQ ID NO: 578736 - protein, 16 aa, Homo sapiens
  CDR3 for beta chain variable domain of TCR clone 289368 (TRBV7-3, TRBJ2-2)
CANSLKRGTLSGELFF

SEQ ID NO: 578737 - protein, 15 aa, Homo sapiens
  CDR3 for alpha chain variable domain of TCR clone 289369 (TRAV3, TRAJ3)
CAVRDRRSSASKIIF

SEQ ID NO: 578738 - protein, 17 aa, Homo sapiens
  CDR3 for beta chain variable domain of TCR clone 289369 (TRBV5-1, TRBJ2-5)
CASSPVALGQNQETQYF

SEQ ID NO: 578739 - protein, 13 aa, Homo sapiens
  CDR3 for alpha chain variable domain of TCR clone 289370 (TRAV21, TRAJ27)
CAARPGNAGKSTF

SEQ ID NO: 578740 - protein, 18 aa, Homo sapiens
  CDR3 for beta chain variable domain of TCR clone 289370 (TRBV20-1, TRBJ2-3)
CSASGLAGGPGTTDTQYF

SEQ ID NO: 578741 - protein, 11 aa, Homo sapiens
  CDR3 for alpha chain variable domain of TCR clone 289371 (TRAV3, TRAJ17)
PRGAAGNRLTF

SEQ ID NO: 578742 - protein, 15 aa, Homo sapiens
  CDR3 for beta chain variable domain of TCR clone 289371 (TRBV20-1, TRBJ2-7)
CSARDRVSGMDEQYF

SEQ ID NO: 578743 - protein, 11 aa, Homo sapiens
  CDR3 for alpha chain variable domain of TCR clone 289372 (TRAV3, TRAJ21)
CAVGNFNKFYS

SEQ ID NO: 578744 - protein, 15 aa, Homo sapiens
  CDR3 for beta chain variable domain of TCR clone 289372 (TRBV20-1, TRBJ2-7)
CSARDRVSGMDEQYF

SEQ ID NO: 578745 - protein, 13 aa, Homo sapiens
  CDR3 for alpha chain variable domain of TCR clone 289373 (TRAV23/DV6, TRAJ10)
ASVLTGGGNKLTF

SEQ ID NO: 578746 - protein, 13 aa, Homo sapiens
  CDR3 for beta chain variable domain of TCR clone 289373 (TRBV11-1, TRBJ1-2)
CASVGSWGYGDIF

SEQ ID NO: 578747 - protein, 15 aa, Homo sapiens
  CDR3 for alpha chain variable domain of TCR clone 289374 (TRAV3, TRAJ27)
CAVRDPLTNAGKSTF

SEQ ID NO: 578748 - protein, 15 aa, Homo sapiens
  CDR3 for beta chain variable domain of TCR clone 289374 (TRBV28, TRBJ2-1)
CASSIIAGGRSGQFF

SEQ ID NO: 578749 - protein, 10 aa, Homo sapiens
  CDR3 for alpha chain variable domain of TCR clone 289375 (TRAV23/DV6, TRAJ57)
CAASSTLSQG

SEQ ID NO: 578750 - protein, 14 aa, Homo sapiens
  CDR3 for beta chain variable domain of TCR clone 289375 (TRBV25-1, TRBJ1-1)
CGSTHMGGNTEAFF

SEQ ID NO: 578751 - protein, 18 aa, Homo sapiens
  CDR3 for alpha chain variable domain of TCR clone 289376 (TRAV21, TRAJ52)
CAVRPSPAGGTSYGKLTF

SEQ ID NO: 578752 - protein, 15 aa, Homo sapiens
  CDR3 for beta chain variable domain of TCR clone 289376 (TRBV12-4, TRBJ2-1)
CASSLLATGNNEQFF

SEQ ID NO: 578753 - protein, 18 aa, Homo sapiens
  CDR3 for alpha chain variable domain of TCR clone 289377 (TRAV12-3, TRAJ52)
CAMSVGGAGGTSYGKRTF

SEQ ID NO: 578754 - protein, 15 aa, Homo sapiens
  CDR3 for beta chain variable domain of TCR clone 289377 (TRBV27, TRBJ1-6)
CASSFDRGTGSPLHF

SEQ ID NO: 578755 - protein, 12 aa, Homo sapiens
  CDR3 for alpha chain variable domain of TCR clone 289378 (TRAV8-3, TRAJ40)
CAVTSGTYKYIF

SEQ ID NO: 578756 - protein, 14 aa, Homo sapiens
  CDR3 for beta chain variable domain of TCR clone 289378 (TRBV12-4, TRBJ2-3)
CASSGQSSTDTQYF

SEQ ID NO: 578757 - protein, 11 aa, Homo sapiens
  CDR3 for alpha chain variable domain of TCR clone 289379 (TRAV16, TRAJ20)
CALSEGFKAAL

SEQ ID NO: 578758 - protein, 16 aa, Homo sapiens
  CDR3 for beta chain variable domain of TCR clone 289379 (TRBV19, TRBJ1-1)
CASRFGGPVTGTEAFF

SEQ ID NO: 578759 - protein, 15 aa, Homo sapiens
  CDR3 for alpha chain variable domain of TCR clone 289380 (TRAV12-1, TRAJ44)
CVADLPTGTASKLTF

SEQ ID NO: 578760 - protein, 14 aa, Homo sapiens
  CDR3 for beta chain variable domain of TCR clone 289380 (TRBV12-4, TRBJ2-7)
CASSPSGSPYEQYF

SEQ ID NO: 578761 - protein, 12 aa, Homo sapiens
  CDR3 for alpha chain variable domain of TCR clone 289381 (TRAV8-6, TRAJ21)
CAVRPNFNKFYF

SEQ ID NO: 578762 - protein, 13 aa, Homo sapiens
  CDR3 for beta chain variable domain of TCR clone 289381 (TRBV10-3, TRBJ2-7)
CASKLAVNYEQYF

SEQ ID NO: 578763 - protein, 14 aa, Homo sapiens
  CDR3 for alpha chain variable domain of TCR clone 289382 (TRAV17, TRAJ37)
CATDAFSNTGKLIF

SEQ ID NO: 578764 - protein, 14 aa, Homo sapiens
  CDR3 for beta chain variable domain of TCR clone 289382 (TRBV7-2, TRBJ2-7)
CASRSQGAAYEQYF

SEQ ID NO: 578765 - protein, 13 aa, Homo sapiens
  CDR3 for alpha chain variable domain of TCR clone 289383 (TRAV26-1, TRAJ36)
CIAVRRGANNLFF

SEQ ID NO: 578766 - protein, 19 aa, Homo sapiens
  CDR3 for beta chain variable domain of TCR clone 289383 (TRBV27, TRBJ2-1)
CASSLEIRPPGAAGNEQFF

SEQ ID NO: 578767 - protein, 15 aa, Homo sapiens
  CDR3 for alpha chain variable domain of TCR clone 289384 (TRAV12-1, TRAJ44)
CVVDTPQGTASKLPF

SEQ ID NO: 578768 - protein, 13 aa, Homo sapiens
  CDR3 for beta chain variable domain of TCR clone 289384 (TRBV7-9, TRBJ1-2)
CASSLKQNYGYTF

SEQ ID NO: 578769 - protein, 14 aa, Homo sapiens
  CDR3 for alpha chain variable domain of TCR clone 289385 (TRAV26-1, TRAJ21)
CIVRPPYNFNKFYF

SEQ ID NO: 578770 - protein, 16 aa, Homo sapiens
  CDR3 for beta chain variable domain of TCR clone 289385 (TRBV12-5, TRBJ2-5)
CASGPRTSGNQETQYF

SEQ ID NO: 578771 - protein, 16 aa, Homo sapiens
  CDR3 for alpha chain variable domain of TCR clone 289386 (TRAV12-2, TRAJ6)
CVAPLAGSGGSYIPTF

SEQ ID NO: 578772 - protein, 10 aa, Homo sapiens
  CDR3 for beta chain variable domain of TCR clone 289386 (TRBV28, TRBJ1-2)
CASSSDRAVF

SEQ ID NO: 578773 - protein, 12 aa, Homo sapiens
  CDR3 for alpha chain variable domain of TCR clone 289387 (TRAV13-1, TRAJ21)
CAAKEGFNKFYF

SEQ ID NO: 578774 - protein, 17 aa, Homo sapiens
  CDR3 for beta chain variable domain of TCR clone 289387 (TRBV20-1, TRBJ2-1)
CSASSSGLAGSYNAQFF

SEQ ID NO: 578775 - protein, 18 aa, Homo sapiens
  CDR3 for alpha chain variable domain of TCR clone 289388 (TRAV12-3, TRAJ52)
RAMSVGGAGGTSYGKLTF

SEQ ID NO: 578776 - protein, 13 aa, Homo sapiens
  CDR3 for beta chain variable domain of TCR clone 289388 (TRBV12-4, TRBJ2-7)
CASSPTETYEQYF

SEQ ID NO: 578777 - protein, 12 aa, Homo sapiens
  CDR3 for alpha chain variable domain of TCR clone 289389 (TRAV12-3, TRAJ17)
CAMTLTGDKLTF

SEQ ID NO: 578778 - protein, 15 aa, Homo sapiens
  CDR3 for beta chain variable domain of TCR clone 289389 (TRBV20-1, TRBJ2-7)
CSARDRVSGMGEQYF

SEQ ID NO: 578779 - protein, 12 aa, Homo sapiens
  CDR3 for alpha chain variable domain of TCR clone 289390 (TRAV12-1, TRAJ16)
CGERARCQKLLF

SEQ ID NO: 578780 - protein, 13 aa, Homo sapiens
  CDR3 for beta chain variable domain of TCR clone 289390 (TRBV2, TRBJ1-1)
CARNPTGGFHAFF

SEQ ID NO: 578781 - protein, 16 aa, Homo sapiens
  CDR3 for alpha chain variable domain of TCR clone 289391 (TRAV16, TRAJ4)
CALSRMFSGGYNKLIF

SEQ ID NO: 578782 - protein, 14 aa, Homo sapiens
  CDR3 for beta chain variable domain of TCR clone 289391 (TRBV6-5, TRBJ1-1)
CASSLDRVRAEAFF

SEQ ID NO: 578783 - protein, 11 aa, Homo sapiens
  CDR3 for alpha chain variable domain of TCR clone 289392 (TRAV35, TRAJ30)
FAPGGDDKIIF

SEQ ID NO: 578784 - protein, 15 aa, Homo sapiens
  CDR3 for beta chain variable domain of TCR clone 289392 (TRBV9, TRBJ1-6)
CASSVAGTGDSPLHF

SEQ ID NO: 578785 - protein, 15 aa, Homo sapiens
  CDR3 for alpha chain variable domain of TCR clone 289393 (TRAV12-2, TRAJ53)
CAVNTVGGSNYKLTF

SEQ ID NO: 578786 - protein, 15 aa, Homo sapiens
  CDR3 for beta chain variable domain of TCR clone 289393 (TRBV5-1, TRBJ2-5)
CASSLGLGEIKTQYF

SEQ ID NO: 578787 - protein, 13 aa, Homo sapiens
  CDR3 for alpha chain variable domain of TCR clone 289394 (TRAV26-2, TRAJ54)
CIPRVGGAQKLVS

SEQ ID NO: 578788 - protein, 16 aa, Homo sapiens
  CDR3 for beta chain variable domain of TCR clone 289394 (TRBV4-1, TRBJ1-1)
CASSSMSERPNTEAFF

SEQ ID NO: 578789 - protein, 16 aa, Homo sapiens
  CDR3 for alpha chain variable domain of TCR clone 289395 (TRAV3, TRAJ37)
CAGRGKGSGNTGKLIF

SEQ ID NO: 578790 - protein, 13 aa, Homo sapiens
  CDR3 for beta chain variable domain of TCR clone 289395 (TRBV4-2, TRBJ1-1)
CASSQAGNTEAFF

SEQ ID NO: 578791 - protein, 13 aa, Homo sapiens
  CDR3 for alpha chain variable domain of TCR clone 289396 (TRAV20, TRAJ15)
CATINKAGTALIF

SEQ ID NO: 578792 - protein, 13 aa, Homo sapiens
  CDR3 for beta chain variable domain of TCR clone 289396 (TRBV12-4, TRBJ2-1)
CASRQPSNNEQFF

SEQ ID NO: 578793 - protein, 14 aa, Homo sapiens
  CDR3 for alpha chain variable domain of TCR clone 289397 (TRAV12-2, TRAJ53)
CAVKGGGSNYKLTS

SEQ ID NO: 578794 - protein, 14 aa, Homo sapiens
  CDR3 for beta chain variable domain of TCR clone 289397 (TRBV18, TRBJ2-5)
CASSPGVSQETQYF

SEQ ID NO: 578795 - protein, 13 aa, Homo sapiens
  CDR3 for alpha chain variable domain of TCR clone 289398 (TRAV13-1, TRAJ23)
CAASGRGGGKLNF

SEQ ID NO: 578796 - protein, 13 aa, Homo sapiens
  CDR3 for beta chain variable domain of TCR clone 289398 (TRBV7-2, TRBJ1-5)
CASSLAEGGANEF

SEQ ID NO: 578797 - protein, 16 aa, Homo sapiens
  CDR3 for alpha chain variable domain of TCR clone 289399 (TRAV12-3, TRAJ53)
CAMSPGSGGSNYKLTF

SEQ ID NO: 578798 - protein, 14 aa, Homo sapiens
  CDR3 for beta chain variable domain of TCR clone 289399 (TRBV7-9, TRBJ1-2)
CASSSNRGGDGYTF

SEQ ID NO: 578799 - protein, 13 aa, Homo sapiens
  CDR3 for alpha chain variable domain of TCR clone 289400 (TRAV23/DV6, TRAJ12)
CAPRVDSSYKLIF

SEQ ID NO: 578800 - protein, 14 aa, Homo sapiens
  CDR3 for beta chain variable domain of TCR clone 289400 (TRBV5-7, TRBJ1-5)
CASSRTGGGQPQHF

SEQ ID NO: 578801 - protein, 13 aa, Homo sapiens
  CDR3 for alpha chain variable domain of TCR clone 289401 (TRAV16, TRAJ9)
CALRATGGFKTIF

SEQ ID NO: 578802 - protein, 16 aa, Homo sapiens
  CDR3 for beta chain variable domain of TCR clone 289401 (TRBV5-1, TRBJ1-3)
CASSRSGEDSRNTIYF

SEQ ID NO: 578803 - protein, 11 aa, Homo sapiens
  CDR3 for alpha chain variable domain of TCR clone 289402 (TRAV1-1, TRAJ23)
CAVRQGGKLIF

SEQ ID NO: 578804 - protein, 13 aa, Homo sapiens
  CDR3 for beta chain variable domain of TCR clone 289402 (TRBV19, TRBJ2-7)
CASSKQGGYEQYF

SEQ ID NO: 578805 - protein, 15 aa, Homo sapiens
  CDR3 for alpha chain variable domain of TCR clone 289403 (TRAV12-3, TRAJ6)
CAMSATTGGSYIPTF

SEQ ID NO: 578806 - protein, 16 aa, Homo sapiens
  CDR3 for beta chain variable domain of TCR clone 289403 (TRBV2, TRBJ2-1)
CASSVGGSLSYNEQFF

SEQ ID NO: 578807 - protein, 15 aa, Homo sapiens
  CDR3 for alpha chain variable domain of TCR clone 289404 (TRAV3, TRAJ22)
CAVRDRGGSARQLTF

SEQ ID NO: 578808 - protein, 15 aa, Homo sapiens
  CDR3 for beta chain variable domain of TCR clone 289404 (TRBV7-2, TRBJ1-5)
CASSSGQGHAQPQHF

SEQ ID NO: 578809 - protein, 14 aa, Homo sapiens
  CDR3 for alpha chain variable domain of TCR clone 289405 (TRAV38-1, TRAJ45)
CAYYSGVGADGLTF

SEQ ID NO: 578810 - protein, 15 aa, Homo sapiens
  CDR3 for beta chain variable domain of TCR clone 289405 (TRBV11-2, TRBJ2-1)
CERRKKRGIIYEKLL

SEQ ID NO: 578811 - protein, 21 aa, Homo sapiens
  CDR3 for alpha chain variable domain of TCR clone 289406 (TRAV8-4, TRAJ47)
HLTKPSAHMSDAAERGNKLVF

SEQ ID NO: 578812 - protein, 16 aa, Homo sapiens
  CDR3 for beta chain variable domain of TCR clone 289406 (TRBV12-5, TRBJ2-5)
CASGPRTSGNQETQYF

SEQ ID NO: 578813 - protein, 14 aa, Homo sapiens
  CDR3 for alpha chain variable domain of TCR clone 289407 (TRAV13-1, TRAJ36)
CAAIYQTGANNLFF

SEQ ID NO: 578814 - protein, 15 aa, Homo sapiens
  CDR3 for beta chain variable domain of TCR clone 289407 (TRBV5-1, TRBJ1-1)
CASSPLGGSNTDAFF

SEQ ID NO: 578815 - protein, 16 aa, Homo sapiens
  CDR3 for alpha chain variable domain of TCR clone 289408 (TRAV3, TRAJ10)
CAVRDMMAGGGNKLTF

SEQ ID NO: 578816 - protein, 15 aa, Homo sapiens
  CDR3 for beta chain variable domain of TCR clone 289408 (TRBV29-1, TRBJ1-2)
CSVVLEAGSNYGYTF

SEQ ID NO: 578817 - protein, 14 aa, Homo sapiens
  CDR3 for alpha chain variable domain of TCR clone 289409 (TRAV1-2, TRAJ8)
CAVREDTGFQKLVF

SEQ ID NO: 578818 - protein, 17 aa, Homo sapiens
  CDR3 for beta chain variable domain of TCR clone 289409 (TRBV28, TRBJ2-4)
CTTVPRVPTLLMGIQYF

SEQ ID NO: 578819 - protein, 14 aa, Homo sapiens
  CDR3 for alpha chain variable domain of TCR clone 289410 (TRAV17, TRAJ33)
CATDARRSNYQLIW

SEQ ID NO: 578820 - protein, 15 aa, Homo sapiens
  CDR3 for beta chain variable domain of TCR clone 289410 (TRBV13, TRBJ1-4)
CASSLRPSRNEKLFF

SEQ ID NO: 578821 - protein, 15 aa, Homo sapiens
  CDR3 for alpha chain variable domain of TCR clone 289411 (TRAV8-3, TRAJ27)
CAVGPSKTNAGKSTF

SEQ ID NO: 578822 - protein, 12 aa, Homo sapiens
  CDR3 for beta chain variable domain of TCR clone 289411 (TRBV28, TRBJ2-3)
CASSLYRDTQYF

SEQ ID NO: 578823 - protein, 12 aa, Homo sapiens
  CDR3 for alpha chain variable domain of TCR clone 289412 (TRAV8-4, TRAJ9)
SAVRAGGFKTIF

SEQ ID NO: 578824 - protein, 14 aa, Homo sapiens
  CDR3 for beta chain variable domain of TCR clone 289412 (TRBV4-1, TRBJ2-5)
CASSQERGRETQYF

SEQ ID NO: 578825 - protein, 14 aa, Homo sapiens
  CDR3 for alpha chain variable domain of TCR clone 289413 (TRAV8-3, TRAJ47)
CAVGAQGRGNKLVF

SEQ ID NO: 578826 - protein, 14 aa, Homo sapiens
  CDR3 for beta chain variable domain of TCR clone 289413 (TRBV7-2, TRBJ2-7)
CASSPKTSFYEQYF

SEQ ID NO: 578827 - protein, 19 aa, Homo sapiens
  CDR3 for alpha chain variable domain of TCR clone 289414 (TRAV26-1, TRAJ52)
CIVRAHRNAGCTSYGKLTF

SEQ ID NO: 578828 - protein, 15 aa, Homo sapiens
  CDR3 for beta chain variable domain of TCR clone 289414 (TRBV12-4, TRBJ2-5)
CASSPPTGLQETQYF

SEQ ID NO: 578829 - protein, 12 aa, Homo sapiens
  CDR3 for alpha chain variable domain of TCR clone 289415 (TRAV21, TRAJ42)
CAVGGSQGHLIF

SEQ ID NO: 578830 - protein, 14 aa, Homo sapiens
  CDR3 for beta chain variable domain of TCR clone 289415 (TRBV12-4, TRBJ1-1)
CASSLGTGGTEAFF

SEQ ID NO: 578831 - protein, 15 aa, Homo sapiens
  CDR3 for alpha chain variable domain of TCR clone 289416 (TRAV12-1, TRAJ44)
CVVDTPKGTARKLTF

SEQ ID NO: 578832 - protein, 14 aa, Homo sapiens
  CDR3 for beta chain variable domain of TCR clone 289416 (TRBV7-9, TRBJ2-1)
CASSPRDSLYEQFF

SEQ ID NO: 578833 - protein, 14 aa, Homo sapiens
  CDR3 for alpha chain variable domain of TCR clone 289417 (TRAV3, TRAJ16)
CCERLKSDCQKLLF

SEQ ID NO: 578834 - protein, 15 aa, Homo sapiens
  CDR3 for beta chain variable domain of TCR clone 289417 (TRBV28, TRBJ2-7)
CASSPGGRGFYEQYF

SEQ ID NO: 578835 - protein, 14 aa, Homo sapiens
  CDR3 for alpha chain variable domain of TCR clone 289418 (TRAV9-2, TRAJ39)
CALYIYNAGNILTF

SEQ ID NO: 578836 - protein, 14 aa, Homo sapiens
  CDR3 for beta chain variable domain of TCR clone 289418 (TRBV12-5, TRBJ2-5)
CASGSRTHQETQYF

SEQ ID NO: 578837 - protein, 17 aa, Homo sapiens
  CDR3 for alpha chain variable domain of TCR clone 289419 (TRAV3, TRAJ6)
CAVRDGPRAGGSYIPTF

SEQ ID NO: 578838 - protein, 12 aa, Homo sapiens
  CDR3 for beta chain variable domain of TCR clone 289419 (TRBV7-3, TRBJ2-1)
CASSLGFNEQFF

SEQ ID NO: 578839 - protein, 13 aa, Homo sapiens
  CDR3 for alpha chain variable domain of TCR clone 289420 (TRAV3, TRAJ41)
CAVSSNSGYALNF

SEQ ID NO: 578840 - protein, 13 aa, Homo sapiens
  CDR3 for beta chain variable domain of TCR clone 289420 (TRBV20-1, TRBJ2-2)
CSARSGGAGELFF

SEQ ID NO: 578841 - protein, 13 aa, Homo sapiens
  CDR3 for alpha chain variable domain of TCR clone 289421 (TRAV23/DV6, TRAJ15)
CAALPAGRNCSDL

SEQ ID NO: 578842 - protein, 14 aa, Homo sapiens
  CDR3 for beta chain variable domain of TCR clone 289421 (TRBV7-9, TRBJ1-2)
GASSRQGANYGYTF

SEQ ID NO: 578843 - protein, 18 aa, Homo sapiens
  CDR3 for alpha chain variable domain of TCR clone 289422 (TRAV20, TRAJ53)
CAVQASGGSNYKLTFTLT

SEQ ID NO: 578844 - protein, 15 aa, Homo sapiens
  CDR3 for beta chain variable domain of TCR clone 289422 (TRBV9, TRBJ1-6)
CASSVAGTGDSPLHF

SEQ ID NO: 578845 - protein, 15 aa, Homo sapiens
  CDR3 for alpha chain variable domain of TCR clone 289423 (TRAV12-1, TRAJ42)
CVVTRDGGSQGNLIF

SEQ ID NO: 578846 - protein, 16 aa, Homo sapiens
  CDR3 for beta chain variable domain of TCR clone 289423 (TRBV11-2, TRBJ2-2)
CASSPRTGEHTGELFF

SEQ ID NO: 578847 - protein, 14 aa, Homo sapiens
  CDR3 for alpha chain variable domain of TCR clone 289424 (TRAV29/DV5, TRAJ47)
CAASSIDYGNKLVF

SEQ ID NO: 578848 - protein, 12 aa, Homo sapiens
  CDR3 for beta chain variable domain of TCR clone 289424 (TRBV19, TRBJ1-5)
CASSIAQQPQHF

SEQ ID NO: 578849 - protein, 11 aa, Homo sapiens
  CDR3 for alpha chain variable domain of TCR clone 289425 (TRAV1-2, TRAJ20)
CAVANDYNPSF

SEQ ID NO: 578850 - protein, 18 aa, Homo sapiens
  CDR3 for beta chain variable domain of TCR clone 289425 (TRBV20-1, TRBJ2-6)
CSAETTPTHGSGANVLTF

SEQ ID NO: 578851 - protein, 16 aa, Homo sapiens
  CDR3 for alpha chain variable domain of TCR clone 289426 (TRAV26-1, TRAJ22)
CIVSLNFFWFCNATDL

SEQ ID NO: 578852 - protein, 13 aa, Homo sapiens
  CDR3 for beta chain variable domain of TCR clone 289426 (TRBV11-3, TRBJ2-5)
CASSSGLQETQYF

SEQ ID NO: 578853 - protein, 16 aa, Homo sapiens
  CDR3 for alpha chain variable domain of TCR clone 289427 (TRAV16, TRAJ4)
CALSRMFSGGYNKLIF

SEQ ID NO: 578854 - protein, 12 aa, Homo sapiens
  CDR3 for beta chain variable domain of TCR clone 289427 (TRBV11-2, TRBJ2-2)
CARRLGGGELFF

SEQ ID NO: 578855 - protein, 17 aa, Homo sapiens
  CDR3 for alpha chain variable domain of TCR clone 289428 (TRAV3, TRAJ42)
CAVRERDYGGSQGNLIF

SEQ ID NO: 578856 - protein, 15 aa, Homo sapiens
  CDR3 for beta chain variable domain of TCR clone 289428 (TRBV6-6, TRBJ2-7)
CASSYSYGGSYKQYF

SEQ ID NO: 578857 - protein, 14 aa, Homo sapiens
  CDR3 for alpha chain variable domain of TCR clone 289429 (TRAV35, TRAJ13)
CAGSPSGGYQKVTF

SEQ ID NO: 578858 - protein, 17 aa, Homo sapiens
  CDR3 for beta chain variable domain of TCR clone 289429 (TRBV7-6, TRBJ2-5)
CASSRGLAEPGGETQYF

SEQ ID NO: 578859 - protein, 19 aa, Homo sapiens
  CDR3 for alpha chain variable domain of TCR clone 289430 (TRAV13-1, TRAJ6)
CAAVAYIWKRNQPYCSSVY

SEQ ID NO: 578860 - protein, 14 aa, Homo sapiens
  CDR3 for beta chain variable domain of TCR clone 289430 (TRBV28, TRBJ2-3)
CASSLTDLLDTQYF

SEQ ID NO: 578861 - protein, 12 aa, Homo sapiens
  CDR3 for alpha chain variable domain of TCR clone 289431 (TRAV12-2, TRAJ42)
CAVGGSQGNLIF

SEQ ID NO: 578862 - protein, 14 aa, Homo sapiens
  CDR3 for beta chain variable domain of TCR clone 289431 (TRBV7-2, TRBJ2-7)
CASRSQGAAYEQYF

SEQ ID NO: 578863 - protein, 17 aa, Homo sapiens
  CDR3 for alpha chain variable domain of TCR clone 289432 (TRAV38-2/DV8, TRAJ23)
CALSRKPIFGQGTELSV

SEQ ID NO: 578864 - protein, 17 aa, Homo sapiens
  CDR3 for beta chain variable domain of TCR clone 289432 (TRBV5-4, TRBJ2-1)
CASSSAGGRGPYNEQFF

SEQ ID NO: 578865 - protein, 15 aa, Homo sapiens
  CDR3 for alpha chain variable domain of TCR clone 289433 (TRAV12-2, TRAJ32)
CAVNHCGGATNKLIF

SEQ ID NO: 578866 - protein, 14 aa, Homo sapiens
  CDR3 for beta chain variable domain of TCR clone 289433 (TRBV27, TRBJ2-1)
CASSFGREANEQFF

SEQ ID NO: 578867 - protein, 12 aa, Homo sapiens
  CDR3 for alpha chain variable domain of TCR clone 289434 (TRAV17, TRAJ39)
CATGAAGNMLTF

SEQ ID NO: 578868 - protein, 14 aa, Homo sapiens
  CDR3 for beta chain variable domain of TCR clone 289434 (TRBV7-9, TRBJ1-2)
CASSRQGANYVYTF

SEQ ID NO: 578869 - protein, 21 aa, Homo sapiens
  CDR3 for alpha chain variable domain of TCR clone 289435 (TRAV1-1, TRAJ9)
CAAKNTGGFKTILEQEQDYLL

SEQ ID NO: 578870 - protein, 15 aa, Homo sapiens
  CDR3 for beta chain variable domain of TCR clone 289435 (TRBV20-1, TRBJ2-7)
CSAESGTSGAYEQYF

SEQ ID NO: 578871 - protein, 15 aa, Homo sapiens
  CDR3 for alpha chain variable domain of TCR clone 289436 (TRAV27, TRAJ38)
CAARRNAGNNRKLIW

SEQ ID NO: 578872 - protein, 13 aa, Homo sapiens
  CDR3 for beta chain variable domain of TCR clone 289436 (TRBV12-5, TRBJ2-3)
CASGDRGSDTQYF

SEQ ID NO: 578873 - protein, 13 aa, Homo sapiens
  CDR3 for alpha chain variable domain of TCR clone 289437 (TRAV12-1, TRAJ9)
CVVLNTGGFKTFF

SEQ ID NO: 578874 - protein, 13 aa, Homo sapiens
  CDR3 for beta chain variable domain of TCR clone 289437 (TRBV20-1, TRBJ1-1)
CSARGGGNTEAVF

SEQ ID NO: 578875 - protein, 14 aa, Homo sapiens
  CDR3 for alpha chain variable domain of TCR clone 289438 (TRAV1-2, TRAJ8)
CSVREDTGFQKFVF

SEQ ID NO: 578876 - protein, 16 aa, Homo sapiens
  CDR3 for beta chain variable domain of TCR clone 289438 (TRBV7-9, TRBJ2-1)
CASSDVAGGSYNEQFF

SEQ ID NO: 578877 - protein, 17 aa, Homo sapiens
  CDR3 for alpha chain variable domain of TCR clone 289439 (TRAV3, TRAJ38)
CAARDCLNAGNNRKLIW

SEQ ID NO: 578878 - protein, 13 aa, Homo sapiens
  CDR3 for beta chain variable domain of TCR clone 289439 (TRBV7-9, TRBJ2-1)
CASSWESYNEQFF

SEQ ID NO: 578879 - protein, 15 aa, Homo sapiens
  CDR3 for alpha chain variable domain of TCR clone 289440 (TRAV12-2, TRAJ53)
CAVNGGGCRNYKLTF

SEQ ID NO: 578880 - protein, 13 aa, Homo sapiens
  CDR3 for beta chain variable domain of TCR clone 289440 (TRBV3-1, TRBJ1-1)
CASSPGVITEAFF

SEQ ID NO: 578881 - protein, 15 aa, Homo sapiens
  CDR3 for alpha chain variable domain of TCR clone 289441 (TRAV3, TRAJ12)
CAVRDIRDSSYKLIF

SEQ ID NO: 578882 - protein, 15 aa, Homo sapiens
  CDR3 for beta chain variable domain of TCR clone 289441 (TRBV4-2, TRBJ1-2)
CASSQRTGGRDGYTF

SEQ ID NO: 578883 - protein, 13 aa, Homo sapiens
  CDR3 for alpha chain variable domain of TCR clone 289442 (TRAV14/DV4, TRAJ23)
CAMREVKGGKLIF

SEQ ID NO: 578884 - protein, 14 aa, Homo sapiens
  CDR3 for beta chain variable domain of TCR clone 289442 (TRBV6-3, TRBJ2-1)
CQQFASDSYNEQFF

SEQ ID NO: 578885 - protein, 19 aa, Homo sapiens
  CDR3 for alpha chain variable domain of TCR clone 289443 (TRAV3, TRAJ6)
CAVRDGPGQEEATYLHLEE

SEQ ID NO: 578886 - protein, 13 aa, Homo sapiens
  CDR3 for beta chain variable domain of TCR clone 289443 (TRBV19, TRBJ2-7)
CASSIDRPYEQYF

SEQ ID NO: 578887 - protein, 16 aa, Homo sapiens
  CDR3 for alpha chain variable domain of TCR clone 289444 (TRAV21, TRAJ37)
CAVRTAGSSNTGKLIF

SEQ ID NO: 578888 - protein, 13 aa, Homo sapiens
  CDR3 for beta chain variable domain of TCR clone 289444 (TRBV7-9, TRBJ2-5)
RACLPSGRETQYF

SEQ ID NO: 578889 - protein, 13 aa, Homo sapiens
  CDR3 for alpha chain variable domain of TCR clone 289445 (TRAV12-2, TRAJ40)
CAVKRTETYKYIF

SEQ ID NO: 578890 - protein, 18 aa, Homo sapiens
  CDR3 for beta chain variable domain of TCR clone 289445 (TRBV7-2, TRBJ2-3)
CASSLETSRGRKADTQYF

SEQ ID NO: 578891 - protein, 14 aa, Homo sapiens
  CDR3 for alpha chain variable domain of TCR clone 289446 (TRAV8-4, TRAJ17)
CAVSAGAAGNKLTF

SEQ ID NO: 578892 - protein, 13 aa, Homo sapiens
  CDR3 for beta chain variable domain of TCR clone 289446 (TRBV19, TRBJ2-1)
CASSMYRVNEQFF

SEQ ID NO: 578893 - protein, 15 aa, Homo sapiens
  CDR3 for alpha chain variable domain of TCR clone 289447 (TRAV21, TRAJ10)
CAVRGLTGGGNKLTF

SEQ ID NO: 578894 - protein, 13 aa, Homo sapiens
  CDR3 for beta chain variable domain of TCR clone 289447 (TRBV29-1, TRBJ1-1)
CSVGDSRNTEAFF

SEQ ID NO: 578895 - protein, 17 aa, Homo sapiens
  CDR3 for alpha chain variable domain of TCR clone 289448 (TRAV3, TRAJ6)
CAVRDGPRAGGSYIPTF

SEQ ID NO: 578896 - protein, 16 aa, Homo sapiens
  CDR3 for beta chain variable domain of TCR clone 289448 (TRBV28, TRBJ2-7)
CASSSGTSGRGYEQYF

SEQ ID NO: 578897 - protein, 12 aa, Homo sapiens
  CDR3 for alpha chain variable domain of TCR clone 289449 (TRAV3, TRAJ43)
CAVRDPNNGMRF

SEQ ID NO: 578898 - protein, 12 aa, Homo sapiens
  CDR3 for beta chain variable domain of TCR clone 289449 (TRBV24-1, TRBJ1-1)
CATSDSDRGAFF

SEQ ID NO: 578899 - protein, 12 aa, Homo sapiens
  CDR3 for alpha chain variable domain of TCR clone 289450 (TRAV17, TRAJ57)
RAPPRASEKLVF

SEQ ID NO: 578900 - protein, 16 aa, Homo sapiens
  CDR3 for beta chain variable domain of TCR clone 289450 (TRBV12-4, TRBJ1-5)
CASSRPVGGSNQPQHF

SEQ ID NO: 578901 - protein, 16 aa, Homo sapiens
  CDR3 for alpha chain variable domain of TCR clone 289451 (TRAV13-1, TRAJ22)
CAAKGGRSGSARQLTF

SEQ ID NO: 578902 - protein, 15 aa, Homo sapiens
  CDR3 for beta chain variable domain of TCR clone 289451 (TRBV9, TRBJ1-6)
CASSVAGTGESPLHF

SEQ ID NO: 578903 - protein, 14 aa, Homo sapiens
  CDR3 for alpha chain variable domain of TCR clone 289452 (TRAV12-3, TRAJ9)
CAMSPNTGGFKTIF

SEQ ID NO: 578904 - protein, 12 aa, Homo sapiens
  CDR3 for beta chain variable domain of TCR clone 289452 (TRBV11-2, TRBJ2-2)
CASSLGGGELFC

SEQ ID NO: 578905 - protein, 15 aa, Homo sapiens
  CDR3 for alpha chain variable domain of TCR clone 289453 (TRAV38-1, TRAJ37)
CAFIFGSGNTGKLIF

SEQ ID NO: 578906 - protein, 15 aa, Homo sapiens
  CDR3 for beta chain variable domain of TCR clone 289453 (TRBV7-2, TRBJ2-3)
CASSSTGLETDTQYF

SEQ ID NO: 578907 - protein, 14 aa, Homo sapiens
  CDR3 for alpha chain variable domain of TCR clone 289454 (TRAV2, TRAJ9)
CAVEDRSGGFKTIF

SEQ ID NO: 578908 - protein, 14 aa, Homo sapiens
  CDR3 for beta chain variable domain of TCR clone 289454 (TRBV7-2, TRBJ2-7)
CASSLPPGQGPQYF

SEQ ID NO: 578909 - protein, 14 aa, Homo sapiens
  CDR3 for alpha chain variable domain of TCR clone 289455 (TRAV14/DV4, TRAJ42)
CPRGSLRSQGNPIF

SEQ ID NO: 578910 - protein, 14 aa, Homo sapiens
  CDR3 for beta chain variable domain of TCR clone 289455 (TRBV11-2, TRBJ1-2)
CASSLGTANYGYTF

SEQ ID NO: 578911 - protein, 13 aa, Homo sapiens
  CDR3 for alpha chain variable domain of TCR clone 289456 (TRAV17, TRAJ5)
CATDARGRRALTF

SEQ ID NO: 578912 - protein, 14 aa, Homo sapiens
  CDR3 for beta chain variable domain of TCR clone 289456 (TRBV7-9, TRBJ2-7)
CASSLAAATYEQYF

SEQ ID NO: 578913 - protein, 13 aa, Homo sapiens
  CDR3 for alpha chain variable domain of TCR clone 289457 (TRAV8-1, TRAJ23)
CAWRDNQGGKLIF

SEQ ID NO: 578914 - protein, 13 aa, Homo sapiens
  CDR3 for beta chain variable domain of TCR clone 289457 (TRBV20-1, TRBJ2-7)
CSTTHTSGYEQYF

SEQ ID NO: 578915 - protein, 14 aa, Homo sapiens
  CDR3 for alpha chain variable domain of TCR clone 289458 (TRAV12-2, TRAJ13)
CAVAGSGGYQEVTF

SEQ ID NO: 578916 - protein, 14 aa, Homo sapiens
  CDR3 for beta chain variable domain of TCR clone 289458 (TRBV6-5, TRBJ2-7)
CASSYGVGEAEQYF

SEQ ID NO: 578917 - protein, 14 aa, Homo sapiens
  CDR3 for alpha chain variable domain of TCR clone 289459 (TRAV12-3, TRAJ10)
SHLPLTGGGNKLTF

SEQ ID NO: 578918 - protein, 13 aa, Homo sapiens
  CDR3 for beta chain variable domain of TCR clone 289459 (TRBV10-3, TRBJ2-7)
CASKLAVNYEQYC

SEQ ID NO: 578919 - protein, 15 aa, Homo sapiens
  CDR3 for alpha chain variable domain of TCR clone 289460 (TRAV17, TRAJ13)
CATDAGSGGYQKVTF

SEQ ID NO: 578920 - protein, 16 aa, Homo sapiens
  CDR3 for beta chain variable domain of TCR clone 289460 (TRBV11-2, TRBJ2-1)
CSSLYPPGVEYNEQFF

SEQ ID NO: 578921 - protein, 21 aa, Homo sapiens
  CDR3 for alpha chain variable domain of TCR clone 289461 (TRAV1-1, TRAJ6)
CLLLLRCERLERTGGSYIPTF

SEQ ID NO: 578922 - protein, 13 aa, Homo sapiens
  CDR3 for beta chain variable domain of TCR clone 289461 (TRBV10-2, TRBJ2-7)
CASGASGGYERYF

SEQ ID NO: 578923 - protein, 16 aa, Homo sapiens
  CDR3 for alpha chain variable domain of TCR clone 289462 (TRAV3, TRAJ37)
CAVRVRGSGNTGKLIF

SEQ ID NO: 578924 - protein, 14 aa, Homo sapiens
  CDR3 for beta chain variable domain of TCR clone 289462 (TRBV7-2, TRBJ1-2)
CASSQTGSTYGYTF

SEQ ID NO: 578925 - protein, 13 aa, Homo sapiens
  CDR3 for alpha chain variable domain of TCR clone 289463 (TRAV12-3, TRAJ40)
FAMSDSGTYKYIF

SEQ ID NO: 578926 - protein, 22 aa, Homo sapiens
  CDR3 for beta chain variable domain of TCR clone 289463 (TRBV14, TRBJ1-5)
CASSQDGVTPYLPPIGNQPQHF

SEQ ID NO: 578927 - protein, 13 aa, Homo sapiens
  CDR3 for alpha chain variable domain of TCR clone 289464 (TRAV14/DV4, TRAJ40)
CAMSGSGTYKYTF

SEQ ID NO: 578928 - protein, 15 aa, Homo sapiens
  CDR3 for beta chain variable domain of TCR clone 289464 (TRBV20-1, TRBJ2-7)
CSARDRVSGMDEQYF

SEQ ID NO: 578929 - protein, 14 aa, Homo sapiens
  CDR3 for alpha chain variable domain of TCR clone 289465 (TRAV1-2, TRAJ16)
CAVNRFSDGQKLLF

SEQ ID NO: 578930 - protein, 15 aa, Homo sapiens
  CDR3 for beta chain variable domain of TCR clone 289465 (TRBV19, TRBJ1-5)
CASTIVWADNQPQHF

SEQ ID NO: 578931 - protein, 14 aa, Homo sapiens
  CDR3 for alpha chain variable domain of TCR clone 289466 (TRAV12-2, TRAJ33)
CAVKRARSNYQLIW

SEQ ID NO: 578932 - protein, 14 aa, Homo sapiens
  CDR3 for beta chain variable domain of TCR clone 289466 (TRBV12-4, TRBJ2-5)
CASSFGASGGTQYF

SEQ ID NO: 578933 - protein, 13 aa, Homo sapiens
  CDR3 for alpha chain variable domain of TCR clone 289467 (TRAV1-2, TRAJ9)
CSSLNTGGFKTIF

SEQ ID NO: 578934 - protein, 13 aa, Homo sapiens
  CDR3 for beta chain variable domain of TCR clone 289467 (TRBV19, TRBJ1-2)
CASSVPGQDGYTF

SEQ ID NO: 578935 - protein, 20 aa, Homo sapiens
  CDR3 for alpha chain variable domain of TCR clone 289468 (TRAV21, TRAJ22)
SLMTQPPTLKSSGSARQLTF

SEQ ID NO: 578936 - protein, 16 aa, Homo sapiens
  CDR3 for beta chain variable domain of TCR clone 289468 (TRBV7-3, TRBJ2-2)
CASSLKRGTLSGELFF

SEQ ID NO: 578937 - protein, 14 aa, Homo sapiens
  CDR3 for alpha chain variable domain of TCR clone 289469 (TRAV1-2, TRAJ16)
CAVNRFSDGQKLLF

SEQ ID NO: 578938 - protein, 13 aa, Homo sapiens
  CDR3 for beta chain variable domain of TCR clone 289469 (TRBV6-5, TRBJ1-1)
QTSVYFGALRAFF

SEQ ID NO: 578939 - protein, 14 aa, Homo sapiens
  CDR3 for alpha chain variable domain of TCR clone 289470 (TRAV26-1, TRAJ22)
CIVRVYGSARQLAF

SEQ ID NO: 578940 - protein, 17 aa, Homo sapiens
  CDR3 for beta chain variable domain of TCR clone 289470 (TRBV7-3, TRBJ2-3)
CASSPGGLAGFGDTQYF

SEQ ID NO: 578941 - protein, 13 aa, Homo sapiens
  CDR3 for alpha chain variable domain of TCR clone 289471 (TRAV1-2, TRAJ9)
CAVLNTGGFKTIF

SEQ ID NO: 578942 - protein, 14 aa, Homo sapiens
  CDR3 for beta chain variable domain of TCR clone 289471 (TRBV20-1, TRBJ2-3)
YSARGGTSTDTQYF

SEQ ID NO: 578943 - protein, 11 aa, Homo sapiens
  CDR3 for alpha chain variable domain of TCR clone 289472 (TRAV2, TRAJ23)
CVVETRGKLIF

SEQ ID NO: 578944 - protein, 14 aa, Homo sapiens
  CDR3 for beta chain variable domain of TCR clone 289472 (TRBV7-2, TRBJ2-7)
CASSPKTSFYEQYF

SEQ ID NO: 578945 - protein, 15 aa, Homo sapiens
  CDR3 for alpha chain variable domain of TCR clone 289473 (TRAV26-1, TRAJ29)
CIVRVEGSGNTPLVF

SEQ ID NO: 578946 - protein, 13 aa, Homo sapiens
  CDR3 for beta chain variable domain of TCR clone 289473 (TRBV18, TRBJ2-5)
CQRTWVSQETQYF

SEQ ID NO: 578947 - protein, 19 aa, Homo sapiens
  CDR3 for alpha chain variable domain of TCR clone 289474 (TRAV2, TRAJ20)
ILQVREEDAAVYRDCKLSF

SEQ ID NO: 578948 - protein, 15 aa, Homo sapiens
  CDR3 for beta chain variable domain of TCR clone 289474 (TRBV9, TRBJ1-6)
CASSVAGTGDSPLHF

SEQ ID NO: 578949 - protein, 14 aa, Homo sapiens
  CDR3 for alpha chain variable domain of TCR clone 289475 (TRAV12-3, TRAJ10)
GHLPLTGGGNKLTF

SEQ ID NO: 578950 - protein, 13 aa, Homo sapiens
  CDR3 for beta chain variable domain of TCR clone 289475 (TRBV12-5, TRBJ2-3)
CASGDRQSDTQYF

SEQ ID NO: 578951 - protein, 14 aa, Homo sapiens
  CDR3 for alpha chain variable domain of TCR clone 289476 (TRAV4, TRAJ17)
CLVGDMAAGNKLTF

SEQ ID NO: 578952 - protein, 14 aa, Homo sapiens
  CDR3 for beta chain variable domain of TCR clone 289476 (TRBV7-6, TRBJ2-3)
CASGLGTVTDTQYF

SEQ ID NO: 578953 - protein, 12 aa, Homo sapiens
  CDR3 for alpha chain variable domain of TCR clone 289477 (TRAV8-3, TRAJ27)
WAVGAEAGKSPF

SEQ ID NO: 578954 - protein, 14 aa, Homo sapiens
  CDR3 for beta chain variable domain of TCR clone 289477 (TRBV2, TRBJ2-1)
CASRLIVGHDEQFF

SEQ ID NO: 578955 - protein, 15 aa, Homo sapiens
  CDR3 for alpha chain variable domain of TCR clone 289478 (TRAV12-2, TRAJ53)
CAVNGGGGSNYKLTF

SEQ ID NO: 578956 - protein, 15 aa, Homo sapiens
  CDR3 for beta chain variable domain of TCR clone 289478 (TRBV11-1, TRBJ2-7)
CASSRGRFKTYEQYF

SEQ ID NO: 578957 - protein, 12 aa, Homo sapiens
  CDR3 for alpha chain variable domain of TCR clone 289479 (TRAV8-3, TRAJ26)
RAGDNYGQNFVL

SEQ ID NO: 578958 - protein, 15 aa, Homo sapiens
  CDR3 for beta chain variable domain of TCR clone 289479 (TRBV9, TRBJ2-1)
CASSLAGSSYNEQFF

SEQ ID NO: 578959 - protein, 13 aa, Homo sapiens
  CDR3 for alpha chain variable domain of TCR clone 289480 (TRAV13-1, TRAJ40)
CAARTSGTYKYIF

SEQ ID NO: 578960 - protein, 15 aa, Homo sapiens
  CDR3 for beta chain variable domain of TCR clone 289480 (TRBV7-2, TRBJ2-1)
CASSLASGRVNEQFF

SEQ ID NO: 578961 - protein, 13 aa, Homo sapiens
  CDR3 for alpha chain variable domain of TCR clone 289481 (TRAV12-1, TRAJ13)
SATMIGGYQKVTF

SEQ ID NO: 578962 - protein, 15 aa, Homo sapiens
  CDR3 for beta chain variable domain of TCR clone 289481 (TRBV12-4, TRBJ2-5)
CASSPPTGLQETQYF

SEQ ID NO: 578963 - protein, 11 aa, Homo sapiens
  CDR3 for alpha chain variable domain of TCR clone 289482 (TRAV2, TRAJ13)
CASGGYQKVTL

SEQ ID NO: 578964 - protein, 14 aa, Homo sapiens
  CDR3 for beta chain variable domain of TCR clone 289482 (TRBV7-2, TRBJ2-7)
CASSPKTSFYEQYF

SEQ ID NO: 578965 - protein, 13 aa, Homo sapiens
  CDR3 for alpha chain variable domain of TCR clone 289483 (TRAV8-4, TRAJ43)
CAVTLINNNDMRF

SEQ ID NO: 578966 - protein, 14 aa, Homo sapiens
  CDR3 for beta chain variable domain of TCR clone 289483 (TRBV7-2, TRBJ2-7)
CASRSQGAAYEQYF

SEQ ID NO: 578967 - protein, 14 aa, Homo sapiens
  CDR3 for alpha chain variable domain of TCR clone 289484 (TRAV35, TRAJ38)
CAGSNAGNNRKLIW

SEQ ID NO: 578968 - protein, 14 aa, Homo sapiens
  CDR3 for beta chain variable domain of TCR clone 289484 (TRBV15, TRBJ2-5)
CATSMGGSGETQYF

SEQ ID NO: 578969 - protein, 11 aa, Homo sapiens
  CDR3 for alpha chain variable domain of TCR clone 289485 (TRAV1-2, TRAJ20)
CAVSNDYKLSF

SEQ ID NO: 578970 - protein, 16 aa, Homo sapiens
  CDR3 for beta chain variable domain of TCR clone 289485 (TRBV29-1, TRBJ2-6)
CSVEDITYSGTNVLTF

SEQ ID NO: 578971 - protein, 16 aa, Homo sapiens
  CDR3 for alpha chain variable domain of TCR clone 289486 (TRAV30, TRAJ24)
CGTEIVDADSWGKSHF

SEQ ID NO: 578972 - protein, 14 aa, Homo sapiens
  CDR3 for beta chain variable domain of TCR clone 289486 (TRBV12-5, TRBJ2-5)
CASGSRTHQETQYF

SEQ ID NO: 578973 - protein, 15 aa, Homo sapiens
  CDR3 for alpha chain variable domain of TCR clone 289487 (TRAV25, TRAJ52)
CAGRPGGTSYGKLTF

SEQ ID NO: 578974 - protein, 17 aa, Homo sapiens
  CDR3 for beta chain variable domain of TCR clone 289487 (TRBV7-2, TRBJ2-3)
CASSLEARGTSTDTQYF

SEQ ID NO: 578975 - protein, 15 aa, Homo sapiens
  CDR3 for alpha chain variable domain of TCR clone 289488 (TRAV25, TRAJ53)
CAATGGGGSNYKLTF

SEQ ID NO: 578976 - protein, 16 aa, Homo sapiens
  CDR3 for beta chain variable domain of TCR clone 289488 (TRBV29-1, TRBJ2-7)
CSVEVVGTSGSYEQYF

SEQ ID NO: 578977 - protein, 16 aa, Homo sapiens
  CDR3 for alpha chain variable domain of TCR clone 289489 (TRAV8-3, TRAJ22)
CAVYLLGPGSARQLTF

SEQ ID NO: 578978 - protein, 14 aa, Homo sapiens
  CDR3 for beta chain variable domain of TCR clone 289489 (TRBV11-2, TRBJ2-7)
CASSLELEGYEQYF

SEQ ID NO: 578979 - protein, 12 aa, Homo sapiens
  CDR3 for alpha chain variable domain of TCR clone 289490 (TRAV21, TRAJ29)
CAVTSGNTPLVF

SEQ ID NO: 578980 - protein, 15 aa, Homo sapiens
  CDR3 for beta chain variable domain of TCR clone 289490 (TRBV11-2, TRBJ2-7)
CASRFPGTGGYEQYF

SEQ ID NO: 578981 - protein, 13 aa, Homo sapiens
  CDR3 for alpha chain variable domain of TCR clone 289491 (TRAV1-2, TRAJ9)
CAALNTGGFKTIF

SEQ ID NO: 578982 - protein, 15 aa, Homo sapiens
  CDR3 for beta chain variable domain of TCR clone 289491 (TRBV4-1, TRBJ2-5)
CASSQWDLYQETQYF

SEQ ID NO: 578983 - protein, 15 aa, Homo sapiens
  CDR3 for alpha chain variable domain of TCR clone 289492 (TRAV17, TRAJ56)
CATEPFTGANSKLKF

SEQ ID NO: 578984 - protein, 14 aa, Homo sapiens
  CDR3 for beta chain variable domain of TCR clone 289492 (TRBV19, TRBJ2-1)
CASPTFVLSGEQFF

SEQ ID NO: 578985 - protein, 14 aa, Homo sapiens
  CDR3 for alpha chain variable domain of TCR clone 289493 (TRAV12-2, TRAJ13)
CAVKKTGGYQKATF

SEQ ID NO: 578986 - protein, 13 aa, Homo sapiens
  CDR3 for beta chain variable domain of TCR clone 289493 (TRBV19, TRBJ1-2)
CASSQGQVYGYTF

SEQ ID NO: 578987 - protein, 12 aa, Homo sapiens
  CDR3 for alpha chain variable domain of TCR clone 289494 (TRAV13-1, TRAJ48)
CAANFGNEKLTF

SEQ ID NO: 578988 - protein, 17 aa, Homo sapiens
  CDR3 for beta chain variable domain of TCR clone 289494 (TRBV20-1, TRBJ2-1)
CSASSSGLAGSYNEQFF

SEQ ID NO: 578989 - protein, 12 aa, Homo sapiens
  CDR3 for alpha chain variable domain of TCR clone 289495 (TRAV8-4, TRAJ43)
CAVSVNNNDMRF

SEQ ID NO: 578990 - protein, 16 aa, Homo sapiens
  CDR3 for beta chain variable domain of TCR clone 289495 (TRBV12-4, TRBJ2-5)
CASSWRPSGDLKTQYF

SEQ ID NO: 578991 - protein, 15 aa, Homo sapiens
  CDR3 for alpha chain variable domain of TCR clone 289496 (TRAV21, TRAJ40)
CAVRPQTSGTYEYIF

SEQ ID NO: 578992 - protein, 15 aa, Homo sapiens
  CDR3 for beta chain variable domain of TCR clone 289496 (TRBV5-1, TRBJ2-3)
CASSVTSGSTDTQYF

SEQ ID NO: 578993 - protein, 12 aa, Homo sapiens
  CDR3 for alpha chain variable domain of TCR clone 289497 (TRAV17, TRAJ43)
CATDAFPADMRF

SEQ ID NO: 578994 - protein, 17 aa, Homo sapiens
  CDR3 for beta chain variable domain of TCR clone 289497 (TRBV20-1, TRBJ2-1)
CSASSSGLAGSYNEQFF

SEQ ID NO: 578995 - protein, 16 aa, Homo sapiens
  CDR3 for alpha chain variable domain of TCR clone 289498 (TRAV12-2, TRAJ43)
CAGDDMRFGAGTRLTV

SEQ ID NO: 578996 - protein, 15 aa, Homo sapiens
  CDR3 for beta chain variable domain of TCR clone 289498 (TRBV7-2, TRBJ2-1)
CASTHGTGSYNEQFF

SEQ ID NO: 578997 - protein, 14 aa, Homo sapiens
  CDR3 for alpha chain variable domain of TCR clone 289499 (TRAV38-1, TRAJ43)
CAFMKHNNNNEMRF

SEQ ID NO: 578998 - protein, 14 aa, Homo sapiens
  CDR3 for beta chain variable domain of TCR clone 289499 (TRBV5-4, TRBJ1-1)
CASSLDSRRDEAFF

SEQ ID NO: 578999 - protein, 10 aa, Homo sapiens
  CDR3 for alpha chain variable domain of TCR clone 289500 (TRAV21, TRAJ17)
CAVTGNKLTF

SEQ ID NO: 579000 - protein, 15 aa, Homo sapiens
  CDR3 for beta chain variable domain of TCR clone 289500 (TRBV19, TRBJ1-2)
CASSVGQVLNYGYTF

SEQ ID NO: 579001 - protein, 14 aa, Homo sapiens
  CDR3 for alpha chain variable domain of TCR clone 289501 (TRAV1-2, TRAJ16)
CAVNRFSDGPKLLF

SEQ ID NO: 579002 - protein, 15 aa, Homo sapiens
  CDR3 for beta chain variable domain of TCR clone 289501 (TRBV7-2, TRBJ2-7)
CASSLKGALTYEQYF

SEQ ID NO: 579003 - protein, 15 aa, Homo sapiens
  CDR3 for alpha chain variable domain of TCR clone 289502 (TRAV26-2, TRAJ39)
CSLRGNNNACNMLTF

SEQ ID NO: 579004 - protein, 15 aa, Homo sapiens
  CDR3 for beta chain variable domain of TCR clone 289502 (TRBV5-4, TRBJ1-1)
CARSSLGWANTEAFF

SEQ ID NO: 579005 - protein, 12 aa, Homo sapiens
  CDR3 for alpha chain variable domain of TCR clone 289503 (TRAV16, TRAJ26)
CASKDGGQNFVF

SEQ ID NO: 579006 - protein, 18 aa, Homo sapiens
  CDR3 for beta chain variable domain of TCR clone 289503 (TRBV5-5, TRBJ1-5)
CASSLRQVKGSSNQPQHF

SEQ ID NO: 579007 - protein, 12 aa, Homo sapiens
  CDR3 for alpha chain variable domain of TCR clone 289504 (TRAV3, TRAJ39)
RAVIEWSNMLTF

SEQ ID NO: 579008 - protein, 14 aa, Homo sapiens
  CDR3 for beta chain variable domain of TCR clone 289504 (TRBV7-8, TRBJ2-3)
CASSFPDGQDTQYF

SEQ ID NO: 579009 - protein, 16 aa, Homo sapiens
  CDR3 for alpha chain variable domain of TCR clone 289505 (TRAV30, TRAJ24)
CGTEIVDADSWGKFKF

SEQ ID NO: 579010 - protein, 14 aa, Homo sapiens
  CDR3 for beta chain variable domain of TCR clone 289505 (TRBV12-5, TRBJ2-5)
CASGSRTHQETKYF

SEQ ID NO: 579011 - protein, 15 aa, Homo sapiens
  CDR3 for alpha chain variable domain of TCR clone 289506 (TRAV26-1, TRAJ13)
CIVRASRGGYQKVTF

SEQ ID NO: 579012 - protein, 17 aa, Homo sapiens
  CDR3 for beta chain variable domain of TCR clone 289506 (TRBV7-8, TRBJ2-6)
CASSAGTGGAGANVLTF

SEQ ID NO: 579013 - protein, 11 aa, Homo sapiens
  CDR3 for alpha chain variable domain of TCR clone 289507 (TRAV3, TRAJ17)
CAEAAGSKLTF

SEQ ID NO: 579014 - protein, 15 aa, Homo sapiens
  CDR3 for beta chain variable domain of TCR clone 289507 (TRBV12-4, TRBJ2-7)
CASSLGSGGPYERYF

SEQ ID NO: 579015 - protein, 10 aa, Homo sapiens
  CDR3 for alpha chain variable domain of TCR clone 289508 (TRAV23/DV6, TRAJ57)
CAVSSTLSQG

SEQ ID NO: 579016 - protein, 14 aa, Homo sapiens
  CDR3 for beta chain variable domain of TCR clone 289508 (TRBV7-6, TRBJ2-7)
CASSFRQGADEQYF

SEQ ID NO: 579017 - protein, 12 aa, Homo sapiens
  CDR3 for alpha chain variable domain of TCR clone 289509 (TRAV12-3, TRAJ17)
CAMTLTGNKLTF

SEQ ID NO: 579018 - protein, 15 aa, Homo sapiens
  CDR3 for beta chain variable domain of TCR clone 289509 (TRBV20-1, TRBJ2-7)
CSARDRVSGMDVQYV

SEQ ID NO: 579019 - protein, 16 aa, Homo sapiens
  CDR3 for alpha chain variable domain of TCR clone 289510 (TRAV16, TRAJ52)
CALSAAGGTSYGKLTF

SEQ ID NO: 579020 - protein, 12 aa, Homo sapiens
  CDR3 for beta chain variable domain of TCR clone 289510 (TRBV12-4, TRBJ1-3)
CESSFSGNTIYF

SEQ ID NO: 579021 - protein, 13 aa, Homo sapiens
  CDR3 for alpha chain variable domain of TCR clone 289511 (TRAV13-1, TRAJ53)
CAASKGSNYKLTF

SEQ ID NO: 579022 - protein, 14 aa, Homo sapiens
  CDR3 for beta chain variable domain of TCR clone 289511 (TRBV11-2, TRBJ2-1)
CASSRATSYNEQFF

SEQ ID NO: 579023 - protein, 10 aa, Homo sapiens
  CDR3 for alpha chain variable domain of TCR clone 289512 (TRAV13-1, TRAJ43)
CAASKNDMRF

SEQ ID NO: 579024 - protein, 13 aa, Homo sapiens
  CDR3 for beta chain variable domain of TCR clone 289512 (TRBV11-2, TRBJ2-1)
CASSLGLAGGRFF

SEQ ID NO: 579025 - protein, 13 aa, Homo sapiens
  CDR3 for alpha chain variable domain of TCR clone 289513 (TRAV35, TRAJ37)
CAGSSGNTGKLIF

SEQ ID NO: 579026 - protein, 16 aa, Homo sapiens
  CDR3 for beta chain variable domain of TCR clone 289513 (TRBV10-3, TRBJ2-1)
CAISLTSGNSYNEQFL

SEQ ID NO: 579027 - protein, 18 aa, Homo sapiens
  CDR3 for alpha chain variable domain of TCR clone 289514 (TRAV21, TRAJ52)
CAVRPSPAGGTSYGKLKV

SEQ ID NO: 579028 - protein, 17 aa, Homo sapiens
  CDR3 for beta chain variable domain of TCR clone 289514 (TRBV13, TRBJ2-3)
CASSLSRVAGGRNTQYF

SEQ ID NO: 579029 - protein, 13 aa, Homo sapiens
  CDR3 for alpha chain variable domain of TCR clone 289515 (TRAV17, TRAJ9)
CATEYTGGFKTIF

SEQ ID NO: 579030 - protein, 14 aa, Homo sapiens
  CDR3 for beta chain variable domain of TCR clone 289515 (TRBV19, TRBJ2-5)
CASSMTGQQETQLF

SEQ ID NO: 579031 - protein, 12 aa, Homo sapiens
  CDR3 for alpha chain variable domain of TCR clone 289516 (TRAV26-1, TRAJ13)
CIVSRGYQKVTF

SEQ ID NO: 579032 - protein, 14 aa, Homo sapiens
  CDR3 for beta chain variable domain of TCR clone 289516 (TRBV28, TRBJ2-2)
CASTRRSGDGELFF

SEQ ID NO: 579033 - protein, 15 aa, Homo sapiens
  CDR3 for alpha chain variable domain of TCR clone 289517 (TRAV26-1, TRAJ29)
CIVRVEGSGTTPLVF

SEQ ID NO: 579034 - protein, 15 aa, Homo sapiens
  CDR3 for beta chain variable domain of TCR clone 289517 (TRBV7-9, TRBJ1-5)
CASSQGHQPNQTQHF

SEQ ID NO: 579035 - protein, 15 aa, Homo sapiens
  CDR3 for alpha chain variable domain of TCR clone 289518 (TRAV17, TRAJ22)
CATAPITGSARQLTF

SEQ ID NO: 579036 - protein, 14 aa, Homo sapiens
  CDR3 for beta chain variable domain of TCR clone 289518 (TRBV9, TRBJ2-1)
CASSVDPRGKEQFF

SEQ ID NO: 579037 - protein, 15 aa, Homo sapiens
  CDR3 for alpha chain variable domain of TCR clone 289519 (TRAV1-2, TRAJ29)
CAVSPPPGGNTPLVF

SEQ ID NO: 579038 - protein, 12 aa, Homo sapiens
  CDR3 for beta chain variable domain of TCR clone 289519 (TRBV11-2, TRBJ2-3)
CASRPGTDTQYF

SEQ ID NO: 579039 - protein, 13 aa, Homo sapiens
  CDR3 for alpha chain variable domain of TCR clone 289520 (TRAV27, TRAJ45)
CRSAGGGADGLTF

SEQ ID NO: 579040 - protein, 11 aa, Homo sapiens
  CDR3 for beta chain variable domain of TCR clone 289520 (TRBV19, TRBJ1-1)
CASSIGSEAFF

SEQ ID NO: 579041 - protein, 15 aa, Homo sapiens
  CDR3 for alpha chain variable domain of TCR clone 289521 (TRAV21, TRAJ24)
CAARSSTDSWGKLQF

SEQ ID NO: 579042 - protein, 14 aa, Homo sapiens
  CDR3 for beta chain variable domain of TCR clone 289521 (TRBV5-7, TRBJ1-1)
CASSLAGDWTEAFF

SEQ ID NO: 579043 - protein, 14 aa, Homo sapiens
  CDR3 for alpha chain variable domain of TCR clone 289522 (TRAV12-1, TRAJ29)
CVVNEGSGHTPLVF

SEQ ID NO: 579044 - protein, 13 aa, Homo sapiens
  CDR3 for beta chain variable domain of TCR clone 289522 (TRBV7-9, TRBJ2-3)
CASSPGSKDTQYF

SEQ ID NO: 579045 - protein, 14 aa, Homo sapiens
  CDR3 for alpha chain variable domain of TCR clone 289523 (TRAV12-3, TRAJ33)
CAMSVPGSNYQLIW

SEQ ID NO: 579046 - protein, 15 aa, Homo sapiens
  CDR3 for beta chain variable domain of TCR clone 289523 (TRBV11-3, TRBJ2-3)
CASLKDGREGDTQYF

SEQ ID NO: 579047 - protein, 14 aa, Homo sapiens
  CDR3 for alpha chain variable domain of TCR clone 289524 (TRAV12-3, TRAJ7)
CAMTEIGGNNRLAF

SEQ ID NO: 579048 - protein, 12 aa, Homo sapiens
  CDR3 for beta chain variable domain of TCR clone 289524 (TRBV5-4, TRBJ1-1)
CASSLDRREAFF

SEQ ID NO: 579049 - protein, 15 aa, Homo sapiens
  CDR3 for alpha chain variable domain of TCR clone 289525 (TRAV38-2/DV8, TRAJ48)
CAYRSGGFGNEKLNF

SEQ ID NO: 579050 - protein, 16 aa, Homo sapiens
  CDR3 for beta chain variable domain of TCR clone 289525 (TRBV28, TRBJ2-7)
CASSPWVATGDLSQYF

SEQ ID NO: 579051 - protein, 22 aa, Homo sapiens
  CDR3 for alpha chain variable domain of TCR clone 289526 (TRAV2, TRAJ10)
ILQVREADAAVYYTGGGTKLTF

SEQ ID NO: 579052 - protein, 15 aa, Homo sapiens
  CDR3 for beta chain variable domain of TCR clone 289526 (TRBV5-7, TRBJ2-7)
CASSLGPGRGHEQYF

SEQ ID NO: 579053 - protein, 13 aa, Homo sapiens
  CDR3 for alpha chain variable domain of TCR clone 289527 (TRAV21, TRAJ15)
CAVANQAGTALIF

SEQ ID NO: 579054 - protein, 16 aa, Homo sapiens
  CDR3 for beta chain variable domain of TCR clone 289527 (TRBV27, TRBJ2-5)
CASSYGPGGQKETQYF

SEQ ID NO: 579055 - protein, 17 aa, Homo sapiens
  CDR3 for alpha chain variable domain of TCR clone 289528 (TRAV26-2, TRAJ42)
CILRDVGYGGSQGNLIF

SEQ ID NO: 579056 - protein, 16 aa, Homo sapiens
  CDR3 for beta chain variable domain of TCR clone 289528 (TRBV12-4, TRBJ2-7)
CAISLIGGTGTYEQYF

SEQ ID NO: 579057 - protein, 15 aa, Homo sapiens
  CDR3 for alpha chain variable domain of TCR clone 289529 (TRAV29/DV5, TRAJ29)
CAASERSSGNTPLVF

SEQ ID NO: 579058 - protein, 15 aa, Homo sapiens
  CDR3 for beta chain variable domain of TCR clone 289529 (TRBV5-1, TRBJ1-1)
CASSLSDLGGTEAFC

SEQ ID NO: 579059 - protein, 14 aa, Homo sapiens
  CDR3 for alpha chain variable domain of TCR clone 289530 (TRAV26-1, TRAJ38)
RIADNAGNNRKRIW

SEQ ID NO: 579060 - protein, 17 aa, Homo sapiens
  CDR3 for beta chain variable domain of TCR clone 289530 (TRBV7-9, TRBJ2-3)
CASSPTVAGDLTDTQYF

SEQ ID NO: 579061 - protein, 13 aa, Homo sapiens
  CDR3 for alpha chain variable domain of TCR clone 289531 (TRAV2, TRAJ40)
CAVVTSGTYKYIL

SEQ ID NO: 579062 - protein, 16 aa, Homo sapiens
  CDR3 for beta chain variable domain of TCR clone 289531 (TRBV19, TRBJ2-2)
CASRSPGTGATGELFF

SEQ ID NO: 579063 - protein, 14 aa, Homo sapiens
  CDR3 for alpha chain variable domain of TCR clone 289532 (TRAV13-1, TRAJ35)
CAASTGGFGNVLDS

SEQ ID NO: 579064 - protein, 13 aa, Homo sapiens
  CDR3 for beta chain variable domain of TCR clone 289532 (TRBV7-3, TRBJ1-1)
CASSQDWGAEAFF

SEQ ID NO: 579065 - protein, 17 aa, Homo sapiens
  CDR3 for alpha chain variable domain of TCR clone 289533 (TRAV3, TRAJ42)
WSVRDRDYGGSQGNLIF

SEQ ID NO: 579066 - protein, 15 aa, Homo sapiens
  CDR3 for beta chain variable domain of TCR clone 289533 (TRBV6-6, TRBJ2-7)
CASSYSYGGSYEQYF

SEQ ID NO: 579067 - protein, 12 aa, Homo sapiens
  CDR3 for alpha chain variable domain of TCR clone 289534 (TRAV13-2, TRAJ23)
CAERHRGGKRIF

SEQ ID NO: 579068 - protein, 19 aa, Homo sapiens
  CDR3 for beta chain variable domain of TCR clone 289534 (TRBV19, TRBJ2-5)
CASSIGQVTDFFLGETQYF

SEQ ID NO: 579069 - protein, 16 aa, Homo sapiens
  CDR3 for alpha chain variable domain of TCR clone 289535 (TRAV27, TRAJ52)
CAGAPAGGTSYGKLTF

SEQ ID NO: 579070 - protein, 15 aa, Homo sapiens
  CDR3 for beta chain variable domain of TCR clone 289535 (TRBV27, TRBJ2-1)
CASSNGGGSSNEQFF

SEQ ID NO: 579071 - protein, 14 aa, Homo sapiens
  CDR3 for alpha chain variable domain of TCR clone 289536 (TRAV1-2, TRAJ8)
CAVREDTGFQKLVF

SEQ ID NO: 579072 - protein, 17 aa, Homo sapiens
  CDR3 for beta chain variable domain of TCR clone 289536 (TRBV11-2, TRBJ2-1)
CASSLYPPGVEYNEHFF

SEQ ID NO: 579073 - protein, 17 aa, Homo sapiens
  CDR3 for alpha chain variable domain of TCR clone 289537 (TRAV3, TRAJ42)
CAVRDRDYGGSQGNLIF

SEQ ID NO: 579074 - protein, 15 aa, Homo sapiens
  CDR3 for beta chain variable domain of TCR clone 289537 (TRBV5-5, TRBJ2-2)
CASSRQASGAGELFF

SEQ ID NO: 579075 - protein, 14 aa, Homo sapiens
  CDR3 for alpha chain variable domain of TCR clone 289538 (TRAV35, TRAJ24)
CAGPRRGSWGKLRF

SEQ ID NO: 579076 - protein, 12 aa, Homo sapiens
  CDR3 for beta chain variable domain of TCR clone 289538 (TRBV12-4, TRBJ2-3)
CASSLGQDTQYF

SEQ ID NO: 579077 - protein, 15 aa, Homo sapiens
  CDR3 for alpha chain variable domain of TCR clone 289539 (TRAV3, TRAJ23)
CAVRDRGNQGGKLIF

SEQ ID NO: 579078 - protein, 14 aa, Homo sapiens
  CDR3 for beta chain variable domain of TCR clone 289539 (TRBV7-3, TRBJ2-1)
CASSLAGGTNEQFF

SEQ ID NO: 579079 - protein, 15 aa, Homo sapiens
  CDR3 for alpha chain variable domain of TCR clone 289540 (TRAV21, TRAJ13)
CAVPRSFWGLLESYL

SEQ ID NO: 579080 - protein, 17 aa, Homo sapiens
  CDR3 for beta chain variable domain of TCR clone 289540 (TRBV7-9, TRBJ1-6)
CASSSRDVEIHPSTLGT

SEQ ID NO: 579081 - protein, 13 aa, Homo sapiens
  CDR3 for alpha chain variable domain of TCR clone 289541 (TRAV2, TRAJ27)
CAVEAPMQANQPL

SEQ ID NO: 579082 - protein, 13 aa, Homo sapiens
  CDR3 for beta chain variable domain of TCR clone 289541 (TRBV12-4, TRBJ1-2)
CASSLRQGKGYTF

SEQ ID NO: 579083 - protein, 17 aa, Homo sapiens
  CDR3 for alpha chain variable domain of TCR clone 289542 (TRAV12-1, TRAJ26)
SAIQPPTSVPYGQNFVF

SEQ ID NO: 579084 - protein, 14 aa, Homo sapiens
  CDR3 for beta chain variable domain of TCR clone 289542 (TRBV5-4, TRBJ2-1)
CASSLDQGLNEQFF

SEQ ID NO: 579085 - protein, 14 aa, Homo sapiens
  CDR3 for alpha chain variable domain of TCR clone 289543 (TRAV13-1, TRAJ4)
RAAIPVTGYNKLIF

SEQ ID NO: 579086 - protein, 13 aa, Homo sapiens
  CDR3 for beta chain variable domain of TCR clone 289543 (TRBV20-1, TRBJ1-2)
CSAITGGGGGYTF

SEQ ID NO: 579087 - protein, 13 aa, Homo sapiens
  CDR3 for alpha chain variable domain of TCR clone 289544 (TRAV4, TRAJ15)
CLVGPEAGTALIL

SEQ ID NO: 579088 - protein, 15 aa, Homo sapiens
  CDR3 for beta chain variable domain of TCR clone 289544 (TRBV7-2, TRBJ2-2)
CASSLVAGSAGELFF

SEQ ID NO: 579089 - protein, 12 aa, Homo sapiens
  CDR3 for alpha chain variable domain of TCR clone 289545 (TRAV17, TRAJ12)
CATLRSSYKLIF

SEQ ID NO: 579090 - protein, 16 aa, Homo sapiens
  CDR3 for beta chain variable domain of TCR clone 289545 (TRBV28, TRBJ2-7)
CASSLFFETGGPEQDF

SEQ ID NO: 579091 - protein, 14 aa, Homo sapiens
  CDR3 for alpha chain variable domain of TCR clone 289546 (TRAV12-2, TRAJ40)
CAVKIPSGTYKYIF

SEQ ID NO: 579092 - protein, 15 aa, Homo sapiens
  CDR3 for beta chain variable domain of TCR clone 289546 (TRBV20-1, TRBJ2-1)
CSAQPGGGPYNEQFF

SEQ ID NO: 579093 - protein, 13 aa, Homo sapiens
  CDR3 for alpha chain variable domain of TCR clone 289547 (TRAV23/DV6, TRAJ5)
CAARAAGRRALTF

SEQ ID NO: 579094 - protein, 17 aa, Homo sapiens
  CDR3 for beta chain variable domain of TCR clone 289547 (TRBV11-2, TRBJ2-1)
CASSLYPPGVEYNEQFF

SEQ ID NO: 579095 - protein, 16 aa, Homo sapiens
  CDR3 for alpha chain variable domain of TCR clone 289548 (TRAV13-1, TRAJ10)
CAAGYILTGGGNKLTF

SEQ ID NO: 579096 - protein, 15 aa, Homo sapiens
  CDR3 for beta chain variable domain of TCR clone 289548 (TRBV12-4, TRBJ2-7)
CASSQTGAIYYEQYF

SEQ ID NO: 579097 - protein, 17 aa, Homo sapiens
  CDR3 for alpha chain variable domain of TCR clone 289549 (TRAV3, TRAJ6)
CAVRDGPRAGGSYLPTF

SEQ ID NO: 579098 - protein, 18 aa, Homo sapiens
  CDR3 for beta chain variable domain of TCR clone 289549 (TRBV7-9, TRBJ2-7)
CASSLTTSGSRTWYEQYF

SEQ ID NO: 579099 - protein, 13 aa, Homo sapiens
  CDR3 for alpha chain variable domain of TCR clone 289550 (TRAV12-2, TRAJ20)
CAVYPSNDYKLSF

SEQ ID NO: 579100 - protein, 13 aa, Homo sapiens
  CDR3 for beta chain variable domain of TCR clone 289550 (TRBV19, TRBJ1-2)
CASSVPGQDGYPF

SEQ ID NO: 579101 - protein, 14 aa, Homo sapiens
  CDR3 for alpha chain variable domain of TCR clone 289551 (TRAV12-2, TRAJ17)
CAVLFKAAGNKLIF

SEQ ID NO: 579102 - protein, 14 aa, Homo sapiens
  CDR3 for beta chain variable domain of TCR clone 289551 (TRBV7-3, TRBJ1-1)
CASSLKGGNTEAFF

SEQ ID NO: 579103 - protein, 12 aa, Homo sapiens
  CDR3 for alpha chain variable domain of TCR clone 289552 (TRAV23/DV6, TRAJ31)
CAARRIGARLML

SEQ ID NO: 579104 - protein, 13 aa, Homo sapiens
  CDR3 for beta chain variable domain of TCR clone 289552 (TRBV28, TRBJ2-7)
CASKAGGVYEQYF

SEQ ID NO: 579105 - protein, 14 aa, Homo sapiens
  CDR3 for alpha chain variable domain of TCR clone 289553 (TRAV13-1, TRAJ35)
CAASKGGFGNVLHC

SEQ ID NO: 579106 - protein, 14 aa, Homo sapiens
  CDR3 for beta chain variable domain of TCR clone 289553 (TRBV20-1, TRBJ1-3)
CSASPTGAGNTMYF

SEQ ID NO: 579107 - protein, 13 aa, Homo sapiens
  CDR3 for alpha chain variable domain of TCR clone 289554 (TRAV12-1, TRAJ26)
CVVRRNYGQNFGF

SEQ ID NO: 579108 - protein, 14 aa, Homo sapiens
  CDR3 for beta chain variable domain of TCR clone 289554 (TRBV7-2, TRBJ2-7)
CASRSQGAAYEQYF

SEQ ID NO: 579109 - protein, 14 aa, Homo sapiens
  CDR3 for alpha chain variable domain of TCR clone 289555 (TRAV13-2, TRAJ17)
CAENSKAAGNKLTL

SEQ ID NO: 579110 - protein, 16 aa, Homo sapiens
  CDR3 for beta chain variable domain of TCR clone 289555 (TRBV12-4, TRBJ1-5)
CASSRPVGGSNQPQHF

SEQ ID NO: 579111 - protein, 15 aa, Homo sapiens
  CDR3 for alpha chain variable domain of TCR clone 289556 (TRAV12-1, TRAJ44)
CVADLPTGTASKLTF

SEQ ID NO: 579112 - protein, 16 aa, Homo sapiens
  CDR3 for beta chain variable domain of TCR clone 289556 (TRBV4-2, TRBJ2-3)
CASSQELAGDTDTQYF

SEQ ID NO: 579113 - protein, 15 aa, Homo sapiens
  CDR3 for alpha chain variable domain of TCR clone 289557 (TRAV8-3, TRAJ45)
CASSYSGGGADGLTF

SEQ ID NO: 579114 - protein, 16 aa, Homo sapiens
  CDR3 for beta chain variable domain of TCR clone 289557 (TRBV7-9, TRBJ2-2)
CTSSGFGGANTGELFF

SEQ ID NO: 579115 - protein, 13 aa, Homo sapiens
  CDR3 for alpha chain variable domain of TCR clone 289558 (TRAV13-1, TRAJ3)
CAALGSSASKIIF

SEQ ID NO: 579116 - protein, 15 aa, Homo sapiens
  CDR3 for beta chain variable domain of TCR clone 289558 (TRBV27, TRBJ1-1)
CASSLSGGWNTEAFF

SEQ ID NO: 579117 - protein, 14 aa, Homo sapiens
  CDR3 for alpha chain variable domain of TCR clone 289559 (TRAV3, TRAJ37)
CAVKESGNTGKLIF

SEQ ID NO: 579118 - protein, 15 aa, Homo sapiens
  CDR3 for beta chain variable domain of TCR clone 289559 (TRBV7-9, TRBJ2-2)
CASGPLDTFPGELFF

SEQ ID NO: 579119 - protein, 13 aa, Homo sapiens
  CDR3 for alpha chain variable domain of TCR clone 289560 (TRAV27, TRAJ45)
CRSSGGGADGLTF

SEQ ID NO: 579120 - protein, 15 aa, Homo sapiens
  CDR3 for beta chain variable domain of TCR clone 289560 (TRBV9, TRBJ2-2)
CDSSDFAGASGELFF

SEQ ID NO: 579121 - protein, 14 aa, Homo sapiens
  CDR3 for alpha chain variable domain of TCR clone 289561 (TRAV12-2, TRAJ13)
CAVKKTGGYQKVTF

SEQ ID NO: 579122 - protein, 14 aa, Homo sapiens
  CDR3 for beta chain variable domain of TCR clone 289561 (TRBV2, TRBJ1-5)
CASKKTDSNQTQHF

SEQ ID NO: 579123 - protein, 16 aa, Homo sapiens
  CDR3 for alpha chain variable domain of TCR clone 289562 (TRAV9-2, TRAJ53)
CALIKNSGGRNYKLTF

SEQ ID NO: 579124 - protein, 14 aa, Homo sapiens
  CDR3 for beta chain variable domain of TCR clone 289562 (TRBV28, TRBJ2-1)
CASSLNGRNNEQFF

SEQ ID NO: 579125 - protein, 13 aa, Homo sapiens
  CDR3 for alpha chain variable domain of TCR clone 289563 (TRAV3, TRAJ20)
CAVRYTGDYKLSF

SEQ ID NO: 579126 - protein, 12 aa, Homo sapiens
  CDR3 for beta chain variable domain of TCR clone 289563 (TRBV29-1, TRBJ2-3)
CSVTGGADTQYF

SEQ ID NO: 579127 - protein, 13 aa, Homo sapiens
  CDR3 for alpha chain variable domain of TCR clone 289564 (TRAV3, TRAJ21)
CAVREPDFTKFYF

SEQ ID NO: 579128 - protein, 14 aa, Homo sapiens
  CDR3 for beta chain variable domain of TCR clone 289564 (TRBV4-2, TRBJ2-1)
CASGLDRAYNEQFF

SEQ ID NO: 579129 - protein, 13 aa, Homo sapiens
  CDR3 for alpha chain variable domain of TCR clone 289565 (TRAV21, TRAJ27)
CAARPGNAGKSTF

SEQ ID NO: 579130 - protein, 13 aa, Homo sapiens
  CDR3 for beta chain variable domain of TCR clone 289565 (TRBV7-2, TRBJ1-2)
CASSLPGLYGYTF

SEQ ID NO: 579131 - protein, 14 aa, Homo sapiens
  CDR3 for alpha chain variable domain of TCR clone 289566 (TRAV2, TRAJ9)
CAVEDRGGGFKTIF

SEQ ID NO: 579132 - protein, 14 aa, Homo sapiens
  CDR3 for beta chain variable domain of TCR clone 289566 (TRBV3-1, TRBJ2-5)
CASSQGPDQETQYF

SEQ ID NO: 579133 - protein, 13 aa, Homo sapiens
  CDR3 for alpha chain variable domain of TCR clone 289567 (TRAV5, TRAJ30)
CAEIANRDDKIIF

SEQ ID NO: 579134 - protein, 13 aa, Homo sapiens
  CDR3 for beta chain variable domain of TCR clone 289567 (TRBV7-9, TRBJ2-3)
CASSPGSTDTQYF

SEQ ID NO: 579135 - protein, 12 aa, Homo sapiens
  CDR3 for alpha chain variable domain of TCR clone 289568 (TRAV3, TRAJ31)
CAVRDGNARLMF

SEQ ID NO: 579136 - protein, 18 aa, Homo sapiens
  CDR3 for beta chain variable domain of TCR clone 289568 (TRBV7-2, TRBJ2-3)
FASSLKREGSGITDTQYV

SEQ ID NO: 579137 - protein, 16 aa, Homo sapiens
  CDR3 for alpha chain variable domain of TCR clone 289569 (TRAV12-3, TRAJ28)
CAMRANSGAGSYQLTF

SEQ ID NO: 579138 - protein, 16 aa, Homo sapiens
  CDR3 for beta chain variable domain of TCR clone 289569 (TRBV7-2, TRBJ1-3)
CASNRLEASSGNTIYF

SEQ ID NO: 579139 - protein, 12 aa, Homo sapiens
  CDR3 for alpha chain variable domain of TCR clone 289570 (TRAV1-2, TRAJ17)
CAVRAAGIKLTF

SEQ ID NO: 579140 - protein, 16 aa, Homo sapiens
  CDR3 for beta chain variable domain of TCR clone 289570 (TRBV20-1, TRBJ2-1)
CSAPGLAGSYSDEQFF

SEQ ID NO: 579141 - protein, 13 aa, Homo sapiens
  CDR3 for alpha chain variable domain of TCR clone 289571 (TRAV12-3, TRAJ40)
CAMSARGAYKYIF

SEQ ID NO: 579142 - protein, 16 aa, Homo sapiens
  CDR3 for beta chain variable domain of TCR clone 289571 (TRBV20-1, TRBJ2-3)
CSGEAGLAGGQDTQYF

SEQ ID NO: 579143 - protein, 15 aa, Homo sapiens
  CDR3 for alpha chain variable domain of TCR clone 289572 (TRAV3, TRAJ17)
CAVRDTGAAGNKLTF

SEQ ID NO: 579144 - protein, 14 aa, Homo sapiens
  CDR3 for beta chain variable domain of TCR clone 289572 (TRBV6-3, TRBJ1-1)
CASSNRLPGAEAFF

SEQ ID NO: 579145 - protein, 17 aa, Homo sapiens
  CDR3 for alpha chain variable domain of TCR clone 289573 (TRAV26-1, TRAJ53)
CIVRVDDSGGSNYKLTF

SEQ ID NO: 579146 - protein, 14 aa, Homo sapiens
  CDR3 for beta chain variable domain of TCR clone 289573 (TRBV4-2, TRBJ1-2)
CASSPGGSNYGYTF

SEQ ID NO: 579147 - protein, 17 aa, Homo sapiens
  CDR3 for alpha chain variable domain of TCR clone 289574 (TRAV12-3, TRAJ26)
CAMSGGRWDNYGQNFVF

SEQ ID NO: 579148 - protein, 12 aa, Homo sapiens
  CDR3 for beta chain variable domain of TCR clone 289574 (TRBV19, TRBJ1-1)
CASSTTGIEAVF

SEQ ID NO: 579149 - protein, 14 aa, Homo sapiens
  CDR3 for alpha chain variable domain of TCR clone 289575 (TRAV1-2, TRAJ8)
CAVREDTGFQNLVF

SEQ ID NO: 579150 - protein, 10 aa, Homo sapiens
  CDR3 for beta chain variable domain of TCR clone 289575 (TRBV28, TRBJ1-2)
CASSSDRAVF

SEQ ID NO: 579151 - protein, 15 aa, Homo sapiens
  CDR3 for alpha chain variable domain of TCR clone 289576 (TRAV2, TRAJ13)
CATPSYSGGYQKVTF

SEQ ID NO: 579152 - protein, 14 aa, Homo sapiens
  CDR3 for beta chain variable domain of TCR clone 289576 (TRBV11-2, TRBJ1-2)
CASSSGQAGDGYTF

SEQ ID NO: 579153 - protein, 13 aa, Homo sapiens
  CDR3 for alpha chain variable domain of TCR clone 289577 (TRAV13-1, TRAJ37)
CAARSGNTGKLIF

SEQ ID NO: 579154 - protein, 15 aa, Homo sapiens
  CDR3 for beta chain variable domain of TCR clone 289577 (TRBV4-2, TRBJ1-1)
CASSQAGTPNTEAFF

SEQ ID NO: 579155 - protein, 11 aa, Homo sapiens
  CDR3 for alpha chain variable domain of TCR clone 289578 (TRAV2, TRAJ13)
CASGGYQKVTF

SEQ ID NO: 579156 - protein, 13 aa, Homo sapiens
  CDR3 for beta chain variable domain of TCR clone 289578 (TRBV24-1, TRBJ2-3)
CATSTGGTETQYF

SEQ ID NO: 579157 - protein, 11 aa, Homo sapiens
  CDR3 for alpha chain variable domain of TCR clone 289579 (TRAV17, TRAJ9)
CATTGGFKTIF

SEQ ID NO: 579158 - protein, 14 aa, Homo sapiens
  CDR3 for beta chain variable domain of TCR clone 289579 (TRBV7-9, TRBJ2-2)
CASSGLADTAELFF

SEQ ID NO: 579159 - protein, 16 aa, Homo sapiens
  CDR3 for alpha chain variable domain of TCR clone 289580 (TRAV23/DV6, TRAJ21)
FAASSGGGTTSTNFTL

SEQ ID NO: 579160 - protein, 11 aa, Homo sapiens
  CDR3 for beta chain variable domain of TCR clone 289580 (TRBV7-8, TRBJ2-7)
CASSLSLEQYF

SEQ ID NO: 579161 - protein, 11 aa, Homo sapiens
  CDR3 for alpha chain variable domain of TCR clone 289581 (TRAV1-2, TRAJ40)
CAVPGTYKYIF

SEQ ID NO: 579162 - protein, 15 aa, Homo sapiens
  CDR3 for beta chain variable domain of TCR clone 289581 (TRBV25-1, TRBJ1-4)
CASSPGDITNEKLFF

SEQ ID NO: 579163 - protein, 14 aa, Homo sapiens
  CDR3 for alpha chain variable domain of TCR clone 289582 (TRAV12-2, TRAJ6)
FASKWGGGSYIPTF

SEQ ID NO: 579164 - protein, 13 aa, Homo sapiens
  CDR3 for beta chain variable domain of TCR clone 289582 (TRBV2, TRBJ1-1)
CASSEGGNTEALF

SEQ ID NO: 579165 - protein, 14 aa, Homo sapiens
  CDR3 for alpha chain variable domain of TCR clone 289583 (TRAV12-3, TRAJ10)
SHLPLTGGGNTLTF

SEQ ID NO: 579166 - protein, 15 aa, Homo sapiens
  CDR3 for beta chain variable domain of TCR clone 289583 (TRBV7-6, TRBJ1-5)
CASSQSSGINQPQHF

SEQ ID NO: 579167 - protein, 17 aa, Homo sapiens
  CDR3 for alpha chain variable domain of TCR clone 289584 (TRAV13-1, TRAJ52)
CAASSGAGGTSYGKLTF

SEQ ID NO: 579168 - protein, 15 aa, Homo sapiens
  CDR3 for beta chain variable domain of TCR clone 289584 (TRBV2, TRBJ2-1)
CASRGLAGSYNEQFF

SEQ ID NO: 579169 - protein, 14 aa, Homo sapiens
  CDR3 for alpha chain variable domain of TCR clone 289585 (TRAV12-3, TRAJ42)
CAMNYGGSQGNLIF

SEQ ID NO: 579170 - protein, 13 aa, Homo sapiens
  CDR3 for beta chain variable domain of TCR clone 289585 (TRBV20-1, TRBJ1-6)
CSAPLGVGSPRHF

SEQ ID NO: 579171 - protein, 10 aa, Homo sapiens
  CDR3 for alpha chain variable domain of TCR clone 289586 (TRAV1-2, TRAJ31)
CVSEDARLLF

SEQ ID NO: 579172 - protein, 15 aa, Homo sapiens
  CDR3 for beta chain variable domain of TCR clone 289586 (TRBV11-3, TRBJ2-3)
CASLKDGREGDTQYF

SEQ ID NO: 579173 - protein, 12 aa, Homo sapiens
  CDR3 for alpha chain variable domain of TCR clone 289587 (TRAV35, TRAJ49)
CAGWNTGNQFYF

SEQ ID NO: 579174 - protein, 16 aa, Homo sapiens
  CDR3 for beta chain variable domain of TCR clone 289587 (TRBV5-1, TRBJ2-2)
GASSRWDTTNTGELFF

SEQ ID NO: 579175 - protein, 18 aa, Homo sapiens
  CDR3 for alpha chain variable domain of TCR clone 289588 (TRAV21, TRAJ52)
CAVRPSPAGGTSYGKLTF

SEQ ID NO: 579176 - protein, 17 aa, Homo sapiens
  CDR3 for beta chain variable domain of TCR clone 289588 (TRBV13, TRBJ2-3)
CSSSLSRVAGGKNTQYF

SEQ ID NO: 579177 - protein, 11 aa, Homo sapiens
  CDR3 for alpha chain variable domain of TCR clone 289589 (TRAV2, TRAJ33)
CAVDSNYQLIW

SEQ ID NO: 579178 - protein, 13 aa, Homo sapiens
  CDR3 for beta chain variable domain of TCR clone 289589 (TRBV11-3, TRBJ2-7)
CASSGTRPYEQYF

SEQ ID NO: 579179 - protein, 15 aa, Homo sapiens
  CDR3 for alpha chain variable domain of TCR clone 289590 (TRAV3, TRAJ22)
CAVRDRGGSARQLTF

SEQ ID NO: 579180 - protein, 16 aa, Homo sapiens
  CDR3 for beta chain variable domain of TCR clone 289590 (TRBV4-1, TRBJ2-7)
CASSPSGGGADNEQYF

SEQ ID NO: 579181 - protein, 15 aa, Homo sapiens
  CDR3 for alpha chain variable domain of TCR clone 289591 (TRAV26-1, TRAJ29)
CIVRVEGSGNTPLVF

SEQ ID NO: 579182 - protein, 14 aa, Homo sapiens
  CDR3 for beta chain variable domain of TCR clone 289591 (TRBV19, TRBJ2-7)
CASSIFAGTYEQYF

SEQ ID NO: 579183 - protein, 11 aa, Homo sapiens
  CDR3 for alpha chain variable domain of TCR clone 289592 (TRAV21, TRAJ34)
CAVTNTDKLIF

SEQ ID NO: 579184 - protein, 13 aa, Homo sapiens
  CDR3 for beta chain variable domain of TCR clone 289592 (TRBV10-2, TRBJ2-7)
CASGASGGYEQCF

SEQ ID NO: 579185 - protein, 17 aa, Homo sapiens
  CDR3 for alpha chain variable domain of TCR clone 289593 (TRAV3, TRAJ6)
FAVRDGPRAGGSYIPTF

SEQ ID NO: 579186 - protein, 20 aa, Homo sapiens
  CDR3 for beta chain variable domain of TCR clone 289593 (TRBV28, TRBJ2-1)
RASTPIGRSPGLAGGNEQFF

SEQ ID NO: 579187 - protein, 15 aa, Homo sapiens
  CDR3 for alpha chain variable domain of TCR clone 289594 (TRAV35, TRAJ40)
CAGHPGQAGTYKYIF

SEQ ID NO: 579188 - protein, 14 aa, Homo sapiens
  CDR3 for beta chain variable domain of TCR clone 289594 (TRBV7-3, TRBJ2-1)
CASSLTGGANEQFF

SEQ ID NO: 579189 - protein, 11 aa, Homo sapiens
  CDR3 for alpha chain variable domain of TCR clone 289595 (TRAV2, TRAJ13)
CASGGYQKVTF

SEQ ID NO: 579190 - protein, 18 aa, Homo sapiens
  CDR3 for beta chain variable domain of TCR clone 289595 (TRBV6-3, TRBJ2-1)
CASSYSMATGFGYNEQFF

SEQ ID NO: 579191 - protein, 14 aa, Homo sapiens
  CDR3 for alpha chain variable domain of TCR clone 289596 (TRAV16, TRAJ15)
CALSFNQAGTALIF

SEQ ID NO: 579192 - protein, 16 aa, Homo sapiens
  CDR3 for beta chain variable domain of TCR clone 289596 (TRBV9, TRBJ2-7)
CASSEGPDRSPYEQYF

SEQ ID NO: 579193 - protein, 14 aa, Homo sapiens
  CDR3 for alpha chain variable domain of TCR clone 289597 (TRAV35, TRAJ22)
CAGLRPGSARQLTF

SEQ ID NO: 579194 - protein, 16 aa, Homo sapiens
  CDR3 for beta chain variable domain of TCR clone 289597 (TRBV7-9, TRBJ2-1)
CASSDVAGGSYNEQFF

SEQ ID NO: 579195 - protein, 15 aa, Homo sapiens
  CDR3 for alpha chain variable domain of TCR clone 289598 (TRAV2, TRAJ24)
CAVEVLTDSWGNFQF

SEQ ID NO: 579196 - protein, 14 aa, Homo sapiens
  CDR3 for beta chain variable domain of TCR clone 289598 (TRBV19, TRBJ2-1)
CASSMGSGRRSSSS

SEQ ID NO: 579197 - protein, 15 aa, Homo sapiens
  CDR3 for alpha chain variable domain of TCR clone 289599 (TRAV26-1, TRAJ42)
FIVRVKGGSQGTLLF

SEQ ID NO: 579198 - protein, 14 aa, Homo sapiens
  CDR3 for beta chain variable domain of TCR clone 289599 (TRBV19, TRBJ2-2)
CATTGHANTGELFF

SEQ ID NO: 579199 - protein, 15 aa, Homo sapiens
  CDR3 for alpha chain variable domain of TCR clone 289600 (TRAV26-1, TRAJ37)
CIVRVATGNTGKLIF

SEQ ID NO: 579200 - protein, 12 aa, Homo sapiens
  CDR3 for beta chain variable domain of TCR clone 289600 (TRBV5-4, TRBJ2-7)
CASSLEAYEQYF

SEQ ID NO: 579201 - protein, 12 aa, Homo sapiens
  CDR3 for alpha chain variable domain of TCR clone 289601 (TRAV3, TRAJ4)
CAVSGGYNKLIF

SEQ ID NO: 579202 - protein, 14 aa, Homo sapiens
  CDR3 for beta chain variable domain of TCR clone 289601 (TRBV10-3, TRBJ2-7)
CAISAPRGAYEQYF

SEQ ID NO: 579203 - protein, 14 aa, Homo sapiens
  CDR3 for alpha chain variable domain of TCR clone 289602 (TRAV12-2, TRAJ13)
CAVKKTGGYQKVTF

SEQ ID NO: 579204 - protein, 14 aa, Homo sapiens
  CDR3 for beta chain variable domain of TCR clone 289602 (TRBV7-3, TRBJ2-1)
CASSLSGSYNEQFF

SEQ ID NO: 579205 - protein, 14 aa, Homo sapiens
  CDR3 for alpha chain variable domain of TCR clone 289603 (TRAV3, TRAJ9)
CAVRLNTGGFKTIF

SEQ ID NO: 579206 - protein, 19 aa, Homo sapiens
  CDR3 for beta chain variable domain of TCR clone 289603 (TRBV19, TRBJ2-2)
CASTRPGLAGGRVTGELFF

SEQ ID NO: 579207 - protein, 16 aa, Homo sapiens
  CDR3 for alpha chain variable domain of TCR clone 289604 (TRAV26-1, TRAJ22)
CIVSLNFFWFCKATDL

SEQ ID NO: 579208 - protein, 15 aa, Homo sapiens
  CDR3 for beta chain variable domain of TCR clone 289604 (TRBV4-2, TRBJ1-2)
CASSQRTGGRDGYTF

SEQ ID NO: 579209 - protein, 18 aa, Homo sapiens
  CDR3 for alpha chain variable domain of TCR clone 289605 (TRAV21, TRAJ52)
CAVRPSPAGGTSYGNLTF

SEQ ID NO: 579210 - protein, 13 aa, Homo sapiens
  CDR3 for beta chain variable domain of TCR clone 289605 (TRBV4-1, TRBJ2-2)
CASSQENTGELFF

SEQ ID NO: 579211 - protein, 15 aa, Homo sapiens
  CDR3 for alpha chain variable domain of TCR clone 289606 (TRAV17, TRAJ6)
CAADLPSGGSYIPTF

SEQ ID NO: 579212 - protein, 16 aa, Homo sapiens
  CDR3 for beta chain variable domain of TCR clone 289606 (TRBV4-1, TRBJ2-7)
CASSQDPTGYSYEQYF

SEQ ID NO: 579213 - protein, 17 aa, Homo sapiens
  CDR3 for alpha chain variable domain of TCR clone 289607 (TRAV3, TRAJ6)
CAVRDGPRAGGSYNPTF

SEQ ID NO: 579214 - protein, 20 aa, Homo sapiens
  CDR3 for beta chain variable domain of TCR clone 289607 (TRBV28, TRBJ2-1)
CASTPIGRSPGLAGGNEQFF

SEQ ID NO: 579215 - protein, 15 aa, Homo sapiens
  CDR3 for alpha chain variable domain of TCR clone 289608 (TRAV2, TRAJ22)
CAVPSRGGSARQLTF

SEQ ID NO: 579216 - protein, 12 aa, Homo sapiens
  CDR3 for beta chain variable domain of TCR clone 289608 (TRBV29-1, TRBJ2-3)
CSVTGGADTQYF

SEQ ID NO: 579217 - protein, 16 aa, Homo sapiens
  CDR3 for alpha chain variable domain of TCR clone 289609 (TRAV8-1, TRAJ39)
CAVNVPSYNAGNMLTF

SEQ ID NO: 579218 - protein, 16 aa, Homo sapiens
  CDR3 for beta chain variable domain of TCR clone 289609 (TRBV7-3, TRBJ2-2)
CASSLTGTGTTGELFF

SEQ ID NO: 579219 - protein, 15 aa, Homo sapiens
  CDR3 for alpha chain variable domain of TCR clone 289610 (TRAV38-1, TRAJ57)
CAFMKLQGGSEKLVF

SEQ ID NO: 579220 - protein, 11 aa, Homo sapiens
  CDR3 for beta chain variable domain of TCR clone 289610 (TRBV6-3, TRBJ2-3)
CATGQADTQYF

SEQ ID NO: 579221 - protein, 14 aa, Homo sapiens
  CDR3 for alpha chain variable domain of TCR clone 289611 (TRAV1-2, TRAJ16)
CAGNRFSDGQKLLF

SEQ ID NO: 579222 - protein, 14 aa, Homo sapiens
  CDR3 for beta chain variable domain of TCR clone 289611 (TRBV7-2, TRBJ1-5)
CASSTQGAGQPQHF

SEQ ID NO: 579223 - protein, 15 aa, Homo sapiens
  CDR3 for alpha chain variable domain of TCR clone 289612 (TRAV12-3, TRAJ11)
CAMSEENSGYSTLTF

SEQ ID NO: 579224 - protein, 19 aa, Homo sapiens
  CDR3 for beta chain variable domain of TCR clone 289612 (TRBV5-5, TRBJ2-1)
CASSRGSGTGTNLRNEQFF

SEQ ID NO: 579225 - protein, 23 aa, Homo sapiens
  CDR3 for alpha chain variable domain of TCR clone 289613 (TRAV13-1, TRAJ8)
CAARAFRNLYLELAPDFWSVQIS

SEQ ID NO: 579226 - protein, 16 aa, Homo sapiens
  CDR3 for beta chain variable domain of TCR clone 289613 (TRBV19, TRBJ1-5)
CASSTRGTRSNQPQHF

SEQ ID NO: 579227 - protein, 15 aa, Homo sapiens
  CDR3 for alpha chain variable domain of TCR clone 289614 (TRAV12-3, TRAJ22)
CAMRTISGSARQLTF

SEQ ID NO: 579228 - protein, 16 aa, Homo sapiens
  CDR3 for beta chain variable domain of TCR clone 289614 (TRBV20-1, TRBJ2-2)
CSARRPGTGNTGELFS

SEQ ID NO: 579229 - protein, 14 aa, Homo sapiens
  CDR3 for alpha chain variable domain of TCR clone 289615 (TRAV1-2, TRAJ8)
CAVREYTGFQKLVF

SEQ ID NO: 579230 - protein, 12 aa, Homo sapiens
  CDR3 for beta chain variable domain of TCR clone 289615 (TRBV7-2, TRBJ2-5)
CASSQYQETQYF

SEQ ID NO: 579231 - protein, 13 aa, Homo sapiens
  CDR3 for alpha chain variable domain of TCR clone 289616 (TRAV12-3, TRAJ13)
CAMGTGGYQKVTF

SEQ ID NO: 579232 - protein, 14 aa, Homo sapiens
  CDR3 for beta chain variable domain of TCR clone 289616 (TRBV7-2, TRBJ2-5)
CASSTGGELKTHYF

SEQ ID NO: 579233 - protein, 13 aa, Homo sapiens
  CDR3 for alpha chain variable domain of TCR clone 289617 (TRAV13-2, TRAJ23)
CAERHRGKAYLRT

SEQ ID NO: 579234 - protein, 16 aa, Homo sapiens
  CDR3 for beta chain variable domain of TCR clone 289617 (TRBV20-1, TRBJ1-4)
CSAPGQGLLTNEKLFF

SEQ ID NO: 579235 - protein, 13 aa, Homo sapiens
  CDR3 for alpha chain variable domain of TCR clone 289618 (TRAV21, TRAJ37)
CAVSSGNTAKLIF

SEQ ID NO: 579236 - protein, 17 aa, Homo sapiens
  CDR3 for beta chain variable domain of TCR clone 289618 (TRBV5-1, TRBJ2-5)
CASSLLGLAANQETQYF

SEQ ID NO: 579237 - protein, 13 aa, Homo sapiens
  CDR3 for alpha chain variable domain of TCR clone 289619 (TRAV30, TRAJ6)
CGFIEGGSYIPTF

SEQ ID NO: 579238 - protein, 13 aa, Homo sapiens
  CDR3 for beta chain variable domain of TCR clone 289619 (TRBV5-4, TRBJ2-5)
CASSPVSQVTQYF

SEQ ID NO: 579239 - protein, 17 aa, Homo sapiens
  CDR3 for alpha chain variable domain of TCR clone 289620 (TRAV3, TRAJ4)
CAVRDGTGGYNKLILEQ

SEQ ID NO: 579240 - protein, 13 aa, Homo sapiens
  CDR3 for beta chain variable domain of TCR clone 289620 (TRBV12-5, TRBJ1-2)
CASGVRTGNGDTF

SEQ ID NO: 579241 - protein, 12 aa, Homo sapiens
  CDR3 for alpha chain variable domain of TCR clone 289621 (TRAV35, TRAJ12)
CAGRESSYKLIF

SEQ ID NO: 579242 - protein, 14 aa, Homo sapiens
  CDR3 for beta chain variable domain of TCR clone 289621 (TRBV28, TRBJ2-5)
CASSLYRGTETQYF

SEQ ID NO: 579243 - protein, 15 aa, Homo sapiens
  CDR3 for alpha chain variable domain of TCR clone 289622 (TRAV29/DV5, TRAJ29)
CAASERSSGNTPLVF

SEQ ID NO: 579244 - protein, 17 aa, Homo sapiens
  CDR3 for beta chain variable domain of TCR clone 289622 (TRBV4-1, TRBJ1-4)
CASSQEGPRGVEEELFF

SEQ ID NO: 579245 - protein, 12 aa, Homo sapiens
  CDR3 for alpha chain variable domain of TCR clone 289623 (TRAV36/DV7, TRAJ40)
CAVAGGTYKYIF

SEQ ID NO: 579246 - protein, 18 aa, Homo sapiens
  CDR3 for beta chain variable domain of TCR clone 289623 (TRBV27, TRBJ2-3)
CDSSKGTSGRTSTDTQYF

SEQ ID NO: 579247 - protein, 14 aa, Homo sapiens
  CDR3 for alpha chain variable domain of TCR clone 289624 (TRAV26-2, TRAJ11)
CIPRLNSGYSTLTF

SEQ ID NO: 579248 - protein, 12 aa, Homo sapiens
  CDR3 for beta chain variable domain of TCR clone 289624 (TRBV5-5, TRBJ2-5)
CASSYFGETQYF

SEQ ID NO: 579249 - protein, 15 aa, Homo sapiens
  CDR3 for alpha chain variable domain of TCR clone 289625 (TRAV3, TRAJ4)
CAVRDGTGGYNKLIF

SEQ ID NO: 579250 - protein, 16 aa, Homo sapiens
  CDR3 for beta chain variable domain of TCR clone 289625 (TRBV27, TRBJ2-2)
CASSSSGVSNSGELFF

SEQ ID NO: 579251 - protein, 14 aa, Homo sapiens
  CDR3 for alpha chain variable domain of TCR clone 289626 (TRAV3, TRAJ36)
CAVRDGTGANNLFF

SEQ ID NO: 579252 - protein, 13 aa, Homo sapiens
  CDR3 for beta chain variable domain of TCR clone 289626 (TRBV7-9, TRBJ1-2)
CASSLKQNYGYTF

SEQ ID NO: 579253 - protein, 11 aa, Homo sapiens
  CDR3 for alpha chain variable domain of TCR clone 289627 (TRAV21, TRAJ39)
LLVNAGNMLTF

SEQ ID NO: 579254 - protein, 15 aa, Homo sapiens
  CDR3 for beta chain variable domain of TCR clone 289627 (TRBV29-1, TRBJ2-1)
CSGRDSKSSYNEQFF

SEQ ID NO: 579255 - protein, 16 aa, Homo sapiens
  CDR3 for alpha chain variable domain of TCR clone 289628 (TRAV3, TRAJ10)
CAVRDMRAGGGNKLTF

SEQ ID NO: 579256 - protein, 14 aa, Homo sapiens
  CDR3 for beta chain variable domain of TCR clone 289628 (TRBV28, TRBJ2-1)
CASSLVAPYNEQFF

SEQ ID NO: 579257 - protein, 11 aa, Homo sapiens
  CDR3 for alpha chain variable domain of TCR clone 289629 (TRAV23/DV6, TRAJ58)
CAAILLRGETS

SEQ ID NO: 579258 - protein, 14 aa, Homo sapiens
  CDR3 for beta chain variable domain of TCR clone 289629 (TRBV7-3, TRBJ2-1)
CASSLAGGTNEQFF

SEQ ID NO: 579259 - protein, 13 aa, Homo sapiens
  CDR3 for alpha chain variable domain of TCR clone 289630 (TRAV21, TRAJ27)
CAARPGNAGKSTF

SEQ ID NO: 579260 - protein, 13 aa, Homo sapiens
  CDR3 for beta chain variable domain of TCR clone 289630 (TRBV7-6, TRBJ2-1)
CQQLVGGADEQFF

SEQ ID NO: 579261 - protein, 12 aa, Homo sapiens
  CDR3 for alpha chain variable domain of TCR clone 289631 (TRAV12-1, TRAJ40)
CVVYSGTYTYIF

SEQ ID NO: 579262 - protein, 18 aa, Homo sapiens
  CDR3 for beta chain variable domain of TCR clone 289631 (TRBV11-2, TRBJ2-3)
GASSLGGASRGAPNTQYF

SEQ ID NO: 579263 - protein, 17 aa, Homo sapiens
  CDR3 for alpha chain variable domain of TCR clone 289632 (TRAV3, TRAJ28)
CAVRPLYSGAGSYQLTF

SEQ ID NO: 579264 - protein, 14 aa, Homo sapiens
  CDR3 for beta chain variable domain of TCR clone 289632 (TRBV7-3, TRBJ1-1)
CASSLKGGNTEAFF

SEQ ID NO: 579265 - protein, 15 aa, Homo sapiens
  CDR3 for alpha chain variable domain of TCR clone 289633 (TRAV13-1, TRAJ42)
CAASIDGGSQGNLIF

SEQ ID NO: 579266 - protein, 15 aa, Homo sapiens
  CDR3 for beta chain variable domain of TCR clone 289633 (TRBV19, TRBJ2-1)
CASSIVRGEGREQFF

SEQ ID NO: 579267 - protein, 12 aa, Homo sapiens
  CDR3 for alpha chain variable domain of TCR clone 289634 (TRAV12-3, TRAJ20)
CAMVRGDYKLSF

SEQ ID NO: 579268 - protein, 15 aa, Homo sapiens
  CDR3 for beta chain variable domain of TCR clone 289634 (TRBV5-1, TRBJ2-5)
CAGSFKGGDQETQYF

SEQ ID NO: 579269 - protein, 17 aa, Homo sapiens
  CDR3 for alpha chain variable domain of TCR clone 289635 (TRAV3, TRAJ12)
CAVRDGGRMDSSYKLIF

SEQ ID NO: 579270 - protein, 17 aa, Homo sapiens
  CDR3 for beta chain variable domain of TCR clone 289635 (TRBV5-1, TRBJ1-6)
CASSFGEVSSYNSPLHF

SEQ ID NO: 579271 - protein, 11 aa, Homo sapiens
  CDR3 for alpha chain variable domain of TCR clone 289636 (TRAV27, TRAJ45)
CAGAPEEVLTD

SEQ ID NO: 579272 - protein, 13 aa, Homo sapiens
  CDR3 for beta chain variable domain of TCR clone 289636 (TRBV7-7, TRBJ2-5)
CASSRSGQETQYF

SEQ ID NO: 579273 - protein, 13 aa, Homo sapiens
  CDR3 for alpha chain variable domain of TCR clone 289637 (TRAV35, TRAJ36)
CARPRIGAHNLFF

SEQ ID NO: 579274 - protein, 15 aa, Homo sapiens
  CDR3 for beta chain variable domain of TCR clone 289637 (TRBV28, TRBJ2-5)
CASSPPWSYQETQYF

SEQ ID NO: 579275 - protein, 13 aa, Homo sapiens
  CDR3 for alpha chain variable domain of TCR clone 289638 (TRAV8-3, TRAJ40)
CAVGAQYLRNLQI

SEQ ID NO: 579276 - protein, 14 aa, Homo sapiens
  CDR3 for beta chain variable domain of TCR clone 289638 (TRBV4-1, TRBJ2-2)
CASSQAVNTGELFF

SEQ ID NO: 579277 - protein, 12 aa, Homo sapiens
  CDR3 for alpha chain variable domain of TCR clone 289639 (TRAV12-3, TRAJ29)
CAAREGNTPLVF

SEQ ID NO: 579278 - protein, 14 aa, Homo sapiens
  CDR3 for beta chain variable domain of TCR clone 289639 (TRBV5-7, TRBJ1-1)
CASSLAGDWTEAFF

SEQ ID NO: 579279 - protein, 13 aa, Homo sapiens
  CDR3 for alpha chain variable domain of TCR clone 289640 (TRAV8-3, TRAJ44)
CAVVPGTASKLTF

SEQ ID NO: 579280 - protein, 17 aa, Homo sapiens
  CDR3 for beta chain variable domain of TCR clone 289640 (TRBV15, TRBJ1-4)
CATSRYGTGDPNEKLFF

SEQ ID NO: 579281 - protein, 14 aa, Homo sapiens
  CDR3 for alpha chain variable domain of TCR clone 289641 (TRAV12-3, TRAJ9)
CAMSPNTGGFKTIF

SEQ ID NO: 579282 - protein, 17 aa, Homo sapiens
  CDR3 for beta chain variable domain of TCR clone 289641 (TRBV5-1, TRBJ2-5)
CASSLLGLAANQETQYF

SEQ ID NO: 579283 - protein, 16 aa, Homo sapiens
  CDR3 for alpha chain variable domain of TCR clone 289642 (TRAV22, TRAJ45)
CAVERGQRGGADGLTF

SEQ ID NO: 579284 - protein, 13 aa, Homo sapiens
  CDR3 for beta chain variable domain of TCR clone 289642 (TRBV27, TRBJ1-1)
CASSLSIGAEAFF

SEQ ID NO: 579285 - protein, 16 aa, Homo sapiens
  CDR3 for alpha chain variable domain of TCR clone 289643 (TRAV12-2, TRAJ32)
CAVNMNNGGATNKLIF

SEQ ID NO: 579286 - protein, 16 aa, Homo sapiens
  CDR3 for beta chain variable domain of TCR clone 289643 (TRBV7-8, TRBJ2-3)
CASSTEGQRETDTQYF

SEQ ID NO: 579287 - protein, 13 aa, Homo sapiens
  CDR3 for alpha chain variable domain of TCR clone 289644 (TRAV35, TRAJ21)
CAGQLSNFNKFYF

SEQ ID NO: 579288 - protein, 11 aa, Homo sapiens
  CDR3 for beta chain variable domain of TCR clone 289644 (TRBV7-6, TRBJ2-5)
CSSSSQETQYF

SEQ ID NO: 579289 - protein, 14 aa, Homo sapiens
  CDR3 for alpha chain variable domain of TCR clone 289645 (TRAV13-1, TRAJ35)
CAVRKGGFGNVLHC

SEQ ID NO: 579290 - protein, 15 aa, Homo sapiens
  CDR3 for beta chain variable domain of TCR clone 289645 (TRBV7-2, TRBJ2-1)
CASSLVGSSYNEQFF

SEQ ID NO: 579291 - protein, 11 aa, Homo sapiens
  CDR3 for alpha chain variable domain of TCR clone 289646 (TRAV8-3, TRAJ15)
CAVGPGTALSV

SEQ ID NO: 579292 - protein, 18 aa, Homo sapiens
  CDR3 for beta chain variable domain of TCR clone 289646 (TRBV18, TRBJ2-3)
CASSYTSGAAGGTDTQYF

SEQ ID NO: 579293 - protein, 13 aa, Homo sapiens
  CDR3 for alpha chain variable domain of TCR clone 289647 (TRAV21, TRAJ27)
CAASPGNAGNSTF

SEQ ID NO: 579294 - protein, 14 aa, Homo sapiens
  CDR3 for beta chain variable domain of TCR clone 289647 (TRBV7-6, TRBJ2-3)
CASSLGTVTDTQYF

SEQ ID NO: 579295 - protein, 16 aa, Homo sapiens
  CDR3 for alpha chain variable domain of TCR clone 289648 (TRAV27, TRAJ13)
CAGAKSDSGGYQKVTF

SEQ ID NO: 579296 - protein, 16 aa, Homo sapiens
  CDR3 for beta chain variable domain of TCR clone 289648 (TRBV7-3, TRBJ2-5)
CASIQPGGSVQETQYF

SEQ ID NO: 579297 - protein, 14 aa, Homo sapiens
  CDR3 for alpha chain variable domain of TCR clone 289649 (TRAV38-1, TRAJ38)
CAFMKHEVDRKLIW

SEQ ID NO: 579298 - protein, 14 aa, Homo sapiens
  CDR3 for beta chain variable domain of TCR clone 289649 (TRBV7-2, TRBJ2-7)
CASSPKTSFYEQYF

SEQ ID NO: 579299 - protein, 13 aa, Homo sapiens
  CDR3 for alpha chain variable domain of TCR clone 289650 (TRAV8-3, TRAJ44)
CAVVPGTASKLTF

SEQ ID NO: 579300 - protein, 16 aa, Homo sapiens
  CDR3 for beta chain variable domain of TCR clone 289650 (TRBV11-2, TRBJ1-5)
CASSPWGPEGNQPQHF

SEQ ID NO: 579301 - protein, 14 aa, Homo sapiens
  CDR3 for alpha chain variable domain of TCR clone 289651 (TRAV12-1, TRAJ17)
CVVNYKAAGNKLTF

SEQ ID NO: 579302 - protein, 13 aa, Homo sapiens
  CDR3 for beta chain variable domain of TCR clone 289651 (TRBV6-1, TRBJ1-1)
CASSRQGNTEAFF

SEQ ID NO: 579303 - protein, 14 aa, Homo sapiens
  CDR3 for alpha chain variable domain of TCR clone 289652 (TRAV34, TRAJ22)
CGADTSGSARQLPF

SEQ ID NO: 579304 - protein, 14 aa, Homo sapiens
  CDR3 for beta chain variable domain of TCR clone 289652 (TRBV6-1, TRBJ1-2)
CTSSDTGASYGYTF

SEQ ID NO: 579305 - protein, 12 aa, Homo sapiens
  CDR3 for alpha chain variable domain of TCR clone 289653 (TRAV26-1, TRAJ54)
CIGGWGAQKLVF

SEQ ID NO: 579306 - protein, 15 aa, Homo sapiens
  CDR3 for beta chain variable domain of TCR clone 289653 (TRBV7-9, TRBJ1-6)
CASSSPGRGNSPLHF

SEQ ID NO: 579307 - protein, 17 aa, Homo sapiens
  CDR3 for alpha chain variable domain of TCR clone 289654 (TRAV3, TRAJ6)
CAVRDGPRAGGSYIPTF

SEQ ID NO: 579308 - protein, 20 aa, Homo sapiens
  CDR3 for beta chain variable domain of TCR clone 289654 (TRBV28, TRBJ2-1)
CASTPIGQSPGLAGGKEQFF

SEQ ID NO: 579309 - protein, 14 aa, Homo sapiens
  CDR3 for alpha chain variable domain of TCR clone 289655 (TRAV26-1, TRAJ49)
CIVRPSNPGNQLYF

SEQ ID NO: 579310 - protein, 15 aa, Homo sapiens
  CDR3 for beta chain variable domain of TCR clone 289655 (TRBV19, TRBJ1-1)
CASMGFRDVNTEAFF

SEQ ID NO: 579311 - protein, 15 aa, Homo sapiens
  CDR3 for alpha chain variable domain of TCR clone 289656 (TRAV17, TRAJ20)
CATDGGGSNDYKLSF

SEQ ID NO: 579312 - protein, 13 aa, Homo sapiens
  CDR3 for beta chain variable domain of TCR clone 289656 (TRBV24-1, TRBJ2-2)
CATSDWSTGELFF

SEQ ID NO: 579313 - protein, 10 aa, Homo sapiens
  CDR3 for alpha chain variable domain of TCR clone 289657 (TRAV23/DV6, TRAJ57)
CAASSTLSQG

SEQ ID NO: 579314 - protein, 14 aa, Homo sapiens
  CDR3 for beta chain variable domain of TCR clone 289657 (TRBV25-1, TRBJ1-1)
CDSTHLRGNTEAFF

SEQ ID NO: 579315 - protein, 15 aa, Homo sapiens
  CDR3 for alpha chain variable domain of TCR clone 289658 (TRAV41, TRAJ45)
CAAAYSGGGADGLTF

SEQ ID NO: 579316 - protein, 14 aa, Homo sapiens
  CDR3 for beta chain variable domain of TCR clone 289658 (TRBV12-5, TRBJ2-5)
CASGSRTHQETQYF

SEQ ID NO: 579317 - protein, 13 aa, Homo sapiens
  CDR3 for alpha chain variable domain of TCR clone 289659 (TRAV12-3, TRAJ13)
CAMGTGGYQKVTF

SEQ ID NO: 579318 - protein, 17 aa, Homo sapiens
  CDR3 for beta chain variable domain of TCR clone 289659 (TRBV28, TRBJ2-1)
CASSSARQALTYNEQFF

SEQ ID NO: 579319 - protein, 16 aa, Homo sapiens
  CDR3 for alpha chain variable domain of TCR clone 289660 (TRAV26-1, TRAJ31)
CIVRPPVLNNNARLMF

SEQ ID NO: 579320 - protein, 14 aa, Homo sapiens
  CDR3 for beta chain variable domain of TCR clone 289660 (TRBV7-8, TRBJ2-3)
CASSLEAGTDTQYF

SEQ ID NO: 579321 - protein, 15 aa, Homo sapiens
  CDR3 for alpha chain variable domain of TCR clone 289661 (TRAV13-2, TRAJ4)
CADPQERGGYNKLIF

SEQ ID NO: 579322 - protein, 14 aa, Homo sapiens
  CDR3 for beta chain variable domain of TCR clone 289661 (TRBV19, TRBJ2-3)
CASSAPRGTDTQYF

SEQ ID NO: 579323 - protein, 13 aa, Homo sapiens
  CDR3 for alpha chain variable domain of TCR clone 289662 (TRAV20, TRAJ42)
CAVQGGSQGNLIF

SEQ ID NO: 579324 - protein, 16 aa, Homo sapiens
  CDR3 for beta chain variable domain of TCR clone 289662 (TRBV7-2, TRBJ2-5)
CASSPFPTGGEETQYF

SEQ ID NO: 579325 - protein, 11 aa, Homo sapiens
  CDR3 for alpha chain variable domain of TCR clone 289663 (TRAV17, TRAJ31)
CATSNNARLMF

SEQ ID NO: 579326 - protein, 12 aa, Homo sapiens
  CDR3 for beta chain variable domain of TCR clone 289663 (TRBV20-1, TRBJ2-1)
CSAYRGAGEQFF

SEQ ID NO: 579327 - protein, 13 aa, Homo sapiens
  CDR3 for alpha chain variable domain of TCR clone 289664 (TRAV36/DV7, TRAJ37)
CAVFSSNTGKLIF

SEQ ID NO: 579328 - protein, 18 aa, Homo sapiens
  CDR3 for beta chain variable domain of TCR clone 289664 (TRBV11-2, TRBJ2-3)
CASSFGGASRGAPNTQYF

SEQ ID NO: 579329 - protein, 14 aa, Homo sapiens
  CDR3 for alpha chain variable domain of TCR clone 289665 (TRAV12-2, TRAJ40)
CAVKIPSGTYKYIF

SEQ ID NO: 579330 - protein, 17 aa, Homo sapiens
  CDR3 for beta chain variable domain of TCR clone 289665 (TRBV20-1, TRBJ2-1)
GSAFSGTSGSLYNEQFF

SEQ ID NO: 579331 - protein, 11 aa, Homo sapiens
  CDR3 for alpha chain variable domain of TCR clone 289666 (TRAV21, TRAJ34)
CAVTNTDKLIF

SEQ ID NO: 579332 - protein, 12 aa, Homo sapiens
  CDR3 for beta chain variable domain of TCR clone 289666 (TRBV13, TRBJ2-1)
CASSLGAQEQFF

SEQ ID NO: 579333 - protein, 16 aa, Homo sapiens
  CDR3 for alpha chain variable domain of TCR clone 289667 (TRAV25, TRAJ24)
CAQRRGTTYSWGKLQF

SEQ ID NO: 579334 - protein, 14 aa, Homo sapiens
  CDR3 for beta chain variable domain of TCR clone 289667 (TRBV6-6, TRBJ1-5)
CASSYGPANQPQHF

SEQ ID NO: 579335 - protein, 13 aa, Homo sapiens
  CDR3 for alpha chain variable domain of TCR clone 289668 (TRAV8-2, TRAJ8)
CVVSDLSFQKLVF

SEQ ID NO: 579336 - protein, 17 aa, Homo sapiens
  CDR3 for beta chain variable domain of TCR clone 289668 (TRBV11-2, TRBJ2-1)
CASSLYPPGVEYNEQFF

SEQ ID NO: 579337 - protein, 14 aa, Homo sapiens
  CDR3 for alpha chain variable domain of TCR clone 289669 (TRAV12-2, TRAJ13)
CAVKKTGGYQKVTF

SEQ ID NO: 579338 - protein, 15 aa, Homo sapiens
  CDR3 for beta chain variable domain of TCR clone 289669 (TRBV7-8, TRBJ2-7)
CASSLERAGSYEQYF

SEQ ID NO: 579339 - protein, 12 aa, Homo sapiens
  CDR3 for alpha chain variable domain of TCR clone 289670 (TRAV8-3, TRAJ43)
CAVGAGNNDMRF

SEQ ID NO: 579340 - protein, 14 aa, Homo sapiens
  CDR3 for beta chain variable domain of TCR clone 289670 (TRBV4-2, TRBJ1-5)
CSSSRDRGNQPQHF

SEQ ID NO: 579341 - protein, 11 aa, Homo sapiens
  CDR3 for alpha chain variable domain of TCR clone 289671 (TRAV1-1, TRAJ20)
CAVFNDYKLSF

SEQ ID NO: 579342 - protein, 17 aa, Homo sapiens
  CDR3 for beta chain variable domain of TCR clone 289671 (TRBV7-8, TRBJ1-2)
CASSLRPLQGHLYGYTF

SEQ ID NO: 579343 - protein, 13 aa, Homo sapiens
  CDR3 for alpha chain variable domain of TCR clone 289672 (TRAV8-1, TRAJ15)
CAVKNQAGTALIF

SEQ ID NO: 579344 - protein, 15 aa, Homo sapiens
  CDR3 for beta chain variable domain of TCR clone 289672 (TRBV7-3, TRBJ2-7)
CASSLTPTGYYEQYF

SEQ ID NO: 579345 - protein, 12 aa, Homo sapiens
  CDR3 for alpha chain variable domain of TCR clone 289673 (TRAV12-3, TRAJ17)
CAMTLTGNKLTF

SEQ ID NO: 579346 - protein, 12 aa, Homo sapiens
  CDR3 for beta chain variable domain of TCR clone 289673 (TRBV20-1, TRBJ2-1)
CSARLGTDEQFF

SEQ ID NO: 579347 - protein, 14 aa, Homo sapiens
  CDR3 for alpha chain variable domain of TCR clone 289674 (TRAV3, TRAJ7)
CAVREEEREQQTRF

SEQ ID NO: 579348 - protein, 15 aa, Homo sapiens
  CDR3 for beta chain variable domain of TCR clone 289674 (TRBV9, TRBJ2-1)
CASSLAGSSYNEQFF

SEQ ID NO: 579349 - protein, 17 aa, Homo sapiens
  CDR3 for alpha chain variable domain of TCR clone 289675 (TRAV26-2, TRAJ42)
CILRDVGYGGSQGNLIF

SEQ ID NO: 579350 - protein, 14 aa, Homo sapiens
  CDR3 for beta chain variable domain of TCR clone 289675 (TRBV7-8, TRBJ2-7)
CASTFRGGPNEQYF

SEQ ID NO: 579351 - protein, 20 aa, Homo sapiens
  CDR3 for alpha chain variable domain of TCR clone 289676 (TRAV1-1, TRAJ4)
CLLLLRCEGFLSGGYNKLIF

SEQ ID NO: 579352 - protein, 16 aa, Homo sapiens
  CDR3 for beta chain variable domain of TCR clone 289676 (TRBV28, TRBJ1-4)
CASSPPYRGRSEKPFF

SEQ ID NO: 579353 - protein, 15 aa, Homo sapiens
  CDR3 for alpha chain variable domain of TCR clone 289677 (TRAV12-1, TRAJ45)
CVVLSGGGGADGLTF

SEQ ID NO: 579354 - protein, 14 aa, Homo sapiens
  CDR3 for beta chain variable domain of TCR clone 289677 (TRBV11-2, TRBJ2-5)
CASSRTRGIETQYF

SEQ ID NO: 579355 - protein, 12 aa, Homo sapiens
  CDR3 for alpha chain variable domain of TCR clone 289678 (TRAV21, TRAJ31)
CAVSPARGRLMF

SEQ ID NO: 579356 - protein, 14 aa, Homo sapiens
  CDR3 for beta chain variable domain of TCR clone 289678 (TRBV28, TRBJ2-7)
CASSVLRISYEQYF

SEQ ID NO: 579357 - protein, 23 aa, Homo sapiens
  CDR3 for alpha chain variable domain of TCR clone 289679 (TRAV26-1, TRAJ38)
CIADNAGNNHIQNPDPAVYQLRD

SEQ ID NO: 579358 - protein, 14 aa, Homo sapiens
  CDR3 for beta chain variable domain of TCR clone 289679 (TRBV28, TRBJ2-7)
CASSLRARGNEQYF

SEQ ID NO: 579359 - protein, 15 aa, Homo sapiens
  CDR3 for alpha chain variable domain of TCR clone 289680 (TRAV27, TRAJ38)
CAGRFNAGNNHKLIW

SEQ ID NO: 579360 - protein, 13 aa, Homo sapiens
  CDR3 for beta chain variable domain of TCR clone 289680 (TRBV12-5, TRBJ2-3)
CASQNRGTDTQYF

SEQ ID NO: 579361 - protein, 14 aa, Homo sapiens
  CDR3 for alpha chain variable domain of TCR clone 289681 (TRAV29/DV5, TRAJ44)
CATFLVGTASKLTF

SEQ ID NO: 579362 - protein, 15 aa, Homo sapiens
  CDR3 for beta chain variable domain of TCR clone 289681 (TRBV7-3, TRBJ2-2)
CASSETGQGTGELFF

SEQ ID NO: 579363 - protein, 16 aa, Homo sapiens
  CDR3 for alpha chain variable domain of TCR clone 289682 (TRAV26-1, TRAJ45)
CIVEKYSGGGADGLTF

SEQ ID NO: 579364 - protein, 15 aa, Homo sapiens
  CDR3 for beta chain variable domain of TCR clone 289682 (TRBV15, TRBJ2-7)
CHQHRPIQQAYEQYF

SEQ ID NO: 579365 - protein, 13 aa, Homo sapiens
  CDR3 for alpha chain variable domain of TCR clone 289683 (TRAV8-4, TRAJ10)
CAAFRGGGNKLTF

SEQ ID NO: 579366 - protein, 15 aa, Homo sapiens
  CDR3 for beta chain variable domain of TCR clone 289683 (TRBV2, TRBJ2-3)
CASSDFEKATDTQYF

SEQ ID NO: 579367 - protein, 11 aa, Homo sapiens
  CDR3 for alpha chain variable domain of TCR clone 289684 (TRAV21, TRAJ39)
LLVNAGNMLTL

SEQ ID NO: 579368 - protein, 16 aa, Homo sapiens
  CDR3 for beta chain variable domain of TCR clone 289684 (TRBV9, TRBJ2-7)
CASSVGLGGGTYEQYF

SEQ ID NO: 579369 - protein, 15 aa, Homo sapiens
  CDR3 for alpha chain variable domain of TCR clone 289685 (TRAV26-2, TRAJ26)
CILRDFDNYGQNFVF

SEQ ID NO: 579370 - protein, 17 aa, Homo sapiens
  CDR3 for beta chain variable domain of TCR clone 289685 (TRBV3-1, TRBJ2-7)
CASSQDLTGLSSYEQYF

SEQ ID NO: 579371 - protein, 15 aa, Homo sapiens
  CDR3 for alpha chain variable domain of TCR clone 289686 (TRAV26-2, TRAJ54)
CILRDVGQGAQKLVF

SEQ ID NO: 579372 - protein, 15 aa, Homo sapiens
  CDR3 for beta chain variable domain of TCR clone 289686 (TRBV10-1, TRBJ2-3)
CASSATSGGFDTQYF

SEQ ID NO: 579373 - protein, 17 aa, Homo sapiens
  CDR3 for alpha chain variable domain of TCR clone 289687 (TRAV26-1, TRAJ53)
CFVRVDDRGGSNYKLTF

SEQ ID NO: 579374 - protein, 15 aa, Homo sapiens
  CDR3 for beta chain variable domain of TCR clone 289687 (TRBV20-1, TRBJ2-7)
CSARVPAAYFYEQYF

SEQ ID NO: 579375 - protein, 14 aa, Homo sapiens
  CDR3 for alpha chain variable domain of TCR clone 289688 (TRAV3, TRAJ9)
CAVRLNTGAFKTIF

SEQ ID NO: 579376 - protein, 15 aa, Homo sapiens
  CDR3 for beta chain variable domain of TCR clone 289688 (TRBV7-2, TRBJ2-1)
CASSLASGRVNEQFF

SEQ ID NO: 579377 - protein, 14 aa, Homo sapiens
  CDR3 for alpha chain variable domain of TCR clone 289689 (TRAV8-6, TRAJ5)
CAVSVDTGRSALTF

SEQ ID NO: 579378 - protein, 14 aa, Homo sapiens
  CDR3 for beta chain variable domain of TCR clone 289689 (TRBV6-1, TRBJ1-3)
CASVQGGGGNTIYF

SEQ ID NO: 579379 - protein, 12 aa, Homo sapiens
  CDR3 for alpha chain variable domain of TCR clone 289690 (TRAV8-3, TRAJ26)
YAGDNYGQNFVF

SEQ ID NO: 579380 - protein, 13 aa, Homo sapiens
  CDR3 for beta chain variable domain of TCR clone 289690 (TRBV20-1, TRBJ2-5)
CSARGDYQETQYF

SEQ ID NO: 579381 - protein, 12 aa, Homo sapiens
  CDR3 for alpha chain variable domain of TCR clone 289691 (TRAV13-2, TRAJ54)
CGAHEGAQKLVF

SEQ ID NO: 579382 - protein, 16 aa, Homo sapiens
  CDR3 for beta chain variable domain of TCR clone 289691 (TRBV12-5, TRBJ2-5)
CASGPRTSGDQETQYF

SEQ ID NO: 579383 - protein, 11 aa, Homo sapiens
  CDR3 for alpha chain variable domain of TCR clone 289692 (TRAV2, TRAJ20)
CAVLNDYKLSF

SEQ ID NO: 579384 - protein, 15 aa, Homo sapiens
  CDR3 for beta chain variable domain of TCR clone 289692 (TRBV7-8, TRBJ1-1)
CASSLGSGFDTEAFF

SEQ ID NO: 579385 - protein, 10 aa, Homo sapiens
  CDR3 for alpha chain variable domain of TCR clone 289693 (TRAV12-2, TRAJ22)
CAVNETPLTF

SEQ ID NO: 579386 - protein, 13 aa, Homo sapiens
  CDR3 for beta chain variable domain of TCR clone 289693 (TRBV6-5, TRBJ2-6)
CASSTSGPLRLYF

SEQ ID NO: 579387 - protein, 23 aa, Homo sapiens
  CDR3 for alpha chain variable domain of TCR clone 289694 (TRAV30, TRAJ43)
CALRPPSSVTQEPTSAALSDMRF

SEQ ID NO: 579388 - protein, 13 aa, Homo sapiens
  CDR3 for beta chain variable domain of TCR clone 289694 (TRBV12-4, TRBJ2-2)
CASSITGSGELFF

SEQ ID NO: 579389 - protein, 15 aa, Homo sapiens
  CDR3 for alpha chain variable domain of TCR clone 289695 (TRAV8-3, TRAJ7)
CAVGSISYGKTDSLL

SEQ ID NO: 579390 - protein, 15 aa, Homo sapiens
  CDR3 for beta chain variable domain of TCR clone 289695 (TRBV4-2, TRBJ1-1)
CASSQEDLPRTEAFF

SEQ ID NO: 579391 - protein, 14 aa, Homo sapiens
  CDR3 for alpha chain variable domain of TCR clone 289696 (TRAV34, TRAJ44)
CGADGTGTASKLTF

SEQ ID NO: 579392 - protein, 14 aa, Homo sapiens
  CDR3 for beta chain variable domain of TCR clone 289696 (TRBV7-9, TRBJ2-5)
CASSLDTAQETQYF

SEQ ID NO: 579393 - protein, 15 aa, Homo sapiens
  CDR3 for alpha chain variable domain of TCR clone 289697 (TRAV12-3, TRAJ49)
CAMAVTPNTGNQFYF

SEQ ID NO: 579394 - protein, 17 aa, Homo sapiens
  CDR3 for beta chain variable domain of TCR clone 289697 (TRBV19, TRBJ2-6)
CASSTGQVFSGANVLTF

SEQ ID NO: 579395 - protein, 18 aa, Homo sapiens
  CDR3 for alpha chain variable domain of TCR clone 289698 (TRAV8-3, TRAJ6)
CAVCAEHQEEATYLHLEE

SEQ ID NO: 579396 - protein, 14 aa, Homo sapiens
  CDR3 for beta chain variable domain of TCR clone 289698 (TRBV6-6, TRBJ2-7)
CASSDSGAGYEQYF

SEQ ID NO: 579397 - protein, 13 aa, Homo sapiens
  CDR3 for alpha chain variable domain of TCR clone 289699 (TRAV36/DV7, TRAJ54)
CSVLIQGAQKLVF

SEQ ID NO: 579398 - protein, 13 aa, Homo sapiens
  CDR3 for beta chain variable domain of TCR clone 289699 (TRBV29-1, TRBJ2-4)
CSVGEGTKNIQYF

SEQ ID NO: 579399 - protein, 13 aa, Homo sapiens
  CDR3 for alpha chain variable domain of TCR clone 289700 (TRAV21, TRAJ27)
CAALPGNAGKSTS

SEQ ID NO: 579400 - protein, 14 aa, Homo sapiens
  CDR3 for beta chain variable domain of TCR clone 289700 (TRBV7-6, TRBJ2-3)
CASSLGTVTDTQYF

SEQ ID NO: 579401 - protein, 14 aa, Homo sapiens
  CDR3 for alpha chain variable domain of TCR clone 289701 (TRAV12-3, TRAJ10)
SHLPLTGGGNKLTF

SEQ ID NO: 579402 - protein, 18 aa, Homo sapiens
  CDR3 for beta chain variable domain of TCR clone 289701 (TRBV5-4, TRBJ2-2)
CASSSGTSGSFSTWELFF

SEQ ID NO: 579403 - protein, 15 aa, Homo sapiens
  CDR3 for alpha chain variable domain of TCR clone 289702 (TRAV26-1, TRAJ29)
CIVRVEGAGNTPLVC

SEQ ID NO: 579404 - protein, 15 aa, Homo sapiens
  CDR3 for beta chain variable domain of TCR clone 289702 (TRBV7-9, TRBJ1-5)
CASSQGHQPNQPQHF

SEQ ID NO: 579405 - protein, 13 aa, Homo sapiens
  CDR3 for alpha chain variable domain of TCR clone 289703 (TRAV12-2, TRAJ28)
CAPHGAGSYQLTF

SEQ ID NO: 579406 - protein, 15 aa, Homo sapiens
  CDR3 for beta chain variable domain of TCR clone 289703 (TRBV7-3, TRBJ2-1)
CASILDGNSYNEQFF

SEQ ID NO: 579407 - protein, 14 aa, Homo sapiens
  CDR3 for alpha chain variable domain of TCR clone 289704 (TRAV38-1, TRAJ45)
CAYYSGGGADGLTF

SEQ ID NO: 579408 - protein, 19 aa, Homo sapiens
  CDR3 for beta chain variable domain of TCR clone 289704 (TRBV19, TRBJ2-5)
CASSIGQVTDFFLGETQYF

SEQ ID NO: 579409 - protein, 16 aa, Homo sapiens
  CDR3 for alpha chain variable domain of TCR clone 289705 (TRAV8-6, TRAJ42)
CAVSEGYGGSQGNLIF

SEQ ID NO: 579410 - protein, 16 aa, Homo sapiens
  CDR3 for beta chain variable domain of TCR clone 289705 (TRBV13, TRBJ2-2)
FASSPRAGEHTGELFF

SEQ ID NO: 579411 - protein, 14 aa, Homo sapiens
  CDR3 for alpha chain variable domain of TCR clone 289706 (TRAV8-1, TRAJ5)
CAVYMDTGRRALTF

SEQ ID NO: 579412 - protein, 15 aa, Homo sapiens
  CDR3 for beta chain variable domain of TCR clone 289706 (TRBV19, TRBJ2-4)
CASRGPRRGENIQYF

SEQ ID NO: 579413 - protein, 11 aa, Homo sapiens
  CDR3 for alpha chain variable domain of TCR clone 289707 (TRAV2, TRAJ13)
CASVCYQKVTF

SEQ ID NO: 579414 - protein, 16 aa, Homo sapiens
  CDR3 for beta chain variable domain of TCR clone 289707 (TRBV6-1, TRBJ2-5)
CASSETLDRGAETQYF

SEQ ID NO: 579415 - protein, 14 aa, Homo sapiens
  CDR3 for alpha chain variable domain of TCR clone 289708 (TRAV1-2, TRAJ16)
CAVNRFSDGQKLLF

SEQ ID NO: 579416 - protein, 12 aa, Homo sapiens
  CDR3 for beta chain variable domain of TCR clone 289708 (TRBV14, TRBJ1-1)
CASSQHKGLAFF

SEQ ID NO: 579417 - protein, 12 aa, Homo sapiens
  CDR3 for alpha chain variable domain of TCR clone 289709 (TRAV2, TRAJ31)
CAVEDNNARLMF

SEQ ID NO: 579418 - protein, 14 aa, Homo sapiens
  CDR3 for beta chain variable domain of TCR clone 289709 (TRBV28, TRBJ1-5)
CASSRTGLNQAQHF

SEQ ID NO: 579419 - protein, 14 aa, Homo sapiens
  CDR3 for alpha chain variable domain of TCR clone 289710 (TRAV8-3, TRAJ4)
CAVGAAGGYNKLIF

SEQ ID NO: 579420 - protein, 15 aa, Homo sapiens
  CDR3 for beta chain variable domain of TCR clone 289710 (TRBV27, TRBJ1-6)
CASSFDRGLGSPLHF

SEQ ID NO: 579421 - protein, 12 aa, Homo sapiens
  CDR3 for alpha chain variable domain of TCR clone 289711 (TRAV21, TRAJ13)
PGPSGVYQKVTF

SEQ ID NO: 579422 - protein, 13 aa, Homo sapiens
  CDR3 for beta chain variable domain of TCR clone 289711 (TRBV7-9, TRBJ1-2)
CASSLKQNYGYTF

SEQ ID NO: 579423 - protein, 17 aa, Homo sapiens
  CDR3 for alpha chain variable domain of TCR clone 289712 (TRAV1-2, TRAJ8)
CAVRDPDENTGFQKIVF

SEQ ID NO: 579424 - protein, 16 aa, Homo sapiens
  CDR3 for beta chain variable domain of TCR clone 289712 (TRBV7-9, TRBJ2-2)
CASSGFGGANTGELFF

SEQ ID NO: 579425 - protein, 12 aa, Homo sapiens
  CDR3 for alpha chain variable domain of TCR clone 289713 (TRAV21, TRAJ33)
CAKMDSNYQLIW

SEQ ID NO: 579426 - protein, 18 aa, Homo sapiens
  CDR3 for beta chain variable domain of TCR clone 289713 (TRBV15, TRBJ2-3)
CATSRDGARRWDTDTQYF

SEQ ID NO: 579427 - protein, 13 aa, Homo sapiens
  CDR3 for alpha chain variable domain of TCR clone 289714 (TRAV12-2, TRAJ52)
CAVRGTSYGKLTF

SEQ ID NO: 579428 - protein, 16 aa, Homo sapiens
  CDR3 for beta chain variable domain of TCR clone 289714 (TRBV7-2, TRBJ2-7)
CASTSQAASGGYEQYF

SEQ ID NO: 579429 - protein, 13 aa, Homo sapiens
  CDR3 for alpha chain variable domain of TCR clone 289715 (TRAV20, TRAJ54)
CALTFEGAQKLVF

SEQ ID NO: 579430 - protein, 13 aa, Homo sapiens
  CDR3 for beta chain variable domain of TCR clone 289715 (TRBV18, TRBJ2-2)
CASSPTRGGELFF

SEQ ID NO: 579431 - protein, 13 aa, Homo sapiens
  CDR3 for alpha chain variable domain of TCR clone 289716 (TRAV13-2, TRAJ13)
CAERPGGYQKVTF

SEQ ID NO: 579432 - protein, 16 aa, Homo sapiens
  CDR3 for beta chain variable domain of TCR clone 289716 (TRBV18, TRBJ2-5)
CTSSPPSSGGAKTQYF

SEQ ID NO: 579433 - protein, 15 aa, Homo sapiens
  CDR3 for alpha chain variable domain of TCR clone 289717 (TRAV17, TRAJ52)
CATEAGGTSYGKLTF

SEQ ID NO: 579434 - protein, 13 aa, Homo sapiens
  CDR3 for beta chain variable domain of TCR clone 289717 (TRBV7-3, TRBJ2-5)
CASSFRGGETQYF

SEQ ID NO: 579435 - protein, 14 aa, Homo sapiens
  CDR3 for alpha chain variable domain of TCR clone 289718 (TRAV8-6, TRAJ13)
CAVFSSGGYQKVTF

SEQ ID NO: 579436 - protein, 14 aa, Homo sapiens
  CDR3 for beta chain variable domain of TCR clone 289718 (TRBV7-2, TRBJ1-5)
CASSLTGSNQPQHF

SEQ ID NO: 579437 - protein, 13 aa, Homo sapiens
  CDR3 for alpha chain variable domain of TCR clone 289719 (TRAV12-2, TRAJ39)
CAVNNNAGNMLTF

SEQ ID NO: 579438 - protein, 15 aa, Homo sapiens
  CDR3 for beta chain variable domain of TCR clone 289719 (TRBV6-3, TRBJ2-7)
CASSSPGTVFYEQYF

SEQ ID NO: 579439 - protein, 12 aa, Homo sapiens
  CDR3 for alpha chain variable domain of TCR clone 289720 (TRAV29/DV5, TRAJ49)
CAATDTGNQFYF

SEQ ID NO: 579440 - protein, 16 aa, Homo sapiens
  CDR3 for beta chain variable domain of TCR clone 289720 (TRBV9, TRBJ2-1)
CASSVGGGGNYNEQFF

SEQ ID NO: 579441 - protein, 14 aa, Homo sapiens
  CDR3 for alpha chain variable domain of TCR clone 289721 (TRAV23/DV6, TRAJ11)
CAALIGGGYSTLTF

SEQ ID NO: 579442 - protein, 14 aa, Homo sapiens
  CDR3 for beta chain variable domain of TCR clone 289721 (TRBV19, TRBJ2-7)
CASSIFAGTYEQYF

SEQ ID NO: 579443 - protein, 14 aa, Homo sapiens
  CDR3 for alpha chain variable domain of TCR clone 289722 (TRAV1-2, TRAJ16)
CAVNRFSDGQKLLF

SEQ ID NO: 579444 - protein, 16 aa, Homo sapiens
  CDR3 for beta chain variable domain of TCR clone 289722 (TRBV11-2, TRBJ1-2)
CASILDTGGADYGDTF

SEQ ID NO: 579445 - protein, 15 aa, Homo sapiens
  CDR3 for alpha chain variable domain of TCR clone 289723 (TRAV4, TRAJ10)
CLVGDGSGGGNKLTF

SEQ ID NO: 579446 - protein, 16 aa, Homo sapiens
  CDR3 for beta chain variable domain of TCR clone 289723 (TRBV20-1, TRBJ1-4)
CSAPGQGLLTNEKLFF

SEQ ID NO: 579447 - protein, 17 aa, Homo sapiens
  CDR3 for alpha chain variable domain of TCR clone 289724 (TRAV27, TRAJ26)
CAGARAPLHNYGQNFVF

SEQ ID NO: 579448 - protein, 15 aa, Homo sapiens
  CDR3 for beta chain variable domain of TCR clone 289724 (TRBV11-2, TRBJ2-5)
CASSPRSGGLETQYF

SEQ ID NO: 579449 - protein, 13 aa, Homo sapiens
  CDR3 for alpha chain variable domain of TCR clone 289725 (TRAV22, TRAJ29)
CAVGGSGNTPLVF

SEQ ID NO: 579450 - protein, 14 aa, Homo sapiens
  CDR3 for beta chain variable domain of TCR clone 289725 (TRBV7-9, TRBJ2-1)
CASSLGVADNEQFF

SEQ ID NO: 579451 - protein, 14 aa, Homo sapiens
  CDR3 for alpha chain variable domain of TCR clone 289726 (TRAV12-2, TRAJ36)
CAVKISTGANNLFF

SEQ ID NO: 579452 - protein, 13 aa, Homo sapiens
  CDR3 for beta chain variable domain of TCR clone 289726 (TRBV7-3, TRBJ2-1)
CASSLDSYNEQFF

SEQ ID NO: 579453 - protein, 13 aa, Homo sapiens
  CDR3 for alpha chain variable domain of TCR clone 289727 (TRAV20, TRAJ40)
CAVRTSGTYKYIF

SEQ ID NO: 579454 - protein, 16 aa, Homo sapiens
  CDR3 for beta chain variable domain of TCR clone 289727 (TRBV12-5, TRBJ2-5)
CASGPRTSGNQETQYF

SEQ ID NO: 579455 - protein, 12 aa, Homo sapiens
  CDR3 for alpha chain variable domain of TCR clone 289728 (TRAV6, TRAJ9)
CALVTGGFKTIF

SEQ ID NO: 579456 - protein, 16 aa, Homo sapiens
  CDR3 for beta chain variable domain of TCR clone 289728 (TRBV4-1, TRBJ1-5)
CASSQGGHTTNQPQHF

SEQ ID NO: 579457 - protein, 15 aa, Homo sapiens
  CDR3 for alpha chain variable domain of TCR clone 289729 (TRAV3, TRAJ22)
CAVRDRGGSARQLNF

SEQ ID NO: 579458 - protein, 16 aa, Homo sapiens
  CDR3 for beta chain variable domain of TCR clone 289729 (TRBV5-4, TRBJ2-3)
CASQQPGAGGSDTQYF

SEQ ID NO: 579459 - protein, 13 aa, Homo sapiens
  CDR3 for alpha chain variable domain of TCR clone 289730 (TRAV3, TRAJ29)
CAVREWGNTPLVF

SEQ ID NO: 579460 - protein, 15 aa, Homo sapiens
  CDR3 for beta chain variable domain of TCR clone 289730 (TRBV12-4, TRBJ2-5)
CASIGRTGEGETQYF

SEQ ID NO: 579461 - protein, 13 aa, Homo sapiens
  CDR3 for alpha chain variable domain of TCR clone 289731 (TRAV27, TRAJ49)
CAPRHTPVTSSIL

SEQ ID NO: 579462 - protein, 16 aa, Homo sapiens
  CDR3 for beta chain variable domain of TCR clone 289731 (TRBV4-1, TRBJ1-2)
CASSQDAGQVLYGYTF

SEQ ID NO: 579463 - protein, 14 aa, Homo sapiens
  CDR3 for alpha chain variable domain of TCR clone 289732 (TRAV12-2, TRAJ21)
CAVNKANNFNKFYF

SEQ ID NO: 579464 - protein, 13 aa, Homo sapiens
  CDR3 for beta chain variable domain of TCR clone 289732 (TRBV7-3, TRBJ1-1)
CASSQDWGAEAFF

SEQ ID NO: 579465 - protein, 13 aa, Homo sapiens
  CDR3 for alpha chain variable domain of TCR clone 289733 (TRAV13-2, TRAJ48)
CAEMDFGNEKLTF

SEQ ID NO: 579466 - protein, 14 aa, Homo sapiens
  CDR3 for beta chain variable domain of TCR clone 289733 (TRBV5-5, TRBJ1-5)
CASSGQGVDQPQHF

SEQ ID NO: 579467 - protein, 13 aa, Homo sapiens
  CDR3 for alpha chain variable domain of TCR clone 289734 (TRAV8-6, TRAJ8)
CAVSNTGFQKLVF

SEQ ID NO: 579468 - protein, 15 aa, Homo sapiens
  CDR3 for beta chain variable domain of TCR clone 289734 (TRBV28, TRBJ2-5)
CASSSGRTIQETQYL

SEQ ID NO: 579469 - protein, 15 aa, Homo sapiens
  CDR3 for alpha chain variable domain of TCR clone 289735 (TRAV27, TRAJ24)
CAGGTSADSWGKLQF

SEQ ID NO: 579470 - protein, 14 aa, Homo sapiens
  CDR3 for beta chain variable domain of TCR clone 289735 (TRBV20-1, TRBJ2-1)
CSAQIGGSANEQFF

SEQ ID NO: 579471 - protein, 10 aa, Homo sapiens
  CDR3 for alpha chain variable domain of TCR clone 289736 (TRAV30, TRAJ34)
CGTNPDKLIF

SEQ ID NO: 579472 - protein, 13 aa, Homo sapiens
  CDR3 for beta chain variable domain of TCR clone 289736 (TRBV6-5, TRBJ2-5)
CASSPQGGETQYF

SEQ ID NO: 579473 - protein, 12 aa, Homo sapiens
  CDR3 for alpha chain variable domain of TCR clone 289737 (TRAV20, TRAJ23)
CAVQAPGGKLIF

SEQ ID NO: 579474 - protein, 14 aa, Homo sapiens
  CDR3 for beta chain variable domain of TCR clone 289737 (TRBV5-4, TRBJ2-1)
CASSLSGAYNEQFF

SEQ ID NO: 579475 - protein, 16 aa, Homo sapiens
  CDR3 for alpha chain variable domain of TCR clone 289738 (TRAV3, TRAJ6)
CAVRGGMGRGKLHTYI

SEQ ID NO: 579476 - protein, 15 aa, Homo sapiens
  CDR3 for beta chain variable domain of TCR clone 289738 (TRBV9, TRBJ2-1)
CASSLAGSSYNEQFF

SEQ ID NO: 579477 - protein, 13 aa, Homo sapiens
  CDR3 for alpha chain variable domain of TCR clone 289739 (TRAV36/DV7, TRAJ53)
CALSGGSNYKLTF

SEQ ID NO: 579478 - protein, 14 aa, Homo sapiens
  CDR3 for beta chain variable domain of TCR clone 289739 (TRBV11-2, TRBJ2-1)
CASSLSGPYNEQFF

SEQ ID NO: 579479 - protein, 14 aa, Homo sapiens
  CDR3 for alpha chain variable domain of TCR clone 289740 (TRAV8-3, TRAJ4)
CAVGAAGGYNKLIF

SEQ ID NO: 579480 - protein, 13 aa, Homo sapiens
  CDR3 for beta chain variable domain of TCR clone 289740 (TRBV7-9, TRBJ1-1)
CASSLAGVSEAFF

SEQ ID NO: 579481 - protein, 14 aa, Homo sapiens
  CDR3 for alpha chain variable domain of TCR clone 289741 (TRAV8-4, TRAJ9)
CAGRINTGGFKTIF

SEQ ID NO: 579482 - protein, 17 aa, Homo sapiens
  CDR3 for beta chain variable domain of TCR clone 289741 (TRBV28, TRBJ2-7)
CASSPLHRASGVYEQYF

SEQ ID NO: 579483 - protein, 13 aa, Homo sapiens
  CDR3 for alpha chain variable domain of TCR clone 289742 (TRAV38-2/DV8, TRAJ34)
CAYRTWNTDKLIF

SEQ ID NO: 579484 - protein, 15 aa, Homo sapiens
  CDR3 for beta chain variable domain of TCR clone 289742 (TRBV11-3, TRBJ2-7)
CASSPGPASSYEQYF

SEQ ID NO: 579485 - protein, 13 aa, Homo sapiens
  CDR3 for alpha chain variable domain of TCR clone 289743 (TRAV12-2, TRAJ42)
CAVKRGSQGNLIF

SEQ ID NO: 579486 - protein, 15 aa, Homo sapiens
  CDR3 for beta chain variable domain of TCR clone 289743 (TRBV19, TRBJ1-6)
CASSTQGAVGSPLHF

SEQ ID NO: 579487 - protein, 16 aa, Homo sapiens
  CDR3 for alpha chain variable domain of TCR clone 289744 (TRAV3, TRAJ10)
CAVRDMRAGGGNKLTF

SEQ ID NO: 579488 - protein, 14 aa, Homo sapiens
  CDR3 for beta chain variable domain of TCR clone 289744 (TRBV10-3, TRBJ2-5)
CATSRDRDRETQYF

SEQ ID NO: 579489 - protein, 17 aa, Homo sapiens
  CDR3 for alpha chain variable domain of TCR clone 289745 (TRAV13-1, TRAJ28)
CAASPPDSGAGSYQLTF

SEQ ID NO: 579490 - protein, 12 aa, Homo sapiens
  CDR3 for beta chain variable domain of TCR clone 289745 (TRBV11-2, TRBJ2-2)
CASSLPTGELFF

SEQ ID NO: 579491 - protein, 14 aa, Homo sapiens
  CDR3 for alpha chain variable domain of TCR clone 289746 (TRAV23/DV6, TRAJ8)
CAASKNTGFMNLVF

SEQ ID NO: 579492 - protein, 16 aa, Homo sapiens
  CDR3 for beta chain variable domain of TCR clone 289746 (TRBV4-1, TRBJ2-6)
CASSQVGDPGANVLTF

SEQ ID NO: 579493 - protein, 14 aa, Homo sapiens
  CDR3 for alpha chain variable domain of TCR clone 289747 (TRAV2, TRAJ9)
CAVEDRSGGFKTIF

SEQ ID NO: 579494 - protein, 13 aa, Homo sapiens
  CDR3 for beta chain variable domain of TCR clone 289747 (TRBV25-1, TRBJ1-2)
CSSSEAGASGYTF

SEQ ID NO: 579495 - protein, 13 aa, Homo sapiens
  CDR3 for alpha chain variable domain of TCR clone 289748 (TRAV12-3, TRAJ33)
CAMSLNRNYQLIW

SEQ ID NO: 579496 - protein, 13 aa, Homo sapiens
  CDR3 for beta chain variable domain of TCR clone 289748 (TRBV7-2, TRBJ2-2)
CASSLAVTGELFF

SEQ ID NO: 579497 - protein, 15 aa, Homo sapiens
  CDR3 for alpha chain variable domain of TCR clone 289749 (TRAV34, TRAJ38)
CGADFTPGNNRKLIW

SEQ ID NO: 579498 - protein, 14 aa, Homo sapiens
  CDR3 for beta chain variable domain of TCR clone 289749 (TRBV12-5, TRBJ2-5)
CASGSRTHQETPYF

SEQ ID NO: 579499 - protein, 11 aa, Homo sapiens
  CDR3 for alpha chain variable domain of TCR clone 289750 (TRAV21, TRAJ34)
CAVYNTDKLIF

SEQ ID NO: 579500 - protein, 13 aa, Homo sapiens
  CDR3 for beta chain variable domain of TCR clone 289750 (TRBV4-3, TRBJ2-1)
CASGLRVYNEQFF

SEQ ID NO: 579501 - protein, 14 aa, Homo sapiens
  CDR3 for alpha chain variable domain of TCR clone 289751 (TRAV13-1, TRAJ24)
CAASRTDSWGKLQF

SEQ ID NO: 579502 - protein, 13 aa, Homo sapiens
  CDR3 for beta chain variable domain of TCR clone 289751 (TRBV7-9, TRBJ1-2)
CASSLKQNYGYTF

SEQ ID NO: 579503 - protein, 14 aa, Homo sapiens
  CDR3 for alpha chain variable domain of TCR clone 289752 (TRAV12-2, TRAJ24)
CAVTPADSWGKLQF

SEQ ID NO: 579504 - protein, 16 aa, Homo sapiens
  CDR3 for beta chain variable domain of TCR clone 289752 (TRBV4-1, TRBJ2-7)
CASSQNDRDNSYEQYF

SEQ ID NO: 579505 - protein, 10 aa, Homo sapiens
  CDR3 for alpha chain variable domain of TCR clone 289753 (TRAV12-2, TRAJ22)
CAVNETQLTF

SEQ ID NO: 579506 - protein, 13 aa, Homo sapiens
  CDR3 for beta chain variable domain of TCR clone 289753 (TRBV20-1, TRBJ1-6)
CSAPLGVGSPLHF

SEQ ID NO: 579507 - protein, 16 aa, Homo sapiens
  CDR3 for alpha chain variable domain of TCR clone 289754 (TRAV30, TRAJ24)
CGTEVVDADSWGKFQC

SEQ ID NO: 579508 - protein, 14 aa, Homo sapiens
  CDR3 for beta chain variable domain of TCR clone 289754 (TRBV12-5, TRBJ2-5)
CASGSRTHQETQYF

SEQ ID NO: 579509 - protein, 14 aa, Homo sapiens
  CDR3 for alpha chain variable domain of TCR clone 289755 (TRAV29/DV5, TRAJ36)
CAARRKTGANKPFF

SEQ ID NO: 579510 - protein, 14 aa, Homo sapiens
  CDR3 for beta chain variable domain of TCR clone 289755 (TRBV12-5, TRBJ2-5)
CASGSRTHQETQYF

SEQ ID NO: 579511 - protein, 14 aa, Homo sapiens
  CDR3 for alpha chain variable domain of TCR clone 289756 (TRAV13-1, TRAJ3)
CAAEGYSSASKIIF

SEQ ID NO: 579512 - protein, 16 aa, Homo sapiens
  CDR3 for beta chain variable domain of TCR clone 289756 (TRBV7-2, TRBJ1-2)
CASSSNQDRRGHGYTF

SEQ ID NO: 579513 - protein, 12 aa, Homo sapiens
  CDR3 for alpha chain variable domain of TCR clone 289757 (TRAV13-1, TRAJ53)
AASGGRNYKMTF

SEQ ID NO: 579514 - protein, 11 aa, Homo sapiens
  CDR3 for beta chain variable domain of TCR clone 289757 (TRBV12-4, TRBJ2-2)
CASSSAGELFF

SEQ ID NO: 579515 - protein, 15 aa, Homo sapiens
  CDR3 for alpha chain variable domain of TCR clone 289758 (TRAV8-3, TRAJ15)
CAVVAANQAGTALIF

SEQ ID NO: 579516 - protein, 14 aa, Homo sapiens
  CDR3 for beta chain variable domain of TCR clone 289758 (TRBV20-1, TRBJ2-1)
CSPNDEASYNEQFF

SEQ ID NO: 579517 - protein, 14 aa, Homo sapiens
  CDR3 for alpha chain variable domain of TCR clone 289759 (TRAV38-1, TRAJ29)
CAFITPSGNTPLVF

SEQ ID NO: 579518 - protein, 14 aa, Homo sapiens
  CDR3 for beta chain variable domain of TCR clone 289759 (TRBV18, TRBJ2-7)
CASSTGGGAYEQYF

SEQ ID NO: 579519 - protein, 14 aa, Homo sapiens
  CDR3 for alpha chain variable domain of TCR clone 289760 (TRAV29/DV5, TRAJ49)
CAASLSNTGNQSYF

SEQ ID NO: 579520 - protein, 21 aa, Homo sapiens
  CDR3 for beta chain variable domain of TCR clone 289760 (TRBV9, TRBJ2-5)
CASRGRLAGGPEDPVLRARHA

SEQ ID NO: 579521 - protein, 14 aa, Homo sapiens
  CDR3 for alpha chain variable domain of TCR clone 289761 (TRAV1-2, TRAJ16)
CAVNRFSDGQQLLF

SEQ ID NO: 579522 - protein, 14 aa, Homo sapiens
  CDR3 for beta chain variable domain of TCR clone 289761 (TRBV11-1, TRBJ2-7)
CASSFRQGSYEQYF

SEQ ID NO: 579523 - protein, 14 aa, Homo sapiens
  CDR3 for alpha chain variable domain of TCR clone 289762 (TRAV12-1, TRAJ37)
CVVTGSSNTGKLIF

SEQ ID NO: 579524 - protein, 18 aa, Homo sapiens
  CDR3 for beta chain variable domain of TCR clone 289762 (TRBV23-1, TRBJ2-5)
AAPAVPERVLLIQETQYF

SEQ ID NO: 579525 - protein, 15 aa, Homo sapiens
  CDR3 for alpha chain variable domain of TCR clone 289763 (TRAV2, TRAJ39)
CAVEDRRNAVNMLTF

SEQ ID NO: 579526 - protein, 16 aa, Homo sapiens
  CDR3 for beta chain variable domain of TCR clone 289763 (TRBV7-8, TRBJ2-7)
CASSLAAGTSVYEQYF

SEQ ID NO: 579527 - protein, 17 aa, Homo sapiens
  CDR3 for alpha chain variable domain of TCR clone 289764 (TRAV3, TRAJ6)
CAVRDGPRPGGSYIPTF

SEQ ID NO: 579528 - protein, 18 aa, Homo sapiens
  CDR3 for beta chain variable domain of TCR clone 289764 (TRBV25-1, TRBJ1-2)
CASSGLQNGQGLIFGYTF

SEQ ID NO: 579529 - protein, 14 aa, Homo sapiens
  CDR3 for alpha chain variable domain of TCR clone 289765 (TRAV1-2, TRAJ8)
CAVPPATGFQKLVF

SEQ ID NO: 579530 - protein, 13 aa, Homo sapiens
  CDR3 for beta chain variable domain of TCR clone 289765 (TRBV19, TRBJ1-2)
CASSVPGQDGYTF

SEQ ID NO: 579531 - protein, 15 aa, Homo sapiens
  CDR3 for alpha chain variable domain of TCR clone 289766 (TRAV20, TRAJ4)
CAVTMFSGGYNKLIF

SEQ ID NO: 579532 - protein, 11 aa, Homo sapiens
  CDR3 for beta chain variable domain of TCR clone 289766 (TRBV19, TRBJ1-1)
CASSIGSEAVF

SEQ ID NO: 579533 - protein, 14 aa, Homo sapiens
  CDR3 for alpha chain variable domain of TCR clone 289767 (TRAV13-1, TRAJ10)
CAAKEPGGGNKRTF

SEQ ID NO: 579534 - protein, 14 aa, Homo sapiens
  CDR3 for beta chain variable domain of TCR clone 289767 (TRBV6-6, TRBJ2-7)
RASSDSGAGYEQYF

SEQ ID NO: 579535 - protein, 11 aa, Homo sapiens
  CDR3 for alpha chain variable domain of TCR clone 289768 (TRAV21, TRAJ34)
CAVTNTDKLIF

SEQ ID NO: 579536 - protein, 17 aa, Homo sapiens
  CDR3 for beta chain variable domain of TCR clone 289768 (TRBV7-3, TRBJ2-3)
CASSLMKRMRGADTQYF

SEQ ID NO: 579537 - protein, 15 aa, Homo sapiens
  CDR3 for alpha chain variable domain of TCR clone 289769 (TRAV12-1, TRAJ45)
CVVLSGGGGGDGLTV

SEQ ID NO: 579538 - protein, 13 aa, Homo sapiens
  CDR3 for beta chain variable domain of TCR clone 289769 (TRBV7-9, TRBJ2-3)
CASSPGSTDTQYF

SEQ ID NO: 579539 - protein, 14 aa, Homo sapiens
  CDR3 for alpha chain variable domain of TCR clone 289770 (TRAV29/DV5, TRAJ36)
CAARRKTGANNLFF

SEQ ID NO: 579540 - protein, 12 aa, Homo sapiens
  CDR3 for beta chain variable domain of TCR clone 289770 (TRBV12-4, TRBJ2-7)
CASSSGGYEQYF

SEQ ID NO: 579541 - protein, 14 aa, Homo sapiens
  CDR3 for alpha chain variable domain of TCR clone 289771 (TRAV8-1, TRAJ5)
CAVSMDTGRRALAF

SEQ ID NO: 579542 - protein, 15 aa, Homo sapiens
  CDR3 for beta chain variable domain of TCR clone 289771 (TRBV19, TRBJ2-4)
CASRGPRRGENSQYF

SEQ ID NO: 579543 - protein, 11 aa, Homo sapiens
  CDR3 for alpha chain variable domain of TCR clone 289772 (TRAV12-3, TRAJ43)
CAMSVSNDMRF

SEQ ID NO: 579544 - protein, 16 aa, Homo sapiens
  CDR3 for beta chain variable domain of TCR clone 289772 (TRBV5-7, TRBJ2-5)
CASIRGQTGYQETQYF

SEQ ID NO: 579545 - protein, 23 aa, Homo sapiens
  CDR3 for alpha chain variable domain of TCR clone 289773 (TRAV26-1, )
CIADNAGTNDIQNPDPAVYQLRD

SEQ ID NO: 579546 - protein, 13 aa, Homo sapiens
  CDR3 for beta chain variable domain of TCR clone 289773 (TRBV20-1, TRBJ1-1)
CSARGGGNTEAFF

SEQ ID NO: 579547 - protein, 11 aa, Homo sapiens
  CDR3 for alpha chain variable domain of TCR clone 289774 (TRAV21, TRAJ34)
CAVTNTHTLIF

SEQ ID NO: 579548 - protein, 16 aa, Homo sapiens
  CDR3 for beta chain variable domain of TCR clone 289774 (TRBV18, TRBJ1-1)
CASSPGVGGRGGEAFF

SEQ ID NO: 579549 - protein, 14 aa, Homo sapiens
  CDR3 for alpha chain variable domain of TCR clone 289775 (TRAV8-3, TRAJ4)
CAVGAAGGYNKLIV

SEQ ID NO: 579550 - protein, 15 aa, Homo sapiens
  CDR3 for beta chain variable domain of TCR clone 289775 (TRBV6-3, TRBJ2-7)
CASSSPGTVFYEQYF

SEQ ID NO: 579551 - protein, 11 aa, Homo sapiens
  CDR3 for alpha chain variable domain of TCR clone 289776 (TRAV12-2, TRAJ29)
CAVTLRSPLVF

SEQ ID NO: 579552 - protein, 17 aa, Homo sapiens
  CDR3 for beta chain variable domain of TCR clone 289776 (TRBV5-1, TRBJ2-5)
CASSPVALGQNQETQYF

SEQ ID NO: 579553 - protein, 16 aa, Homo sapiens
  CDR3 for alpha chain variable domain of TCR clone 289777 (TRAV12-3, TRAJ53)
CAMSVGSGGSNYKLTF

SEQ ID NO: 579554 - protein, 15 aa, Homo sapiens
  CDR3 for beta chain variable domain of TCR clone 289777 (TRBV29-1, TRBJ2-5)
CSVARERPSTSGQAR

SEQ ID NO: 579555 - protein, 10 aa, Homo sapiens
  CDR3 for alpha chain variable domain of TCR clone 289778 (TRAV12-3, TRAJ23)
CAPGGGKLIF

SEQ ID NO: 579556 - protein, 13 aa, Homo sapiens
  CDR3 for beta chain variable domain of TCR clone 289778 (TRBV7-9, TRBJ1-2)
CASSLKQNYGYTF

SEQ ID NO: 579557 - protein, 14 aa, Homo sapiens
  CDR3 for alpha chain variable domain of TCR clone 289779 (TRAV26-2, TRAJ39)
CILRDNNAGNMLTF

SEQ ID NO: 579558 - protein, 13 aa, Homo sapiens
  CDR3 for beta chain variable domain of TCR clone 289779 (TRBV7-9, TRBJ1-2)
CASSLKQNYGYTF

SEQ ID NO: 579559 - protein, 14 aa, Homo sapiens
  CDR3 for alpha chain variable domain of TCR clone 289780 (TRAV26-1, TRAJ48)
CIVRVPFGNEKLTF

SEQ ID NO: 579560 - protein, 16 aa, Homo sapiens
  CDR3 for beta chain variable domain of TCR clone 289780 (TRBV18, TRBJ2-1)
CASSPYLSIRGDEKFF

SEQ ID NO: 579561 - protein, 14 aa, Homo sapiens
  CDR3 for alpha chain variable domain of TCR clone 289781 (TRAV8-4, TRAJ48)
CAVSETFGNEKLTF

SEQ ID NO: 579562 - protein, 15 aa, Homo sapiens
  CDR3 for beta chain variable domain of TCR clone 289781 (TRBV6-1, TRBJ2-4)
CASSEAVWTINIQYF

SEQ ID NO: 579563 - protein, 11 aa, Homo sapiens
  CDR3 for alpha chain variable domain of TCR clone 289782 (TRAV3, TRAJ21)
CAVGNFNKSYF

SEQ ID NO: 579564 - protein, 16 aa, Homo sapiens
  CDR3 for beta chain variable domain of TCR clone 289782 (TRBV19, TRBJ2-1)
CASSKAGPSSYNEQSF

SEQ ID NO: 579565 - protein, 18 aa, Homo sapiens
  CDR3 for alpha chain variable domain of TCR clone 289783 (TRAV8-4, TRAJ53)
CCECWRMRSGGSNYKLTF

SEQ ID NO: 579566 - protein, 19 aa, Homo sapiens
  CDR3 for beta chain variable domain of TCR clone 289783 (TRBV7-9, TRBJ2-1)
CASSHNRGALLRSYNEQFF

SEQ ID NO: 579567 - protein, 11 aa, Homo sapiens
  CDR3 for alpha chain variable domain of TCR clone 289784 (TRAV12-1, TRAJ30)
CVVNGQDKIIF

SEQ ID NO: 579568 - protein, 12 aa, Homo sapiens
  CDR3 for beta chain variable domain of TCR clone 289784 (TRBV27, TRBJ2-2)
CATKLFTGELFF

SEQ ID NO: 579569 - protein, 12 aa, Homo sapiens
  CDR3 for alpha chain variable domain of TCR clone 289785 (TRAV27, TRAJ58)
CAGARDTSRLTF

SEQ ID NO: 579570 - protein, 15 aa, Homo sapiens
  CDR3 for beta chain variable domain of TCR clone 289785 (TRBV7-3, TRBJ1-5)
CASSQSSGINQPQHF

SEQ ID NO: 579571 - protein, 15 aa, Homo sapiens
  CDR3 for alpha chain variable domain of TCR clone 289786 (TRAV3, TRAJ44)
CAVRSNTGTASKLTF

SEQ ID NO: 579572 - protein, 14 aa, Homo sapiens
  CDR3 for beta chain variable domain of TCR clone 289786 (TRBV7-2, TRBJ2-7)
CASSPKTSFYEQYF

SEQ ID NO: 579573 - protein, 12 aa, Homo sapiens
  CDR3 for alpha chain variable domain of TCR clone 289787 (TRAV3, TRAJ20)
CAVRDGDYKLSF

SEQ ID NO: 579574 - protein, 15 aa, Homo sapiens
  CDR3 for beta chain variable domain of TCR clone 289787 (TRBV7-3, TRBJ2-1)
CASSPTGGGEVEQFF

SEQ ID NO: 579575 - protein, 10 aa, Homo sapiens
  CDR3 for alpha chain variable domain of TCR clone 289788 (TRAV25, TRAJ17)
CQAAGNKLTF

SEQ ID NO: 579576 - protein, 13 aa, Homo sapiens
  CDR3 for beta chain variable domain of TCR clone 289788 (TRBV6-5, TRBJ2-2)
YASSLPGVGELFF

SEQ ID NO: 579577 - protein, 14 aa, Homo sapiens
  CDR3 for alpha chain variable domain of TCR clone 289789 (TRAV12-2, TRAJ13)
CAVKKTGGYQKVTF

SEQ ID NO: 579578 - protein, 13 aa, Homo sapiens
  CDR3 for beta chain variable domain of TCR clone 289789 (TRBV20-1, TRBJ2-1)
CSASTGTSNEQFF

SEQ ID NO: 579579 - protein, 13 aa, Homo sapiens
  CDR3 for alpha chain variable domain of TCR clone 289790 (TRAV4, TRAJ20)
CLVGSSNDYKLSF

SEQ ID NO: 579580 - protein, 14 aa, Homo sapiens
  CDR3 for beta chain variable domain of TCR clone 289790 (TRBV23-1, TRBJ2-5)
CASSFLRSQETQYF

SEQ ID NO: 579581 - protein, 14 aa, Homo sapiens
  CDR3 for alpha chain variable domain of TCR clone 289791 (TRAV12-1, TRAJ23)
CVVMIYNQGGKLIF

SEQ ID NO: 579582 - protein, 23 aa, Homo sapiens
  CDR3 for beta chain variable domain of TCR clone 289791 (TRBV7-3, TRBJ1-6)
GASSLTSRDEASDPSSYNSPLHF

SEQ ID NO: 579583 - protein, 13 aa, Homo sapiens
  CDR3 for alpha chain variable domain of TCR clone 289792 (TRAV20, TRAJ54)
RAVQAGGAQKMVF

SEQ ID NO: 579584 - protein, 14 aa, Homo sapiens
  CDR3 for beta chain variable domain of TCR clone 289792 (TRBV20-1, TRBJ2-7)
CSAKTGTGGYEQYF

SEQ ID NO: 579585 - protein, 13 aa, Homo sapiens
  CDR3 for alpha chain variable domain of TCR clone 289793 (TRAV27, TRAJ41)
CAGEGNSGYALNF

SEQ ID NO: 579586 - protein, 14 aa, Homo sapiens
  CDR3 for beta chain variable domain of TCR clone 289793 (TRBV25-1, TRBJ1-1)
CASTHLGGNPEAFF

SEQ ID NO: 579587 - protein, 15 aa, Homo sapiens
  CDR3 for alpha chain variable domain of TCR clone 289794 (TRAV10, TRAJ6)
CVVRPRTGGSYIPTF

SEQ ID NO: 579588 - protein, 15 aa, Homo sapiens
  CDR3 for beta chain variable domain of TCR clone 289794 (TRBV5-1, TRBJ2-1)
CASSPPRAPYNEQFF

SEQ ID NO: 579589 - protein, 15 aa, Homo sapiens
  CDR3 for alpha chain variable domain of TCR clone 289795 (TRAV3, TRAJ3)
CAMRDMSSSASKIIF

SEQ ID NO: 579590 - protein, 13 aa, Homo sapiens
  CDR3 for beta chain variable domain of TCR clone 289795 (TRBV2, TRBJ2-7)
CASSVGGSGEQYF

SEQ ID NO: 579591 - protein, 15 aa, Homo sapiens
  CDR3 for alpha chain variable domain of TCR clone 289796 (TRAV26-1, TRAJ29)
CIVRVEGSGNTPLVF

SEQ ID NO: 579592 - protein, 14 aa, Homo sapiens
  CDR3 for beta chain variable domain of TCR clone 289796 (TRBV19, TRBJ2-7)
CASSMGQGAIEQYF

SEQ ID NO: 579593 - protein, 10 aa, Homo sapiens
  CDR3 for alpha chain variable domain of TCR clone 289797 (TRAV13-1, TRAJ5)
CAASRSALTF

SEQ ID NO: 579594 - protein, 16 aa, Homo sapiens
  CDR3 for beta chain variable domain of TCR clone 289797 (TRBV4-3, TRBJ2-3)
CASSQGGLAGTDTQYF

SEQ ID NO: 579595 - protein, 14 aa, Homo sapiens
  CDR3 for alpha chain variable domain of TCR clone 289798 (TRAV38-2/DV8, TRAJ47)
CAYRTLEYGNKLVF

SEQ ID NO: 579596 - protein, 15 aa, Homo sapiens
  CDR3 for beta chain variable domain of TCR clone 289798 (TRBV10-2, TRBJ2-6)
CASSEQGTGANVLTF

SEQ ID NO: 579597 - protein, 14 aa, Homo sapiens
  CDR3 for alpha chain variable domain of TCR clone 289799 (TRAV29/DV5, TRAJ44)
CPASALGTASKLTF

SEQ ID NO: 579598 - protein, 13 aa, Homo sapiens
  CDR3 for beta chain variable domain of TCR clone 289799 (TRBV29-1, TRBJ2-7)
CSVKRGGNYEQYF

SEQ ID NO: 579599 - protein, 17 aa, Homo sapiens
  CDR3 for alpha chain variable domain of TCR clone 289800 (TRAV3, TRAJ42)
CAVRDRDYGGSQGNLIF

SEQ ID NO: 579600 - protein, 16 aa, Homo sapiens
  CDR3 for beta chain variable domain of TCR clone 289800 (TRBV7-9, TRBJ2-1)
CASSPRASSSYNEQFF

SEQ ID NO: 579601 - protein, 13 aa, Homo sapiens
  CDR3 for alpha chain variable domain of TCR clone 289801 (TRAV8-3, TRAJ28)
CAVGAAGSYQLTF

SEQ ID NO: 579602 - protein, 17 aa, Homo sapiens
  CDR3 for beta chain variable domain of TCR clone 289801 (TRBV11-2, TRBJ2-1)
CASSLYPPGVEYNEQFF

SEQ ID NO: 579603 - protein, 11 aa, Homo sapiens
  CDR3 for alpha chain variable domain of TCR clone 289802 (TRAV3, TRAJ21)
GAVGNFNKFYF

SEQ ID NO: 579604 - protein, 14 aa, Homo sapiens
  CDR3 for beta chain variable domain of TCR clone 289802 (TRBV18, TRBJ1-2)
CASSPDRVVYGYTF

SEQ ID NO: 579605 - protein, 13 aa, Homo sapiens
  CDR3 for alpha chain variable domain of TCR clone 289803 (TRAV16, TRAJ27)
CALRRTNAGKSTF

SEQ ID NO: 579606 - protein, 15 aa, Homo sapiens
  CDR3 for beta chain variable domain of TCR clone 289803 (TRBV18, TRBJ2-1)
CASSPPGASYNEQFF

SEQ ID NO: 579607 - protein, 15 aa, Homo sapiens
  CDR3 for alpha chain variable domain of TCR clone 289804 (TRAV8-3, TRAJ45)
CASSYSGGGADGLTF

SEQ ID NO: 579608 - protein, 13 aa, Homo sapiens
  CDR3 for beta chain variable domain of TCR clone 289804 (TRBV10-3, TRBJ2-5)
CLQTSGNQETQYF

SEQ ID NO: 579609 - protein, 12 aa, Homo sapiens
  CDR3 for alpha chain variable domain of TCR clone 289805 (TRAV17, TRAJ12)
CATLRSRYKLIF

SEQ ID NO: 579610 - protein, 16 aa, Homo sapiens
  CDR3 for beta chain variable domain of TCR clone 289805 (TRBV28, TRBJ2-7)
CASSLFFETGGTEQYF

SEQ ID NO: 579611 - protein, 15 aa, Homo sapiens
  CDR3 for alpha chain variable domain of TCR clone 289806 (TRAV12-1, TRAJ44)
CVADLPTDTASKLTF

SEQ ID NO: 579612 - protein, 13 aa, Homo sapiens
  CDR3 for beta chain variable domain of TCR clone 289806 (TRBV6-5, TRBJ2-5)
CASSPQGGETQYF

SEQ ID NO: 579613 - protein, 12 aa, Homo sapiens
  CDR3 for alpha chain variable domain of TCR clone 289807 (TRAV13-1, TRAJ49)
CAAPNTGNQFYF

SEQ ID NO: 579614 - protein, 13 aa, Homo sapiens
  CDR3 for beta chain variable domain of TCR clone 289807 (TRBV10-3, TRBJ2-7)
CASKLAVNYEQYF

SEQ ID NO: 579615 - protein, 16 aa, Homo sapiens
  CDR3 for alpha chain variable domain of TCR clone 289808 (TRAV30, TRAJ24)
CGTEIVDADSWGKFQF

SEQ ID NO: 579616 - protein, 14 aa, Homo sapiens
  CDR3 for beta chain variable domain of TCR clone 289808 (TRBV13, TRBJ2-1)
CASSTRPRYNEQFF

SEQ ID NO: 579617 - protein, 12 aa, Homo sapiens
  CDR3 for alpha chain variable domain of TCR clone 289809 (TRAV12-3, TRAJ17)
CAMTLTGNKLTF

SEQ ID NO: 579618 - protein, 16 aa, Homo sapiens
  CDR3 for beta chain variable domain of TCR clone 289809 (TRBV3-1, TRBJ2-7)
CASSQGATGVAYEQYF

SEQ ID NO: 579619 - protein, 14 aa, Homo sapiens
  CDR3 for alpha chain variable domain of TCR clone 289810 (TRAV1-2, TRAJ16)
CAVNRFSDGQKLLF

SEQ ID NO: 579620 - protein, 16 aa, Homo sapiens
  CDR3 for beta chain variable domain of TCR clone 289810 (TRBV19, TRBJ2-1)
CASIKAGPSSYNEQFF

SEQ ID NO: 579621 - protein, 14 aa, Homo sapiens
  CDR3 for alpha chain variable domain of TCR clone 289811 (TRAV35, TRAJ38)
CSGSNAGNNRKLIW

SEQ ID NO: 579622 - protein, 12 aa, Homo sapiens
  CDR3 for beta chain variable domain of TCR clone 289811 (TRBV19, TRBJ2-7)
CASTDRGYEQYF

SEQ ID NO: 579623 - protein, 15 aa, Homo sapiens
  CDR3 for alpha chain variable domain of TCR clone 289812 (TRAV8-2, TRAJ36)
CVVIENWGKQPLLWD

SEQ ID NO: 579624 - protein, 15 aa, Homo sapiens
  CDR3 for beta chain variable domain of TCR clone 289812 (TRBV20-1, TRBJ2-5)
CSAEGTGGLQETQYF

SEQ ID NO: 579625 - protein, 21 aa, Homo sapiens
  CDR3 for alpha chain variable domain of TCR clone 289813 (TRAV8-3, TRAJ10)
CAVGHTHGMRKQTHLWDRHSA

SEQ ID NO: 579626 - protein, 10 aa, Homo sapiens
  CDR3 for beta chain variable domain of TCR clone 289813 (TRBV20-1, TRBJ2-5)
CSARFETQYF

SEQ ID NO: 579627 - protein, 16 aa, Homo sapiens
  CDR3 for alpha chain variable domain of TCR clone 289814 (TRAV13-1, TRAJ37)
CAASSLGSSNTGKLIF

SEQ ID NO: 579628 - protein, 12 aa, Homo sapiens
  CDR3 for beta chain variable domain of TCR clone 289814 (TRBV6-1, TRBJ2-5)
CARSEGRENQYF

SEQ ID NO: 579629 - protein, 18 aa, Homo sapiens
  CDR3 for alpha chain variable domain of TCR clone 289815 (TRAV21, TRAJ52)
CAVRPSPAGGTSYGKLTF

SEQ ID NO: 579630 - protein, 14 aa, Homo sapiens
  CDR3 for beta chain variable domain of TCR clone 289815 (TRBV5-1, TRBJ1-1)
CASSKPGPNTEAFF

SEQ ID NO: 579631 - protein, 14 aa, Homo sapiens
  CDR3 for alpha chain variable domain of TCR clone 289816 (TRAV26-1, TRAJ34)
CIVRVAYNTAKLIF

SEQ ID NO: 579632 - protein, 15 aa, Homo sapiens
  CDR3 for beta chain variable domain of TCR clone 289816 (TRBV7-3, TRBJ2-1)
CASSPTGGGEVEQFF

SEQ ID NO: 579633 - protein, 12 aa, Homo sapiens
  CDR3 for alpha chain variable domain of TCR clone 289817 (TRAV21, TRAJ33)
CAKVDSDYQLIW

SEQ ID NO: 579634 - protein, 14 aa, Homo sapiens
  CDR3 for beta chain variable domain of TCR clone 289817 (TRBV2, TRBJ2-7)
CASSLTSGGYEQYF

SEQ ID NO: 579635 - protein, 14 aa, Homo sapiens
  CDR3 for alpha chain variable domain of TCR clone 289818 (TRAV1-2, TRAJ16)
CAVNRFSDGQKLLF

SEQ ID NO: 579636 - protein, 15 aa, Homo sapiens
  CDR3 for beta chain variable domain of TCR clone 289818 (TRBV27, TRBJ2-1)
CARSNGGGSSNEQFF

SEQ ID NO: 579637 - protein, 14 aa, Homo sapiens
  CDR3 for alpha chain variable domain of TCR clone 289819 (TRAV1-2, TRAJ16)
CAVNRFSDGQKLPF

SEQ ID NO: 579638 - protein, 11 aa, Homo sapiens
  CDR3 for beta chain variable domain of TCR clone 289819 (TRBV13, TRBJ2-3)
CASGNADTQYF

SEQ ID NO: 579639 - protein, 14 aa, Homo sapiens
  CDR3 for alpha chain variable domain of TCR clone 289820 (TRAV16, TRAJ8)
CALLMNTGFQKLVF

SEQ ID NO: 579640 - protein, 18 aa, Homo sapiens
  CDR3 for beta chain variable domain of TCR clone 289820 (TRBV11-2, TRBJ2-3)
CASSLGGASRGAPNTQYF

SEQ ID NO: 579641 - protein, 14 aa, Homo sapiens
  CDR3 for alpha chain variable domain of TCR clone 289821 (TRAV13-1, TRAJ40)
CAARSISGTYKYIF

SEQ ID NO: 579642 - protein, 15 aa, Homo sapiens
  CDR3 for beta chain variable domain of TCR clone 289821 (TRBV18, TRBJ1-5)
CASSETGGNNQPQHF

SEQ ID NO: 579643 - protein, 11 aa, Homo sapiens
  CDR3 for alpha chain variable domain of TCR clone 289822 (TRAV1-2, TRAJ20)
CAVANDYKLRF

SEQ ID NO: 579644 - protein, 15 aa, Homo sapiens
  CDR3 for beta chain variable domain of TCR clone 289822 (TRBV2, TRBJ2-1)
CASSELAGSYNEQFF

SEQ ID NO: 579645 - protein, 13 aa, Homo sapiens
  CDR3 for alpha chain variable domain of TCR clone 289823 (TRAV12-3, TRAJ7)
CAMSASGNNRLAF

SEQ ID NO: 579646 - protein, 14 aa, Homo sapiens
  CDR3 for beta chain variable domain of TCR clone 289823 (TRBV13, TRBJ2-5)
GASSLGPRGETQYF

SEQ ID NO: 579647 - protein, 10 aa, Homo sapiens
  CDR3 for alpha chain variable domain of TCR clone 289824 (TRAV8-3, TRAJ4)
CAVGPKGLDF

SEQ ID NO: 579648 - protein, 13 aa, Homo sapiens
  CDR3 for beta chain variable domain of TCR clone 289824 (TRBV12-4, TRBJ1-5)
CASSPDRAQPQHF

SEQ ID NO: 579649 - protein, 14 aa, Homo sapiens
  CDR3 for alpha chain variable domain of TCR clone 289825 (TRAV1-2, TRAJ16)
CAVNRFSDGQKLLF

SEQ ID NO: 579650 - protein, 14 aa, Homo sapiens
  CDR3 for beta chain variable domain of TCR clone 289825 (TRBV5-1, TRBJ1-1)
CASSSGTLKLSLDK

SEQ ID NO: 579651 - protein, 14 aa, Homo sapiens
  CDR3 for alpha chain variable domain of TCR clone 289826 (TRAV16, TRAJ33)
CALSAMDSNYQVIW

SEQ ID NO: 579652 - protein, 14 aa, Homo sapiens
  CDR3 for beta chain variable domain of TCR clone 289826 (TRBV4-2, TRBJ2-1)
CASGLDRAYNEQFF

SEQ ID NO: 579653 - protein, 14 aa, Homo sapiens
  CDR3 for alpha chain variable domain of TCR clone 289827 (TRAV34, TRAJ22)
CGADTSGSARQLTF

SEQ ID NO: 579654 - protein, 13 aa, Homo sapiens
  CDR3 for beta chain variable domain of TCR clone 289827 (TRBV4-2, TRBJ1-1)
CASSQAGYTEAFF

SEQ ID NO: 579655 - protein, 17 aa, Homo sapiens
  CDR3 for alpha chain variable domain of TCR clone 289828 (TRAV26-1, TRAJ53)
CIVRVDDSGGRNYKLTF

SEQ ID NO: 579656 - protein, 16 aa, Homo sapiens
  CDR3 for beta chain variable domain of TCR clone 289828 (TRBV2, TRBJ1-4)
CASNLLQGATNEKLFF

SEQ ID NO: 579657 - protein, 16 aa, Homo sapiens
  CDR3 for alpha chain variable domain of TCR clone 289829 (TRAV14/DV4, TRAJ53)
CAMREGGGGSNYKLTF

SEQ ID NO: 579658 - protein, 13 aa, Homo sapiens
  CDR3 for beta chain variable domain of TCR clone 289829 (TRBV11-2, TRBJ1-6)
CASSLAGVSPLHF

SEQ ID NO: 579659 - protein, 15 aa, Homo sapiens
  CDR3 for alpha chain variable domain of TCR clone 289830 (TRAV8-3, TRAJ45)
CASSYSGGGADGLTF

SEQ ID NO: 579660 - protein, 11 aa, Homo sapiens
  CDR3 for beta chain variable domain of TCR clone 289830 (TRBV20-1, TRBJ1-5)
CSAQGDQPQHF

SEQ ID NO: 579661 - protein, 13 aa, Homo sapiens
  CDR3 for alpha chain variable domain of TCR clone 289831 (TRAV12-2, TRAJ39)
CAVNNNAGNMLTF

SEQ ID NO: 579662 - protein, 12 aa, Homo sapiens
  CDR3 for beta chain variable domain of TCR clone 289831 (TRBV11-2, TRBJ2-7)
CASSPPADEQYF

SEQ ID NO: 579663 - protein, 12 aa, Homo sapiens
  CDR3 for alpha chain variable domain of TCR clone 289832 (TRAV12-2, TRAJ8)
CAVNTGFQKLVF

SEQ ID NO: 579664 - protein, 17 aa, Homo sapiens
  CDR3 for beta chain variable domain of TCR clone 289832 (TRBV4-3, TRBJ1-1)
CASSQDLGPFMNTEAFF

SEQ ID NO: 579665 - protein, 14 aa, Homo sapiens
  CDR3 for alpha chain variable domain of TCR clone 289833 (TRAV21, TRAJ35)
CAVMPIGFGNVLHC

SEQ ID NO: 579666 - protein, 17 aa, Homo sapiens
  CDR3 for beta chain variable domain of TCR clone 289833 (TRBV10-3, TRBJ1-2)
CAISETRDRGLEYGYTF

SEQ ID NO: 579667 - protein, 13 aa, Homo sapiens
  CDR3 for alpha chain variable domain of TCR clone 289834 (TRAV13-2, TRAJ40)
CAEFTSGSYKYIF

SEQ ID NO: 579668 - protein, 14 aa, Homo sapiens
  CDR3 for beta chain variable domain of TCR clone 289834 (TRBV10-2, TRBJ1-5)
CASSSTGRNQPQHF

SEQ ID NO: 579669 - protein, 11 aa, Homo sapiens
  CDR3 for alpha chain variable domain of TCR clone 289835 (TRAV12-1, TRAJ3)
CVVSSASKIIF

SEQ ID NO: 579670 - protein, 15 aa, Homo sapiens
  CDR3 for beta chain variable domain of TCR clone 289835 (TRBV12-4, TRBJ1-2)
CASSPITGGGYGYTF

SEQ ID NO: 579671 - protein, 15 aa, Homo sapiens
  CDR3 for alpha chain variable domain of TCR clone 289836 (TRAV35, TRAJ33)
CAGQPPRYSNYQLIW

SEQ ID NO: 579672 - protein, 15 aa, Homo sapiens
  CDR3 for beta chain variable domain of TCR clone 289836 (TRBV27, TRBJ2-5)
CASSLYPRGGETQYF

SEQ ID NO: 579673 - protein, 14 aa, Homo sapiens
  CDR3 for alpha chain variable domain of TCR clone 289837 (TRAV13-1, TRAJ5)
CAASGGTGRRALTF

SEQ ID NO: 579674 - protein, 17 aa, Homo sapiens
  CDR3 for beta chain variable domain of TCR clone 289837 (TRBV11-2, TRBJ2-1)
CASSLYPPGVEYNEQFF

SEQ ID NO: 579675 - protein, 13 aa, Homo sapiens
  CDR3 for alpha chain variable domain of TCR clone 289838 (TRAV16, TRAJ58)
CALSIPSGSRLTF

SEQ ID NO: 579676 - protein, 14 aa, Homo sapiens
  CDR3 for beta chain variable domain of TCR clone 289838 (TRBV4-1, TRBJ1-6)
CASSPGSDSSPLHF

SEQ ID NO: 579677 - protein, 17 aa, Homo sapiens
  CDR3 for alpha chain variable domain of TCR clone 289839 (TRAV19, TRAJ28)
CALSESSSGAGSYQLTF

SEQ ID NO: 579678 - protein, 13 aa, Homo sapiens
  CDR3 for beta chain variable domain of TCR clone 289839 (TRBV3-1, TRBJ1-1)
CASSPGVITEAFF

SEQ ID NO: 579679 - protein, 18 aa, Homo sapiens
  CDR3 for alpha chain variable domain of TCR clone 289840 (TRAV21, TRAJ52)
CDVRPSPAGGTSYGKLTF

SEQ ID NO: 579680 - protein, 13 aa, Homo sapiens
  CDR3 for beta chain variable domain of TCR clone 289840 (TRBV20-1, TRBJ2-5)
CSAREAFQETQYF

SEQ ID NO: 579681 - protein, 16 aa, Homo sapiens
  CDR3 for alpha chain variable domain of TCR clone 289841 (TRAV30, TRAJ24)
CSTEIVDADSWGKFQF

SEQ ID NO: 579682 - protein, 14 aa, Homo sapiens
  CDR3 for beta chain variable domain of TCR clone 289841 (TRBV13, TRBJ2-1)
CASSPRPRYNEQFF

SEQ ID NO: 579683 - protein, 12 aa, Homo sapiens
  CDR3 for alpha chain variable domain of TCR clone 289842 (TRAV12-1, TRAJ16)
CVVFRDGQKLLF

SEQ ID NO: 579684 - protein, 15 aa, Homo sapiens
  CDR3 for beta chain variable domain of TCR clone 289842 (TRBV2, TRBJ2-7)
CASSEGLARSYEQYF

SEQ ID NO: 579685 - protein, 15 aa, Homo sapiens
  CDR3 for alpha chain variable domain of TCR clone 289843 (TRAV8-3, TRAJ44)
CAVVPGTASNSPLGL

SEQ ID NO: 579686 - protein, 14 aa, Homo sapiens
  CDR3 for beta chain variable domain of TCR clone 289843 (TRBV11-2, TRBJ2-3)
CASSRLARTDTQYF

SEQ ID NO: 579687 - protein, 14 aa, Homo sapiens
  CDR3 for alpha chain variable domain of TCR clone 289844 (TRAV26-1, TRAJ38)
CIADNAGNNRKLIW

SEQ ID NO: 579688 - protein, 16 aa, Homo sapiens
  CDR3 for beta chain variable domain of TCR clone 289844 (TRBV7-2, TRBJ1-6)
CASSLGGGAYNSPLHF

SEQ ID NO: 579689 - protein, 13 aa, Homo sapiens
  CDR3 for alpha chain variable domain of TCR clone 289845 (TRAV16, TRAJ34)
CALTGYNTDKIIF

SEQ ID NO: 579690 - protein, 13 aa, Homo sapiens
  CDR3 for beta chain variable domain of TCR clone 289845 (TRBV6-1, TRBJ2-1)
CASREDGGHEQFF

SEQ ID NO: 579691 - protein, 14 aa, Homo sapiens
  CDR3 for alpha chain variable domain of TCR clone 289846 (TRAV13-1, TRAJ3)
CAAEGYSSASKIIF

SEQ ID NO: 579692 - protein, 14 aa, Homo sapiens
  CDR3 for beta chain variable domain of TCR clone 289846 (TRBV19, TRBJ2-5)
CTSSSSGIQETQYF

SEQ ID NO: 579693 - protein, 13 aa, Homo sapiens
  CDR3 for alpha chain variable domain of TCR clone 289847 (TRAV17, TRAJ6)
CATGVGGSYIPTF

SEQ ID NO: 579694 - protein, 14 aa, Homo sapiens
  CDR3 for beta chain variable domain of TCR clone 289847 (TRBV5-1, TRBJ2-5)
CASSSGGSQETQYF

SEQ ID NO: 579695 - protein, 16 aa, Homo sapiens
  CDR3 for alpha chain variable domain of TCR clone 289848 (TRAV23/DV6, TRAJ52)
CAARPTGGTSYGKMTF

SEQ ID NO: 579696 - protein, 13 aa, Homo sapiens
  CDR3 for beta chain variable domain of TCR clone 289848 (TRBV7-9, TRBJ1-1)
CASSLSGETEAFF

SEQ ID NO: 579697 - protein, 18 aa, Homo sapiens
  CDR3 for alpha chain variable domain of TCR clone 289849 (TRAV8-3, TRAJ4)
WGRDPTSNDPGGYNKLIF

SEQ ID NO: 579698 - protein, 13 aa, Homo sapiens
  CDR3 for beta chain variable domain of TCR clone 289849 (TRBV20-1, TRBJ1-2)
CSATGIQGSGYTF

SEQ ID NO: 579699 - protein, 16 aa, Homo sapiens
  CDR3 for alpha chain variable domain of TCR clone 289850 (TRAV21, TRAJ33)
CAVSPASMDSNYQLIW

SEQ ID NO: 579700 - protein, 17 aa, Homo sapiens
  CDR3 for beta chain variable domain of TCR clone 289850 (TRBV2, TRBJ1-4)
CASSKRELAQGEEKLFF

SEQ ID NO: 579701 - protein, 13 aa, Homo sapiens
  CDR3 for alpha chain variable domain of TCR clone 289851 (TRAV13-1, TRAJ39)
CATSIVMQATCSP

SEQ ID NO: 579702 - protein, 16 aa, Homo sapiens
  CDR3 for beta chain variable domain of TCR clone 289851 (TRBV20-1, TRBJ1-4)
CSAPGQGLLTNEKPFF

SEQ ID NO: 579703 - protein, 13 aa, Homo sapiens
  CDR3 for alpha chain variable domain of TCR clone 289852 (TRAV36/DV7, TRAJ33)
CAVDMESNYQLIW

SEQ ID NO: 579704 - protein, 16 aa, Homo sapiens
  CDR3 for beta chain variable domain of TCR clone 289852 (TRBV15, TRBJ2-3)
CATRLSGGRAPDTQYF

SEQ ID NO: 579705 - protein, 14 aa, Homo sapiens
  CDR3 for alpha chain variable domain of TCR clone 289853 (TRAV12-2, TRAJ24)
CAVTPADSWGKLQF

SEQ ID NO: 579706 - protein, 14 aa, Homo sapiens
  CDR3 for beta chain variable domain of TCR clone 289853 (TRBV10-3, TRBJ2-7)
CAISEKQGIGEQYF

SEQ ID NO: 579707 - protein, 13 aa, Homo sapiens
  CDR3 for alpha chain variable domain of TCR clone 289854 (TRAV12-3, TRAJ9)
CAMSADGGFKTIF

SEQ ID NO: 579708 - protein, 12 aa, Homo sapiens
  CDR3 for beta chain variable domain of TCR clone 289854 (TRBV9, TRBJ2-1)
CASSVGGTDIFF

SEQ ID NO: 579709 - protein, 16 aa, Homo sapiens
  CDR3 for alpha chain variable domain of TCR clone 289855 (TRAV1-2, TRAJ10)
CAVTGVLTGGGNKLTF

SEQ ID NO: 579710 - protein, 15 aa, Homo sapiens
  CDR3 for beta chain variable domain of TCR clone 289855 (TRBV6-3, TRBJ2-7)
CASSSPGTVFYEQYF

SEQ ID NO: 579711 - protein, 16 aa, Homo sapiens
  CDR3 for alpha chain variable domain of TCR clone 289856 (TRAV3, TRAJ6)
CAVRDGMGRRKLHTYI

SEQ ID NO: 579712 - protein, 15 aa, Homo sapiens
  CDR3 for beta chain variable domain of TCR clone 289856 (TRBV9, TRBJ2-1)
CASSLAGSSYNEQFI

SEQ ID NO: 579713 - protein, 14 aa, Homo sapiens
  CDR3 for alpha chain variable domain of TCR clone 289857 (TRAV38-1, TRAJ45)
CASHSGGGADGPTF

SEQ ID NO: 579714 - protein, 14 aa, Homo sapiens
  CDR3 for beta chain variable domain of TCR clone 289857 (TRBV20-1, TRBJ1-1)
CSAQTRIGGTEAFF

SEQ ID NO: 579715 - protein, 13 aa, Homo sapiens
  CDR3 for alpha chain variable domain of TCR clone 289858 (TRAV22, TRAJ50)
CAVMKTSYDKVIF

SEQ ID NO: 579716 - protein, 14 aa, Homo sapiens
  CDR3 for beta chain variable domain of TCR clone 289858 (TRBV18, TRBJ2-7)
CASSPRGGAYEQYF

SEQ ID NO: 579717 - protein, 13 aa, Homo sapiens
  CDR3 for alpha chain variable domain of TCR clone 289859 (TRAV21, TRAJ27)
CAARPGNAGKSTF

SEQ ID NO: 579718 - protein, 14 aa, Homo sapiens
  CDR3 for beta chain variable domain of TCR clone 289859 (TRBV7-9, TRBJ2-5)
CASSLDTAQETRYF

SEQ ID NO: 579719 - protein, 14 aa, Homo sapiens
  CDR3 for alpha chain variable domain of TCR clone 289860 (TRAV26-1, TRAJ16)
CIVRVPSDGQKLLF

SEQ ID NO: 579720 - protein, 17 aa, Homo sapiens
  CDR3 for beta chain variable domain of TCR clone 289860 (TRBV20-1, TRBJ2-1)
CSASSSVLAGSYNEQFF

SEQ ID NO: 579721 - protein, 14 aa, Homo sapiens
  CDR3 for alpha chain variable domain of TCR clone 289861 (TRAV12-2, TRAJ13)
RAVKKTGGYQKDTF

SEQ ID NO: 579722 - protein, 15 aa, Homo sapiens
  CDR3 for beta chain variable domain of TCR clone 289861 (TRBV27, TRBJ2-1)
CASSNGGGSSNEQFF

SEQ ID NO: 579723 - protein, 16 aa, Homo sapiens
  CDR3 for alpha chain variable domain of TCR clone 289862 (TRAV3, TRAJ18)
CAVREGRGSTLGRLNF

SEQ ID NO: 579724 - protein, 15 aa, Homo sapiens
  CDR3 for beta chain variable domain of TCR clone 289862 (TRBV7-9, TRBJ1-6)
CASSSPGRGNSPLHF

SEQ ID NO: 579725 - protein, 14 aa, Homo sapiens
  CDR3 for alpha chain variable domain of TCR clone 289863 (TRAV13-2, TRAJ17)
CAENSKAAGNKLTC

SEQ ID NO: 579726 - protein, 11 aa, Homo sapiens
  CDR3 for beta chain variable domain of TCR clone 289863 (TRBV6-3, TRBJ2-3)
CATGQADTQYF

SEQ ID NO: 579727 - protein, 17 aa, Homo sapiens
  CDR3 for alpha chain variable domain of TCR clone 289864 (TRAV3, TRAJ6)
CAVRDGPRAGGSYLPTF

SEQ ID NO: 579728 - protein, 12 aa, Homo sapiens
  CDR3 for beta chain variable domain of TCR clone 289864 (TRBV11-2, TRBJ2-2)
CASSLGGGELFF

SEQ ID NO: 579729 - protein, 18 aa, Homo sapiens
  CDR3 for alpha chain variable domain of TCR clone 289865 (TRAV26-2, TRAJ54)
CILRDVEVGIQGAQKLVF

SEQ ID NO: 579730 - protein, 12 aa, Homo sapiens
  CDR3 for beta chain variable domain of TCR clone 289865 (TRBV11-2, TRBJ2-2)
CASSLPTGELFF

SEQ ID NO: 579731 - protein, 15 aa, Homo sapiens
  CDR3 for alpha chain variable domain of TCR clone 289866 (TRAV12-1, TRAJ44)
CVVDSPQGTASKLTF

SEQ ID NO: 579732 - protein, 14 aa, Homo sapiens
  CDR3 for beta chain variable domain of TCR clone 289866 (TRBV7-9, TRBJ2-1)
CASSPRDSLYEQFF

SEQ ID NO: 579733 - protein, 13 aa, Homo sapiens
  CDR3 for alpha chain variable domain of TCR clone 289867 (TRAV8-3, TRAJ28)
CAVGAVGSYQLTF

SEQ ID NO: 579734 - protein, 18 aa, Homo sapiens
  CDR3 for beta chain variable domain of TCR clone 289867 (TRBV4-1, TRBJ1-5)
CASSQDPRGQGLNQPQHF

SEQ ID NO: 579735 - protein, 12 aa, Homo sapiens
  CDR3 for alpha chain variable domain of TCR clone 289868 (TRAV17, TRAJ50)
CAPETSYDKVIF

SEQ ID NO: 579736 - protein, 13 aa, Homo sapiens
  CDR3 for beta chain variable domain of TCR clone 289868 (TRBV7-3, TRBJ1-1)
CASSQDWGAEAFF

SEQ ID NO: 579737 - protein, 15 aa, Homo sapiens
  CDR3 for alpha chain variable domain of TCR clone 289869 (TRAV27, TRAJ38)
CAARRNAGNNRKLIW

SEQ ID NO: 579738 - protein, 14 aa, Homo sapiens
  CDR3 for beta chain variable domain of TCR clone 289869 (TRBV12-5, TRBJ2-5)
CASGSRTHQETQYS

SEQ ID NO: 579739 - protein, 13 aa, Homo sapiens
  CDR3 for alpha chain variable domain of TCR clone 289870 (TRAV12-2, TRAJ42)
CAVKIGSQGNLIF

SEQ ID NO: 579740 - protein, 12 aa, Homo sapiens
  CDR3 for beta chain variable domain of TCR clone 289870 (TRBV5-7, TRBJ1-2)
CASSLVQNGYTF

SEQ ID NO: 579741 - protein, 11 aa, Homo sapiens
  CDR3 for alpha chain variable domain of TCR clone 289871 (TRAV12-3, TRAJ43)
CAMRVSNDMRL

SEQ ID NO: 579742 - protein, 13 aa, Homo sapiens
  CDR3 for beta chain variable domain of TCR clone 289871 (TRBV20-1, TRBJ1-1)
CSAPLGGGTEAFF

SEQ ID NO: 579743 - protein, 14 aa, Homo sapiens
  CDR3 for alpha chain variable domain of TCR clone 289872 (TRAV1-2, TRAJ16)
CAVNRFSDGQKLLF

SEQ ID NO: 579744 - protein, 15 aa, Homo sapiens
  CDR3 for beta chain variable domain of TCR clone 289872 (TRBV28, TRBJ2-5)
CASSSGRTIQETQYF

SEQ ID NO: 579745 - protein, 13 aa, Homo sapiens
  CDR3 for alpha chain variable domain of TCR clone 289873 (TRAV36/DV7, TRAJ37)
CAVLSSNTGKLIF

SEQ ID NO: 579746 - protein, 16 aa, Homo sapiens
  CDR3 for beta chain variable domain of TCR clone 289873 (TRBV5-8, TRBJ2-2)
CASSLINPGGAGELFF

SEQ ID NO: 579747 - protein, 16 aa, Homo sapiens
  CDR3 for alpha chain variable domain of TCR clone 289874 (TRAV29/DV5, TRAJ39)
CAASLLFNNAGNMLTF

SEQ ID NO: 579748 - protein, 16 aa, Homo sapiens
  CDR3 for beta chain variable domain of TCR clone 289874 (TRBV19, TRBJ2-6)
CASSMSGLSGPNVLTF

SEQ ID NO: 579749 - protein, 12 aa, Homo sapiens
  CDR3 for alpha chain variable domain of TCR clone 289875 (TRAV12-2, TRAJ10)
WGVTGGGNKLTF

SEQ ID NO: 579750 - protein, 13 aa, Homo sapiens
  CDR3 for beta chain variable domain of TCR clone 289875 (TRBV24-1, TRBJ2-2)
CATSDWSTGELFF

SEQ ID NO: 579751 - protein, 14 aa, Homo sapiens
  CDR3 for alpha chain variable domain of TCR clone 289876 (TRAV16, TRAJ15)
CALSFNQAGTALIF

SEQ ID NO: 579752 - protein, 15 aa, Homo sapiens
  CDR3 for beta chain variable domain of TCR clone 289876 (TRBV7-8, TRBJ2-7)
CASSLERAGSYEQYF

SEQ ID NO: 579753 - protein, 14 aa, Homo sapiens
  CDR3 for alpha chain variable domain of TCR clone 289877 (TRAV38-1, TRAJ45)
CASHSGGGADGLTF

SEQ ID NO: 579754 - protein, 16 aa, Homo sapiens
  CDR3 for beta chain variable domain of TCR clone 289877 (TRBV25-1, TRBJ1-1)
CASSGDRDRGRIEAFF

SEQ ID NO: 579755 - protein, 14 aa, Homo sapiens
  CDR3 for alpha chain variable domain of TCR clone 289878 (TRAV1-2, TRAJ24)
CAVLTTDSWGKFPF

SEQ ID NO: 579756 - protein, 13 aa, Homo sapiens
  CDR3 for beta chain variable domain of TCR clone 289878 (TRBV6-5, TRBJ1-2)
CASSSYGTLGYTF

SEQ ID NO: 579757 - protein, 13 aa, Homo sapiens
  CDR3 for alpha chain variable domain of TCR clone 289879 (TRAV3, TRAJ30)
CAVRDRGDDKIIF

SEQ ID NO: 579758 - protein, 16 aa, Homo sapiens
  CDR3 for beta chain variable domain of TCR clone 289879 (TRBV7-3, TRBJ2-2)
GASSLKRGTLSGELFF

SEQ ID NO: 579759 - protein, 16 aa, Homo sapiens
  CDR3 for alpha chain variable domain of TCR clone 289880 (TRAV4, TRAJ22)
CLVGDLYSGSARQLTF

SEQ ID NO: 579760 - protein, 14 aa, Homo sapiens
  CDR3 for beta chain variable domain of TCR clone 289880 (TRBV20-1, TRBJ2-1)
CSAQIGGSANEQFF

SEQ ID NO: 579761 - protein, 12 aa, Homo sapiens
  CDR3 for alpha chain variable domain of TCR clone 289881 (TRAV1-1, TRAJ39)
CAVPVVGNMLTF

SEQ ID NO: 579762 - protein, 14 aa, Homo sapiens
  CDR3 for beta chain variable domain of TCR clone 289881 (TRBV6-1, TRBJ1-3)
CASVQGGGGNTIYF

SEQ ID NO: 579763 - protein, 12 aa, Homo sapiens
  CDR3 for alpha chain variable domain of TCR clone 289882 (TRAV13-2, TRAJ23)
CAERHRGAKLIF

SEQ ID NO: 579764 - protein, 13 aa, Homo sapiens
  CDR3 for beta chain variable domain of TCR clone 289882 (TRBV7-9, TRBJ1-2)
CASSLKQNYGYTF

SEQ ID NO: 579765 - protein, 11 aa, Homo sapiens
  CDR3 for alpha chain variable domain of TCR clone 289883 (TRAV1-1, TRAJ23)
CAVRQGGKLIF

SEQ ID NO: 579766 - protein, 13 aa, Homo sapiens
  CDR3 for beta chain variable domain of TCR clone 289883 (TRBV4-3, TRBJ1-1)
CASSQDWADRAFF

SEQ ID NO: 579767 - protein, 16 aa, Homo sapiens
  CDR3 for alpha chain variable domain of TCR clone 289884 (TRAV3, TRAJ10)
CAVGDMRAGGGNKLTF

SEQ ID NO: 579768 - protein, 14 aa, Homo sapiens
  CDR3 for beta chain variable domain of TCR clone 289884 (TRBV7-2, TRBJ2-7)
CASSPKTSFYEQYF

SEQ ID NO: 579769 - protein, 15 aa, Homo sapiens
  CDR3 for alpha chain variable domain of TCR clone 289885 (TRAV3, TRAJ3)
WAVRDRDSSASKIIF

SEQ ID NO: 579770 - protein, 18 aa, Homo sapiens
  CDR3 for beta chain variable domain of TCR clone 289885 (TRBV25-1, TRBJ1-2)
CASSGLQNGQGLIFGYTF

SEQ ID NO: 579771 - protein, 15 aa, Homo sapiens
  CDR3 for alpha chain variable domain of TCR clone 289886 (TRAV17, TRAJ57)
FATGPSQGGSEKLVF

SEQ ID NO: 579772 - protein, 16 aa, Homo sapiens
  CDR3 for beta chain variable domain of TCR clone 289886 (TRBV12-4, TRBJ1-5)
CDSSRPVGGSNQPQHF

SEQ ID NO: 579773 - protein, 16 aa, Homo sapiens
  CDR3 for alpha chain variable domain of TCR clone 289887 (TRAV1-2, TRAJ18)
CAVRVERGSTLGRLYF

SEQ ID NO: 579774 - protein, 16 aa, Homo sapiens
  CDR3 for beta chain variable domain of TCR clone 289887 (TRBV20-1, TRBJ2-7)
CSASTRGRLSSYEQYF

SEQ ID NO: 579775 - protein, 11 aa, Homo sapiens
  CDR3 for alpha chain variable domain of TCR clone 289888 (TRAV3, TRAJ21)
CAVGNFNKFYF

SEQ ID NO: 579776 - protein, 14 aa, Homo sapiens
  CDR3 for beta chain variable domain of TCR clone 289888 (TRBV7-9, TRBJ1-1)
CASSLGHGNTEAFF

SEQ ID NO: 579777 - protein, 13 aa, Homo sapiens
  CDR3 for alpha chain variable domain of TCR clone 289889 (TRAV3, TRAJ40)
CAVRGSGAYKYIF

SEQ ID NO: 579778 - protein, 16 aa, Homo sapiens
  CDR3 for beta chain variable domain of TCR clone 289889 (TRBV12-5, TRBJ2-5)
CASGPRTSGNQEAQYF

SEQ ID NO: 579779 - protein, 15 aa, Homo sapiens
  CDR3 for alpha chain variable domain of TCR clone 289890 (TRAV2, TRAJ9)
CAVDDRGTGGFKTIF

SEQ ID NO: 579780 - protein, 15 aa, Homo sapiens
  CDR3 for beta chain variable domain of TCR clone 289890 (TRBV19, TRBJ1-2)
CASSVGQVLNYGYTF

SEQ ID NO: 579781 - protein, 15 aa, Homo sapiens
  CDR3 for alpha chain variable domain of TCR clone 289891 (TRAV8-4, TRAJ13)
CAVSDWGGGYQKVTS

SEQ ID NO: 579782 - protein, 15 aa, Homo sapiens
  CDR3 for beta chain variable domain of TCR clone 289891 (TRBV25-1, TRBJ1-4)
CASSPGDSTNEKLFF

SEQ ID NO: 579783 - protein, 12 aa, Homo sapiens
  CDR3 for alpha chain variable domain of TCR clone 289892 (TRAV22, TRAJ29)
CAPPSGNTPLVF

SEQ ID NO: 579784 - protein, 14 aa, Homo sapiens
  CDR3 for beta chain variable domain of TCR clone 289892 (TRBV11-2, TRBJ2-7)
CARSLGAGAYEQYF

SEQ ID NO: 579785 - protein, 14 aa, Homo sapiens
  CDR3 for alpha chain variable domain of TCR clone 289893 (TRAV23/DV6, TRAJ11)
CAASLEPGYSTLTL

SEQ ID NO: 579786 - protein, 13 aa, Homo sapiens
  CDR3 for beta chain variable domain of TCR clone 289893 (TRBV4-1, TRBJ2-5)
CASSLTRGETQYF

SEQ ID NO: 579787 - protein, 14 aa, Homo sapiens
  CDR3 for alpha chain variable domain of TCR clone 289894 (TRAV1-2, TRAJ8)
CAVREDTGFLKLVF

SEQ ID NO: 579788 - protein, 15 aa, Homo sapiens
  CDR3 for beta chain variable domain of TCR clone 289894 (TRBV20-1, TRBJ2-7)
CSARDRVSGMDEQYF

SEQ ID NO: 579789 - protein, 15 aa, Homo sapiens
  CDR3 for alpha chain variable domain of TCR clone 289895 (TRAV13-1, TRAJ57)
CAASNTQGGSEKLVF

SEQ ID NO: 579790 - protein, 16 aa, Homo sapiens
  CDR3 for beta chain variable domain of TCR clone 289895 (TRBV19, TRBJ2-1)
CASSKAAPSSYNEQFF

SEQ ID NO: 579791 - protein, 14 aa, Homo sapiens
  CDR3 for alpha chain variable domain of TCR clone 289896 (TRAV23/DV6, TRAJ4)
CAANLSGGYNKLIV

SEQ ID NO: 579792 - protein, 11 aa, Homo sapiens
  CDR3 for beta chain variable domain of TCR clone 289896 (TRBV7-9, TRBJ2-3)
CASSPTDTQYF

SEQ ID NO: 579793 - protein, 14 aa, Homo sapiens
  CDR3 for alpha chain variable domain of TCR clone 289897 (TRAV26-1, TRAJ31)
CIALPPNNNARLMF

SEQ ID NO: 579794 - protein, 16 aa, Homo sapiens
  CDR3 for beta chain variable domain of TCR clone 289897 (TRBV10-2, TRBJ2-7)
CTSSESPGSSGSEQYF

SEQ ID NO: 579795 - protein, 16 aa, Homo sapiens
  CDR3 for alpha chain variable domain of TCR clone 289898 (TRAV4, TRAJ22)
CLVGGLYSGSARQLTF

SEQ ID NO: 579796 - protein, 17 aa, Homo sapiens
  CDR3 for beta chain variable domain of TCR clone 289898 (TRBV11-2, TRBJ2-1)
CASSLYPPGVECNEQFF

SEQ ID NO: 579797 - protein, 11 aa, Homo sapiens
  CDR3 for alpha chain variable domain of TCR clone 289899 (TRAV17, TRAJ31)
CATSNNARLMF

SEQ ID NO: 579798 - protein, 16 aa, Homo sapiens
  CDR3 for beta chain variable domain of TCR clone 289899 (TRBV7-8, TRBJ2-4)
CASSAERTLAKTRQYF

SEQ ID NO: 579799 - protein, 16 aa, Homo sapiens
  CDR3 for alpha chain variable domain of TCR clone 289900 (TRAV12-2, TRAJ32)
CAVNFGQGGATNKPIF

SEQ ID NO: 579800 - protein, 15 aa, Homo sapiens
  CDR3 for beta chain variable domain of TCR clone 289900 (TRBV20-1, TRBJ2-7)
CSARGPLAGGREQYF

SEQ ID NO: 579801 - protein, 15 aa, Homo sapiens
  CDR3 for alpha chain variable domain of TCR clone 289901 (TRAV3, TRAJ22)
CAVRDRGGFARQRTF

SEQ ID NO: 579802 - protein, 16 aa, Homo sapiens
  CDR3 for beta chain variable domain of TCR clone 289901 (TRBV5-4, TRBJ2-3)
CASQQPGAGGADTQYF

SEQ ID NO: 579803 - protein, 15 aa, Homo sapiens
  CDR3 for alpha chain variable domain of TCR clone 289902 (TRAV29/DV5, TRAJ42)
CAAKTDGGSQGNLIF

SEQ ID NO: 579804 - protein, 15 aa, Homo sapiens
  CDR3 for beta chain variable domain of TCR clone 289902 (TRBV5-1, TRBJ2-2)
CASSSQGGNTGELFL

SEQ ID NO: 579805 - protein, 12 aa, Homo sapiens
  CDR3 for alpha chain variable domain of TCR clone 289903 (TRAV8-3, TRAJ26)
CAGDNYGQNFVF

SEQ ID NO: 579806 - protein, 14 aa, Homo sapiens
  CDR3 for beta chain variable domain of TCR clone 289903 (TRBV4-1, TRBJ2-7)
CASSPVAGGDEQYF

SEQ ID NO: 579807 - protein, 14 aa, Homo sapiens
  CDR3 for alpha chain variable domain of TCR clone 289904 (TRAV12-1, TRAJ41)
CVVLNSNSGYVLNF

SEQ ID NO: 579808 - protein, 14 aa, Homo sapiens
  CDR3 for beta chain variable domain of TCR clone 289904 (TRBV5-1, TRBJ2-7)
CASSRGESLYEQYF

SEQ ID NO: 579809 - protein, 14 aa, Homo sapiens
  CDR3 for alpha chain variable domain of TCR clone 289905 (TRAV1-1, TRAJ23)
RAVSIYNQGGKLIF

SEQ ID NO: 579810 - protein, 15 aa, Homo sapiens
  CDR3 for beta chain variable domain of TCR clone 289905 (TRBV28, TRBJ1-1)
CASSLGRGFRTGAFF

SEQ ID NO: 579811 - protein, 16 aa, Homo sapiens
  CDR3 for alpha chain variable domain of TCR clone 289906 (TRAV1-2, TRAJ27)
CAVREPQTPMHANQPL

SEQ ID NO: 579812 - protein, 13 aa, Homo sapiens
  CDR3 for beta chain variable domain of TCR clone 289906 (TRBV6-1, TRBJ1-2)
CASSAREGYGYTF

SEQ ID NO: 579813 - protein, 13 aa, Homo sapiens
  CDR3 for alpha chain variable domain of TCR clone 289907 (TRAV21, TRAJ27)
CAARPGNAGKSTF

SEQ ID NO: 579814 - protein, 16 aa, Homo sapiens
  CDR3 for beta chain variable domain of TCR clone 289907 (TRBV20-1, TRBJ1-2)
CSASMGQSVANYGYTF

SEQ ID NO: 579815 - protein, 14 aa, Homo sapiens
  CDR3 for alpha chain variable domain of TCR clone 289908 (TRAV12-1, TRAJ23)
CVVNIYNKGGKLIF

SEQ ID NO: 579816 - protein, 13 aa, Homo sapiens
  CDR3 for beta chain variable domain of TCR clone 289908 (TRBV29-1, TRBJ2-5)
CSVLLASGETQYF

SEQ ID NO: 579817 - protein, 14 aa, Homo sapiens
  CDR3 for alpha chain variable domain of TCR clone 289909 (TRAV12-3, TRAJ10)
SHLPLTGGGNKLTF

SEQ ID NO: 579818 - protein, 16 aa, Homo sapiens
  CDR3 for beta chain variable domain of TCR clone 289909 (TRBV19, TRBJ2-1)
CASSSKGTRSYNEQFF

SEQ ID NO: 579819 - protein, 12 aa, Homo sapiens
  CDR3 for alpha chain variable domain of TCR clone 289910 (TRAV8-6, TRAJ26)
CAGDNYGQNFVF

SEQ ID NO: 579820 - protein, 13 aa, Homo sapiens
  CDR3 for beta chain variable domain of TCR clone 289910 (TRBV20-1, TRBJ1-1)
CSAPLGGGTEAFF

SEQ ID NO: 579821 - protein, 11 aa, Homo sapiens
  CDR3 for alpha chain variable domain of TCR clone 289911 (TRAV1-2, TRAJ20)
CAVANDYKLSF

SEQ ID NO: 579822 - protein, 18 aa, Homo sapiens
  CDR3 for beta chain variable domain of TCR clone 289911 (TRBV20-1, TRBJ2-6)
GSAETTTTHGSGANVLTV

SEQ ID NO: 579823 - protein, 14 aa, Homo sapiens
  CDR3 for alpha chain variable domain of TCR clone 289912 (TRAV21, TRAJ35)
CAVMPIGFGIVLHC

SEQ ID NO: 579824 - protein, 12 aa, Homo sapiens
  CDR3 for beta chain variable domain of TCR clone 289912 (TRBV7-9, TRBJ2-7)
YASSIKREEQYF

SEQ ID NO: 579825 - protein, 14 aa, Homo sapiens
  CDR3 for alpha chain variable domain of TCR clone 289913 (TRAV41, TRAJ32)
CCPNYGGATNKLIF

SEQ ID NO: 579826 - protein, 15 aa, Homo sapiens
  CDR3 for beta chain variable domain of TCR clone 289913 (TRBV11-2, TRBJ2-1)
CASSKNRGLIYEEFF

SEQ ID NO: 579827 - protein, 16 aa, Homo sapiens
  CDR3 for alpha chain variable domain of TCR clone 289914 (TRAV26-2, TRAJ40)
CILRDVIGGGTYKYIF

SEQ ID NO: 579828 - protein, 15 aa, Homo sapiens
  CDR3 for beta chain variable domain of TCR clone 289914 (TRBV10-3, TRBJ2-5)
CAISEFGRGQETQYF

SEQ ID NO: 579829 - protein, 15 aa, Homo sapiens
  CDR3 for alpha chain variable domain of TCR clone 289915 (TRAV21, TRAJ38)
CAVTQDAGNNRKLIW

SEQ ID NO: 579830 - protein, 16 aa, Homo sapiens
  CDR3 for beta chain variable domain of TCR clone 289915 (TRBV4-2, TRBJ1-1)
CASRPLDGGGDTEAFF

SEQ ID NO: 579831 - protein, 15 aa, Homo sapiens
  CDR3 for alpha chain variable domain of TCR clone 289916 (TRAV26-1, TRAJ29)
CIVRVEGSGNTPLVF

SEQ ID NO: 579832 - protein, 15 aa, Homo sapiens
  CDR3 for beta chain variable domain of TCR clone 289916 (TRBV6-1, TRBJ2-1)
CASSELRGQYNEQFF

SEQ ID NO: 579833 - protein, 12 aa, Homo sapiens
  CDR3 for alpha chain variable domain of TCR clone 289917 (TRAV3, TRAJ20)
RAVRDGDYKLSF

SEQ ID NO: 579834 - protein, 14 aa, Homo sapiens
  CDR3 for beta chain variable domain of TCR clone 289917 (TRBV4-1, TRBJ2-5)
CASSRSGSGETQYF

SEQ ID NO: 579835 - protein, 13 aa, Homo sapiens
  CDR3 for alpha chain variable domain of TCR clone 289918 (TRAV2, TRAJ10)
CAVETGGGHKLTF

SEQ ID NO: 579836 - protein, 14 aa, Homo sapiens
  CDR3 for beta chain variable domain of TCR clone 289918 (TRBV20-1, TRBJ2-3)
CSAGGRRGTDTQYF

SEQ ID NO: 579837 - protein, 16 aa, Homo sapiens
  CDR3 for alpha chain variable domain of TCR clone 289919 (TRAV4, TRAJ22)
CLVGDLYSGSARHLTF

SEQ ID NO: 579838 - protein, 15 aa, Homo sapiens
  CDR3 for beta chain variable domain of TCR clone 289919 (TRBV7-9, TRBJ1-4)
CASSRTGGFNEKLFF

SEQ ID NO: 579839 - protein, 13 aa, Homo sapiens
  CDR3 for alpha chain variable domain of TCR clone 289920 (TRAV8-2, TRAJ45)
CVVTTLQEELLTD

SEQ ID NO: 579840 - protein, 14 aa, Homo sapiens
  CDR3 for beta chain variable domain of TCR clone 289920 (TRBV7-2, TRBJ1-1)
CASSFLTGTTEAFF

SEQ ID NO: 579841 - protein, 17 aa, Homo sapiens
  CDR3 for alpha chain variable domain of TCR clone 289921 (TRAV23/DV6, TRAJ57)
CAASSTLSQGGSEKLFF

SEQ ID NO: 579842 - protein, 14 aa, Homo sapiens
  CDR3 for beta chain variable domain of TCR clone 289921 (TRBV25-1, TRBJ1-1)
CASTHLGGNTEAVF

SEQ ID NO: 579843 - protein, 15 aa, Homo sapiens
  CDR3 for alpha chain variable domain of TCR clone 289922 (TRAV6, TRAJ13)
CALGGDWGGLPESYL

SEQ ID NO: 579844 - protein, 12 aa, Homo sapiens
  CDR3 for beta chain variable domain of TCR clone 289922 (TRBV5-7, TRBJ1-2)
CASSDRIHGYTS

SEQ ID NO: 579845 - protein, 11 aa, Homo sapiens
  CDR3 for alpha chain variable domain of TCR clone 289923 (TRAV12-3, TRAJ43)
CAMSVSNAVRF

SEQ ID NO: 579846 - protein, 13 aa, Homo sapiens
  CDR3 for beta chain variable domain of TCR clone 289923 (TRBV20-1, TRBJ1-1)
CSAPLGGGTEAFF

SEQ ID NO: 579847 - protein, 14 aa, Homo sapiens
  CDR3 for alpha chain variable domain of TCR clone 289924 (TRAV1-2, TRAJ16)
CAVNRFSAGQKLLF

SEQ ID NO: 579848 - protein, 15 aa, Homo sapiens
  CDR3 for beta chain variable domain of TCR clone 289924 (TRBV27, TRBJ2-1)
CASSNGGGSSNEQFF

SEQ ID NO: 579849 - protein, 17 aa, Homo sapiens
  CDR3 for alpha chain variable domain of TCR clone 289925 (TRAV8-1, TRAJ43)
CAVTNDMRFGAGTRLPV

SEQ ID NO: 579850 - protein, 17 aa, Homo sapiens
  CDR3 for beta chain variable domain of TCR clone 289925 (TRBV5-4, TRBJ2-1)
CASSSAGGRGHYNEQFF

SEQ ID NO: 579851 - protein, 11 aa, Homo sapiens
  CDR3 for alpha chain variable domain of TCR clone 289926 (TRAV3, TRAJ17)
PRGAAGNKLTF

SEQ ID NO: 579852 - protein, 15 aa, Homo sapiens
  CDR3 for beta chain variable domain of TCR clone 289926 (TRBV7-3, TRBJ2-2)
CASSGTGQGTGELFF

SEQ ID NO: 579853 - protein, 16 aa, Homo sapiens
  CDR3 for alpha chain variable domain of TCR clone 289927 (TRAV3, TRAJ42)
CAVRDIEGGSQGNLIF

SEQ ID NO: 579854 - protein, 16 aa, Homo sapiens
  CDR3 for beta chain variable domain of TCR clone 289927 (TRBV5-1, TRBJ1-1)
CASSSGGNSLNTEAFF

SEQ ID NO: 579855 - protein, 13 aa, Homo sapiens
  CDR3 for alpha chain variable domain of TCR clone 289928 (TRAV2, TRAJ15)
CAVASQAGTALIF

SEQ ID NO: 579856 - protein, 15 aa, Homo sapiens
  CDR3 for beta chain variable domain of TCR clone 289928 (TRBV4-2, TRBJ1-2)
CASSQRTGGRDGYTF

SEQ ID NO: 579857 - protein, 15 aa, Homo sapiens
  CDR3 for alpha chain variable domain of TCR clone 289929 (TRAV17, TRAJ56)
CATEPFTGANSKLTF

SEQ ID NO: 579858 - protein, 15 aa, Homo sapiens
  CDR3 for beta chain variable domain of TCR clone 289929 (TRBV28, TRBJ1-5)
CASSRTRGYVQPQHF

SEQ ID NO: 579859 - protein, 17 aa, Homo sapiens
  CDR3 for alpha chain variable domain of TCR clone 289930 (TRAV3, TRAJ12)
CAVRDGGRMDSSYKLIF

SEQ ID NO: 579860 - protein, 17 aa, Homo sapiens
  CDR3 for beta chain variable domain of TCR clone 289930 (TRBV6-4, TRBJ2-4)
CASSDSRDRVPKNIQYF

SEQ ID NO: 579861 - protein, 14 aa, Homo sapiens
  CDR3 for alpha chain variable domain of TCR clone 289931 (TRAV35, TRAJ50)
CAGHRKTSYDKVIF

SEQ ID NO: 579862 - protein, 15 aa, Homo sapiens
  CDR3 for beta chain variable domain of TCR clone 289931 (TRBV11-2, TRBJ2-1)
CASSKNRGLIYEQFF

SEQ ID NO: 579863 - protein, 14 aa, Homo sapiens
  CDR3 for alpha chain variable domain of TCR clone 289932 (TRAV1-2, TRAJ16)
CAVNRFSDGQKLLF

SEQ ID NO: 579864 - protein, 13 aa, Homo sapiens
  CDR3 for beta chain variable domain of TCR clone 289932 (TRBV6-4, TRBJ2-3)
CASSVSWADTQYF

SEQ ID NO: 579865 - protein, 15 aa, Homo sapiens
  CDR3 for alpha chain variable domain of TCR clone 289933 (TRAV26-1, TRAJ22)
CIVRVSFWFCKELTF

SEQ ID NO: 579866 - protein, 13 aa, Homo sapiens
  CDR3 for beta chain variable domain of TCR clone 289933 (TRBV7-9, TRBJ1-2)
CASSLKQNYGYTF

SEQ ID NO: 579867 - protein, 15 aa, Homo sapiens
  CDR3 for alpha chain variable domain of TCR clone 289934 (TRAV12-1, TRAJ40)
CVVNRDTSGTYKYIF

SEQ ID NO: 579868 - protein, 15 aa, Homo sapiens
  CDR3 for beta chain variable domain of TCR clone 289934 (TRBV12-4, TRBJ2-5)
CANTLNSGRGETQYF

SEQ ID NO: 579869 - protein, 12 aa, Homo sapiens
  CDR3 for alpha chain variable domain of TCR clone 289935 (TRAV12-1, TRAJ40)
CVVYSGTYKYIF

SEQ ID NO: 579870 - protein, 16 aa, Homo sapiens
  CDR3 for beta chain variable domain of TCR clone 289935 (TRBV10-3, TRBJ2-7)
CAISADFADRPYEQYF

SEQ ID NO: 579871 - protein, 15 aa, Homo sapiens
  CDR3 for alpha chain variable domain of TCR clone 289936 (TRAV17, TRAJ57)
CATGPSQGGSEKLVF

SEQ ID NO: 579872 - protein, 14 aa, Homo sapiens
  CDR3 for beta chain variable domain of TCR clone 289936 (TRBV13, TRBJ2-5)
CASSVDRVGETQYF

SEQ ID NO: 579873 - protein, 18 aa, Homo sapiens
  CDR3 for alpha chain variable domain of TCR clone 289937 (TRAV12-1, TRAJ52)
CVVKLINAGGTSCGKLTF

SEQ ID NO: 579874 - protein, 16 aa, Homo sapiens
  CDR3 for beta chain variable domain of TCR clone 289937 (TRBV7-6, TRBJ2-7)
CASSGGTGALSYEQYF

SEQ ID NO: 579875 - protein, 14 aa, Homo sapiens
  CDR3 for alpha chain variable domain of TCR clone 289938 (TRAV12-3, TRAJ29)
CAMILLSGNTPLVF

SEQ ID NO: 579876 - protein, 14 aa, Homo sapiens
  CDR3 for beta chain variable domain of TCR clone 289938 (TRBV7-8, TRBJ2-3)
CASSLEAGTDTQYF

SEQ ID NO: 579877 - protein, 14 aa, Homo sapiens
  CDR3 for alpha chain variable domain of TCR clone 289939 (TRAV20, TRAJ20)
CSVRRGYHDYKLSF

SEQ ID NO: 579878 - protein, 13 aa, Homo sapiens
  CDR3 for beta chain variable domain of TCR clone 289939 (TRBV19, TRBJ2-5)
CASSETAPETQYF

SEQ ID NO: 579879 - protein, 13 aa, Homo sapiens
  CDR3 for alpha chain variable domain of TCR clone 289940 (TRAV21, TRAJ57)
CAVTQGGSEKLVL

SEQ ID NO: 579880 - protein, 17 aa, Homo sapiens
  CDR3 for beta chain variable domain of TCR clone 289940 (TRBV13, TRBJ2-3)
CASSLSRVAGGRNTQYF

SEQ ID NO: 579881 - protein, 14 aa, Homo sapiens
  CDR3 for alpha chain variable domain of TCR clone 289941 (TRAV4, TRAJ43)
CLVGPMSNNNDMRF

SEQ ID NO: 579882 - protein, 21 aa, Homo sapiens
  CDR3 for beta chain variable domain of TCR clone 289941 (TRBV11-1, TRBJ2-1)
CASSARERLRPEGPSYNEQFF

SEQ ID NO: 579883 - protein, 15 aa, Homo sapiens
  CDR3 for alpha chain variable domain of TCR clone 289942 (TRAV4, TRAJ39)
CLVGPNNNAGNMLTF

SEQ ID NO: 579884 - protein, 18 aa, Homo sapiens
  CDR3 for beta chain variable domain of TCR clone 289942 (TRBV7-9, TRBJ2-7)
CASSLTTSGSRTWYEQYF

SEQ ID NO: 579885 - protein, 16 aa, Homo sapiens
  CDR3 for alpha chain variable domain of TCR clone 289943 (TRAV30, TRAJ26)
CVTESVGDNYGQNFVF

SEQ ID NO: 579886 - protein, 13 aa, Homo sapiens
  CDR3 for beta chain variable domain of TCR clone 289943 (TRBV19, TRBJ1-2)
CASSISEDYGYTF

SEQ ID NO: 579887 - protein, 12 aa, Homo sapiens
  CDR3 for alpha chain variable domain of TCR clone 289944 (TRAV38-1, TRAJ57)
CAFMKLPPTLVF

SEQ ID NO: 579888 - protein, 16 aa, Homo sapiens
  CDR3 for beta chain variable domain of TCR clone 289944 (TRBV19, TRBJ2-1)
CASSKAGPSSYNEQFF

SEQ ID NO: 579889 - protein, 13 aa, Homo sapiens
  CDR3 for alpha chain variable domain of TCR clone 289945 (TRAV2, TRAJ15)
CAVASQAGTALIF

SEQ ID NO: 579890 - protein, 16 aa, Homo sapiens
  CDR3 for beta chain variable domain of TCR clone 289945 (TRBV5-1, TRBJ1-1)
CASSSGGNSLNPEAFF

SEQ ID NO: 579891 - protein, 16 aa, Homo sapiens
  CDR3 for alpha chain variable domain of TCR clone 289946 (TRAV3, TRAJ10)
CAVSDMRSGGGNKLTF

SEQ ID NO: 579892 - protein, 13 aa, Homo sapiens
  CDR3 for beta chain variable domain of TCR clone 289946 (TRBV6-1, TRBJ1-1)
CASSRQGNTEAFF

SEQ ID NO: 579893 - protein, 16 aa, Homo sapiens
  CDR3 for alpha chain variable domain of TCR clone 289947 (TRAV14/DV4, TRAJ15)
CAMREGPAQAGTALIF

SEQ ID NO: 579894 - protein, 11 aa, Homo sapiens
  CDR3 for beta chain variable domain of TCR clone 289947 (TRBV28, TRBJ2-6)
CHPGWANVLTF

SEQ ID NO: 579895 - protein, 16 aa, Homo sapiens
  CDR3 for alpha chain variable domain of TCR clone 289948 (TRAV4, TRAJ5)
CLVGPDHGHGQESTYF

SEQ ID NO: 579896 - protein, 15 aa, Homo sapiens
  CDR3 for beta chain variable domain of TCR clone 289948 (TRBV27, TRBJ2-5)
CACSLIPSGGETQYF

SEQ ID NO: 579897 - protein, 10 aa, Homo sapiens
  CDR3 for alpha chain variable domain of TCR clone 289949 (TRAV12-1, TRAJ37)
ARGNTGKLIF

SEQ ID NO: 579898 - protein, 15 aa, Homo sapiens
  CDR3 for beta chain variable domain of TCR clone 289949 (TRBV18, TRBJ1-6)
CASSPGGGVNSPLHF

SEQ ID NO: 579899 - protein, 14 aa, Homo sapiens
  CDR3 for alpha chain variable domain of TCR clone 289950 (TRAV8-6, TRAJ20)
CAVSDRRVRDKLSF

SEQ ID NO: 579900 - protein, 12 aa, Homo sapiens
  CDR3 for beta chain variable domain of TCR clone 289950 (TRBV3-1, TRBJ2-2)
CASSLFPGELFF

SEQ ID NO: 579901 - protein, 17 aa, Homo sapiens
  CDR3 for alpha chain variable domain of TCR clone 289951 (TRAV36/DV7, TRAJ52)
CAVAQRAGGTSYGKLTF

SEQ ID NO: 579902 - protein, 14 aa, Homo sapiens
  CDR3 for beta chain variable domain of TCR clone 289951 (TRBV7-7, TRBJ2-2)
CATRQDSDTGELFF

SEQ ID NO: 579903 - protein, 16 aa, Homo sapiens
  CDR3 for alpha chain variable domain of TCR clone 289952 (TRAV23/DV6, TRAJ9)
CAASIGGNTGGFKTIF

SEQ ID NO: 579904 - protein, 14 aa, Homo sapiens
  CDR3 for beta chain variable domain of TCR clone 289952 (TRBV19, TRBJ2-7)
CASTVQGRPYEQYF

SEQ ID NO: 579905 - protein, 17 aa, Homo sapiens
  CDR3 for alpha chain variable domain of TCR clone 289953 (TRAV3, TRAJ42)
CAVRDRAYGGSQGNLIF

SEQ ID NO: 579906 - protein, 17 aa, Homo sapiens
  CDR3 for beta chain variable domain of TCR clone 289953 (TRBV7-9, TRBJ2-3)
CASSPTVAGDLTDTQYF

SEQ ID NO: 579907 - protein, 12 aa, Homo sapiens
  CDR3 for alpha chain variable domain of TCR clone 289954 (TRAV2, TRAJ33)
CAVPDSNYPLIW

SEQ ID NO: 579908 - protein, 13 aa, Homo sapiens
  CDR3 for beta chain variable domain of TCR clone 289954 (TRBV12-4, TRBJ1-1)
CASSPGTGFEAFF

SEQ ID NO: 579909 - protein, 18 aa, Homo sapiens
  CDR3 for alpha chain variable domain of TCR clone 289955 (TRAV13-1, TRAJ52)
CAAKNPNAGGTSYGKLTF

SEQ ID NO: 579910 - protein, 17 aa, Homo sapiens
  CDR3 for beta chain variable domain of TCR clone 289955 (TRBV6-3, TRBJ2-2)
CASSYAGQGVNTGELFF

SEQ ID NO: 579911 - protein, 11 aa, Homo sapiens
  CDR3 for alpha chain variable domain of TCR clone 289956 (TRAV12-2, TRAJ43)
CAAYNNNDMRF

SEQ ID NO: 579912 - protein, 14 aa, Homo sapiens
  CDR3 for beta chain variable domain of TCR clone 289956 (TRBV7-8, TRBJ1-2)
CASSVGTAIYGYSF

SEQ ID NO: 579913 - protein, 14 aa, Homo sapiens
  CDR3 for alpha chain variable domain of TCR clone 289957 (TRAV29/DV5, TRAJ36)
CAARRKTGANNPFF

SEQ ID NO: 579914 - protein, 14 aa, Homo sapiens
  CDR3 for beta chain variable domain of TCR clone 289957 (TRBV6-1, TRBJ1-3)
CASVQGGGGNTIYF

SEQ ID NO: 579915 - protein, 19 aa, Homo sapiens
  CDR3 for alpha chain variable domain of TCR clone 289958 (TRAV40, )
CLPIPDIQNPDPAVYQLRD

SEQ ID NO: 579916 - protein, 15 aa, Homo sapiens
  CDR3 for beta chain variable domain of TCR clone 289958 (TRBV2, TRBJ1-2)
CASSEIGGASYGYTF

SEQ ID NO: 579917 - protein, 11 aa, Homo sapiens
  CDR3 for alpha chain variable domain of TCR clone 289959 (TRAV1-1, TRAJ23)
CAVRQGGKLIF

SEQ ID NO: 579918 - protein, 14 aa, Homo sapiens
  CDR3 for beta chain variable domain of TCR clone 289959 (TRBV19, TRBJ2-1)
CAGPTFVLSGEQFF

SEQ ID NO: 579919 - protein, 13 aa, Homo sapiens
  CDR3 for alpha chain variable domain of TCR clone 289960 (TRAV8-3, TRAJ6)
CAVEKGGSYIPTV

SEQ ID NO: 579920 - protein, 15 aa, Homo sapiens
  CDR3 for beta chain variable domain of TCR clone 289960 (TRBV28, TRBJ2-5)
CASSADRGRGETQYF

SEQ ID NO: 579921 - protein, 14 aa, Homo sapiens
  CDR3 for alpha chain variable domain of TCR clone 289961 (TRAV12-2, TRAJ13)
CAVKKTGGYQKVTF

SEQ ID NO: 579922 - protein, 14 aa, Homo sapiens
  CDR3 for beta chain variable domain of TCR clone 289961 (TRBV6-1, TRBJ1-3)
CASVRGGGGNTIYF

SEQ ID NO: 579923 - protein, 15 aa, Homo sapiens
  CDR3 for alpha chain variable domain of TCR clone 289962 (TRAV8-3, TRAJ11)
CAVGLLNSGYGTLPF

SEQ ID NO: 579924 - protein, 16 aa, Homo sapiens
  CDR3 for beta chain variable domain of TCR clone 289962 (TRBV7-9, TRBJ1-2)
CASSLGFSSGEDGYTF

SEQ ID NO: 579925 - protein, 14 aa, Homo sapiens
  CDR3 for alpha chain variable domain of TCR clone 289963 (TRAV26-1, TRAJ38)
FIADNAGNNRKLIW

SEQ ID NO: 579926 - protein, 14 aa, Homo sapiens
  CDR3 for beta chain variable domain of TCR clone 289963 (TRBV20-1, TRBJ2-1)
CSAQIGGSANEQFF

SEQ ID NO: 579927 - protein, 13 aa, Homo sapiens
  CDR3 for alpha chain variable domain of TCR clone 289964 (TRAV27, TRAJ6)
CAGGTRGSYIPTF

SEQ ID NO: 579928 - protein, 13 aa, Homo sapiens
  CDR3 for beta chain variable domain of TCR clone 289964 (TRBV7-6, TRBJ1-2)
CASSLVADYGYTF

SEQ ID NO: 579929 - protein, 11 aa, Homo sapiens
  CDR3 for alpha chain variable domain of TCR clone 289965 (TRAV3, TRAJ21)
CAVGNFNKFYF

SEQ ID NO: 579930 - protein, 14 aa, Homo sapiens
  CDR3 for beta chain variable domain of TCR clone 289965 (TRBV12-5, TRBJ2-5)
CASGSRTHQETQYV

SEQ ID NO: 579931 - protein, 16 aa, Homo sapiens
  CDR3 for alpha chain variable domain of TCR clone 289966 (TRAV3, TRAJ21)
CSVRDIERGNFNKFYF

SEQ ID NO: 579932 - protein, 13 aa, Homo sapiens
  CDR3 for beta chain variable domain of TCR clone 289966 (TRBV4-2, TRBJ1-1)
CASSQAGNTEAFF

SEQ ID NO: 579933 - protein, 14 aa, Homo sapiens
  CDR3 for alpha chain variable domain of TCR clone 289967 (TRAV1-2, TRAJ16)
CAVNRFLDGQKLLF

SEQ ID NO: 579934 - protein, 14 aa, Homo sapiens
  CDR3 for beta chain variable domain of TCR clone 289967 (TRBV7-3, TRBJ2-1)
CASSLGTSANEQFF

SEQ ID NO: 579935 - protein, 17 aa, Homo sapiens
  CDR3 for alpha chain variable domain of TCR clone 289968 (TRAV27, TRAJ42)
CAERVIYYGGSQGNLTF

SEQ ID NO: 579936 - protein, 14 aa, Homo sapiens
  CDR3 for beta chain variable domain of TCR clone 289968 (TRBV6-6, TRBJ2-3)
CASRLQREADTQYF

SEQ ID NO: 579937 - protein, 14 aa, Homo sapiens
  CDR3 for alpha chain variable domain of TCR clone 289969 (TRAV27, TRAJ29)
CAGASGAGNTPLVF

SEQ ID NO: 579938 - protein, 13 aa, Homo sapiens
  CDR3 for beta chain variable domain of TCR clone 289969 (TRBV5-1, TRBJ1-2)
CASSPTDPYGYTF

SEQ ID NO: 579939 - protein, 12 aa, Homo sapiens
  CDR3 for alpha chain variable domain of TCR clone 289970 (TRAV12-3, TRAJ17)
CAMTLTGNKLTF

SEQ ID NO: 579940 - protein, 13 aa, Homo sapiens
  CDR3 for beta chain variable domain of TCR clone 289970 (TRBV20-1, TRBJ1-1)
CSARGGGNTETFF

SEQ ID NO: 579941 - protein, 14 aa, Homo sapiens
  CDR3 for alpha chain variable domain of TCR clone 289971 (TRAV12-2, TRAJ33)
CAGKRARSNYQLIW

SEQ ID NO: 579942 - protein, 15 aa, Homo sapiens
  CDR3 for beta chain variable domain of TCR clone 289971 (TRBV20-1, TRBJ2-7)
CSARDRVSGMDEQYF

SEQ ID NO: 579943 - protein, 18 aa, Homo sapiens
  CDR3 for alpha chain variable domain of TCR clone 289972 (TRAV35, TRAJ52)
CAGLLRYPGGTSYGELTF

SEQ ID NO: 579944 - protein, 14 aa, Homo sapiens
  CDR3 for beta chain variable domain of TCR clone 289972 (TRBV2, TRBJ2-5)
CASKRDGTTEAQYF

SEQ ID NO: 579945 - protein, 14 aa, Homo sapiens
  CDR3 for alpha chain variable domain of TCR clone 289973 (TRAV12-1, TRAJ29)
CVVNEGSGNTPLVF

SEQ ID NO: 579946 - protein, 13 aa, Homo sapiens
  CDR3 for beta chain variable domain of TCR clone 289973 (TRBV7-9, TRBJ2-3)
CASSPGSADTQYF

SEQ ID NO: 579947 - protein, 13 aa, Homo sapiens
  CDR3 for alpha chain variable domain of TCR clone 289974 (TRAV8-3, TRAJ43)
CAVVPYNNNDMRF

SEQ ID NO: 579948 - protein, 17 aa, Homo sapiens
  CDR3 for beta chain variable domain of TCR clone 289974 (TRBV7-7, TRBJ1-1)
CASIGDMPNLGVTEAFF

SEQ ID NO: 579949 - protein, 14 aa, Homo sapiens
  CDR3 for alpha chain variable domain of TCR clone 289975 (TRAV12-1, TRAJ17)
WVVNYKAAGNKLTF

SEQ ID NO: 579950 - protein, 16 aa, Homo sapiens
  CDR3 for beta chain variable domain of TCR clone 289975 (TRBV12-4, TRBJ1-5)
CASSRPVGGSNQPQHF

SEQ ID NO: 579951 - protein, 15 aa, Homo sapiens
  CDR3 for alpha chain variable domain of TCR clone 289976 (TRAV8-6, TRAJ38)
CAVSSNAGNNRKLIW

SEQ ID NO: 579952 - protein, 13 aa, Homo sapiens
  CDR3 for beta chain variable domain of TCR clone 289976 (TRBV6-5, TRBJ2-5)
CASSPQGGETQYF

SEQ ID NO: 579953 - protein, 16 aa, Homo sapiens
  CDR3 for alpha chain variable domain of TCR clone 289977 (TRAV35, TRAJ28)
CAGQRYSGAGSYQLTF

SEQ ID NO: 579954 - protein, 13 aa, Homo sapiens
  CDR3 for beta chain variable domain of TCR clone 289977 (TRBV19, TRBJ1-2)
CASSQGHVYGYTF

SEQ ID NO: 579955 - protein, 14 aa, Homo sapiens
  CDR3 for alpha chain variable domain of TCR clone 289978 (TRAV12-2, TRAJ13)
CAVKKTGGNQKVTF

SEQ ID NO: 579956 - protein, 14 aa, Homo sapiens
  CDR3 for beta chain variable domain of TCR clone 289978 (TRBV5-5, TRBJ2-7)
CASSLGQGTYEQYF

SEQ ID NO: 579957 - protein, 14 aa, Homo sapiens
  CDR3 for alpha chain variable domain of TCR clone 289979 (TRAV1-2, TRAJ16)
CAVNRFSDGQKLLF

SEQ ID NO: 579958 - protein, 13 aa, Homo sapiens
  CDR3 for beta chain variable domain of TCR clone 289979 (TRBV19, TRBJ2-7)
CASRKAGGGEQYF

SEQ ID NO: 579959 - protein, 14 aa, Homo sapiens
  CDR3 for alpha chain variable domain of TCR clone 289980 (TRAV26-1, TRAJ38)
CIADNAGNNRKLIS

SEQ ID NO: 579960 - protein, 13 aa, Homo sapiens
  CDR3 for beta chain variable domain of TCR clone 289980 (TRBV20-1, TRBJ2-2)
CSASAAGTGELFF

SEQ ID NO: 579961 - protein, 15 aa, Homo sapiens
  CDR3 for alpha chain variable domain of TCR clone 289981 (TRAV23/DV6, TRAJ18)
CAARYRGSTLVRLDF

SEQ ID NO: 579962 - protein, 13 aa, Homo sapiens
  CDR3 for beta chain variable domain of TCR clone 289981 (TRBV7-2, TRBJ2-7)
CASSSPSGSEQYF

SEQ ID NO: 579963 - protein, 12 aa, Homo sapiens
  CDR3 for alpha chain variable domain of TCR clone 289982 (TRAV17, TRAJ20)
CATDGDDYKLSF

SEQ ID NO: 579964 - protein, 18 aa, Homo sapiens
  CDR3 for beta chain variable domain of TCR clone 289982 (TRBV6-5, TRBJ2-5)
CASSYSQAGGSYHETQYF

SEQ ID NO: 579965 - protein, 12 aa, Homo sapiens
  CDR3 for alpha chain variable domain of TCR clone 289983 (TRAV1-1, TRAJ39)
CAVPVVGNMLTF

SEQ ID NO: 579966 - protein, 13 aa, Homo sapiens
  CDR3 for beta chain variable domain of TCR clone 289983 (TRBV28, TRBJ2-7)
CASSPSGTYEQYF

SEQ ID NO: 579967 - protein, 11 aa, Homo sapiens
  CDR3 for alpha chain variable domain of TCR clone 289984 (TRAV12-3, TRAJ49)
CAANTGNQVYF

SEQ ID NO: 579968 - protein, 16 aa, Homo sapiens
  CDR3 for beta chain variable domain of TCR clone 289984 (TRBV7-9, TRBJ2-3)
CASSPWREVGTDTQYF

SEQ ID NO: 579969 - protein, 15 aa, Homo sapiens
  CDR3 for alpha chain variable domain of TCR clone 289985 (TRAV25, TRAJ52)
CAGRPGGTSYGKLTF

SEQ ID NO: 579970 - protein, 16 aa, Homo sapiens
  CDR3 for beta chain variable domain of TCR clone 289985 (TRBV7-3, TRBJ2-2)
RASSLKRGTLSGELFF

SEQ ID NO: 579971 - protein, 14 aa, Homo sapiens
  CDR3 for alpha chain variable domain of TCR clone 289986 (TRAV12-1, TRAJ23)
CVVIVYNQGGKLIF

SEQ ID NO: 579972 - protein, 15 aa, Homo sapiens
  CDR3 for beta chain variable domain of TCR clone 289986 (TRBV7-9, TRBJ1-4)
CASSARTGGNEKLFF

SEQ ID NO: 579973 - protein, 14 aa, Homo sapiens
  CDR3 for alpha chain variable domain of TCR clone 289987 (TRAV12-2, TRAJ15)
GAPHTGQAGTALIF

SEQ ID NO: 579974 - protein, 15 aa, Homo sapiens
  CDR3 for beta chain variable domain of TCR clone 289987 (TRBV28, TRBJ2-3)
CASSLNSSEHRYAVF

SEQ ID NO: 579975 - protein, 14 aa, Homo sapiens
  CDR3 for alpha chain variable domain of TCR clone 289988 (TRAV12-2, TRAJ13)
CAVKKTGGYQQVTF

SEQ ID NO: 579976 - protein, 13 aa, Homo sapiens
  CDR3 for beta chain variable domain of TCR clone 289988 (TRBV20-1, TRBJ1-1)
CSARGGGNTEAFF

SEQ ID NO: 579977 - protein, 13 aa, Homo sapiens
  CDR3 for alpha chain variable domain of TCR clone 289989 (TRAV22, TRAJ29)
CAVRGSGNTPLVF

SEQ ID NO: 579978 - protein, 18 aa, Homo sapiens
  CDR3 for beta chain variable domain of TCR clone 289989 (TRBV10-3, TRBJ2-3)
CAISESRVGPMRGETQYF

SEQ ID NO: 579979 - protein, 14 aa, Homo sapiens
  CDR3 for alpha chain variable domain of TCR clone 289990 (TRAV12-2, TRAJ44)
CAVNKAGTASKLTF

SEQ ID NO: 579980 - protein, 14 aa, Homo sapiens
  CDR3 for beta chain variable domain of TCR clone 289990 (TRBV7-2, TRBJ2-7)
CASSPKTSFYEQYF

SEQ ID NO: 579981 - protein, 17 aa, Homo sapiens
  CDR3 for alpha chain variable domain of TCR clone 289991 (TRAV8-6, TRAJ58)
CAVSSWVGETSGSRLTF

SEQ ID NO: 579982 - protein, 13 aa, Homo sapiens
  CDR3 for beta chain variable domain of TCR clone 289991 (TRBV7-6, TRBJ1-2)
CASSLVADYGYTF

SEQ ID NO: 579983 - protein, 22 aa, Homo sapiens
  CDR3 for alpha chain variable domain of TCR clone 289992 (TRAV12-3, TRAJ26)
CSSETHSPVIQPPTSPNQNFVF

SEQ ID NO: 579984 - protein, 15 aa, Homo sapiens
  CDR3 for beta chain variable domain of TCR clone 289992 (TRBV11-3, TRBJ2-3)
CASLKDGREGDTQYF

SEQ ID NO: 579985 - protein, 15 aa, Homo sapiens
  CDR3 for alpha chain variable domain of TCR clone 289993 (TRAV13-1, TRAJ52)
CAARSPSTSYGKLTF

SEQ ID NO: 579986 - protein, 13 aa, Homo sapiens
  CDR3 for beta chain variable domain of TCR clone 289993 (TRBV27, TRBJ2-5)
CASSLSSLETQYF

SEQ ID NO: 579987 - protein, 13 aa, Homo sapiens
  CDR3 for alpha chain variable domain of TCR clone 289994 (TRAV21, TRAJ20)
CAVGLRVDYKLSF

SEQ ID NO: 579988 - protein, 11 aa, Homo sapiens
  CDR3 for beta chain variable domain of TCR clone 289994 (TRBV20-1, TRBJ2-7)
CSARLSYEQYF

SEQ ID NO: 579989 - protein, 13 aa, Homo sapiens
  CDR3 for alpha chain variable domain of TCR clone 289995 (TRAV16, TRAJ11)
CALMNSGYSTLTF

SEQ ID NO: 579990 - protein, 14 aa, Homo sapiens
  CDR3 for beta chain variable domain of TCR clone 289995 (TRBV20-1, TRBJ1-1)
CSAQTRIGGTEAFF

SEQ ID NO: 579991 - protein, 15 aa, Homo sapiens
  CDR3 for alpha chain variable domain of TCR clone 289996 (TRAV3, TRAJ36)
CAVRASQTGANNLFF

SEQ ID NO: 579992 - protein, 13 aa, Homo sapiens
  CDR3 for beta chain variable domain of TCR clone 289996 (TRBV7-7, TRBJ2-3)
CASSLSRADTQYF

SEQ ID NO: 579993 - protein, 10 aa, Homo sapiens
  CDR3 for alpha chain variable domain of TCR clone 289997 (TRAV23/DV6, TRAJ31)
CARCGARLMF

SEQ ID NO: 579994 - protein, 14 aa, Homo sapiens
  CDR3 for beta chain variable domain of TCR clone 289997 (TRBV7-8, TRBJ1-2)
CASSPDSLSYGYTF

SEQ ID NO: 579995 - protein, 15 aa, Homo sapiens
  CDR3 for alpha chain variable domain of TCR clone 289998 (TRAV27, TRAJ38)
CAARRNAGKNRKLIW

SEQ ID NO: 579996 - protein, 13 aa, Homo sapiens
  CDR3 for beta chain variable domain of TCR clone 289998 (TRBV2, TRBJ2-5)
CASGTPYQETQYF

SEQ ID NO: 579997 - protein, 17 aa, Homo sapiens
  CDR3 for alpha chain variable domain of TCR clone 289999 (TRAV13-1, TRAJ52)
CAASSGAGGTSYGKLTF

SEQ ID NO: 579998 - protein, 13 aa, Homo sapiens
  CDR3 for beta chain variable domain of TCR clone 289999 (TRBV12-4, TRBJ2-2)
CASSLVRRTSGFK

SEQ ID NO: 579999 - protein, 18 aa, Homo sapiens
  CDR3 for alpha chain variable domain of TCR clone 290000 (TRAV12-2, )
CAVEDIQNPDPAVYQLRD

SEQ ID NO: 580000 - protein, 16 aa, Homo sapiens
  CDR3 for beta chain variable domain of TCR clone 290000 (TRBV7-7, TRBJ2-1)
CASSLASGTSYNEQFF

SEQ ID NO: 580001 - protein, 13 aa, Homo sapiens
  CDR3 for alpha chain variable domain of TCR clone 290001 (TRAV27, TRAJ8)
CARGPTGFQKLVF

SEQ ID NO: 580002 - protein, 15 aa, Homo sapiens
  CDR3 for beta chain variable domain of TCR clone 290001 (TRBV6-1, TRBJ2-7)
CASSESMGDFYEQYF

SEQ ID NO: 580003 - protein, 13 aa, Homo sapiens
  CDR3 for alpha chain variable domain of TCR clone 290002 (TRAV17, TRAJ9)
CATDYTGGCKTIF

SEQ ID NO: 580004 - protein, 12 aa, Homo sapiens
  CDR3 for beta chain variable domain of TCR clone 290002 (TRBV19, TRBJ1-1)
CASSTTGSEAFF

SEQ ID NO: 580005 - protein, 14 aa, Homo sapiens
  CDR3 for alpha chain variable domain of TCR clone 290003 (TRAV34, TRAJ44)
CGADGTGTASKLTF

SEQ ID NO: 580006 - protein, 14 aa, Homo sapiens
  CDR3 for beta chain variable domain of TCR clone 290003 (TRBV16, TRBJ1-1)
CASSQAGPNTEAFF

SEQ ID NO: 580007 - protein, 14 aa, Homo sapiens
  CDR3 for alpha chain variable domain of TCR clone 290004 (TRAV12-2, TRAJ40)
CAVKIPSGTYKYIF

SEQ ID NO: 580008 - protein, 20 aa, Homo sapiens
  CDR3 for beta chain variable domain of TCR clone 290004 (TRBV28, TRBJ2-1)
CASIPIGRSPGLAGGNEQFF

SEQ ID NO: 580009 - protein, 13 aa, Homo sapiens
  CDR3 for alpha chain variable domain of TCR clone 290005 (TRAV3, TRAJ33)
CAVRDRSNYQLIW

SEQ ID NO: 580010 - protein, 12 aa, Homo sapiens
  CDR3 for beta chain variable domain of TCR clone 290005 (TRBV11-2, TRBJ2-1)
CASSPGNNEQFF

SEQ ID NO: 580011 - protein, 12 aa, Homo sapiens
  CDR3 for alpha chain variable domain of TCR clone 290006 (TRAV21, TRAJ33)
CAKMDSNYQLIW

SEQ ID NO: 580012 - protein, 12 aa, Homo sapiens
  CDR3 for beta chain variable domain of TCR clone 290006 (TRBV10-3, TRBJ2-2)
CAIRENTGELFF

SEQ ID NO: 580013 - protein, 14 aa, Homo sapiens
  CDR3 for alpha chain variable domain of TCR clone 290007 (TRAV12-2, TRAJ13)
CAVPRSGGYQKVTF

SEQ ID NO: 580014 - protein, 11 aa, Homo sapiens
  CDR3 for beta chain variable domain of TCR clone 290007 (TRBV20-1, TRBJ1-5)
CSAQGDQPQHF

SEQ ID NO: 580015 - protein, 14 aa, Homo sapiens
  CDR3 for alpha chain variable domain of TCR clone 290008 (TRAV1-2, TRAJ8)
CAVREDTGFQKLLF

SEQ ID NO: 580016 - protein, 14 aa, Homo sapiens
  CDR3 for beta chain variable domain of TCR clone 290008 (TRBV29-1, TRBJ2-3)
CSAGAGVGADTQYF

SEQ ID NO: 580017 - protein, 14 aa, Homo sapiens
  CDR3 for alpha chain variable domain of TCR clone 290009 (TRAV1-2, TRAJ8)
CAVREDAGFQKLVF

SEQ ID NO: 580018 - protein, 15 aa, Homo sapiens
  CDR3 for beta chain variable domain of TCR clone 290009 (TRBV29-1, TRBJ2-1)
CSVPTGLALYNEQFF

SEQ ID NO: 580019 - protein, 14 aa, Homo sapiens
  CDR3 for alpha chain variable domain of TCR clone 290010 (TRAV26-1, TRAJ22)
CIVRVYGSARQLTF

SEQ ID NO: 580020 - protein, 16 aa, Homo sapiens
  CDR3 for beta chain variable domain of TCR clone 290010 (TRBV7-3, TRBJ2-3)
CQQPCGLAGFGDTQYF

SEQ ID NO: 580021 - protein, 14 aa, Homo sapiens
  CDR3 for alpha chain variable domain of TCR clone 290011 (TRAV35, TRAJ38)
CAGSNAGNNRKLIC

SEQ ID NO: 580022 - protein, 12 aa, Homo sapiens
  CDR3 for beta chain variable domain of TCR clone 290011 (TRBV19, TRBJ2-7)
CASTDRGYEQYF

SEQ ID NO: 580023 - protein, 12 aa, Homo sapiens
  CDR3 for alpha chain variable domain of TCR clone 290012 (TRAV13-2, TRAJ23)
CAERHRGGKLIF

SEQ ID NO: 580024 - protein, 16 aa, Homo sapiens
  CDR3 for beta chain variable domain of TCR clone 290012 (TRBV20-1, TRBJ1-4)
CSPPGQGLLTKEKLFF

SEQ ID NO: 580025 - protein, 13 aa, Homo sapiens
  CDR3 for alpha chain variable domain of TCR clone 290013 (TRAV8-3, TRAJ36)
CAAGATGANNLFS

SEQ ID NO: 580026 - protein, 15 aa, Homo sapiens
  CDR3 for beta chain variable domain of TCR clone 290013 (TRBV7-2, TRBJ1-2)
CASSPRAGWSYGYTS

SEQ ID NO: 580027 - protein, 13 aa, Homo sapiens
  CDR3 for alpha chain variable domain of TCR clone 290014 (TRAV23/DV6, TRAJ47)
CAASMTRGNKLVF

SEQ ID NO: 580028 - protein, 14 aa, Homo sapiens
  CDR3 for beta chain variable domain of TCR clone 290014 (TRBV7-3, TRBJ1-1)
CASSLKGGNTESFF

SEQ ID NO: 580029 - protein, 18 aa, Homo sapiens
  CDR3 for alpha chain variable domain of TCR clone 290015 (TRAV21, TRAJ52)
CAVRPSPAGGTSYGKLTF

SEQ ID NO: 580030 - protein, 14 aa, Homo sapiens
  CDR3 for beta chain variable domain of TCR clone 290015 (TRBV4-1, TRBJ2-2)
CTSSQAVNTGELFF

SEQ ID NO: 580031 - protein, 14 aa, Homo sapiens
  CDR3 for alpha chain variable domain of TCR clone 290016 (TRAV26-2, TRAJ31)
CILIPGNNNAGPMF

SEQ ID NO: 580032 - protein, 16 aa, Homo sapiens
  CDR3 for beta chain variable domain of TCR clone 290016 (TRBV7-3, TRBJ2-1)
CASSLVSGSSNNEQFF

SEQ ID NO: 580033 - protein, 17 aa, Homo sapiens
  CDR3 for alpha chain variable domain of TCR clone 290017 (TRAV36/DV7, TRAJ52)
CAVAQRAGGTSYGKLTF

SEQ ID NO: 580034 - protein, 14 aa, Homo sapiens
  CDR3 for beta chain variable domain of TCR clone 290017 (TRBV7-2, TRBJ1-1)
CASSFLTGTTEAFF

SEQ ID NO: 580035 - protein, 14 aa, Homo sapiens
  CDR3 for alpha chain variable domain of TCR clone 290018 (TRAV1-2, TRAJ8)
CAVREATGFQKLVF

SEQ ID NO: 580036 - protein, 12 aa, Homo sapiens
  CDR3 for beta chain variable domain of TCR clone 290018 (TRBV27, TRBJ2-2)
CASKLFTGELFF

SEQ ID NO: 580037 - protein, 13 aa, Homo sapiens
  CDR3 for alpha chain variable domain of TCR clone 290019 (TRAV21, TRAJ27)
CAARPGNAGKSTF

SEQ ID NO: 580038 - protein, 16 aa, Homo sapiens
  CDR3 for beta chain variable domain of TCR clone 290019 (TRBV20-1, TRBJ1-2)
CSASMGQGVANYGYVC

SEQ ID NO: 580039 - protein, 16 aa, Homo sapiens
  CDR3 for alpha chain variable domain of TCR clone 290020 (TRAV38-1, TRAJ42)
CAFMKLGGGSQGNLIF

SEQ ID NO: 580040 - protein, 16 aa, Homo sapiens
  CDR3 for beta chain variable domain of TCR clone 290020 (TRBV12-4, TRBJ2-5)
CASSFFVRGRQETQYF

SEQ ID NO: 580041 - protein, 12 aa, Homo sapiens
  CDR3 for alpha chain variable domain of TCR clone 290021 (TRAV17, TRAJ57)
CATDGGSKKLVF

SEQ ID NO: 580042 - protein, 12 aa, Homo sapiens
  CDR3 for beta chain variable domain of TCR clone 290021 (TRBV29-1, TRBJ2-2)
CSVDKYTGELFF

SEQ ID NO: 580043 - protein, 13 aa, Homo sapiens
  CDR3 for alpha chain variable domain of TCR clone 290022 (TRAV3, TRAJ43)
CAVKARNNNDMRS

SEQ ID NO: 580044 - protein, 16 aa, Homo sapiens
  CDR3 for beta chain variable domain of TCR clone 290022 (TRBV7-9, TRBJ2-3)
CASSFSVAGGTDTQYF

SEQ ID NO: 580045 - protein, 13 aa, Homo sapiens
  CDR3 for alpha chain variable domain of TCR clone 290023 (TRAV8-3, TRAJ6)
CAARRGGSYIPTF

SEQ ID NO: 580046 - protein, 15 aa, Homo sapiens
  CDR3 for beta chain variable domain of TCR clone 290023 (TRBV4-1, TRBJ2-3)
CASSILAGGRDTQYF

SEQ ID NO: 580047 - protein, 14 aa, Homo sapiens
  CDR3 for alpha chain variable domain of TCR clone 290024 (TRAV12-2, TRAJ13)
CAVKKTGGYQKVTF

SEQ ID NO: 580048 - protein, 15 aa, Homo sapiens
  CDR3 for beta chain variable domain of TCR clone 290024 (TRBV5-1, TRBJ2-1)
CASSLVANSYNEQFF

SEQ ID NO: 580049 - protein, 14 aa, Homo sapiens
  CDR3 for alpha chain variable domain of TCR clone 290025 (TRAV8-6, TRAJ29)
CAVTRNSGNTPLVF

SEQ ID NO: 580050 - protein, 15 aa, Homo sapiens
  CDR3 for beta chain variable domain of TCR clone 290025 (TRBV7-7, TRBJ2-3)
CASSFGLAPTDTQYF

SEQ ID NO: 580051 - protein, 12 aa, Homo sapiens
  CDR3 for alpha chain variable domain of TCR clone 290026 (TRAV16, TRAJ26)
CASKDGGQNFVF

SEQ ID NO: 580052 - protein, 13 aa, Homo sapiens
  CDR3 for beta chain variable domain of TCR clone 290026 (TRBV25-1, TRBJ1-1)
CASSDRRRAEAFF

SEQ ID NO: 580053 - protein, 12 aa, Homo sapiens
  CDR3 for alpha chain variable domain of TCR clone 290027 (TRAV13-1, TRAJ26)
QVQDNYGQNFVF

SEQ ID NO: 580054 - protein, 13 aa, Homo sapiens
  CDR3 for beta chain variable domain of TCR clone 290027 (TRBV7-9, TRBJ2-7)
CAGSAGLQYEQYF

SEQ ID NO: 580055 - protein, 17 aa, Homo sapiens
  CDR3 for alpha chain variable domain of TCR clone 290028 (TRAV4, TRAJ18)
CLVGERSVGSTLGRLYF

SEQ ID NO: 580056 - protein, 16 aa, Homo sapiens
  CDR3 for beta chain variable domain of TCR clone 290028 (TRBV15, TRBJ1-4)
CATSRDSPPGREKRFF

SEQ ID NO: 580057 - protein, 12 aa, Homo sapiens
  CDR3 for alpha chain variable domain of TCR clone 290029 (TRAV21, TRAJ11)
CAATSGYSTLTF

SEQ ID NO: 580058 - protein, 16 aa, Homo sapiens
  CDR3 for beta chain variable domain of TCR clone 290029 (TRBV28, TRBJ2-2)
CASSVEGGSNTGELFL

SEQ ID NO: 580059 - protein, 12 aa, Homo sapiens
  CDR3 for alpha chain variable domain of TCR clone 290030 (TRAV12-1, TRAJ40)
CVVYSGTYKYIF

SEQ ID NO: 580060 - protein, 18 aa, Homo sapiens
  CDR3 for beta chain variable domain of TCR clone 290030 (TRBV11-2, TRBJ2-3)
CASSFGWASRGAPNTQYF

SEQ ID NO: 580061 - protein, 18 aa, Homo sapiens
  CDR3 for alpha chain variable domain of TCR clone 290031 (TRAV21, TRAJ52)
CAVRPSPAGGTSYGKQTF

SEQ ID NO: 580062 - protein, 15 aa, Homo sapiens
  CDR3 for beta chain variable domain of TCR clone 290031 (TRBV11-3, TRBJ2-3)
CASLKDGREGDTQYF

SEQ ID NO: 580063 - protein, 13 aa, Homo sapiens
  CDR3 for alpha chain variable domain of TCR clone 290032 (TRAV27, TRAJ40)
CAGVLASTYKYIF

SEQ ID NO: 580064 - protein, 15 aa, Homo sapiens
  CDR3 for beta chain variable domain of TCR clone 290032 (TRBV28, TRBJ2-5)
CASSPGQGSIETQYF

SEQ ID NO: 580065 - protein, 13 aa, Homo sapiens
  CDR3 for alpha chain variable domain of TCR clone 290033 (TRAV16, TRAJ26)
CITVLCLGQNFVF

SEQ ID NO: 580066 - protein, 12 aa, Homo sapiens
  CDR3 for beta chain variable domain of TCR clone 290033 (TRBV11-2, TRBJ2-1)
CASSAGNNEQFF

SEQ ID NO: 580067 - protein, 12 aa, Homo sapiens
  CDR3 for alpha chain variable domain of TCR clone 290034 (TRAV27, TRAJ35)
CAGADFGNVLHR

SEQ ID NO: 580068 - protein, 15 aa, Homo sapiens
  CDR3 for beta chain variable domain of TCR clone 290034 (TRBV19, TRBJ2-1)
CASSISSGGYNEQFF

SEQ ID NO: 580069 - protein, 13 aa, Homo sapiens
  CDR3 for alpha chain variable domain of TCR clone 290035 (TRAV13-1, TRAJ21)
CAASIYNFNKFYF

SEQ ID NO: 580070 - protein, 13 aa, Homo sapiens
  CDR3 for beta chain variable domain of TCR clone 290035 (TRBV27, TRBJ1-1)
CASSLSIGAEAFF

SEQ ID NO: 580071 - protein, 15 aa, Homo sapiens
  CDR3 for alpha chain variable domain of TCR clone 290036 (TRAV26-1, TRAJ29)
CIVRVEGSGNTTLVF

SEQ ID NO: 580072 - protein, 14 aa, Homo sapiens
  CDR3 for beta chain variable domain of TCR clone 290036 (TRBV7-6, TRBJ2-3)
CASSLGTVTDTQYF

SEQ ID NO: 580073 - protein, 15 aa, Homo sapiens
  CDR3 for alpha chain variable domain of TCR clone 290037 (TRAV1-2, TRAJ16)
CAVRARFSDGQKLLF

SEQ ID NO: 580074 - protein, 19 aa, Homo sapiens
  CDR3 for beta chain variable domain of TCR clone 290037 (TRBV11-3, TRBJ2-3)
CASGFGTSGGPRGEGTQYF

SEQ ID NO: 580075 - protein, 14 aa, Homo sapiens
  CDR3 for alpha chain variable domain of TCR clone 290038 (TRAV20, TRAJ40)
CAVSLTSGTYKYIF

SEQ ID NO: 580076 - protein, 13 aa, Homo sapiens
  CDR3 for beta chain variable domain of TCR clone 290038 (TRBV19, TRBJ1-2)
CASSVPGQDGYTF

SEQ ID NO: 580077 - protein, 13 aa, Homo sapiens
  CDR3 for alpha chain variable domain of TCR clone 290039 (TRAV12-1, TRAJ26)
CVVRRNYGQNFVF

SEQ ID NO: 580078 - protein, 14 aa, Homo sapiens
  CDR3 for beta chain variable domain of TCR clone 290039 (TRBV18, TRBJ2-5)
CASSPGVSQETQYF

SEQ ID NO: 580079 - protein, 17 aa, Homo sapiens
  CDR3 for alpha chain variable domain of TCR clone 290040 (TRAV12-2, TRAJ48)
CASNEKLTFGTGTRLTI

SEQ ID NO: 580080 - protein, 14 aa, Homo sapiens
  CDR3 for beta chain variable domain of TCR clone 290040 (TRBV5-1, TRBJ2-5)
CASSLAGRQETQYF

SEQ ID NO: 580081 - protein, 14 aa, Homo sapiens
  CDR3 for alpha chain variable domain of TCR clone 290041 (TRAV16, TRAJ17)
CALSGRAAGNKLTF

SEQ ID NO: 580082 - protein, 12 aa, Homo sapiens
  CDR3 for beta chain variable domain of TCR clone 290041 (TRBV3-1, TRBJ1-2)
CASSPTRLPRGA

SEQ ID NO: 580083 - protein, 15 aa, Homo sapiens
  CDR3 for alpha chain variable domain of TCR clone 290042 (TRAV8-3, TRAJ23)
CAVGDRNNQGGKLIL

SEQ ID NO: 580084 - protein, 17 aa, Homo sapiens
  CDR3 for beta chain variable domain of TCR clone 290042 (TRBV4-1, TRBJ1-4)
CASSQEGPRGVEEKLFF

SEQ ID NO: 580085 - protein, 14 aa, Homo sapiens
  CDR3 for alpha chain variable domain of TCR clone 290043 (TRAV12-3, TRAJ10)
GHLPLTGGGNKLTF

SEQ ID NO: 580086 - protein, 15 aa, Homo sapiens
  CDR3 for beta chain variable domain of TCR clone 290043 (TRBV11-3, TRBJ2-3)
CASLKDGREGDTQYF

SEQ ID NO: 580087 - protein, 12 aa, Homo sapiens
  CDR3 for alpha chain variable domain of TCR clone 290044 (TRAV13-2, TRAJ13)
CAPFWGLPESYL

SEQ ID NO: 580088 - protein, 15 aa, Homo sapiens
  CDR3 for beta chain variable domain of TCR clone 290044 (TRBV19, TRBJ1-1)
CASSIGGGRNTEAFF

SEQ ID NO: 580089 - protein, 13 aa, Homo sapiens
  CDR3 for alpha chain variable domain of TCR clone 290045 (TRAV21, TRAJ27)
CAARPGNAGKSTF

SEQ ID NO: 580090 - protein, 14 aa, Homo sapiens
  CDR3 for beta chain variable domain of TCR clone 290045 (TRBV7-9, TRBJ2-5)
CGSSLDTAQETQYF

SEQ ID NO: 580091 - protein, 14 aa, Homo sapiens
  CDR3 for alpha chain variable domain of TCR clone 290046 (TRAV1-2, TRAJ16)
YAVNRFSGGQKLLF

SEQ ID NO: 580092 - protein, 15 aa, Homo sapiens
  CDR3 for beta chain variable domain of TCR clone 290046 (TRBV9, TRBJ1-6)
CASSVAGTGDSPLHF

SEQ ID NO: 580093 - protein, 14 aa, Homo sapiens
  CDR3 for alpha chain variable domain of TCR clone 290047 (TRAV1-2, TRAJ6)
CAVRSSGGSYIPTF

SEQ ID NO: 580094 - protein, 17 aa, Homo sapiens
  CDR3 for beta chain variable domain of TCR clone 290047 (TRBV7-3, TRBJ2-3)
CASSLMKRMRGADTQYF

SEQ ID NO: 580095 - protein, 15 aa, Homo sapiens
  CDR3 for alpha chain variable domain of TCR clone 290048 (TRAV13-1, TRAJ44)
CAASRGGGTASKLTF

SEQ ID NO: 580096 - protein, 15 aa, Homo sapiens
  CDR3 for beta chain variable domain of TCR clone 290048 (TRBV19, TRBJ1-5)
CASSIVWADNQPQHF

SEQ ID NO: 580097 - protein, 13 aa, Homo sapiens
  CDR3 for alpha chain variable domain of TCR clone 290049 (TRAV35, TRAJ42)
CAGFPGSQGDLIF

SEQ ID NO: 580098 - protein, 14 aa, Homo sapiens
  CDR3 for beta chain variable domain of TCR clone 290049 (TRBV29-1, TRBJ2-2)
CSVLAETNTGELFF

SEQ ID NO: 580099 - protein, 13 aa, Homo sapiens
  CDR3 for alpha chain variable domain of TCR clone 290050 (TRAV12-3, TRAJ33)
CAMSVNSNYQLIW

SEQ ID NO: 580100 - protein, 14 aa, Homo sapiens
  CDR3 for beta chain variable domain of TCR clone 290050 (TRBV7-3, TRBJ1-1)
CASSLGTGYTEAFF

SEQ ID NO: 580101 - protein, 14 aa, Homo sapiens
  CDR3 for alpha chain variable domain of TCR clone 290051 (TRAV12-2, TRAJ5)
CAVKGDTGRRALTF

SEQ ID NO: 580102 - protein, 12 aa, Homo sapiens
  CDR3 for beta chain variable domain of TCR clone 290051 (TRBV7-9, TRBJ2-7)
CASSLEGYEQYF

SEQ ID NO: 580103 - protein, 15 aa, Homo sapiens
  CDR3 for alpha chain variable domain of TCR clone 290052 (TRAV14/DV4, TRAJ10)
CAMRELTGGGNKHTF

SEQ ID NO: 580104 - protein, 18 aa, Homo sapiens
  CDR3 for beta chain variable domain of TCR clone 290052 (TRBV7-9, TRBJ2-7)
CASSLTTSGSRTWYEEYF

SEQ ID NO: 580105 - protein, 15 aa, Homo sapiens
  CDR3 for alpha chain variable domain of TCR clone 290053 (TRAV4, TRAJ39)
CLVGPNNNAGNMLTF

SEQ ID NO: 580106 - protein, 14 aa, Homo sapiens
  CDR3 for beta chain variable domain of TCR clone 290053 (TRBV4-1, TRBJ2-2)
CASSQAVNTGELFF

SEQ ID NO: 580107 - protein, 13 aa, Homo sapiens
  CDR3 for alpha chain variable domain of TCR clone 290054 (TRAV12-2, TRAJ22)
CAAQSGSARQLTF

SEQ ID NO: 580108 - protein, 15 aa, Homo sapiens
  CDR3 for beta chain variable domain of TCR clone 290054 (TRBV27, TRBJ1-5)
CASSLGTGFDQPQHF

SEQ ID NO: 580109 - protein, 12 aa, Homo sapiens
  CDR3 for alpha chain variable domain of TCR clone 290055 (TRAV27, TRAJ9)
CAGESGCCKTIF

SEQ ID NO: 580110 - protein, 18 aa, Homo sapiens
  CDR3 for beta chain variable domain of TCR clone 290055 (TRBV10-2, TRBJ2-2)
CISAPAVHRQADAGELFF

SEQ ID NO: 580111 - protein, 15 aa, Homo sapiens
  CDR3 for alpha chain variable domain of TCR clone 290056 (TRAV35, TRAJ40)
CDGVPGASGTYKYIF

SEQ ID NO: 580112 - protein, 14 aa, Homo sapiens
  CDR3 for beta chain variable domain of TCR clone 290056 (TRBV11-2, TRBJ2-5)
CASSRTGGIETQYF

SEQ ID NO: 580113 - protein, 14 aa, Homo sapiens
  CDR3 for alpha chain variable domain of TCR clone 290057 (TRAV12-2, TRAJ13)
CAVKKTGGYQKVTF

SEQ ID NO: 580114 - protein, 16 aa, Homo sapiens
  CDR3 for beta chain variable domain of TCR clone 290057 (TRBV28, TRBJ2-2)
CASSLVGGSNTGELFF

SEQ ID NO: 580115 - protein, 11 aa, Homo sapiens
  CDR3 for alpha chain variable domain of TCR clone 290058 (TRAV35, TRAJ22)
CAGPGVGQLTF

SEQ ID NO: 580116 - protein, 15 aa, Homo sapiens
  CDR3 for beta chain variable domain of TCR clone 290058 (TRBV7-3, TRBJ2-1)
CASSPTGGGEVEQFF

SEQ ID NO: 580117 - protein, 15 aa, Homo sapiens
  CDR3 for alpha chain variable domain of TCR clone 290059 (TRAV20, TRAJ6)
CAVRLQSGGSYIPTF

SEQ ID NO: 580118 - protein, 17 aa, Homo sapiens
  CDR3 for beta chain variable domain of TCR clone 290059 (TRBV28, TRBJ2-5)
CASSRQGGLAGAETQYF

SEQ ID NO: 580119 - protein, 15 aa, Homo sapiens
  CDR3 for alpha chain variable domain of TCR clone 290060 (TRAV26-2, TRAJ28)
CILVESGAGSYQLTF

SEQ ID NO: 580120 - protein, 11 aa, Homo sapiens
  CDR3 for beta chain variable domain of TCR clone 290060 (TRBV25-1, TRBJ2-7)
CARSTSYEQYF

SEQ ID NO: 580121 - protein, 14 aa, Homo sapiens
  CDR3 for alpha chain variable domain of TCR clone 290061 (TRAV8-1, TRAJ4)
CAVKFSGGYNKLIF

SEQ ID NO: 580122 - protein, 22 aa, Homo sapiens
  CDR3 for beta chain variable domain of TCR clone 290061 (TRBV7-3, TRBJ2-5)
CASARDRVILRPREPVLRARHA

SEQ ID NO: 580123 - protein, 13 aa, Homo sapiens
  CDR3 for alpha chain variable domain of TCR clone 290062 (TRAV12-2, TRAJ4)
CAGFSGGQNKLIF

SEQ ID NO: 580124 - protein, 14 aa, Homo sapiens
  CDR3 for beta chain variable domain of TCR clone 290062 (TRBV24-1, TRBJ1-1)
CATSIPRGDTEAFF

SEQ ID NO: 580125 - protein, 18 aa, Homo sapiens
  CDR3 for alpha chain variable domain of TCR clone 290063 (TRAV26-1, TRAJ22)
CIVIVALISSGSARQLTF

SEQ ID NO: 580126 - protein, 13 aa, Homo sapiens
  CDR3 for beta chain variable domain of TCR clone 290063 (TRBV13, TRBJ2-5)
CASSPEVGETQYF

SEQ ID NO: 580127 - protein, 14 aa, Homo sapiens
  CDR3 for alpha chain variable domain of TCR clone 290064 (TRAV13-1, TRAJ35)
CAASKGGFGNVLHC

SEQ ID NO: 580128 - protein, 13 aa, Homo sapiens
  CDR3 for beta chain variable domain of TCR clone 290064 (TRBV7-3, TRBJ1-1)
CVSSQDWGAEAFF

SEQ ID NO: 580129 - protein, 14 aa, Homo sapiens
  CDR3 for alpha chain variable domain of TCR clone 290065 (TRAV4, TRAJ9)
CLVGSGTGGLKTIF

SEQ ID NO: 580130 - protein, 15 aa, Homo sapiens
  CDR3 for beta chain variable domain of TCR clone 290065 (TRBV7-2, TRBJ2-1)
CASSLASGRVNEQFF

SEQ ID NO: 580131 - protein, 11 aa, Homo sapiens
  CDR3 for alpha chain variable domain of TCR clone 290066 (TRAV1-2, TRAJ20)
CAVANDYKLSV

SEQ ID NO: 580132 - protein, 18 aa, Homo sapiens
  CDR3 for beta chain variable domain of TCR clone 290066 (TRBV20-1, TRBJ2-6)
CSAETTPTHGSGANVLTF

SEQ ID NO: 580133 - protein, 17 aa, Homo sapiens
  CDR3 for alpha chain variable domain of TCR clone 290067 (TRAV17, TRAJ52)
CATERPSGGTSYGKLTF

SEQ ID NO: 580134 - protein, 13 aa, Homo sapiens
  CDR3 for beta chain variable domain of TCR clone 290067 (TRBV7-9, TRBJ1-2)
CACSLKQNYGYTF

SEQ ID NO: 580135 - protein, 15 aa, Homo sapiens
  CDR3 for alpha chain variable domain of TCR clone 290068 (TRAV4, TRAJ39)
CLVGPNNNAGNMLTF

SEQ ID NO: 580136 - protein, 11 aa, Homo sapiens
  CDR3 for beta chain variable domain of TCR clone 290068 (TRBV13, TRBJ2-2)
CASSPRTGSTP

SEQ ID NO: 580137 - protein, 15 aa, Homo sapiens
  CDR3 for alpha chain variable domain of TCR clone 290069 (TRAV21, TRAJ39)
SHLPPPRECRNMLTF

SEQ ID NO: 580138 - protein, 12 aa, Homo sapiens
  CDR3 for beta chain variable domain of TCR clone 290069 (TRBV3-1, TRBJ2-1)
CASSQGSSGQFF

SEQ ID NO: 580139 - protein, 14 aa, Homo sapiens
  CDR3 for alpha chain variable domain of TCR clone 290070 (TRAV12-2, TRAJ13)
CAVNKTGGYQKVTF

SEQ ID NO: 580140 - protein, 13 aa, Homo sapiens
  CDR3 for beta chain variable domain of TCR clone 290070 (TRBV2, TRBJ2-7)
CASSVGGSGEQYF

SEQ ID NO: 580141 - protein, 15 aa, Homo sapiens
  CDR3 for alpha chain variable domain of TCR clone 290071 (TRAV17, TRAJ57)
CATGPSQGGSEKLFF

SEQ ID NO: 580142 - protein, 16 aa, Homo sapiens
  CDR3 for beta chain variable domain of TCR clone 290071 (TRBV12-4, TRBJ1-5)
CASSRPVGGSNQTQHF

SEQ ID NO: 580143 - protein, 16 aa, Homo sapiens
  CDR3 for alpha chain variable domain of TCR clone 290072 (TRAV8-3, TRAJ13)
CAVDAYPSGGYQKVTF

SEQ ID NO: 580144 - protein, 15 aa, Homo sapiens
  CDR3 for beta chain variable domain of TCR clone 290072 (TRBV19, TRBJ1-5)
CASSIVWADNQPQHF

SEQ ID NO: 580145 - protein, 17 aa, Homo sapiens
  CDR3 for alpha chain variable domain of TCR clone 290073 (TRAV13-1, TRAJ52)
CAASSGAGGTGYGKLTF

SEQ ID NO: 580146 - protein, 12 aa, Homo sapiens
  CDR3 for beta chain variable domain of TCR clone 290073 (TRBV11-2, TRBJ2-2)
CASSLGGGELFF

SEQ ID NO: 580147 - protein, 12 aa, Homo sapiens
  CDR3 for alpha chain variable domain of TCR clone 290074 (TRAV8-3, TRAJ26)
CAGDNYGQNFAF

SEQ ID NO: 580148 - protein, 15 aa, Homo sapiens
  CDR3 for beta chain variable domain of TCR clone 290074 (TRBV9, TRBJ2-1)
CASSRAGSSYNEQFF

SEQ ID NO: 580149 - protein, 17 aa, Homo sapiens
  CDR3 for alpha chain variable domain of TCR clone 290075 (TRAV3, TRAJ6)
CAVRDGPRAGGSYISTF

SEQ ID NO: 580150 - protein, 15 aa, Homo sapiens
  CDR3 for beta chain variable domain of TCR clone 290075 (TRBV19, TRBJ2-7)
CASSPAGSGEALRYF

SEQ ID NO: 580151 - protein, 12 aa, Homo sapiens
  CDR3 for alpha chain variable domain of TCR clone 290076 (TRAV8-4, TRAJ43)
CAVSVNNNDMRF

SEQ ID NO: 580152 - protein, 14 aa, Homo sapiens
  CDR3 for beta chain variable domain of TCR clone 290076 (TRBV11-2, TRBJ1-2)
CASSLGTANYGNTF

SEQ ID NO: 580153 - protein, 13 aa, Homo sapiens
  CDR3 for alpha chain variable domain of TCR clone 290077 (TRAV17, TRAJ13)
CATDSGGYQKVTF

SEQ ID NO: 580154 - protein, 14 aa, Homo sapiens
  CDR3 for beta chain variable domain of TCR clone 290077 (TRBV7-9, TRBJ2-3)
CASSLEDGTDTQYF

SEQ ID NO: 580155 - protein, 14 aa, Homo sapiens
  CDR3 for alpha chain variable domain of TCR clone 290078 (TRAV1-2, TRAJ8)
CAVREDTGFQKVVF

SEQ ID NO: 580156 - protein, 15 aa, Homo sapiens
  CDR3 for beta chain variable domain of TCR clone 290078 (TRBV12-4, TRBJ2-5)
CASSPPTGLQETQYF

SEQ ID NO: 580157 - protein, 16 aa, Homo sapiens
  CDR3 for alpha chain variable domain of TCR clone 290079 (TRAV26-1, TRAJ36)
CIVRVSYQTGANNLFF

SEQ ID NO: 580158 - protein, 18 aa, Homo sapiens
  CDR3 for beta chain variable domain of TCR clone 290079 (TRBV11-2, TRBJ2-3)
CASSLGGASRGAPNTQYF

SEQ ID NO: 580159 - protein, 13 aa, Homo sapiens
  CDR3 for alpha chain variable domain of TCR clone 290080 (TRAV12-3, TRAJ13)
CAMSSGGYQKVTL

SEQ ID NO: 580160 - protein, 16 aa, Homo sapiens
  CDR3 for beta chain variable domain of TCR clone 290080 (TRBV4-1, TRBJ2-7)
CASSRGDILNSYEQYF

SEQ ID NO: 580161 - protein, 15 aa, Homo sapiens
  CDR3 for alpha chain variable domain of TCR clone 290081 (TRAV26-1, TRAJ29)
FIVRVEGSGNTPLVF

SEQ ID NO: 580162 - protein, 15 aa, Homo sapiens
  CDR3 for beta chain variable domain of TCR clone 290081 (TRBV7-9, TRBJ1-2)
CASSLDREPNYGYTF

SEQ ID NO: 580163 - protein, 15 aa, Homo sapiens
  CDR3 for alpha chain variable domain of TCR clone 290082 (TRAV2, TRAJ22)
CGVPSRGGSARQLTF

SEQ ID NO: 580164 - protein, 11 aa, Homo sapiens
  CDR3 for beta chain variable domain of TCR clone 290082 (TRBV27, TRBJ2-3)
CASSLGDTQYF

SEQ ID NO: 580165 - protein, 15 aa, Homo sapiens
  CDR3 for alpha chain variable domain of TCR clone 290083 (TRAV4, TRAJ29)
CLVGAYRSQQTHLLS

SEQ ID NO: 580166 - protein, 17 aa, Homo sapiens
  CDR3 for beta chain variable domain of TCR clone 290083 (TRBV25-1, TRBJ2-7)
CASSDARVVFSSYEQYF

SEQ ID NO: 580167 - protein, 13 aa, Homo sapiens
  CDR3 for alpha chain variable domain of TCR clone 290084 (TRAV12-2, TRAJ47)
CAVFMEYGNKLVF

SEQ ID NO: 580168 - protein, 14 aa, Homo sapiens
  CDR3 for beta chain variable domain of TCR clone 290084 (TRBV4-1, TRBJ1-5)
CASSQGPTNHPQHF

SEQ ID NO: 580169 - protein, 15 aa, Homo sapiens
  CDR3 for alpha chain variable domain of TCR clone 290085 (TRAV13-1, TRAJ42)
CAASIAGGSQGSPIF

SEQ ID NO: 580170 - protein, 15 aa, Homo sapiens
  CDR3 for beta chain variable domain of TCR clone 290085 (TRBV19, TRBJ2-1)
CASSIVRGEGREQFF

SEQ ID NO: 580171 - protein, 12 aa, Homo sapiens
  CDR3 for alpha chain variable domain of TCR clone 290086 (TRAV12-3, TRAJ17)
CAMTLTGNKLTF

SEQ ID NO: 580172 - protein, 15 aa, Homo sapiens
  CDR3 for beta chain variable domain of TCR clone 290086 (TRBV11-2, TRBJ1-3)
CASSIWGSYGNTIYF

SEQ ID NO: 580173 - protein, 13 aa, Homo sapiens
  CDR3 for alpha chain variable domain of TCR clone 290087 (TRAV21, TRAJ15)
CAVANQAGTALIF

SEQ ID NO: 580174 - protein, 14 aa, Homo sapiens
  CDR3 for beta chain variable domain of TCR clone 290087 (TRBV27, TRBJ2-2)
CASSLGAGTGELFF

SEQ ID NO: 580175 - protein, 11 aa, Homo sapiens
  CDR3 for alpha chain variable domain of TCR clone 290088 (TRAV27, TRAJ47)
SIVEYGNKLVF

SEQ ID NO: 580176 - protein, 18 aa, Homo sapiens
  CDR3 for beta chain variable domain of TCR clone 290088 (TRBV2, TRBJ2-1)
CASRRLAGGPRTYNEQFF

SEQ ID NO: 580177 - protein, 13 aa, Homo sapiens
  CDR3 for alpha chain variable domain of TCR clone 290089 (TRAV21, TRAJ57)
FAVIEGGSEKLVF

SEQ ID NO: 580178 - protein, 15 aa, Homo sapiens
  CDR3 for beta chain variable domain of TCR clone 290089 (TRBV10-3, TRBJ2-5)
CTISEFGRGQETQYF

SEQ ID NO: 580179 - protein, 12 aa, Homo sapiens
  CDR3 for alpha chain variable domain of TCR clone 290090 (TRAV3, TRAJ27)
CAVRDKAGKSTF

SEQ ID NO: 580180 - protein, 13 aa, Homo sapiens
  CDR3 for beta chain variable domain of TCR clone 290090 (TRBV6-5, TRBJ2-5)
CASSPQGGETQYC

SEQ ID NO: 580181 - protein, 11 aa, Homo sapiens
  CDR3 for alpha chain variable domain of TCR clone 290091 (TRAV1-2, TRAJ40)
CAVPGTYRYIF

SEQ ID NO: 580182 - protein, 16 aa, Homo sapiens
  CDR3 for beta chain variable domain of TCR clone 290091 (TRBV7-3, TRBJ2-2)
CASSLKRGTLSGELFF

SEQ ID NO: 580183 - protein, 11 aa, Homo sapiens
  CDR3 for alpha chain variable domain of TCR clone 290092 (TRAV1-2, TRAJ20)
CAVANDYKLSF

SEQ ID NO: 580184 - protein, 18 aa, Homo sapiens
  CDR3 for beta chain variable domain of TCR clone 290092 (TRBV20-1, TRBJ2-6)
CGAETTPTHGSGANDLTF

SEQ ID NO: 580185 - protein, 15 aa, Homo sapiens
  CDR3 for alpha chain variable domain of TCR clone 290093 (TRAV21, TRAJ53)
CATLTRGGSNYKLTF

SEQ ID NO: 580186 - protein, 16 aa, Homo sapiens
  CDR3 for beta chain variable domain of TCR clone 290093 (TRBV9, TRBJ2-1)
CASSVGGGGNYNEQFF

SEQ ID NO: 580187 - protein, 12 aa, Homo sapiens
  CDR3 for alpha chain variable domain of TCR clone 290094 (TRAV12-1, TRAJ40)
CVVNGETYKYIF

SEQ ID NO: 580188 - protein, 17 aa, Homo sapiens
  CDR3 for beta chain variable domain of TCR clone 290094 (TRBV25-1, TRBJ2-7)
CASSDARVVFSSYEQYF

SEQ ID NO: 580189 - protein, 14 aa, Homo sapiens
  CDR3 for alpha chain variable domain of TCR clone 290095 (TRAV14/DV4, TRAJ42)
CPRGSLRSQGNLIF

SEQ ID NO: 580190 - protein, 15 aa, Homo sapiens
  CDR3 for beta chain variable domain of TCR clone 290095 (TRBV7-2, TRBJ2-1)
CASSSGLAGGNEQFF

SEQ ID NO: 580191 - protein, 14 aa, Homo sapiens
  CDR3 for alpha chain variable domain of TCR clone 290096 (TRAV1-2, TRAJ16)
CAVNRFSDGQKLLF

SEQ ID NO: 580192 - protein, 17 aa, Homo sapiens
  CDR3 for beta chain variable domain of TCR clone 290096 (TRBV5-1, TRBJ2-2)
CASSLAGLGGGTGELFF

SEQ ID NO: 580193 - protein, 14 aa, Homo sapiens
  CDR3 for alpha chain variable domain of TCR clone 290097 (TRAV12-2, TRAJ53)
CAVKGGGSNYKLTF

SEQ ID NO: 580194 - protein, 15 aa, Homo sapiens
  CDR3 for beta chain variable domain of TCR clone 290097 (TRBV5-1, TRBJ2-3)
CASSSTSGSTDTQYF

SEQ ID NO: 580195 - protein, 17 aa, Homo sapiens
  CDR3 for alpha chain variable domain of TCR clone 290098 (TRAV38-2/DV8, TRAJ38)
CAYRSARGAGNNRKLIW

SEQ ID NO: 580196 - protein, 15 aa, Homo sapiens
  CDR3 for beta chain variable domain of TCR clone 290098 (TRBV4-2, TRBJ1-1)
CASSQRSSGRTEAFL

SEQ ID NO: 580197 - protein, 15 aa, Homo sapiens
  CDR3 for alpha chain variable domain of TCR clone 290099 (TRAV26-1, TRAJ22)
CIVRVSLWFCKATNL

SEQ ID NO: 580198 - protein, 12 aa, Homo sapiens
  CDR3 for beta chain variable domain of TCR clone 290099 (TRBV11-3, TRBJ2-2)
CASSLGGGELFF

SEQ ID NO: 580199 - protein, 13 aa, Homo sapiens
  CDR3 for alpha chain variable domain of TCR clone 290100 (TRAV20, TRAJ37)
CAGCSSNTGKLIF

SEQ ID NO: 580200 - protein, 18 aa, Homo sapiens
  CDR3 for beta chain variable domain of TCR clone 290100 (TRBV24-1, TRBJ2-1)
CATSDLMFLGRGVHEQFF

SEQ ID NO: 580201 - protein, 15 aa, Homo sapiens
  CDR3 for alpha chain variable domain of TCR clone 290101 (TRAV4, TRAJ39)
CLVGPNNNAGNMLTF

SEQ ID NO: 580202 - protein, 14 aa, Homo sapiens
  CDR3 for beta chain variable domain of TCR clone 290101 (TRBV11-2, TRBJ2-5)
CASSRTGGIETQYS

SEQ ID NO: 580203 - protein, 14 aa, Homo sapiens
  CDR3 for alpha chain variable domain of TCR clone 290102 (TRAV25, TRAJ35)
CARRMEGFGNVLHC

SEQ ID NO: 580204 - protein, 12 aa, Homo sapiens
  CDR3 for beta chain variable domain of TCR clone 290102 (TRBV5-1, TRBJ2-7)
CASSFRGYEQYF

SEQ ID NO: 580205 - protein, 15 aa, Homo sapiens
  CDR3 for alpha chain variable domain of TCR clone 290103 (TRAV17, TRAJ10)
CATVLLTGGGKKLTF

SEQ ID NO: 580206 - protein, 16 aa, Homo sapiens
  CDR3 for beta chain variable domain of TCR clone 290103 (TRBV7-9, TRBJ2-3)
CASSPWREVGTDTQYF

SEQ ID NO: 580207 - protein, 12 aa, Homo sapiens
  CDR3 for alpha chain variable domain of TCR clone 290104 (TRAV8-4, TRAJ37)
CAVSGNTGKLIF

SEQ ID NO: 580208 - protein, 14 aa, Homo sapiens
  CDR3 for beta chain variable domain of TCR clone 290104 (TRBV7-2, TRBJ2-1)
CQQPTGVEYNEQFF

SEQ ID NO: 580209 - protein, 13 aa, Homo sapiens
  CDR3 for alpha chain variable domain of TCR clone 290105 (TRAV8-3, TRAJ44)
CGVVPGTASKLTF

SEQ ID NO: 580210 - protein, 12 aa, Homo sapiens
  CDR3 for beta chain variable domain of TCR clone 290105 (TRBV7-8, TRBJ2-7)
CASSLGDREQYF

SEQ ID NO: 580211 - protein, 14 aa, Homo sapiens
  CDR3 for alpha chain variable domain of TCR clone 290106 (TRAV12-2, TRAJ13)
CAVKKTGGYQKVTF

SEQ ID NO: 580212 - protein, 15 aa, Homo sapiens
  CDR3 for beta chain variable domain of TCR clone 290106 (TRBV20-1, TRBJ2-3)
CSAGDSRLITDTQYF

SEQ ID NO: 580213 - protein, 15 aa, Homo sapiens
  CDR3 for alpha chain variable domain of TCR clone 290107 (TRAV8-3, TRAJ27)
CAVGPSKTNAGKSTF

SEQ ID NO: 580214 - protein, 15 aa, Homo sapiens
  CDR3 for beta chain variable domain of TCR clone 290107 (TRBV20-1, TRBJ2-7)
CSARKGLAESYEQYF

SEQ ID NO: 580215 - protein, 14 aa, Homo sapiens
  CDR3 for alpha chain variable domain of TCR clone 290108 (TRAV35, TRAJ22)
CAGLRPGSARQLTF

SEQ ID NO: 580216 - protein, 16 aa, Homo sapiens
  CDR3 for beta chain variable domain of TCR clone 290108 (TRBV7-8, TRBJ2-6)
CASRVGDSSGANVLTF

SEQ ID NO: 580217 - protein, 13 aa, Homo sapiens
  CDR3 for alpha chain variable domain of TCR clone 290109 (TRAV30, TRAJ24)
CGTVTDSCGKLQF

SEQ ID NO: 580218 - protein, 15 aa, Homo sapiens
  CDR3 for beta chain variable domain of TCR clone 290109 (TRBV25-1, TRBJ1-4)
CASSPGDSTNEKLFF

SEQ ID NO: 580219 - protein, 12 aa, Homo sapiens
  CDR3 for alpha chain variable domain of TCR clone 290110 (TRAV1-2, TRAJ7)
CAVAYGINRLAF

SEQ ID NO: 580220 - protein, 16 aa, Homo sapiens
  CDR3 for beta chain variable domain of TCR clone 290110 (TRBV5-1, TRBJ2-7)
CASSPMTGALSYEQYF

SEQ ID NO: 580221 - protein, 14 aa, Homo sapiens
  CDR3 for alpha chain variable domain of TCR clone 290111 (TRAV1-2, TRAJ8)
CAMREDTGFQKLVF

SEQ ID NO: 580222 - protein, 15 aa, Homo sapiens
  CDR3 for beta chain variable domain of TCR clone 290111 (TRBV7-9, TRBJ1-4)
CASSARTGGNEKLFF

SEQ ID NO: 580223 - protein, 13 aa, Homo sapiens
  CDR3 for alpha chain variable domain of TCR clone 290112 (TRAV20, TRAJ20)
CAVQALNDYKLSF

SEQ ID NO: 580224 - protein, 13 aa, Homo sapiens
  CDR3 for beta chain variable domain of TCR clone 290112 (TRBV7-9, TRBJ1-4)
CASSLPVIEKLFF

SEQ ID NO: 580225 - protein, 14 aa, Homo sapiens
  CDR3 for alpha chain variable domain of TCR clone 290113 (TRAV3, TRAJ37)
CAVKESGNTGNLIF

SEQ ID NO: 580226 - protein, 14 aa, Homo sapiens
  CDR3 for beta chain variable domain of TCR clone 290113 (TRBV2, TRBJ1-5)
CASSENRGGQPQHF

SEQ ID NO: 580227 - protein, 14 aa, Homo sapiens
  CDR3 for alpha chain variable domain of TCR clone 290114 (TRAV20, TRAJ56)
CAVRFDGASSKLTF

SEQ ID NO: 580228 - protein, 14 aa, Homo sapiens
  CDR3 for beta chain variable domain of TCR clone 290114 (TRBV20-1, TRBJ2-7)
CSAKRGRSSYEHYF

SEQ ID NO: 580229 - protein, 14 aa, Homo sapiens
  CDR3 for alpha chain variable domain of TCR clone 290115 (TRAV8-6, TRAJ54)
CAVSPALGAQKLVF

SEQ ID NO: 580230 - protein, 15 aa, Homo sapiens
  CDR3 for beta chain variable domain of TCR clone 290115 (TRBV4-1, TRBJ1-6)
CASSAGQGYNSPLLF

SEQ ID NO: 580231 - protein, 15 aa, Homo sapiens
  CDR3 for alpha chain variable domain of TCR clone 290116 (TRAV34, TRAJ38)
CGADFTPGNNRKRIW

SEQ ID NO: 580232 - protein, 16 aa, Homo sapiens
  CDR3 for beta chain variable domain of TCR clone 290116 (TRBV12-5, TRBJ2-5)
CASGPRTNGNQETQYF

SEQ ID NO: 580233 - protein, 10 aa, Homo sapiens
  CDR3 for alpha chain variable domain of TCR clone 290117 (TRAV30, TRAJ24)
CGTEIRMLTA

SEQ ID NO: 580234 - protein, 15 aa, Homo sapiens
  CDR3 for beta chain variable domain of TCR clone 290117 (TRBV7-9, TRBJ1-4)
CASSARTGGNEKLFF

SEQ ID NO: 580235 - protein, 23 aa, Homo sapiens
  CDR3 for alpha chain variable domain of TCR clone 290118 (TRAV2, TRAJ39)
LQVREADALFTTVHNNAGNMLTF

SEQ ID NO: 580236 - protein, 16 aa, Homo sapiens
  CDR3 for beta chain variable domain of TCR clone 290118 (TRBV24-1, TRBJ2-3)
CATSGYRDRDTDTQYF

SEQ ID NO: 580237 - protein, 16 aa, Homo sapiens
  CDR3 for alpha chain variable domain of TCR clone 290119 (TRAV12-3, TRAJ53)
CAMSTGSGGSNYKLTL

SEQ ID NO: 580238 - protein, 11 aa, Homo sapiens
  CDR3 for beta chain variable domain of TCR clone 290119 (TRBV29-1, TRBJ2-5)
CSEDRTGTQYF

SEQ ID NO: 580239 - protein, 13 aa, Homo sapiens
  CDR3 for alpha chain variable domain of TCR clone 290120 (TRAV36/DV7, TRAJ54)
CAVDIQGAQKLVF

SEQ ID NO: 580240 - protein, 13 aa, Homo sapiens
  CDR3 for beta chain variable domain of TCR clone 290120 (TRBV7-9, TRBJ2-5)
CASLSPGQETQYF

SEQ ID NO: 580241 - protein, 12 aa, Homo sapiens
  CDR3 for alpha chain variable domain of TCR clone 290121 (TRAV12-1, TRAJ31)
CVSWTNNARLMF

SEQ ID NO: 580242 - protein, 15 aa, Homo sapiens
  CDR3 for beta chain variable domain of TCR clone 290121 (TRBV7-2, TRBJ1-6)
CASSLGPDRGMPLHF

SEQ ID NO: 580243 - protein, 14 aa, Homo sapiens
  CDR3 for alpha chain variable domain of TCR clone 290122 (TRAV12-3, TRAJ10)
SHLPLTGGGNKLTF

SEQ ID NO: 580244 - protein, 13 aa, Homo sapiens
  CDR3 for beta chain variable domain of TCR clone 290122 (TRBV20-1, TRBJ1-1)
CSARAGGSTEAFF

SEQ ID NO: 580245 - protein, 15 aa, Homo sapiens
  CDR3 for alpha chain variable domain of TCR clone 290123 (TRAV17, TRAJ6)
CATDLPSGGSYIPTF

SEQ ID NO: 580246 - protein, 16 aa, Homo sapiens
  CDR3 for beta chain variable domain of TCR clone 290123 (TRBV4-1, TRBJ2-1)
CASSQDPTGYSYEQYF

SEQ ID NO: 580247 - protein, 15 aa, Homo sapiens
  CDR3 for alpha chain variable domain of TCR clone 290124 (TRAV26-1, TRAJ29)
CIGRVEGSGNKPLVF

SEQ ID NO: 580248 - protein, 16 aa, Homo sapiens
  CDR3 for beta chain variable domain of TCR clone 290124 (TRBV11-2, TRBJ1-2)
CASSLDTGGADYGYTF

SEQ ID NO: 580249 - protein, 14 aa, Homo sapiens
  CDR3 for alpha chain variable domain of TCR clone 290125 (TRAV12-3, TRAJ10)
SHLPLTGGGNKLTF

SEQ ID NO: 580250 - protein, 22 aa, Homo sapiens
  CDR3 for beta chain variable domain of TCR clone 290125 (TRBV6-1, TRBJ1-3)
CASVRGGGWKHHIFWRGKLAHC

SEQ ID NO: 580251 - protein, 13 aa, Homo sapiens
  CDR3 for alpha chain variable domain of TCR clone 290126 (TRAV27, TRAJ6)
CAGGTRGSYIPTF

SEQ ID NO: 580252 - protein, 16 aa, Homo sapiens
  CDR3 for beta chain variable domain of TCR clone 290126 (TRBV7-3, TRBJ2-1)
CASSKPLAGGYNEQFF

SEQ ID NO: 580253 - protein, 13 aa, Homo sapiens
  CDR3 for alpha chain variable domain of TCR clone 290127 (TRAV12-3, TRAJ5)
CAMIYTGRRALTF

SEQ ID NO: 580254 - protein, 15 aa, Homo sapiens
  CDR3 for beta chain variable domain of TCR clone 290127 (TRBV20-1, TRBJ2-7)
CSARDRVSGMDEQYV

SEQ ID NO: 580255 - protein, 16 aa, Homo sapiens
  CDR3 for alpha chain variable domain of TCR clone 290128 (TRAV14/DV4, TRAJ17)
CAMREAGRAAGNKLTF

SEQ ID NO: 580256 - protein, 14 aa, Homo sapiens
  CDR3 for beta chain variable domain of TCR clone 290128 (TRBV11-2, TRBJ1-2)
CASSLGTANYGYTF

SEQ ID NO: 580257 - protein, 15 aa, Homo sapiens
  CDR3 for alpha chain variable domain of TCR clone 290129 (TRAV26-1, TRAJ23)
CIVRVAGYQGGKLIF

SEQ ID NO: 580258 - protein, 18 aa, Homo sapiens
  CDR3 for beta chain variable domain of TCR clone 290129 (TRBV28, TRBJ2-1)
CASSSTSGRASSYNEQFF

SEQ ID NO: 580259 - protein, 11 aa, Homo sapiens
  CDR3 for alpha chain variable domain of TCR clone 290130 (TRAV13-2, TRAJ20)
CADSNYYKLSF

SEQ ID NO: 580260 - protein, 14 aa, Homo sapiens
  CDR3 for beta chain variable domain of TCR clone 290130 (TRBV11-2, TRBJ1-5)
CASSLDRGRQPQHF

SEQ ID NO: 580261 - protein, 16 aa, Homo sapiens
  CDR3 for alpha chain variable domain of TCR clone 290131 (TRAV30, TRAJ24)
CGTEIVDADSWGKFQL

SEQ ID NO: 580262 - protein, 12 aa, Homo sapiens
  CDR3 for beta chain variable domain of TCR clone 290131 (TRBV12-4, TRBJ2-3)
CASSSTTDTQYF

SEQ ID NO: 580263 - protein, 23 aa, Homo sapiens
  CDR3 for alpha chain variable domain of TCR clone 290132 (TRAV30, TRAJ43)
CTLRPPSSVTQEPTSAALSDMRF

SEQ ID NO: 580264 - protein, 14 aa, Homo sapiens
  CDR3 for beta chain variable domain of TCR clone 290132 (TRBV13, TRBJ2-5)
CASSLERVGETQYF

SEQ ID NO: 580265 - protein, 14 aa, Homo sapiens
  CDR3 for alpha chain variable domain of TCR clone 290133 (TRAV35, TRAJ42)
CAGRYGVSHGNLIF

SEQ ID NO: 580266 - protein, 15 aa, Homo sapiens
  CDR3 for beta chain variable domain of TCR clone 290133 (TRBV7-9, TRBJ2-1)
CASSLGWGRANEQFF

SEQ ID NO: 580267 - protein, 15 aa, Homo sapiens
  CDR3 for alpha chain variable domain of TCR clone 290134 (TRAV2, TRAJ22)
CAVPSRGGSARQLTL

SEQ ID NO: 580268 - protein, 16 aa, Homo sapiens
  CDR3 for beta chain variable domain of TCR clone 290134 (TRBV29-1, TRBJ2-7)
CSVEDAEDGTAYEQYF

SEQ ID NO: 580269 - protein, 11 aa, Homo sapiens
  CDR3 for alpha chain variable domain of TCR clone 290135 (TRAV29/DV5, TRAJ31)
CAAMNNARHMF

SEQ ID NO: 580270 - protein, 13 aa, Homo sapiens
  CDR3 for beta chain variable domain of TCR clone 290135 (TRBV27, TRBJ1-1)
CASSLSIGAEAFF

SEQ ID NO: 580271 - protein, 14 aa, Homo sapiens
  CDR3 for alpha chain variable domain of TCR clone 290136 (TRAV12-1, TRAJ17)
CMVNYKAAGNKLTF

SEQ ID NO: 580272 - protein, 15 aa, Homo sapiens
  CDR3 for beta chain variable domain of TCR clone 290136 (TRBV20-1, TRBJ2-7)
GSARDRVSGMDEQYF

SEQ ID NO: 580273 - protein, 17 aa, Homo sapiens
  CDR3 for alpha chain variable domain of TCR clone 290137 (TRAV3, TRAJ42)
CAVRDRDYGGSKGNLIF

SEQ ID NO: 580274 - protein, 14 aa, Homo sapiens
  CDR3 for beta chain variable domain of TCR clone 290137 (TRBV4-1, TRBJ2-2)
CASSQAVNTGELFF

SEQ ID NO: 580275 - protein, 14 aa, Homo sapiens
  CDR3 for alpha chain variable domain of TCR clone 290138 (TRAV12-3, TRAJ29)
CAKSPYSGSTPLVF

SEQ ID NO: 580276 - protein, 11 aa, Homo sapiens
  CDR3 for beta chain variable domain of TCR clone 290138 (TRBV12-4, TRBJ2-3)
CASTATDTQYF

SEQ ID NO: 580277 - protein, 11 aa, Homo sapiens
  CDR3 for alpha chain variable domain of TCR clone 290139 (TRAV3, TRAJ21)
CAVGNFNKFYF

SEQ ID NO: 580278 - protein, 12 aa, Homo sapiens
  CDR3 for beta chain variable domain of TCR clone 290139 (TRBV19, TRBJ2-1)
CASSIQYNEQFF

SEQ ID NO: 580279 - protein, 16 aa, Homo sapiens
  CDR3 for alpha chain variable domain of TCR clone 290140 (TRAV26-1, TRAJ53)
CIARVAMGGSNYKLTF

SEQ ID NO: 580280 - protein, 19 aa, Homo sapiens
  CDR3 for beta chain variable domain of TCR clone 290140 (TRBV25-1, TRBJ2-2)
CAILVYRVDRGRKTGELFF

SEQ ID NO: 580281 - protein, 15 aa, Homo sapiens
  CDR3 for alpha chain variable domain of TCR clone 290141 (TRAV27, TRAJ50)
CAGRERGTSYDKVRF

SEQ ID NO: 580282 - protein, 16 aa, Homo sapiens
  CDR3 for beta chain variable domain of TCR clone 290141 (TRBV10-3, TRBJ1-5)
CAISDQVGAPNQPQHF

SEQ ID NO: 580283 - protein, 11 aa, Homo sapiens
  CDR3 for alpha chain variable domain of TCR clone 290142 (TRAV3, TRAJ21)
CAVGNFNKFYF

SEQ ID NO: 580284 - protein, 15 aa, Homo sapiens
  CDR3 for beta chain variable domain of TCR clone 290142 (TRBV7-3, TRBJ2-7)
CASSPPVALNYEQYF

SEQ ID NO: 580285 - protein, 15 aa, Homo sapiens
  CDR3 for alpha chain variable domain of TCR clone 290143 (TRAV13-1, TRAJ10)
CAATILTGGGNKPTF

SEQ ID NO: 580286 - protein, 15 aa, Homo sapiens
  CDR3 for beta chain variable domain of TCR clone 290143 (TRBV2, TRBJ2-7)
CASTLPGSGATEQYF

SEQ ID NO: 580287 - protein, 17 aa, Homo sapiens
  CDR3 for alpha chain variable domain of TCR clone 290144 (TRAV26-1, TRAJ53)
CIVRVDASGGSNYKLTF

SEQ ID NO: 580288 - protein, 15 aa, Homo sapiens
  CDR3 for beta chain variable domain of TCR clone 290144 (TRBV20-1, TRBJ2-7)
CSAESGTSGAYEQYF

SEQ ID NO: 580289 - protein, 12 aa, Homo sapiens
  CDR3 for alpha chain variable domain of TCR clone 290145 (TRAV36/DV7, TRAJ54)
CAVVRGAQKLVL

SEQ ID NO: 580290 - protein, 14 aa, Homo sapiens
  CDR3 for beta chain variable domain of TCR clone 290145 (TRBV7-3, TRBJ1-1)
CASSLKGGNTEAFF

SEQ ID NO: 580291 - protein, 19 aa, Homo sapiens
  CDR3 for alpha chain variable domain of TCR clone 290146 (TRAV26-1, TRAJ52)
CIVRAHRNAGGTSYGKLTF

SEQ ID NO: 580292 - protein, 16 aa, Homo sapiens
  CDR3 for beta chain variable domain of TCR clone 290146 (TRBV6-1, TRBJ2-5)
CASSETLDRGAETQYF

SEQ ID NO: 580293 - protein, 17 aa, Homo sapiens
  CDR3 for alpha chain variable domain of TCR clone 290147 (TRAV3, TRAJ42)
CAVGDRDYGGSQGNLIF

SEQ ID NO: 580294 - protein, 17 aa, Homo sapiens
  CDR3 for beta chain variable domain of TCR clone 290147 (TRBV7-9, TRBJ2-3)
CASSPTVAGDLTDTQYL

SEQ ID NO: 580295 - protein, 13 aa, Homo sapiens
  CDR3 for alpha chain variable domain of TCR clone 290148 (TRAV12-1, TRAJ39)
CVVPQRAGNMLTF

SEQ ID NO: 580296 - protein, 19 aa, Homo sapiens
  CDR3 for beta chain variable domain of TCR clone 290148 (TRBV19, TRBJ2-5)
CASSIGQVTDFFLGETQYF

SEQ ID NO: 580297 - protein, 13 aa, Homo sapiens
  CDR3 for alpha chain variable domain of TCR clone 290149 (TRAV8-3, TRAJ6)
CAARRGGSYIPTF

SEQ ID NO: 580298 - protein, 15 aa, Homo sapiens
  CDR3 for beta chain variable domain of TCR clone 290149 (TRBV4-1, TRBJ2-3)
CASSTLAGGRDTQYF

SEQ ID NO: 580299 - protein, 14 aa, Homo sapiens
  CDR3 for alpha chain variable domain of TCR clone 290150 (TRAV8-2, TRAJ4)
CVVSPSGGYNKLIF

SEQ ID NO: 580300 - protein, 15 aa, Homo sapiens
  CDR3 for beta chain variable domain of TCR clone 290150 (TRBV2, TRBJ2-1)
CAGSELAGSYNEQFF

SEQ ID NO: 580301 - protein, 13 aa, Homo sapiens
  CDR3 for alpha chain variable domain of TCR clone 290151 (TRAV1-2, TRAJ9)
CAVLNTGGFKTIF

SEQ ID NO: 580302 - protein, 17 aa, Homo sapiens
  CDR3 for beta chain variable domain of TCR clone 290151 (TRBV7-9, TRBJ2-3)
CASSLEEAGAYPDTQYF

SEQ ID NO: 580303 - protein, 15 aa, Homo sapiens
  CDR3 for alpha chain variable domain of TCR clone 290152 (TRAV12-3, TRAJ6)
CARSASTGGSYIPTF

SEQ ID NO: 580304 - protein, 16 aa, Homo sapiens
  CDR3 for beta chain variable domain of TCR clone 290152 (TRBV20-1, TRBJ1-2)
CSASMGQGVANYGYTF

SEQ ID NO: 580305 - protein, 13 aa, Homo sapiens
  CDR3 for alpha chain variable domain of TCR clone 290153 (TRAV8-3, TRAJ36)
CAVGATGANNLFF

SEQ ID NO: 580306 - protein, 13 aa, Homo sapiens
  CDR3 for beta chain variable domain of TCR clone 290153 (TRBV5-7, TRBJ2-3)
PAAHGRATDTQYF

SEQ ID NO: 580307 - protein, 13 aa, Homo sapiens
  CDR3 for alpha chain variable domain of TCR clone 290154 (TRAV36/DV7, TRAJ37)
CAVFSSNTGKLIF

SEQ ID NO: 580308 - protein, 16 aa, Homo sapiens
  CDR3 for beta chain variable domain of TCR clone 290154 (TRBV7-2, TRBJ2-3)
CASSLVALYSTDTQYF

SEQ ID NO: 580309 - protein, 18 aa, Homo sapiens
  CDR3 for alpha chain variable domain of TCR clone 290155 (TRAV21, TRAJ52)
CAVRPSPAGVTSYGKLTL

SEQ ID NO: 580310 - protein, 13 aa, Homo sapiens
  CDR3 for beta chain variable domain of TCR clone 290155 (TRBV2, TRBJ1-5)
CATAGQGNQPQHF

SEQ ID NO: 580311 - protein, 12 aa, Homo sapiens
  CDR3 for alpha chain variable domain of TCR clone 290156 (TRAV1-2, TRAJ33)
CAVMDSNYQLIW

SEQ ID NO: 580312 - protein, 14 aa, Homo sapiens
  CDR3 for beta chain variable domain of TCR clone 290156 (TRBV7-6, TRBJ2-3)
CASSLGTVTDTQYF

SEQ ID NO: 580313 - protein, 12 aa, Homo sapiens
  CDR3 for alpha chain variable domain of TCR clone 290157 (TRAV12-3, TRAJ17)
CAMTLTGNKLTL

SEQ ID NO: 580314 - protein, 15 aa, Homo sapiens
  CDR3 for beta chain variable domain of TCR clone 290157 (TRBV20-1, TRBJ2-7)
CSARDRVTGMDEQYF

SEQ ID NO: 580315 - protein, 14 aa, Homo sapiens
  CDR3 for alpha chain variable domain of TCR clone 290158 (TRAV1-2, TRAJ16)
CAVNRFSDGQKLLF

SEQ ID NO: 580316 - protein, 18 aa, Homo sapiens
  CDR3 for beta chain variable domain of TCR clone 290158 (TRBV25-1, TRBJ2-2)
CHPSLPGGQGRKTGELFF

SEQ ID NO: 580317 - protein, 12 aa, Homo sapiens
  CDR3 for alpha chain variable domain of TCR clone 290159 (TRAV16, TRAJ15)
CSNRQAGTALIF

SEQ ID NO: 580318 - protein, 15 aa, Homo sapiens
  CDR3 for beta chain variable domain of TCR clone 290159 (TRBV4-1, TRBJ1-1)
CAGSYSGTGGTEAFF

SEQ ID NO: 580319 - protein, 14 aa, Homo sapiens
  CDR3 for alpha chain variable domain of TCR clone 290160 (TRAV38-1, TRAJ40)
CALRPTSGTYKYIF

SEQ ID NO: 580320 - protein, 13 aa, Homo sapiens
  CDR3 for beta chain variable domain of TCR clone 290160 (TRBV24-1, TRBJ2-2)
CATSDWSTGELFF

SEQ ID NO: 580321 - protein, 15 aa, Homo sapiens
  CDR3 for alpha chain variable domain of TCR clone 290161 (TRAV12-2, TRAJ56)
CAVNPFTGANSKLTF

SEQ ID NO: 580322 - protein, 13 aa, Homo sapiens
  CDR3 for beta chain variable domain of TCR clone 290161 (TRBV20-1, TRBJ1-2)
CSARDRVYGGSTF

SEQ ID NO: 580323 - protein, 13 aa, Homo sapiens
  CDR3 for alpha chain variable domain of TCR clone 290162 (TRAV13-1, TRAJ20)
CAARVSNDYKLSF

SEQ ID NO: 580324 - protein, 13 aa, Homo sapiens
  CDR3 for beta chain variable domain of TCR clone 290162 (TRBV6-4, TRBJ2-1)
CASSASVNNEQFF

SEQ ID NO: 580325 - protein, 13 aa, Homo sapiens
  CDR3 for alpha chain variable domain of TCR clone 290163 (TRAV2, TRAJ40)
CAVVTSGTYKYIF

SEQ ID NO: 580326 - protein, 14 aa, Homo sapiens
  CDR3 for beta chain variable domain of TCR clone 290163 (TRBV5-8, TRBJ2-3)
CASSLGQGTDTQYF

SEQ ID NO: 580327 - protein, 18 aa, Homo sapiens
  CDR3 for alpha chain variable domain of TCR clone 290164 (TRAV13-1, TRAJ52)
CAAKTPNAGGTSYGKLTF

SEQ ID NO: 580328 - protein, 13 aa, Homo sapiens
  CDR3 for beta chain variable domain of TCR clone 290164 (TRBV6-4, TRBJ1-5)
CASSADLNQPQHF

SEQ ID NO: 580329 - protein, 16 aa, Homo sapiens
  CDR3 for alpha chain variable domain of TCR clone 290165 (TRAV3, TRAJ23)
CAVKIGIYNQGGKLIF

SEQ ID NO: 580330 - protein, 17 aa, Homo sapiens
  CDR3 for beta chain variable domain of TCR clone 290165 (TRBV10-3, TRBJ2-6)
CAISESRAPSGANVLTF

SEQ ID NO: 580331 - protein, 10 aa, Homo sapiens
  CDR3 for alpha chain variable domain of TCR clone 290166 (TRAV12-2, TRAJ22)
CAVNETQLTL

SEQ ID NO: 580332 - protein, 13 aa, Homo sapiens
  CDR3 for beta chain variable domain of TCR clone 290166 (TRBV6-5, TRBJ2-6)
CASSTSGPLRLDF

SEQ ID NO: 580333 - protein, 13 aa, Homo sapiens
  CDR3 for alpha chain variable domain of TCR clone 290167 (TRAV1-1, TRAJ9)
CAAKNTGGFKTIF

SEQ ID NO: 580334 - protein, 14 aa, Homo sapiens
  CDR3 for beta chain variable domain of TCR clone 290167 (TRBV20-1, TRBJ2-1)
RSAQIGGSASEQFF

SEQ ID NO: 580335 - protein, 14 aa, Homo sapiens
  CDR3 for alpha chain variable domain of TCR clone 290168 (TRAV12-2, TRAJ40)
CAVKLPSGTYKYIF

SEQ ID NO: 580336 - protein, 13 aa, Homo sapiens
  CDR3 for beta chain variable domain of TCR clone 290168 (TRBV7-9, TRBJ1-2)
CASSLKQNYGYTF

SEQ ID NO: 580337 - protein, 15 aa, Homo sapiens
  CDR3 for alpha chain variable domain of TCR clone 290169 (TRAV38-1, TRAJ37)
CAFIFGSGNTGKLIF

SEQ ID NO: 580338 - protein, 14 aa, Homo sapiens
  CDR3 for beta chain variable domain of TCR clone 290169 (TRBV7-3, TRBJ1-1)
CASSLKGGNTEAFF

SEQ ID NO: 580339 - protein, 13 aa, Homo sapiens
  CDR3 for alpha chain variable domain of TCR clone 290170 (TRAV12-2, TRAJ20)
YAVYPSNDYKLSF

SEQ ID NO: 580340 - protein, 15 aa, Homo sapiens
  CDR3 for beta chain variable domain of TCR clone 290170 (TRBV18, TRBJ1-2)
CASSPGNGLGYGYTF

SEQ ID NO: 580341 - protein, 16 aa, Homo sapiens
  CDR3 for alpha chain variable domain of TCR clone 290171 (TRAV23/DV6, TRAJ21)
CAASSGGGTTSKNFTL

SEQ ID NO: 580342 - protein, 11 aa, Homo sapiens
  CDR3 for beta chain variable domain of TCR clone 290171 (TRBV7-8, TRBJ2-7)
CASSLSLEQYF

SEQ ID NO: 580343 - protein, 14 aa, Homo sapiens
  CDR3 for alpha chain variable domain of TCR clone 290172 (TRAV12-3, TRAJ58)
CAMSTETSGSRLTF

SEQ ID NO: 580344 - protein, 13 aa, Homo sapiens
  CDR3 for beta chain variable domain of TCR clone 290172 (TRBV27, TRBJ2-3)
CASSWGRTDTKYF

SEQ ID NO: 580345 - protein, 15 aa, Homo sapiens
  CDR3 for alpha chain variable domain of TCR clone 290173 (TRAV26-2, TRAJ50)
CILGDEETSYDKVIF

SEQ ID NO: 580346 - protein, 16 aa, Homo sapiens
  CDR3 for beta chain variable domain of TCR clone 290173 (TRBV9, TRBJ2-1)
CASSVGGGGNYNEQFF

SEQ ID NO: 580347 - protein, 13 aa, Homo sapiens
  CDR3 for alpha chain variable domain of TCR clone 290174 (TRAV26-2, TRAJ43)
CILRAVNNNDMRF

SEQ ID NO: 580348 - protein, 14 aa, Homo sapiens
  CDR3 for beta chain variable domain of TCR clone 290174 (TRBV7-3, TRBJ1-1)
CASSLGTGYTEAFF

SEQ ID NO: 580349 - protein, 10 aa, Homo sapiens
  CDR3 for alpha chain variable domain of TCR clone 290175 (TRAV23/DV6, TRAJ31)
CARGGARPMF

SEQ ID NO: 580350 - protein, 15 aa, Homo sapiens
  CDR3 for beta chain variable domain of TCR clone 290175 (TRBV20-1, TRBJ2-7)
CSARDRVSGMDEQYF

SEQ ID NO: 580351 - protein, 12 aa, Homo sapiens
  CDR3 for alpha chain variable domain of TCR clone 290176 (TRAV12-3, TRAJ17)
CAMTLTGNKLTF

SEQ ID NO: 580352 - protein, 15 aa, Homo sapiens
  CDR3 for beta chain variable domain of TCR clone 290176 (TRBV6-5, TRBJ1-2)
CASSYSQAFNYGYTF

SEQ ID NO: 580353 - protein, 17 aa, Homo sapiens
  CDR3 for alpha chain variable domain of TCR clone 290177 (TRAV3, TRAJ12)
CAVRDGGWMDSSYKLIF

SEQ ID NO: 580354 - protein, 13 aa, Homo sapiens
  CDR3 for beta chain variable domain of TCR clone 290177 (TRBV15, TRBJ1-6)
CATSGGLNSPLHF

SEQ ID NO: 580355 - protein, 16 aa, Homo sapiens
  CDR3 for alpha chain variable domain of TCR clone 290178 (TRAV12-3, TRAJ53)
CAMRPGSGGSTYKLTF

SEQ ID NO: 580356 - protein, 13 aa, Homo sapiens
  CDR3 for beta chain variable domain of TCR clone 290178 (TRBV19, TRBJ1-2)
CASSVPGQDGYTF

SEQ ID NO: 580357 - protein, 14 aa, Homo sapiens
  CDR3 for alpha chain variable domain of TCR clone 290179 (TRAV27, TRAJ44)
GAASFTGTASKLTF

SEQ ID NO: 580358 - protein, 13 aa, Homo sapiens
  CDR3 for beta chain variable domain of TCR clone 290179 (TRBV27, TRBJ2-3)
CATSRGGLYTQYF

SEQ ID NO: 580359 - protein, 14 aa, Homo sapiens
  CDR3 for alpha chain variable domain of TCR clone 290180 (TRAV8-6, TRAJ13)
CAGGSSGGYQKVTF

SEQ ID NO: 580360 - protein, 16 aa, Homo sapiens
  CDR3 for beta chain variable domain of TCR clone 290180 (TRBV7-9, TRBJ2-1)
CASSDVAGGSYNEQFF

SEQ ID NO: 580361 - protein, 13 aa, Homo sapiens
  CDR3 for alpha chain variable domain of TCR clone 290181 (TRAV8-4, TRAJ29)
CAVSATGNTPLVF

SEQ ID NO: 580362 - protein, 15 aa, Homo sapiens
  CDR3 for beta chain variable domain of TCR clone 290181 (TRBV7-2, TRBJ1-1)
CASSPQGGANTEAFF

SEQ ID NO: 580363 - protein, 13 aa, Homo sapiens
  CDR3 for alpha chain variable domain of TCR clone 290182 (TRAV23/DV6, TRAJ3)
CAATYSSASKLTF

SEQ ID NO: 580364 - protein, 15 aa, Homo sapiens
  CDR3 for beta chain variable domain of TCR clone 290182 (TRBV19, TRBJ1-1)
CASTSGQIQNTEAFF

SEQ ID NO: 580365 - protein, 12 aa, Homo sapiens
  CDR3 for alpha chain variable domain of TCR clone 290183 (TRAV1-1, TRAJ9)
CAVDPGGFKTIF

SEQ ID NO: 580366 - protein, 14 aa, Homo sapiens
  CDR3 for beta chain variable domain of TCR clone 290183 (TRBV7-8, TRBJ2-5)
CASSATGGQETQYF

SEQ ID NO: 580367 - protein, 10 aa, Homo sapiens
  CDR3 for alpha chain variable domain of TCR clone 290184 (TRAV1-2, TRAJ20)
CACNDSKLSF

SEQ ID NO: 580368 - protein, 16 aa, Homo sapiens
  CDR3 for beta chain variable domain of TCR clone 290184 (TRBV20-1, TRBJ2-1)
CSARDLKQGMNNEQFF

SEQ ID NO: 580369 - protein, 13 aa, Homo sapiens
  CDR3 for alpha chain variable domain of TCR clone 290185 (TRAV4, TRAJ44)
CLEETGTASKLTF

SEQ ID NO: 580370 - protein, 16 aa, Homo sapiens
  CDR3 for beta chain variable domain of TCR clone 290185 (TRBV20-1, TRBJ1-4)
CSAPGQGLLTNEKLFF

SEQ ID NO: 580371 - protein, 14 aa, Homo sapiens
  CDR3 for alpha chain variable domain of TCR clone 290186 (TRAV3, TRAJ21)
FAVRDAYHFNKFYF

SEQ ID NO: 580372 - protein, 17 aa, Homo sapiens
  CDR3 for beta chain variable domain of TCR clone 290186 (TRBV20-1, TRBJ1-6)
CSARGGYTFSYNSPLHF

SEQ ID NO: 580373 - protein, 13 aa, Homo sapiens
  CDR3 for alpha chain variable domain of TCR clone 290187 (TRAV12-3, TRAJ39)
CAMIDNAGNMLTF

SEQ ID NO: 580374 - protein, 18 aa, Homo sapiens
  CDR3 for beta chain variable domain of TCR clone 290187 (TRBV9, TRBJ2-5)
CASSVAGGTNAFGETQYF

SEQ ID NO: 580375 - protein, 14 aa, Homo sapiens
  CDR3 for alpha chain variable domain of TCR clone 290188 (TRAV35, TRAJ24)
CAGPRRDSWGKLQF

SEQ ID NO: 580376 - protein, 12 aa, Homo sapiens
  CDR3 for beta chain variable domain of TCR clone 290188 (TRBV12-3, TRBJ2-3)
CASSLGQDTQYF

SEQ ID NO: 580377 - protein, 13 aa, Homo sapiens
  CDR3 for alpha chain variable domain of TCR clone 290189 (TRAV23/DV6, TRAJ22)
CAPWVGSARQLTF

SEQ ID NO: 580378 - protein, 14 aa, Homo sapiens
  CDR3 for beta chain variable domain of TCR clone 290189 (TRBV18, TRBJ2-7)
CASSPTSGGYEQYF

SEQ ID NO: 580379 - protein, 13 aa, Homo sapiens
  CDR3 for alpha chain variable domain of TCR clone 290190 (TRAV1-2, TRAJ9)
CAALNTGVFRTIF

SEQ ID NO: 580380 - protein, 13 aa, Homo sapiens
  CDR3 for beta chain variable domain of TCR clone 290190 (TRBV19, TRBJ1-2)
CASSVPGQDGYTF

SEQ ID NO: 580381 - protein, 13 aa, Homo sapiens
  CDR3 for alpha chain variable domain of TCR clone 290191 (TRAV29/DV5, TRAJ31)
CAASRNNNARLMF

SEQ ID NO: 580382 - protein, 13 aa, Homo sapiens
  CDR3 for beta chain variable domain of TCR clone 290191 (TRBV11-2, TRBJ1-5)
CASSLDRNQPQHF

SEQ ID NO: 580383 - protein, 12 aa, Homo sapiens
  CDR3 for alpha chain variable domain of TCR clone 290192 (TRAV13-1, TRAJ53)
AASGGSNYKLPF

SEQ ID NO: 580384 - protein, 15 aa, Homo sapiens
  CDR3 for beta chain variable domain of TCR clone 290192 (TRBV5-1, TRBJ2-1)
CASSPPRAPYNEQFF

SEQ ID NO: 580385 - protein, 14 aa, Homo sapiens
  CDR3 for alpha chain variable domain of TCR clone 290193 (TRAV17, TRAJ57)
CATDPQGGSEKLVF

SEQ ID NO: 580386 - protein, 14 aa, Homo sapiens
  CDR3 for beta chain variable domain of TCR clone 290193 (TRBV12-4, TRBJ1-1)
CASSLGRGGTEAFF

SEQ ID NO: 580387 - protein, 13 aa, Homo sapiens
  CDR3 for alpha chain variable domain of TCR clone 290194 (TRAV8-6, TRAJ49)
CAVITNTGNQFYM

SEQ ID NO: 580388 - protein, 13 aa, Homo sapiens
  CDR3 for beta chain variable domain of TCR clone 290194 (TRBV20-1, TRBJ1-1)
CSARGGGNTEAFF

SEQ ID NO: 580389 - protein, 12 aa, Homo sapiens
  CDR3 for alpha chain variable domain of TCR clone 290195 (TRAV12-2, TRAJ31)
CAVNTPDARLMF

SEQ ID NO: 580390 - protein, 14 aa, Homo sapiens
  CDR3 for beta chain variable domain of TCR clone 290195 (TRBV11-3, TRBJ2-6)
CASNKGSVDNVLTF

SEQ ID NO: 580391 - protein, 19 aa, Homo sapiens
  CDR3 for alpha chain variable domain of TCR clone 290196 (TRAV3, TRAJ6)
CAVRDRNPSRSGGSYIPTS

SEQ ID NO: 580392 - protein, 13 aa, Homo sapiens
  CDR3 for beta chain variable domain of TCR clone 290196 (TRBV6-1, TRBJ1-5)
CASTSVGDQPQHF

SEQ ID NO: 580393 - protein, 12 aa, Homo sapiens
  CDR3 for alpha chain variable domain of TCR clone 290197 (TRAV13-1, TRAJ21)
CAAKEGFNNFYF

SEQ ID NO: 580394 - protein, 20 aa, Homo sapiens
  CDR3 for beta chain variable domain of TCR clone 290197 (TRBV7-8, TRBJ2-2)
CASSHLFPGPTIHITGELFF

SEQ ID NO: 580395 - protein, 17 aa, Homo sapiens
  CDR3 for alpha chain variable domain of TCR clone 290198 (TRAV26-1, TRAJ11)
CIVRVGQSNSGYSTPTF

SEQ ID NO: 580396 - protein, 17 aa, Homo sapiens
  CDR3 for beta chain variable domain of TCR clone 290198 (TRBV9, TRBJ2-1)
CASSPRLGLVGYNEQFF

SEQ ID NO: 580397 - protein, 14 aa, Homo sapiens
  CDR3 for alpha chain variable domain of TCR clone 290199 (TRAV38-1, TRAJ40)
CALRPTSGTYKYIF

SEQ ID NO: 580398 - protein, 14 aa, Homo sapiens
  CDR3 for beta chain variable domain of TCR clone 290199 (TRBV4-2, TRBJ1-4)
CASSQGATNEKLFF

SEQ ID NO: 580399 - protein, 13 aa, Homo sapiens
  CDR3 for alpha chain variable domain of TCR clone 290200 (TRAV13-1, TRAJ4)
SAASIGGYNKLIF

SEQ ID NO: 580400 - protein, 16 aa, Homo sapiens
  CDR3 for beta chain variable domain of TCR clone 290200 (TRBV20-1, TRBJ2-1)
CSAPGLAGSYSDEQFF

SEQ ID NO: 580401 - protein, 16 aa, Homo sapiens
  CDR3 for alpha chain variable domain of TCR clone 290201 (TRAV12-3, TRAJ53)
CAMSVGSGGSNYKLTF

SEQ ID NO: 580402 - protein, 16 aa, Homo sapiens
  CDR3 for beta chain variable domain of TCR clone 290201 (TRBV15, TRBJ1-2)
CATSRGPRTGGGGYTF

SEQ ID NO: 580403 - protein, 15 aa, Homo sapiens
  CDR3 for alpha chain variable domain of TCR clone 290202 (TRAV8-3, TRAJ27)
CAVGSSKTTAGKSTF

SEQ ID NO: 580404 - protein, 15 aa, Homo sapiens
  CDR3 for beta chain variable domain of TCR clone 290202 (TRBV7-2, TRBJ2-1)
CASSSGLAGGNEQFF

SEQ ID NO: 580405 - protein, 11 aa, Homo sapiens
  CDR3 for alpha chain variable domain of TCR clone 290203 (TRAV13-1, TRAJ6)
CATLGSYIPTF

SEQ ID NO: 580406 - protein, 13 aa, Homo sapiens
  CDR3 for beta chain variable domain of TCR clone 290203 (TRBV6-6, TRBJ2-1)
CASSVNEGDEQFF

SEQ ID NO: 580407 - protein, 14 aa, Homo sapiens
  CDR3 for alpha chain variable domain of TCR clone 290204 (TRAV12-2, TRAJ13)
CAVKKTGGYPKLTF

SEQ ID NO: 580408 - protein, 15 aa, Homo sapiens
  CDR3 for beta chain variable domain of TCR clone 290204 (TRBV27, TRBJ2-1)
CASSNGGGSSNEQFF

SEQ ID NO: 580409 - protein, 12 aa, Homo sapiens
  CDR3 for alpha chain variable domain of TCR clone 290205 (TRAV36/DV7, TRAJ54)
CAVVRGAQKLVF

SEQ ID NO: 580410 - protein, 12 aa, Homo sapiens
  CDR3 for beta chain variable domain of TCR clone 290205 (TRBV6-1, TRBJ2-5)
CASSEGRETQYF

SEQ ID NO: 580411 - protein, 14 aa, Homo sapiens
  CDR3 for alpha chain variable domain of TCR clone 290206 (TRAV1-2, TRAJ8)
CAVREDTGFQKLVF

SEQ ID NO: 580412 - protein, 15 aa, Homo sapiens
  CDR3 for beta chain variable domain of TCR clone 290206 (TRBV12-4, TRBJ2-5)
CASSPPTGLHETQYF

SEQ ID NO: 580413 - protein, 17 aa, Homo sapiens
  CDR3 for alpha chain variable domain of TCR clone 290207 (TRAV4, TRAJ13)
CLVGVQGSSGGYQKATF

SEQ ID NO: 580414 - protein, 18 aa, Homo sapiens
  CDR3 for beta chain variable domain of TCR clone 290207 (TRBV15, TRBJ2-3)
CATSRDGARSWDTGTQYF

SEQ ID NO: 580415 - protein, 17 aa, Homo sapiens
  CDR3 for alpha chain variable domain of TCR clone 290208 (TRAV13-1, TRAJ28)
CAASPPYTGAGSYQLTF

SEQ ID NO: 580416 - protein, 15 aa, Homo sapiens
  CDR3 for beta chain variable domain of TCR clone 290208 (TRBV20-1, TRBJ2-1)
CSARGGTRYYNEQFF

SEQ ID NO: 580417 - protein, 15 aa, Homo sapiens
  CDR3 for alpha chain variable domain of TCR clone 290209 (TRAV27, TRAJ38)
CAARRNAGNNRKMIG

SEQ ID NO: 580418 - protein, 13 aa, Homo sapiens
  CDR3 for beta chain variable domain of TCR clone 290209 (TRBV12-5, TRBJ2-3)
CASGDRQSDTQYF

SEQ ID NO: 580419 - protein, 16 aa, Homo sapiens
  CDR3 for alpha chain variable domain of TCR clone 290210 (TRAV4, TRAJ9)
CLVGDPNRPGGFKTIF

SEQ ID NO: 580420 - protein, 16 aa, Homo sapiens
  CDR3 for beta chain variable domain of TCR clone 290210 (TRBV2, TRBJ2-1)
CASSVGGSLSYNEQFF

SEQ ID NO: 580421 - protein, 13 aa, Homo sapiens
  CDR3 for alpha chain variable domain of TCR clone 290211 (TRAV13-1, TRAJ40)
CAAISPGTYKYIF

SEQ ID NO: 580422 - protein, 12 aa, Homo sapiens
  CDR3 for beta chain variable domain of TCR clone 290211 (TRBV7-8, TRBJ2-7)
CASSLGDREQYF

SEQ ID NO: 580423 - protein, 14 aa, Homo sapiens
  CDR3 for alpha chain variable domain of TCR clone 290212 (TRAV12-1, TRAJ37)
CVVTGSSNTGKLIF

SEQ ID NO: 580424 - protein, 18 aa, Homo sapiens
  CDR3 for beta chain variable domain of TCR clone 290212 (TRBV23-1, TRBJ2-5)
SAPAVPERVLLIQETQYF

SEQ ID NO: 580425 - protein, 15 aa, Homo sapiens
  CDR3 for alpha chain variable domain of TCR clone 290213 (TRAV14/DV4, TRAJ22)
CAMSRLSGSARQLTF

SEQ ID NO: 580426 - protein, 14 aa, Homo sapiens
  CDR3 for beta chain variable domain of TCR clone 290213 (TRBV12-5, TRBJ2-5)
CASGSRTHQETQYF

SEQ ID NO: 580427 - protein, 11 aa, Homo sapiens
  CDR3 for alpha chain variable domain of TCR clone 290214 (TRAV1-2, TRAJ31)
CAVNNNARLMF

SEQ ID NO: 580428 - protein, 13 aa, Homo sapiens
  CDR3 for beta chain variable domain of TCR clone 290214 (TRBV6-1, TRBJ1-1)
CASSRQGNTEAFF

SEQ ID NO: 580429 - protein, 15 aa, Homo sapiens
  CDR3 for alpha chain variable domain of TCR clone 290215 (TRAV17, TRAJ57)
CATGPSQGGSEKLVF

SEQ ID NO: 580430 - protein, 11 aa, Homo sapiens
  CDR3 for beta chain variable domain of TCR clone 290215 (TRBV29-1, TRBJ2-5)
CSEARTGTQYV

SEQ ID NO: 580431 - protein, 13 aa, Homo sapiens
  CDR3 for alpha chain variable domain of TCR clone 290216 (TRAV13-1, TRAJ12)
CAASPDSSYKLIF

SEQ ID NO: 580432 - protein, 13 aa, Homo sapiens
  CDR3 for beta chain variable domain of TCR clone 290216 (TRBV7-2, TRBJ2-2)
CASSLAVTGELFF

SEQ ID NO: 580433 - protein, 16 aa, Homo sapiens
  CDR3 for alpha chain variable domain of TCR clone 290217 (TRAV12-1, TRAJ21)
CVVLSGYFGSGTKLNV

SEQ ID NO: 580434 - protein, 17 aa, Homo sapiens
  CDR3 for beta chain variable domain of TCR clone 290217 (TRBV11-2, TRBJ2-1)
CASSLYPPGVEYNEQFF

SEQ ID NO: 580435 - protein, 18 aa, Homo sapiens
  CDR3 for alpha chain variable domain of TCR clone 290218 (TRAV3, TRAJ37)
CCERHSRGYPSNTGKLIF

SEQ ID NO: 580436 - protein, 14 aa, Homo sapiens
  CDR3 for beta chain variable domain of TCR clone 290218 (TRBV7-8, TRBJ2-3)
CASSLEAGTDTQYF

SEQ ID NO: 580437 - protein, 21 aa, Homo sapiens
  CDR3 for alpha chain variable domain of TCR clone 290219 (TRAV12-1, TRAJ32)
SSVIQPPTSMNYGGATNKLIF

SEQ ID NO: 580438 - protein, 17 aa, Homo sapiens
  CDR3 for beta chain variable domain of TCR clone 290219 (TRBV11-2, TRBJ2-1)
CASSLYPPGVEYNEQFF

SEQ ID NO: 580439 - protein, 17 aa, Homo sapiens
  CDR3 for alpha chain variable domain of TCR clone 290220 (TRAV3, TRAJ6)
CAVRDGPRAGGSYLPTF

SEQ ID NO: 580440 - protein, 14 aa, Homo sapiens
  CDR3 for beta chain variable domain of TCR clone 290220 (TRBV7-2, TRBJ2-7)
CASSPKTSFYERYF

SEQ ID NO: 580441 - protein, 14 aa, Homo sapiens
  CDR3 for alpha chain variable domain of TCR clone 290221 (TRAV2, TRAJ9)
CAVEDRSGGFKTIF

SEQ ID NO: 580442 - protein, 15 aa, Homo sapiens
  CDR3 for beta chain variable domain of TCR clone 290221 (TRBV9, TRBJ2-1)
CASSLAGSSYNEQFF

SEQ ID NO: 580443 - protein, 12 aa, Homo sapiens
  CDR3 for alpha chain variable domain of TCR clone 290222 (TRAV2, TRAJ31)
FAVEDNNARLMF

SEQ ID NO: 580444 - protein, 16 aa, Homo sapiens
  CDR3 for beta chain variable domain of TCR clone 290222 (TRBV10-3, TRBJ2-1)
CAISGVGDGGGGEQFF

SEQ ID NO: 580445 - protein, 13 aa, Homo sapiens
  CDR3 for alpha chain variable domain of TCR clone 290223 (TRAV1-2, TRAJ12)
CAVSMDSSYKLIF

SEQ ID NO: 580446 - protein, 16 aa, Homo sapiens
  CDR3 for beta chain variable domain of TCR clone 290223 (TRBV19, TRBJ1-6)
CASSVAPVAGNSPLHF

SEQ ID NO: 580447 - protein, 15 aa, Homo sapiens
  CDR3 for alpha chain variable domain of TCR clone 290224 (TRAV27, TRAJ38)
CAGRFDAGNNRKLIW

SEQ ID NO: 580448 - protein, 13 aa, Homo sapiens
  CDR3 for beta chain variable domain of TCR clone 290224 (TRBV20-1, TRBJ2-1)
TSGALPQGNEQFF

SEQ ID NO: 580449 - protein, 16 aa, Homo sapiens
  CDR3 for alpha chain variable domain of TCR clone 290225 (TRAV8-3, TRAJ13)
CAVGAYPSGGYQKVNF

SEQ ID NO: 580450 - protein, 15 aa, Homo sapiens
  CDR3 for beta chain variable domain of TCR clone 290225 (TRBV19, TRBJ1-5)
CASSIVWADNQPKHF

SEQ ID NO: 580451 - protein, 14 aa, Homo sapiens
  CDR3 for alpha chain variable domain of TCR clone 290226 (TRAV1-2, TRAJ8)
CAVREATGFQKLVF

SEQ ID NO: 580452 - protein, 15 aa, Homo sapiens
  CDR3 for beta chain variable domain of TCR clone 290226 (TRBV5-5, TRBJ1-5)
CASSSTPGSNQPQHF

SEQ ID NO: 580453 - protein, 14 aa, Homo sapiens
  CDR3 for alpha chain variable domain of TCR clone 290227 (TRAV12-2, TRAJ17)
CAVNIKAAGNKLTF

SEQ ID NO: 580454 - protein, 13 aa, Homo sapiens
  CDR3 for beta chain variable domain of TCR clone 290227 (TRBV4-1, TRBJ2-1)
CASSQEVQYEQFF

SEQ ID NO: 580455 - protein, 11 aa, Homo sapiens
  CDR3 for alpha chain variable domain of TCR clone 290228 (TRAV23/DV6, TRAJ44)
CAAPTPGKLTF

SEQ ID NO: 580456 - protein, 15 aa, Homo sapiens
  CDR3 for beta chain variable domain of TCR clone 290228 (TRBV7-2, TRBJ2-2)
CASSLVSQFTRELFF

SEQ ID NO: 580457 - protein, 16 aa, Homo sapiens
  CDR3 for alpha chain variable domain of TCR clone 290229 (TRAV38-2/DV8, TRAJ47)
CAYRRAIMEYGNKLVF

SEQ ID NO: 580458 - protein, 14 aa, Homo sapiens
  CDR3 for beta chain variable domain of TCR clone 290229 (TRBV19, TRBJ2-7)
CASSIFAGTYEQYF

SEQ ID NO: 580459 - protein, 16 aa, Homo sapiens
  CDR3 for alpha chain variable domain of TCR clone 290230 (TRAV4, TRAJ22)
CLVGDLYSGSARQLTP

SEQ ID NO: 580460 - protein, 16 aa, Homo sapiens
  CDR3 for beta chain variable domain of TCR clone 290230 (TRBV7-9, TRBJ2-1)
CASSDVAGGSYNEQFF

SEQ ID NO: 580461 - protein, 21 aa, Homo sapiens
  CDR3 for alpha chain variable domain of TCR clone 290231 (TRAV8-3, TRAJ6)
CAVGGQEATYLHLEEEPALLF

SEQ ID NO: 580462 - protein, 17 aa, Homo sapiens
  CDR3 for beta chain variable domain of TCR clone 290231 (TRBV20-1, TRBJ2-1)
CSASSSGLAGSYNEQFF

SEQ ID NO: 580463 - protein, 14 aa, Homo sapiens
  CDR3 for alpha chain variable domain of TCR clone 290232 (TRAV23/DV6, TRAJ6)
CAASRSGGSYIPTF

SEQ ID NO: 580464 - protein, 16 aa, Homo sapiens
  CDR3 for beta chain variable domain of TCR clone 290232 (TRBV20-1, TRBJ2-1)
SASASGLAGSYNEQFF

SEQ ID NO: 580465 - protein, 16 aa, Homo sapiens
  CDR3 for alpha chain variable domain of TCR clone 290233 (TRAV16, TRAJ4)
FALSRMFSGGYNKLIF

SEQ ID NO: 580466 - protein, 13 aa, Homo sapiens
  CDR3 for beta chain variable domain of TCR clone 290233 (TRBV7-9, TRBJ1-2)
CASSLKQNYGYTF

SEQ ID NO: 580467 - protein, 16 aa, Homo sapiens
  CDR3 for alpha chain variable domain of TCR clone 290234 (TRAV21, TRAJ37)
CAVRTAGSCDTGKLIF

SEQ ID NO: 580468 - protein, 13 aa, Homo sapiens
  CDR3 for beta chain variable domain of TCR clone 290234 (TRBV7-9, TRBJ2-5)
CASLPSGRETQYF

SEQ ID NO: 580469 - protein, 12 aa, Homo sapiens
  CDR3 for alpha chain variable domain of TCR clone 290235 (TRAV27, TRAJ9)
CAGESGGFKTIF

SEQ ID NO: 580470 - protein, 14 aa, Homo sapiens
  CDR3 for beta chain variable domain of TCR clone 290235 (TRBV6-1, TRBJ2-1)
CASAKDGFYNEPFF

SEQ ID NO: 580471 - protein, 12 aa, Homo sapiens
  CDR3 for alpha chain variable domain of TCR clone 290236 (TRAV17, TRAJ49)
CATVTTGNPFYF

SEQ ID NO: 580472 - protein, 18 aa, Homo sapiens
  CDR3 for beta chain variable domain of TCR clone 290236 (TRBV11-2, TRBJ2-6)
CASSLNPFLGTGANVLTF

SEQ ID NO: 580473 - protein, 12 aa, Homo sapiens
  CDR3 for alpha chain variable domain of TCR clone 290237 (TRAV13-1, TRAJ11)
CAGPSGYSTLTF

SEQ ID NO: 580474 - protein, 15 aa, Homo sapiens
  CDR3 for beta chain variable domain of TCR clone 290237 (TRBV7-3, TRBJ2-1)
CASSPTVQIGNEQFF

SEQ ID NO: 580475 - protein, 12 aa, Homo sapiens
  CDR3 for alpha chain variable domain of TCR clone 290238 (TRAV12-3, TRAJ17)
CAMTLTGTKLTF

SEQ ID NO: 580476 - protein, 15 aa, Homo sapiens
  CDR3 for beta chain variable domain of TCR clone 290238 (TRBV20-1, TRBJ2-7)
CSASDRVCGTDEQYF

SEQ ID NO: 580477 - protein, 15 aa, Homo sapiens
  CDR3 for alpha chain variable domain of TCR clone 290239 (TRAV38-2/DV8, TRAJ57)
CASARAPGGSEKLVF

SEQ ID NO: 580478 - protein, 17 aa, Homo sapiens
  CDR3 for beta chain variable domain of TCR clone 290239 (TRBV18, TRBJ1-5)
CASSPTMGQGTNQPQHF

SEQ ID NO: 580479 - protein, 14 aa, Homo sapiens
  CDR3 for alpha chain variable domain of TCR clone 290240 (TRAV1-2, TRAJ8)
CAVIEDTGFQKLVF

SEQ ID NO: 580480 - protein, 15 aa, Homo sapiens
  CDR3 for beta chain variable domain of TCR clone 290240 (TRBV10-1, TRBJ2-1)
CASSTGTELYNEQFF

SEQ ID NO: 580481 - protein, 13 aa, Homo sapiens
  CDR3 for alpha chain variable domain of TCR clone 290241 (TRAV26-2, TRAJ43)
CILRAVNNNDMRF

SEQ ID NO: 580482 - protein, 14 aa, Homo sapiens
  CDR3 for beta chain variable domain of TCR clone 290241 (TRBV4-2, TRBJ2-5)
CASSQDRGRETQYF

SEQ ID NO: 580483 - protein, 15 aa, Homo sapiens
  CDR3 for alpha chain variable domain of TCR clone 290242 (TRAV12-2, TRAJ53)
CAVNGGGGSNYKLAF

SEQ ID NO: 580484 - protein, 13 aa, Homo sapiens
  CDR3 for beta chain variable domain of TCR clone 290242 (TRBV3-1, TRBJ1-1)
CASSPGVITEAFF

SEQ ID NO: 580485 - protein, 14 aa, Homo sapiens
  CDR3 for alpha chain variable domain of TCR clone 290243 (TRAV1-2, TRAJ17)
CAVRDMTAGNKLTF

SEQ ID NO: 580486 - protein, 15 aa, Homo sapiens
  CDR3 for beta chain variable domain of TCR clone 290243 (TRBV20-1, TRBJ2-7)
CSARDRVAGMDEQYF

SEQ ID NO: 580487 - protein, 15 aa, Homo sapiens
  CDR3 for alpha chain variable domain of TCR clone 290244 (TRAV3, TRAJ13)
FAVRDIAGGYQKVTF

SEQ ID NO: 580488 - protein, 13 aa, Homo sapiens
  CDR3 for beta chain variable domain of TCR clone 290244 (TRBV12-4, TRBJ1-3)
CASSLASGNTIYF

SEQ ID NO: 580489 - protein, 13 aa, Homo sapiens
  CDR3 for alpha chain variable domain of TCR clone 290245 (TRAV3, TRAJ41)
CAVSSNSGYALNF

SEQ ID NO: 580490 - protein, 14 aa, Homo sapiens
  CDR3 for beta chain variable domain of TCR clone 290245 (TRBV6-1, TRBJ2-7)
CATLLGSSPHEQYF

SEQ ID NO: 580491 - protein, 15 aa, Homo sapiens
  CDR3 for alpha chain variable domain of TCR clone 290246 (TRAV27, TRAJ38)
CAARRTAGNNRKLIW

SEQ ID NO: 580492 - protein, 15 aa, Homo sapiens
  CDR3 for beta chain variable domain of TCR clone 290246 (TRBV4-1, TRBJ2-1)
CASSQAQREIYEQFF

SEQ ID NO: 580493 - protein, 17 aa, Homo sapiens
  CDR3 for alpha chain variable domain of TCR clone 290247 (TRAV3, TRAJ6)
CAVRDGPRAGGRYIPTF

SEQ ID NO: 580494 - protein, 14 aa, Homo sapiens
  CDR3 for beta chain variable domain of TCR clone 290247 (TRBV5-5, TRBJ2-7)
CASSLGLAVYEQYF

SEQ ID NO: 580495 - protein, 13 aa, Homo sapiens
  CDR3 for alpha chain variable domain of TCR clone 290248 (TRAV17, TRAJ45)
CATPGGGADGLTF

SEQ ID NO: 580496 - protein, 16 aa, Homo sapiens
  CDR3 for beta chain variable domain of TCR clone 290248 (TRBV28, TRBJ2-2)
CASSLSPGWNTGELFF

SEQ ID NO: 580497 - protein, 17 aa, Homo sapiens
  CDR3 for alpha chain variable domain of TCR clone 290249 (TRAV12-1, TRAJ53)
CVAGAIVGGGSNYKLTF

SEQ ID NO: 580498 - protein, 16 aa, Homo sapiens
  CDR3 for beta chain variable domain of TCR clone 290249 (TRBV7-9, TRBJ1-2)
CASSLGFSSGEDGYTF

SEQ ID NO: 580499 - protein, 12 aa, Homo sapiens
  CDR3 for alpha chain variable domain of TCR clone 290250 (TRAV21, TRAJ49)
CAVRNTGNQFYF

SEQ ID NO: 580500 - protein, 20 aa, Homo sapiens
  CDR3 for beta chain variable domain of TCR clone 290250 (TRBV7-8, TRBJ2-2)
CASSHLFPGPTIHITGELFF

SEQ ID NO: 580501 - protein, 13 aa, Homo sapiens
  CDR3 for alpha chain variable domain of TCR clone 290251 (TRAV12-2, TRAJ10)
CAVPTGGGKKLTF

SEQ ID NO: 580502 - protein, 11 aa, Homo sapiens
  CDR3 for beta chain variable domain of TCR clone 290251 (TRBV12-4, TRBJ2-2)
CASSSAGELFF

SEQ ID NO: 580503 - protein, 16 aa, Homo sapiens
  CDR3 for alpha chain variable domain of TCR clone 290252 (TRAV8-1, TRAJ39)
RAVNVQWYNAGNMLTF

SEQ ID NO: 580504 - protein, 15 aa, Homo sapiens
  CDR3 for beta chain variable domain of TCR clone 290252 (TRBV4-1, TRBJ2-3)
CASRSTRAGTDTQYF

SEQ ID NO: 580505 - protein, 18 aa, Homo sapiens
  CDR3 for alpha chain variable domain of TCR clone 290253 (TRAV9-2, TRAJ52)
CALSRHNPSGTSYGKLTF

SEQ ID NO: 580506 - protein, 13 aa, Homo sapiens
  CDR3 for beta chain variable domain of TCR clone 290253 (TRBV7-9, TRBJ1-2)
CASSLKQNYGYTF

SEQ ID NO: 580507 - protein, 13 aa, Homo sapiens
  CDR3 for alpha chain variable domain of TCR clone 290254 (TRAV21, TRAJ32)
CAVSGGATNKLIF

SEQ ID NO: 580508 - protein, 15 aa, Homo sapiens
  CDR3 for beta chain variable domain of TCR clone 290254 (TRBV23-1, TRBJ2-1)
CASSQWPQITMSSSS

SEQ ID NO: 580509 - protein, 15 aa, Homo sapiens
  CDR3 for alpha chain variable domain of TCR clone 290255 (TRAV26-1, TRAJ48)
CIVRVGDFGTEKLTY

SEQ ID NO: 580510 - protein, 16 aa, Homo sapiens
  CDR3 for beta chain variable domain of TCR clone 290255 (TRBV4-1, TRBJ2-3)
CASSQRAGGLTDTQYF

SEQ ID NO: 580511 - protein, 17 aa, Homo sapiens
  CDR3 for alpha chain variable domain of TCR clone 290256 (TRAV23/DV6, TRAJ3)
CSNHFFFGWSSASKIIF

SEQ ID NO: 580512 - protein, 15 aa, Homo sapiens
  CDR3 for beta chain variable domain of TCR clone 290256 (TRBV19, TRBJ1-6)
CASSTQGAVGSPLHF

SEQ ID NO: 580513 - protein, 16 aa, Homo sapiens
  CDR3 for alpha chain variable domain of TCR clone 290257 (TRAV30, TRAJ24)
CGTEIVDADSWGKFQF

SEQ ID NO: 580514 - protein, 18 aa, Homo sapiens
  CDR3 for beta chain variable domain of TCR clone 290257 (TRBV20-1, TRBJ2-6)
CSAETTPTHGAGANVLTF

SEQ ID NO: 580515 - protein, 12 aa, Homo sapiens
  CDR3 for alpha chain variable domain of TCR clone 290258 (TRAV3, TRAJ27)
CAVRDGAGKSTV

SEQ ID NO: 580516 - protein, 15 aa, Homo sapiens
  CDR3 for beta chain variable domain of TCR clone 290258 (TRBV13, TRBJ2-2)
CASGYRGRRTGELFF

SEQ ID NO: 580517 - protein, 14 aa, Homo sapiens
  CDR3 for alpha chain variable domain of TCR clone 290259 (TRAV23/DV6, TRAJ5)
CAAKRPAGRRALTF

SEQ ID NO: 580518 - protein, 14 aa, Homo sapiens
  CDR3 for beta chain variable domain of TCR clone 290259 (TRBV13, TRBJ2-7)
CASSLKGASYEQYF

SEQ ID NO: 580519 - protein, 14 aa, Homo sapiens
  CDR3 for alpha chain variable domain of TCR clone 290260 (TRAV1-1, TRAJ28)
CAAPSGAGSYPLTF

SEQ ID NO: 580520 - protein, 16 aa, Homo sapiens
  CDR3 for beta chain variable domain of TCR clone 290260 (TRBV7-9, TRBJ2-3)
CASSPWREVGTDTQYF

SEQ ID NO: 580521 - protein, 15 aa, Homo sapiens
  CDR3 for alpha chain variable domain of TCR clone 290261 (TRAV3, TRAJ22)
CAVRDRGGSARHMTF

SEQ ID NO: 580522 - protein, 16 aa, Homo sapiens
  CDR3 for beta chain variable domain of TCR clone 290261 (TRBV5-4, TRBJ2-3)
CASQQPGAGGADTQYF

SEQ ID NO: 580523 - protein, 12 aa, Homo sapiens
  CDR3 for alpha chain variable domain of TCR clone 290262 (TRAV29/DV5, TRAJ27)
CAASTNAGKSTF

SEQ ID NO: 580524 - protein, 13 aa, Homo sapiens
  CDR3 for beta chain variable domain of TCR clone 290262 (TRBV6-5, TRBJ2-7)
CASSYSGQYEQYF

SEQ ID NO: 580525 - protein, 13 aa, Homo sapiens
  CDR3 for alpha chain variable domain of TCR clone 290263 (TRAV12-2, TRAJ23)
CAVMGNQGGKLIF

SEQ ID NO: 580526 - protein, 13 aa, Homo sapiens
  CDR3 for beta chain variable domain of TCR clone 290263 (TRBV20-1, TRBJ2-1)
CSASTGTSNEQFF

SEQ ID NO: 580527 - protein, 11 aa, Homo sapiens
  CDR3 for alpha chain variable domain of TCR clone 290264 (TRAV21, TRAJ39)
LLVNAGNMLTF

SEQ ID NO: 580528 - protein, 14 aa, Homo sapiens
  CDR3 for beta chain variable domain of TCR clone 290264 (TRBV7-3, TRBJ1-1)
CASSLKGGNTEACF

SEQ ID NO: 580529 - protein, 15 aa, Homo sapiens
  CDR3 for alpha chain variable domain of TCR clone 290265 (TRAV26-2, TRAJ13)
CILRDLSGGYQKVTF

SEQ ID NO: 580530 - protein, 13 aa, Homo sapiens
  CDR3 for beta chain variable domain of TCR clone 290265 (TRBV24-1, TRBJ2-2)
CATSDWSTGELFF

SEQ ID NO: 580531 - protein, 14 aa, Homo sapiens
  CDR3 for alpha chain variable domain of TCR clone 290266 (TRAV1-1, TRAJ27)
CAVIYNTNAGKSTF

SEQ ID NO: 580532 - protein, 18 aa, Homo sapiens
  CDR3 for beta chain variable domain of TCR clone 290266 (TRBV7-3, TRBJ2-1)
CASSLTLASGRAMVSSSP

SEQ ID NO: 580533 - protein, 16 aa, Homo sapiens
  CDR3 for alpha chain variable domain of TCR clone 290267 (TRAV13-1, TRAJ37)
CAASSLGSSNTGKLIF

SEQ ID NO: 580534 - protein, 15 aa, Homo sapiens
  CDR3 for beta chain variable domain of TCR clone 290267 (TRBV10-3, TRBJ2-3)
CAISLTSGGTDTQYF

SEQ ID NO: 580535 - protein, 13 aa, Homo sapiens
  CDR3 for alpha chain variable domain of TCR clone 290268 (TRAV21, TRAJ27)
CAARPGNAGKSTF

SEQ ID NO: 580536 - protein, 14 aa, Homo sapiens
  CDR3 for beta chain variable domain of TCR clone 290268 (TRBV5-4, TRBJ1-1)
CASRLDSRRDEAFF

SEQ ID NO: 580537 - protein, 15 aa, Homo sapiens
  CDR3 for alpha chain variable domain of TCR clone 290269 (TRAV12-3, TRAJ47)
CAMSALVEYGNKLVF

SEQ ID NO: 580538 - protein, 16 aa, Homo sapiens
  CDR3 for beta chain variable domain of TCR clone 290269 (TRBV12-4, TRBJ2-5)
CASSFFVRGRQETQYF

SEQ ID NO: 580539 - protein, 12 aa, Homo sapiens
  CDR3 for alpha chain variable domain of TCR clone 290270 (TRAV25, TRAJ17)
CAGEAAGNKLTF

SEQ ID NO: 580540 - protein, 13 aa, Homo sapiens
  CDR3 for beta chain variable domain of TCR clone 290270 (TRBV5-5, TRBJ2-7)
CASSSQTRQRQYF

SEQ ID NO: 580541 - protein, 13 aa, Homo sapiens
  CDR3 for alpha chain variable domain of TCR clone 290271 (TRAV29/DV5, TRAJ29)
CAASAAGNPPLFF

SEQ ID NO: 580542 - protein, 14 aa, Homo sapiens
  CDR3 for beta chain variable domain of TCR clone 290271 (TRBV19, TRBJ2-3)
CASSAPRGTDTQYF

SEQ ID NO: 580543 - protein, 11 aa, Homo sapiens
  CDR3 for alpha chain variable domain of TCR clone 290272 (TRAV12-2, TRAJ30)
CAVGRDDKIIF

SEQ ID NO: 580544 - protein, 15 aa, Homo sapiens
  CDR3 for beta chain variable domain of TCR clone 290272 (TRBV4-3, TRBJ2-7)
CASSQGDWGDYEQYF

SEQ ID NO: 580545 - protein, 13 aa, Homo sapiens
  CDR3 for alpha chain variable domain of TCR clone 290273 (TRAV23/DV6, TRAJ22)
CAPYSGSARQLTF

SEQ ID NO: 580546 - protein, 15 aa, Homo sapiens
  CDR3 for beta chain variable domain of TCR clone 290273 (TRBV11-2, TRBJ1-6)
CASSLDPCAVSPLHF

SEQ ID NO: 580547 - protein, 18 aa, Homo sapiens
  CDR3 for alpha chain variable domain of TCR clone 290274 (TRAV13-1, TRAJ53)
CTSVQQAASGGSNYKLTF

SEQ ID NO: 580548 - protein, 15 aa, Homo sapiens
  CDR3 for beta chain variable domain of TCR clone 290274 (TRBV5-1, TRBJ2-1)
CASSPPRAPYNEQFF

SEQ ID NO: 580549 - protein, 13 aa, Homo sapiens
  CDR3 for alpha chain variable domain of TCR clone 290275 (TRAV8-4, TRAJ39)
STPPSDAGNMLTF

SEQ ID NO: 580550 - protein, 13 aa, Homo sapiens
  CDR3 for beta chain variable domain of TCR clone 290275 (TRBV12-4, TRBJ2-7)
CASSPTETYKQYF

SEQ ID NO: 580551 - protein, 12 aa, Homo sapiens
  CDR3 for alpha chain variable domain of TCR clone 290276 (TRAV23/DV6, TRAJ49)
CAAEAPGNQFYF

SEQ ID NO: 580552 - protein, 14 aa, Homo sapiens
  CDR3 for beta chain variable domain of TCR clone 290276 (TRBV7-9, TRBJ2-1)
CASSPRDSLYEQFF

SEQ ID NO: 580553 - protein, 15 aa, Homo sapiens
  CDR3 for alpha chain variable domain of TCR clone 290277 (TRAV17, TRAJ16)
CATALRFSDGQKLLF

SEQ ID NO: 580554 - protein, 17 aa, Homo sapiens
  CDR3 for beta chain variable domain of TCR clone 290277 (TRBV18, TRBJ2-1)
CASSKGLSGGADNEQFF

SEQ ID NO: 580555 - protein, 12 aa, Homo sapiens
  CDR3 for alpha chain variable domain of TCR clone 290278 (TRAV14/DV4, TRAJ9)
CAMNPGGFKTIF

SEQ ID NO: 580556 - protein, 16 aa, Homo sapiens
  CDR3 for beta chain variable domain of TCR clone 290278 (TRBV28, TRBJ2-5)
CASSFSPAGGWETQHF

SEQ ID NO: 580557 - protein, 14 aa, Homo sapiens
  CDR3 for alpha chain variable domain of TCR clone 290279 (TRAV1-2, TRAJ16)
CAVNRISDGQKLLF

SEQ ID NO: 580558 - protein, 13 aa, Homo sapiens
  CDR3 for beta chain variable domain of TCR clone 290279 (TRBV20-1, TRBJ2-2)
CSALSGGAGELFF

SEQ ID NO: 580559 - protein, 12 aa, Homo sapiens
  CDR3 for alpha chain variable domain of TCR clone 290280 (TRAV13-1, TRAJ21)
CAAKEGLNKFYF

SEQ ID NO: 580560 - protein, 15 aa, Homo sapiens
  CDR3 for beta chain variable domain of TCR clone 290280 (TRBV15, TRBJ1-5)
CATSRDPVSNQHQHF

SEQ ID NO: 580561 - protein, 10 aa, Homo sapiens
  CDR3 for alpha chain variable domain of TCR clone 290281 (TRAV16, TRAJ22)
SAMYLRQLTF

SEQ ID NO: 580562 - protein, 15 aa, Homo sapiens
  CDR3 for beta chain variable domain of TCR clone 290281 (TRBV7-9, TRBJ1-6)
CATSSPGRGNSPLHF

SEQ ID NO: 580563 - protein, 16 aa, Homo sapiens
  CDR3 for alpha chain variable domain of TCR clone 290282 (TRAV3, TRAJ6)
CAVRDGVGRRTLHTYI

SEQ ID NO: 580564 - protein, 15 aa, Homo sapiens
  CDR3 for beta chain variable domain of TCR clone 290282 (TRBV5-1, TRBJ2-7)
CASSLGDFTTYEQYF

SEQ ID NO: 580565 - protein, 13 aa, Homo sapiens
  CDR3 for alpha chain variable domain of TCR clone 290283 (TRAV1-2, TRAJ9)
CAVLNTGGFKTIF

SEQ ID NO: 580566 - protein, 14 aa, Homo sapiens
  CDR3 for beta chain variable domain of TCR clone 290283 (TRBV5-1, TRBJ2-2)
CASSLGGGSGELFC

SEQ ID NO: 580567 - protein, 12 aa, Homo sapiens
  CDR3 for alpha chain variable domain of TCR clone 290284 (TRAV16, TRAJ10)
CSRTGGGNKLTF

SEQ ID NO: 580568 - protein, 18 aa, Homo sapiens
  CDR3 for beta chain variable domain of TCR clone 290284 (TRBV12-4, TRBJ2-2)
CASSLVAGTRGRTGELFF

SEQ ID NO: 580569 - protein, 19 aa, Homo sapiens
  CDR3 for alpha chain variable domain of TCR clone 290285 (TRAV27, TRAJ53)
ASTSVQSRNSGGSNYKLTF

SEQ ID NO: 580570 - protein, 13 aa, Homo sapiens
  CDR3 for beta chain variable domain of TCR clone 290285 (TRBV11-3, TRBJ2-7)
CASSLDKLYEQYF

SEQ ID NO: 580571 - protein, 11 aa, Homo sapiens
  CDR3 for alpha chain variable domain of TCR clone 290286 (TRAV3, TRAJ21)
RAVGTFNKFYF

SEQ ID NO: 580572 - protein, 16 aa, Homo sapiens
  CDR3 for beta chain variable domain of TCR clone 290286 (TRBV19, TRBJ2-1)
CASSKAGPSSYNEQFF

SEQ ID NO: 580573 - protein, 16 aa, Homo sapiens
  CDR3 for alpha chain variable domain of TCR clone 290287 (TRAV12-2, TRAJ28)
CAVVTDSGAGSYQLTF

SEQ ID NO: 580574 - protein, 14 aa, Homo sapiens
  CDR3 for beta chain variable domain of TCR clone 290287 (TRBV25-1, TRBJ1-1)
CASTHLGGNTEAFF

SEQ ID NO: 580575 - protein, 13 aa, Homo sapiens
  CDR3 for alpha chain variable domain of TCR clone 290288 (TRAV3, TRAJ21)
CAVREPDFNKFYF

SEQ ID NO: 580576 - protein, 16 aa, Homo sapiens
  CDR3 for beta chain variable domain of TCR clone 290288 (TRBV9, TRBJ2-1)
CASSVGGGGNYNEQFF

SEQ ID NO: 580577 - protein, 15 aa, Homo sapiens
  CDR3 for alpha chain variable domain of TCR clone 290289 (TRAV12-3, TRAJ47)
CAMSALVEYGNKLVF

SEQ ID NO: 580578 - protein, 11 aa, Homo sapiens
  CDR3 for beta chain variable domain of TCR clone 290289 (TRBV12-4, TRBJ2-3)
CASTATDTQYF

SEQ ID NO: 580579 - protein, 15 aa, Homo sapiens
  CDR3 for alpha chain variable domain of TCR clone 290290 (TRAV3, TRAJ10)
CAVRDGTGGGNKLTF

SEQ ID NO: 580580 - protein, 16 aa, Homo sapiens
  CDR3 for beta chain variable domain of TCR clone 290290 (TRBV7-3, TRBJ2-1)
CASSSIRRAPTMSSSS

SEQ ID NO: 580581 - protein, 13 aa, Homo sapiens
  CDR3 for alpha chain variable domain of TCR clone 290291 (TRAV5, TRAJ30)
CAEIANRDDKIVF

SEQ ID NO: 580582 - protein, 14 aa, Homo sapiens
  CDR3 for beta chain variable domain of TCR clone 290291 (TRBV4-1, TRBJ2-2)
CASSQAVNTGELFF

SEQ ID NO: 580583 - protein, 12 aa, Homo sapiens
  CDR3 for alpha chain variable domain of TCR clone 290292 (TRAV16, TRAJ13)
CITLRGYQKVTF

SEQ ID NO: 580584 - protein, 13 aa, Homo sapiens
  CDR3 for beta chain variable domain of TCR clone 290292 (TRBV19, TRBJ1-2)
CASSQGQVYGYTF

SEQ ID NO: 580585 - protein, 13 aa, Homo sapiens
  CDR3 for alpha chain variable domain of TCR clone 290293 (TRAV3, TRAJ15)
CAVGDQAGTALIF

SEQ ID NO: 580586 - protein, 15 aa, Homo sapiens
  CDR3 for beta chain variable domain of TCR clone 290293 (TRBV11-1, TRBJ2-7)
CASSLNYGASYEQYL

SEQ ID NO: 580587 - protein, 19 aa, Homo sapiens
  CDR3 for alpha chain variable domain of TCR clone 290294 (TRAV8-3, TRAJ6)
CAVAGMMHQEEATYLHLEE

SEQ ID NO: 580588 - protein, 14 aa, Homo sapiens
  CDR3 for beta chain variable domain of TCR clone 290294 (TRBV12-4, TRBJ1-4)
CASSFLGSNEKLFF

SEQ ID NO: 580589 - protein, 15 aa, Homo sapiens
  CDR3 for alpha chain variable domain of TCR clone 290295 (TRAV2, TRAJ13)
CATPSYSGGYQKVTF

SEQ ID NO: 580590 - protein, 14 aa, Homo sapiens
  CDR3 for beta chain variable domain of TCR clone 290295 (TRBV27, TRBJ2-2)
CASSLGAAAGELFF

SEQ ID NO: 580591 - protein, 15 aa, Homo sapiens
  CDR3 for alpha chain variable domain of TCR clone 290296 (TRAV4, TRAJ39)
CLVGPNNNAGNMLTF

SEQ ID NO: 580592 - protein, 13 aa, Homo sapiens
  CDR3 for beta chain variable domain of TCR clone 290296 (TRBV11-2, TRBJ2-5)
CASSRGPSETQYF

SEQ ID NO: 580593 - protein, 14 aa, Homo sapiens
  CDR3 for alpha chain variable domain of TCR clone 290297 (TRAV38-2/DV8, TRAJ30)
FAYMDGLGGDKIIF

SEQ ID NO: 580594 - protein, 15 aa, Homo sapiens
  CDR3 for beta chain variable domain of TCR clone 290297 (TRBV7-9, TRBJ2-2)
CASRPADRDTGELFF

SEQ ID NO: 580595 - protein, 13 aa, Homo sapiens
  CDR3 for alpha chain variable domain of TCR clone 290298 (TRAV21, TRAJ33)
CAVAGDSNYQLIW

SEQ ID NO: 580596 - protein, 17 aa, Homo sapiens
  CDR3 for beta chain variable domain of TCR clone 290298 (TRBV11-2, TRBJ2-4)
CASSSVGPGGHRNIQYF

SEQ ID NO: 580597 - protein, 14 aa, Homo sapiens
  CDR3 for alpha chain variable domain of TCR clone 290299 (TRAV26-1, TRAJ39)
CIVRGSRAGNMLTF

SEQ ID NO: 580598 - protein, 16 aa, Homo sapiens
  CDR3 for beta chain variable domain of TCR clone 290299 (TRBV19, TRBJ2-2)
CASRSPGTGATGELFF

SEQ ID NO: 580599 - protein, 15 aa, Homo sapiens
  CDR3 for alpha chain variable domain of TCR clone 290300 (TRAV26-2, TRAJ26)
CILRDFDNYGQNFVS

SEQ ID NO: 580600 - protein, 14 aa, Homo sapiens
  CDR3 for beta chain variable domain of TCR clone 290300 (TRBV29-1, TRBJ2-5)
CSFWTPYAGETQYF

SEQ ID NO: 580601 - protein, 10 aa, Homo sapiens
  CDR3 for alpha chain variable domain of TCR clone 290301 (TRAV12-3, TRAJ18)
CAMSAEAQPW

SEQ ID NO: 580602 - protein, 13 aa, Homo sapiens
  CDR3 for beta chain variable domain of TCR clone 290301 (TRBV10-3, TRBJ2-7)
CDSKLAVNYEQYF

SEQ ID NO: 580603 - protein, 20 aa, Homo sapiens
  CDR3 for alpha chain variable domain of TCR clone 290302 (TRAV26-1, TRAJ42)
CCVLLHRQTYYEGSQGNLIF

SEQ ID NO: 580604 - protein, 16 aa, Homo sapiens
  CDR3 for beta chain variable domain of TCR clone 290302 (TRBV7-3, TRBJ2-2)
CASSLKRGTLSGELFF

SEQ ID NO: 580605 - protein, 14 aa, Homo sapiens
  CDR3 for alpha chain variable domain of TCR clone 290303 (TRAV8-4, TRAJ9)
CAVSDRTGGFKTIF

SEQ ID NO: 580606 - protein, 13 aa, Homo sapiens
  CDR3 for beta chain variable domain of TCR clone 290303 (TRBV11-3, TRBJ2-7)
CASSLGDSYEQYF

SEQ ID NO: 580607 - protein, 13 aa, Homo sapiens
  CDR3 for alpha chain variable domain of TCR clone 290304 (TRAV21, TRAJ20)
CAVSRLGDYKLSF

SEQ ID NO: 580608 - protein, 15 aa, Homo sapiens
  CDR3 for beta chain variable domain of TCR clone 290304 (TRBV7-3, TRBJ1-6)
CASSSPGRGNSPLHF

SEQ ID NO: 580609 - protein, 13 aa, Homo sapiens
  CDR3 for alpha chain variable domain of TCR clone 290305 (TRAV12-1, TRAJ22)
CVASGGSARQLTF

SEQ ID NO: 580610 - protein, 14 aa, Homo sapiens
  CDR3 for beta chain variable domain of TCR clone 290305 (TRBV7-3, TRBJ2-1)
CASSSAGGTNEQFF

SEQ ID NO: 580611 - protein, 13 aa, Homo sapiens
  CDR3 for alpha chain variable domain of TCR clone 290306 (TRAV38-2/DV8, TRAJ57)
CAYTQGGSEKLVF

SEQ ID NO: 580612 - protein, 18 aa, Homo sapiens
  CDR3 for beta chain variable domain of TCR clone 290306 (TRBV5-5, TRBJ1-5)
CASSLRQVKGSSNQHQHF

SEQ ID NO: 580613 - protein, 10 aa, Homo sapiens
  CDR3 for alpha chain variable domain of TCR clone 290307 (TRAV1-2, TRAJ23)
CAGQGGKLIF

SEQ ID NO: 580614 - protein, 15 aa, Homo sapiens
  CDR3 for beta chain variable domain of TCR clone 290307 (TRBV12-4, TRBJ2-5)
CASSPPTGLQETQYF

SEQ ID NO: 580615 - protein, 16 aa, Homo sapiens
  CDR3 for alpha chain variable domain of TCR clone 290308 (TRAV12-3, TRAJ53)
CTMSQGSGGSNYKLTF

SEQ ID NO: 580616 - protein, 11 aa, Homo sapiens
  CDR3 for beta chain variable domain of TCR clone 290308 (TRBV29-1, TRBJ2-5)
CSEDRTGTQYF

SEQ ID NO: 580617 - protein, 21 aa, Homo sapiens
  CDR3 for alpha chain variable domain of TCR clone 290309 (TRAV29/DV5, TRAJ52)
CSVLLCSKREAGGTSYGKLTF

SEQ ID NO: 580618 - protein, 15 aa, Homo sapiens
  CDR3 for beta chain variable domain of TCR clone 290309 (TRBV6-1, TRBJ2-1)
CASSELRGQYNEQFF

SEQ ID NO: 580619 - protein, 13 aa, Homo sapiens
  CDR3 for alpha chain variable domain of TCR clone 290310 (TRAV6, TRAJ20)
RALAVSNDYKLSF

SEQ ID NO: 580620 - protein, 16 aa, Homo sapiens
  CDR3 for beta chain variable domain of TCR clone 290310 (TRBV7-9, TRBJ2-1)
CASSDVAGGSYNEQFF

SEQ ID NO: 580621 - protein, 18 aa, Homo sapiens
  CDR3 for alpha chain variable domain of TCR clone 290311 (TRAV13-1, TRAJ52)
CAASKRSAGGTSYGKLKF

SEQ ID NO: 580622 - protein, 14 aa, Homo sapiens
  CDR3 for beta chain variable domain of TCR clone 290311 (TRBV2, TRBJ1-5)
CASSGTVSNQPQHF

SEQ ID NO: 580623 - protein, 14 aa, Homo sapiens
  CDR3 for alpha chain variable domain of TCR clone 290312 (TRAV26-1, TRAJ21)
CIVRVVYNFNKFYF

SEQ ID NO: 580624 - protein, 17 aa, Homo sapiens
  CDR3 for beta chain variable domain of TCR clone 290312 (TRBV11-2, TRBJ2-1)
CASSLSPPGVEYNEQFF

SEQ ID NO: 580625 - protein, 16 aa, Homo sapiens
  CDR3 for alpha chain variable domain of TCR clone 290313 (TRAV3, TRAJ4)
CAVRPSPSGGYNKLIF

SEQ ID NO: 580626 - protein, 12 aa, Homo sapiens
  CDR3 for beta chain variable domain of TCR clone 290313 (TRBV7-9, TRBJ2-7)
CASSQWVYEQYF

SEQ ID NO: 580627 - protein, 16 aa, Homo sapiens
  CDR3 for alpha chain variable domain of TCR clone 290314 (TRAV21, TRAJ37)
CAVRTAGSSNTGKLIF

SEQ ID NO: 580628 - protein, 13 aa, Homo sapiens
  CDR3 for beta chain variable domain of TCR clone 290314 (TRBV19, TRBJ1-2)
CASSVPGQDGYTF

SEQ ID NO: 580629 - protein, 14 aa, Homo sapiens
  CDR3 for alpha chain variable domain of TCR clone 290315 (TRAV8-6, TRAJ49)
CAVSVRYTGNQFYF

SEQ ID NO: 580630 - protein, 17 aa, Homo sapiens
  CDR3 for beta chain variable domain of TCR clone 290315 (TRBV7-8, TRBJ2-6)
CASSAGTGGAGANVLTF

SEQ ID NO: 580631 - protein, 11 aa, Homo sapiens
  CDR3 for alpha chain variable domain of TCR clone 290316 (TRAV2, TRAJ13)
CASGGYQTVTF

SEQ ID NO: 580632 - protein, 17 aa, Homo sapiens
  CDR3 for beta chain variable domain of TCR clone 290316 (TRBV7-3, TRBJ2-3)
CASSLMKRMRGADTQYF

SEQ ID NO: 580633 - protein, 11 aa, Homo sapiens
  CDR3 for alpha chain variable domain of TCR clone 290317 (TRAV35, TRAJ30)
CAPWGDDKIIF

SEQ ID NO: 580634 - protein, 14 aa, Homo sapiens
  CDR3 for beta chain variable domain of TCR clone 290317 (TRBV7-6, TRBJ2-1)
CASSLGGGADEQFF

SEQ ID NO: 580635 - protein, 11 aa, Homo sapiens
  CDR3 for alpha chain variable domain of TCR clone 290318 (TRAV25, TRAJ23)
CGSNQGGKLIF

SEQ ID NO: 580636 - protein, 15 aa, Homo sapiens
  CDR3 for beta chain variable domain of TCR clone 290318 (TRBV6-3, TRBJ2-7)
CASSSPGTGFYEQYF

SEQ ID NO: 580637 - protein, 13 aa, Homo sapiens
  CDR3 for alpha chain variable domain of TCR clone 290319 (TRAV3, TRAJ41)
GAVSSNSGYALNF

SEQ ID NO: 580638 - protein, 13 aa, Homo sapiens
  CDR3 for beta chain variable domain of TCR clone 290319 (TRBV20-1, TRBJ2-2)
CSALSGGAGELFF

SEQ ID NO: 580639 - protein, 16 aa, Homo sapiens
  CDR3 for alpha chain variable domain of TCR clone 290320 (TRAV8-3, TRAJ22)
CAVDLLGPGSARQLTF

SEQ ID NO: 580640 - protein, 14 aa, Homo sapiens
  CDR3 for beta chain variable domain of TCR clone 290320 (TRBV11-2, TRBJ2-7)
CASSLELEGYEHYF

SEQ ID NO: 580641 - protein, 11 aa, Homo sapiens
  CDR3 for alpha chain variable domain of TCR clone 290321 (TRAV23/DV6, TRAJ48)
CAPLWGVKLTF

SEQ ID NO: 580642 - protein, 14 aa, Homo sapiens
  CDR3 for beta chain variable domain of TCR clone 290321 (TRBV29-1, TRBJ1-3)
CSVADRVVGNTIYF

SEQ ID NO: 580643 - protein, 10 aa, Homo sapiens
  CDR3 for alpha chain variable domain of TCR clone 290322 (TRAV12-2, TRAJ20)
CAVYLYKLSF

SEQ ID NO: 580644 - protein, 14 aa, Homo sapiens
  CDR3 for beta chain variable domain of TCR clone 290322 (TRBV10-3, TRBJ2-2)
CAISAVSHSGELFF

SEQ ID NO: 580645 - protein, 14 aa, Homo sapiens
  CDR3 for alpha chain variable domain of TCR clone 290323 (TRAV8-3, TRAJ4)
CAVGAAGGYNKLIF

SEQ ID NO: 580646 - protein, 14 aa, Homo sapiens
  CDR3 for beta chain variable domain of TCR clone 290323 (TRBV7-3, TRBJ2-1)
CASSLKGLELLQLA

SEQ ID NO: 580647 - protein, 14 aa, Homo sapiens
  CDR3 for alpha chain variable domain of TCR clone 290324 (TRAV1-1, TRAJ23)
CAVSIYNQGGKLIF

SEQ ID NO: 580648 - protein, 12 aa, Homo sapiens
  CDR3 for beta chain variable domain of TCR clone 290324 (TRBV7-9, TRBJ1-5)
CASSPQGQPQHF

SEQ ID NO: 580649 - protein, 14 aa, Homo sapiens
  CDR3 for alpha chain variable domain of TCR clone 290325 (TRAV12-3, TRAJ56)
CAMSVTGANSKLTF

SEQ ID NO: 580650 - protein, 17 aa, Homo sapiens
  CDR3 for beta chain variable domain of TCR clone 290325 (TRBV20-1, TRBJ2-3)
CSASLLGRGGSADTQYL

SEQ ID NO: 580651 - protein, 12 aa, Homo sapiens
  CDR3 for alpha chain variable domain of TCR clone 290326 (TRAV3, TRAJ31)
CAAQRANARLMF

SEQ ID NO: 580652 - protein, 16 aa, Homo sapiens
  CDR3 for beta chain variable domain of TCR clone 290326 (TRBV4-2, TRBJ1-1)
CASSPSPGRAAPEAFF

SEQ ID NO: 580653 - protein, 11 aa, Homo sapiens
  CDR3 for alpha chain variable domain of TCR clone 290327 (TRAV3, TRAJ21)
CAVGNFNKFYF

SEQ ID NO: 580654 - protein, 14 aa, Homo sapiens
  CDR3 for beta chain variable domain of TCR clone 290327 (TRBV6-1, TRBJ1-3)
CASVRGGGGNTIYF

SEQ ID NO: 580655 - protein, 18 aa, Homo sapiens
  CDR3 for alpha chain variable domain of TCR clone 290328 (TRAV21, TRAJ52)
CAVRPSPAGGTSYGKLTF

SEQ ID NO: 580656 - protein, 15 aa, Homo sapiens
  CDR3 for beta chain variable domain of TCR clone 290328 (TRBV9, TRBJ1-6)
CAGSVAGTGDSPLHF

SEQ ID NO: 580657 - protein, 12 aa, Homo sapiens
  CDR3 for alpha chain variable domain of TCR clone 290329 (TRAV12-3, TRAJ17)
CAMTLTGNTLTF

SEQ ID NO: 580658 - protein, 15 aa, Homo sapiens
  CDR3 for beta chain variable domain of TCR clone 290329 (TRBV20-1, TRBJ2-7)
CRARDRVSGMDEQYF

SEQ ID NO: 580659 - protein, 14 aa, Homo sapiens
  CDR3 for alpha chain variable domain of TCR clone 290330 (TRAV34, TRAJ44)
CGADGTGTASKLTF

SEQ ID NO: 580660 - protein, 17 aa, Homo sapiens
  CDR3 for beta chain variable domain of TCR clone 290330 (TRBV28, TRBJ2-5)
CASSKQGGLAGAETQYF

SEQ ID NO: 580661 - protein, 13 aa, Homo sapiens
  CDR3 for alpha chain variable domain of TCR clone 290331 (TRAV13-1, TRAJ5)
CPARVTGRRALTF

SEQ ID NO: 580662 - protein, 15 aa, Homo sapiens
  CDR3 for beta chain variable domain of TCR clone 290331 (TRBV7-9, TRBJ2-7)
CASSPGGGLTYEQYF

SEQ ID NO: 580663 - protein, 17 aa, Homo sapiens
  CDR3 for alpha chain variable domain of TCR clone 290332 (TRAV8-6, TRAJ8)
CAVKEGIENTGFQKLVF

SEQ ID NO: 580664 - protein, 13 aa, Homo sapiens
  CDR3 for beta chain variable domain of TCR clone 290332 (TRBV12-4, TRBJ2-2)
CASSITGSGELFF

SEQ ID NO: 580665 - protein, 15 aa, Homo sapiens
  CDR3 for alpha chain variable domain of TCR clone 290333 (TRAV26-1, TRAJ40)
CLVRAVPSGTYKYIF

SEQ ID NO: 580666 - protein, 14 aa, Homo sapiens
  CDR3 for beta chain variable domain of TCR clone 290333 (TRBV19, TRBJ2-1)
CASKDPGLANEQFF

SEQ ID NO: 580667 - protein, 17 aa, Homo sapiens
  CDR3 for alpha chain variable domain of TCR clone 290334 (TRAV26-2, TRAJ42)
CILRDVGDGGSQGNLIF

SEQ ID NO: 580668 - protein, 16 aa, Homo sapiens
  CDR3 for beta chain variable domain of TCR clone 290334 (TRBV12-4, TRBJ2-7)
RASSLIGGTGTYEQYF

SEQ ID NO: 580669 - protein, 14 aa, Homo sapiens
  CDR3 for alpha chain variable domain of TCR clone 290335 (TRAV38-1, TRAJ45)
CAYYSGGCADGLTF

SEQ ID NO: 580670 - protein, 20 aa, Homo sapiens
  CDR3 for beta chain variable domain of TCR clone 290335 (TRBV28, TRBJ2-1)
CASTPIGRSPGIAGGNEQFF

SEQ ID NO: 580671 - protein, 23 aa, Homo sapiens
  CDR3 for alpha chain variable domain of TCR clone 290336 (TRAV3, TRAJ9)
CAVRDSNTEASKLSLEQEQDYLL

SEQ ID NO: 580672 - protein, 16 aa, Homo sapiens
  CDR3 for beta chain variable domain of TCR clone 290336 (TRBV15, TRBJ2-5)
CATSPTTGQGMETQYF

SEQ ID NO: 580673 - protein, 11 aa, Homo sapiens
  CDR3 for alpha chain variable domain of TCR clone 290337 (TRAV12-2, TRAJ36)
CAVKDNLFFET

SEQ ID NO: 580674 - protein, 15 aa, Homo sapiens
  CDR3 for beta chain variable domain of TCR clone 290337 (TRBV28, TRBJ2-2)
CASTVAGANTGELFF

SEQ ID NO: 580675 - protein, 14 aa, Homo sapiens
  CDR3 for alpha chain variable domain of TCR clone 290338 (TRAV26-1, TRAJ39)
CIVRGSRAGNMLTF

SEQ ID NO: 580676 - protein, 15 aa, Homo sapiens
  CDR3 for beta chain variable domain of TCR clone 290338 (TRBV7-9, TRBJ1-5)
CASSLGHQPNQPQHF

SEQ ID NO: 580677 - protein, 16 aa, Homo sapiens
  CDR3 for alpha chain variable domain of TCR clone 290339 (TRAV3, TRAJ21)
CAVRDIERGNFNKFYF

SEQ ID NO: 580678 - protein, 21 aa, Homo sapiens
  CDR3 for beta chain variable domain of TCR clone 290339 (TRBV11-2, TRBJ1-3)
CASSPRGWKHHIFWRGKLAHC

SEQ ID NO: 580679 - protein, 14 aa, Homo sapiens
  CDR3 for alpha chain variable domain of TCR clone 290340 (TRAV8-3, TRAJ27)
CAGGRNTNAGKSTF

SEQ ID NO: 580680 - protein, 15 aa, Homo sapiens
  CDR3 for beta chain variable domain of TCR clone 290340 (TRBV11-3, TRBJ2-5)
CASSLRGRVQETQYL

SEQ ID NO: 580681 - protein, 12 aa, Homo sapiens
  CDR3 for alpha chain variable domain of TCR clone 290341 (TRAV20, TRAJ23)
CLQPGRKAYLRT

SEQ ID NO: 580682 - protein, 16 aa, Homo sapiens
  CDR3 for beta chain variable domain of TCR clone 290341 (TRBV7-8, TRBJ2-5)
CASSFGGQPAQETQYF

SEQ ID NO: 580683 - protein, 13 aa, Homo sapiens
  CDR3 for alpha chain variable domain of TCR clone 290342 (TRAV23/DV6, TRAJ36)
CAASQTGANNLLF

SEQ ID NO: 580684 - protein, 13 aa, Homo sapiens
  CDR3 for beta chain variable domain of TCR clone 290342 (TRBV5-4, TRBJ1-5)
CASSLGGDQPQHF

SEQ ID NO: 580685 - protein, 14 aa, Homo sapiens
  CDR3 for alpha chain variable domain of TCR clone 290343 (TRAV13-1, TRAJ44)
CAAKATGTASKLTF

SEQ ID NO: 580686 - protein, 11 aa, Homo sapiens
  CDR3 for beta chain variable domain of TCR clone 290343 (TRBV12-4, TRBJ2-3)
CASTATDTQYF

SEQ ID NO: 580687 - protein, 14 aa, Homo sapiens
  CDR3 for alpha chain variable domain of TCR clone 290344 (TRAV36/DV7, TRAJ13)
WGSGENGGYQKVTF

SEQ ID NO: 580688 - protein, 15 aa, Homo sapiens
  CDR3 for beta chain variable domain of TCR clone 290344 (TRBV19, TRBJ2-1)
CASSIGTSSYNEQFF

SEQ ID NO: 580689 - protein, 16 aa, Homo sapiens
  CDR3 for alpha chain variable domain of TCR clone 290345 (TRAV3, TRAJ18)
CAVRDGRGSTLGRLYL

SEQ ID NO: 580690 - protein, 15 aa, Homo sapiens
  CDR3 for beta chain variable domain of TCR clone 290345 (TRBV7-9, TRBJ1-6)
CASSSPGCGNSPLHF

SEQ ID NO: 580691 - protein, 14 aa, Homo sapiens
  CDR3 for alpha chain variable domain of TCR clone 290346 (TRAV1-2, TRAJ16)
CAVKDGSDGQKLLF

SEQ ID NO: 580692 - protein, 13 aa, Homo sapiens
  CDR3 for beta chain variable domain of TCR clone 290346 (TRBV20-1, TRBJ1-1)
CSAPLGGGTEAFF

SEQ ID NO: 580693 - protein, 10 aa, Homo sapiens
  CDR3 for alpha chain variable domain of TCR clone 290347 (TRAV8-4, TRAJ43)
CAVSADGMRF

SEQ ID NO: 580694 - protein, 13 aa, Homo sapiens
  CDR3 for beta chain variable domain of TCR clone 290347 (TRBV12-4, TRBJ2-5)
CASSPGTEETQYF

SEQ ID NO: 580695 - protein, 14 aa, Homo sapiens
  CDR3 for alpha chain variable domain of TCR clone 290348 (TRAV12-3, TRAJ29)
CAMSPYSGNTPLVF

SEQ ID NO: 580696 - protein, 13 aa, Homo sapiens
  CDR3 for beta chain variable domain of TCR clone 290348 (TRBV10-3, TRBJ2-7)
CASKLAVNYERYF

SEQ ID NO: 580697 - protein, 11 aa, Homo sapiens
  CDR3 for alpha chain variable domain of TCR clone 290349 (TRAV8-6, TRAJ42)
CAVRGRKPRKS

SEQ ID NO: 580698 - protein, 12 aa, Homo sapiens
  CDR3 for beta chain variable domain of TCR clone 290349 (TRBV11-2, TRBJ2-1)
CASSPGNNEQFF

SEQ ID NO: 580699 - protein, 15 aa, Homo sapiens
  CDR3 for alpha chain variable domain of TCR clone 290350 (TRAV17, TRAJ57)
CATGPSQGGSEKRVF

SEQ ID NO: 580700 - protein, 13 aa, Homo sapiens
  CDR3 for beta chain variable domain of TCR clone 290350 (TRBV27, TRBJ1-4)
CASSLMGDEKLFF

SEQ ID NO: 580701 - protein, 13 aa, Homo sapiens
  CDR3 for alpha chain variable domain of TCR clone 290351 (TRAV21, TRAJ27)
CAARPGNAGKSTF

SEQ ID NO: 580702 - protein, 15 aa, Homo sapiens
  CDR3 for beta chain variable domain of TCR clone 290351 (TRBV2, TRBJ2-1)
CATQARLVMIGEQFF

SEQ ID NO: 580703 - protein, 16 aa, Homo sapiens
  CDR3 for alpha chain variable domain of TCR clone 290352 (TRAV3, TRAJ28)
CAVLPRSGAGSYQLTF

SEQ ID NO: 580704 - protein, 13 aa, Homo sapiens
  CDR3 for beta chain variable domain of TCR clone 290352 (TRBV5-7, TRBJ2-6)
CASTSSGANVLTF

SEQ ID NO: 580705 - protein, 14 aa, Homo sapiens
  CDR3 for alpha chain variable domain of TCR clone 290353 (TRAV35, TRAJ54)
CAGYLIQGAQKLVF

SEQ ID NO: 580706 - protein, 14 aa, Homo sapiens
  CDR3 for beta chain variable domain of TCR clone 290353 (TRBV7-2, TRBJ2-5)
CASSVGWVEETQYF

SEQ ID NO: 580707 - protein, 10 aa, Homo sapiens
  CDR3 for alpha chain variable domain of TCR clone 290354 (TRAV26-1, TRAJ22)
CIVSLNFFWF

SEQ ID NO: 580708 - protein, 15 aa, Homo sapiens
  CDR3 for beta chain variable domain of TCR clone 290354 (TRBV5-1, TRBJ1-2)
CASSLGQVSGRGYTF

SEQ ID NO: 580709 - protein, 14 aa, Homo sapiens
  CDR3 for alpha chain variable domain of TCR clone 290355 (TRAV16, TRAJ33)
CVLSAMDSNYQLIW

SEQ ID NO: 580710 - protein, 16 aa, Homo sapiens
  CDR3 for beta chain variable domain of TCR clone 290355 (TRBV12-4, TRBJ2-3)
CASSFPSNTNTDTQYF

SEQ ID NO: 580711 - protein, 12 aa, Homo sapiens
  CDR3 for alpha chain variable domain of TCR clone 290356 (TRAV2, TRAJ24)
CAATDSWGKFQF

SEQ ID NO: 580712 - protein, 13 aa, Homo sapiens
  CDR3 for beta chain variable domain of TCR clone 290356 (TRBV7-3, TRBJ1-1)
CASSQDWGAEAFF

SEQ ID NO: 580713 - protein, 13 aa, Homo sapiens
  CDR3 for alpha chain variable domain of TCR clone 290357 (TRAV29/DV5, TRAJ31)
CAASRNNNARLMF

SEQ ID NO: 580714 - protein, 16 aa, Homo sapiens
  CDR3 for beta chain variable domain of TCR clone 290357 (TRBV13, TRBJ2-7)
CASSLDRRRGFYEQYF

SEQ ID NO: 580715 - protein, 12 aa, Homo sapiens
  CDR3 for alpha chain variable domain of TCR clone 290358 (TRAV36/DV7, TRAJ54)
CAVVRGAQKLVF

SEQ ID NO: 580716 - protein, 14 aa, Homo sapiens
  CDR3 for beta chain variable domain of TCR clone 290358 (TRBV7-3, TRBJ1-1)
CASSLKGGNTEAFF

SEQ ID NO: 580717 - protein, 15 aa, Homo sapiens
  CDR3 for alpha chain variable domain of TCR clone 290359 (TRAV17, TRAJ56)
CATDANTGANSKLTF

SEQ ID NO: 580718 - protein, 14 aa, Homo sapiens
  CDR3 for beta chain variable domain of TCR clone 290359 (TRBV19, TRBJ1-5)
CASSLGSGGQPQHF

SEQ ID NO: 580719 - protein, 14 aa, Homo sapiens
  CDR3 for alpha chain variable domain of TCR clone 290360 (TRAV12-2, TRAJ17)
CAVLFKAAGNKLTF

SEQ ID NO: 580720 - protein, 14 aa, Homo sapiens
  CDR3 for beta chain variable domain of TCR clone 290360 (TRBV11-1, TRBJ2-7)
CASSVRQGSYEQYF

SEQ ID NO: 580721 - protein, 11 aa, Homo sapiens
  CDR3 for alpha chain variable domain of TCR clone 290361 (TRAV12-2, TRAJ33)
CAVGSNYQLIW

SEQ ID NO: 580722 - protein, 14 aa, Homo sapiens
  CDR3 for beta chain variable domain of TCR clone 290361 (TRBV6-1, TRBJ2-2)
CASVEHIESGELFI

SEQ ID NO: 580723 - protein, 12 aa, Homo sapiens
  CDR3 for alpha chain variable domain of TCR clone 290362 (TRAV12-3, TRAJ17)
CAMTLTGNKLTF

SEQ ID NO: 580724 - protein, 15 aa, Homo sapiens
  CDR3 for beta chain variable domain of TCR clone 290362 (TRBV12-4, TRBJ2-5)
CASSPPTGLKETQYF

SEQ ID NO: 580725 - protein, 14 aa, Homo sapiens
  CDR3 for alpha chain variable domain of TCR clone 290363 (TRAV1-2, TRAJ16)
CAVNRFSDGQKLLV

SEQ ID NO: 580726 - protein, 14 aa, Homo sapiens
  CDR3 for beta chain variable domain of TCR clone 290363 (TRBV7-3, TRBJ1-1)
CASSLGTGYTEAFF

SEQ ID NO: 580727 - protein, 12 aa, Homo sapiens
  CDR3 for alpha chain variable domain of TCR clone 290364 (TRAV12-3, TRAJ5)
CAMDTGRRALTF

SEQ ID NO: 580728 - protein, 20 aa, Homo sapiens
  CDR3 for beta chain variable domain of TCR clone 290364 (TRBV7-8, TRBJ2-2)
CASSHLFPGPTVHITGELFF

SEQ ID NO: 580729 - protein, 14 aa, Homo sapiens
  CDR3 for alpha chain variable domain of TCR clone 290365 (TRAV23/DV6, TRAJ17)
CAASIGAAGNKLTS

SEQ ID NO: 580730 - protein, 12 aa, Homo sapiens
  CDR3 for beta chain variable domain of TCR clone 290365 (TRBV20-1, TRBJ2-5)
CSAGGAGETQYF

SEQ ID NO: 580731 - protein, 12 aa, Homo sapiens
  CDR3 for alpha chain variable domain of TCR clone 290366 (TRAV3, TRAJ43)
CAVRDPNNDTRF

SEQ ID NO: 580732 - protein, 14 aa, Homo sapiens
  CDR3 for beta chain variable domain of TCR clone 290366 (TRBV5-1, TRBJ2-3)
CASSLFGPTDTQYF

SEQ ID NO: 580733 - protein, 13 aa, Homo sapiens
  CDR3 for alpha chain variable domain of TCR clone 290367 (TRAV12-2, TRAJ40)
CAVKRTGTYKYNF

SEQ ID NO: 580734 - protein, 15 aa, Homo sapiens
  CDR3 for beta chain variable domain of TCR clone 290367 (TRBV12-4, TRBJ1-2)
CASSPITGGGYGYTF

SEQ ID NO: 580735 - protein, 12 aa, Homo sapiens
  CDR3 for alpha chain variable domain of TCR clone 290368 (TRAV13-1, TRAJ27)
CAANTNAGKSTL

SEQ ID NO: 580736 - protein, 14 aa, Homo sapiens
  CDR3 for beta chain variable domain of TCR clone 290368 (TRBV19, TRBJ2-2)
CASSGQGIAGELFF

SEQ ID NO: 580737 - protein, 14 aa, Homo sapiens
  CDR3 for alpha chain variable domain of TCR clone 290369 (TRAV1-2, TRAJ8)
CAVREDTGFQKLVF

SEQ ID NO: 580738 - protein, 15 aa, Homo sapiens
  CDR3 for beta chain variable domain of TCR clone 290369 (TRBV5-5, TRBJ1-5)
CASISTPGSNQPQHF

SEQ ID NO: 580739 - protein, 16 aa, Homo sapiens
  CDR3 for alpha chain variable domain of TCR clone 290370 (TRAV30, TRAJ24)
CGTEIVDADSWGKLQF

SEQ ID NO: 580740 - protein, 14 aa, Homo sapiens
  CDR3 for beta chain variable domain of TCR clone 290370 (TRBV12-5, TRBJ2-5)
CASGSRTHQETQSF

SEQ ID NO: 580741 - protein, 13 aa, Homo sapiens
  CDR3 for alpha chain variable domain of TCR clone 290371 (TRAV9-2, TRAJ3)
CSDLYSSASKIIF

SEQ ID NO: 580742 - protein, 16 aa, Homo sapiens
  CDR3 for beta chain variable domain of TCR clone 290371 (TRBV18, TRBJ2-7)
CASSPSTSGRNHEQYF

SEQ ID NO: 580743 - protein, 10 aa, Homo sapiens
  CDR3 for alpha chain variable domain of TCR clone 290372 (TRAV26-1, TRAJ22)
CIAGSRQLTF

SEQ ID NO: 580744 - protein, 15 aa, Homo sapiens
  CDR3 for beta chain variable domain of TCR clone 290372 (TRBV7-2, TRBJ2-1)
CASSSGLAGGNEQFF

SEQ ID NO: 580745 - protein, 16 aa, Homo sapiens
  CDR3 for alpha chain variable domain of TCR clone 290373 (TRAV23/DV6, TRAJ9)
CAASIGGNTGGFKTIF

SEQ ID NO: 580746 - protein, 14 aa, Homo sapiens
  CDR3 for beta chain variable domain of TCR clone 290373 (TRBV18, TRBJ2-5)
CASSPGVSQETQYF

SEQ ID NO: 580747 - protein, 13 aa, Homo sapiens
  CDR3 for alpha chain variable domain of TCR clone 290374 (TRAV21, TRAJ53)
CCEMGGSNYKLTF

SEQ ID NO: 580748 - protein, 14 aa, Homo sapiens
  CDR3 for beta chain variable domain of TCR clone 290374 (TRBV19, TRBJ2-1)
CASPTFVLSGEQFF

SEQ ID NO: 580749 - protein, 15 aa, Homo sapiens
  CDR3 for alpha chain variable domain of TCR clone 290375 (TRAV17, TRAJ57)
CATGPSQGGSEKLVF

SEQ ID NO: 580750 - protein, 15 aa, Homo sapiens
  CDR3 for beta chain variable domain of TCR clone 290375 (TRBV7-9, TRBJ1-6)
CASSSPGRGNSPLQF

SEQ ID NO: 580751 - protein, 15 aa, Homo sapiens
  CDR3 for alpha chain variable domain of TCR clone 290376 (TRAV12-2, TRAJ8)
CAVREENTGFRKLVF

SEQ ID NO: 580752 - protein, 15 aa, Homo sapiens
  CDR3 for beta chain variable domain of TCR clone 290376 (TRBV28, TRBJ2-4)
CAAGSGTLLMGIQYF

SEQ ID NO: 580753 - protein, 14 aa, Homo sapiens
  CDR3 for alpha chain variable domain of TCR clone 290377 (TRAV29/DV5, TRAJ49)
CAASAQNTGNQSYF

SEQ ID NO: 580754 - protein, 16 aa, Homo sapiens
  CDR3 for beta chain variable domain of TCR clone 290377 (TRBV12-4, TRBJ1-5)
CASRQPVEGSNQPQHF

SEQ ID NO: 580755 - protein, 13 aa, Homo sapiens
  CDR3 for alpha chain variable domain of TCR clone 290378 (TRAV13-1, TRAJ44)
CSKATGTASKLTF

SEQ ID NO: 580756 - protein, 12 aa, Homo sapiens
  CDR3 for beta chain variable domain of TCR clone 290378 (TRBV7-8, TRBJ2-7)
CASSLGDREQYF

SEQ ID NO: 580757 - protein, 12 aa, Homo sapiens
  CDR3 for alpha chain variable domain of TCR clone 290379 (TRAV26-1, TRAJ31)
CIVRNNNARLML

SEQ ID NO: 580758 - protein, 15 aa, Homo sapiens
  CDR3 for beta chain variable domain of TCR clone 290379 (TRBV20-1, TRBJ2-4)
CSARDLTGGPNIQYF

SEQ ID NO: 580759 - protein, 18 aa, Homo sapiens
  CDR3 for alpha chain variable domain of TCR clone 290380 (TRAV26-2, TRAJ33)
CCVLLHPEEPASSYQLIW

SEQ ID NO: 580760 - protein, 13 aa, Homo sapiens
  CDR3 for beta chain variable domain of TCR clone 290380 (TRBV24-1, TRBJ2-2)
CATSDWSTGELFF

SEQ ID NO: 580761 - protein, 15 aa, Homo sapiens
  CDR3 for alpha chain variable domain of TCR clone 290381 (TRAV3, TRAJ5)
CAVRDLYTGRRALTF

SEQ ID NO: 580762 - protein, 16 aa, Homo sapiens
  CDR3 for beta chain variable domain of TCR clone 290381 (TRBV20-1, TRBJ1-4)
CSAPGQGLLTNDTLFF

SEQ ID NO: 580763 - protein, 12 aa, Homo sapiens
  CDR3 for alpha chain variable domain of TCR clone 290382 (TRAV8-3, TRAJ26)
CAGDNYGQNFVF

SEQ ID NO: 580764 - protein, 15 aa, Homo sapiens
  CDR3 for beta chain variable domain of TCR clone 290382 (TRBV9, TRBJ2-1)
CANSLAGSSYNEQFF

SEQ ID NO: 580765 - protein, 18 aa, Homo sapiens
  CDR3 for alpha chain variable domain of TCR clone 290383 (TRAV21, TRAJ52)
CAVRPSPAGGTSYGKLTF

SEQ ID NO: 580766 - protein, 16 aa, Homo sapiens
  CDR3 for beta chain variable domain of TCR clone 290383 (TRBV25-1, TRBJ1-1)
CASSGDRDRGRIEAFF

SEQ ID NO: 580767 - protein, 17 aa, Homo sapiens
  CDR3 for alpha chain variable domain of TCR clone 290384 (TRAV13-1, TRAJ28)
CAASPPYSGAGSYQLTF

SEQ ID NO: 580768 - protein, 13 aa, Homo sapiens
  CDR3 for beta chain variable domain of TCR clone 290384 (TRBV7-6, TRBJ1-2)
CASSLVADYGYTF

SEQ ID NO: 580769 - protein, 13 aa, Homo sapiens
  CDR3 for alpha chain variable domain of TCR clone 290385 (TRAV1-2, TRAJ9)
CAALNTGGFKTIS

SEQ ID NO: 580770 - protein, 13 aa, Homo sapiens
  CDR3 for beta chain variable domain of TCR clone 290385 (TRBV19, TRBJ1-2)
CDSSVPGQDGYTF

SEQ ID NO: 580771 - protein, 15 aa, Homo sapiens
  CDR3 for alpha chain variable domain of TCR clone 290386 (TRAV13-1, TRAJ52)
SYYNAGVTSYGKLTF

SEQ ID NO: 580772 - protein, 11 aa, Homo sapiens
  CDR3 for beta chain variable domain of TCR clone 290386 (TRBV12-4, TRBJ2-2)
CASSSAGELFF

SEQ ID NO: 580773 - protein, 13 aa, Homo sapiens
  CDR3 for alpha chain variable domain of TCR clone 290387 (TRAV12-1, TRAJ7)
CVVNMRGNNRLAF

SEQ ID NO: 580774 - protein, 17 aa, Homo sapiens
  CDR3 for beta chain variable domain of TCR clone 290387 (TRBV20-1, TRBJ2-1)
CSARDPLAGVWDNEQFF

SEQ ID NO: 580775 - protein, 18 aa, Homo sapiens
  CDR3 for alpha chain variable domain of TCR clone 290388 (TRAV26-1, TRAJ23)
CIVRVGLEVWNQGGERIF

SEQ ID NO: 580776 - protein, 15 aa, Homo sapiens
  CDR3 for beta chain variable domain of TCR clone 290388 (TRBV12-4, TRBJ2-5)
CQQFFVRGRQETQYF

SEQ ID NO: 580777 - protein, 14 aa, Homo sapiens
  CDR3 for alpha chain variable domain of TCR clone 290389 (TRAV8-1, TRAJ5)
CAVRTDTGRRALTF

SEQ ID NO: 580778 - protein, 13 aa, Homo sapiens
  CDR3 for beta chain variable domain of TCR clone 290389 (TRBV10-3, TRBJ2-7)
CASKLAVNYEQYF

SEQ ID NO: 580779 - protein, 13 aa, Homo sapiens
  CDR3 for alpha chain variable domain of TCR clone 290390 (TRAV30, TRAJ24)
CGTVTDSWGKLQF

SEQ ID NO: 580780 - protein, 13 aa, Homo sapiens
  CDR3 for beta chain variable domain of TCR clone 290390 (TRBV20-1, TRBJ2-2)
CSASAAGTGELFF

SEQ ID NO: 580781 - protein, 16 aa, Homo sapiens
  CDR3 for alpha chain variable domain of TCR clone 290391 (TRAV35, TRAJ28)
CAGQRYSGAWSYQLTF

SEQ ID NO: 580782 - protein, 14 aa, Homo sapiens
  CDR3 for beta chain variable domain of TCR clone 290391 (TRBV18, TRBJ2-7)
CASSPRGGAYEQYF

SEQ ID NO: 580783 - protein, 14 aa, Homo sapiens
  CDR3 for alpha chain variable domain of TCR clone 290392 (TRAV17, TRAJ15)
CATGPNQAVTALIF

SEQ ID NO: 580784 - protein, 15 aa, Homo sapiens
  CDR3 for beta chain variable domain of TCR clone 290392 (TRBV11-2, TRBJ2-2)
CASSSDRVNAGELFF

SEQ ID NO: 580785 - protein, 16 aa, Homo sapiens
  CDR3 for alpha chain variable domain of TCR clone 290393 (TRAV13-1, TRAJ37)
RAAGSLGSSNTGKLIL

SEQ ID NO: 580786 - protein, 12 aa, Homo sapiens
  CDR3 for beta chain variable domain of TCR clone 290393 (TRBV6-1, TRBJ2-5)
CASSEGRETQYF

SEQ ID NO: 580787 - protein, 14 aa, Homo sapiens
  CDR3 for alpha chain variable domain of TCR clone 290394 (TRAV12-1, TRAJ6)
CVVPTSGGSYIPTF

SEQ ID NO: 580788 - protein, 16 aa, Homo sapiens
  CDR3 for beta chain variable domain of TCR clone 290394 (TRBV2, TRBJ2-7)
CASSDPWTGPSYEQYF

SEQ ID NO: 580789 - protein, 13 aa, Homo sapiens
  CDR3 for alpha chain variable domain of TCR clone 290395 (TRAV16, TRAJ9)
CALSNTGGLKTIF

SEQ ID NO: 580790 - protein, 14 aa, Homo sapiens
  CDR3 for beta chain variable domain of TCR clone 290395 (TRBV5-1, TRBJ2-1)
CASSLEGPVYEQFF

SEQ ID NO: 580791 - protein, 15 aa, Homo sapiens
  CDR3 for alpha chain variable domain of TCR clone 290396 (TRAV17, TRAJ35)
CATAFAIGFGNVLHC

SEQ ID NO: 580792 - protein, 16 aa, Homo sapiens
  CDR3 for beta chain variable domain of TCR clone 290396 (TRBV11-2, TRBJ2-7)
CASSPLAGGPRYEQYF

SEQ ID NO: 580793 - protein, 12 aa, Homo sapiens
  CDR3 for alpha chain variable domain of TCR clone 290397 (TRAV12-3, TRAJ20)
CAMVRGDYMLSF

SEQ ID NO: 580794 - protein, 14 aa, Homo sapiens
  CDR3 for beta chain variable domain of TCR clone 290397 (TRBV5-5, TRBJ1-5)
CASSGQGVDQPQHF

SEQ ID NO: 580795 - protein, 14 aa, Homo sapiens
  CDR3 for alpha chain variable domain of TCR clone 290398 (TRAV1-2, TRAJ16)
CAVNRFSDGQKLLF

SEQ ID NO: 580796 - protein, 16 aa, Homo sapiens
  CDR3 for beta chain variable domain of TCR clone 290398 (TRBV13, TRBJ2-2)
CASSPRTGEHAGELFF

SEQ ID NO: 580797 - protein, 13 aa, Homo sapiens
  CDR3 for alpha chain variable domain of TCR clone 290399 (TRAV8-6, TRAJ54)
CAVSDQGAQKLVF

SEQ ID NO: 580798 - protein, 17 aa, Homo sapiens
  CDR3 for beta chain variable domain of TCR clone 290399 (TRBV19, TRBJ1-1)
CASSIAGRGLMSTEAFF

SEQ ID NO: 580799 - protein, 13 aa, Homo sapiens
  CDR3 for alpha chain variable domain of TCR clone 290400 (TRAV38-1, TRAJ49)
CAFMKYTGNQFYF

SEQ ID NO: 580800 - protein, 15 aa, Homo sapiens
  CDR3 for beta chain variable domain of TCR clone 290400 (TRBV5-1, TRBJ1-1)
FAPAASDRGGGEAFF

SEQ ID NO: 580801 - protein, 19 aa, Homo sapiens
  CDR3 for alpha chain variable domain of TCR clone 290401 (TRAV17, TRAJ37)
CFLLLCYGPCSSNTGKLIF

SEQ ID NO: 580802 - protein, 14 aa, Homo sapiens
  CDR3 for beta chain variable domain of TCR clone 290401 (TRBV7-2, TRBJ2-3)
CASSRTSGADTQYF

SEQ ID NO: 580803 - protein, 16 aa, Homo sapiens
  CDR3 for alpha chain variable domain of TCR clone 290402 (TRAV13-1, TRAJ22)
CAAKGGRSGSARQLTF

SEQ ID NO: 580804 - protein, 13 aa, Homo sapiens
  CDR3 for beta chain variable domain of TCR clone 290402 (TRBV2, TRBJ2-7)
CASSVGGSGEQYF

SEQ ID NO: 580805 - protein, 16 aa, Homo sapiens
  CDR3 for alpha chain variable domain of TCR clone 290403 (TRAV3, TRAJ37)
CAVRVRGSGNTGKLIF

SEQ ID NO: 580806 - protein, 11 aa, Homo sapiens
  CDR3 for beta chain variable domain of TCR clone 290403 (TRBV11-2, TRBJ2-2)
CASSLPEELFF

SEQ ID NO: 580807 - protein, 14 aa, Homo sapiens
  CDR3 for alpha chain variable domain of TCR clone 290404 (TRAV29/DV5, TRAJ4)
CAATVFGGYNKLIF

SEQ ID NO: 580808 - protein, 16 aa, Homo sapiens
  CDR3 for beta chain variable domain of TCR clone 290404 (TRBV12-5, TRBJ2-5)
CASGPRTSGNQETQYF

SEQ ID NO: 580809 - protein, 14 aa, Homo sapiens
  CDR3 for alpha chain variable domain of TCR clone 290405 (TRAV8-3, TRAJ33)
CAVGPLGGNYQLIW

SEQ ID NO: 580810 - protein, 12 aa, Homo sapiens
  CDR3 for beta chain variable domain of TCR clone 290405 (TRBV28, TRBJ2-3)
CASSLYRDTQYF

SEQ ID NO: 580811 - protein, 14 aa, Homo sapiens
  CDR3 for alpha chain variable domain of TCR clone 290406 (TRAV17, TRAJ56)
CATVPAGANSKLTF

SEQ ID NO: 580812 - protein, 14 aa, Homo sapiens
  CDR3 for beta chain variable domain of TCR clone 290406 (TRBV19, TRBJ2-3)
CASSAPRGTDTQYF

SEQ ID NO: 580813 - protein, 16 aa, Homo sapiens
  CDR3 for alpha chain variable domain of TCR clone 290407 (TRAV30, TRAJ24)
RGTEIVDADSWGKFQF

SEQ ID NO: 580814 - protein, 16 aa, Homo sapiens
  CDR3 for beta chain variable domain of TCR clone 290407 (TRBV12-5, TRBJ2-5)
CASGPRTSGNQETQYF

SEQ ID NO: 580815 - protein, 20 aa, Homo sapiens
  CDR3 for alpha chain variable domain of TCR clone 290408 (TRAV1-1, TRAJ4)
CLLLLRCEGFLSGGYNKLIF

SEQ ID NO: 580816 - protein, 16 aa, Homo sapiens
  CDR3 for beta chain variable domain of TCR clone 290408 (TRBV28, TRBJ1-4)
CASSPPYRGRSEKLCF

SEQ ID NO: 580817 - protein, 17 aa, Homo sapiens
  CDR3 for alpha chain variable domain of TCR clone 290409 (TRAV3, TRAJ38)
CAVRDCRNAGNNRKLIW

SEQ ID NO: 580818 - protein, 16 aa, Homo sapiens
  CDR3 for beta chain variable domain of TCR clone 290409 (TRBV20-1, TRBJ1-4)
CSAPGQGLLTNEKLFF

SEQ ID NO: 580819 - protein, 10 aa, Homo sapiens
  CDR3 for alpha chain variable domain of TCR clone 290410 (TRAV12-1, TRAJ43)
CVVHNNYMRF

SEQ ID NO: 580820 - protein, 13 aa, Homo sapiens
  CDR3 for beta chain variable domain of TCR clone 290410 (TRBV12-4, TRBJ1-2)
CASSSGLTVRSTF

SEQ ID NO: 580821 - protein, 14 aa, Homo sapiens
  CDR3 for alpha chain variable domain of TCR clone 290411 (TRAV12-3, TRAJ10)
SHLPLTGGGNKLTF

SEQ ID NO: 580822 - protein, 13 aa, Homo sapiens
  CDR3 for beta chain variable domain of TCR clone 290411 (TRBV19, TRBJ2-2)
CASGQRSTGELFF

SEQ ID NO: 580823 - protein, 12 aa, Homo sapiens
  CDR3 for alpha chain variable domain of TCR clone 290412 (TRAV13-2, TRAJ23)
CAERHRGGKLIF

SEQ ID NO: 580824 - protein, 16 aa, Homo sapiens
  CDR3 for beta chain variable domain of TCR clone 290412 (TRBV12-5, TRBJ2-1)
CASGPRTSGNQETQYF

SEQ ID NO: 580825 - protein, 11 aa, Homo sapiens
  CDR3 for alpha chain variable domain of TCR clone 290413 (TRAV2, TRAJ13)
CASGGYQKVTF

SEQ ID NO: 580826 - protein, 14 aa, Homo sapiens
  CDR3 for beta chain variable domain of TCR clone 290413 (TRBV7-6, TRBJ2-1)
CASSLGGGADEQFF

SEQ ID NO: 580827 - protein, 12 aa, Homo sapiens
  CDR3 for alpha chain variable domain of TCR clone 290414 (TRAV13-2, TRAJ58)
CAERRLDPRLTF

SEQ ID NO: 580828 - protein, 15 aa, Homo sapiens
  CDR3 for beta chain variable domain of TCR clone 290414 (TRBV5-1, TRBJ2-5)
CASSSGREMVETQYF

SEQ ID NO: 580829 - protein, 15 aa, Homo sapiens
  CDR3 for alpha chain variable domain of TCR clone 290415 (TRAV26-1, TRAJ23)
CIVRVAGYQGGKLIF

SEQ ID NO: 580830 - protein, 18 aa, Homo sapiens
  CDR3 for beta chain variable domain of TCR clone 290415 (TRBV28, TRBJ2-1)
CASSSTSGRANSYNEQFC

SEQ ID NO: 580831 - protein, 11 aa, Homo sapiens
  CDR3 for alpha chain variable domain of TCR clone 290416 (TRAV21, TRAJ11)
CAVNGYSTLTF

SEQ ID NO: 580832 - protein, 11 aa, Homo sapiens
  CDR3 for beta chain variable domain of TCR clone 290416 (TRBV11-2, TRBJ2-7)
CASSSDYEQHF

SEQ ID NO: 580833 - protein, 19 aa, Homo sapiens
  CDR3 for alpha chain variable domain of TCR clone 290417 (TRAV2, TRAJ20)
ILQVREADASVYRDCKLSF

SEQ ID NO: 580834 - protein, 13 aa, Homo sapiens
  CDR3 for beta chain variable domain of TCR clone 290417 (TRBV15, TRBJ1-6)
CATSGGLNSPLHF

SEQ ID NO: 580835 - protein, 16 aa, Homo sapiens
  CDR3 for alpha chain variable domain of TCR clone 290418 (TRAV3, TRAJ37)
CAVRPHGSGNTGKLLF

SEQ ID NO: 580836 - protein, 14 aa, Homo sapiens
  CDR3 for beta chain variable domain of TCR clone 290418 (TRBV2, TRBJ2-1)
CASSDRAYYKEQFF

SEQ ID NO: 580837 - protein, 13 aa, Homo sapiens
  CDR3 for alpha chain variable domain of TCR clone 290419 (TRAV30, TRAJ6)
CGFLEGGSYIPTF

SEQ ID NO: 580838 - protein, 13 aa, Homo sapiens
  CDR3 for beta chain variable domain of TCR clone 290419 (TRBV5-4, TRBJ2-5)
CASSPVSQETQYF

SEQ ID NO: 580839 - protein, 15 aa, Homo sapiens
  CDR3 for alpha chain variable domain of TCR clone 290420 (TRAV4, TRAJ39)
CLVGPNNSAGNILTF

SEQ ID NO: 580840 - protein, 16 aa, Homo sapiens
  CDR3 for beta chain variable domain of TCR clone 290420 (TRBV13, TRBJ2-2)
CASSPRTGEHTGELFF

SEQ ID NO: 580841 - protein, 18 aa, Homo sapiens
  CDR3 for alpha chain variable domain of TCR clone 290421 (TRAV29/DV5, TRAJ52)
CAAGFRGAGGTSYGKLTF

SEQ ID NO: 580842 - protein, 16 aa, Homo sapiens
  CDR3 for beta chain variable domain of TCR clone 290421 (TRBV7-3, TRBJ2-1)
CASSLKRGTSYNEQFF

SEQ ID NO: 580843 - protein, 16 aa, Homo sapiens
  CDR3 for alpha chain variable domain of TCR clone 290422 (TRAV3, TRAJ10)
CAVRDMRAGGGNKLTF

SEQ ID NO: 580844 - protein, 13 aa, Homo sapiens
  CDR3 for beta chain variable domain of TCR clone 290422 (TRBV4-2, TRBJ1-1)
CASRQAGNTEAFF

SEQ ID NO: 580845 - protein, 14 aa, Homo sapiens
  CDR3 for alpha chain variable domain of TCR clone 290423 (TRAV8-1, TRAJ23)
CAVGTYNQGGKLIF

SEQ ID NO: 580846 - protein, 16 aa, Homo sapiens
  CDR3 for beta chain variable domain of TCR clone 290423 (TRBV18, TRBJ1-5)
CASSPSTGNGNQPQHF

SEQ ID NO: 580847 - protein, 13 aa, Homo sapiens
  CDR3 for alpha chain variable domain of TCR clone 290424 (TRAV27, TRAJ45)
CRSSGGGADGLTF

SEQ ID NO: 580848 - protein, 17 aa, Homo sapiens
  CDR3 for beta chain variable domain of TCR clone 290424 (TRBV11-2, TRBJ2-1)
CACSLYPPGVEYNEQFF

SEQ ID NO: 580849 - protein, 19 aa, Homo sapiens
  CDR3 for alpha chain variable domain of TCR clone 290425 (TRAV1-2, TRAJ26)
CLLPLCCERPDNYGQNFVF

SEQ ID NO: 580850 - protein, 15 aa, Homo sapiens
  CDR3 for beta chain variable domain of TCR clone 290425 (TRBV20-1, TRBJ1-1)
CSASRGVTGNTEAFF

SEQ ID NO: 580851 - protein, 11 aa, Homo sapiens
  CDR3 for alpha chain variable domain of TCR clone 290426 (TRAV13-1, TRAJ52)
PGGTSDGKLTC

SEQ ID NO: 580852 - protein, 16 aa, Homo sapiens
  CDR3 for beta chain variable domain of TCR clone 290426 (TRBV28, TRBJ2-7)
CVSSPWVATGDLSQYF

SEQ ID NO: 580853 - protein, 16 aa, Homo sapiens
  CDR3 for alpha chain variable domain of TCR clone 290427 (TRAV8-2, TRAJ7)
CVVREGPYYGNNRLAF

SEQ ID NO: 580854 - protein, 13 aa, Homo sapiens
  CDR3 for beta chain variable domain of TCR clone 290427 (TRBV19, TRBJ2-1)
CASSMYRVNEQFF

SEQ ID NO: 580855 - protein, 14 aa, Homo sapiens
  CDR3 for alpha chain variable domain of TCR clone 290428 (TRAV8-4, TRAJ9)
CAVRINTGGFKTIF

SEQ ID NO: 580856 - protein, 15 aa, Homo sapiens
  CDR3 for beta chain variable domain of TCR clone 290428 (TRBV10-2, TRBJ2-6)
RASSEQGTGANVLTF

SEQ ID NO: 580857 - protein, 12 aa, Homo sapiens
  CDR3 for alpha chain variable domain of TCR clone 290429 (TRAV22, TRAJ36)
SAVGTGANNLFF

SEQ ID NO: 580858 - protein, 17 aa, Homo sapiens
  CDR3 for beta chain variable domain of TCR clone 290429 (TRBV15, TRBJ1-4)
CATSRYGTGDPNEKLFF

SEQ ID NO: 580859 - protein, 13 aa, Homo sapiens
  CDR3 for alpha chain variable domain of TCR clone 290430 (TRAV20, TRAJ37)
CAGCSSNTGKLIF

SEQ ID NO: 580860 - protein, 16 aa, Homo sapiens
  CDR3 for beta chain variable domain of TCR clone 290430 (TRBV28, TRBJ1-5)
CASSLTGQGWNQPQHF

SEQ ID NO: 580861 - protein, 15 aa, Homo sapiens
  CDR3 for alpha chain variable domain of TCR clone 290431 (TRAV12-1, TRAJ44)
CVVFVNTGTASKRTF

SEQ ID NO: 580862 - protein, 17 aa, Homo sapiens
  CDR3 for beta chain variable domain of TCR clone 290431 (TRBV7-8, TRBJ2-6)
CASSAGTGGAGANVLTF

SEQ ID NO: 580863 - protein, 14 aa, Homo sapiens
  CDR3 for alpha chain variable domain of TCR clone 290432 (TRAV1-2, TRAJ8)
CAVREDTGFQKLVF

SEQ ID NO: 580864 - protein, 17 aa, Homo sapiens
  CDR3 for beta chain variable domain of TCR clone 290432 (TRBV6-1, TRBJ1-3)
CASVQGGGVETPCILER

SEQ ID NO: 580865 - protein, 12 aa, Homo sapiens
  CDR3 for alpha chain variable domain of TCR clone 290433 (TRAV21, TRAJ13)
PGPSGGYQKVTF

SEQ ID NO: 580866 - protein, 16 aa, Homo sapiens
  CDR3 for beta chain variable domain of TCR clone 290433 (TRBV4-1, TRBJ1-5)
CASSQGGHTTNQPHHF

SEQ ID NO: 580867 - protein, 15 aa, Homo sapiens
  CDR3 for alpha chain variable domain of TCR clone 290434 (TRAV5, TRAJ33)
CAEAPAMDSNYQLIW

SEQ ID NO: 580868 - protein, 15 aa, Homo sapiens
  CDR3 for beta chain variable domain of TCR clone 290434 (TRBV9, TRBJ1-6)
CASSVAGTGDSPLHF

SEQ ID NO: 580869 - protein, 18 aa, Homo sapiens
  CDR3 for alpha chain variable domain of TCR clone 290435 (TRAV21, TRAJ52)
CAVRPSPAGGTSYGKLTF

SEQ ID NO: 580870 - protein, 17 aa, Homo sapiens
  CDR3 for beta chain variable domain of TCR clone 290435 (TRBV4-1, TRBJ1-4)
CASSHEGPRRVEEKLFF

SEQ ID NO: 580871 - protein, 14 aa, Homo sapiens
  CDR3 for alpha chain variable domain of TCR clone 290436 (TRAV1-2, TRAJ16)
CAVNRFSDGQKLHF

SEQ ID NO: 580872 - protein, 16 aa, Homo sapiens
  CDR3 for beta chain variable domain of TCR clone 290436 (TRBV20-1, TRBJ1-4)
CSAPGQGLLTNEKLFF

SEQ ID NO: 580873 - protein, 11 aa, Homo sapiens
  CDR3 for alpha chain variable domain of TCR clone 290437 (TRAV2, TRAJ13)
CASGGYQKVTF

SEQ ID NO: 580874 - protein, 15 aa, Homo sapiens
  CDR3 for beta chain variable domain of TCR clone 290437 (TRBV7-9, TRBJ1-6)
CASSPPGRGNSPLRF

SEQ ID NO: 580875 - protein, 11 aa, Homo sapiens
  CDR3 for alpha chain variable domain of TCR clone 290438 (TRAV8-6, TRAJ20)
CAVSYDYKLSL

SEQ ID NO: 580876 - protein, 14 aa, Homo sapiens
  CDR3 for beta chain variable domain of TCR clone 290438 (TRBV10-2, TRBJ2-2)
CASSERSNTGELFF

SEQ ID NO: 580877 - protein, 18 aa, Homo sapiens
  CDR3 for alpha chain variable domain of TCR clone 290439 (TRAV13-1, TRAJ52)
CAAKNPNAGGTSYGKLTF

SEQ ID NO: 580878 - protein, 11 aa, Homo sapiens
  CDR3 for beta chain variable domain of TCR clone 290439 (TRBV29-1, TRBJ2-5)
CSEDRAGTQYF

SEQ ID NO: 580879 - protein, 14 aa, Homo sapiens
  CDR3 for alpha chain variable domain of TCR clone 290440 (TRAV25, TRAJ6)
CAGRESGGSYIPTF

SEQ ID NO: 580880 - protein, 13 aa, Homo sapiens
  CDR3 for beta chain variable domain of TCR clone 290440 (TRBV4-2, TRBJ1-1)
CASSQAGNTEAFF

SEQ ID NO: 580881 - protein, 12 aa, Homo sapiens
  CDR3 for alpha chain variable domain of TCR clone 290441 (TRAV3, TRAJ43)
CAVRDPNNDMRF

SEQ ID NO: 580882 - protein, 11 aa, Homo sapiens
  CDR3 for beta chain variable domain of TCR clone 290441 (TRBV19, TRBJ2-5)
CASSIKETQYF

SEQ ID NO: 580883 - protein, 13 aa, Homo sapiens
  CDR3 for alpha chain variable domain of TCR clone 290442 (TRAV13-1, TRAJ5)
CAARVTGRSALTS

SEQ ID NO: 580884 - protein, 15 aa, Homo sapiens
  CDR3 for beta chain variable domain of TCR clone 290442 (TRBV7-9, TRBJ2-7)
CASSPGGGLTYEQYF

SEQ ID NO: 580885 - protein, 15 aa, Homo sapiens
  CDR3 for alpha chain variable domain of TCR clone 290443 (TRAV12-2, TRAJ52)
CAVTSGGSSYGKLTF

SEQ ID NO: 580886 - protein, 15 aa, Homo sapiens
  CDR3 for beta chain variable domain of TCR clone 290443 (TRBV7-2, TRBJ2-1)
CASSPGFISGNEQFF

SEQ ID NO: 580887 - protein, 13 aa, Homo sapiens
  CDR3 for alpha chain variable domain of TCR clone 290444 (TRAV1-1, TRAJ11)
CAVLNSGYSTLTF

SEQ ID NO: 580888 - protein, 15 aa, Homo sapiens
  CDR3 for beta chain variable domain of TCR clone 290444 (TRBV7-9, TRBJ1-1)
CASSLLEQGGTEAFF

SEQ ID NO: 580889 - protein, 18 aa, Homo sapiens
  CDR3 for alpha chain variable domain of TCR clone 290445 (TRAV17, TRAJ45)
CATSLDLYSGGGADGRTF

SEQ ID NO: 580890 - protein, 13 aa, Homo sapiens
  CDR3 for beta chain variable domain of TCR clone 290445 (TRBV10-3, TRBJ2-7)
CASKLAVNYEQYF

SEQ ID NO: 580891 - protein, 15 aa, Homo sapiens
  CDR3 for alpha chain variable domain of TCR clone 290446 (TRAV12-1, TRAJ15)
CVVARANQAGTALIF

SEQ ID NO: 580892 - protein, 14 aa, Homo sapiens
  CDR3 for beta chain variable domain of TCR clone 290446 (TRBV5-1, TRBJ1-1)
CSSSLVSINTEAFF

SEQ ID NO: 580893 - protein, 15 aa, Homo sapiens
  CDR3 for alpha chain variable domain of TCR clone 290447 (TRAV12-2, TRAJ53)
CAVNGGGGSNNKLTF

SEQ ID NO: 580894 - protein, 15 aa, Homo sapiens
  CDR3 for beta chain variable domain of TCR clone 290447 (TRBV27, TRBJ2-1)
CASSNGEGSSNEQFF

SEQ ID NO: 580895 - protein, 12 aa, Homo sapiens
  CDR3 for alpha chain variable domain of TCR clone 290448 (TRAV26-2, TRAJ47)
CILVEYGNKLVF

SEQ ID NO: 580896 - protein, 16 aa, Homo sapiens
  CDR3 for beta chain variable domain of TCR clone 290448 (TRBV18, TRBJ1-4)
CDSSPLVGDRAEKLFF

SEQ ID NO: 580897 - protein, 11 aa, Homo sapiens
  CDR3 for alpha chain variable domain of TCR clone 290449 (TRAV13-1, TRAJ15)
CAATPGTALIF

SEQ ID NO: 580898 - protein, 16 aa, Homo sapiens
  CDR3 for beta chain variable domain of TCR clone 290449 (TRBV13, TRBJ2-3)
CQQPLQGSGGGNTQYF

SEQ ID NO: 580899 - protein, 10 aa, Homo sapiens
  CDR3 for alpha chain variable domain of TCR clone 290450 (TRAV12-1, TRAJ37)
ARGNTGKLIF

SEQ ID NO: 580900 - protein, 17 aa, Homo sapiens
  CDR3 for beta chain variable domain of TCR clone 290450 (TRBV15, TRBJ1-2)
CATSGREIDVVNYGYTF

SEQ ID NO: 580901 - protein, 13 aa, Homo sapiens
  CDR3 for alpha chain variable domain of TCR clone 290451 (TRAV13-1, TRAJ39)
CAASIWAGNMLTF

SEQ ID NO: 580902 - protein, 16 aa, Homo sapiens
  CDR3 for beta chain variable domain of TCR clone 290451 (TRBV7-9, TRBJ2-1)
CASSDVAGGSYNKQFF

SEQ ID NO: 580903 - protein, 16 aa, Homo sapiens
  CDR3 for alpha chain variable domain of TCR clone 290452 (TRAV2, TRAJ32)
CAVEDGYGGATNKLIF

SEQ ID NO: 580904 - protein, 13 aa, Homo sapiens
  CDR3 for beta chain variable domain of TCR clone 290452 (TRBV7-9, TRBJ1-2)
CASSLKQNYGDTF

SEQ ID NO: 580905 - protein, 13 aa, Homo sapiens
  CDR3 for alpha chain variable domain of TCR clone 290453 (TRAV29/DV5, TRAJ31)
CAASRNNNARLMF

SEQ ID NO: 580906 - protein, 14 aa, Homo sapiens
  CDR3 for beta chain variable domain of TCR clone 290453 (TRBV24-1, TRBJ1-1)
CATSIPRGDTEAFF

SEQ ID NO: 580907 - protein, 16 aa, Homo sapiens
  CDR3 for alpha chain variable domain of TCR clone 290454 (TRAV21, TRAJ37)
CAVRTAGSSNTGKLIF

SEQ ID NO: 580908 - protein, 13 aa, Homo sapiens
  CDR3 for beta chain variable domain of TCR clone 290454 (TRBV7-9, TRBJ2-5)
CASLPTGRETQYF

SEQ ID NO: 580909 - protein, 14 aa, Homo sapiens
  CDR3 for alpha chain variable domain of TCR clone 290455 (TRAV21, TRAJ28)
CAVGSGAGSCQLTF

SEQ ID NO: 580910 - protein, 14 aa, Homo sapiens
  CDR3 for beta chain variable domain of TCR clone 290455 (TRBV6-1, TRBJ1-3)
CASVQGGGGNTIYF

SEQ ID NO: 580911 - protein, 15 aa, Homo sapiens
  CDR3 for alpha chain variable domain of TCR clone 290456 (TRAV17, TRAJ4)
CATGTWSGGYNKLFF

SEQ ID NO: 580912 - protein, 13 aa, Homo sapiens
  CDR3 for beta chain variable domain of TCR clone 290456 (TRBV6-6, TRBJ2-7)
CASSPKHLAEQYF

SEQ ID NO: 580913 - protein, 12 aa, Homo sapiens
  CDR3 for alpha chain variable domain of TCR clone 290457 (TRAV8-3, TRAJ26)
CAGDNYGQNFVF

SEQ ID NO: 580914 - protein, 18 aa, Homo sapiens
  CDR3 for beta chain variable domain of TCR clone 290457 (TRBV12-4, TRBJ2-2)
CASSLVAGTRGRTGELSF

SEQ ID NO: 580915 - protein, 10 aa, Homo sapiens
  CDR3 for alpha chain variable domain of TCR clone 290458 (TRAV8-1, TRAJ42)
CAVKWGNYGG

SEQ ID NO: 580916 - protein, 15 aa, Homo sapiens
  CDR3 for beta chain variable domain of TCR clone 290458 (TRBV9, TRBJ1-6)
CASSVAGTGDSPLHF

SEQ ID NO: 580917 - protein, 14 aa, Homo sapiens
  CDR3 for alpha chain variable domain of TCR clone 290459 (TRAV12-2, TRAJ17)
CAVNIKAAGNKLTF

SEQ ID NO: 580918 - protein, 15 aa, Homo sapiens
  CDR3 for beta chain variable domain of TCR clone 290459 (TRBV7-9, TRBJ1-5)
CASSQGHQPNQPQHF

SEQ ID NO: 580919 - protein, 15 aa, Homo sapiens
  CDR3 for alpha chain variable domain of TCR clone 290460 (TRAV23/DV6, TRAJ37)
CAAGEGTSNTGKLIF

SEQ ID NO: 580920 - protein, 17 aa, Homo sapiens
  CDR3 for beta chain variable domain of TCR clone 290460 (TRBV20-1, TRBJ2-7)
CSATRAGGVAGVEEQYF

SEQ ID NO: 580921 - protein, 14 aa, Homo sapiens
  CDR3 for alpha chain variable domain of TCR clone 290461 (TRAV1-2, TRAJ16)
CAVTRFSDGQKLLF

SEQ ID NO: 580922 - protein, 12 aa, Homo sapiens
  CDR3 for beta chain variable domain of TCR clone 290461 (TRBV20-1, TRBJ1-5)
CSAAGWDQPQHF

SEQ ID NO: 580923 - protein, 14 aa, Homo sapiens
  CDR3 for alpha chain variable domain of TCR clone 290462 (TRAV16, TRAJ15)
CALWPNQAGTALIF

SEQ ID NO: 580924 - protein, 16 aa, Homo sapiens
  CDR3 for beta chain variable domain of TCR clone 290462 (TRBV6-5, TRBJ2-2)
CASSYGRVPDTGELFF

SEQ ID NO: 580925 - protein, 14 aa, Homo sapiens
  CDR3 for alpha chain variable domain of TCR clone 290463 (TRAV21, TRAJ45)
CAVVSGGGTDGLTF

SEQ ID NO: 580926 - protein, 14 aa, Homo sapiens
  CDR3 for beta chain variable domain of TCR clone 290463 (TRBV20-1, TRBJ2-3)
CSALGLEGADTQYF

SEQ ID NO: 580927 - protein, 13 aa, Homo sapiens
  CDR3 for alpha chain variable domain of TCR clone 290464 (TRAV23/DV6, TRAJ5)
CAARAAGRRALTF

SEQ ID NO: 580928 - protein, 12 aa, Homo sapiens
  CDR3 for beta chain variable domain of TCR clone 290464 (TRBV29-1, TRBJ2-3)
CSVTGGADTQYF

SEQ ID NO: 580929 - protein, 12 aa, Homo sapiens
  CDR3 for alpha chain variable domain of TCR clone 290465 (TRAV13-2, TRAJ8)
CAPWLGFQKLGF

SEQ ID NO: 580930 - protein, 16 aa, Homo sapiens
  CDR3 for beta chain variable domain of TCR clone 290465 (TRBV5-1, TRBJ2-7)
CACSWEGLAGLYEQYF

SEQ ID NO: 580931 - protein, 13 aa, Homo sapiens
  CDR3 for alpha chain variable domain of TCR clone 290466 (TRAV8-3, TRAJ28)
CAVGAVVSYQLTF

SEQ ID NO: 580932 - protein, 15 aa, Homo sapiens
  CDR3 for beta chain variable domain of TCR clone 290466 (TRBV7-9, TRBJ1-5)
CASSQGHQPNQHQHF

SEQ ID NO: 580933 - protein, 13 aa, Homo sapiens
  CDR3 for alpha chain variable domain of TCR clone 290467 (TRAV13-1, TRAJ39)
CSKYSNEGNMLTF

SEQ ID NO: 580934 - protein, 16 aa, Homo sapiens
  CDR3 for beta chain variable domain of TCR clone 290467 (TRBV7-2, TRBJ2-3)
CASSLVALYSTDTQYF

SEQ ID NO: 580935 - protein, 12 aa, Homo sapiens
  CDR3 for alpha chain variable domain of TCR clone 290468 (TRAV30, TRAJ43)
CGTEERGNDMRF

SEQ ID NO: 580936 - protein, 13 aa, Homo sapiens
  CDR3 for beta chain variable domain of TCR clone 290468 (TRBV7-9, TRBJ2-3)
CARSPGSTDTQYF

SEQ ID NO: 580937 - protein, 13 aa, Homo sapiens
  CDR3 for alpha chain variable domain of TCR clone 290469 (TRAV12-3, TRAJ33)
CAMSVNSNYQSIW

SEQ ID NO: 580938 - protein, 16 aa, Homo sapiens
  CDR3 for beta chain variable domain of TCR clone 290469 (TRBV13, TRBJ2-5)
CASSLRTGGSWETQYF

SEQ ID NO: 580939 - protein, 10 aa, Homo sapiens
  CDR3 for alpha chain variable domain of TCR clone 290470 (TRAV29/DV5, TRAJ48)
CAAGGEKLTF

SEQ ID NO: 580940 - protein, 12 aa, Homo sapiens
  CDR3 for beta chain variable domain of TCR clone 290470 (TRBV24-1, TRBJ2-3)
CATSDSTDTQYF

SEQ ID NO: 580941 - protein, 12 aa, Homo sapiens
  CDR3 for alpha chain variable domain of TCR clone 290471 (TRAV13-1, TRAJ9)
CASHTGGYKTIF

SEQ ID NO: 580942 - protein, 18 aa, Homo sapiens
  CDR3 for beta chain variable domain of TCR clone 290471 (TRBV11-2, TRBJ2-3)
CASSLGGASRGAPNTQYF

SEQ ID NO: 580943 - protein, 14 aa, Homo sapiens
  CDR3 for alpha chain variable domain of TCR clone 290472 (TRAV36/DV7, TRAJ13)
WGSGDNGGYQKVTF

SEQ ID NO: 580944 - protein, 15 aa, Homo sapiens
  CDR3 for beta chain variable domain of TCR clone 290472 (TRBV19, TRBJ2-1)
CASSTGTSSYNEQFF

SEQ ID NO: 580945 - protein, 15 aa, Homo sapiens
  CDR3 for alpha chain variable domain of TCR clone 290473 (TRAV8-3, TRAJ45)
CASSYSGGGSDGLTF

SEQ ID NO: 580946 - protein, 12 aa, Homo sapiens
  CDR3 for beta chain variable domain of TCR clone 290473 (TRBV12-4, TRBJ2-7)
CASSLGGYEQYF

SEQ ID NO: 580947 - protein, 20 aa, Homo sapiens
  CDR3 for alpha chain variable domain of TCR clone 290474 (TRAV1-1, TRAJ4)
CLLLLRCEGFLSGGYNKLIF

SEQ ID NO: 580948 - protein, 12 aa, Homo sapiens
  CDR3 for beta chain variable domain of TCR clone 290474 (TRBV11-2, TRBJ2-2)
CAGSLGGGELFF

SEQ ID NO: 580949 - protein, 13 aa, Homo sapiens
  CDR3 for alpha chain variable domain of TCR clone 290475 (TRAV25, TRAJ17)
CAGLRAAGNKLTF

SEQ ID NO: 580950 - protein, 14 aa, Homo sapiens
  CDR3 for beta chain variable domain of TCR clone 290475 (TRBV7-9, TRBJ2-1)
CASSPRDSLYEQFF

SEQ ID NO: 580951 - protein, 10 aa, Homo sapiens
  CDR3 for alpha chain variable domain of TCR clone 290476 (TRAV36/DV7, TRAJ38)
CAANNRKLIW

SEQ ID NO: 580952 - protein, 15 aa, Homo sapiens
  CDR3 for beta chain variable domain of TCR clone 290476 (TRBV9, TRBJ1-6)
CASSVAGTGDSPLHF

SEQ ID NO: 580953 - protein, 18 aa, Homo sapiens
  CDR3 for alpha chain variable domain of TCR clone 290477 (TRAV29/DV5, TRAJ52)
FAAGFRGAGGTSYGKLIF

SEQ ID NO: 580954 - protein, 16 aa, Homo sapiens
  CDR3 for beta chain variable domain of TCR clone 290477 (TRBV20-1, TRBJ1-4)
CSAPGQGLLTNEKLFF

SEQ ID NO: 580955 - protein, 13 aa, Homo sapiens
  CDR3 for alpha chain variable domain of TCR clone 290478 (TRAV8-3, TRAJ28)
CAVGAVGSYQLTF

SEQ ID NO: 580956 - protein, 14 aa, Homo sapiens
  CDR3 for beta chain variable domain of TCR clone 290478 (TRBV7-2, TRBJ2-7)
CASRSQGAAYEQDF

SEQ ID NO: 580957 - protein, 13 aa, Homo sapiens
  CDR3 for alpha chain variable domain of TCR clone 290479 (TRAV35, TRAJ48)
CAGHEFGNEKLPF

SEQ ID NO: 580958 - protein, 16 aa, Homo sapiens
  CDR3 for beta chain variable domain of TCR clone 290479 (TRBV12-5, TRBJ2-5)
CASGPRTSGNQETQYF

SEQ ID NO: 580959 - protein, 12 aa, Homo sapiens
  CDR3 for alpha chain variable domain of TCR clone 290480 (TRAV21, TRAJ58)
CAAETSGSRLPF

SEQ ID NO: 580960 - protein, 15 aa, Homo sapiens
  CDR3 for beta chain variable domain of TCR clone 290480 (TRBV20-1, TRBJ2-7)
CSARDPVKGEGEQYF

SEQ ID NO: 580961 - protein, 15 aa, Homo sapiens
  CDR3 for alpha chain variable domain of TCR clone 290481 (TRAV27, TRAJ38)
CAGRFNAGNNRKLIW

SEQ ID NO: 580962 - protein, 13 aa, Homo sapiens
  CDR3 for beta chain variable domain of TCR clone 290481 (TRBV20-1, TRBJ1-1)
CSAGVGGNTEAFF

SEQ ID NO: 580963 - protein, 11 aa, Homo sapiens
  CDR3 for alpha chain variable domain of TCR clone 290482 (TRAV17, TRAJ9)
CATTGGFKTIF

SEQ ID NO: 580964 - protein, 14 aa, Homo sapiens
  CDR3 for beta chain variable domain of TCR clone 290482 (TRBV19, TRBJ2-2)
CASSTLHRSGELFF

SEQ ID NO: 580965 - protein, 12 aa, Homo sapiens
  CDR3 for alpha chain variable domain of TCR clone 290483 (TRAV12-1, TRAJ15)
CVVNQAGTALIF

SEQ ID NO: 580966 - protein, 15 aa, Homo sapiens
  CDR3 for beta chain variable domain of TCR clone 290483 (TRBV10-2, TRBJ2-6)
CASSEQGTGANALTF

SEQ ID NO: 580967 - protein, 14 aa, Homo sapiens
  CDR3 for alpha chain variable domain of TCR clone 290484 (TRAV12-2, TRAJ40)
CAVKIPSGTYKYIF

SEQ ID NO: 580968 - protein, 20 aa, Homo sapiens
  CDR3 for beta chain variable domain of TCR clone 290484 (TRBV28, TRBJ2-5)
CASSFPRQGAGRPSTSSQAR

SEQ ID NO: 580969 - protein, 18 aa, Homo sapiens
  CDR3 for alpha chain variable domain of TCR clone 290485 (TRAV21, TRAJ52)
CAVRPSPAGGTSYGKLTF

SEQ ID NO: 580970 - protein, 17 aa, Homo sapiens
  CDR3 for beta chain variable domain of TCR clone 290485 (TRBV14, TRBJ2-1)
CASSQDRRVTSYNEQFF

SEQ ID NO: 580971 - protein, 13 aa, Homo sapiens
  CDR3 for alpha chain variable domain of TCR clone 290486 (TRAV21, TRAJ27)
CAARPGTAGKSTF

SEQ ID NO: 580972 - protein, 14 aa, Homo sapiens
  CDR3 for beta chain variable domain of TCR clone 290486 (TRBV7-6, TRBJ2-3)
CAGSLGTVTDTQYF

SEQ ID NO: 580973 - protein, 12 aa, Homo sapiens
  CDR3 for alpha chain variable domain of TCR clone 290487 (TRAV2, TRAJ34)
CAVEGNTDKLIF

SEQ ID NO: 580974 - protein, 14 aa, Homo sapiens
  CDR3 for beta chain variable domain of TCR clone 290487 (TRBV7-9, TRBJ2-1)
CASGDNSGYNEQFF

SEQ ID NO: 580975 - protein, 13 aa, Homo sapiens
  CDR3 for alpha chain variable domain of TCR clone 290488 (TRAV1-2, TRAJ9)
CAALNTGGFKTIF

SEQ ID NO: 580976 - protein, 15 aa, Homo sapiens
  CDR3 for beta chain variable domain of TCR clone 290488 (TRBV4-3, TRBJ2-7)
CASSQGDWGDYEQYF

SEQ ID NO: 580977 - protein, 15 aa, Homo sapiens
  CDR3 for alpha chain variable domain of TCR clone 290489 (TRAV25, TRAJ10)
CAGPLLTGGGNKLTF

SEQ ID NO: 580978 - protein, 15 aa, Homo sapiens
  CDR3 for beta chain variable domain of TCR clone 290489 (TRBV12-5, TRBJ2-2)
CASGCLGGNTGELFF

SEQ ID NO: 580979 - protein, 12 aa, Homo sapiens
  CDR3 for alpha chain variable domain of TCR clone 290490 (TRAV30, TRAJ43)
RGTEERGNDMRF

SEQ ID NO: 580980 - protein, 11 aa, Homo sapiens
  CDR3 for beta chain variable domain of TCR clone 290490 (TRBV29-1, TRBJ2-5)
CSEDRTGTQYF

SEQ ID NO: 580981 - protein, 15 aa, Homo sapiens
  CDR3 for alpha chain variable domain of TCR clone 290491 (TRAV14/DV4, TRAJ22)
CNERGPPGSARQLTF

SEQ ID NO: 580982 - protein, 16 aa, Homo sapiens
  CDR3 for beta chain variable domain of TCR clone 290491 (TRBV19, TRBJ1-6)
CASSVAPVAGNSTLHF

SEQ ID NO: 580983 - protein, 14 aa, Homo sapiens
  CDR3 for alpha chain variable domain of TCR clone 290492 (TRAV12-2, TRAJ17)
CAVNIKAAGNKLTF

SEQ ID NO: 580984 - protein, 16 aa, Homo sapiens
  CDR3 for beta chain variable domain of TCR clone 290492 (TRBV20-1, TRBJ2-6)
CNASSQGYDGANVLTF

SEQ ID NO: 580985 - protein, 11 aa, Homo sapiens
  CDR3 for alpha chain variable domain of TCR clone 290493 (TRAV8-3, TRAJ15)
CAVGPGTALIF

SEQ ID NO: 580986 - protein, 18 aa, Homo sapiens
  CDR3 for beta chain variable domain of TCR clone 290493 (TRBV18, TRBJ2-3)
CDSSYTSGAAGGTDTQYF

SEQ ID NO: 580987 - protein, 13 aa, Homo sapiens
  CDR3 for alpha chain variable domain of TCR clone 290494 (TRAV17, TRAJ26)
CATVDNYGQNFVF

SEQ ID NO: 580988 - protein, 16 aa, Homo sapiens
  CDR3 for beta chain variable domain of TCR clone 290494 (TRBV19, TRBJ2-1)
CSSSKAGPSSYNEQFF

SEQ ID NO: 580989 - protein, 18 aa, Homo sapiens
  CDR3 for alpha chain variable domain of TCR clone 290495 (TRAV8-4, TRAJ52)
CAVTRANAGGTSNGKLTF

SEQ ID NO: 580990 - protein, 14 aa, Homo sapiens
  CDR3 for beta chain variable domain of TCR clone 290495 (TRBV19, TRBJ1-5)
CASGTEVYNQPQHF

SEQ ID NO: 580991 - protein, 14 aa, Homo sapiens
  CDR3 for alpha chain variable domain of TCR clone 290496 (TRAV12-2, TRAJ17)
CAVLFKAAGNKLTF

SEQ ID NO: 580992 - protein, 17 aa, Homo sapiens
  CDR3 for beta chain variable domain of TCR clone 290496 (TRBV20-1, TRBJ2-2)
CSPSGSGQGGLTGELFF

SEQ ID NO: 580993 - protein, 12 aa, Homo sapiens
  CDR3 for alpha chain variable domain of TCR clone 290497 (TRAV13-1, TRAJ48)
CAANFGNEKLTF

SEQ ID NO: 580994 - protein, 13 aa, Homo sapiens
  CDR3 for beta chain variable domain of TCR clone 290497 (TRBV11-2, TRBJ2-5)
CASSSTTQETQYF

SEQ ID NO: 580995 - protein, 18 aa, Homo sapiens
  CDR3 for alpha chain variable domain of TCR clone 290498 (TRAV16, TRAJ52)
CALSGVDAGGTSYGKLTF

SEQ ID NO: 580996 - protein, 17 aa, Homo sapiens
  CDR3 for beta chain variable domain of TCR clone 290498 (TRBV13, TRBJ2-3)
CASSLSRVAGGRNTQYF

SEQ ID NO: 580997 - protein, 18 aa, Homo sapiens
  CDR3 for alpha chain variable domain of TCR clone 290499 (TRAV1-2, TRAJ18)
CAVRDMGDRGSTLGSLYF

SEQ ID NO: 580998 - protein, 16 aa, Homo sapiens
  CDR3 for beta chain variable domain of TCR clone 290499 (TRBV29-1, TRBJ1-2)
CSVEANRDIANYGYTF

SEQ ID NO: 580999 - protein, 16 aa, Homo sapiens
  CDR3 for alpha chain variable domain of TCR clone 290500 (TRAV30, TRAJ24)
CGTEIVDADSWGKFQF

SEQ ID NO: 581000 - protein, 14 aa, Homo sapiens
  CDR3 for beta chain variable domain of TCR clone 290500 (TRBV9, TRBJ2-7)
CASSVCVGSYEQYF

SEQ ID NO: 581001 - protein, 14 aa, Homo sapiens
  CDR3 for alpha chain variable domain of TCR clone 290501 (TRAV12-3, TRAJ10)
SHLPLTGGGNKLTF

SEQ ID NO: 581002 - protein, 15 aa, Homo sapiens
  CDR3 for beta chain variable domain of TCR clone 290501 (TRBV29-1, TRBJ2-6)
CSVGDRSSGANVLTF

SEQ ID NO: 581003 - protein, 13 aa, Homo sapiens
  CDR3 for alpha chain variable domain of TCR clone 290502 (TRAV8-6, TRAJ49)
CAVITNTGNQFYF

SEQ ID NO: 581004 - protein, 17 aa, Homo sapiens
  CDR3 for beta chain variable domain of TCR clone 290502 (TRBV20-1, TRBJ2-1)
CSAPPRLAGTRYNEQFF

SEQ ID NO: 581005 - protein, 14 aa, Homo sapiens
  CDR3 for alpha chain variable domain of TCR clone 290503 (TRAV17, TRAJ5)
CATDRDTGRRALTF

SEQ ID NO: 581006 - protein, 14 aa, Homo sapiens
  CDR3 for beta chain variable domain of TCR clone 290503 (TRBV7-2, TRBJ2-7)
CASRSQGAAYEQYF

SEQ ID NO: 581007 - protein, 14 aa, Homo sapiens
  CDR3 for alpha chain variable domain of TCR clone 290504 (TRAV26-1, TRAJ57)
CTRAGQGGSEKLVF

SEQ ID NO: 581008 - protein, 13 aa, Homo sapiens
  CDR3 for beta chain variable domain of TCR clone 290504 (TRBV19, TRBJ2-7)
CASSLTTSYEQYF

SEQ ID NO: 581009 - protein, 20 aa, Homo sapiens
  CDR3 for alpha chain variable domain of TCR clone 290505 (TRAV27, TRAJ10)
ASTSVPSRGILTGGGNQLTF

SEQ ID NO: 581010 - protein, 15 aa, Homo sapiens
  CDR3 for beta chain variable domain of TCR clone 290505 (TRBV9, TRBJ2-3)
CASSLEGGLTDTQYF

SEQ ID NO: 581011 - protein, 14 aa, Homo sapiens
  CDR3 for alpha chain variable domain of TCR clone 290506 (TRAV21, TRAJ35)
CAVMPIGFGNVLHC

SEQ ID NO: 581012 - protein, 13 aa, Homo sapiens
  CDR3 for beta chain variable domain of TCR clone 290506 (TRBV9, TRBJ2-1)
CASSPSGGNEQFF

SEQ ID NO: 581013 - protein, 14 aa, Homo sapiens
  CDR3 for alpha chain variable domain of TCR clone 290507 (TRAV12-3, TRAJ10)
SHLPLTGGGNKLTF

SEQ ID NO: 581014 - protein, 15 aa, Homo sapiens
  CDR3 for beta chain variable domain of TCR clone 290507 (TRBV28, TRBJ2-1)
CASSIMAGGRSEQFF

SEQ ID NO: 581015 - protein, 13 aa, Homo sapiens
  CDR3 for alpha chain variable domain of TCR clone 290508 (TRAV13-2, TRAJ49)
CAETLHGGNQFYF

SEQ ID NO: 581016 - protein, 13 aa, Homo sapiens
  CDR3 for beta chain variable domain of TCR clone 290508 (TRBV19, TRBJ1-2)
CASSVPGQDGYTF

SEQ ID NO: 581017 - protein, 11 aa, Homo sapiens
  CDR3 for alpha chain variable domain of TCR clone 290509 (TRAV2, TRAJ33)
CAVESNYQLIW

SEQ ID NO: 581018 - protein, 16 aa, Homo sapiens
  CDR3 for beta chain variable domain of TCR clone 290509 (TRBV7-3, TRBJ2-1)
CASSKPLAGGYNEQFF

SEQ ID NO: 581019 - protein, 14 aa, Homo sapiens
  CDR3 for alpha chain variable domain of TCR clone 290510 (TRAV12-3, TRAJ10)
SHLPLTGGGNKLTF

SEQ ID NO: 581020 - protein, 13 aa, Homo sapiens
  CDR3 for beta chain variable domain of TCR clone 290510 (TRBV7-9, TRBJ2-3)
CASSPGTTDTQYF

SEQ ID NO: 581021 - protein, 15 aa, Homo sapiens
  CDR3 for alpha chain variable domain of TCR clone 290511 (TRAV2, TRAJ9)
CAVAALNTGGFKTIF

SEQ ID NO: 581022 - protein, 12 aa, Homo sapiens
  CDR3 for beta chain variable domain of TCR clone 290511 (TRBV14, TRBJ1-1)
CASIQLKGLAFF

SEQ ID NO: 581023 - protein, 14 aa, Homo sapiens
  CDR3 for alpha chain variable domain of TCR clone 290512 (TRAV26-2, TRAJ54)
CILSRIQGAQKLVF

SEQ ID NO: 581024 - protein, 14 aa, Homo sapiens
  CDR3 for beta chain variable domain of TCR clone 290512 (TRBV7-8, TRBJ2-7)
CASSPGLADYEQYF

SEQ ID NO: 581025 - protein, 13 aa, Homo sapiens
  CDR3 for alpha chain variable domain of TCR clone 290513 (TRAV12-2, TRAJ26)
CAVTDLYGQNFVF

SEQ ID NO: 581026 - protein, 12 aa, Homo sapiens
  CDR3 for beta chain variable domain of TCR clone 290513 (TRBV18, TRBJ2-7)
CASAYVGGEQYF

SEQ ID NO: 581027 - protein, 15 aa, Homo sapiens
  CDR3 for alpha chain variable domain of TCR clone 290514 (TRAV12-3, TRAJ6)
CAMSATTGGSYIPTF

SEQ ID NO: 581028 - protein, 14 aa, Homo sapiens
  CDR3 for beta chain variable domain of TCR clone 290514 (TRBV6-5, TRBJ1-2)
CASSCSGQGGGYTF

SEQ ID NO: 581029 - protein, 17 aa, Homo sapiens
  CDR3 for alpha chain variable domain of TCR clone 290515 (TRAV3, TRAJ6)
CAVSDGPRAGGSKIHTF

SEQ ID NO: 581030 - protein, 20 aa, Homo sapiens
  CDR3 for beta chain variable domain of TCR clone 290515 (TRBV7-8, TRBJ2-2)
CASSHLFPGPTIHITGELFF

SEQ ID NO: 581031 - protein, 15 aa, Homo sapiens
  CDR3 for alpha chain variable domain of TCR clone 290516 (TRAV3, TRAJ3)
CAVRDRDRSASKIIF

SEQ ID NO: 581032 - protein, 15 aa, Homo sapiens
  CDR3 for beta chain variable domain of TCR clone 290516 (TRBV29-1, TRBJ2-7)
CSVEFFDRGSYEQYF

SEQ ID NO: 581033 - protein, 13 aa, Homo sapiens
  CDR3 for alpha chain variable domain of TCR clone 290517 (TRAV8-3, TRAJ34)
CAVGPYNTDKLIF

SEQ ID NO: 581034 - protein, 17 aa, Homo sapiens
  CDR3 for beta chain variable domain of TCR clone 290517 (TRBV11-1, TRBJ2-7)
CASSLTGSFGLDYEQYF

SEQ ID NO: 581035 - protein, 11 aa, Homo sapiens
  CDR3 for alpha chain variable domain of TCR clone 290518 (TRAV1-2, TRAJ11)
CAVRGYSTLTF

SEQ ID NO: 581036 - protein, 18 aa, Homo sapiens
  CDR3 for beta chain variable domain of TCR clone 290518 (TRBV20-1, TRBJ2-6)
CSADTTPTHGSGANVLTF

SEQ ID NO: 581037 - protein, 12 aa, Homo sapiens
  CDR3 for alpha chain variable domain of TCR clone 290519 (TRAV13-2, TRAJ23)
CAERHRVGKLIL

SEQ ID NO: 581038 - protein, 16 aa, Homo sapiens
  CDR3 for beta chain variable domain of TCR clone 290519 (TRBV20-1, TRBJ1-4)
CSAPGQGLLTNEKLFF

SEQ ID NO: 581039 - protein, 15 aa, Homo sapiens
  CDR3 for alpha chain variable domain of TCR clone 290520 (TRAV27, TRAJ38)
CAARRNAGNNRKLIW

SEQ ID NO: 581040 - protein, 14 aa, Homo sapiens
  CDR3 for beta chain variable domain of TCR clone 290520 (TRBV20-1, TRBJ2-3)
CSARDGVGTDTQYF

SEQ ID NO: 581041 - protein, 15 aa, Homo sapiens
  CDR3 for alpha chain variable domain of TCR clone 290521 (TRAV13-1, TRAJ16)
CAARYQMARSCSLQG

SEQ ID NO: 581042 - protein, 13 aa, Homo sapiens
  CDR3 for beta chain variable domain of TCR clone 290521 (TRBV4-1, TRBJ2-1)
CAGSQAGGDEQFF

SEQ ID NO: 581043 - protein, 13 aa, Homo sapiens
  CDR3 for alpha chain variable domain of TCR clone 290522 (TRAV2, TRAJ40)
CAVVTSGTYKYIF

SEQ ID NO: 581044 - protein, 14 aa, Homo sapiens
  CDR3 for beta chain variable domain of TCR clone 290522 (TRBV19, TRBJ2-1)
CASPTFILSGGQFF

SEQ ID NO: 581045 - protein, 12 aa, Homo sapiens
  CDR3 for alpha chain variable domain of TCR clone 290523 (TRAV12-1, TRAJ23)
CVVNIPGGKLIF

SEQ ID NO: 581046 - protein, 15 aa, Homo sapiens
  CDR3 for beta chain variable domain of TCR clone 290523 (TRBV7-2, TRBJ2-7)
CASSVVSSGSYEQYF

SEQ ID NO: 581047 - protein, 14 aa, Homo sapiens
  CDR3 for alpha chain variable domain of TCR clone 290524 (TRAV1-2, TRAJ8)
CSVREDTGFQKLVF

SEQ ID NO: 581048 - protein, 12 aa, Homo sapiens
  CDR3 for beta chain variable domain of TCR clone 290524 (TRBV24-1, TRBJ1-1)
CATLYPDTEAFF

SEQ ID NO: 581049 - protein, 16 aa, Homo sapiens
  CDR3 for alpha chain variable domain of TCR clone 290525 (TRAV30, TRAJ24)
CGTEIVDADSWGKFQF

SEQ ID NO: 581050 - protein, 14 aa, Homo sapiens
  CDR3 for beta chain variable domain of TCR clone 290525 (TRBV7-8, TRBJ1-2)
CASSQTGSTYGYTF

SEQ ID NO: 581051 - protein, 11 aa, Homo sapiens
  CDR3 for alpha chain variable domain of TCR clone 290526 (TRAV27, TRAJ47)
SIVEYGNKLFF

SEQ ID NO: 581052 - protein, 18 aa, Homo sapiens
  CDR3 for beta chain variable domain of TCR clone 290526 (TRBV2, TRBJ2-1)
CASRGLAGGPRTYNKQFF

SEQ ID NO: 581053 - protein, 15 aa, Homo sapiens
  CDR3 for alpha chain variable domain of TCR clone 290527 (TRAV38-1, TRAJ57)
CAFMDSQGGSEKLVF

SEQ ID NO: 581054 - protein, 13 aa, Homo sapiens
  CDR3 for beta chain variable domain of TCR clone 290527 (TRBV24-1, TRBJ2-2)
CATSDWSTGELFF

SEQ ID NO: 581055 - protein, 14 aa, Homo sapiens
  CDR3 for alpha chain variable domain of TCR clone 290528 (TRAV12-1, TRAJ34)
CVVNLDYNTDKLIF

SEQ ID NO: 581056 - protein, 13 aa, Homo sapiens
  CDR3 for beta chain variable domain of TCR clone 290528 (TRBV7-9, TRBJ2-7)
CASSFAGAYEQYF

SEQ ID NO: 581057 - protein, 19 aa, Homo sapiens
  CDR3 for alpha chain variable domain of TCR clone 290529 (TRAV2, TRAJ20)
ILQVGEADAAVYRDCKLSF

SEQ ID NO: 581058 - protein, 12 aa, Homo sapiens
  CDR3 for beta chain variable domain of TCR clone 290529 (TRBV11-2, TRBJ2-2)
CASSLGGGELFF

SEQ ID NO: 581059 - protein, 14 aa, Homo sapiens
  CDR3 for alpha chain variable domain of TCR clone 290530 (TRAV12-2, TRAJ13)
CAVKKTGGYQKVTF

SEQ ID NO: 581060 - protein, 15 aa, Homo sapiens
  CDR3 for beta chain variable domain of TCR clone 290530 (TRBV19, TRBJ1-6)
CASSTQGAVCSPLHF

SEQ ID NO: 581061 - protein, 13 aa, Homo sapiens
  CDR3 for alpha chain variable domain of TCR clone 290531 (TRAV8-3, TRAJ12)
WVLRMDSSYKLIF

SEQ ID NO: 581062 - protein, 16 aa, Homo sapiens
  CDR3 for beta chain variable domain of TCR clone 290531 (TRBV6-1, TRBJ2-2)
CASSAFRGGDTGELFF

SEQ ID NO: 581063 - protein, 13 aa, Homo sapiens
  CDR3 for alpha chain variable domain of TCR clone 290532 (TRAV1-2, TRAJ9)
CAALNTGGFKTIF

SEQ ID NO: 581064 - protein, 13 aa, Homo sapiens
  CDR3 for beta chain variable domain of TCR clone 290532 (TRBV11-3, TRBJ2-3)
CASSHDTKDTQYF

SEQ ID NO: 581065 - protein, 14 aa, Homo sapiens
  CDR3 for alpha chain variable domain of TCR clone 290533 (TRAV26-1, TRAJ44)
CIVKSTGTASKLNF

SEQ ID NO: 581066 - protein, 15 aa, Homo sapiens
  CDR3 for beta chain variable domain of TCR clone 290533 (TRBV19, TRBJ2-4)
CASSDGGGAKNIQYF

SEQ ID NO: 581067 - protein, 15 aa, Homo sapiens
  CDR3 for alpha chain variable domain of TCR clone 290534 (TRAV2, TRAJ9)
CAVEDRGTGGFKTIF

SEQ ID NO: 581068 - protein, 18 aa, Homo sapiens
  CDR3 for beta chain variable domain of TCR clone 290534 (TRBV10-3, TRBJ2-3)
CAISESRVGPMRGDTQYF

SEQ ID NO: 581069 - protein, 15 aa, Homo sapiens
  CDR3 for alpha chain variable domain of TCR clone 290535 (TRAV3, TRAJ22)
CAVRDRGGSARQLTF

SEQ ID NO: 581070 - protein, 14 aa, Homo sapiens
  CDR3 for beta chain variable domain of TCR clone 290535 (TRBV4-1, TRBJ1-1)
CASSPKAGNTEAFF

SEQ ID NO: 581071 - protein, 14 aa, Homo sapiens
  CDR3 for alpha chain variable domain of TCR clone 290536 (TRAV1-2, TRAJ8)
CTVREDTGFQKLVF

SEQ ID NO: 581072 - protein, 13 aa, Homo sapiens
  CDR3 for beta chain variable domain of TCR clone 290536 (TRBV7-3, TRBJ2-1)
CASSLDSYNEQFF

SEQ ID NO: 581073 - protein, 15 aa, Homo sapiens
  CDR3 for alpha chain variable domain of TCR clone 290537 (TRAV21, TRAJ53)
CATLNSGGSNYKLTF

SEQ ID NO: 581074 - protein, 16 aa, Homo sapiens
  CDR3 for beta chain variable domain of TCR clone 290537 (TRBV10-3, TRBJ2-1)
CAIRGGGRVDYNEQFF

SEQ ID NO: 581075 - protein, 14 aa, Homo sapiens
  CDR3 for alpha chain variable domain of TCR clone 290538 (TRAV13-1, TRAJ44)
CAAKATGTASKLTF

SEQ ID NO: 581076 - protein, 14 aa, Homo sapiens
  CDR3 for beta chain variable domain of TCR clone 290538 (TRBV19, TRBJ2-5)
CASSMTGQQETQYF

SEQ ID NO: 581077 - protein, 17 aa, Homo sapiens
  CDR3 for alpha chain variable domain of TCR clone 290539 (TRAV12-2, TRAJ48)
CASNEKLTFGTGTRLTI

SEQ ID NO: 581078 - protein, 16 aa, Homo sapiens
  CDR3 for beta chain variable domain of TCR clone 290539 (TRBV7-2, TRBJ2-6)
CASSLAGRSGANVLTF

SEQ ID NO: 581079 - protein, 16 aa, Homo sapiens
  CDR3 for alpha chain variable domain of TCR clone 290540 (TRAV21, TRAJ58)
CAVRGDRETSGSRLTF

SEQ ID NO: 581080 - protein, 12 aa, Homo sapiens
  CDR3 for beta chain variable domain of TCR clone 290540 (TRBV19, TRBJ2-3)
CASAGGADTPYF

SEQ ID NO: 581081 - protein, 15 aa, Homo sapiens
  CDR3 for alpha chain variable domain of TCR clone 290541 (TRAV8-3, TRAJ3)
CAVAHSGSSASKIIF

SEQ ID NO: 581082 - protein, 13 aa, Homo sapiens
  CDR3 for beta chain variable domain of TCR clone 290541 (TRBV10-3, TRBJ1-2)
CAISERDSYGYTF

SEQ ID NO: 581083 - protein, 14 aa, Homo sapiens
  CDR3 for alpha chain variable domain of TCR clone 290542 (TRAV14/DV4, TRAJ27)
CAMRGNTNAGKSTF

SEQ ID NO: 581084 - protein, 12 aa, Homo sapiens
  CDR3 for beta chain variable domain of TCR clone 290542 (TRBV7-9, TRBJ2-7)
CASSFGSYEQYF

SEQ ID NO: 581085 - protein, 15 aa, Homo sapiens
  CDR3 for alpha chain variable domain of TCR clone 290543 (TRAV17, TRAJ57)
CATGPSQGGSEKLVF

SEQ ID NO: 581086 - protein, 15 aa, Homo sapiens
  CDR3 for beta chain variable domain of TCR clone 290543 (TRBV9, TRBJ1-6)
CASSVAGTVDSPLHF

SEQ ID NO: 581087 - protein, 13 aa, Homo sapiens
  CDR3 for alpha chain variable domain of TCR clone 290544 (TRAV13-1, TRAJ9)
CAASGTGGFKTIF

SEQ ID NO: 581088 - protein, 17 aa, Homo sapiens
  CDR3 for beta chain variable domain of TCR clone 290544 (TRBV15, TRBJ1-5)
CATSRAPPGTRNQPQHF

SEQ ID NO: 581089 - protein, 12 aa, Homo sapiens
  CDR3 for alpha chain variable domain of TCR clone 290545 (TRAV12-3, TRAJ17)
CAMPLTGNKLTF

SEQ ID NO: 581090 - protein, 15 aa, Homo sapiens
  CDR3 for beta chain variable domain of TCR clone 290545 (TRBV19, TRBJ2-1)
CASSILGEGRNEQFF

SEQ ID NO: 581091 - protein, 14 aa, Homo sapiens
  CDR3 for alpha chain variable domain of TCR clone 290546 (TRAV35, TRAJ13)
CAGRSPGGYKKVTF

SEQ ID NO: 581092 - protein, 15 aa, Homo sapiens
  CDR3 for beta chain variable domain of TCR clone 290546 (TRBV19, TRBJ2-4)
CASRGPRRGENIQYF

SEQ ID NO: 581093 - protein, 16 aa, Homo sapiens
  CDR3 for alpha chain variable domain of TCR clone 290547 (TRAV8-3, TRAJ13)
CAVGAYPSGGYQKVTF

SEQ ID NO: 581094 - protein, 14 aa, Homo sapiens
  CDR3 for beta chain variable domain of TCR clone 290547 (TRBV18, TRBJ2-5)
CASSPRASSESQYF

SEQ ID NO: 581095 - protein, 15 aa, Homo sapiens
  CDR3 for alpha chain variable domain of TCR clone 290548 (TRAV8-4, TRAJ3)
CAVSDPYSSASKIIF

SEQ ID NO: 581096 - protein, 14 aa, Homo sapiens
  CDR3 for beta chain variable domain of TCR clone 290548 (TRBV12-5, TRBJ2-5)
CASGSRTHQETQYF

SEQ ID NO: 581097 - protein, 10 aa, Homo sapiens
  CDR3 for alpha chain variable domain of TCR clone 290549 (TRAV26-1, TRAJ54)
SAVGAQKLVF

SEQ ID NO: 581098 - protein, 14 aa, Homo sapiens
  CDR3 for beta chain variable domain of TCR clone 290549 (TRBV11-2, TRBJ1-2)
CASSSGQAGDGYTF

SEQ ID NO: 581099 - protein, 13 aa, Homo sapiens
  CDR3 for alpha chain variable domain of TCR clone 290550 (TRAV12-1, TRAJ43)
CGERSKQYNDMRF

SEQ ID NO: 581100 - protein, 13 aa, Homo sapiens
  CDR3 for beta chain variable domain of TCR clone 290550 (TRBV10-3, TRBJ2-7)
CASKLAVNYEQYF

SEQ ID NO: 581101 - protein, 13 aa, Homo sapiens
  CDR3 for alpha chain variable domain of TCR clone 290551 (TRAV21, TRAJ27)
CAALNTNAGKSTF

SEQ ID NO: 581102 - protein, 13 aa, Homo sapiens
  CDR3 for beta chain variable domain of TCR clone 290551 (TRBV27, TRBJ1-1)
CQSLLSGLSEAFF

SEQ ID NO: 581103 - protein, 16 aa, Homo sapiens
  CDR3 for alpha chain variable domain of TCR clone 290552 (TRAV12-2, TRAJ28)
CAVTPSSGAGSYQLTF

SEQ ID NO: 581104 - protein, 13 aa, Homo sapiens
  CDR3 for beta chain variable domain of TCR clone 290552 (TRBV19, TRBJ1-2)
CASSVPGQDGYTF

SEQ ID NO: 581105 - protein, 11 aa, Homo sapiens
  CDR3 for alpha chain variable domain of TCR clone 290553 (TRAV3, TRAJ21)
CAVGNFNKFYF

SEQ ID NO: 581106 - protein, 16 aa, Homo sapiens
  CDR3 for beta chain variable domain of TCR clone 290553 (TRBV19, TRBJ2-1)
WASSKEGPSSYNEQFF

SEQ ID NO: 581107 - protein, 11 aa, Homo sapiens
  CDR3 for alpha chain variable domain of TCR clone 290554 (TRAV12-2, TRAJ21)
CAVEGFNKFYF

SEQ ID NO: 581108 - protein, 15 aa, Homo sapiens
  CDR3 for beta chain variable domain of TCR clone 290554 (TRBV20-1, TRBJ1-5)
CSAIRRGDLGQPQHF

SEQ ID NO: 581109 - protein, 14 aa, Homo sapiens
  CDR3 for alpha chain variable domain of TCR clone 290555 (TRAV3, TRAJ9)
CAVRLNTGGFKTIF

SEQ ID NO: 581110 - protein, 14 aa, Homo sapiens
  CDR3 for beta chain variable domain of TCR clone 290555 (TRBV11-2, TRBJ1-2)
CASSLGTASYGYTF

SEQ ID NO: 581111 - protein, 12 aa, Homo sapiens
  CDR3 for alpha chain variable domain of TCR clone 290556 (TRAV8-3, TRAJ26)
CAGDNYGQNFVF

SEQ ID NO: 581112 - protein, 20 aa, Homo sapiens
  CDR3 for beta chain variable domain of TCR clone 290556 (TRBV28, TRBJ2-1)
CAFTPIGRSPGLAGGNEQFF

SEQ ID NO: 581113 - protein, 11 aa, Homo sapiens
  CDR3 for alpha chain variable domain of TCR clone 290557 (TRAV1-1, TRAJ23)
CAVRQGGKLIF

SEQ ID NO: 581114 - protein, 20 aa, Homo sapiens
  CDR3 for beta chain variable domain of TCR clone 290557 (TRBV7-8, TRBJ2-2)
CASSHLVPGPTIRITGELFF

SEQ ID NO: 581115 - protein, 19 aa, Homo sapiens
  CDR3 for alpha chain variable domain of TCR clone 290558 (TRAV8-3, TRAJ34)
LSTSVLWVWGLRTTDKLIF

SEQ ID NO: 581116 - protein, 13 aa, Homo sapiens
  CDR3 for beta chain variable domain of TCR clone 290558 (TRBV12-4, TRBJ2-7)
CASSLSGVYEQYF

SEQ ID NO: 581117 - protein, 11 aa, Homo sapiens
  CDR3 for alpha chain variable domain of TCR clone 290559 (TRAV27, TRAJ47)
CAGASGNKLVF

SEQ ID NO: 581118 - protein, 12 aa, Homo sapiens
  CDR3 for beta chain variable domain of TCR clone 290559 (TRBV11-2, TRBJ2-1)
CASSPGNNEQFF

SEQ ID NO: 581119 - protein, 14 aa, Homo sapiens
  CDR3 for alpha chain variable domain of TCR clone 290560 (TRAV12-3, TRAJ10)
SHLPLTGGGNKLTF

SEQ ID NO: 581120 - protein, 13 aa, Homo sapiens
  CDR3 for beta chain variable domain of TCR clone 290560 (TRBV15, TRBJ1-6)
CATSGGLNSPLHV

SEQ ID NO: 581121 - protein, 13 aa, Homo sapiens
  CDR3 for alpha chain variable domain of TCR clone 290561 (TRAV4, TRAJ9)
CLVAGGGGFKTIF

SEQ ID NO: 581122 - protein, 17 aa, Homo sapiens
  CDR3 for beta chain variable domain of TCR clone 290561 (TRBV27, TRBJ2-1)
CASSPMKGQGSYNEQFF

SEQ ID NO: 581123 - protein, 17 aa, Homo sapiens
  CDR3 for alpha chain variable domain of TCR clone 290562 (TRAV3, TRAJ6)
CAVRDGPGAGGSYITTF

SEQ ID NO: 581124 - protein, 15 aa, Homo sapiens
  CDR3 for beta chain variable domain of TCR clone 290562 (TRBV11-3, TRBJ2-7)
CASSPGPASSYEQYF

SEQ ID NO: 581125 - protein, 12 aa, Homo sapiens
  CDR3 for alpha chain variable domain of TCR clone 290563 (TRAV3, TRAJ26)
CAVRDYGQNFVF

SEQ ID NO: 581126 - protein, 13 aa, Homo sapiens
  CDR3 for beta chain variable domain of TCR clone 290563 (TRBV3-1, TRBJ1-1)
CASSPGVITEAFF

SEQ ID NO: 581127 - protein, 15 aa, Homo sapiens
  CDR3 for alpha chain variable domain of TCR clone 290564 (TRAV9-2, TRAJ29)
CALYIYNAGNTPLVF

SEQ ID NO: 581128 - protein, 14 aa, Homo sapiens
  CDR3 for beta chain variable domain of TCR clone 290564 (TRBV7-2, TRBJ2-7)
CASRSQGAAYEQYF

SEQ ID NO: 581129 - protein, 12 aa, Homo sapiens
  CDR3 for alpha chain variable domain of TCR clone 290565 (TRAV25, TRAJ11)
CAGASGYSTLTF

SEQ ID NO: 581130 - protein, 13 aa, Homo sapiens
  CDR3 for beta chain variable domain of TCR clone 290565 (TRBV7-9, TRBJ1-2)
CASSLKQNYGYTF

SEQ ID NO: 581131 - protein, 14 aa, Homo sapiens
  CDR3 for alpha chain variable domain of TCR clone 290566 (TRAV8-1, TRAJ34)
CAVNPSYNTDKLIF

SEQ ID NO: 581132 - protein, 15 aa, Homo sapiens
  CDR3 for beta chain variable domain of TCR clone 290566 (TRBV20-1, TRBJ2-7)
CSARDRVSGMDEQYF

SEQ ID NO: 581133 - protein, 14 aa, Homo sapiens
  CDR3 for alpha chain variable domain of TCR clone 290567 (TRAV12-3, TRAJ10)
SHLPLTGGGNKLTF

SEQ ID NO: 581134 - protein, 15 aa, Homo sapiens
  CDR3 for beta chain variable domain of TCR clone 290567 (TRBV29-1, TRBJ2-1)
CSGRDRKSSYNEQFF

SEQ ID NO: 581135 - protein, 14 aa, Homo sapiens
  CDR3 for alpha chain variable domain of TCR clone 290568 (TRAV1-2, TRAJ16)
CAVNRFSDGQQLLF

SEQ ID NO: 581136 - protein, 15 aa, Homo sapiens
  CDR3 for beta chain variable domain of TCR clone 290568 (TRBV6-5, TRBJ2-7)
CASSYSTSGNYEQYF

SEQ ID NO: 581137 - protein, 13 aa, Homo sapiens
  CDR3 for alpha chain variable domain of TCR clone 290569 (TRAV8-6, TRAJ21)
CAVSPSSLNKFYF

SEQ ID NO: 581138 - protein, 14 aa, Homo sapiens
  CDR3 for beta chain variable domain of TCR clone 290569 (TRBV9, TRBJ1-1)
CASSVEGGGTEAFF

SEQ ID NO: 581139 - protein, 10 aa, Homo sapiens
  CDR3 for alpha chain variable domain of TCR clone 290570 (TRAV12-3, TRAJ18)
CAMSAEAQPW

SEQ ID NO: 581140 - protein, 15 aa, Homo sapiens
  CDR3 for beta chain variable domain of TCR clone 290570 (TRBV28, TRBJ1-4)
CASSLGTGTKEKLFF

SEQ ID NO: 581141 - protein, 13 aa, Homo sapiens
  CDR3 for alpha chain variable domain of TCR clone 290571 (TRAV1-2, TRAJ9)
CAALNTGGFKTIF

SEQ ID NO: 581142 - protein, 16 aa, Homo sapiens
  CDR3 for beta chain variable domain of TCR clone 290571 (TRBV29-1, TRBJ1-2)
CSVEANRDIANYGYTF

SEQ ID NO: 581143 - protein, 16 aa, Homo sapiens
  CDR3 for alpha chain variable domain of TCR clone 290572 (TRAV3, TRAJ5)
CTSVRDLDTGRRALTF

SEQ ID NO: 581144 - protein, 13 aa, Homo sapiens
  CDR3 for beta chain variable domain of TCR clone 290572 (TRBV12-4, TRBJ2-7)
CASSPTETYEQYF

SEQ ID NO: 581145 - protein, 15 aa, Homo sapiens
  CDR3 for alpha chain variable domain of TCR clone 290573 (TRAV8-4, TRAJ48)
CAVSAAYFGNEKLTF

SEQ ID NO: 581146 - protein, 12 aa, Homo sapiens
  CDR3 for beta chain variable domain of TCR clone 290573 (TRBV3-1, TRBJ2-5)
CASSQRGETQYF

SEQ ID NO: 581147 - protein, 14 aa, Homo sapiens
  CDR3 for alpha chain variable domain of TCR clone 290574 (TRAV12-2, TRAJ6)
CASKWGGGSYIPTF

SEQ ID NO: 581148 - protein, 13 aa, Homo sapiens
  CDR3 for beta chain variable domain of TCR clone 290574 (TRBV12-4, TRBJ1-1)
CASSLGGTTEAFF

SEQ ID NO: 581149 - protein, 13 aa, Homo sapiens
  CDR3 for alpha chain variable domain of TCR clone 290575 (TRAV13-2, TRAJ40)
CAEFTSGTYKYIF

SEQ ID NO: 581150 - protein, 13 aa, Homo sapiens
  CDR3 for beta chain variable domain of TCR clone 290575 (TRBV20-1, TRBJ1-1)
CSARGGGNTEAFF

SEQ ID NO: 581151 - protein, 13 aa, Homo sapiens
  CDR3 for alpha chain variable domain of TCR clone 290576 (TRAV30, TRAJ6)
CGFIEGGSYIPTF

SEQ ID NO: 581152 - protein, 13 aa, Homo sapiens
  CDR3 for beta chain variable domain of TCR clone 290576 (TRBV5-4, TRBJ2-5)
CASSPVSQEQQYF

SEQ ID NO: 581153 - protein, 18 aa, Homo sapiens
  CDR3 for alpha chain variable domain of TCR clone 290577 (TRAV17, TRAJ28)
CATDPPSGSGAGSYQLTF

SEQ ID NO: 581154 - protein, 14 aa, Homo sapiens
  CDR3 for beta chain variable domain of TCR clone 290577 (TRBV13, TRBJ2-5)
CASSLDYPQETQYF

SEQ ID NO: 581155 - protein, 12 aa, Homo sapiens
  CDR3 for alpha chain variable domain of TCR clone 290578 (TRAV21, TRAJ31)
CSVWGNNARLMF

SEQ ID NO: 581156 - protein, 16 aa, Homo sapiens
  CDR3 for beta chain variable domain of TCR clone 290578 (TRBV27, TRBJ2-5)
CASSYGPGGQKESQYF

SEQ ID NO: 581157 - protein, 14 aa, Homo sapiens
  CDR3 for alpha chain variable domain of TCR clone 290579 (TRAV12-3, TRAJ10)
SHLPLTGGGNKLTF

SEQ ID NO: 581158 - protein, 16 aa, Homo sapiens
  CDR3 for beta chain variable domain of TCR clone 290579 (TRBV6-5, TRBJ2-6)
CASSYPLSSGANVLTF

SEQ ID NO: 581159 - protein, 13 aa, Homo sapiens
  CDR3 for alpha chain variable domain of TCR clone 290580 (TRAV2, TRAJ40)
CAVVTSGTYKYIF

SEQ ID NO: 581160 - protein, 15 aa, Homo sapiens
  CDR3 for beta chain variable domain of TCR clone 290580 (TRBV9, TRBJ1-6)
CASSVAGTGDSPFHF

SEQ ID NO: 581161 - protein, 14 aa, Homo sapiens
  CDR3 for alpha chain variable domain of TCR clone 290581 (TRAV12-2, TRAJ45)
CAVNIGGGADGLTF

SEQ ID NO: 581162 - protein, 14 aa, Homo sapiens
  CDR3 for beta chain variable domain of TCR clone 290581 (TRBV27, TRBJ2-2)
CASRPGVNTGELFF

SEQ ID NO: 581163 - protein, 18 aa, Homo sapiens
  CDR3 for alpha chain variable domain of TCR clone 290582 (TRAV13-1, TRAJ52)
CAASKRSAGGTSYGKLTF

SEQ ID NO: 581164 - protein, 16 aa, Homo sapiens
  CDR3 for beta chain variable domain of TCR clone 290582 (TRBV7-8, TRBJ2-3)
CASSTEGQRETDTQYF

SEQ ID NO: 581165 - protein, 15 aa, Homo sapiens
  CDR3 for alpha chain variable domain of TCR clone 290583 (TRAV23/DV6, TRAJ13)
CAAWPGGGGYQKVTF

SEQ ID NO: 581166 - protein, 17 aa, Homo sapiens
  CDR3 for beta chain variable domain of TCR clone 290583 (TRBV19, TRBJ2-7)
CASSISFYDSYPYQQYF

SEQ ID NO: 581167 - protein, 16 aa, Homo sapiens
  CDR3 for alpha chain variable domain of TCR clone 290584 (TRAV8-3, TRAJ13)
CAVGAEVFGGYQKVTF

SEQ ID NO: 581168 - protein, 17 aa, Homo sapiens
  CDR3 for beta chain variable domain of TCR clone 290584 (TRBV20-1, TRBJ2-2)
CSASGSGQGGLTGELFF

SEQ ID NO: 581169 - protein, 12 aa, Homo sapiens
  CDR3 for alpha chain variable domain of TCR clone 290585 (TRAV20, TRAJ13)
GCVKRGYQKVTF

SEQ ID NO: 581170 - protein, 13 aa, Homo sapiens
  CDR3 for beta chain variable domain of TCR clone 290585 (TRBV12-5, TRBJ2-1)
CASGLGRGNEQFF

SEQ ID NO: 581171 - protein, 14 aa, Homo sapiens
  CDR3 for alpha chain variable domain of TCR clone 290586 (TRAV12-2, TRAJ17)
CAVLLKAAGNKLTF

SEQ ID NO: 581172 - protein, 16 aa, Homo sapiens
  CDR3 for beta chain variable domain of TCR clone 290586 (TRBV20-1, TRBJ1-4)
CSAPRQGLLTNEKLFF

SEQ ID NO: 581173 - protein, 15 aa, Homo sapiens
  CDR3 for alpha chain variable domain of TCR clone 290587 (TRAV29/DV5, TRAJ29)
CAASERSSGNTPLVF

SEQ ID NO: 581174 - protein, 15 aa, Homo sapiens
  CDR3 for beta chain variable domain of TCR clone 290587 (TRBV6-3, TRBJ2-7)
CASSSPGTVFYEQYF

SEQ ID NO: 581175 - protein, 13 aa, Homo sapiens
  CDR3 for alpha chain variable domain of TCR clone 290588 (TRAV12-1, TRAJ21)
CVVTLYNFNKFYF

SEQ ID NO: 581176 - protein, 20 aa, Homo sapiens
  CDR3 for beta chain variable domain of TCR clone 290588 (TRBV7-8, TRBJ2-1)
CASSLAHRRAGVRSYNEQFF

SEQ ID NO: 581177 - protein, 20 aa, Homo sapiens
  CDR3 for alpha chain variable domain of TCR clone 290589 (TRAV1-2, TRAJ8)
CAVREDTGFQKLVLELAPDF

SEQ ID NO: 581178 - protein, 14 aa, Homo sapiens
  CDR3 for beta chain variable domain of TCR clone 290589 (TRBV29-1, TRBJ2-5)
CSVETSGSGETQYF

SEQ ID NO: 581179 - protein, 14 aa, Homo sapiens
  CDR3 for alpha chain variable domain of TCR clone 290590 (TRAV8-3, TRAJ6)
CAVGASGGSYIPTF

SEQ ID NO: 581180 - protein, 17 aa, Homo sapiens
  CDR3 for beta chain variable domain of TCR clone 290590 (TRBV18, TRBJ2-2)
CAISPSDPWQNTGELFF

SEQ ID NO: 581181 - protein, 14 aa, Homo sapiens
  CDR3 for alpha chain variable domain of TCR clone 290591 (TRAV13-2, TRAJ32)
CAESLGGATNKLIF

SEQ ID NO: 581182 - protein, 15 aa, Homo sapiens
  CDR3 for beta chain variable domain of TCR clone 290591 (TRBV20-1, TRBJ1-2)
RSARDSRGRNYGYTF

SEQ ID NO: 581183 - protein, 13 aa, Homo sapiens
  CDR3 for alpha chain variable domain of TCR clone 290592 (TRAV12-2, TRAJ20)
CAVYPSNDYKLSF

SEQ ID NO: 581184 - protein, 15 aa, Homo sapiens
  CDR3 for beta chain variable domain of TCR clone 290592 (TRBV19, TRBJ1-1)
CASTSGQIQNTEAFF

SEQ ID NO: 581185 - protein, 16 aa, Homo sapiens
  CDR3 for alpha chain variable domain of TCR clone 290593 (TRAV16, TRAJ42)
CARKMNYGGSQGNLIF

SEQ ID NO: 581186 - protein, 14 aa, Homo sapiens
  CDR3 for beta chain variable domain of TCR clone 290593 (TRBV14, TRBJ2-3)
CQQPDDRDTDTRYF

SEQ ID NO: 581187 - protein, 13 aa, Homo sapiens
  CDR3 for alpha chain variable domain of TCR clone 290594 (TRAV2, TRAJ16)
CAVEFGDGQKLLF

SEQ ID NO: 581188 - protein, 14 aa, Homo sapiens
  CDR3 for beta chain variable domain of TCR clone 290594 (TRBV7-2, TRBJ2-7)
CASSPKTSFYEQYF

SEQ ID NO: 581189 - protein, 15 aa, Homo sapiens
  CDR3 for alpha chain variable domain of TCR clone 290595 (TRAV8-4, TRAJ37)
CAVSTRSGNTGKLIF

SEQ ID NO: 581190 - protein, 20 aa, Homo sapiens
  CDR3 for beta chain variable domain of TCR clone 290595 (TRBV7-8, TRBJ2-2)
CANSHLFPGPTIHITGELFV

SEQ ID NO: 581191 - protein, 12 aa, Homo sapiens
  CDR3 for alpha chain variable domain of TCR clone 290596 (TRAV14/DV4, TRAJ31)
CNERARGARLMF

SEQ ID NO: 581192 - protein, 14 aa, Homo sapiens
  CDR3 for beta chain variable domain of TCR clone 290596 (TRBV19, TRBJ2-1)
CASPTFVLSGEQFF

SEQ ID NO: 581193 - protein, 13 aa, Homo sapiens
  CDR3 for alpha chain variable domain of TCR clone 290597 (TRAV21, TRAJ33)
CAVAGDSNYQLIW

SEQ ID NO: 581194 - protein, 15 aa, Homo sapiens
  CDR3 for beta chain variable domain of TCR clone 290597 (TRBV19, TRBJ1-2)
CASSVGQVLNYGDTF

SEQ ID NO: 581195 - protein, 15 aa, Homo sapiens
  CDR3 for alpha chain variable domain of TCR clone 290598 (TRAV12-1, TRAJ37)
CVVNLPTSNTGKLIF

SEQ ID NO: 581196 - protein, 14 aa, Homo sapiens
  CDR3 for beta chain variable domain of TCR clone 290598 (TRBV7-6, TRBJ2-3)
CASSLGTVTDTQYF

SEQ ID NO: 581197 - protein, 14 aa, Homo sapiens
  CDR3 for alpha chain variable domain of TCR clone 290599 (TRAV1-2, TRAJ16)
CADNRFSDGQKLLF

SEQ ID NO: 581198 - protein, 14 aa, Homo sapiens
  CDR3 for beta chain variable domain of TCR clone 290599 (TRBV7-9, TRBJ2-3)
CASSLEDGTDTQYF

SEQ ID NO: 581199 - protein, 13 aa, Homo sapiens
  CDR3 for alpha chain variable domain of TCR clone 290600 (TRAV3, TRAJ36)
CAVRDTGANNLFF

SEQ ID NO: 581200 - protein, 18 aa, Homo sapiens
  CDR3 for beta chain variable domain of TCR clone 290600 (TRBV3-1, TRBJ1-2)
CASSQDVIGWNGDYGYTF

SEQ ID NO: 581201 - protein, 16 aa, Homo sapiens
  CDR3 for alpha chain variable domain of TCR clone 290601 (TRAV30, TRAJ24)
CGTEIVDADSCGKFQF

SEQ ID NO: 581202 - protein, 14 aa, Homo sapiens
  CDR3 for beta chain variable domain of TCR clone 290601 (TRBV7-8, TRBJ2-3)
CASSLEAGTDTQYF

SEQ ID NO: 581203 - protein, 13 aa, Homo sapiens
  CDR3 for alpha chain variable domain of TCR clone 290602 (TRAV39, TRAJ40)
CAVYTSGTYKYIF

SEQ ID NO: 581204 - protein, 11 aa, Homo sapiens
  CDR3 for beta chain variable domain of TCR clone 290602 (TRBV29-1, TRBJ2-5)
CSEDRTGTQYF

SEQ ID NO: 581205 - protein, 11 aa, Homo sapiens
  CDR3 for alpha chain variable domain of TCR clone 290603 (TRAV29/DV5, TRAJ49)
CAAVPGNQFYF

SEQ ID NO: 581206 - protein, 13 aa, Homo sapiens
  CDR3 for beta chain variable domain of TCR clone 290603 (TRBV12-4, TRBJ1-1)
CASSPGTGFEAFF

SEQ ID NO: 581207 - protein, 15 aa, Homo sapiens
  CDR3 for alpha chain variable domain of TCR clone 290604 (TRAV4, TRAJ36)
CLVGDRQTGANNLFF

SEQ ID NO: 581208 - protein, 14 aa, Homo sapiens
  CDR3 for beta chain variable domain of TCR clone 290604 (TRBV7-2, TRBJ1-1)
CASSFLTGTTEAFF

SEQ ID NO: 581209 - protein, 14 aa, Homo sapiens
  CDR3 for alpha chain variable domain of TCR clone 290605 (TRAV13-1, TRAJ44)
CAAKATGTASKITF

SEQ ID NO: 581210 - protein, 16 aa, Homo sapiens
  CDR3 for beta chain variable domain of TCR clone 290605 (TRBV15, TRBJ1-2)
CATSRGPRTGGGGYTF

SEQ ID NO: 581211 - protein, 15 aa, Homo sapiens
  CDR3 for alpha chain variable domain of TCR clone 290606 (TRAV3, TRAJ22)
CAARDRGGSARQLTF

SEQ ID NO: 581212 - protein, 13 aa, Homo sapiens
  CDR3 for beta chain variable domain of TCR clone 290606 (TRBV7-3, TRBJ2-5)
CASSFRGGETQCF

SEQ ID NO: 581213 - protein, 13 aa, Homo sapiens
  CDR3 for alpha chain variable domain of TCR clone 290607 (TRAV2, TRAJ16)
CAVEFGDGQKLLF

SEQ ID NO: 581214 - protein, 14 aa, Homo sapiens
  CDR3 for beta chain variable domain of TCR clone 290607 (TRBV7-2, TRBJ2-7)
CASRSQGAAYEQYF

SEQ ID NO: 581215 - protein, 12 aa, Homo sapiens
  CDR3 for alpha chain variable domain of TCR clone 290608 (TRAV30, TRAJ43)
CGTEERGNDMRF

SEQ ID NO: 581216 - protein, 16 aa, Homo sapiens
  CDR3 for beta chain variable domain of TCR clone 290608 (TRBV11-2, TRBJ2-3)
CASSSRTSGGAGTQYF

SEQ ID NO: 581217 - protein, 13 aa, Homo sapiens
  CDR3 for alpha chain variable domain of TCR clone 290609 (TRAV21, TRAJ10)
CAVPTGGGNKLTF

SEQ ID NO: 581218 - protein, 22 aa, Homo sapiens
  CDR3 for beta chain variable domain of TCR clone 290609 (TRBV19, TRBJ2-1)
CASSVRDRVTGTSGRVYNEQFF

SEQ ID NO: 581219 - protein, 15 aa, Homo sapiens
  CDR3 for alpha chain variable domain of TCR clone 290610 (TRAV21, TRAJ56)
CAVTKYTAANSKLTF

SEQ ID NO: 581220 - protein, 14 aa, Homo sapiens
  CDR3 for beta chain variable domain of TCR clone 290610 (TRBV20-1, TRBJ2-3)
CSARVRGSTDTQYF

SEQ ID NO: 581221 - protein, 16 aa, Homo sapiens
  CDR3 for alpha chain variable domain of TCR clone 290611 (TRAV25, TRAJ52)
CAGGFLSGTSYGKLTF

SEQ ID NO: 581222 - protein, 14 aa, Homo sapiens
  CDR3 for beta chain variable domain of TCR clone 290611 (TRBV7-2, TRBJ2-1)
CASSLGVGYNEQFF

SEQ ID NO: 581223 - protein, 14 aa, Homo sapiens
  CDR3 for alpha chain variable domain of TCR clone 290612 (TRAV23/DV6, TRAJ11)
CAALIGGGYSTITF

SEQ ID NO: 581224 - protein, 13 aa, Homo sapiens
  CDR3 for beta chain variable domain of TCR clone 290612 (TRBV11-3, TRBJ1-1)
CASSLGGNTEAFF

SEQ ID NO: 581225 - protein, 15 aa, Homo sapiens
  CDR3 for alpha chain variable domain of TCR clone 290613 (TRAV17, TRAJ45)
CATAELGGGADGLTF

SEQ ID NO: 581226 - protein, 16 aa, Homo sapiens
  CDR3 for beta chain variable domain of TCR clone 290613 (TRBV7-3, TRBJ2-2)
CASSLKRGTLSGELFF

SEQ ID NO: 581227 - protein, 13 aa, Homo sapiens
  CDR3 for alpha chain variable domain of TCR clone 290614 (TRAV13-1, TRAJ21)
CAASIYNFNKFYF

SEQ ID NO: 581228 - protein, 15 aa, Homo sapiens
  CDR3 for beta chain variable domain of TCR clone 290614 (TRBV19, TRBJ1-2)
CASSVGQVLNYGYTF

SEQ ID NO: 581229 - protein, 13 aa, Homo sapiens
  CDR3 for alpha chain variable domain of TCR clone 290615 (TRAV2, TRAJ24)
CALTTDSWGKLQF

SEQ ID NO: 581230 - protein, 14 aa, Homo sapiens
  CDR3 for beta chain variable domain of TCR clone 290615 (TRBV13, TRBJ2-5)
CASSLGRGQETQYF

SEQ ID NO: 581231 - protein, 15 aa, Homo sapiens
  CDR3 for alpha chain variable domain of TCR clone 290616 (TRAV8-3, TRAJ45)
CASSYSGGGADGLTF

SEQ ID NO: 581232 - protein, 13 aa, Homo sapiens
  CDR3 for beta chain variable domain of TCR clone 290616 (TRBV10-3, TRBJ2-1)
CASKLAVNYEQYF

SEQ ID NO: 581233 - protein, 15 aa, Homo sapiens
  CDR3 for alpha chain variable domain of TCR clone 290617 (TRAV8-3, TRAJ45)
CASSYSGGGADGLTF

SEQ ID NO: 581234 - protein, 13 aa, Homo sapiens
  CDR3 for beta chain variable domain of TCR clone 290617 (TRBV10-3, TRBJ2-5)
CASKLAVNYEQYF

SEQ ID NO: 581235 - protein, 13 aa, Homo sapiens
  CDR3 for alpha chain variable domain of TCR clone 290618 (TRAV8-3, TRAJ48)
FAVVPFGNEKLTF

SEQ ID NO: 581236 - protein, 12 aa, Homo sapiens
  CDR3 for beta chain variable domain of TCR clone 290618 (TRBV11-2, TRBJ2-2)
CASSLGGGELFF

SEQ ID NO: 581237 - protein, 12 aa, Homo sapiens
  CDR3 for alpha chain variable domain of TCR clone 290619 (TRAV29/DV5, TRAJ43)
CAAPYNDNDMRF

SEQ ID NO: 581238 - protein, 15 aa, Homo sapiens
  CDR3 for beta chain variable domain of TCR clone 290619 (TRBV18, TRBJ1-6)
CAGSRIQGRNPPLHF

SEQ ID NO: 581239 - protein, 15 aa, Homo sapiens
  CDR3 for alpha chain variable domain of TCR clone 290620 (TRAV26-1, TRAJ22)
CIVRVSFWFCKATDL

SEQ ID NO: 581240 - protein, 22 aa, Homo sapiens
  CDR3 for beta chain variable domain of TCR clone 290620 (TRBV6-1, TRBJ1-3)
CASVQGGGWKHHIFWRGKLAHC

SEQ ID NO: 581241 - protein, 11 aa, Homo sapiens
  CDR3 for alpha chain variable domain of TCR clone 290621 (TRAV17, TRAJ39)
CATNPYNMLTF

SEQ ID NO: 581242 - protein, 14 aa, Homo sapiens
  CDR3 for beta chain variable domain of TCR clone 290621 (TRBV19, TRBJ2-1)
CASPTFVLSGEQFF

SEQ ID NO: 581243 - protein, 14 aa, Homo sapiens
  CDR3 for alpha chain variable domain of TCR clone 290622 (TRAV16, TRAJ15)
CALRPNQAGTALIF

SEQ ID NO: 581244 - protein, 16 aa, Homo sapiens
  CDR3 for beta chain variable domain of TCR clone 290622 (TRBV6-5, TRBJ2-2)
CASCYGRVPDTGELFF

SEQ ID NO: 581245 - protein, 12 aa, Homo sapiens
  CDR3 for alpha chain variable domain of TCR clone 290623 (TRAV2, TRAJ23)
CALEDVGGKLIF

SEQ ID NO: 581246 - protein, 13 aa, Homo sapiens
  CDR3 for beta chain variable domain of TCR clone 290623 (TRBV5-1, TRBJ2-4)
CASSLEGGMNQYF

SEQ ID NO: 581247 - protein, 13 aa, Homo sapiens
  CDR3 for alpha chain variable domain of TCR clone 290624 (TRAV35, TRAJ53)
CAGQESSNYKLTF

SEQ ID NO: 581248 - protein, 17 aa, Homo sapiens
  CDR3 for beta chain variable domain of TCR clone 290624 (TRBV13, TRBJ2-3)
CASSLSRVAGGRNTQYF

SEQ ID NO: 581249 - protein, 12 aa, Homo sapiens
  CDR3 for alpha chain variable domain of TCR clone 290625 (TRAV16, TRAJ10)
CSRTGGGNKLTF

SEQ ID NO: 581250 - protein, 14 aa, Homo sapiens
  CDR3 for beta chain variable domain of TCR clone 290625 (TRBV4-1, TRBJ2-3)
CASSQDWSTDTQYF

SEQ ID NO: 581251 - protein, 17 aa, Homo sapiens
  CDR3 for alpha chain variable domain of TCR clone 290626 (TRAV3, TRAJ6)
CAVRDCPRAGGSYIPTF

SEQ ID NO: 581252 - protein, 15 aa, Homo sapiens
  CDR3 for beta chain variable domain of TCR clone 290626 (TRBV20-1, TRBJ2-7)
CSARDRVSGMDEQYF

SEQ ID NO: 581253 - protein, 14 aa, Homo sapiens
  CDR3 for alpha chain variable domain of TCR clone 290627 (TRAV26-1, TRAJ38)
CIADNAGNNRKLIW

SEQ ID NO: 581254 - protein, 14 aa, Homo sapiens
  CDR3 for beta chain variable domain of TCR clone 290627 (TRBV7-3, TRBJ1-1)
SASSLGTGYTEAFF

SEQ ID NO: 581255 - protein, 13 aa, Homo sapiens
  CDR3 for alpha chain variable domain of TCR clone 290628 (TRAV20, TRAJ37)
CAGCSSNTGKLIF

SEQ ID NO: 581256 - protein, 11 aa, Homo sapiens
  CDR3 for beta chain variable domain of TCR clone 290628 (TRBV13, TRBJ2-3)
WASTATDTQYF

SEQ ID NO: 581257 - protein, 13 aa, Homo sapiens
  CDR3 for alpha chain variable domain of TCR clone 290629 (TRAV17, TRAJ57)
CAIYQGGSEKLVF

SEQ ID NO: 581258 - protein, 16 aa, Homo sapiens
  CDR3 for beta chain variable domain of TCR clone 290629 (TRBV12-5, TRBJ2-5)
CASGPRTSGNQETQYF

SEQ ID NO: 581259 - protein, 13 aa, Homo sapiens
  CDR3 for alpha chain variable domain of TCR clone 290630 (TRAV8-3, )
CAVGASNAATTIS

SEQ ID NO: 581260 - protein, 15 aa, Homo sapiens
  CDR3 for beta chain variable domain of TCR clone 290630 (TRBV11-3, TRBJ1-3)
CASSLFGPSGNTIYF

SEQ ID NO: 581261 - protein, 13 aa, Homo sapiens
  CDR3 for alpha chain variable domain of TCR clone 290631 (TRAV1-2, TRAJ9)
CAALNTGGFKTIF

SEQ ID NO: 581262 - protein, 16 aa, Homo sapiens
  CDR3 for beta chain variable domain of TCR clone 290631 (TRBV19, TRBJ1-1)
ISVPVPRQIQNTEAFF

SEQ ID NO: 581263 - protein, 13 aa, Homo sapiens
  CDR3 for alpha chain variable domain of TCR clone 290632 (TRAV3, TRAJ21)
CAVREPDFNKFYF

SEQ ID NO: 581264 - protein, 17 aa, Homo sapiens
  CDR3 for beta chain variable domain of TCR clone 290632 (TRBV11-2, TRBJ2-3)
CQQLRGASRGAPNKQYF

SEQ ID NO: 581265 - protein, 15 aa, Homo sapiens
  CDR3 for alpha chain variable domain of TCR clone 290633 (TRAV13-2, TRAJ5)
CAENPHWTGRIALTF

SEQ ID NO: 581266 - protein, 14 aa, Homo sapiens
  CDR3 for beta chain variable domain of TCR clone 290633 (TRBV5-7, TRBJ2-7)
CASSFKGATGEQYF

SEQ ID NO: 581267 - protein, 13 aa, Homo sapiens
  CDR3 for alpha chain variable domain of TCR clone 290634 (TRAV8-3, TRAJ36)
CAVGATGATNLFI

SEQ ID NO: 581268 - protein, 15 aa, Homo sapiens
  CDR3 for beta chain variable domain of TCR clone 290634 (TRBV7-2, TRBJ1-2)
CASSPRASWNYGYTF

SEQ ID NO: 581269 - protein, 13 aa, Homo sapiens
  CDR3 for alpha chain variable domain of TCR clone 290635 (TRAV29/DV5, TRAJ47)
CAASAEYGNKLVF

SEQ ID NO: 581270 - protein, 15 aa, Homo sapiens
  CDR3 for beta chain variable domain of TCR clone 290635 (TRBV12-4, TRBJ2-5)
CASSGTGQAQETQYF

SEQ ID NO: 581271 - protein, 16 aa, Homo sapiens
  CDR3 for alpha chain variable domain of TCR clone 290636 (TRAV8-2, TRAJ48)
CVVSDVSNLGNEKLTF

SEQ ID NO: 581272 - protein, 19 aa, Homo sapiens
  CDR3 for beta chain variable domain of TCR clone 290636 (TRBV2, TRBJ2-7)
CASSDDETSGRANDYEQYF

SEQ ID NO: 581273 - protein, 13 aa, Homo sapiens
  CDR3 for alpha chain variable domain of TCR clone 290637 (TRAV17, TRAJ9)
CATDYTGGFNTIF

SEQ ID NO: 581274 - protein, 16 aa, Homo sapiens
  CDR3 for beta chain variable domain of TCR clone 290637 (TRBV7-7, TRBJ2-1)
CASSLARGTSYNEQFF

SEQ ID NO: 581275 - protein, 14 aa, Homo sapiens
  CDR3 for alpha chain variable domain of TCR clone 290638 (TRAV8-3, TRAJ34)
CAVGPPHNTYKLIF

SEQ ID NO: 581276 - protein, 15 aa, Homo sapiens
  CDR3 for beta chain variable domain of TCR clone 290638 (TRBV20-1, TRBJ2-7)
CSARDRVSGMDEQYF

SEQ ID NO: 581277 - protein, 16 aa, Homo sapiens
  CDR3 for alpha chain variable domain of TCR clone 290639 (TRAV1-2, TRAJ10)
CAVRGVLTGGGNKLTF

SEQ ID NO: 581278 - protein, 14 aa, Homo sapiens
  CDR3 for beta chain variable domain of TCR clone 290639 (TRBV13, TRBJ2-7)
CASSLKGASYEQYF

SEQ ID NO: 581279 - protein, 15 aa, Homo sapiens
  CDR3 for alpha chain variable domain of TCR clone 290640 (TRAV20, TRAJ56)
CAVLAYTGANSKLTF

SEQ ID NO: 581280 - protein, 13 aa, Homo sapiens
  CDR3 for beta chain variable domain of TCR clone 290640 (TRBV9, TRBJ1-2)
CASSVGGGYGYSF

SEQ ID NO: 581281 - protein, 12 aa, Homo sapiens
  CDR3 for alpha chain variable domain of TCR clone 290641 (TRAV27, TRAJ9)
CAGESGGFKAIF

SEQ ID NO: 581282 - protein, 15 aa, Homo sapiens
  CDR3 for beta chain variable domain of TCR clone 290641 (TRBV7-9, TRBJ1-4)
CASSRTGGFNEKLFF

SEQ ID NO: 581283 - protein, 17 aa, Homo sapiens
  CDR3 for alpha chain variable domain of TCR clone 290642 (TRAV13-1, TRAJ53)
CAASWKSSGGSNYKLTF

SEQ ID NO: 581284 - protein, 19 aa, Homo sapiens
  CDR3 for beta chain variable domain of TCR clone 290642 (TRBV7-9, TRBJ2-1)
CAGSHNRGAILRSYNEQFF

SEQ ID NO: 581285 - protein, 18 aa, Homo sapiens
  CDR3 for alpha chain variable domain of TCR clone 290643 (TRAV12-3, TRAJ52)
CAMSRTNAGGTSYGKLTF

SEQ ID NO: 581286 - protein, 13 aa, Homo sapiens
  CDR3 for beta chain variable domain of TCR clone 290643 (TRBV9, TRBJ2-2)
CASSTFSSGELFF

SEQ ID NO: 581287 - protein, 13 aa, Homo sapiens
  CDR3 for alpha chain variable domain of TCR clone 290644 (TRAV4, TRAJ20)
CLVGSSNDYKLSS

SEQ ID NO: 581288 - protein, 14 aa, Homo sapiens
  CDR3 for beta chain variable domain of TCR clone 290644 (TRBV6-5, TRBJ1-2)
CASSYDGTGGGYTF

SEQ ID NO: 581289 - protein, 10 aa, Homo sapiens
  CDR3 for alpha chain variable domain of TCR clone 290645 (TRAV27, TRAJ58)
SDTSGSRLTF

SEQ ID NO: 581290 - protein, 14 aa, Homo sapiens
  CDR3 for beta chain variable domain of TCR clone 290645 (TRBV7-2, TRBJ2-7)
CASSPKTSFYEQYF

SEQ ID NO: 581291 - protein, 14 aa, Homo sapiens
  CDR3 for alpha chain variable domain of TCR clone 290646 (TRAV1-2, TRAJ16)
CAGNRFSDGQKLLF

SEQ ID NO: 581292 - protein, 14 aa, Homo sapiens
  CDR3 for beta chain variable domain of TCR clone 290646 (TRBV19, TRBJ2-1)
CASPTFVLSGEQFF

SEQ ID NO: 581293 - protein, 16 aa, Homo sapiens
  CDR3 for alpha chain variable domain of TCR clone 290647 (TRAV3, TRAJ37)
CAVRGKGAGNTGKLIF

SEQ ID NO: 581294 - protein, 14 aa, Homo sapiens
  CDR3 for beta chain variable domain of TCR clone 290647 (TRBV20-1, TRBJ2-3)
CSARGGTSTDTQYF

SEQ ID NO: 581295 - protein, 14 aa, Homo sapiens
  CDR3 for alpha chain variable domain of TCR clone 290648 (TRAV29/DV5, TRAJ40)
CAAAYGGATNKLIF

SEQ ID NO: 581296 - protein, 14 aa, Homo sapiens
  CDR3 for beta chain variable domain of TCR clone 290648 (TRBV20-1, TRBJ1-1)
CSAQTRIGGTEAFF

SEQ ID NO: 581297 - protein, 14 aa, Homo sapiens
  CDR3 for alpha chain variable domain of TCR clone 290649 (TRAV3, TRAJ22)
CAVRDYGSSRQLTF

SEQ ID NO: 581298 - protein, 13 aa, Homo sapiens
  CDR3 for beta chain variable domain of TCR clone 290649 (TRBV11-2, TRBJ2-5)
CASGHGAKETQYF

SEQ ID NO: 581299 - protein, 23 aa, Homo sapiens
  CDR3 for alpha chain variable domain of TCR clone 290650 (TRAV26-1, TRAJ38)
CIADNAGNSHNQNPDPAVYQLRD

SEQ ID NO: 581300 - protein, 13 aa, Homo sapiens
  CDR3 for beta chain variable domain of TCR clone 290650 (TRBV20-1, TRBJ1-1)
CSARGGGNTEAFF

SEQ ID NO: 581301 - protein, 13 aa, Homo sapiens
  CDR3 for alpha chain variable domain of TCR clone 290651 (TRAV12-1, TRAJ34)
CVVTGYNTDKLIF

SEQ ID NO: 581302 - protein, 14 aa, Homo sapiens
  CDR3 for beta chain variable domain of TCR clone 290651 (TRBV6-1, TRBJ1-3)
CASVQGGGGNTIYF

SEQ ID NO: 581303 - protein, 13 aa, Homo sapiens
  CDR3 for alpha chain variable domain of TCR clone 290652 (TRAV2, TRAJ12)
CAVGADSSYKLIF

SEQ ID NO: 581304 - protein, 13 aa, Homo sapiens
  CDR3 for beta chain variable domain of TCR clone 290652 (TRBV20-1, TRBJ2-1)
CSARSSPGDEQFF

SEQ ID NO: 581305 - protein, 15 aa, Homo sapiens
  CDR3 for alpha chain variable domain of TCR clone 290653 (TRAV3, TRAJ22)
CAVRDRIGSARQLTF

SEQ ID NO: 581306 - protein, 16 aa, Homo sapiens
  CDR3 for beta chain variable domain of TCR clone 290653 (TRBV5-4, TRBJ2-3)
CASQQPGAGGADTQYF

SEQ ID NO: 581307 - protein, 15 aa, Homo sapiens
  CDR3 for alpha chain variable domain of TCR clone 290654 (TRAV3, TRAJ20)
CAVRDIKLSDYKLSF

SEQ ID NO: 581308 - protein, 13 aa, Homo sapiens
  CDR3 for beta chain variable domain of TCR clone 290654 (TRBV7-2, TRBJ2-2)
CASSLAVTGELFF

SEQ ID NO: 581309 - protein, 16 aa, Homo sapiens
  CDR3 for alpha chain variable domain of TCR clone 290655 (TRAV3, TRAJ37)
CAVRGKGSGNTGKLIF

SEQ ID NO: 581310 - protein, 15 aa, Homo sapiens
  CDR3 for beta chain variable domain of TCR clone 290655 (TRBV7-2, TRBJ2-7)
CASSLDPAQGQEQYF

SEQ ID NO: 581311 - protein, 16 aa, Homo sapiens
  CDR3 for alpha chain variable domain of TCR clone 290656 (TRAV1-2, TRAJ10)
CAVRGVLTGGGNKLTF

SEQ ID NO: 581312 - protein, 11 aa, Homo sapiens
  CDR3 for beta chain variable domain of TCR clone 290656 (TRBV10-3, TRBJ2-7)
CAISEGLEQYF

SEQ ID NO: 581313 - protein, 14 aa, Homo sapiens
  CDR3 for alpha chain variable domain of TCR clone 290657 (TRAV12-2, TRAJ13)
CAVKKTGGYQNVTF

SEQ ID NO: 581314 - protein, 16 aa, Homo sapiens
  CDR3 for beta chain variable domain of TCR clone 290657 (TRBV20-1, TRBJ1-4)
CSAPGQGLLTNEKLFF

SEQ ID NO: 581315 - protein, 16 aa, Homo sapiens
  CDR3 for alpha chain variable domain of TCR clone 290658 (TRAV3, TRAJ37)
CAVRPHGSGNTVKLIF

SEQ ID NO: 581316 - protein, 15 aa, Homo sapiens
  CDR3 for beta chain variable domain of TCR clone 290658 (TRBV20-1, TRBJ2-7)
CSARDRVSGMDEQYF

SEQ ID NO: 581317 - protein, 13 aa, Homo sapiens
  CDR3 for alpha chain variable domain of TCR clone 290659 (TRAV23/DV6, TRAJ12)
CAPREDSSYKLIF

SEQ ID NO: 581318 - protein, 12 aa, Homo sapiens
  CDR3 for beta chain variable domain of TCR clone 290659 (TRBV7-8, TRBJ2-7)
CASSLGDREQYF

SEQ ID NO: 581319 - protein, 15 aa, Homo sapiens
  CDR3 for alpha chain variable domain of TCR clone 290660 (TRAV26-1, TRAJ40)
CIVRVTTSGTYKYIF

SEQ ID NO: 581320 - protein, 13 aa, Homo sapiens
  CDR3 for beta chain variable domain of TCR clone 290660 (TRBV19, TRBJ1-1)
CASSPSNGGEAFF

SEQ ID NO: 581321 - protein, 14 aa, Homo sapiens
  CDR3 for alpha chain variable domain of TCR clone 290661 (TRAV3, TRAJ33)
CAVRDMGSNYKLIW

SEQ ID NO: 581322 - protein, 17 aa, Homo sapiens
  CDR3 for beta chain variable domain of TCR clone 290661 (TRBV19, TRBJ2-1)
CASSIWSAQPTHNEQFF

SEQ ID NO: 581323 - protein, 14 aa, Homo sapiens
  CDR3 for alpha chain variable domain of TCR clone 290662 (TRAV8-3, TRAJ30)
CAVGDMNRDDKIIF

SEQ ID NO: 581324 - protein, 17 aa, Homo sapiens
  CDR3 for beta chain variable domain of TCR clone 290662 (TRBV19, TRBJ2-2)
CASSRKSGGFGTGELFF

SEQ ID NO: 581325 - protein, 15 aa, Homo sapiens
  CDR3 for alpha chain variable domain of TCR clone 290663 (TRAV12-3, TRAJ42)
CAMSVHGGSQGNLIF

SEQ ID NO: 581326 - protein, 13 aa, Homo sapiens
  CDR3 for beta chain variable domain of TCR clone 290663 (TRBV19, TRBJ2-5)
CASSGRAGETQYF

SEQ ID NO: 581327 - protein, 15 aa, Homo sapiens
  CDR3 for alpha chain variable domain of TCR clone 290664 (TRAV34, TRAJ38)
CGADFTPGNNRKLIW

SEQ ID NO: 581328 - protein, 14 aa, Homo sapiens
  CDR3 for beta chain variable domain of TCR clone 290664 (TRBV7-2, TRBJ1-1)
CASSFLTGTAEAFF

SEQ ID NO: 581329 - protein, 13 aa, Homo sapiens
  CDR3 for alpha chain variable domain of TCR clone 290665 (TRAV2, TRAJ20)
CAVEGPSEYKPSF

SEQ ID NO: 581330 - protein, 16 aa, Homo sapiens
  CDR3 for beta chain variable domain of TCR clone 290665 (TRBV25-1, TRBJ2-7)
CASSELTGGGIYEQYF

SEQ ID NO: 581331 - protein, 17 aa, Homo sapiens
  CDR3 for alpha chain variable domain of TCR clone 290666 (TRAV3, TRAJ6)
CAVRDGPRAGGSYISTF

SEQ ID NO: 581332 - protein, 18 aa, Homo sapiens
  CDR3 for beta chain variable domain of TCR clone 290666 (TRBV11-2, TRBJ2-3)
CASSLGGASRGAPNTQYF

SEQ ID NO: 581333 - protein, 14 aa, Homo sapiens
  CDR3 for alpha chain variable domain of TCR clone 290667 (TRAV2, TRAJ9)
CAVEDRSGGFKTIF

SEQ ID NO: 581334 - protein, 13 aa, Homo sapiens
  CDR3 for beta chain variable domain of TCR clone 290667 (TRBV7-9, TRBJ1-2)
CASSLKQDYGYTF

SEQ ID NO: 581335 - protein, 17 aa, Homo sapiens
  CDR3 for alpha chain variable domain of TCR clone 290668 (TRAV3, TRAJ42)
CAVRDRDYAGSQGNLIF

SEQ ID NO: 581336 - protein, 14 aa, Homo sapiens
  CDR3 for beta chain variable domain of TCR clone 290668 (TRBV7-2, TRBJ2-5)
CASSPRGSSETQYF

SEQ ID NO: 581337 - protein, 13 aa, Homo sapiens
  CDR3 for alpha chain variable domain of TCR clone 290669 (TRAV3, TRAJ36)
CAVKRTGANNLFF

SEQ ID NO: 581338 - protein, 16 aa, Homo sapiens
  CDR3 for beta chain variable domain of TCR clone 290669 (TRBV20-1, TRBJ2-6)
CSASSQGYDGANVLTF

SEQ ID NO: 581339 - protein, 15 aa, Homo sapiens
  CDR3 for alpha chain variable domain of TCR clone 290670 (TRAV8-4, TRAJ47)
CAVSDPEEYGNKLVF

SEQ ID NO: 581340 - protein, 15 aa, Homo sapiens
  CDR3 for beta chain variable domain of TCR clone 290670 (TRBV11-2, TRBJ2-1)
CAISLGPDSYNEQFF

SEQ ID NO: 581341 - protein, 14 aa, Homo sapiens
  CDR3 for alpha chain variable domain of TCR clone 290671 (TRAV38-1, TRAJ30)
CAFMPMNRDDKIIF

SEQ ID NO: 581342 - protein, 13 aa, Homo sapiens
  CDR3 for beta chain variable domain of TCR clone 290671 (TRBV20-1, TRBJ1-1)
CSARGGGNTEAFF

SEQ ID NO: 581343 - protein, 12 aa, Homo sapiens
  CDR3 for alpha chain variable domain of TCR clone 290672 (TRAV4, TRAJ26)
CLVGDYGQNFVF

SEQ ID NO: 581344 - protein, 14 aa, Homo sapiens
  CDR3 for beta chain variable domain of TCR clone 290672 (TRBV11-2, TRBJ2-3)
CASSRLARTDTQYF

SEQ ID NO: 581345 - protein, 15 aa, Homo sapiens
  CDR3 for alpha chain variable domain of TCR clone 290673 (TRAV13-1, TRAJ16)
CAARYQMASSCSLQG

SEQ ID NO: 581346 - protein, 13 aa, Homo sapiens
  CDR3 for beta chain variable domain of TCR clone 290673 (TRBV4-1, TRBJ2-1)
CASSQAGGDEQFC

SEQ ID NO: 581347 - protein, 13 aa, Homo sapiens
  CDR3 for alpha chain variable domain of TCR clone 290674 (TRAV36/DV7, TRAJ49)
CAVDANTGNQFYF

SEQ ID NO: 581348 - protein, 13 aa, Homo sapiens
  CDR3 for beta chain variable domain of TCR clone 290674 (TRBV10-3, TRBJ2-7)
CASNLAVNYEQYF

SEQ ID NO: 581349 - protein, 13 aa, Homo sapiens
  CDR3 for alpha chain variable domain of TCR clone 290675 (TRAV2, TRAJ15)
CAVGGQAGTALIF

SEQ ID NO: 581350 - protein, 16 aa, Homo sapiens
  CDR3 for beta chain variable domain of TCR clone 290675 (TRBV13, TRBJ2-5)
CASSRGAGIRQETQYF

SEQ ID NO: 581351 - protein, 18 aa, Homo sapiens
  CDR3 for alpha chain variable domain of TCR clone 290676 (TRAV26-1, TRAJ23)
CIVRVVLEVWNQGGKLIF

SEQ ID NO: 581352 - protein, 16 aa, Homo sapiens
  CDR3 for beta chain variable domain of TCR clone 290676 (TRBV12-4, TRBJ2-5)
CASSFFVRGRQETQYF

SEQ ID NO: 581353 - protein, 15 aa, Homo sapiens
  CDR3 for alpha chain variable domain of TCR clone 290677 (TRAV27, TRAJ38)
CAARRNAGNNRKLIW

SEQ ID NO: 581354 - protein, 14 aa, Homo sapiens
  CDR3 for beta chain variable domain of TCR clone 290677 (TRBV4-2, TRBJ2-7)
CASSQGQTAYEQYF

SEQ ID NO: 581355 - protein, 14 aa, Homo sapiens
  CDR3 for alpha chain variable domain of TCR clone 290678 (TRAV13-1, TRAJ44)
CAEKAAGTASKLTF

SEQ ID NO: 581356 - protein, 13 aa, Homo sapiens
  CDR3 for beta chain variable domain of TCR clone 290678 (TRBV5-5, TRBJ1-2)
CASSFWRGEDYTF

SEQ ID NO: 581357 - protein, 12 aa, Homo sapiens
  CDR3 for alpha chain variable domain of TCR clone 290679 (TRAV17, TRAJ57)
CATDGGSEKLVF

SEQ ID NO: 581358 - protein, 13 aa, Homo sapiens
  CDR3 for beta chain variable domain of TCR clone 290679 (TRBV5-4, TRBJ1-1)
CASSVDLGTEAFF

SEQ ID NO: 581359 - protein, 13 aa, Homo sapiens
  CDR3 for alpha chain variable domain of TCR clone 290680 (TRAV26-1, TRAJ48)
CIVRVVGDEKLTF

SEQ ID NO: 581360 - protein, 15 aa, Homo sapiens
  CDR3 for beta chain variable domain of TCR clone 290680 (TRBV9, TRBJ1-6)
CASSVAGTGDSPLHF

SEQ ID NO: 581361 - protein, 13 aa, Homo sapiens
  CDR3 for alpha chain variable domain of TCR clone 290681 (TRAV13-2, TRAJ48)
CAEMDFGDEKLTF

SEQ ID NO: 581362 - protein, 15 aa, Homo sapiens
  CDR3 for beta chain variable domain of TCR clone 290681 (TRBV11-3, TRBJ2-3)
CASLKDGREGDTQYF

SEQ ID NO: 581363 - protein, 15 aa, Homo sapiens
  CDR3 for alpha chain variable domain of TCR clone 290682 (TRAV3, TRAJ5)
CAVRDLDTGRRALNF

SEQ ID NO: 581364 - protein, 13 aa, Homo sapiens
  CDR3 for beta chain variable domain of TCR clone 290682 (TRBV24-1, TRBJ2-2)
CATSDWSTGELFF

SEQ ID NO: 581365 - protein, 16 aa, Homo sapiens
  CDR3 for alpha chain variable domain of TCR clone 290683 (TRAV16, TRAJ42)
CTLSGYYGGSQGNLIF

SEQ ID NO: 581366 - protein, 14 aa, Homo sapiens
  CDR3 for beta chain variable domain of TCR clone 290683 (TRBV3-1, TRBJ2-5)
CASSQAVRQETQYF

SEQ ID NO: 581367 - protein, 15 aa, Homo sapiens
  CDR3 for alpha chain variable domain of TCR clone 290684 (TRAV26-1, TRAJ22)
CIVRVSFWFCKATEL

SEQ ID NO: 581368 - protein, 17 aa, Homo sapiens
  CDR3 for beta chain variable domain of TCR clone 290684 (TRBV7-2, TRBJ2-3)
CASSLEARGTSTDTQYF

SEQ ID NO: 581369 - protein, 11 aa, Homo sapiens
  CDR3 for alpha chain variable domain of TCR clone 290685 (TRAV2, TRAJ37)
CAVDNTGKLIF

SEQ ID NO: 581370 - protein, 13 aa, Homo sapiens
  CDR3 for beta chain variable domain of TCR clone 290685 (TRBV2, TRBJ1-5)
CATAGPGNQPQHF

SEQ ID NO: 581371 - protein, 14 aa, Homo sapiens
  CDR3 for alpha chain variable domain of TCR clone 290686 (TRAV12-1, TRAJ17)
YVVNYKAAGNKLTF

SEQ ID NO: 581372 - protein, 17 aa, Homo sapiens
  CDR3 for beta chain variable domain of TCR clone 290686 (TRBV20-1, TRBJ2-1)
CSASSSGLAGSYNEQFF

SEQ ID NO: 581373 - protein, 15 aa, Homo sapiens
  CDR3 for alpha chain variable domain of TCR clone 290687 (TRAV4, TRAJ39)
CLVGPNNNAGNMLTF

SEQ ID NO: 581374 - protein, 12 aa, Homo sapiens
  CDR3 for beta chain variable domain of TCR clone 290687 (TRBV12-4, TRBJ2-7)
CASNPGGGEQYF

SEQ ID NO: 581375 - protein, 21 aa, Homo sapiens
  CDR3 for alpha chain variable domain of TCR clone 290688 (TRAV8-3, TRAJ6)
CAVGGEEATYLHLEEEPALLF

SEQ ID NO: 581376 - protein, 17 aa, Homo sapiens
  CDR3 for beta chain variable domain of TCR clone 290688 (TRBV7-2, TRBJ2-3)
CASSLSGGLAGTAGQYF

SEQ ID NO: 581377 - protein, 14 aa, Homo sapiens
  CDR3 for alpha chain variable domain of TCR clone 290689 (TRAV8-3, TRAJ35)
CAVVPQGFGNVLHC

SEQ ID NO: 581378 - protein, 13 aa, Homo sapiens
  CDR3 for beta chain variable domain of TCR clone 290689 (TRBV7-7, TRBJ2-5)
CASSLRAIETQYF

SEQ ID NO: 581379 - protein, 12 aa, Homo sapiens
  CDR3 for alpha chain variable domain of TCR clone 290690 (TRAV12-3, TRAJ17)
CDMTLTGNKLTF

SEQ ID NO: 581380 - protein, 15 aa, Homo sapiens
  CDR3 for beta chain variable domain of TCR clone 290690 (TRBV20-1, TRBJ2-7)
CSARDRVSGMDEQYF

SEQ ID NO: 581381 - protein, 12 aa, Homo sapiens
  CDR3 for alpha chain variable domain of TCR clone 290691 (TRAV1-2, TRAJ33)
CAALDSNYQLIW

SEQ ID NO: 581382 - protein, 16 aa, Homo sapiens
  CDR3 for beta chain variable domain of TCR clone 290691 (TRBV5-1, TRBJ2-7)
CASSYASTSSGGEQYF

SEQ ID NO: 581383 - protein, 23 aa, Homo sapiens
  CDR3 for alpha chain variable domain of TCR clone 290692 (TRAV26-1, TRAJ38)
CIADNAGNNHIQNPDPAVYQLRD

SEQ ID NO: 581384 - protein, 13 aa, Homo sapiens
  CDR3 for beta chain variable domain of TCR clone 290692 (TRBV20-1, TRBJ1-1)
CCARGGGNTEAFF

SEQ ID NO: 581385 - protein, 14 aa, Homo sapiens
  CDR3 for alpha chain variable domain of TCR clone 290693 (TRAV1-2, TRAJ16)
CAVNRFSDGQKLLF

SEQ ID NO: 581386 - protein, 17 aa, Homo sapiens
  CDR3 for beta chain variable domain of TCR clone 290693 (TRBV20-1, TRBJ2-1)
CSASSSGLAGSYNEQVF

SEQ ID NO: 581387 - protein, 17 aa, Homo sapiens
  CDR3 for alpha chain variable domain of TCR clone 290694 (TRAV3, TRAJ6)
CAVRDGPRAGGSYIPTF

SEQ ID NO: 581388 - protein, 15 aa, Homo sapiens
  CDR3 for beta chain variable domain of TCR clone 290694 (TRBV20-1, TRBJ1-2)
CSAAGEGARIYGDTF

SEQ ID NO: 581389 - protein, 14 aa, Homo sapiens
  CDR3 for alpha chain variable domain of TCR clone 290695 (TRAV17, TRAJ57)
CATDPQGGSEKLVV

SEQ ID NO: 581390 - protein, 14 aa, Homo sapiens
  CDR3 for beta chain variable domain of TCR clone 290695 (TRBV5-8, TRBJ2-3)
CASSLGQGTDTQYF

SEQ ID NO: 581391 - protein, 13 aa, Homo sapiens
  CDR3 for alpha chain variable domain of TCR clone 290696 (TRAV3, TRAJ41)
CAVSSNSGYALNF

SEQ ID NO: 581392 - protein, 14 aa, Homo sapiens
  CDR3 for beta chain variable domain of TCR clone 290696 (TRBV7-2, TRBJ2-7)
CASSPKTSVYEQYF

SEQ ID NO: 581393 - protein, 12 aa, Homo sapiens
  CDR3 for alpha chain variable domain of TCR clone 290697 (TRAV3, TRAJ43)
CAVRYPNNDMRF

SEQ ID NO: 581394 - protein, 15 aa, Homo sapiens
  CDR3 for beta chain variable domain of TCR clone 290697 (TRBV6-5, TRBJ2-1)
CASSYDAGAGNEQFF

SEQ ID NO: 581395 - protein, 14 aa, Homo sapiens
  CDR3 for alpha chain variable domain of TCR clone 290698 (TRAV34, TRAJ22)
CGADTSGSARQLTF

SEQ ID NO: 581396 - protein, 11 aa, Homo sapiens
  CDR3 for beta chain variable domain of TCR clone 290698 (TRBV7-8, TRBJ2-7)
CASSLSLEQYF

SEQ ID NO: 581397 - protein, 15 aa, Homo sapiens
  CDR3 for alpha chain variable domain of TCR clone 290699 (TRAV27, TRAJ38)
CAARRNAGNNRTLIW

SEQ ID NO: 581398 - protein, 15 aa, Homo sapiens
  CDR3 for beta chain variable domain of TCR clone 290699 (TRBV12-4, TRBJ2-5)
CASSPPTGLQETQYF

SEQ ID NO: 581399 - protein, 13 aa, Homo sapiens
  CDR3 for alpha chain variable domain of TCR clone 290700 (TRAV12-3, TRAJ47)
CAMKKEDGNKLVF

SEQ ID NO: 581400 - protein, 16 aa, Homo sapiens
  CDR3 for beta chain variable domain of TCR clone 290700 (TRBV3-1, TRBJ2-6)
CASSLTWVSGANVLTF

SEQ ID NO: 581401 - protein, 12 aa, Homo sapiens
  CDR3 for alpha chain variable domain of TCR clone 290701 (TRAV2, TRAJ31)
CAVEDNNARLMF

SEQ ID NO: 581402 - protein, 16 aa, Homo sapiens
  CDR3 for beta chain variable domain of TCR clone 290701 (TRBV12-4, TRBJ1-5)
CASSRPVGGSNQPQHF

SEQ ID NO: 581403 - protein, 16 aa, Homo sapiens
  CDR3 for alpha chain variable domain of TCR clone 290702 (TRAV4, TRAJ9)
CLVGDPNRPGGFKTIF

SEQ ID NO: 581404 - protein, 15 aa, Homo sapiens
  CDR3 for beta chain variable domain of TCR clone 290702 (TRBV28, TRBJ2-7)
CASSVRQVSSYEQYF

SEQ ID NO: 581405 - protein, 18 aa, Homo sapiens
  CDR3 for alpha chain variable domain of TCR clone 290703 (TRAV21, TRAJ52)
CAVRPSPAGGTSYGKLTF

SEQ ID NO: 581406 - protein, 16 aa, Homo sapiens
  CDR3 for beta chain variable domain of TCR clone 290703 (TRBV4-2, TRBJ1-1)
CASSQAGFGMNTEAFF

SEQ ID NO: 581407 - protein, 13 aa, Homo sapiens
  CDR3 for alpha chain variable domain of TCR clone 290704 (TRAV12-1, TRAJ7)
CVVNMRGNNRLAF

SEQ ID NO: 581408 - protein, 16 aa, Homo sapiens
  CDR3 for beta chain variable domain of TCR clone 290704 (TRBV12-4, TRBJ1-4)
CASSLKGIGHGEKLFF

SEQ ID NO: 581409 - protein, 12 aa, Homo sapiens
  CDR3 for alpha chain variable domain of TCR clone 290705 (TRAV12-3, TRAJ17)
CAMTPTGNKLTL

SEQ ID NO: 581410 - protein, 15 aa, Homo sapiens
  CDR3 for beta chain variable domain of TCR clone 290705 (TRBV20-1, TRBJ2-7)
CSARDRVSGMDEQYF

SEQ ID NO: 581411 - protein, 14 aa, Homo sapiens
  CDR3 for alpha chain variable domain of TCR clone 290706 (TRAV8-4, TRAJ13)
CAVTLSGGYQKVTF

SEQ ID NO: 581412 - protein, 14 aa, Homo sapiens
  CDR3 for beta chain variable domain of TCR clone 290706 (TRBV7-2, TRBJ1-2)
CASSQTGTTYGYTF

SEQ ID NO: 581413 - protein, 15 aa, Homo sapiens
  CDR3 for alpha chain variable domain of TCR clone 290707 (TRAV3, TRAJ20)
CAVRDIKLSDYKLSF

SEQ ID NO: 581414 - protein, 15 aa, Homo sapiens
  CDR3 for beta chain variable domain of TCR clone 290707 (TRBV7-9, TRBJ1-6)
CASSSPGRGSSPLLF

SEQ ID NO: 581415 - protein, 14 aa, Homo sapiens
  CDR3 for alpha chain variable domain of TCR clone 290708 (TRAV4, TRAJ30)
CLVGDMNRDDKTIF

SEQ ID NO: 581416 - protein, 16 aa, Homo sapiens
  CDR3 for beta chain variable domain of TCR clone 290708 (TRBV20-1, TRBJ1-4)
CSAPGQGLLTNEKLFF

SEQ ID NO: 581417 - protein, 13 aa, Homo sapiens
  CDR3 for alpha chain variable domain of TCR clone 290709 (TRAV21, TRAJ15)
CAVRNQAGTALIF

SEQ ID NO: 581418 - protein, 16 aa, Homo sapiens
  CDR3 for beta chain variable domain of TCR clone 290709 (TRBV20-1, TRBJ2-5)
CSTGGTSGGYMETQYF

SEQ ID NO: 581419 - protein, 12 aa, Homo sapiens
  CDR3 for alpha chain variable domain of TCR clone 290710 (TRAV17, TRAJ30)
CVPERRDDKMIF

SEQ ID NO: 581420 - protein, 14 aa, Homo sapiens
  CDR3 for beta chain variable domain of TCR clone 290710 (TRBV7-7, TRBJ2-2)
CASSRDRSTGELFF

SEQ ID NO: 581421 - protein, 15 aa, Homo sapiens
  CDR3 for alpha chain variable domain of TCR clone 290711 (TRAV8-3, TRAJ27)
CAVGPSKTNAGKSTF

SEQ ID NO: 581422 - protein, 16 aa, Homo sapiens
  CDR3 for beta chain variable domain of TCR clone 290711 (TRBV24-1, TRBJ2-3)
CATSDPGTGATDTQYF

SEQ ID NO: 581423 - protein, 12 aa, Homo sapiens
  CDR3 for alpha chain variable domain of TCR clone 290712 (TRAV26-1, TRAJ26)
CIVCIYGQNVVF

SEQ ID NO: 581424 - protein, 15 aa, Homo sapiens
  CDR3 for beta chain variable domain of TCR clone 290712 (TRBV20-1, TRBJ2-7)
CSARDRVSGMDEQYF

SEQ ID NO: 581425 - protein, 14 aa, Homo sapiens
  CDR3 for alpha chain variable domain of TCR clone 290713 (TRAV1-2, TRAJ8)
CAVREDTGFHKLVF

SEQ ID NO: 581426 - protein, 16 aa, Homo sapiens
  CDR3 for beta chain variable domain of TCR clone 290713 (TRBV29-1, TRBJ2-6)
CSVEDITYSGANVLTF

SEQ ID NO: 581427 - protein, 15 aa, Homo sapiens
  CDR3 for alpha chain variable domain of TCR clone 290714 (TRAV21, TRAJ53)
CATLNSGGSNYKLTY

SEQ ID NO: 581428 - protein, 16 aa, Homo sapiens
  CDR3 for beta chain variable domain of TCR clone 290714 (TRBV9, TRBJ2-1)
CASSVGGGGNYNEQFF

SEQ ID NO: 581429 - protein, 14 aa, Homo sapiens
  CDR3 for alpha chain variable domain of TCR clone 290715 (TRAV12-2, TRAJ17)
CAVLFKAAGNKLTF

SEQ ID NO: 581430 - protein, 14 aa, Homo sapiens
  CDR3 for beta chain variable domain of TCR clone 290715 (TRBV7-7, TRBJ2-2)
CATLQDSDTGELFF

SEQ ID NO: 581431 - protein, 13 aa, Homo sapiens
  CDR3 for alpha chain variable domain of TCR clone 290716 (TRAV8-3, TRAJ44)
CAVVPGTASKLTF

SEQ ID NO: 581432 - protein, 14 aa, Homo sapiens
  CDR3 for beta chain variable domain of TCR clone 290716 (TRBV6-1, TRBJ1-1)
CASSGTGLNTEAFF

SEQ ID NO: 581433 - protein, 12 aa, Homo sapiens
  CDR3 for alpha chain variable domain of TCR clone 290717 (TRAV8-3, TRAJ20)
CAVDFNYYKLSF

SEQ ID NO: 581434 - protein, 13 aa, Homo sapiens
  CDR3 for beta chain variable domain of TCR clone 290717 (TRBV5-7, TRBJ2-3)
CASSLGRTDTQYF

SEQ ID NO: 581435 - protein, 17 aa, Homo sapiens
  CDR3 for alpha chain variable domain of TCR clone 290718 (TRAV23/DV6, TRAJ10)
CSKPPFILPGGGTKLTF

SEQ ID NO: 581436 - protein, 15 aa, Homo sapiens
  CDR3 for beta chain variable domain of TCR clone 290718 (TRBV20-1, TRBJ2-1)
CSAEGGLLAGDEQFF

SEQ ID NO: 581437 - protein, 13 aa, Homo sapiens
  CDR3 for alpha chain variable domain of TCR clone 290719 (TRAV3, TRAJ31)
CAVREGNNARLMF

SEQ ID NO: 581438 - protein, 12 aa, Homo sapiens
  CDR3 for beta chain variable domain of TCR clone 290719 (TRBV11-2, TRBJ2-2)
CASSLGGGELFF

SEQ ID NO: 581439 - protein, 16 aa, Homo sapiens
  CDR3 for alpha chain variable domain of TCR clone 290720 (TRAV30, TRAJ24)
CGTEIVDADSWGNSSL

SEQ ID NO: 581440 - protein, 17 aa, Homo sapiens
  CDR3 for beta chain variable domain of TCR clone 290720 (TRBV7-2, TRBJ2-7)
CASSPFGSSGPSPEQYF

SEQ ID NO: 581441 - protein, 14 aa, Homo sapiens
  CDR3 for alpha chain variable domain of TCR clone 290721 (TRAV1-2, TRAJ16)
CAVNRFSDGQKLLF

SEQ ID NO: 581442 - protein, 17 aa, Homo sapiens
  CDR3 for beta chain variable domain of TCR clone 290721 (TRBV7-2, TRBJ2-3)
CASSLAGGLAGTAGQYF

SEQ ID NO: 581443 - protein, 14 aa, Homo sapiens
  CDR3 for alpha chain variable domain of TCR clone 290722 (TRAV1-2, TRAJ16)
CAANRFSDGQKLLF

SEQ ID NO: 581444 - protein, 16 aa, Homo sapiens
  CDR3 for beta chain variable domain of TCR clone 290722 (TRBV4-3, TRBJ2-2)
CASSHLQGSGTGELFF

SEQ ID NO: 581445 - protein, 15 aa, Homo sapiens
  CDR3 for alpha chain variable domain of TCR clone 290723 (TRAV12-2, TRAJ53)
CAVNGEGGSNYKLTF

SEQ ID NO: 581446 - protein, 14 aa, Homo sapiens
  CDR3 for beta chain variable domain of TCR clone 290723 (TRBV18, TRBJ2-7)
CASSPRGGAYEQYF

SEQ ID NO: 581447 - protein, 14 aa, Homo sapiens
  CDR3 for alpha chain variable domain of TCR clone 290724 (TRAV1-2, TRAJ16)
CAVNRFSDGQKLLF

SEQ ID NO: 581448 - protein, 16 aa, Homo sapiens
  CDR3 for beta chain variable domain of TCR clone 290724 (TRBV12-4, TRBJ1-5)
CARSRPVGGSNQPQHF

SEQ ID NO: 581449 - protein, 13 aa, Homo sapiens
  CDR3 for alpha chain variable domain of TCR clone 290725 (TRAV25, TRAJ30)
CAGRVDRDDKIIF

SEQ ID NO: 581450 - protein, 17 aa, Homo sapiens
  CDR3 for beta chain variable domain of TCR clone 290725 (TRBV7-9, TRBJ2-6)
CASSFGAGYSRANVLTF

SEQ ID NO: 581451 - protein, 13 aa, Homo sapiens
  CDR3 for alpha chain variable domain of TCR clone 290726 (TRAV38-2/DV8, TRAJ34)
CAYRNYNTDKLIF

SEQ ID NO: 581452 - protein, 15 aa, Homo sapiens
  CDR3 for beta chain variable domain of TCR clone 290726 (TRBV20-1, TRBJ2-5)
CSAEGTGCLQETQYF

SEQ ID NO: 581453 - protein, 12 aa, Homo sapiens
  CDR3 for alpha chain variable domain of TCR clone 290727 (TRAV16, TRAJ26)
CASKDGGQNFVF

SEQ ID NO: 581454 - protein, 13 aa, Homo sapiens
  CDR3 for beta chain variable domain of TCR clone 290727 (TRBV25-1, TRBJ1-1)
CASSARGRAEAFF

SEQ ID NO: 581455 - protein, 11 aa, Homo sapiens
  CDR3 for alpha chain variable domain of TCR clone 290728 (TRAV13-2, TRAJ26)
CAEIPGQNVVF

SEQ ID NO: 581456 - protein, 19 aa, Homo sapiens
  CDR3 for beta chain variable domain of TCR clone 290728 (TRBV19, TRBJ2-2)
CASTRPGLAGGRVTGELFF

SEQ ID NO: 581457 - protein, 12 aa, Homo sapiens
  CDR3 for alpha chain variable domain of TCR clone 290729 (TRAV17, TRAJ57)
CATDGGSEKLVF

SEQ ID NO: 581458 - protein, 13 aa, Homo sapiens
  CDR3 for beta chain variable domain of TCR clone 290729 (TRBV7-9, TRBJ2-7)
CASSFAGAYAQYF

SEQ ID NO: 581459 - protein, 15 aa, Homo sapiens
  CDR3 for alpha chain variable domain of TCR clone 290730 (TRAV25, TRAJ52)
CAGRPGGTSYGKLTF

SEQ ID NO: 581460 - protein, 16 aa, Homo sapiens
  CDR3 for beta chain variable domain of TCR clone 290730 (TRBV5-1, TRBJ1-1)
CARSSGGNSLNTEAFF

SEQ ID NO: 581461 - protein, 13 aa, Homo sapiens
  CDR3 for alpha chain variable domain of TCR clone 290731 (TRAV36/DV7, TRAJ33)
CAVDMDNNYQLIW

SEQ ID NO: 581462 - protein, 16 aa, Homo sapiens
  CDR3 for beta chain variable domain of TCR clone 290731 (TRBV15, TRBJ2-3)
CATRLSGGRAPDTQYF

SEQ ID NO: 581463 - protein, 12 aa, Homo sapiens
  CDR3 for alpha chain variable domain of TCR clone 290732 (TRAV9-2, TRAJ9)
GAMNTGGFKTIF

SEQ ID NO: 581464 - protein, 17 aa, Homo sapiens
  CDR3 for beta chain variable domain of TCR clone 290732 (TRBV28, TRBJ2-5)
CASSRQGGLAGAETQYF

SEQ ID NO: 581465 - protein, 14 aa, Homo sapiens
  CDR3 for alpha chain variable domain of TCR clone 290733 (TRAV12-3, TRAJ10)
SHLPLKGGGNKLTF

SEQ ID NO: 581466 - protein, 14 aa, Homo sapiens
  CDR3 for beta chain variable domain of TCR clone 290733 (TRBV19, TRBJ2-7)
CASTVQGRPYEQYF

SEQ ID NO: 581467 - protein, 15 aa, Homo sapiens
  CDR3 for alpha chain variable domain of TCR clone 290734 (TRAV14/DV4, TRAJ26)
CAMREGQNYGQNFVF

SEQ ID NO: 581468 - protein, 15 aa, Homo sapiens
  CDR3 for beta chain variable domain of TCR clone 290734 (TRBV11-2, TRBJ2-5)
CASSPRSGGLETQYF

SEQ ID NO: 581469 - protein, 16 aa, Homo sapiens
  CDR3 for alpha chain variable domain of TCR clone 290735 (TRAV26-1, TRAJ32)
CLVRTNYGGATNKLIF

SEQ ID NO: 581470 - protein, 14 aa, Homo sapiens
  CDR3 for beta chain variable domain of TCR clone 290735 (TRBV27, TRBJ1-1)
CASSLLSGLSEAFF

SEQ ID NO: 581471 - protein, 14 aa, Homo sapiens
  CDR3 for alpha chain variable domain of TCR clone 290736 (TRAV2, TRAJ9)
CAMEDRSGGFKTIF

SEQ ID NO: 581472 - protein, 13 aa, Homo sapiens
  CDR3 for beta chain variable domain of TCR clone 290736 (TRBV27, TRBJ1-1)
CASSLSIGAEAFF

SEQ ID NO: 581473 - protein, 14 aa, Homo sapiens
  CDR3 for alpha chain variable domain of TCR clone 290737 (TRAV20, TRAJ29)
CAVQAWVGNTPLVF

SEQ ID NO: 581474 - protein, 15 aa, Homo sapiens
  CDR3 for beta chain variable domain of TCR clone 290737 (TRBV6-1, TRBJ2-6)
CASSSRPSGANVLTF

SEQ ID NO: 581475 - protein, 14 aa, Homo sapiens
  CDR3 for alpha chain variable domain of TCR clone 290738 (TRAV12-1, TRAJ23)
CVVKPGNQGGELIF

SEQ ID NO: 581476 - protein, 16 aa, Homo sapiens
  CDR3 for beta chain variable domain of TCR clone 290738 (TRBV7-9, TRBJ1-2)
CASSLGFSSGEDGYTF

SEQ ID NO: 581477 - protein, 13 aa, Homo sapiens
  CDR3 for alpha chain variable domain of TCR clone 290739 (TRAV3, TRAJ21)
CAVREPDFNKFYF

SEQ ID NO: 581478 - protein, 15 aa, Homo sapiens
  CDR3 for beta chain variable domain of TCR clone 290739 (TRBV20-1, TRBJ1-1)
CSAIRGVTRNTEAFF

SEQ ID NO: 581479 - protein, 17 aa, Homo sapiens
  CDR3 for alpha chain variable domain of TCR clone 290740 (TRAV3, TRAJ42)
CAVRDRDYGGSQGNLIF

SEQ ID NO: 581480 - protein, 16 aa, Homo sapiens
  CDR3 for beta chain variable domain of TCR clone 290740 (TRBV5-4, TRBJ2-3)
CASQQPGAGEADTQYF

SEQ ID NO: 581481 - protein, 11 aa, Homo sapiens
  CDR3 for alpha chain variable domain of TCR clone 290741 (TRAV13-2, TRAJ20)
CADSNDYKLSF

SEQ ID NO: 581482 - protein, 12 aa, Homo sapiens
  CDR3 for beta chain variable domain of TCR clone 290741 (TRBV11-3, TRBJ2-2)
CASSLGGGELFF

SEQ ID NO: 581483 - protein, 14 aa, Homo sapiens
  CDR3 for alpha chain variable domain of TCR clone 290742 (TRAV23/DV6, TRAJ24)
CAASLSDSWGKLQF

SEQ ID NO: 581484 - protein, 16 aa, Homo sapiens
  CDR3 for beta chain variable domain of TCR clone 290742 (TRBV4-1, TRBJ2-5)
CASSSGLAGVLGTQYF

SEQ ID NO: 581485 - protein, 13 aa, Homo sapiens
  CDR3 for alpha chain variable domain of TCR clone 290743 (TRAV8-4, TRAJ47)
CAVTALYGNKLVF

SEQ ID NO: 581486 - protein, 11 aa, Homo sapiens
  CDR3 for beta chain variable domain of TCR clone 290743 (TRBV11-2, TRBJ2-2)
CASSLPGELFF

SEQ ID NO: 581487 - protein, 14 aa, Homo sapiens
  CDR3 for alpha chain variable domain of TCR clone 290744 (TRAV6, TRAJ8)
CALERGTGFQKLVF

SEQ ID NO: 581488 - protein, 20 aa, Homo sapiens
  CDR3 for beta chain variable domain of TCR clone 290744 (TRBV28, TRBJ2-1)
CTSTPIGRSPGLAGGNEQFF

SEQ ID NO: 581489 - protein, 12 aa, Homo sapiens
  CDR3 for alpha chain variable domain of TCR clone 290745 (TRAV27, TRAJ35)
CAGADFGNVLHC

SEQ ID NO: 581490 - protein, 12 aa, Homo sapiens
  CDR3 for beta chain variable domain of TCR clone 290745 (TRBV28, TRBJ2-1)
CASSVQINEQFF

SEQ ID NO: 581491 - protein, 11 aa, Homo sapiens
  CDR3 for alpha chain variable domain of TCR clone 290746 (TRAV16, TRAJ33)
CALHSNYQLIW

SEQ ID NO: 581492 - protein, 17 aa, Homo sapiens
  CDR3 for beta chain variable domain of TCR clone 290746 (TRBV13, TRBJ2-3)
CASSLSRVAGGRNTQYF

SEQ ID NO: 581493 - protein, 14 aa, Homo sapiens
  CDR3 for alpha chain variable domain of TCR clone 290747 (TRAV35, TRAJ33)
CAGSSQDSDYQLIW

SEQ ID NO: 581494 - protein, 15 aa, Homo sapiens
  CDR3 for beta chain variable domain of TCR clone 290747 (TRBV20-1, TRBJ2-7)
CSAESGTSGAYGQYF

SEQ ID NO: 581495 - protein, 14 aa, Homo sapiens
  CDR3 for alpha chain variable domain of TCR clone 290748 (TRAV9-2, TRAJ39)
CALYIYNAGNMLTF

SEQ ID NO: 581496 - protein, 17 aa, Homo sapiens
  CDR3 for beta chain variable domain of TCR clone 290748 (TRBV28, TRBJ2-3)
CASRNPSYGFSTDTQYF

SEQ ID NO: 581497 - protein, 12 aa, Homo sapiens
  CDR3 for alpha chain variable domain of TCR clone 290749 (TRAV13-2, TRAJ23)
CAERHGGGKLIF

SEQ ID NO: 581498 - protein, 15 aa, Homo sapiens
  CDR3 for beta chain variable domain of TCR clone 290749 (TRBV19, TRBJ1-2)
CASSVGQVLNYGDTF

SEQ ID NO: 581499 - protein, 14 aa, Homo sapiens
  CDR3 for alpha chain variable domain of TCR clone 290750 (TRAV16, TRAJ16)
CALSVLSDGQQLLF

SEQ ID NO: 581500 - protein, 12 aa, Homo sapiens
  CDR3 for beta chain variable domain of TCR clone 290750 (TRBV5-5, TRBJ1-2)
CASSALNYGYTF

SEQ ID NO: 581501 - protein, 15 aa, Homo sapiens
  CDR3 for alpha chain variable domain of TCR clone 290751 (TRAV2, TRAJ37)
CAVGDGSSNTGNLIF

SEQ ID NO: 581502 - protein, 13 aa, Homo sapiens
  CDR3 for beta chain variable domain of TCR clone 290751 (TRBV20-1, TRBJ2-7)
CSAQTGLSYEQYF

SEQ ID NO: 581503 - protein, 14 aa, Homo sapiens
  CDR3 for alpha chain variable domain of TCR clone 290752 (TRAV20, TRAJ18)
CAVGRGSTLGRLYF

SEQ ID NO: 581504 - protein, 14 aa, Homo sapiens
  CDR3 for beta chain variable domain of TCR clone 290752 (TRBV28, TRBJ2-4)
CASTQVTGINIQYF

SEQ ID NO: 581505 - protein, 14 aa, Homo sapiens
  CDR3 for alpha chain variable domain of TCR clone 290753 (TRAV12-2, TRAJ40)
CAVKIPSGTYKYIF

SEQ ID NO: 581506 - protein, 12 aa, Homo sapiens
  CDR3 for beta chain variable domain of TCR clone 290753 (TRBV7-9, TRBJ1-5)
CASSPQGQPQHF

SEQ ID NO: 581507 - protein, 13 aa, Homo sapiens
  CDR3 for alpha chain variable domain of TCR clone 290754 (TRAV12-3, TRAJ47)
CAMKKEYGNKLVF

SEQ ID NO: 581508 - protein, 12 aa, Homo sapiens
  CDR3 for beta chain variable domain of TCR clone 290754 (TRBV3-1, TRBJ2-2)
CASSLGGGELFF

SEQ ID NO: 581509 - protein, 14 aa, Homo sapiens
  CDR3 for alpha chain variable domain of TCR clone 290755 (TRAV29/DV5, TRAJ36)
CSARRKTGANNLFF

SEQ ID NO: 581510 - protein, 13 aa, Homo sapiens
  CDR3 for beta chain variable domain of TCR clone 290755 (TRBV7-9, TRBJ1-2)
CASSLKQNYGYTF

SEQ ID NO: 581511 - protein, 12 aa, Homo sapiens
  CDR3 for alpha chain variable domain of TCR clone 290756 (TRAV12-1, TRAJ40)
CLVYSGTYKYIF

SEQ ID NO: 581512 - protein, 14 aa, Homo sapiens
  CDR3 for beta chain variable domain of TCR clone 290756 (TRBV20-1, TRBJ2-3)
CSARGGTSTDTQYF

SEQ ID NO: 581513 - protein, 14 aa, Homo sapiens
  CDR3 for alpha chain variable domain of TCR clone 290757 (TRAV36/DV7, TRAJ44)
CCGANTGTASKLTF

SEQ ID NO: 581514 - protein, 15 aa, Homo sapiens
  CDR3 for beta chain variable domain of TCR clone 290757 (TRBV6-3, TRBJ2-3)
CASSTRTFYTDTQYF

SEQ ID NO: 581515 - protein, 14 aa, Homo sapiens
  CDR3 for alpha chain variable domain of TCR clone 290758 (TRAV12-1, TRAJ34)
CVVNLDYNTDKLIF

SEQ ID NO: 581516 - protein, 19 aa, Homo sapiens
  CDR3 for beta chain variable domain of TCR clone 290758 (TRBV5-1, TRBJ2-3)
CASSLWLAGGITTTDTQYF

SEQ ID NO: 581517 - protein, 13 aa, Homo sapiens
  CDR3 for alpha chain variable domain of TCR clone 290759 (TRAV38-2/DV8, TRAJ34)
CAYRTWNTDKLIF

SEQ ID NO: 581518 - protein, 13 aa, Homo sapiens
  CDR3 for beta chain variable domain of TCR clone 290759 (TRBV20-1, TRBJ1-1)
CSARGGGNTEAFF

SEQ ID NO: 581519 - protein, 14 aa, Homo sapiens
  CDR3 for alpha chain variable domain of TCR clone 290760 (TRAV38-1, TRAJ40)
RALRPTSGTYKYIF

SEQ ID NO: 581520 - protein, 14 aa, Homo sapiens
  CDR3 for beta chain variable domain of TCR clone 290760 (TRBV25-1, TRBJ1-1)
CASTHLVGNTEAFF

SEQ ID NO: 581521 - protein, 14 aa, Homo sapiens
  CDR3 for alpha chain variable domain of TCR clone 290761 (TRAV12-2, TRAJ40)
CAVKIPPGTYKYIF

SEQ ID NO: 581522 - protein, 14 aa, Homo sapiens
  CDR3 for beta chain variable domain of TCR clone 290761 (TRBV20-1, TRBJ1-1)
CSAQTRIGGAEAFF

SEQ ID NO: 581523 - protein, 12 aa, Homo sapiens
  CDR3 for alpha chain variable domain of TCR clone 290762 (TRAV23/DV6, TRAJ53)
CAASKLGSGGSN

SEQ ID NO: 581524 - protein, 18 aa, Homo sapiens
  CDR3 for beta chain variable domain of TCR clone 290762 (TRBV12-4, TRBJ1-6)
CASSFGGASGIHPSTLGT

SEQ ID NO: 581525 - protein, 10 aa, Homo sapiens
  CDR3 for alpha chain variable domain of TCR clone 290763 (TRAV8-4, TRAJ43)
CAVSADDMRF

SEQ ID NO: 581526 - protein, 11 aa, Homo sapiens
  CDR3 for beta chain variable domain of TCR clone 290763 (TRBV10-3, TRBJ2-1)
CAISDRGLQFF

SEQ ID NO: 581527 - protein, 14 aa, Homo sapiens
  CDR3 for alpha chain variable domain of TCR clone 290764 (TRAV9-2, TRAJ39)
CALYIYNAGNMLTF

SEQ ID NO: 581528 - protein, 14 aa, Homo sapiens
  CDR3 for beta chain variable domain of TCR clone 290764 (TRBV19, TRBJ1-5)
CASRAPDSFLSQHF

SEQ ID NO: 581529 - protein, 12 aa, Homo sapiens
  CDR3 for alpha chain variable domain of TCR clone 290765 (TRAV12-2, TRAJ44)
CADTGTASNLTF

SEQ ID NO: 581530 - protein, 17 aa, Homo sapiens
  CDR3 for beta chain variable domain of TCR clone 290765 (TRBV20-1, TRBJ1-1)
CSARGTGGSYGNTGAFF

SEQ ID NO: 581531 - protein, 15 aa, Homo sapiens
  CDR3 for alpha chain variable domain of TCR clone 290766 (TRAV8-2, TRAJ15)
CVVTMGNQAGTALIF

SEQ ID NO: 581532 - protein, 15 aa, Homo sapiens
  CDR3 for beta chain variable domain of TCR clone 290766 (TRBV19, TRBJ2-1)
CASSRPGQNYNEQFF

SEQ ID NO: 581533 - protein, 10 aa, Homo sapiens
  CDR3 for alpha chain variable domain of TCR clone 290767 (TRAV35, TRAJ41)
DANSGYALNF

SEQ ID NO: 581534 - protein, 14 aa, Homo sapiens
  CDR3 for beta chain variable domain of TCR clone 290767 (TRBV9, TRBJ2-3)
CASSVGLSTDTQFF

SEQ ID NO: 581535 - protein, 11 aa, Homo sapiens
  CDR3 for alpha chain variable domain of TCR clone 290768 (TRAV1-1, TRAJ20)
CAVFNDYTLSF

SEQ ID NO: 581536 - protein, 16 aa, Homo sapiens
  CDR3 for beta chain variable domain of TCR clone 290768 (TRBV29-1, TRBJ2-2)
CSVEKTSEGNTGELFF

SEQ ID NO: 581537 - protein, 15 aa, Homo sapiens
  CDR3 for alpha chain variable domain of TCR clone 290769 (TRAV8-3, TRAJ27)
CAVGPSKTNAGKSTF

SEQ ID NO: 581538 - protein, 22 aa, Homo sapiens
  CDR3 for beta chain variable domain of TCR clone 290769 (TRBV7-2, TRBJ2-1)
RRTRPCISVPAAPLAGGNEQFF

SEQ ID NO: 581539 - protein, 12 aa, Homo sapiens
  CDR3 for alpha chain variable domain of TCR clone 290770 (TRAV13-1, TRAJ16)
CAAVSDGQKLLF

SEQ ID NO: 581540 - protein, 13 aa, Homo sapiens
  CDR3 for beta chain variable domain of TCR clone 290770 (TRBV11-2, TRBJ2-1)
CASSLDLVNEQFF

SEQ ID NO: 581541 - protein, 12 aa, Homo sapiens
  CDR3 for alpha chain variable domain of TCR clone 290771 (TRAV36/DV7, TRAJ37)
CACYVNTGKLIF

SEQ ID NO: 581542 - protein, 14 aa, Homo sapiens
  CDR3 for beta chain variable domain of TCR clone 290771 (TRBV6-3, TRBJ1-4)
CASSGQNLNEKLFF

SEQ ID NO: 581543 - protein, 13 aa, Homo sapiens
  CDR3 for alpha chain variable domain of TCR clone 290772 (TRAV8-4, TRAJ30)
CAVSVNRDDKIIF

SEQ ID NO: 581544 - protein, 11 aa, Homo sapiens
  CDR3 for beta chain variable domain of TCR clone 290772 (TRBV7-8, TRBJ2-7)
CASSLSLEQYF

SEQ ID NO: 581545 - protein, 14 aa, Homo sapiens
  CDR3 for alpha chain variable domain of TCR clone 290773 (TRAV23/DV6, TRAJ13)
CAAMYSGAYQKVTF

SEQ ID NO: 581546 - protein, 14 aa, Homo sapiens
  CDR3 for beta chain variable domain of TCR clone 290773 (TRBV7-9, TRBJ2-1)
CASSPRDSLYEQFF

SEQ ID NO: 581547 - protein, 19 aa, Homo sapiens
  CDR3 for alpha chain variable domain of TCR clone 290774 (TRAV26-1, TRAJ52)
CIFRAHRNAGGTSYVKLTF

SEQ ID NO: 581548 - protein, 15 aa, Homo sapiens
  CDR3 for beta chain variable domain of TCR clone 290774 (TRBV12-4, TRBJ2-5)
CASSPPTGLQETQYF

SEQ ID NO: 581549 - protein, 17 aa, Homo sapiens
  CDR3 for alpha chain variable domain of TCR clone 290775 (TRAV20, TRAJ4)
CAVQLVLFSGGYNKLLF

SEQ ID NO: 581550 - protein, 17 aa, Homo sapiens
  CDR3 for beta chain variable domain of TCR clone 290775 (TRBV27, TRBJ2-3)
CASSLRSLAGSTDTQYF

SEQ ID NO: 581551 - protein, 13 aa, Homo sapiens
  CDR3 for alpha chain variable domain of TCR clone 290776 (TRAV29/DV5, TRAJ31)
CAASRNNNARLMF

SEQ ID NO: 581552 - protein, 12 aa, Homo sapiens
  CDR3 for beta chain variable domain of TCR clone 290776 (TRBV14, TRBJ1-1)
CASSQLKGLAFL

SEQ ID NO: 581553 - protein, 10 aa, Homo sapiens
  CDR3 for alpha chain variable domain of TCR clone 290777 (TRAV23/DV6, TRAJ57)
CAASSTLSQG

SEQ ID NO: 581554 - protein, 12 aa, Homo sapiens
  CDR3 for beta chain variable domain of TCR clone 290777 (TRBV28, TRBJ2-7)
CASTGNHYEQYF

SEQ ID NO: 581555 - protein, 15 aa, Homo sapiens
  CDR3 for alpha chain variable domain of TCR clone 290778 (TRAV12-3, TRAJ27)
CALRAYNTNAGKSTF

SEQ ID NO: 581556 - protein, 13 aa, Homo sapiens
  CDR3 for beta chain variable domain of TCR clone 290778 (TRBV11-2, TRBJ2-5)
CASSRGPSETQYF

SEQ ID NO: 581557 - protein, 14 aa, Homo sapiens
  CDR3 for alpha chain variable domain of TCR clone 290779 (TRAV23/DV6, TRAJ40)
CASSLTSGTCKYIF

SEQ ID NO: 581558 - protein, 14 aa, Homo sapiens
  CDR3 for beta chain variable domain of TCR clone 290779 (TRBV5-1, TRBJ2-3)
CASSRGQGGGTQYF

SEQ ID NO: 581559 - protein, 14 aa, Homo sapiens
  CDR3 for alpha chain variable domain of TCR clone 290780 (TRAV1-2, TRAJ16)
CAGNRFSDGQKLLF

SEQ ID NO: 581560 - protein, 15 aa, Homo sapiens
  CDR3 for beta chain variable domain of TCR clone 290780 (TRBV7-9, TRBJ1-6)
CASSSPGRGNSTLHF

SEQ ID NO: 581561 - protein, 13 aa, Homo sapiens
  CDR3 for alpha chain variable domain of TCR clone 290781 (TRAV13-2, TRAJ40)
CAEFTSGTYKYIF

SEQ ID NO: 581562 - protein, 15 aa, Homo sapiens
  CDR3 for beta chain variable domain of TCR clone 290781 (TRBV7-2, TRBJ2-1)
CASSSGLAGGNEQFF

SEQ ID NO: 581563 - protein, 14 aa, Homo sapiens
  CDR3 for alpha chain variable domain of TCR clone 290782 (TRAV12-2, TRAJ40)
CAVKIPSGTYKYIF

SEQ ID NO: 581564 - protein, 14 aa, Homo sapiens
  CDR3 for beta chain variable domain of TCR clone 290782 (TRBV20-1, TRBJ1-1)
CSAQTRLGGTEAFF

SEQ ID NO: 581565 - protein, 14 aa, Homo sapiens
  CDR3 for alpha chain variable domain of TCR clone 290783 (TRAV1-2, TRAJ8)
CAVREDTGFQKLVF

SEQ ID NO: 581566 - protein, 14 aa, Homo sapiens
  CDR3 for beta chain variable domain of TCR clone 290783 (TRBV5-1, TRBJ1-1)
CASSLTRRSTEAFF

SEQ ID NO: 581567 - protein, 11 aa, Homo sapiens
  CDR3 for alpha chain variable domain of TCR clone 290784 (TRAV4, TRAJ28)
NSGAGSYQLTF

SEQ ID NO: 581568 - protein, 13 aa, Homo sapiens
  CDR3 for beta chain variable domain of TCR clone 290784 (TRBV12-4, TRBJ2-6)
CASSGTGANGLTF

SEQ ID NO: 581569 - protein, 14 aa, Homo sapiens
  CDR3 for alpha chain variable domain of TCR clone 290785 (TRAV38-1, TRAJ29)
CAFITHSGNTPLVF

SEQ ID NO: 581570 - protein, 14 aa, Homo sapiens
  CDR3 for beta chain variable domain of TCR clone 290785 (TRBV18, TRBJ2-7)
CASSRRGGAYEQYF

SEQ ID NO: 581571 - protein, 14 aa, Homo sapiens
  CDR3 for alpha chain variable domain of TCR clone 290786 (TRAV1-1, TRAJ35)
CAVRSIGFGIVLHC

SEQ ID NO: 581572 - protein, 14 aa, Homo sapiens
  CDR3 for beta chain variable domain of TCR clone 290786 (TRBV19, TRBJ2-1)
CASPTFVLSGEQFF

SEQ ID NO: 581573 - protein, 12 aa, Homo sapiens
  CDR3 for alpha chain variable domain of TCR clone 290787 (TRAV38-1, TRAJ32)
CAPLGATTKLIF

SEQ ID NO: 581574 - protein, 14 aa, Homo sapiens
  CDR3 for beta chain variable domain of TCR clone 290787 (TRBV29-1, TRBJ2-5)
CSVETSGSGETQYF

SEQ ID NO: 581575 - protein, 14 aa, Homo sapiens
  CDR3 for alpha chain variable domain of TCR clone 290788 (TRAV1-2, TRAJ16)
CAVNRFSDGQKLLF

SEQ ID NO: 581576 - protein, 12 aa, Homo sapiens
  CDR3 for beta chain variable domain of TCR clone 290788 (TRBV7-7, TRBJ2-7)
CASSLADSEQYF

SEQ ID NO: 581577 - protein, 14 aa, Homo sapiens
  CDR3 for alpha chain variable domain of TCR clone 290789 (TRAV12-2, TRAJ12)
CAVINRDSSYKLIF

SEQ ID NO: 581578 - protein, 15 aa, Homo sapiens
  CDR3 for beta chain variable domain of TCR clone 290789 (TRBV28, TRBJ2-1)
CDSSLDTSSYNEQFF

SEQ ID NO: 581579 - protein, 13 aa, Homo sapiens
  CDR3 for alpha chain variable domain of TCR clone 290790 (TRAV12-2, TRAJ20)
CAVYPSNDYKLSF

SEQ ID NO: 581580 - protein, 15 aa, Homo sapiens
  CDR3 for beta chain variable domain of TCR clone 290790 (TRBV28, TRBJ2-5)
CASSPPWSYQETQYF

SEQ ID NO: 581581 - protein, 13 aa, Homo sapiens
  CDR3 for alpha chain variable domain of TCR clone 290791 (TRAV12-2, TRAJ6)
CAVNVSRKLHTYI

SEQ ID NO: 581582 - protein, 15 aa, Homo sapiens
  CDR3 for beta chain variable domain of TCR clone 290791 (TRBV28, TRBJ2-4)
CAAGSGTLLMGMQYF

SEQ ID NO: 581583 - protein, 18 aa, Homo sapiens
  CDR3 for alpha chain variable domain of TCR clone 290792 (TRAV13-1, TRAJ52)
CAASKRSAGGTSYGKLTF

SEQ ID NO: 581584 - protein, 12 aa, Homo sapiens
  CDR3 for beta chain variable domain of TCR clone 290792 (TRBV12-4, TRBJ2-7)
CASSLEGYEQYF

SEQ ID NO: 581585 - protein, 13 aa, Homo sapiens
  CDR3 for alpha chain variable domain of TCR clone 290793 (TRAV3, TRAJ15)
CAVRDQAGTALIF

SEQ ID NO: 581586 - protein, 15 aa, Homo sapiens
  CDR3 for beta chain variable domain of TCR clone 290793 (TRBV11-1, TRBJ2-7)
CASSFNYGAYYEQYF

SEQ ID NO: 581587 - protein, 11 aa, Homo sapiens
  CDR3 for alpha chain variable domain of TCR clone 290794 (TRAV12-3, TRAJ10)
PLTGGGNKLTF

SEQ ID NO: 581588 - protein, 11 aa, Homo sapiens
  CDR3 for beta chain variable domain of TCR clone 290794 (TRBV29-1, TRBJ2-5)
CSEDRTGTQYF

SEQ ID NO: 581589 - protein, 12 aa, Homo sapiens
  CDR3 for alpha chain variable domain of TCR clone 290795 (TRAV12-1, TRAJ34)
CVVAGATDKLIF

SEQ ID NO: 581590 - protein, 17 aa, Homo sapiens
  CDR3 for beta chain variable domain of TCR clone 290795 (TRBV5-1, TRBJ2-5)
CASSPVALGQNQETQYF

SEQ ID NO: 581591 - protein, 14 aa, Homo sapiens
  CDR3 for alpha chain variable domain of TCR clone 290796 (TRAV12-2, TRAJ13)
CAVTKTGGYQKVTF

SEQ ID NO: 581592 - protein, 13 aa, Homo sapiens
  CDR3 for beta chain variable domain of TCR clone 290796 (TRBV20-1, TRBJ1-1)
CSARGGGNTEAFF

SEQ ID NO: 581593 - protein, 13 aa, Homo sapiens
  CDR3 for alpha chain variable domain of TCR clone 290797 (TRAV27, TRAJ29)
CAAAHSGNTPLVL

SEQ ID NO: 581594 - protein, 14 aa, Homo sapiens
  CDR3 for beta chain variable domain of TCR clone 290797 (TRBV7-9, TRBJ2-7)
CASSIGQGAGEQYF

SEQ ID NO: 581595 - protein, 15 aa, Homo sapiens
  CDR3 for alpha chain variable domain of TCR clone 290798 (TRAV26-2, TRAJ28)
CILVEPGAGSYQLTF

SEQ ID NO: 581596 - protein, 11 aa, Homo sapiens
  CDR3 for beta chain variable domain of TCR clone 290798 (TRBV25-1, TRBJ2-7)
CASSTSYEQYF

SEQ ID NO: 581597 - protein, 15 aa, Homo sapiens
  CDR3 for alpha chain variable domain of TCR clone 290799 (TRAV23/DV6, TRAJ13)
CAAWPGGGGYQKVTF

SEQ ID NO: 581598 - protein, 17 aa, Homo sapiens
  CDR3 for beta chain variable domain of TCR clone 290799 (TRBV19, TRBJ2-7)
CASSISFYDSYPDEQYF

SEQ ID NO: 581599 - protein, 11 aa, Homo sapiens
  CDR3 for alpha chain variable domain of TCR clone 290800 (TRAV2, TRAJ33)
CAVDSNYQLIW

SEQ ID NO: 581600 - protein, 12 aa, Homo sapiens
  CDR3 for beta chain variable domain of TCR clone 290800 (TRBV11-2, TRBJ2-2)
CASSLGGGELSF

SEQ ID NO: 581601 - protein, 14 aa, Homo sapiens
  CDR3 for alpha chain variable domain of TCR clone 290801 (TRAV26-1, TRAJ48)
CIVRVGFGNEKLTF

SEQ ID NO: 581602 - protein, 15 aa, Homo sapiens
  CDR3 for beta chain variable domain of TCR clone 290801 (TRBV7-2, TRBJ2-3)
CASSLGGGGRDTQYF

SEQ ID NO: 581603 - protein, 19 aa, Homo sapiens
  CDR3 for alpha chain variable domain of TCR clone 290802 (TRAV27, TRAJ41)
CAVRTQIPDIQNPDPAVYQ

SEQ ID NO: 581604 - protein, 16 aa, Homo sapiens
  CDR3 for beta chain variable domain of TCR clone 290802 (TRBV5-1, TRBJ2-3)
CASSLGLAVYTDTQYL

SEQ ID NO: 581605 - protein, 11 aa, Homo sapiens
  CDR3 for alpha chain variable domain of TCR clone 290803 (TRAV21, TRAJ34)
CSPLDTDKLIF

SEQ ID NO: 581606 - protein, 16 aa, Homo sapiens
  CDR3 for beta chain variable domain of TCR clone 290803 (TRBV5-1, TRBJ2-3)
CASSLAGDRGTDTQYF

SEQ ID NO: 581607 - protein, 14 aa, Homo sapiens
  CDR3 for alpha chain variable domain of TCR clone 290804 (TRAV1-2, TRAJ29)
CAVRELTSATPLVF

SEQ ID NO: 581608 - protein, 14 aa, Homo sapiens
  CDR3 for beta chain variable domain of TCR clone 290804 (TRBV3-1, TRBJ2-5)
CASSQGPDQETQCF

SEQ ID NO: 581609 - protein, 16 aa, Homo sapiens
  CDR3 for alpha chain variable domain of TCR clone 290805 (TRAV16, TRAJ4)
CALSRMFSGGYNKLIF

SEQ ID NO: 581610 - protein, 16 aa, Homo sapiens
  CDR3 for beta chain variable domain of TCR clone 290805 (TRBV24-1, TRBJ2-3)
CVTSDPGTGATDTQYF

SEQ ID NO: 581611 - protein, 13 aa, Homo sapiens
  CDR3 for alpha chain variable domain of TCR clone 290806 (TRAV8-2, TRAJ22)
CVVSEGSARQLTF

SEQ ID NO: 581612 - protein, 13 aa, Homo sapiens
  CDR3 for beta chain variable domain of TCR clone 290806 (TRBV4-2, TRBJ2-3)
CASSLTSTDTQYF

SEQ ID NO: 581613 - protein, 13 aa, Homo sapiens
  CDR3 for alpha chain variable domain of TCR clone 290807 (TRAV21, TRAJ57)
CAVTQGGSEKLVF

SEQ ID NO: 581614 - protein, 14 aa, Homo sapiens
  CDR3 for beta chain variable domain of TCR clone 290807 (TRBV28, TRBJ1-2)
CASRIQGANYGYTF

SEQ ID NO: 581615 - protein, 14 aa, Homo sapiens
  CDR3 for alpha chain variable domain of TCR clone 290808 (TRAV8-2, TRAJ11)
CVVSEKSGYSTLTF

SEQ ID NO: 581616 - protein, 16 aa, Homo sapiens
  CDR3 for beta chain variable domain of TCR clone 290808 (TRBV28, TRBJ2-1)
CASSSPEYPRDNEQSF

SEQ ID NO: 581617 - protein, 13 aa, Homo sapiens
  CDR3 for alpha chain variable domain of TCR clone 290809 (TRAV3, TRAJ20)
CAVRDTPRYKLSF

SEQ ID NO: 581618 - protein, 15 aa, Homo sapiens
  CDR3 for beta chain variable domain of TCR clone 290809 (TRBV5-1, TRBJ2-2)
CASSSQGGNTRELFF

SEQ ID NO: 581619 - protein, 14 aa, Homo sapiens
  CDR3 for alpha chain variable domain of TCR clone 290810 (TRAV29/DV5, TRAJ36)
CAARRKTGANNLFF

SEQ ID NO: 581620 - protein, 16 aa, Homo sapiens
  CDR3 for beta chain variable domain of TCR clone 290810 (TRBV12-4, TRBJ2-7)
CASRSTGTGPSYEQYF

SEQ ID NO: 581621 - protein, 14 aa, Homo sapiens
  CDR3 for alpha chain variable domain of TCR clone 290811 (TRAV26-1, TRAJ34)
CIVRVASNTDKLIF

SEQ ID NO: 581622 - protein, 15 aa, Homo sapiens
  CDR3 for beta chain variable domain of TCR clone 290811 (TRBV20-1, TRBJ2-7)
CSARVPAAYFYEQYL

SEQ ID NO: 581623 - protein, 16 aa, Homo sapiens
  CDR3 for alpha chain variable domain of TCR clone 290812 (TRAV4, TRAJ22)
CLVGDLYSCSARQLTF

SEQ ID NO: 581624 - protein, 16 aa, Homo sapiens
  CDR3 for beta chain variable domain of TCR clone 290812 (TRBV7-9, TRBJ2-1)
CASSDVAGGSYNEHFF

SEQ ID NO: 581625 - protein, 11 aa, Homo sapiens
  CDR3 for alpha chain variable domain of TCR clone 290813 (TRAV21, TRAJ34)
CAHYNTDKLIF

SEQ ID NO: 581626 - protein, 13 aa, Homo sapiens
  CDR3 for beta chain variable domain of TCR clone 290813 (TRBV19, TRBJ2-7)
CASRKAGGSEQYF

SEQ ID NO: 581627 - protein, 14 aa, Homo sapiens
  CDR3 for alpha chain variable domain of TCR clone 290814 (TRAV12-2, TRAJ24)
CAVTPADSWGKLQF

SEQ ID NO: 581628 - protein, 19 aa, Homo sapiens
  CDR3 for beta chain variable domain of TCR clone 290814 (TRBV19, TRBJ2-2)
CASTRPGLAGGRVTGELFF

SEQ ID NO: 581629 - protein, 12 aa, Homo sapiens
  CDR3 for alpha chain variable domain of TCR clone 290815 (TRAV8-3, TRAJ20)
CAVDFNDHKLSF

SEQ ID NO: 581630 - protein, 13 aa, Homo sapiens
  CDR3 for beta chain variable domain of TCR clone 290815 (TRBV5-7, TRBJ2-3)
CASSLGRTDTQYF

SEQ ID NO: 581631 - protein, 13 aa, Homo sapiens
  CDR3 for alpha chain variable domain of TCR clone 290816 (TRAV12-3, TRAJ7)
CAMSASGNNRLAF

SEQ ID NO: 581632 - protein, 19 aa, Homo sapiens
  CDR3 for beta chain variable domain of TCR clone 290816 (TRBV28, TRBJ2-7)
CASSYSGTSRLGWVYEQYF

SEQ ID NO: 581633 - protein, 15 aa, Homo sapiens
  CDR3 for alpha chain variable domain of TCR clone 290817 (TRAV12-3, TRAJ42)
CAMSGHGGSQGNLIF

SEQ ID NO: 581634 - protein, 13 aa, Homo sapiens
  CDR3 for beta chain variable domain of TCR clone 290817 (TRBV19, TRBJ2-5)
CASSGRARETQYF

SEQ ID NO: 581635 - protein, 17 aa, Homo sapiens
  CDR3 for alpha chain variable domain of TCR clone 290818 (TRAV20, TRAJ45)
FAVQGMYSGGGADGLTF

SEQ ID NO: 581636 - protein, 14 aa, Homo sapiens
  CDR3 for beta chain variable domain of TCR clone 290818 (TRBV18, TRBJ2-7)
CASSPRGGAYEQYF

SEQ ID NO: 581637 - protein, 16 aa, Homo sapiens
  CDR3 for alpha chain variable domain of TCR clone 290819 (TRAV30, TRAJ24)
CGAEIVDADSWGKFQF

SEQ ID NO: 581638 - protein, 15 aa, Homo sapiens
  CDR3 for beta chain variable domain of TCR clone 290819 (TRBV20-1, TRBJ2-7)
CSARDRVSGMDEQYF

SEQ ID NO: 581639 - protein, 15 aa, Homo sapiens
  CDR3 for alpha chain variable domain of TCR clone 290820 (TRAV13-1, TRAJ5)
CAASKADTGRRALTF

SEQ ID NO: 581640 - protein, 15 aa, Homo sapiens
  CDR3 for beta chain variable domain of TCR clone 290820 (TRBV19, TRBJ2-1)
CASSMGWNSNDEQFF

SEQ ID NO: 581641 - protein, 15 aa, Homo sapiens
  CDR3 for alpha chain variable domain of TCR clone 290821 (TRAV4, TRAJ39)
CLVGPNNNAGNTLTF

SEQ ID NO: 581642 - protein, 15 aa, Homo sapiens
  CDR3 for beta chain variable domain of TCR clone 290821 (TRBV19, TRBJ1-1)
CASTSGQIQNTEAFF

SEQ ID NO: 581643 - protein, 16 aa, Homo sapiens
  CDR3 for alpha chain variable domain of TCR clone 290822 (TRAV13-2, TRAJ53)
CAENANSGGSNYKLTC

SEQ ID NO: 581644 - protein, 19 aa, Homo sapiens
  CDR3 for beta chain variable domain of TCR clone 290822 (TRBV28, TRBJ2-7)
CASSYSGTSRLGWVYEQYF

SEQ ID NO: 581645 - protein, 16 aa, Homo sapiens
  CDR3 for alpha chain variable domain of TCR clone 290823 (TRAV16, TRAJ21)
CACGWATNSTNFTLVL

SEQ ID NO: 581646 - protein, 15 aa, Homo sapiens
  CDR3 for beta chain variable domain of TCR clone 290823 (TRBV19, TRBJ2-1)
CASSIQATSYNEQFF

SEQ ID NO: 581647 - protein, 14 aa, Homo sapiens
  CDR3 for alpha chain variable domain of TCR clone 290824 (TRAV1-2, TRAJ8)
CAVREDTGFQKLVF

SEQ ID NO: 581648 - protein, 15 aa, Homo sapiens
  CDR3 for beta chain variable domain of TCR clone 290824 (TRBV20-1, TRBJ2-7)
CSAIDRVSGMDEQYF

SEQ ID NO: 581649 - protein, 19 aa, Homo sapiens
  CDR3 for alpha chain variable domain of TCR clone 290825 (TRAV2, TRAJ20)
ILQVREADAAVYRDCKLSF

SEQ ID NO: 581650 - protein, 16 aa, Homo sapiens
  CDR3 for beta chain variable domain of TCR clone 290825 (TRBV5-1, TRBJ2-5)
CASSLALLRAGENQYF

SEQ ID NO: 581651 - protein, 14 aa, Homo sapiens
  CDR3 for alpha chain variable domain of TCR clone 290826 (TRAV20, TRAJ4)
CAVRLGGGYNKLIF

SEQ ID NO: 581652 - protein, 20 aa, Homo sapiens
  CDR3 for beta chain variable domain of TCR clone 290826 (TRBV15, TRBJ2-1)
WGTQPCTCVPPAEVDTARFF

SEQ ID NO: 581653 - protein, 16 aa, Homo sapiens
  CDR3 for alpha chain variable domain of TCR clone 290827 (TRAV30, TRAJ24)
CGTEIVDADSWGKFQF

SEQ ID NO: 581654 - protein, 14 aa, Homo sapiens
  CDR3 for beta chain variable domain of TCR clone 290827 (TRBV18, TRBJ2-3)
CACSPRTSTDTQYF

SEQ ID NO: 581655 - protein, 15 aa, Homo sapiens
  CDR3 for alpha chain variable domain of TCR clone 290828 (TRAV8-3, TRAJ41)
CAVRSNSNSGYSLNF

SEQ ID NO: 581656 - protein, 17 aa, Homo sapiens
  CDR3 for beta chain variable domain of TCR clone 290828 (TRBV25-1, TRBJ2-1)
CASSAYGQGRGVYEQFF

SEQ ID NO: 581657 - protein, 14 aa, Homo sapiens
  CDR3 for alpha chain variable domain of TCR clone 290829 (TRAV1-2, TRAJ8)
CAVRENTGFQKLVF

SEQ ID NO: 581658 - protein, 15 aa, Homo sapiens
  CDR3 for beta chain variable domain of TCR clone 290829 (TRBV12-4, TRBJ2-5)
CASSPPTGLQETQYF

SEQ ID NO: 581659 - protein, 14 aa, Homo sapiens
  CDR3 for alpha chain variable domain of TCR clone 290830 (TRAV8-2, TRAJ11)
CVVSEKSGYSTLTF

SEQ ID NO: 581660 - protein, 14 aa, Homo sapiens
  CDR3 for beta chain variable domain of TCR clone 290830 (TRBV7-2, TRBJ1-1)
CASSFLTGTTEAFF

SEQ ID NO: 581661 - protein, 13 aa, Homo sapiens
  CDR3 for alpha chain variable domain of TCR clone 290831 (TRAV23/DV6, TRAJ45)
CAARRGGADGHTF

SEQ ID NO: 581662 - protein, 14 aa, Homo sapiens
  CDR3 for beta chain variable domain of TCR clone 290831 (TRBV7-2, TRBJ2-3)
CASSLARGTDTQYF

SEQ ID NO: 581663 - protein, 16 aa, Homo sapiens
  CDR3 for alpha chain variable domain of TCR clone 290832 (TRAV12-3, TRAJ53)
CAMSPGSGGSNYKLTF

SEQ ID NO: 581664 - protein, 20 aa, Homo sapiens
  CDR3 for beta chain variable domain of TCR clone 290832 (TRBV7-8, TRBJ2-2)
CASSHLFPGPTIHVTGELFF

SEQ ID NO: 581665 - protein, 16 aa, Homo sapiens
  CDR3 for alpha chain variable domain of TCR clone 290833 (TRAV13-1, TRAJ13)
CTAFVLGVTRKLPLEL

SEQ ID NO: 581666 - protein, 15 aa, Homo sapiens
  CDR3 for beta chain variable domain of TCR clone 290833 (TRBV5-1, TRBJ2-1)
CASSPPRAPYNEQFF

SEQ ID NO: 581667 - protein, 14 aa, Homo sapiens
  CDR3 for alpha chain variable domain of TCR clone 290834 (TRAV1-1, TRAJ30)
CAVRSLNRGDKIIF

SEQ ID NO: 581668 - protein, 12 aa, Homo sapiens
  CDR3 for beta chain variable domain of TCR clone 290834 (TRBV11-2, TRBJ2-2)
CASSLGGGELFF

SEQ ID NO: 581669 - protein, 12 aa, Homo sapiens
  CDR3 for alpha chain variable domain of TCR clone 290835 (TRAV2, TRAJ5)
GALDTSRRALTF

SEQ ID NO: 581670 - protein, 15 aa, Homo sapiens
  CDR3 for beta chain variable domain of TCR clone 290835 (TRBV10-3, TRBJ2-1)
CAISDVQDRAYEQFF

SEQ ID NO: 581671 - protein, 14 aa, Homo sapiens
  CDR3 for alpha chain variable domain of TCR clone 290836 (TRAV1-2, TRAJ8)
CSVREDAGFQKLVF

SEQ ID NO: 581672 - protein, 15 aa, Homo sapiens
  CDR3 for beta chain variable domain of TCR clone 290836 (TRBV7-9, TRBJ1-4)
CASSARAGGNEKLFF

SEQ ID NO: 581673 - protein, 19 aa, Homo sapiens
  CDR3 for alpha chain variable domain of TCR clone 290837 (TRAV3, TRAJ37)
CAVRDIVGGYPSNTGELIF

SEQ ID NO: 581674 - protein, 14 aa, Homo sapiens
  CDR3 for beta chain variable domain of TCR clone 290837 (TRBV7-8, TRBJ2-3)
CASSLEAGTDTQYF

SEQ ID NO: 581675 - protein, 15 aa, Homo sapiens
  CDR3 for alpha chain variable domain of TCR clone 290838 (TRAV17, TRAJ6)
CATDLPSGGIYIPTF

SEQ ID NO: 581676 - protein, 16 aa, Homo sapiens
  CDR3 for beta chain variable domain of TCR clone 290838 (TRBV4-1, TRBJ2-7)
CASSQDPTGYSYEQYF

SEQ ID NO: 581677 - protein, 15 aa, Homo sapiens
  CDR3 for alpha chain variable domain of TCR clone 290839 (TRAV12-1, TRAJ45)
CVGLSGGGGADGLTF

SEQ ID NO: 581678 - protein, 12 aa, Homo sapiens
  CDR3 for beta chain variable domain of TCR clone 290839 (TRBV12-5, TRBJ2-5)
CASGQGVETQYF

SEQ ID NO: 581679 - protein, 10 aa, Homo sapiens
  CDR3 for alpha chain variable domain of TCR clone 290840 (TRAV5, TRAJ34)
CAEETDKLIF

SEQ ID NO: 581680 - protein, 14 aa, Homo sapiens
  CDR3 for beta chain variable domain of TCR clone 290840 (TRBV20-1, TRBJ2-5)
CSARDGRAGETQYF

SEQ ID NO: 581681 - protein, 13 aa, Homo sapiens
  CDR3 for alpha chain variable domain of TCR clone 290841 (TRAV14/DV4, TRAJ26)
CAMREAYGQNFVF

SEQ ID NO: 581682 - protein, 10 aa, Homo sapiens
  CDR3 for beta chain variable domain of TCR clone 290841 (TRBV13, TRBJ2-6)
CASSLVHRDR

SEQ ID NO: 581683 - protein, 13 aa, Homo sapiens
  CDR3 for alpha chain variable domain of TCR clone 290842 (TRAV20, TRAJ20)
CAVQAGSGYKLSF

SEQ ID NO: 581684 - protein, 15 aa, Homo sapiens
  CDR3 for beta chain variable domain of TCR clone 290842 (TRBV7-9, TRBJ1-5)
CASSFGTGNNQPQHF

SEQ ID NO: 581685 - protein, 15 aa, Homo sapiens
  CDR3 for alpha chain variable domain of TCR clone 290843 (TRAV34, TRAJ38)
CGADFTPGNNRKLLW

SEQ ID NO: 581686 - protein, 12 aa, Homo sapiens
  CDR3 for beta chain variable domain of TCR clone 290843 (TRBV7-9, TRBJ2-7)
RATRTDAYEQYF

SEQ ID NO: 581687 - protein, 13 aa, Homo sapiens
  CDR3 for alpha chain variable domain of TCR clone 290844 (TRAV26-1, TRAJ34)
CIVRPWITDKLTF

SEQ ID NO: 581688 - protein, 13 aa, Homo sapiens
  CDR3 for beta chain variable domain of TCR clone 290844 (TRBV5-1, TRBJ2-1)
CASSLGSYNEQFF

SEQ ID NO: 581689 - protein, 14 aa, Homo sapiens
  CDR3 for alpha chain variable domain of TCR clone 290845 (TRAV12-3, TRAJ13)
CAMKNSGGYQKVTF

SEQ ID NO: 581690 - protein, 12 aa, Homo sapiens
  CDR3 for beta chain variable domain of TCR clone 290845 (TRBV6-3, TRBJ2-7)
CASSLTPYEQYF

SEQ ID NO: 581691 - protein, 17 aa, Homo sapiens
  CDR3 for alpha chain variable domain of TCR clone 290846 (TRAV13-1, TRAJ52)
CVASLGVGGTSYGKLTF

SEQ ID NO: 581692 - protein, 15 aa, Homo sapiens
  CDR3 for beta chain variable domain of TCR clone 290846 (TRBV2, TRBJ2-1)
CASSELAGSYNEQFF

SEQ ID NO: 581693 - protein, 15 aa, Homo sapiens
  CDR3 for alpha chain variable domain of TCR clone 290847 (TRAV26-1, TRAJ22)
CIVRVSFWFCKATDL

SEQ ID NO: 581694 - protein, 14 aa, Homo sapiens
  CDR3 for beta chain variable domain of TCR clone 290847 (TRBV5-1, TRBJ2-7)
CASSRGESLYEQYF

SEQ ID NO: 581695 - protein, 15 aa, Homo sapiens
  CDR3 for alpha chain variable domain of TCR clone 290848 (TRAV20, TRAJ6)
CAVRLQSGGSYIPTF

SEQ ID NO: 581696 - protein, 20 aa, Homo sapiens
  CDR3 for beta chain variable domain of TCR clone 290848 (TRBV28, TRBJ2-1)
CASTPIGRSPGLAGGNEQFF

SEQ ID NO: 581697 - protein, 16 aa, Homo sapiens
  CDR3 for alpha chain variable domain of TCR clone 290849 (TRAV16, TRAJ4)
CALSRMFSGGYNKLLF

SEQ ID NO: 581698 - protein, 16 aa, Homo sapiens
  CDR3 for beta chain variable domain of TCR clone 290849 (TRBV24-1, TRBJ2-3)
CATSDPGTGATGTQYF

SEQ ID NO: 581699 - protein, 14 aa, Homo sapiens
  CDR3 for alpha chain variable domain of TCR clone 290850 (TRAV12-3, TRAJ10)
SHLPLTGGGNKLTF

SEQ ID NO: 581700 - protein, 17 aa, Homo sapiens
  CDR3 for beta chain variable domain of TCR clone 290850 (TRBV11-2, TRBJ2-4)
CASSSVGPGGHRNIQYF

SEQ ID NO: 581701 - protein, 14 aa, Homo sapiens
  CDR3 for alpha chain variable domain of TCR clone 290851 (TRAV8-4, TRAJ54)
CAVCEVLGAQELVF

SEQ ID NO: 581702 - protein, 13 aa, Homo sapiens
  CDR3 for beta chain variable domain of TCR clone 290851 (TRBV27, TRBJ2-7)
CASSFVSSYEQYF

SEQ ID NO: 581703 - protein, 14 aa, Homo sapiens
  CDR3 for alpha chain variable domain of TCR clone 290852 (TRAV8-4, TRAJ34)
CAVSDPGDTDKPIF

SEQ ID NO: 581704 - protein, 14 aa, Homo sapiens
  CDR3 for beta chain variable domain of TCR clone 290852 (TRBV20-1, TRBJ2-5)
CSARDGRAGETQYF

SEQ ID NO: 581705 - protein, 15 aa, Homo sapiens
  CDR3 for alpha chain variable domain of TCR clone 290853 (TRAV4, TRAJ39)
CLVGPNNNAGNMVTF

SEQ ID NO: 581706 - protein, 12 aa, Homo sapiens
  CDR3 for beta chain variable domain of TCR clone 290853 (TRBV12-5, TRBJ2-5)
CASGQGVETQYF

SEQ ID NO: 581707 - protein, 13 aa, Homo sapiens
  CDR3 for alpha chain variable domain of TCR clone 290854 (TRAV2, TRAJ24)
CAVTTDSWGQLQF

SEQ ID NO: 581708 - protein, 14 aa, Homo sapiens
  CDR3 for beta chain variable domain of TCR clone 290854 (TRBV13, TRBJ2-5)
CASSLGREQETQYF

SEQ ID NO: 581709 - protein, 15 aa, Homo sapiens
  CDR3 for alpha chain variable domain of TCR clone 290855 (TRAV3, TRAJ4)
CAVRDGTGGYNKLIF

SEQ ID NO: 581710 - protein, 16 aa, Homo sapiens
  CDR3 for beta chain variable domain of TCR clone 290855 (TRBV11-2, TRBJ2-1)
CQQLIPPGVEYNEQFF

SEQ ID NO: 581711 - protein, 14 aa, Homo sapiens
  CDR3 for alpha chain variable domain of TCR clone 290856 (TRAV38-1, TRAJ40)
CALRPTSGTYKYIF

SEQ ID NO: 581712 - protein, 14 aa, Homo sapiens
  CDR3 for beta chain variable domain of TCR clone 290856 (TRBV15, TRBJ2-5)
CATSMGGSGETQYF

SEQ ID NO: 581713 - protein, 17 aa, Homo sapiens
  CDR3 for alpha chain variable domain of TCR clone 290857 (TRAV26-1, TRAJ28)
CIVRVPDSGAGSYQLTF

SEQ ID NO: 581714 - protein, 17 aa, Homo sapiens
  CDR3 for beta chain variable domain of TCR clone 290857 (TRBV28, TRBJ2-7)
CASSPLPAGGKCYEQYF

SEQ ID NO: 581715 - protein, 17 aa, Homo sapiens
  CDR3 for alpha chain variable domain of TCR clone 290858 (TRAV3, TRAJ6)
CAVRDGPRAGGKYIPTL

SEQ ID NO: 581716 - protein, 14 aa, Homo sapiens
  CDR3 for beta chain variable domain of TCR clone 290858 (TRBV7-2, TRBJ2-7)
CASSPKTSFYEQYF

SEQ ID NO: 581717 - protein, 16 aa, Homo sapiens
  CDR3 for alpha chain variable domain of TCR clone 290859 (TRAV12-3, TRAJ53)
CAMSPGRGGSNYKLTY

SEQ ID NO: 581718 - protein, 11 aa, Homo sapiens
  CDR3 for beta chain variable domain of TCR clone 290859 (TRBV29-1, TRBJ2-5)
CSEDRTGTQYF

SEQ ID NO: 581719 - protein, 12 aa, Homo sapiens
  CDR3 for alpha chain variable domain of TCR clone 290860 (TRAV21, TRAJ15)
CAVNQAGTALIF

SEQ ID NO: 581720 - protein, 13 aa, Homo sapiens
  CDR3 for beta chain variable domain of TCR clone 290860 (TRBV11-2, TRBJ2-5)
CARSSTGEETQYF

SEQ ID NO: 581721 - protein, 11 aa, Homo sapiens
  CDR3 for alpha chain variable domain of TCR clone 290861 (TRAV21, TRAJ48)
CAVDGNGQLTF

SEQ ID NO: 581722 - protein, 16 aa, Homo sapiens
  CDR3 for beta chain variable domain of TCR clone 290861 (TRBV12-4, TRBJ1-5)
CASSSGPRGSNQPQHF

SEQ ID NO: 581723 - protein, 14 aa, Homo sapiens
  CDR3 for alpha chain variable domain of TCR clone 290862 (TRAV12-1, TRAJ37)
CVVNRRSNTGKLIF

SEQ ID NO: 581724 - protein, 14 aa, Homo sapiens
  CDR3 for beta chain variable domain of TCR clone 290862 (TRBV12-4, TRBJ1-2)
CASSSSAAGSSYTF

SEQ ID NO: 581725 - protein, 12 aa, Homo sapiens
  CDR3 for alpha chain variable domain of TCR clone 290863 (TRAV30, TRAJ39)
CGRGNAGNMLTF

SEQ ID NO: 581726 - protein, 14 aa, Homo sapiens
  CDR3 for beta chain variable domain of TCR clone 290863 (TRBV18, TRBJ1-5)
CASSPGNSNQPQHF

SEQ ID NO: 581727 - protein, 21 aa, Homo sapiens
  CDR3 for alpha chain variable domain of TCR clone 290864 (TRAV27, TRAJ3)
TAAQPGDTGLPPGQQCFKIIF

SEQ ID NO: 581728 - protein, 15 aa, Homo sapiens
  CDR3 for beta chain variable domain of TCR clone 290864 (TRBV28, TRBJ1-3)
CASSMGWASGNTIYF

SEQ ID NO: 581729 - protein, 13 aa, Homo sapiens
  CDR3 for alpha chain variable domain of TCR clone 290865 (TRAV2, TRAJ15)
CAVASQAGTALIF

SEQ ID NO: 581730 - protein, 12 aa, Homo sapiens
  CDR3 for beta chain variable domain of TCR clone 290865 (TRBV12-4, TRBJ1-2)
CASSFMWLHLRF

SEQ ID NO: 581731 - protein, 11 aa, Homo sapiens
  CDR3 for alpha chain variable domain of TCR clone 290866 (TRAV21, TRAJ31)
CAVRNNSRLMF

SEQ ID NO: 581732 - protein, 15 aa, Homo sapiens
  CDR3 for beta chain variable domain of TCR clone 290866 (TRBV20-1, TRBJ2-7)
CSARDRVSGMDEQYF

SEQ ID NO: 581733 - protein, 16 aa, Homo sapiens
  CDR3 for alpha chain variable domain of TCR clone 290867 (TRAV30, TRAJ24)
CGTEIVDADSWGKSQF

SEQ ID NO: 581734 - protein, 17 aa, Homo sapiens
  CDR3 for beta chain variable domain of TCR clone 290867 (TRBV3-1, TRBJ2-2)
CASSFELGQRNTGELFF

SEQ ID NO: 581735 - protein, 13 aa, Homo sapiens
  CDR3 for alpha chain variable domain of TCR clone 290868 (TRAV22, TRAJ29)
CAVGGSGNNPLVF

SEQ ID NO: 581736 - protein, 13 aa, Homo sapiens
  CDR3 for beta chain variable domain of TCR clone 290868 (TRBV4-2, TRBJ1-1)
CASSQAGNTEAFF

SEQ ID NO: 581737 - protein, 13 aa, Homo sapiens
  CDR3 for alpha chain variable domain of TCR clone 290869 (TRAV27, TRAJ3)
ASLRGSSASKMIF

SEQ ID NO: 581738 - protein, 15 aa, Homo sapiens
  CDR3 for beta chain variable domain of TCR clone 290869 (TRBV28, TRBJ1-3)
CASSMGWASGNTIYF

SEQ ID NO: 581739 - protein, 15 aa, Homo sapiens
  CDR3 for alpha chain variable domain of TCR clone 290870 (TRAV26-1, TRAJ37)
CIVRLGSGNTGKLIF

SEQ ID NO: 581740 - protein, 13 aa, Homo sapiens
  CDR3 for beta chain variable domain of TCR clone 290870 (TRBV6-6, TRBJ2-7)
CASSSSGSYEQYV

SEQ ID NO: 581741 - protein, 18 aa, Homo sapiens
  CDR3 for alpha chain variable domain of TCR clone 290871 (TRAV1-2, TRAJ16)
CLLPLCSTWFSDGQKLLF

SEQ ID NO: 581742 - protein, 17 aa, Homo sapiens
  CDR3 for beta chain variable domain of TCR clone 290871 (TRBV13, TRBJ2-3)
CASSLSRVAGGRNTQYF

SEQ ID NO: 581743 - protein, 14 aa, Homo sapiens
  CDR3 for alpha chain variable domain of TCR clone 290872 (TRAV1-2, TRAJ16)
CAVNRFSDGQKLLF

SEQ ID NO: 581744 - protein, 15 aa, Homo sapiens
  CDR3 for beta chain variable domain of TCR clone 290872 (TRBV7-3, TRBJ2-3)
CASSLTSGETDTQYF

SEQ ID NO: 581745 - protein, 15 aa, Homo sapiens
  CDR3 for alpha chain variable domain of TCR clone 290873 (TRAV27, TRAJ38)
CAARRNAGNNRKLIW

SEQ ID NO: 581746 - protein, 15 aa, Homo sapiens
  CDR3 for beta chain variable domain of TCR clone 290873 (TRBV12-4, TRBJ2-5)
CASSPPTGLQETRYF

SEQ ID NO: 581747 - protein, 14 aa, Homo sapiens
  CDR3 for alpha chain variable domain of TCR clone 290874 (TRAV26-1, TRAJ34)
CIVRVAYNTDKLIF

SEQ ID NO: 581748 - protein, 13 aa, Homo sapiens
  CDR3 for beta chain variable domain of TCR clone 290874 (TRBV7-3, TRBJ2-1)
CASSVDSYNEQFF

SEQ ID NO: 581749 - protein, 18 aa, Homo sapiens
  CDR3 for alpha chain variable domain of TCR clone 290875 (TRAV12-2, )
CAVEDIQNPDPAVYRLRD

SEQ ID NO: 581750 - protein, 16 aa, Homo sapiens
  CDR3 for beta chain variable domain of TCR clone 290875 (TRBV6-1, TRBJ1-2)
CASSGAWQGRSHGYTF

SEQ ID NO: 581751 - protein, 14 aa, Homo sapiens
  CDR3 for alpha chain variable domain of TCR clone 290876 (TRAV8-3, TRAJ4)
CAVGAAGGYNKLIF

SEQ ID NO: 581752 - protein, 12 aa, Homo sapiens
  CDR3 for beta chain variable domain of TCR clone 290876 (TRBV7-6, TRBJ2-7)
CASSLDPVEQYF

SEQ ID NO: 581753 - protein, 14 aa, Homo sapiens
  CDR3 for alpha chain variable domain of TCR clone 290877 (TRAV26-1, TRAJ38)
CIADNAGNNRKLIW

SEQ ID NO: 581754 - protein, 15 aa, Homo sapiens
  CDR3 for beta chain variable domain of TCR clone 290877 (TRBV7-3, TRBJ2-1)
CASSLSSGSFDEQFF

SEQ ID NO: 581755 - protein, 22 aa, Homo sapiens
  CDR3 for alpha chain variable domain of TCR clone 290878 (TRAV8-2, TRAJ45)
HLTKPSAHMSDAAEYSADGLTF

SEQ ID NO: 581756 - protein, 12 aa, Homo sapiens
  CDR3 for beta chain variable domain of TCR clone 290878 (TRBV7-3, TRBJ2-1)
CQQPVAYNEQFF

SEQ ID NO: 581757 - protein, 16 aa, Homo sapiens
  CDR3 for alpha chain variable domain of TCR clone 290879 (TRAV16, TRAJ4)
CALSRMFSGGYNKLIF

SEQ ID NO: 581758 - protein, 13 aa, Homo sapiens
  CDR3 for beta chain variable domain of TCR clone 290879 (TRBV7-2, TRBJ2-2)
CASSLAVTGELFF

SEQ ID NO: 581759 - protein, 15 aa, Homo sapiens
  CDR3 for alpha chain variable domain of TCR clone 290880 (TRAV3, TRAJ9)
CAVRVRNTGGFKTIF

SEQ ID NO: 581760 - protein, 16 aa, Homo sapiens
  CDR3 for beta chain variable domain of TCR clone 290880 (TRBV4-3, TRBJ2-2)
CASSHLQGSGTGELFF

SEQ ID NO: 581761 - protein, 12 aa, Homo sapiens
  CDR3 for alpha chain variable domain of TCR clone 290881 (TRAV3, TRAJ20)
CAVRDPAYKLSF

SEQ ID NO: 581762 - protein, 15 aa, Homo sapiens
  CDR3 for beta chain variable domain of TCR clone 290881 (TRBV2, TRBJ2-2)
CASSRETVGTGELFF

SEQ ID NO: 581763 - protein, 14 aa, Homo sapiens
  CDR3 for alpha chain variable domain of TCR clone 290882 (TRAV12-3, TRAJ10)
SHLPLTGGGNKLTF

SEQ ID NO: 581764 - protein, 13 aa, Homo sapiens
  CDR3 for beta chain variable domain of TCR clone 290882 (TRBV20-1, TRBJ1-5)
CSASQQVVQPQLF

SEQ ID NO: 581765 - protein, 12 aa, Homo sapiens
  CDR3 for alpha chain variable domain of TCR clone 290883 (TRAV13-1, TRAJ21)
CAAKEGFNKCYF

SEQ ID NO: 581766 - protein, 14 aa, Homo sapiens
  CDR3 for beta chain variable domain of TCR clone 290883 (TRBV12-4, TRBJ1-1)
CASSLDGLNTEAFF

SEQ ID NO: 581767 - protein, 14 aa, Homo sapiens
  CDR3 for alpha chain variable domain of TCR clone 290884 (TRAV35, TRAJ13)
CAGSPSGGYQKVTF

SEQ ID NO: 581768 - protein, 13 aa, Homo sapiens
  CDR3 for beta chain variable domain of TCR clone 290884 (TRBV29-1, TRBJ1-1)
CSVGDNRNTEAFF

SEQ ID NO: 581769 - protein, 14 aa, Homo sapiens
  CDR3 for alpha chain variable domain of TCR clone 290885 (TRAV2, TRAJ12)
CAVDAMDSSYKVIF

SEQ ID NO: 581770 - protein, 13 aa, Homo sapiens
  CDR3 for beta chain variable domain of TCR clone 290885 (TRBV19, TRBJ2-1)
CASKVGAGGEQFF

SEQ ID NO: 581771 - protein, 14 aa, Homo sapiens
  CDR3 for alpha chain variable domain of TCR clone 290886 (TRAV4, TRAJ9)
CLVGAGNGGFKTIF

SEQ ID NO: 581772 - protein, 14 aa, Homo sapiens
  CDR3 for beta chain variable domain of TCR clone 290886 (TRBV7-9, TRBJ2-4)
CASSLAMGGNIQYF

SEQ ID NO: 581773 - protein, 16 aa, Homo sapiens
  CDR3 for alpha chain variable domain of TCR clone 290887 (TRAV24, TRAJ37)
CAFPLIGSGNTGKLIF

SEQ ID NO: 581774 - protein, 15 aa, Homo sapiens
  CDR3 for beta chain variable domain of TCR clone 290887 (TRBV29-1, TRBJ2-7)
CSVEFFDRGSYEQYF

SEQ ID NO: 581775 - protein, 12 aa, Homo sapiens
  CDR3 for alpha chain variable domain of TCR clone 290888 (TRAV13-1, TRAJ21)
CAAKEGFNKFYF

SEQ ID NO: 581776 - protein, 14 aa, Homo sapiens
  CDR3 for beta chain variable domain of TCR clone 290888 (TRBV20-1, TRBJ2-7)
CSAPELAGVGEQYF

SEQ ID NO: 581777 - protein, 14 aa, Homo sapiens
  CDR3 for alpha chain variable domain of TCR clone 290889 (TRAV12-2, TRAJ29)
CAVRSNSGNTPLVF

SEQ ID NO: 581778 - protein, 13 aa, Homo sapiens
  CDR3 for beta chain variable domain of TCR clone 290889 (TRBV12-4, TRBJ2-1)
CASSHYTDNEQFF

SEQ ID NO: 581779 - protein, 14 aa, Homo sapiens
  CDR3 for alpha chain variable domain of TCR clone 290890 (TRAV1-2, TRAJ16)
SAVNRFSDGQKLLF

SEQ ID NO: 581780 - protein, 15 aa, Homo sapiens
  CDR3 for beta chain variable domain of TCR clone 290890 (TRBV9, TRBJ1-6)
CASSVAGTGDSPLRF

SEQ ID NO: 581781 - protein, 12 aa, Homo sapiens
  CDR3 for alpha chain variable domain of TCR clone 290891 (TRAV13-2, TRAJ41)
CAKNIGRYALNF

SEQ ID NO: 581782 - protein, 14 aa, Homo sapiens
  CDR3 for beta chain variable domain of TCR clone 290891 (TRBV7-9, TRBJ1-1)
CASSLLSGLSEAFF

SEQ ID NO: 581783 - protein, 12 aa, Homo sapiens
  CDR3 for alpha chain variable domain of TCR clone 290892 (TRAV27, TRAJ54)
CAGDEGAQKLVF

SEQ ID NO: 581784 - protein, 16 aa, Homo sapiens
  CDR3 for beta chain variable domain of TCR clone 290892 (TRBV12-4, TRBJ2-7)
CASSLIGGTGTYEQYF

SEQ ID NO: 581785 - protein, 17 aa, Homo sapiens
  CDR3 for alpha chain variable domain of TCR clone 290893 (TRAV3, TRAJ12)
CCERRDGTMDSSYKLIF

SEQ ID NO: 581786 - protein, 15 aa, Homo sapiens
  CDR3 for beta chain variable domain of TCR clone 290893 (TRBV5-5, TRBJ1-5)
CASSLEGGGEQPQHF

SEQ ID NO: 581787 - protein, 10 aa, Homo sapiens
  CDR3 for alpha chain variable domain of TCR clone 290894 (TRAV1-2, TRAJ34)
CAVNTDKPIF

SEQ ID NO: 581788 - protein, 13 aa, Homo sapiens
  CDR3 for beta chain variable domain of TCR clone 290894 (TRBV10-1, TRBJ2-1)
CASSAGPDNEQFF

SEQ ID NO: 581789 - protein, 13 aa, Homo sapiens
  CDR3 for alpha chain variable domain of TCR clone 290895 (TRAV21, TRAJ27)
CAARPGNAGKSNF

SEQ ID NO: 581790 - protein, 13 aa, Homo sapiens
  CDR3 for beta chain variable domain of TCR clone 290895 (TRBV13, TRBJ2-1)
CASILGGRGEQFF

SEQ ID NO: 581791 - protein, 11 aa, Homo sapiens
  CDR3 for alpha chain variable domain of TCR clone 290896 (TRAV25, TRAJ47)
CAGLYGNKLAF

SEQ ID NO: 581792 - protein, 14 aa, Homo sapiens
  CDR3 for beta chain variable domain of TCR clone 290896 (TRBV19, TRBJ2-1)
CASKEGVQVNEQFF

SEQ ID NO: 581793 - protein, 15 aa, Homo sapiens
  CDR3 for alpha chain variable domain of TCR clone 290897 (TRAV8-4, TRAJ56)
CAVSGGPGANSKLTF

SEQ ID NO: 581794 - protein, 14 aa, Homo sapiens
  CDR3 for beta chain variable domain of TCR clone 290897 (TRBV7-9, TRBJ2-1)
CTSSPKGGADEQFF

SEQ ID NO: 581795 - protein, 13 aa, Homo sapiens
  CDR3 for alpha chain variable domain of TCR clone 290898 (TRAV20, TRAJ37)
CAGCSSNTGKLIF

SEQ ID NO: 581796 - protein, 15 aa, Homo sapiens
  CDR3 for beta chain variable domain of TCR clone 290898 (TRBV27, TRBJ1-6)
CASSFDRGLGSPLHF

SEQ ID NO: 581797 - protein, 12 aa, Homo sapiens
  CDR3 for alpha chain variable domain of TCR clone 290899 (TRAV16, TRAJ13)
CITLRGYQKVTF

SEQ ID NO: 581798 - protein, 17 aa, Homo sapiens
  CDR3 for beta chain variable domain of TCR clone 290899 (TRBV28, TRBJ2-5)
CASSSQGGLAGAETQYF

SEQ ID NO: 581799 - protein, 14 aa, Homo sapiens
  CDR3 for alpha chain variable domain of TCR clone 290900 (TRAV8-3, TRAJ48)
CCGCGQFGNEKLTF

SEQ ID NO: 581800 - protein, 14 aa, Homo sapiens
  CDR3 for beta chain variable domain of TCR clone 290900 (TRBV7-2, TRBJ2-7)
CASRSQGAAYEQYF

SEQ ID NO: 581801 - protein, 14 aa, Homo sapiens
  CDR3 for alpha chain variable domain of TCR clone 290901 (TRAV26-1, TRAJ38)
CIADNAGNNSKLIW

SEQ ID NO: 581802 - protein, 15 aa, Homo sapiens
  CDR3 for beta chain variable domain of TCR clone 290901 (TRBV4-1, TRBJ1-1)
CTSSQEWGHYTEAFF

SEQ ID NO: 581803 - protein, 14 aa, Homo sapiens
  CDR3 for alpha chain variable domain of TCR clone 290902 (TRAV4, TRAJ9)
CLVGSGTGGFKTIF

SEQ ID NO: 581804 - protein, 15 aa, Homo sapiens
  CDR3 for beta chain variable domain of TCR clone 290902 (TRBV4-1, TRBJ1-2)
CASSQGQGAAYGYTF

SEQ ID NO: 581805 - protein, 13 aa, Homo sapiens
  CDR3 for alpha chain variable domain of TCR clone 290903 (TRAV13-2, TRAJ49)
CAETLHGGNQFYF

SEQ ID NO: 581806 - protein, 15 aa, Homo sapiens
  CDR3 for beta chain variable domain of TCR clone 290903 (TRBV7-8, TRBJ1-5)
CASSRGGGADQPQHF

SEQ ID NO: 581807 - protein, 12 aa, Homo sapiens
  CDR3 for alpha chain variable domain of TCR clone 290904 (TRAV30, TRAJ39)
CGRGNAGNMLTF

SEQ ID NO: 581808 - protein, 13 aa, Homo sapiens
  CDR3 for beta chain variable domain of TCR clone 290904 (TRBV7-2, TRBJ2-2)
CASSLAVTGELFF

SEQ ID NO: 581809 - protein, 12 aa, Homo sapiens
  CDR3 for alpha chain variable domain of TCR clone 290905 (TRAV12-3, TRAJ17)
CAMTLTGNKLTF

SEQ ID NO: 581810 - protein, 13 aa, Homo sapiens
  CDR3 for beta chain variable domain of TCR clone 290905 (TRBV7-3, TRBJ1-1)
CASSQDRGAEAFF

SEQ ID NO: 581811 - protein, 16 aa, Homo sapiens
  CDR3 for alpha chain variable domain of TCR clone 290906 (TRAV12-2, TRAJ56)
CAVRRVETGANSKLTF

SEQ ID NO: 581812 - protein, 11 aa, Homo sapiens
  CDR3 for beta chain variable domain of TCR clone 290906 (TRBV3-1, TRBJ2-7)
CASSQVREQYF

SEQ ID NO: 581813 - protein, 15 aa, Homo sapiens
  CDR3 for alpha chain variable domain of TCR clone 290907 (TRAV26-1, TRAJ22)
CVVGVSFWFCKATDL

SEQ ID NO: 581814 - protein, 13 aa, Homo sapiens
  CDR3 for beta chain variable domain of TCR clone 290907 (TRBV7-9, TRBJ1-2)
CASSLKQNYGYTF

SEQ ID NO: 581815 - protein, 16 aa, Homo sapiens
  CDR3 for alpha chain variable domain of TCR clone 290908 (TRAV2, TRAJ13)
CAARILGVTRKLPLEL

SEQ ID NO: 581816 - protein, 14 aa, Homo sapiens
  CDR3 for beta chain variable domain of TCR clone 290908 (TRBV7-2, TRBJ2-7)
CASSPKTSFYEQYF

SEQ ID NO: 581817 - protein, 12 aa, Homo sapiens
  CDR3 for alpha chain variable domain of TCR clone 290909 (TRAV29/DV5, TRAJ34)
CAASSGTDKLLF

SEQ ID NO: 581818 - protein, 15 aa, Homo sapiens
  CDR3 for beta chain variable domain of TCR clone 290909 (TRBV2, TRBJ2-3)
CASSDAGGPPDTQYF

SEQ ID NO: 581819 - protein, 12 aa, Homo sapiens
  CDR3 for alpha chain variable domain of TCR clone 290910 (TRAV2, TRAJ33)
CAVWGSNYQLIL

SEQ ID NO: 581820 - protein, 16 aa, Homo sapiens
  CDR3 for beta chain variable domain of TCR clone 290910 (TRBV20-1, TRBJ1-4)
CSAPGQGLLTNEKLFF

SEQ ID NO: 581821 - protein, 13 aa, Homo sapiens
  CDR3 for alpha chain variable domain of TCR clone 290911 (TRAV2, TRAJ29)
CAEGNSGNTPLVF

SEQ ID NO: 581822 - protein, 16 aa, Homo sapiens
  CDR3 for beta chain variable domain of TCR clone 290911 (TRBV7-9, TRBJ1-2)
CASSPGGGAINYGYTF

SEQ ID NO: 581823 - protein, 11 aa, Homo sapiens
  CDR3 for alpha chain variable domain of TCR clone 290912 (TRAV17, TRAJ9)
CGFTGGFKTIF

SEQ ID NO: 581824 - protein, 14 aa, Homo sapiens
  CDR3 for beta chain variable domain of TCR clone 290912 (TRBV7-9, TRBJ2-2)
CASSLVQDTGVLFF

SEQ ID NO: 581825 - protein, 12 aa, Homo sapiens
  CDR3 for alpha chain variable domain of TCR clone 290913 (TRAV30, TRAJ39)
CGRGNAGNMLTF

SEQ ID NO: 581826 - protein, 16 aa, Homo sapiens
  CDR3 for beta chain variable domain of TCR clone 290913 (TRBV19, TRBJ2-2)
CASRSPGTGATGELFF

SEQ ID NO: 581827 - protein, 15 aa, Homo sapiens
  CDR3 for alpha chain variable domain of TCR clone 290914 (TRAV2, TRAJ15)
CAVEDRGQAGTALIF

SEQ ID NO: 581828 - protein, 15 aa, Homo sapiens
  CDR3 for beta chain variable domain of TCR clone 290914 (TRBV5-1, TRBJ1-2)
CASSLAGGFNYGYTF

SEQ ID NO: 581829 - protein, 16 aa, Homo sapiens
  CDR3 for alpha chain variable domain of TCR clone 290915 (TRAV13-1, TRAJ48)
CAASIFGNFGNEKLTF

SEQ ID NO: 581830 - protein, 14 aa, Homo sapiens
  CDR3 for beta chain variable domain of TCR clone 290915 (TRBV20-1, TRBJ1-1)
CSAQTRIGGTEAFF

SEQ ID NO: 581831 - protein, 14 aa, Homo sapiens
  CDR3 for alpha chain variable domain of TCR clone 290916 (TRAV1-2, TRAJ16)
CAVSRFSDGQKLLF

SEQ ID NO: 581832 - protein, 13 aa, Homo sapiens
  CDR3 for beta chain variable domain of TCR clone 290916 (TRBV10-3, TRBJ1-2)
CAISERDSYGYTF

SEQ ID NO: 581833 - protein, 13 aa, Homo sapiens
  CDR3 for alpha chain variable domain of TCR clone 290917 (TRAV2, TRAJ40)
CAVVTSGTYKYIF

SEQ ID NO: 581834 - protein, 17 aa, Homo sapiens
  CDR3 for beta chain variable domain of TCR clone 290917 (TRBV7-8, TRBJ2-3)
CASSLMKRMRGADTQYF

SEQ ID NO: 581835 - protein, 17 aa, Homo sapiens
  CDR3 for alpha chain variable domain of TCR clone 290918 (TRAV3, TRAJ6)
CSVGDGPRAGGSYIPTF

SEQ ID NO: 581836 - protein, 14 aa, Homo sapiens
  CDR3 for beta chain variable domain of TCR clone 290918 (TRBV7-2, TRBJ2-7)
CASSPKTSFYEQYF

SEQ ID NO: 581837 - protein, 16 aa, Homo sapiens
  CDR3 for alpha chain variable domain of TCR clone 290919 (TRAV26-1, TRAJ58)
CIVRVLGETSGSRLTF

SEQ ID NO: 581838 - protein, 13 aa, Homo sapiens
  CDR3 for beta chain variable domain of TCR clone 290919 (TRBV15, TRBJ1-6)
CATSGGLNSPLHF

SEQ ID NO: 581839 - protein, 11 aa, Homo sapiens
  CDR3 for alpha chain variable domain of TCR clone 290920 (TRAV17, TRAJ36)
CAPTGANNLFF

SEQ ID NO: 581840 - protein, 13 aa, Homo sapiens
  CDR3 for beta chain variable domain of TCR clone 290920 (TRBV12-4, TRBJ2-7)
CASSPTETHEQYF

SEQ ID NO: 581841 - protein, 11 aa, Homo sapiens
  CDR3 for alpha chain variable domain of TCR clone 290921 (TRAV12-1, TRAJ30)
CGVNGQDKIIF

SEQ ID NO: 581842 - protein, 12 aa, Homo sapiens
  CDR3 for beta chain variable domain of TCR clone 290921 (TRBV27, TRBJ2-2)
CASKLFTGELFF

SEQ ID NO: 581843 - protein, 12 aa, Homo sapiens
  CDR3 for alpha chain variable domain of TCR clone 290922 (TRAV12-3, TRAJ17)
CAMTLTGNKLTF

SEQ ID NO: 581844 - protein, 15 aa, Homo sapiens
  CDR3 for beta chain variable domain of TCR clone 290922 (TRBV20-1, TRBJ2-7)
CSARDRVSGRDEQYV

SEQ ID NO: 581845 - protein, 16 aa, Homo sapiens
  CDR3 for alpha chain variable domain of TCR clone 290923 (TRAV14/DV4, TRAJ21)
CATREGPENNFNKFYF

SEQ ID NO: 581846 - protein, 12 aa, Homo sapiens
  CDR3 for beta chain variable domain of TCR clone 290923 (TRBV29-1, TRBJ2-2)
CSVDKYTGELFF

SEQ ID NO: 581847 - protein, 12 aa, Homo sapiens
  CDR3 for alpha chain variable domain of TCR clone 290924 (TRAV12-1, TRAJ40)
CVVYSGTYIYIF

SEQ ID NO: 581848 - protein, 17 aa, Homo sapiens
  CDR3 for beta chain variable domain of TCR clone 290924 (TRBV11-3, TRBJ1-5)
CASSPLTGLRGNQPQHF

SEQ ID NO: 581849 - protein, 13 aa, Homo sapiens
  CDR3 for alpha chain variable domain of TCR clone 290925 (TRAV3, TRAJ4)
CAVRDGGYNMLIF

SEQ ID NO: 581850 - protein, 14 aa, Homo sapiens
  CDR3 for beta chain variable domain of TCR clone 290925 (TRBV12-4, TRBJ1-2)
CASSSSAAGSSYTF

SEQ ID NO: 581851 - protein, 23 aa, Homo sapiens
  CDR3 for alpha chain variable domain of TCR clone 290926 (TRAV26-1, TRAJ38)
CIADNAGNNHIQNPDPAVYQLRD

SEQ ID NO: 581852 - protein, 17 aa, Homo sapiens
  CDR3 for beta chain variable domain of TCR clone 290926 (TRBV11-2, TRBJ2-6)
CASSQRYIFSGANVLTF

SEQ ID NO: 581853 - protein, 14 aa, Homo sapiens
  CDR3 for alpha chain variable domain of TCR clone 290927 (TRAV1-2, TRAJ26)
CCERPDNYGQNFVF

SEQ ID NO: 581854 - protein, 11 aa, Homo sapiens
  CDR3 for beta chain variable domain of TCR clone 290927 (TRBV12-4, TRBJ2-3)
CASTATDTQYF

SEQ ID NO: 581855 - protein, 13 aa, Homo sapiens
  CDR3 for alpha chain variable domain of TCR clone 290928 (TRAV36/DV7, TRAJ37)
CAVFSSNTGKLTF

SEQ ID NO: 581856 - protein, 15 aa, Homo sapiens
  CDR3 for beta chain variable domain of TCR clone 290928 (TRBV5-1, TRBJ2-2)
CASSSQGGNTGELFF

SEQ ID NO: 581857 - protein, 15 aa, Homo sapiens
  CDR3 for alpha chain variable domain of TCR clone 290929 (TRAV3, TRAJ22)
CAVRDRGGSARQLTF

SEQ ID NO: 581858 - protein, 16 aa, Homo sapiens
  CDR3 for beta chain variable domain of TCR clone 290929 (TRBV5-4, TRBJ2-3)
CASQQPGAGGADTLYF

SEQ ID NO: 581859 - protein, 14 aa, Homo sapiens
  CDR3 for alpha chain variable domain of TCR clone 290930 (TRAV12-2, TRAJ17)
CAVNIKAAGNKLTL

SEQ ID NO: 581860 - protein, 13 aa, Homo sapiens
  CDR3 for beta chain variable domain of TCR clone 290930 (TRBV7-8, TRBJ2-7)
CASSLTGGREQYF

SEQ ID NO: 581861 - protein, 16 aa, Homo sapiens
  CDR3 for alpha chain variable domain of TCR clone 290931 (TRAV23/DV6, TRAJ9)
CAASIGGNTGGFNTIF

SEQ ID NO: 581862 - protein, 15 aa, Homo sapiens
  CDR3 for beta chain variable domain of TCR clone 290931 (TRBV20-1, TRBJ2-5)
CSATRTSGSLETQYF

SEQ ID NO: 581863 - protein, 13 aa, Homo sapiens
  CDR3 for alpha chain variable domain of TCR clone 290932 (TRAV12-2, TRAJ20)
CAVYPSNDYQLSF

SEQ ID NO: 581864 - protein, 15 aa, Homo sapiens
  CDR3 for beta chain variable domain of TCR clone 290932 (TRBV18, TRBJ1-2)
CASSPGNGLGYGYIF

SEQ ID NO: 581865 - protein, 14 aa, Homo sapiens
  CDR3 for alpha chain variable domain of TCR clone 290933 (TRAV25, TRAJ52)
CAGEGGTSYGKLTF

SEQ ID NO: 581866 - protein, 17 aa, Homo sapiens
  CDR3 for beta chain variable domain of TCR clone 290933 (TRBV7-8, TRBJ2-6)
CASSAGTGGAGANVLTF

SEQ ID NO: 581867 - protein, 13 aa, Homo sapiens
  CDR3 for alpha chain variable domain of TCR clone 290934 (TRAV8-6, TRAJ21)
CAVSPSSLNKCYF

SEQ ID NO: 581868 - protein, 14 aa, Homo sapiens
  CDR3 for beta chain variable domain of TCR clone 290934 (TRBV7-9, TRBJ2-5)
CASSLDTAQETQYF

SEQ ID NO: 581869 - protein, 16 aa, Homo sapiens
  CDR3 for alpha chain variable domain of TCR clone 290935 (TRAV38-1, TRAJ37)
CAFKGDGSSNTGKLIF

SEQ ID NO: 581870 - protein, 13 aa, Homo sapiens
  CDR3 for beta chain variable domain of TCR clone 290935 (TRBV12-4, TRBJ2-5)
CASSLFRRETRYF

SEQ ID NO: 581871 - protein, 12 aa, Homo sapiens
  CDR3 for alpha chain variable domain of TCR clone 290936 (TRAV1-2, TRAJ33)
CAALDSNYQLIW

SEQ ID NO: 581872 - protein, 13 aa, Homo sapiens
  CDR3 for beta chain variable domain of TCR clone 290936 (TRBV5-5, TRBJ2-7)
CASSSQTRQRQYF

SEQ ID NO: 581873 - protein, 16 aa, Homo sapiens
  CDR3 for alpha chain variable domain of TCR clone 290937 (TRAV25, TRAJ24)
CTQRRGTTDSWGKLQF

SEQ ID NO: 581874 - protein, 13 aa, Homo sapiens
  CDR3 for beta chain variable domain of TCR clone 290937 (TRBV10-3, TRBJ2-7)
CASKLAVNYEQYF

SEQ ID NO: 581875 - protein, 15 aa, Homo sapiens
  CDR3 for alpha chain variable domain of TCR clone 290938 (TRAV8-2, TRAJ15)
CVVTMGNQAGTALIF

SEQ ID NO: 581876 - protein, 12 aa, Homo sapiens
  CDR3 for beta chain variable domain of TCR clone 290938 (TRBV6-1, TRBJ2-7)
CASSVYSYEQYF

SEQ ID NO: 581877 - protein, 14 aa, Homo sapiens
  CDR3 for alpha chain variable domain of TCR clone 290939 (TRAV1-2, TRAJ16)
CAVNRFSDGQKLLF

SEQ ID NO: 581878 - protein, 12 aa, Homo sapiens
  CDR3 for beta chain variable domain of TCR clone 290939 (TRBV7-9, TRBJ2-7)
CASSLEGYEQFF

SEQ ID NO: 581879 - protein, 15 aa, Homo sapiens
  CDR3 for alpha chain variable domain of TCR clone 290940 (TRAV13-1, TRAJ57)
CAASNTQGGSEKRAF

SEQ ID NO: 581880 - protein, 13 aa, Homo sapiens
  CDR3 for beta chain variable domain of TCR clone 290940 (TRBV7-6, TRBJ1-5)
CASSQGPNRPQHF

SEQ ID NO: 581881 - protein, 13 aa, Homo sapiens
  CDR3 for alpha chain variable domain of TCR clone 290941 (TRAV26-1, TRAJ34)
CIVRPWITDKLIF

SEQ ID NO: 581882 - protein, 14 aa, Homo sapiens
  CDR3 for beta chain variable domain of TCR clone 290941 (TRBV12-4, TRBJ1-4)
CASSRQGANEKLVF

SEQ ID NO: 581883 - protein, 15 aa, Homo sapiens
  CDR3 for alpha chain variable domain of TCR clone 290942 (TRAV2, TRAJ24)
CAVEVLSDSWGKFQF

SEQ ID NO: 581884 - protein, 14 aa, Homo sapiens
  CDR3 for beta chain variable domain of TCR clone 290942 (TRBV19, TRBJ2-1)
CASSMGSGRRSSSS

SEQ ID NO: 581885 - protein, 12 aa, Homo sapiens
  CDR3 for alpha chain variable domain of TCR clone 290943 (TRAV12-2, TRAJ10)
WVATGGGNKLTF

SEQ ID NO: 581886 - protein, 16 aa, Homo sapiens
  CDR3 for beta chain variable domain of TCR clone 290943 (TRBV6-4, TRBJ1-2)
CASSEAVGDPNYGYTF

SEQ ID NO: 581887 - protein, 14 aa, Homo sapiens
  CDR3 for alpha chain variable domain of TCR clone 290944 (TRAV1-2, TRAJ8)
CAVREDTGFHKLVF

SEQ ID NO: 581888 - protein, 16 aa, Homo sapiens
  CDR3 for beta chain variable domain of TCR clone 290944 (TRBV27, TRBJ2-2)
CASSFRGLVRTGELFF

SEQ ID NO: 581889 - protein, 15 aa, Homo sapiens
  CDR3 for alpha chain variable domain of TCR clone 290945 (TRAV21, TRAJ53)
CATLNSGGSNYKLTF

SEQ ID NO: 581890 - protein, 13 aa, Homo sapiens
  CDR3 for beta chain variable domain of TCR clone 290945 (TRBV27, TRBJ2-1)
CASSSGSYNEQFF

SEQ ID NO: 581891 - protein, 14 aa, Homo sapiens
  CDR3 for alpha chain variable domain of TCR clone 290946 (TRAV16, TRAJ33)
CALSAIDSNYQLIW

SEQ ID NO: 581892 - protein, 15 aa, Homo sapiens
  CDR3 for beta chain variable domain of TCR clone 290946 (TRBV28, TRBJ2-7)
CASSLEAYPIYEQYF

SEQ ID NO: 581893 - protein, 13 aa, Homo sapiens
  CDR3 for alpha chain variable domain of TCR clone 290947 (TRAV20, TRAJ20)
CAVRWVRDYKLSF

SEQ ID NO: 581894 - protein, 13 aa, Homo sapiens
  CDR3 for beta chain variable domain of TCR clone 290947 (TRBV10-3, TRBJ2-7)
CASKLAVNYEQYF

SEQ ID NO: 581895 - protein, 14 aa, Homo sapiens
  CDR3 for alpha chain variable domain of TCR clone 290948 (TRAV1-2, TRAJ16)
CAVNRFSDGQKLLF

SEQ ID NO: 581896 - protein, 18 aa, Homo sapiens
  CDR3 for beta chain variable domain of TCR clone 290948 (TRBV7-9, TRBJ2-1)
CASSLTLASGRAMVSSSS

SEQ ID NO: 581897 - protein, 13 aa, Homo sapiens
  CDR3 for alpha chain variable domain of TCR clone 290949 (TRAV21, TRAJ57)
CAVTQGGSGKLVF

SEQ ID NO: 581898 - protein, 14 aa, Homo sapiens
  CDR3 for beta chain variable domain of TCR clone 290949 (TRBV7-2, TRBJ1-1)
CASSFLTGTTEAFF

SEQ ID NO: 581899 - protein, 11 aa, Homo sapiens
  CDR3 for alpha chain variable domain of TCR clone 290950 (TRAV21, TRAJ20)
CCRVNDYKLSF

SEQ ID NO: 581900 - protein, 14 aa, Homo sapiens
  CDR3 for beta chain variable domain of TCR clone 290950 (TRBV7-3, TRBJ2-2)
CASSSGGYTGELFF

SEQ ID NO: 581901 - protein, 14 aa, Homo sapiens
  CDR3 for alpha chain variable domain of TCR clone 290951 (TRAV8-4, TRAJ13)
CAVTLSGGYQKVTF

SEQ ID NO: 581902 - protein, 16 aa, Homo sapiens
  CDR3 for beta chain variable domain of TCR clone 290951 (TRBV7-8, TRBJ2-4)
CASSAERTLAKNIQYF

SEQ ID NO: 581903 - protein, 14 aa, Homo sapiens
  CDR3 for alpha chain variable domain of TCR clone 290952 (TRAV12-1, TRAJ3)
CVVILYSSASKIIF

SEQ ID NO: 581904 - protein, 12 aa, Homo sapiens
  CDR3 for beta chain variable domain of TCR clone 290952 (TRBV28, TRBJ1-2)
CASSRPNYGYTF

SEQ ID NO: 581905 - protein, 17 aa, Homo sapiens
  CDR3 for alpha chain variable domain of TCR clone 290953 (TRAV4, TRAJ18)
CLVCERSVGSTLGRPYF

SEQ ID NO: 581906 - protein, 16 aa, Homo sapiens
  CDR3 for beta chain variable domain of TCR clone 290953 (TRBV19, TRBJ2-1)
CASSKAGPSSYNEQFF

SEQ ID NO: 581907 - protein, 13 aa, Homo sapiens
  CDR3 for alpha chain variable domain of TCR clone 290954 (TRAV35, TRAJ44)
CAGLSGTASKLTF

SEQ ID NO: 581908 - protein, 17 aa, Homo sapiens
  CDR3 for beta chain variable domain of TCR clone 290954 (TRBV7-8, TRBJ1-2)
CASSLRPLQGHVYGDTF

SEQ ID NO: 581909 - protein, 16 aa, Homo sapiens
  CDR3 for alpha chain variable domain of TCR clone 290955 (TRAV3, TRAJ21)
CAVRYIEIGNFNKFYF

SEQ ID NO: 581910 - protein, 13 aa, Homo sapiens
  CDR3 for beta chain variable domain of TCR clone 290955 (TRBV27, TRBJ2-7)
CASSLTTGYEQYF

SEQ ID NO: 581911 - protein, 12 aa, Homo sapiens
  CDR3 for alpha chain variable domain of TCR clone 290956 (TRAV13-1, TRAJ48)
CAANFGNEKLTF

SEQ ID NO: 581912 - protein, 13 aa, Homo sapiens
  CDR3 for beta chain variable domain of TCR clone 290956 (TRBV11-2, TRBJ2-1)
CASSLRLTHEQFF

SEQ ID NO: 581913 - protein, 14 aa, Homo sapiens
  CDR3 for alpha chain variable domain of TCR clone 290957 (TRAV16, TRAJ26)
CALSSANYGQNFVF

SEQ ID NO: 581914 - protein, 16 aa, Homo sapiens
  CDR3 for beta chain variable domain of TCR clone 290957 (TRBV20-1, TRBJ1-4)
CSAPGQGLVTNEKLFF

SEQ ID NO: 581915 - protein, 14 aa, Homo sapiens
  CDR3 for alpha chain variable domain of TCR clone 290958 (TRAV1-2, TRAJ8)
CAVREDTGFQKLVF

SEQ ID NO: 581916 - protein, 16 aa, Homo sapiens
  CDR3 for beta chain variable domain of TCR clone 290958 (TRBV29-1, TRBJ2-7)
CSVEVVGTSGSYKQYF

SEQ ID NO: 581917 - protein, 14 aa, Homo sapiens
  CDR3 for alpha chain variable domain of TCR clone 290959 (TRAV27, TRAJ49)
CAGRPEGTGNQFYF

SEQ ID NO: 581918 - protein, 15 aa, Homo sapiens
  CDR3 for beta chain variable domain of TCR clone 290959 (TRBV4-1, TRBJ2-3)
CASSRGQGIPDTQYF

SEQ ID NO: 581919 - protein, 13 aa, Homo sapiens
  CDR3 for alpha chain variable domain of TCR clone 290960 (TRAV1-2, TRAJ12)
CAVSMDSSYKLIF

SEQ ID NO: 581920 - protein, 13 aa, Homo sapiens
  CDR3 for beta chain variable domain of TCR clone 290960 (TRBV12-4, TRBJ1-2)
CASSLRQGKGYTF

SEQ ID NO: 581921 - protein, 18 aa, Homo sapiens
  CDR3 for alpha chain variable domain of TCR clone 290961 (TRAV26-1, TRAJ27)
CIVRPSFNYNTNAGKSNF

SEQ ID NO: 581922 - protein, 14 aa, Homo sapiens
  CDR3 for beta chain variable domain of TCR clone 290961 (TRBV10-3, TRBJ1-6)
CAISVDGDESPLHF

SEQ ID NO: 581923 - protein, 13 aa, Homo sapiens
  CDR3 for alpha chain variable domain of TCR clone 290962 (TRAV36/DV7, TRAJ37)
CAVFSSNTGKLIF

SEQ ID NO: 581924 - protein, 15 aa, Homo sapiens
  CDR3 for beta chain variable domain of TCR clone 290962 (TRBV12-4, TRBJ2-5)
CQQFFVRGCQETQYF

SEQ ID NO: 581925 - protein, 14 aa, Homo sapiens
  CDR3 for alpha chain variable domain of TCR clone 290963 (TRAV12-3, TRAJ54)
CAMRGIQGAQKLVF

SEQ ID NO: 581926 - protein, 16 aa, Homo sapiens
  CDR3 for beta chain variable domain of TCR clone 290963 (TRBV7-3, TRBJ2-2)
CASSLKRGTLSGELFF

SEQ ID NO: 581927 - protein, 16 aa, Homo sapiens
  CDR3 for alpha chain variable domain of TCR clone 290964 (TRAV8-3, TRAJ22)
CAVDLLGPGSARQLTF

SEQ ID NO: 581928 - protein, 14 aa, Homo sapiens
  CDR3 for beta chain variable domain of TCR clone 290964 (TRBV11-2, TRBJ2-7)
CASSLELEGYEEYF

SEQ ID NO: 581929 - protein, 18 aa, Homo sapiens
  CDR3 for alpha chain variable domain of TCR clone 290965 (TRAV21, TRAJ52)
CAVRPSPAGGTSYGKLTF

SEQ ID NO: 581930 - protein, 15 aa, Homo sapiens
  CDR3 for beta chain variable domain of TCR clone 290965 (TRBV11-2, TRBJ2-2)
CASSLETGVTGELFF

SEQ ID NO: 581931 - protein, 13 aa, Homo sapiens
  CDR3 for alpha chain variable domain of TCR clone 290966 (TRAV12-3, TRAJ9)
CAMSADGGFKTIF

SEQ ID NO: 581932 - protein, 14 aa, Homo sapiens
  CDR3 for beta chain variable domain of TCR clone 290966 (TRBV6-1, TRBJ2-7)
CASSDRVNPYEQYF

SEQ ID NO: 581933 - protein, 12 aa, Homo sapiens
  CDR3 for alpha chain variable domain of TCR clone 290967 (TRAV12-3, TRAJ17)
CAMTLTGNELTF

SEQ ID NO: 581934 - protein, 15 aa, Homo sapiens
  CDR3 for beta chain variable domain of TCR clone 290967 (TRBV20-1, TRBJ2-7)
CSARDRVCGMDEQYF

SEQ ID NO: 581935 - protein, 13 aa, Homo sapiens
  CDR3 for alpha chain variable domain of TCR clone 290968 (TRAV30, TRAJ24)
CGTEGNGWGKFQF

SEQ ID NO: 581936 - protein, 17 aa, Homo sapiens
  CDR3 for beta chain variable domain of TCR clone 290968 (TRBV19, TRBJ2-6)
CASSTGQVFSGANVLTF

SEQ ID NO: 581937 - protein, 16 aa, Homo sapiens
  CDR3 for alpha chain variable domain of TCR clone 290969 (TRAV30, TRAJ24)
RGAEIVDADSWGKFQF

SEQ ID NO: 581938 - protein, 15 aa, Homo sapiens
  CDR3 for beta chain variable domain of TCR clone 290969 (TRBV20-1, TRBJ2-7)
CSARDRVSGMDEQYF

SEQ ID NO: 581939 - protein, 14 aa, Homo sapiens
  CDR3 for alpha chain variable domain of TCR clone 290970 (TRAV26-1, TRAJ52)
CILAGGTSYGKLTF

SEQ ID NO: 581940 - protein, 16 aa, Homo sapiens
  CDR3 for beta chain variable domain of TCR clone 290970 (TRBV19, TRBJ2-2)
CASTIGARAGAGELFF

SEQ ID NO: 581941 - protein, 13 aa, Homo sapiens
  CDR3 for alpha chain variable domain of TCR clone 290971 (TRAV3, TRAJ21)
CAVREPDFNKFYF

SEQ ID NO: 581942 - protein, 17 aa, Homo sapiens
  CDR3 for beta chain variable domain of TCR clone 290971 (TRBV7-7, TRBJ2-2)
CASSSVPAGGEIGELFF

SEQ ID NO: 581943 - protein, 14 aa, Homo sapiens
  CDR3 for alpha chain variable domain of TCR clone 290972 (TRAV1-2, TRAJ8)
CAVREDTGFQKLVF

SEQ ID NO: 581944 - protein, 16 aa, Homo sapiens
  CDR3 for beta chain variable domain of TCR clone 290972 (TRBV4-1, TRBJ1-4)
CASSQDLRRGGVKLFF

SEQ ID NO: 581945 - protein, 14 aa, Homo sapiens
  CDR3 for alpha chain variable domain of TCR clone 290973 (TRAV8-2, TRAJ33)
CVVSDEDSNYQLIW

SEQ ID NO: 581946 - protein, 12 aa, Homo sapiens
  CDR3 for beta chain variable domain of TCR clone 290973 (TRBV11-2, TRBJ2-2)
CASSLGGGELFF

SEQ ID NO: 581947 - protein, 13 aa, Homo sapiens
  CDR3 for alpha chain variable domain of TCR clone 290974 (TRAV12-3, TRAJ33)
CAMSLNSNYQLIW

SEQ ID NO: 581948 - protein, 13 aa, Homo sapiens
  CDR3 for beta chain variable domain of TCR clone 290974 (TRBV7-2, TRBJ2-2)
CGSSLAVTGELFF

SEQ ID NO: 581949 - protein, 14 aa, Homo sapiens
  CDR3 for alpha chain variable domain of TCR clone 290975 (TRAV23/DV6, TRAJ4)
CAAPSSGGYNKLIF

SEQ ID NO: 581950 - protein, 16 aa, Homo sapiens
  CDR3 for beta chain variable domain of TCR clone 290975 (TRBV19, TRBJ1-1)
CASRFGGPVTGSEAFF

SEQ ID NO: 581951 - protein, 11 aa, Homo sapiens
  CDR3 for alpha chain variable domain of TCR clone 290976 (TRAV39, TRAJ49)
CAVDISTQFYF

SEQ ID NO: 581952 - protein, 14 aa, Homo sapiens
  CDR3 for beta chain variable domain of TCR clone 290976 (TRBV7-8, TRBJ2-3)
CASSLEAGTDTQYF

SEQ ID NO: 581953 - protein, 14 aa, Homo sapiens
  CDR3 for alpha chain variable domain of TCR clone 290977 (TRAV12-2, TRAJ13)
CAVKKTGGYQKVTF

SEQ ID NO: 581954 - protein, 15 aa, Homo sapiens
  CDR3 for beta chain variable domain of TCR clone 290977 (TRBV6-3, TRBJ2-7)
CASSSPGTVFYEQYV

SEQ ID NO: 581955 - protein, 13 aa, Homo sapiens
  CDR3 for alpha chain variable domain of TCR clone 290978 (TRAV12-1, TRAJ6)
CEVFPGGSYIPTF

SEQ ID NO: 581956 - protein, 14 aa, Homo sapiens
  CDR3 for beta chain variable domain of TCR clone 290978 (TRBV20-1, TRBJ1-3)
CSASPTGAGNTIYF

SEQ ID NO: 581957 - protein, 12 aa, Homo sapiens
  CDR3 for alpha chain variable domain of TCR clone 290979 (TRAV26-1, TRAJ35)
CIGLSFGNVMHC

SEQ ID NO: 581958 - protein, 17 aa, Homo sapiens
  CDR3 for beta chain variable domain of TCR clone 290979 (TRBV11-3, TRBJ1-5)
CASSPLTGLRGNQPQHF

SEQ ID NO: 581959 - protein, 13 aa, Homo sapiens
  CDR3 for alpha chain variable domain of TCR clone 290980 (TRAV13-2, TRAJ48)
CAEMDFGNEKLTF

SEQ ID NO: 581960 - protein, 15 aa, Homo sapiens
  CDR3 for beta chain variable domain of TCR clone 290980 (TRBV7-9, TRBJ1-6)
SASSSPGRGNSPPHF

SEQ ID NO: 581961 - protein, 16 aa, Homo sapiens
  CDR3 for alpha chain variable domain of TCR clone 290981 (TRAV12-3, TRAJ53)
CAVSPGSGGSNYKLTF

SEQ ID NO: 581962 - protein, 19 aa, Homo sapiens
  CDR3 for beta chain variable domain of TCR clone 290981 (TRBV7-2, TRBJ2-3)
CASSFLSRNWGGGTDTQYF

SEQ ID NO: 581963 - protein, 17 aa, Homo sapiens
  CDR3 for alpha chain variable domain of TCR clone 290982 (TRAV29/DV5, TRAJ45)
CAADGPFSGVGADGLTF

SEQ ID NO: 581964 - protein, 13 aa, Homo sapiens
  CDR3 for beta chain variable domain of TCR clone 290982 (TRBV19, TRBJ1-5)
CASSMRGYQPQHF

SEQ ID NO: 581965 - protein, 15 aa, Homo sapiens
  CDR3 for alpha chain variable domain of TCR clone 290983 (TRAV26-1, TRAJ42)
CIVRVKGGSQGNLIF

SEQ ID NO: 581966 - protein, 16 aa, Homo sapiens
  CDR3 for beta chain variable domain of TCR clone 290983 (TRBV7-2, TRBJ2-1)
CASSLVRASGGNEQFF

SEQ ID NO: 581967 - protein, 16 aa, Homo sapiens
  CDR3 for alpha chain variable domain of TCR clone 290984 (TRAV27, TRAJ53)
CAGAGGSGGSNYKLTF

SEQ ID NO: 581968 - protein, 13 aa, Homo sapiens
  CDR3 for beta chain variable domain of TCR clone 290984 (TRBV10-3, TRBJ2-7)
CASKLAVNYEQYF

SEQ ID NO: 581969 - protein, 14 aa, Homo sapiens
  CDR3 for alpha chain variable domain of TCR clone 290985 (TRAV26-1, TRAJ38)
CIVDNAGNNRKLIW

SEQ ID NO: 581970 - protein, 13 aa, Homo sapiens
  CDR3 for beta chain variable domain of TCR clone 290985 (TRBV19, TRBJ1-2)
CASSVPGQDGYTF

SEQ ID NO: 581971 - protein, 14 aa, Homo sapiens
  CDR3 for alpha chain variable domain of TCR clone 290986 (TRAV9-2, TRAJ39)
RALYIYNAGNMLTF

SEQ ID NO: 581972 - protein, 14 aa, Homo sapiens
  CDR3 for beta chain variable domain of TCR clone 290986 (TRBV7-3, TRBJ2-1)
CASSLSGSYNEQFF

SEQ ID NO: 581973 - protein, 15 aa, Homo sapiens
  CDR3 for alpha chain variable domain of TCR clone 290987 (TRAV23/DV6, TRAJ13)
CAAWPGGGGYQKVTF

SEQ ID NO: 581974 - protein, 14 aa, Homo sapiens
  CDR3 for beta chain variable domain of TCR clone 290987 (TRBV4-2, TRBJ2-1)
CASGLDRAYNEQFF

SEQ ID NO: 581975 - protein, 15 aa, Homo sapiens
  CDR3 for alpha chain variable domain of TCR clone 290988 (TRAV3, TRAJ3)
CAVRDRDSSASKIIF

SEQ ID NO: 581976 - protein, 14 aa, Homo sapiens
  CDR3 for beta chain variable domain of TCR clone 290988 (TRBV28, TRBJ1-5)
CASSPTAGNQPQHF

SEQ ID NO: 581977 - protein, 14 aa, Homo sapiens
  CDR3 for alpha chain variable domain of TCR clone 290989 (TRAV1-2, TRAJ16)
CAVNRFSDGQRLLF

SEQ ID NO: 581978 - protein, 18 aa, Homo sapiens
  CDR3 for beta chain variable domain of TCR clone 290989 (TRBV7-6, TRBJ2-1)
CASSPRTSGMSSYNEQFF

SEQ ID NO: 581979 - protein, 15 aa, Homo sapiens
  CDR3 for alpha chain variable domain of TCR clone 290990 (TRAV29/DV5, TRAJ44)
CAASAGTGTASKLTF

SEQ ID NO: 581980 - protein, 14 aa, Homo sapiens
  CDR3 for beta chain variable domain of TCR clone 290990 (TRBV20-1, TRBJ1-1)
CSAQTRIGGTEAFF

SEQ ID NO: 581981 - protein, 13 aa, Homo sapiens
  CDR3 for alpha chain variable domain of TCR clone 290991 (TRAV12-2, TRAJ24)
CAVSTDSWGKLQL

SEQ ID NO: 581982 - protein, 12 aa, Homo sapiens
  CDR3 for beta chain variable domain of TCR clone 290991 (TRBV7-6, TRBJ2-7)
CASSLADIEQYF

SEQ ID NO: 581983 - protein, 16 aa, Homo sapiens
  CDR3 for alpha chain variable domain of TCR clone 290992 (TRAV26-1, TRAJ38)
CIVRVELCGNNRKLIW

SEQ ID NO: 581984 - protein, 14 aa, Homo sapiens
  CDR3 for beta chain variable domain of TCR clone 290992 (TRBV5-1, TRBJ2-3)
CASSPGLAADTQYF

SEQ ID NO: 581985 - protein, 13 aa, Homo sapiens
  CDR3 for alpha chain variable domain of TCR clone 290993 (TRAV8-3, TRAJ28)
CAVGAVGSYQLTF

SEQ ID NO: 581986 - protein, 17 aa, Homo sapiens
  CDR3 for beta chain variable domain of TCR clone 290993 (TRBV11-2, TRBJ2-1)
CASSLYPPWVEYNEQFF

SEQ ID NO: 581987 - protein, 12 aa, Homo sapiens
  CDR3 for alpha chain variable domain of TCR clone 290994 (TRAV29/DV5, TRAJ15)
CASNQAGTVLIF

SEQ ID NO: 581988 - protein, 15 aa, Homo sapiens
  CDR3 for beta chain variable domain of TCR clone 290994 (TRBV11-2, TRBJ2-2)
CASSSYRVNAGELFF

SEQ ID NO: 581989 - protein, 12 aa, Homo sapiens
  CDR3 for alpha chain variable domain of TCR clone 290995 (TRAV21, TRAJ42)
CAVGGSQGNLIF

SEQ ID NO: 581990 - protein, 19 aa, Homo sapiens
  CDR3 for beta chain variable domain of TCR clone 290995 (TRBV5-1, TRBJ2-3)
CASSFTRSAADWSTDTQYF

SEQ ID NO: 581991 - protein, 11 aa, Homo sapiens
  CDR3 for alpha chain variable domain of TCR clone 290996 (TRAV3, TRAJ21)
CAVGNVNKFYF

SEQ ID NO: 581992 - protein, 16 aa, Homo sapiens
  CDR3 for beta chain variable domain of TCR clone 290996 (TRBV19, TRBJ2-1)
CASSTAGPSSYNEQFF

SEQ ID NO: 581993 - protein, 14 aa, Homo sapiens
  CDR3 for alpha chain variable domain of TCR clone 290997 (TRAV12-2, TRAJ11)
CAVEGGSGYSTLTF

SEQ ID NO: 581994 - protein, 14 aa, Homo sapiens
  CDR3 for beta chain variable domain of TCR clone 290997 (TRBV7-2, TRBJ2-1)
CASSPGLAGNEQFF

SEQ ID NO: 581995 - protein, 16 aa, Homo sapiens
  CDR3 for alpha chain variable domain of TCR clone 290998 (TRAV20, TRAJ53)
CAVQAESGGRNYKLTF

SEQ ID NO: 581996 - protein, 14 aa, Homo sapiens
  CDR3 for beta chain variable domain of TCR clone 290998 (TRBV27, TRBJ2-5)
CASSRTFLVDTQYF

SEQ ID NO: 581997 - protein, 15 aa, Homo sapiens
  CDR3 for alpha chain variable domain of TCR clone 290999 (TRAV8-3, TRAJ11)
CAVGLLNSGYSHLTF

SEQ ID NO: 581998 - protein, 16 aa, Homo sapiens
  CDR3 for beta chain variable domain of TCR clone 290999 (TRBV7-9, TRBJ1-2)
CASSLGFSSGEDGYTF

SEQ ID NO: 581999 - protein, 15 aa, Homo sapiens
  CDR3 for alpha chain variable domain of TCR clone 291000 (TRAV13-1, TRAJ52)
CAATSPRTSYGKMTF

SEQ ID NO: 582000 - protein, 12 aa, Homo sapiens
  CDR3 for beta chain variable domain of TCR clone 291000 (TRBV7-8, TRBJ2-7)
CASSLGDREQYF

SEQ ID NO: 582001 - protein, 15 aa, Homo sapiens
  CDR3 for alpha chain variable domain of TCR clone 291001 (TRAV26-1, TRAJ23)
CIVRVLNNQGGKLIF

SEQ ID NO: 582002 - protein, 16 aa, Homo sapiens
  CDR3 for beta chain variable domain of TCR clone 291001 (TRBV7-9, TRBJ1-2)
CASSLGFSSGEDGYTV

SEQ ID NO: 582003 - protein, 13 aa, Homo sapiens
  CDR3 for alpha chain variable domain of TCR clone 291002 (TRAV12-2, TRAJ15)
CAVFNQAGTALIF

SEQ ID NO: 582004 - protein, 22 aa, Homo sapiens
  CDR3 for beta chain variable domain of TCR clone 291002 (TRBV7-8, TRBJ1-5)
RRTPPCISVPAAGGGRYQPQHF

SEQ ID NO: 582005 - protein, 14 aa, Homo sapiens
  CDR3 for alpha chain variable domain of TCR clone 291003 (TRAV1-2, TRAJ8)
CAVREETGFQTLVF

SEQ ID NO: 582006 - protein, 15 aa, Homo sapiens
  CDR3 for beta chain variable domain of TCR clone 291003 (TRBV6-3, TRBJ2-7)
CASSSPGTVFYEQYF

SEQ ID NO: 582007 - protein, 13 aa, Homo sapiens
  CDR3 for alpha chain variable domain of TCR clone 291004 (TRAV35, TRAJ36)
CAGPRIGANNLFF

SEQ ID NO: 582008 - protein, 14 aa, Homo sapiens
  CDR3 for beta chain variable domain of TCR clone 291004 (TRBV20-1, TRBJ1-5)
CSATDRGSNQPQHF

SEQ ID NO: 582009 - protein, 15 aa, Homo sapiens
  CDR3 for alpha chain variable domain of TCR clone 291005 (TRAV21, TRAJ53)
CATLNSGGSNYKLTF

SEQ ID NO: 582010 - protein, 14 aa, Homo sapiens
  CDR3 for beta chain variable domain of TCR clone 291005 (TRBV29-1, TRBJ2-3)
CSAGAGVGADTQYF

SEQ ID NO: 582011 - protein, 16 aa, Homo sapiens
  CDR3 for alpha chain variable domain of TCR clone 291006 (TRAV12-3, TRAJ20)
CAMDKLSFGAGNTVTV

SEQ ID NO: 582012 - protein, 14 aa, Homo sapiens
  CDR3 for beta chain variable domain of TCR clone 291006 (TRBV5-4, TRBJ2-2)
CASSLTSRTGELFF

SEQ ID NO: 582013 - protein, 14 aa, Homo sapiens
  CDR3 for alpha chain variable domain of TCR clone 291007 (TRAV38-1, TRAJ40)
CGLRPTSGTYKYIL

SEQ ID NO: 582014 - protein, 14 aa, Homo sapiens
  CDR3 for beta chain variable domain of TCR clone 291007 (TRBV25-1, TRBJ1-1)
CASTHLGGNTEAFF

SEQ ID NO: 582015 - protein, 15 aa, Homo sapiens
  CDR3 for alpha chain variable domain of TCR clone 291008 (TRAV26-1, TRAJ24)
CIVPLTTDSWGKFRF

SEQ ID NO: 582016 - protein, 14 aa, Homo sapiens
  CDR3 for beta chain variable domain of TCR clone 291008 (TRBV10-3, TRBJ2-3)
CAISEKGLGDTQYF

SEQ ID NO: 582017 - protein, 11 aa, Homo sapiens
  CDR3 for alpha chain variable domain of TCR clone 291009 (TRAV8-3, TRAJ49)
CAGNTGNQFYF

SEQ ID NO: 582018 - protein, 14 aa, Homo sapiens
  CDR3 for beta chain variable domain of TCR clone 291009 (TRBV7-8, TRBJ2-7)
CASSVGQGAYEQYF

SEQ ID NO: 582019 - protein, 18 aa, Homo sapiens
  CDR3 for alpha chain variable domain of TCR clone 291010 (TRAV21, TRAJ52)
CAVRPYPAGGTSYGKLTF

SEQ ID NO: 582020 - protein, 17 aa, Homo sapiens
  CDR3 for beta chain variable domain of TCR clone 291010 (TRBV13, TRBJ2-3)
CASSLSRVAGGKNTQYF

SEQ ID NO: 582021 - protein, 13 aa, Homo sapiens
  CDR3 for alpha chain variable domain of TCR clone 291011 (TRAV27, TRAJ41)
CAGEGNSGYALNF

SEQ ID NO: 582022 - protein, 16 aa, Homo sapiens
  CDR3 for beta chain variable domain of TCR clone 291011 (TRBV20-1, TRBJ2-1)
CSARDLKQGMNNEQFF

SEQ ID NO: 582023 - protein, 14 aa, Homo sapiens
  CDR3 for alpha chain variable domain of TCR clone 291012 (TRAV1-2, TRAJ8)
CAVREDTGFQKLVF

SEQ ID NO: 582024 - protein, 15 aa, Homo sapiens
  CDR3 for beta chain variable domain of TCR clone 291012 (TRBV6-1, TRBJ1-3)
CASSDFGFSGNTIYF

SEQ ID NO: 582025 - protein, 14 aa, Homo sapiens
  CDR3 for alpha chain variable domain of TCR clone 291013 (TRAV12-1, TRAJ37)
CVVNRSGNTGKLIF

SEQ ID NO: 582026 - protein, 14 aa, Homo sapiens
  CDR3 for beta chain variable domain of TCR clone 291013 (TRBV7-9, TRBJ2-5)
CASSLVGGEETQYF

SEQ ID NO: 582027 - protein, 15 aa, Homo sapiens
  CDR3 for alpha chain variable domain of TCR clone 291014 (TRAV27, TRAJ38)
CAGRRNAGNNRKLIW

SEQ ID NO: 582028 - protein, 14 aa, Homo sapiens
  CDR3 for beta chain variable domain of TCR clone 291014 (TRBV7-8, TRBJ2-3)
CASSLEAGTDTQYF

SEQ ID NO: 582029 - protein, 14 aa, Homo sapiens
  CDR3 for alpha chain variable domain of TCR clone 291015 (TRAV26-1, TRAJ45)
CIVRVVGGADGLTF

SEQ ID NO: 582030 - protein, 16 aa, Homo sapiens
  CDR3 for beta chain variable domain of TCR clone 291015 (TRBV7-9, TRBJ1-1)
CGSSLTQVRSNTEAFF

SEQ ID NO: 582031 - protein, 14 aa, Homo sapiens
  CDR3 for alpha chain variable domain of TCR clone 291016 (TRAV4, TRAJ30)
FLVGDMNRDDKIIF

SEQ ID NO: 582032 - protein, 15 aa, Homo sapiens
  CDR3 for beta chain variable domain of TCR clone 291016 (TRBV7-2, TRBJ2-7)
CASSLSSGRTYEQYF

SEQ ID NO: 582033 - protein, 16 aa, Homo sapiens
  CDR3 for alpha chain variable domain of TCR clone 291017 (TRAV16, TRAJ52)
CALSAAGGTSYGKLTF

SEQ ID NO: 582034 - protein, 12 aa, Homo sapiens
  CDR3 for beta chain variable domain of TCR clone 291017 (TRBV12-4, TRBJ1-3)
CASSFSGKQLYF

SEQ ID NO: 582035 - protein, 14 aa, Homo sapiens
  CDR3 for alpha chain variable domain of TCR clone 291018 (TRAV16, TRAJ48)
CALTPGFGNEKLTF

SEQ ID NO: 582036 - protein, 12 aa, Homo sapiens
  CDR3 for beta chain variable domain of TCR clone 291018 (TRBV27, TRBJ2-5)
CASSLKGETQYF

SEQ ID NO: 582037 - protein, 16 aa, Homo sapiens
  CDR3 for alpha chain variable domain of TCR clone 291019 (TRAV30, TRAJ24)
CGPEIVDADSWGKFQF

SEQ ID NO: 582038 - protein, 15 aa, Homo sapiens
  CDR3 for beta chain variable domain of TCR clone 291019 (TRBV5-1, TRBJ1-1)
CASSSTTGTNTEAFF

SEQ ID NO: 582039 - protein, 15 aa, Homo sapiens
  CDR3 for alpha chain variable domain of TCR clone 291020 (TRAV17, TRAJ57)
CATGPSQRGSEKLVF

SEQ ID NO: 582040 - protein, 15 aa, Homo sapiens
  CDR3 for beta chain variable domain of TCR clone 291020 (TRBV7-2, TRBJ1-2)
CASSPRAGWNYGYTF

SEQ ID NO: 582041 - protein, 15 aa, Homo sapiens
  CDR3 for alpha chain variable domain of TCR clone 291021 (TRAV26-1, TRAJ38)
CIVRAEGGNNRKLIW

SEQ ID NO: 582042 - protein, 14 aa, Homo sapiens
  CDR3 for beta chain variable domain of TCR clone 291021 (TRBV7-6, TRBJ2-5)
CASSSPSGSETQCF

SEQ ID NO: 582043 - protein, 14 aa, Homo sapiens
  CDR3 for alpha chain variable domain of TCR clone 291022 (TRAV1-2, TRAJ16)
CAVNRFSDGQKLLF

SEQ ID NO: 582044 - protein, 13 aa, Homo sapiens
  CDR3 for beta chain variable domain of TCR clone 291022 (TRBV7-8, TRBJ2-7)
CASSLTWGREQYF

SEQ ID NO: 582045 - protein, 17 aa, Homo sapiens
  CDR3 for alpha chain variable domain of TCR clone 291023 (TRAV26-1, TRAJ37)
CIVRVITVSSNPGKLIF

SEQ ID NO: 582046 - protein, 15 aa, Homo sapiens
  CDR3 for beta chain variable domain of TCR clone 291023 (TRBV20-1, TRBJ2-1)
CSASSAGSSYNEQFF

SEQ ID NO: 582047 - protein, 12 aa, Homo sapiens
  CDR3 for alpha chain variable domain of TCR clone 291024 (TRAV25, TRAJ11)
CAGYSGYSTLTF

SEQ ID NO: 582048 - protein, 13 aa, Homo sapiens
  CDR3 for beta chain variable domain of TCR clone 291024 (TRBV7-9, TRBJ1-2)
CASSLKENYGYTF

SEQ ID NO: 582049 - protein, 12 aa, Homo sapiens
  CDR3 for alpha chain variable domain of TCR clone 291025 (TRAV12-3, TRAJ17)
CAMTLTGNKLTF

SEQ ID NO: 582050 - protein, 15 aa, Homo sapiens
  CDR3 for beta chain variable domain of TCR clone 291025 (TRBV7-9, TRBJ1-2)
CASSLDREPNYGYTF

SEQ ID NO: 582051 - protein, 15 aa, Homo sapiens
  CDR3 for alpha chain variable domain of TCR clone 291026 (TRAV13-2, TRAJ16)
CAENDRFSDGQKLLF

SEQ ID NO: 582052 - protein, 13 aa, Homo sapiens
  CDR3 for beta chain variable domain of TCR clone 291026 (TRBV7-2, TRBJ2-7)
CASSSPSGSEQYF

SEQ ID NO: 582053 - protein, 13 aa, Homo sapiens
  CDR3 for alpha chain variable domain of TCR clone 291027 (TRAV13-1, TRAJ39)
CSKYSNAGNMLTF

SEQ ID NO: 582054 - protein, 16 aa, Homo sapiens
  CDR3 for beta chain variable domain of TCR clone 291027 (TRBV10-3, TRBJ1-6)
CAISERRGQGNSPLHF

SEQ ID NO: 582055 - protein, 17 aa, Homo sapiens
  CDR3 for alpha chain variable domain of TCR clone 291028 (TRAV35, TRAJ47)
GLLDCRTHTESGNKLVF

SEQ ID NO: 582056 - protein, 11 aa, Homo sapiens
  CDR3 for beta chain variable domain of TCR clone 291028 (TRBV29-1, TRBJ1-1)
CSVEVGTRTFF

SEQ ID NO: 582057 - protein, 16 aa, Homo sapiens
  CDR3 for alpha chain variable domain of TCR clone 291029 (TRAV12-3, TRAJ4)
CAMTRLFSGGYSKLIF

SEQ ID NO: 582058 - protein, 16 aa, Homo sapiens
  CDR3 for beta chain variable domain of TCR clone 291029 (TRBV27, TRBJ2-1)
CASSARLAGVYNEQFF

SEQ ID NO: 582059 - protein, 13 aa, Homo sapiens
  CDR3 for alpha chain variable domain of TCR clone 291030 (TRAV2, TRAJ40)
CAVVASGTYKYIF

SEQ ID NO: 582060 - protein, 14 aa, Homo sapiens
  CDR3 for beta chain variable domain of TCR clone 291030 (TRBV19, TRBJ2-1)
CASPTVVLSGEQFF

SEQ ID NO: 582061 - protein, 16 aa, Homo sapiens
  CDR3 for alpha chain variable domain of TCR clone 291031 (TRAV26-2, TRAJ22)
FILRDGASGSARQLTF

SEQ ID NO: 582062 - protein, 15 aa, Homo sapiens
  CDR3 for beta chain variable domain of TCR clone 291031 (TRBV9, TRBJ1-1)
CASSVALGQTYEAFF

SEQ ID NO: 582063 - protein, 14 aa, Homo sapiens
  CDR3 for alpha chain variable domain of TCR clone 291032 (TRAV29/DV5, TRAJ49)
FAASAQNTGNQFYF

SEQ ID NO: 582064 - protein, 16 aa, Homo sapiens
  CDR3 for beta chain variable domain of TCR clone 291032 (TRBV12-4, TRBJ1-5)
CASRQPVEGSNQPQHF

SEQ ID NO: 582065 - protein, 18 aa, Homo sapiens
  CDR3 for alpha chain variable domain of TCR clone 291033 (TRAV26-1, TRAJ56)
CIVRVASRVSGANSKLTF

SEQ ID NO: 582066 - protein, 15 aa, Homo sapiens
  CDR3 for beta chain variable domain of TCR clone 291033 (TRBV7-9, TRBJ2-5)
RASSDTGRGRETQYF

SEQ ID NO: 582067 - protein, 15 aa, Homo sapiens
  CDR3 for alpha chain variable domain of TCR clone 291034 (TRAV4, TRAJ39)
CLVGPNNNAGNMLTF

SEQ ID NO: 582068 - protein, 14 aa, Homo sapiens
  CDR3 for beta chain variable domain of TCR clone 291034 (TRBV9, TRBJ2-7)
CASSVGVGSYEQYF

SEQ ID NO: 582069 - protein, 14 aa, Homo sapiens
  CDR3 for alpha chain variable domain of TCR clone 291035 (TRAV1-2, TRAJ16)
CAVNRFSDGQKLLF

SEQ ID NO: 582070 - protein, 13 aa, Homo sapiens
  CDR3 for beta chain variable domain of TCR clone 291035 (TRBV7-9, TRBJ1-2)
CDSSLKQNYGYTF

SEQ ID NO: 582071 - protein, 12 aa, Homo sapiens
  CDR3 for alpha chain variable domain of TCR clone 291036 (TRAV27, TRAJ33)
CAGDGSNYQLIW

SEQ ID NO: 582072 - protein, 12 aa, Homo sapiens
  CDR3 for beta chain variable domain of TCR clone 291036 (TRBV20-1, TRBJ2-7)
CSAGLKMGEQYF

SEQ ID NO: 582073 - protein, 15 aa, Homo sapiens
  CDR3 for alpha chain variable domain of TCR clone 291037 (TRAV20, TRAJ43)
CAVQAGKSSNNDMRF

SEQ ID NO: 582074 - protein, 13 aa, Homo sapiens
  CDR3 for beta chain variable domain of TCR clone 291037 (TRBV7-9, TRBJ2-7)
CASSFAGAYEQYF

SEQ ID NO: 582075 - protein, 15 aa, Homo sapiens
  CDR3 for alpha chain variable domain of TCR clone 291038 (TRAV8-3, TRAJ40)
CAVGPYTSGTYQYIF

SEQ ID NO: 582076 - protein, 16 aa, Homo sapiens
  CDR3 for beta chain variable domain of TCR clone 291038 (TRBV7-2, TRBJ2-7)
CASSLDPGGGSGGQYF

SEQ ID NO: 582077 - protein, 14 aa, Homo sapiens
  CDR3 for alpha chain variable domain of TCR clone 291039 (TRAV26-2, TRAJ38)
CILYNAGNNRKLIW

SEQ ID NO: 582078 - protein, 15 aa, Homo sapiens
  CDR3 for beta chain variable domain of TCR clone 291039 (TRBV11-3, TRBJ2-3)
CASRKDGREGDTQYF

SEQ ID NO: 582079 - protein, 14 aa, Homo sapiens
  CDR3 for alpha chain variable domain of TCR clone 291040 (TRAV1-2, TRAJ8)
CAVREDTGFQKLVF

SEQ ID NO: 582080 - protein, 15 aa, Homo sapiens
  CDR3 for beta chain variable domain of TCR clone 291040 (TRBV7-2, TRBJ2-1)
CASSPLAGEYNERFF

SEQ ID NO: 582081 - protein, 21 aa, Homo sapiens
  CDR3 for alpha chain variable domain of TCR clone 291041 (TRAV27, TRAJ11)
CAGARVASPLGRGLCFYSLQI

SEQ ID NO: 582082 - protein, 13 aa, Homo sapiens
  CDR3 for beta chain variable domain of TCR clone 291041 (TRBV20-1, TRBJ2-1)
CSASTGGYNEQFF

SEQ ID NO: 582083 - protein, 13 aa, Homo sapiens
  CDR3 for alpha chain variable domain of TCR clone 291042 (TRAV29/DV5, TRAJ31)
CAASRNNNARLMF

SEQ ID NO: 582084 - protein, 12 aa, Homo sapiens
  CDR3 for beta chain variable domain of TCR clone 291042 (TRBV14, TRBJ2-5)
CASSKLKETQYF

SEQ ID NO: 582085 - protein, 11 aa, Homo sapiens
  CDR3 for alpha chain variable domain of TCR clone 291043 (TRAV12-3, TRAJ43)
FAMSVSIDMRF

SEQ ID NO: 582086 - protein, 14 aa, Homo sapiens
  CDR3 for beta chain variable domain of TCR clone 291043 (TRBV12-5, TRBJ2-5)
CASGSRTHQETQYF

SEQ ID NO: 582087 - protein, 15 aa, Homo sapiens
  CDR3 for alpha chain variable domain of TCR clone 291044 (TRAV8-3, TRAJ27)
CAVGPSKTSAGKSTF

SEQ ID NO: 582088 - protein, 14 aa, Homo sapiens
  CDR3 for beta chain variable domain of TCR clone 291044 (TRBV11-2, TRBJ2-3)
CASSRLARTDTQYF

SEQ ID NO: 582089 - protein, 17 aa, Homo sapiens
  CDR3 for alpha chain variable domain of TCR clone 291045 (TRAV3, TRAJ12)
CAVRDGGRMDSSYKLIF

SEQ ID NO: 582090 - protein, 13 aa, Homo sapiens
  CDR3 for beta chain variable domain of TCR clone 291045 (TRBV4-2, TRBJ1-1)
RASSQAGNTEAFF

SEQ ID NO: 582091 - protein, 10 aa, Homo sapiens
  CDR3 for alpha chain variable domain of TCR clone 291046 (TRAV3, TRAJ6)
CAVRDGPRAG

SEQ ID NO: 582092 - protein, 13 aa, Homo sapiens
  CDR3 for beta chain variable domain of TCR clone 291046 (TRBV19, TRBJ1-1)
CASSITGESEAFF

SEQ ID NO: 582093 - protein, 15 aa, Homo sapiens
  CDR3 for alpha chain variable domain of TCR clone 291047 (TRAV12-3, TRAJ5)
CAMSGLGTGRRALTF

SEQ ID NO: 582094 - protein, 16 aa, Homo sapiens
  CDR3 for beta chain variable domain of TCR clone 291047 (TRBV20-1, TRBJ2-3)
CSARLHSAGAIDTQDF

SEQ ID NO: 582095 - protein, 15 aa, Homo sapiens
  CDR3 for alpha chain variable domain of TCR clone 291048 (TRAV12-1, TRAJ44)
CVVNINTSTASKLTF

SEQ ID NO: 582096 - protein, 16 aa, Homo sapiens
  CDR3 for beta chain variable domain of TCR clone 291048 (TRBV12-5, TRBJ2-5)
CGSGPRTSGNQETQYF

SEQ ID NO: 582097 - protein, 13 aa, Homo sapiens
  CDR3 for alpha chain variable domain of TCR clone 291049 (TRAV23/DV6, TRAJ22)
CSPYSGSASQLTF

SEQ ID NO: 582098 - protein, 14 aa, Homo sapiens
  CDR3 for beta chain variable domain of TCR clone 291049 (TRBV12-5, TRBJ2-5)
CASGSRTHQETQYF

SEQ ID NO: 582099 - protein, 14 aa, Homo sapiens
  CDR3 for alpha chain variable domain of TCR clone 291050 (TRAV12-1, TRAJ12)
CVVTRIDRSYKLIF

SEQ ID NO: 582100 - protein, 13 aa, Homo sapiens
  CDR3 for beta chain variable domain of TCR clone 291050 (TRBV20-1, TRBJ1-1)
CSARGGGNTEAFF

SEQ ID NO: 582101 - protein, 13 aa, Homo sapiens
  CDR3 for alpha chain variable domain of TCR clone 291051 (TRAV8-3, TRAJ48)
CAVVPFGNEKLTF

SEQ ID NO: 582102 - protein, 13 aa, Homo sapiens
  CDR3 for beta chain variable domain of TCR clone 291051 (TRBV20-1, TRBJ2-7)
CSAPGLADYEQYF

SEQ ID NO: 582103 - protein, 12 aa, Homo sapiens
  CDR3 for alpha chain variable domain of TCR clone 291052 (TRAV35, TRAJ39)
LAPHNAGNMLTF

SEQ ID NO: 582104 - protein, 13 aa, Homo sapiens
  CDR3 for beta chain variable domain of TCR clone 291052 (TRBV19, TRBJ1-3)
CASRLSLGNTIYF

SEQ ID NO: 582105 - protein, 13 aa, Homo sapiens
  CDR3 for alpha chain variable domain of TCR clone 291053 (TRAV13-2, TRAJ13)
CAEGPGGYQKVTF

SEQ ID NO: 582106 - protein, 16 aa, Homo sapiens
  CDR3 for beta chain variable domain of TCR clone 291053 (TRBV12-5, TRBJ2-5)
CASGPRTSGNQETQYF

SEQ ID NO: 582107 - protein, 17 aa, Homo sapiens
  CDR3 for alpha chain variable domain of TCR clone 291054 (TRAV8-1, TRAJ43)
CAVTNDMRFGAGTRLTV

SEQ ID NO: 582108 - protein, 17 aa, Homo sapiens
  CDR3 for beta chain variable domain of TCR clone 291054 (TRBV5-4, TRBJ2-1)
CASSSAGGRGPYNAQFF

SEQ ID NO: 582109 - protein, 12 aa, Homo sapiens
  CDR3 for alpha chain variable domain of TCR clone 291055 (TRAV3, TRAJ43)
CAVRDTNNDMRF

SEQ ID NO: 582110 - protein, 14 aa, Homo sapiens
  CDR3 for beta chain variable domain of TCR clone 291055 (TRBV19, TRBJ2-5)
CASSMTGQQETQYF

SEQ ID NO: 582111 - protein, 17 aa, Homo sapiens
  CDR3 for alpha chain variable domain of TCR clone 291056 (TRAV26-1, TRAJ36)
CIVRPPGDQTGANNLFF

SEQ ID NO: 582112 - protein, 15 aa, Homo sapiens
  CDR3 for beta chain variable domain of TCR clone 291056 (TRBV10-3, TRBJ2-6)
CATPAAASGANDLTF

SEQ ID NO: 582113 - protein, 11 aa, Homo sapiens
  CDR3 for alpha chain variable domain of TCR clone 291057 (TRAV12-1, TRAJ21)
CVVNNFNKFYF

SEQ ID NO: 582114 - protein, 11 aa, Homo sapiens
  CDR3 for beta chain variable domain of TCR clone 291057 (TRBV10-3, TRBJ2-7)
CASSEGLEQYF

SEQ ID NO: 582115 - protein, 12 aa, Homo sapiens
  CDR3 for alpha chain variable domain of TCR clone 291058 (TRAV27, TRAJ33)
CAGDGSNYQLIC

SEQ ID NO: 582116 - protein, 15 aa, Homo sapiens
  CDR3 for beta chain variable domain of TCR clone 291058 (TRBV6-5, TRBJ2-7)
CASSYSTSGNYEQYF

SEQ ID NO: 582117 - protein, 14 aa, Homo sapiens
  CDR3 for alpha chain variable domain of TCR clone 291059 (TRAV29/DV5, TRAJ48)
CAAMSLFGNEKLTF

SEQ ID NO: 582118 - protein, 15 aa, Homo sapiens
  CDR3 for beta chain variable domain of TCR clone 291059 (TRBV7-2, TRBJ2-1)
CASTHGTGIYNEQFF

SEQ ID NO: 582119 - protein, 11 aa, Homo sapiens
  CDR3 for alpha chain variable domain of TCR clone 291060 (TRAV1-2, TRAJ20)
CAVSNDYKLSF

SEQ ID NO: 582120 - protein, 16 aa, Homo sapiens
  CDR3 for beta chain variable domain of TCR clone 291060 (TRBV29-1, TRBJ2-6)
CSVEDIAYAGANVLTF

SEQ ID NO: 582121 - protein, 14 aa, Homo sapiens
  CDR3 for alpha chain variable domain of TCR clone 291061 (TRAV23/DV6, TRAJ4)
CAANLSGGYNKLTF

SEQ ID NO: 582122 - protein, 11 aa, Homo sapiens
  CDR3 for beta chain variable domain of TCR clone 291061 (TRBV7-9, TRBJ2-3)
CASSPTDTQYF

SEQ ID NO: 582123 - protein, 10 aa, Homo sapiens
  CDR3 for alpha chain variable domain of TCR clone 291062 (TRAV12-1, TRAJ21)
CVVQWGKFYF

SEQ ID NO: 582124 - protein, 17 aa, Homo sapiens
  CDR3 for beta chain variable domain of TCR clone 291062 (TRBV7-2, TRBJ2-2)
CASSPRGAGEGTGELFF

SEQ ID NO: 582125 - protein, 14 aa, Homo sapiens
  CDR3 for alpha chain variable domain of TCR clone 291063 (TRAV4, TRAJ41)
CLVGDGDSGYALNF

SEQ ID NO: 582126 - protein, 15 aa, Homo sapiens
  CDR3 for beta chain variable domain of TCR clone 291063 (TRBV27, TRBJ2-7)
CASSLEGGGAHEQYF

SEQ ID NO: 582127 - protein, 15 aa, Homo sapiens
  CDR3 for alpha chain variable domain of TCR clone 291064 (TRAV23/DV6, TRAJ15)
CAALPAGRNCSDLLA

SEQ ID NO: 582128 - protein, 14 aa, Homo sapiens
  CDR3 for beta chain variable domain of TCR clone 291064 (TRBV7-9, TRBJ1-2)
CASSRQGANYGYTF

SEQ ID NO: 582129 - protein, 12 aa, Homo sapiens
  CDR3 for alpha chain variable domain of TCR clone 291065 (TRAV13-1, TRAJ21)
CAEKEGFNKFYF

SEQ ID NO: 582130 - protein, 17 aa, Homo sapiens
  CDR3 for beta chain variable domain of TCR clone 291065 (TRBV19, TRBJ2-7)
CASSISFYDSYPYEQYF

SEQ ID NO: 582131 - protein, 16 aa, Homo sapiens
  CDR3 for alpha chain variable domain of TCR clone 291066 (TRAV12-3, TRAJ53)
CAMSVGSGGSNYKLTF

SEQ ID NO: 582132 - protein, 11 aa, Homo sapiens
  CDR3 for beta chain variable domain of TCR clone 291066 (TRBV29-1, TRBJ2-5)
CSVASEETQYF

SEQ ID NO: 582133 - protein, 15 aa, Homo sapiens
  CDR3 for alpha chain variable domain of TCR clone 291067 (TRAV12-1, TRAJ45)
CVVLSGGGGADGLPF

SEQ ID NO: 582134 - protein, 13 aa, Homo sapiens
  CDR3 for beta chain variable domain of TCR clone 291067 (TRBV7-3, TRBJ1-1)
CASSQDWGAEAFF

SEQ ID NO: 582135 - protein, 12 aa, Homo sapiens
  CDR3 for alpha chain variable domain of TCR clone 291068 (TRAV13-1, TRAJ17)
CAARTAGNKRTF

SEQ ID NO: 582136 - protein, 15 aa, Homo sapiens
  CDR3 for beta chain variable domain of TCR clone 291068 (TRBV7-6, TRBJ1-1)
CASSPQGGANTEAFF

SEQ ID NO: 582137 - protein, 16 aa, Homo sapiens
  CDR3 for alpha chain variable domain of TCR clone 291069 (TRAV8-3, TRAJ8)
CAVPRDGHTGFQKLVF

SEQ ID NO: 582138 - protein, 14 aa, Homo sapiens
  CDR3 for beta chain variable domain of TCR clone 291069 (TRBV4-1, TRBJ2-2)
CASSQAVNTGELFF

SEQ ID NO: 582139 - protein, 14 aa, Homo sapiens
  CDR3 for alpha chain variable domain of TCR clone 291070 (TRAV23/DV6, TRAJ13)
CEASETGGYQKVTF

SEQ ID NO: 582140 - protein, 16 aa, Homo sapiens
  CDR3 for beta chain variable domain of TCR clone 291070 (TRBV5-1, TRBJ1-1)
CASSSGGNSLNTEAFF

SEQ ID NO: 582141 - protein, 16 aa, Homo sapiens
  CDR3 for alpha chain variable domain of TCR clone 291071 (TRAV3, TRAJ37)
CAVRPHGSGNTGKLIF

SEQ ID NO: 582142 - protein, 12 aa, Homo sapiens
  CDR3 for beta chain variable domain of TCR clone 291071 (TRBV2, TRBJ2-7)
CASKRGSYEQYF

SEQ ID NO: 582143 - protein, 13 aa, Homo sapiens
  CDR3 for alpha chain variable domain of TCR clone 291072 (TRAV16, TRAJ48)
WSPLNFGNEKLTF

SEQ ID NO: 582144 - protein, 11 aa, Homo sapiens
  CDR3 for beta chain variable domain of TCR clone 291072 (TRBV7-9, TRBJ2-3)
CASSPTDTQYF

SEQ ID NO: 582145 - protein, 14 aa, Homo sapiens
  CDR3 for alpha chain variable domain of TCR clone 291073 (TRAV12-2, TRAJ44)
CAVNPAGTASKLTV

SEQ ID NO: 582146 - protein, 16 aa, Homo sapiens
  CDR3 for beta chain variable domain of TCR clone 291073 (TRBV2, TRBJ2-6)
CASSEVGGAGANVLTF

SEQ ID NO: 582147 - protein, 13 aa, Homo sapiens
  CDR3 for alpha chain variable domain of TCR clone 291074 (TRAV35, TRAJ33)
CVGRHDSNYQLIW

SEQ ID NO: 582148 - protein, 19 aa, Homo sapiens
  CDR3 for beta chain variable domain of TCR clone 291074 (TRBV6-3, TRBJ2-1)
CASSYSWTSGRATYNEQFF

SEQ ID NO: 582149 - protein, 17 aa, Homo sapiens
  CDR3 for alpha chain variable domain of TCR clone 291075 (TRAV3, TRAJ42)
CAVRDRDYGGSQGNLIF

SEQ ID NO: 582150 - protein, 14 aa, Homo sapiens
  CDR3 for beta chain variable domain of TCR clone 291075 (TRBV4-1, TRBJ2-2)
CASSQAGNTGELFF

SEQ ID NO: 582151 - protein, 15 aa, Homo sapiens
  CDR3 for alpha chain variable domain of TCR clone 291076 (TRAV12-1, TRAJ37)
CVVNIMGGNTGKLTF

SEQ ID NO: 582152 - protein, 12 aa, Homo sapiens
  CDR3 for beta chain variable domain of TCR clone 291076 (TRBV2, TRBJ2-7)
CASSRVGYEQYF

SEQ ID NO: 582153 - protein, 13 aa, Homo sapiens
  CDR3 for alpha chain variable domain of TCR clone 291077 (TRAV27, TRAJ41)
CAGEGNSWYALNF

SEQ ID NO: 582154 - protein, 16 aa, Homo sapiens
  CDR3 for beta chain variable domain of TCR clone 291077 (TRBV7-9, TRBJ2-1)
CASSDVAGGSYNEQFF

SEQ ID NO: 582155 - protein, 11 aa, Homo sapiens
  CDR3 for alpha chain variable domain of TCR clone 291078 (TRAV2, TRAJ13)
CASGGYQKVTF

SEQ ID NO: 582156 - protein, 14 aa, Homo sapiens
  CDR3 for beta chain variable domain of TCR clone 291078 (TRBV6-1, TRBJ1-3)
CDSVQGGGGNTIYF

SEQ ID NO: 582157 - protein, 14 aa, Homo sapiens
  CDR3 for alpha chain variable domain of TCR clone 291079 (TRAV2, TRAJ26)
CAVEDWNYGQNFVF

SEQ ID NO: 582158 - protein, 14 aa, Homo sapiens
  CDR3 for beta chain variable domain of TCR clone 291079 (TRBV7-2, TRBJ2-7)
CASRSQGAAYEQYF

SEQ ID NO: 582159 - protein, 13 aa, Homo sapiens
  CDR3 for alpha chain variable domain of TCR clone 291080 (TRAV12-3, TRAJ7)
CAMTPCGNNRLAF

SEQ ID NO: 582160 - protein, 16 aa, Homo sapiens
  CDR3 for beta chain variable domain of TCR clone 291080 (TRBV7-3, TRBJ2-1)
CASSLEGYRSCNEQFF

SEQ ID NO: 582161 - protein, 13 aa, Homo sapiens
  CDR3 for alpha chain variable domain of TCR clone 291081 (TRAV1-1, TRAJ5)
CAVRQAGRRALTF

SEQ ID NO: 582162 - protein, 14 aa, Homo sapiens
  CDR3 for beta chain variable domain of TCR clone 291081 (TRBV7-9, TRBJ2-3)
CASSLEQGTNTQYF

SEQ ID NO: 582163 - protein, 16 aa, Homo sapiens
  CDR3 for alpha chain variable domain of TCR clone 291082 (TRAV3, TRAJ5)
CAVRNLMDTGRRALTF

SEQ ID NO: 582164 - protein, 16 aa, Homo sapiens
  CDR3 for beta chain variable domain of TCR clone 291082 (TRBV4-2, TRBJ2-7)
CASSQEGLAISYEQYV

SEQ ID NO: 582165 - protein, 15 aa, Homo sapiens
  CDR3 for alpha chain variable domain of TCR clone 291083 (TRAV8-6, TRAJ11)
CAVNFMNSGYSTLTL

SEQ ID NO: 582166 - protein, 17 aa, Homo sapiens
  CDR3 for beta chain variable domain of TCR clone 291083 (TRBV3-1, TRBJ2-5)
CASSNWGGTSGQETQYF

SEQ ID NO: 582167 - protein, 15 aa, Homo sapiens
  CDR3 for alpha chain variable domain of TCR clone 291084 (TRAV23/DV6, TRAJ18)
CAARYRGSTLGRLYF

SEQ ID NO: 582168 - protein, 22 aa, Homo sapiens
  CDR3 for beta chain variable domain of TCR clone 291084 (TRBV7-2, TRBJ2-7)
RRTRPCISVPAAPLAGAYEQYF

SEQ ID NO: 582169 - protein, 14 aa, Homo sapiens
  CDR3 for alpha chain variable domain of TCR clone 291085 (TRAV13-1, TRAJ44)
CAAQATGTASKLTF

SEQ ID NO: 582170 - protein, 14 aa, Homo sapiens
  CDR3 for beta chain variable domain of TCR clone 291085 (TRBV7-8, TRBJ2-3)
CASSLEAGTDTQYF

SEQ ID NO: 582171 - protein, 16 aa, Homo sapiens
  CDR3 for alpha chain variable domain of TCR clone 291086 (TRAV26-1, TRAJ56)
CIVRVAETGANSKLTF

SEQ ID NO: 582172 - protein, 15 aa, Homo sapiens
  CDR3 for beta chain variable domain of TCR clone 291086 (TRBV5-1, TRBJ2-3)
CASSVTSGSTDTQYF

SEQ ID NO: 582173 - protein, 14 aa, Homo sapiens
  CDR3 for alpha chain variable domain of TCR clone 291087 (TRAV17, TRAJ22)
CATSPSGSARQLTF

SEQ ID NO: 582174 - protein, 15 aa, Homo sapiens
  CDR3 for beta chain variable domain of TCR clone 291087 (TRBV19, TRBJ1-2)
CASSVGQVLNYGYTF

SEQ ID NO: 582175 - protein, 12 aa, Homo sapiens
  CDR3 for alpha chain variable domain of TCR clone 291088 (TRAV12-3, TRAJ17)
CAMTLTGNKLTF

SEQ ID NO: 582176 - protein, 15 aa, Homo sapiens
  CDR3 for beta chain variable domain of TCR clone 291088 (TRBV20-1, TRBJ2-7)
CSARDRASGMDERYF

SEQ ID NO: 582177 - protein, 14 aa, Homo sapiens
  CDR3 for alpha chain variable domain of TCR clone 291089 (TRAV2, TRAJ37)
CAVGFTSNTGKLIF

SEQ ID NO: 582178 - protein, 15 aa, Homo sapiens
  CDR3 for beta chain variable domain of TCR clone 291089 (TRBV20-1, TRBJ1-1)
CSASQGVTGNTEAFF

SEQ ID NO: 582179 - protein, 12 aa, Homo sapiens
  CDR3 for alpha chain variable domain of TCR clone 291090 (TRAV3, TRAJ7)
CAALLWEQQTRF

SEQ ID NO: 582180 - protein, 13 aa, Homo sapiens
  CDR3 for beta chain variable domain of TCR clone 291090 (TRBV7-3, TRBJ2-5)
CASSFRGGETQYF

SEQ ID NO: 582181 - protein, 16 aa, Homo sapiens
  CDR3 for alpha chain variable domain of TCR clone 291091 (TRAV3, TRAJ18)
CAVRDGRGPTLGRRYF

SEQ ID NO: 582182 - protein, 15 aa, Homo sapiens
  CDR3 for beta chain variable domain of TCR clone 291091 (TRBV7-9, TRBJ1-6)
CASSSPGRGNSPLHF

SEQ ID NO: 582183 - protein, 13 aa, Homo sapiens
  CDR3 for alpha chain variable domain of TCR clone 291092 (TRAV1-1, TRAJ9)
CAAKNTGGFKTIF

SEQ ID NO: 582184 - protein, 15 aa, Homo sapiens
  CDR3 for beta chain variable domain of TCR clone 291092 (TRBV20-1, TRBJ2-7)
CSARGPLAGGREQYF

SEQ ID NO: 582185 - protein, 14 aa, Homo sapiens
  CDR3 for alpha chain variable domain of TCR clone 291093 (TRAV1-2, TRAJ16)
CAVSRFSYGQKLLF

SEQ ID NO: 582186 - protein, 18 aa, Homo sapiens
  CDR3 for beta chain variable domain of TCR clone 291093 (TRBV20-1, TRBJ2-3)
CSASGLAGGPGTTDTQYF

SEQ ID NO: 582187 - protein, 14 aa, Homo sapiens
  CDR3 for alpha chain variable domain of TCR clone 291094 (TRAV17, TRAJ35)
CATDRTGFGNVLHC

SEQ ID NO: 582188 - protein, 15 aa, Homo sapiens
  CDR3 for beta chain variable domain of TCR clone 291094 (TRBV28, TRBJ2-5)
CASSSGRVIQETQYF

SEQ ID NO: 582189 - protein, 17 aa, Homo sapiens
  CDR3 for alpha chain variable domain of TCR clone 291095 (TRAV26-2, TRAJ42)
CILRDVGYGGSQGNLIF

SEQ ID NO: 582190 - protein, 16 aa, Homo sapiens
  CDR3 for beta chain variable domain of TCR clone 291095 (TRBV12-4, TRBJ2-7)
CASSLIDGTGTYEQYF

SEQ ID NO: 582191 - protein, 12 aa, Homo sapiens
  CDR3 for alpha chain variable domain of TCR clone 291096 (TRAV16, TRAJ10)
CSRTGGGNKLTF

SEQ ID NO: 582192 - protein, 14 aa, Homo sapiens
  CDR3 for beta chain variable domain of TCR clone 291096 (TRBV7-2, TRBJ2-1)
CASSLGVGYNEQLF

SEQ ID NO: 582193 - protein, 12 aa, Homo sapiens
  CDR3 for alpha chain variable domain of TCR clone 291097 (TRAV30, TRAJ43)
CGTEDRGNDMRF

SEQ ID NO: 582194 - protein, 16 aa, Homo sapiens
  CDR3 for beta chain variable domain of TCR clone 291097 (TRBV19, TRBJ1-5)
CASSIDRGGPRQPQHF

SEQ ID NO: 582195 - protein, 16 aa, Homo sapiens
  CDR3 for alpha chain variable domain of TCR clone 291098 (TRAV12-2, TRAJ28)
CAVIRGSGAGSYQLTF

SEQ ID NO: 582196 - protein, 13 aa, Homo sapiens
  CDR3 for beta chain variable domain of TCR clone 291098 (TRBV19, TRBJ2-7)
CASSIRSSYEQYF

SEQ ID NO: 582197 - protein, 17 aa, Homo sapiens
  CDR3 for alpha chain variable domain of TCR clone 291099 (TRAV3, TRAJ6)
CAVRDGPRAGGSYIPTF

SEQ ID NO: 582198 - protein, 16 aa, Homo sapiens
  CDR3 for beta chain variable domain of TCR clone 291099 (TRBV2, TRBJ1-3)
CASSGGAGRSGNTIYF

SEQ ID NO: 582199 - protein, 16 aa, Homo sapiens
  CDR3 for alpha chain variable domain of TCR clone 291100 (TRAV16, TRAJ52)
CALSAAGGTSYGKLHL

SEQ ID NO: 582200 - protein, 12 aa, Homo sapiens
  CDR3 for beta chain variable domain of TCR clone 291100 (TRBV12-4, TRBJ1-3)
CASSFSGNTIYF

SEQ ID NO: 582201 - protein, 15 aa, Homo sapiens
  CDR3 for alpha chain variable domain of TCR clone 291101 (TRAV12-3, TRAJ27)
CAMRAYNTNAGKSTF

SEQ ID NO: 582202 - protein, 18 aa, Homo sapiens
  CDR3 for beta chain variable domain of TCR clone 291101 (TRBV11-2, TRBJ2-3)
CASSLGGASRGAPNTQYF

SEQ ID NO: 582203 - protein, 14 aa, Homo sapiens
  CDR3 for alpha chain variable domain of TCR clone 291102 (TRAV1-2, TRAJ6)
RAVSLSGGSSIPTF

SEQ ID NO: 582204 - protein, 15 aa, Homo sapiens
  CDR3 for beta chain variable domain of TCR clone 291102 (TRBV28, TRBJ2-7)
CASSPGGRGFYEQYF

SEQ ID NO: 582205 - protein, 13 aa, Homo sapiens
  CDR3 for alpha chain variable domain of TCR clone 291103 (TRAV1-1, TRAJ11)
CAVLNSGYSTLTF

SEQ ID NO: 582206 - protein, 14 aa, Homo sapiens
  CDR3 for beta chain variable domain of TCR clone 291103 (TRBV7-2, TRBJ1-1)
CASSFLTGTTEAFS

SEQ ID NO: 582207 - protein, 11 aa, Homo sapiens
  CDR3 for alpha chain variable domain of TCR clone 291104 (TRAV12-3, TRAJ43)
CAMIVSNDIRF

SEQ ID NO: 582208 - protein, 16 aa, Homo sapiens
  CDR3 for beta chain variable domain of TCR clone 291104 (TRBV20-1, TRBJ2-1)
CSARDSLGAVYNEQFF

SEQ ID NO: 582209 - protein, 18 aa, Homo sapiens
  CDR3 for alpha chain variable domain of TCR clone 291105 (TRAV12-3, TRAJ52)
CAMSVGGAGGTSYGKLTF

SEQ ID NO: 582210 - protein, 16 aa, Homo sapiens
  CDR3 for beta chain variable domain of TCR clone 291105 (TRBV5-1, TRBJ1-1)
CASSSGGNSLNTEAFF

SEQ ID NO: 582211 - protein, 14 aa, Homo sapiens
  CDR3 for alpha chain variable domain of TCR clone 291106 (TRAV21, TRAJ37)
CAVKGSSNTGKLIF

SEQ ID NO: 582212 - protein, 12 aa, Homo sapiens
  CDR3 for beta chain variable domain of TCR clone 291106 (TRBV7-2, TRBJ2-5)
CSSQTSVETQYL

SEQ ID NO: 582213 - protein, 11 aa, Homo sapiens
  CDR3 for alpha chain variable domain of TCR clone 291107 (TRAV27, TRAJ47)
SIVEYGNKLVF

SEQ ID NO: 582214 - protein, 13 aa, Homo sapiens
  CDR3 for beta chain variable domain of TCR clone 291107 (TRBV27, TRBJ1-4)
CASSLMGDEKLFF

SEQ ID NO: 582215 - protein, 15 aa, Homo sapiens
  CDR3 for alpha chain variable domain of TCR clone 291108 (TRAV8-3, TRAJ45)
CASSYSGGGADGLNF

SEQ ID NO: 582216 - protein, 17 aa, Homo sapiens
  CDR3 for beta chain variable domain of TCR clone 291108 (TRBV7-8, TRBJ1-2)
CASSLRPLQGHLYGYTF

SEQ ID NO: 582217 - protein, 16 aa, Homo sapiens
  CDR3 for alpha chain variable domain of TCR clone 291109 (TRAV23/DV6, TRAJ9)
CAASIGGNTGGFKTIY

SEQ ID NO: 582218 - protein, 14 aa, Homo sapiens
  CDR3 for beta chain variable domain of TCR clone 291109 (TRBV9, TRBJ2-7)
CASSVGVGSYEQYF

SEQ ID NO: 582219 - protein, 13 aa, Homo sapiens
  CDR3 for alpha chain variable domain of TCR clone 291110 (TRAV8-3, TRAJ28)
CAVGAVGSDKLTF

SEQ ID NO: 582220 - protein, 16 aa, Homo sapiens
  CDR3 for beta chain variable domain of TCR clone 291110 (TRBV7-2, TRBJ2-7)
CASRYRERRTSSTSGR

SEQ ID NO: 582221 - protein, 14 aa, Homo sapiens
  CDR3 for alpha chain variable domain of TCR clone 291111 (TRAV23/DV6, TRAJ22)
CAASVSGSARQLTF

SEQ ID NO: 582222 - protein, 15 aa, Homo sapiens
  CDR3 for beta chain variable domain of TCR clone 291111 (TRBV7-2, TRBJ2-2)
CASRRPGQNTGELFF

SEQ ID NO: 582223 - protein, 19 aa, Homo sapiens
  CDR3 for alpha chain variable domain of TCR clone 291112 (TRAV26-1, TRAJ52)
CIVRAHRNAGGTSYGKLTF

SEQ ID NO: 582224 - protein, 15 aa, Homo sapiens
  CDR3 for beta chain variable domain of TCR clone 291112 (TRBV12-4, TRBJ2-5)
CASSPSTGLQETQYF

SEQ ID NO: 582225 - protein, 14 aa, Homo sapiens
  CDR3 for alpha chain variable domain of TCR clone 291113 (TRAV13-1, TRAJ44)
CAAKATGTASKLTF

SEQ ID NO: 582226 - protein, 15 aa, Homo sapiens
  CDR3 for beta chain variable domain of TCR clone 291113 (TRBV12-4, TRBJ1-6)
CASSLGGQGTSPLHF

SEQ ID NO: 582227 - protein, 15 aa, Homo sapiens
  CDR3 for alpha chain variable domain of TCR clone 291114 (TRAV23/DV6, TRAJ28)
CAALLAYSGAGSYQL

SEQ ID NO: 582228 - protein, 13 aa, Homo sapiens
  CDR3 for beta chain variable domain of TCR clone 291114 (TRBV4-2, TRBJ2-3)
CASSQGNTDTQYV

SEQ ID NO: 582229 - protein, 14 aa, Homo sapiens
  CDR3 for alpha chain variable domain of TCR clone 291115 (TRAV8-6, TRAJ9)
CAVSSYTRGFKTIF

SEQ ID NO: 582230 - protein, 15 aa, Homo sapiens
  CDR3 for beta chain variable domain of TCR clone 291115 (TRBV2, TRBJ1-2)
CASSESRTVNYGYTF

SEQ ID NO: 582231 - protein, 15 aa, Homo sapiens
  CDR3 for alpha chain variable domain of TCR clone 291116 (TRAV12-1, TRAJ37)
CVVNLPTSNTGKLIF

SEQ ID NO: 582232 - protein, 16 aa, Homo sapiens
  CDR3 for beta chain variable domain of TCR clone 291116 (TRBV7-3, TRBJ2-2)
CASSFLPSGYTGELFF

SEQ ID NO: 582233 - protein, 15 aa, Homo sapiens
  CDR3 for alpha chain variable domain of TCR clone 291117 (TRAV26-1, TRAJ40)
CIDRYATSRTYKYIF

SEQ ID NO: 582234 - protein, 11 aa, Homo sapiens
  CDR3 for beta chain variable domain of TCR clone 291117 (TRBV7-9, TRBJ2-1)
CASSSQNEQFF

SEQ ID NO: 582235 - protein, 18 aa, Homo sapiens
  CDR3 for alpha chain variable domain of TCR clone 291118 (TRAV26-1, TRAJ52)
CIVRVEGAGGTSYGKLTF

SEQ ID NO: 582236 - protein, 13 aa, Homo sapiens
  CDR3 for beta chain variable domain of TCR clone 291118 (TRBV7-3, TRBJ1-2)
YASSLKRGYGYTF

SEQ ID NO: 582237 - protein, 17 aa, Homo sapiens
  CDR3 for alpha chain variable domain of TCR clone 291119 (TRAV3, TRAJ42)
CAVRDRDYGGSQGNLTF

SEQ ID NO: 582238 - protein, 15 aa, Homo sapiens
  CDR3 for beta chain variable domain of TCR clone 291119 (TRBV6-5, TRBJ2-1)
CASSYDAGAGNEQFF

SEQ ID NO: 582239 - protein, 19 aa, Homo sapiens
  CDR3 for alpha chain variable domain of TCR clone 291120 (TRAV3, TRAJ6)
CAVRDRNPSRSGGSHKPTF

SEQ ID NO: 582240 - protein, 15 aa, Homo sapiens
  CDR3 for beta chain variable domain of TCR clone 291120 (TRBV18, TRBJ2-7)
CASSPTVMDSYEQYF

SEQ ID NO: 582241 - protein, 15 aa, Homo sapiens
  CDR3 for alpha chain variable domain of TCR clone 291121 (TRAV2, TRAJ15)
CAVEDRGQAGTALIF

SEQ ID NO: 582242 - protein, 13 aa, Homo sapiens
  CDR3 for beta chain variable domain of TCR clone 291121 (TRBV18, TRBJ1-1)
CASSPETKPEAFF

SEQ ID NO: 582243 - protein, 14 aa, Homo sapiens
  CDR3 for alpha chain variable domain of TCR clone 291122 (TRAV1-2, TRAJ8)
CAVREDTGFQKRVF

SEQ ID NO: 582244 - protein, 16 aa, Homo sapiens
  CDR3 for beta chain variable domain of TCR clone 291122 (TRBV4-3, TRBJ2-1)
CASSPALDRGVNEQFF

SEQ ID NO: 582245 - protein, 13 aa, Homo sapiens
  CDR3 for alpha chain variable domain of TCR clone 291123 (TRAV3, TRAJ21)
CAVREPDFNKFYF

SEQ ID NO: 582246 - protein, 14 aa, Homo sapiens
  CDR3 for beta chain variable domain of TCR clone 291123 (TRBV19, TRBJ2-1)
CATSQGDTYNEQFF

SEQ ID NO: 582247 - protein, 16 aa, Homo sapiens
  CDR3 for alpha chain variable domain of TCR clone 291124 (TRAV30, TRAJ24)
CGTEIVDADSWGKFQF

SEQ ID NO: 582248 - protein, 15 aa, Homo sapiens
  CDR3 for beta chain variable domain of TCR clone 291124 (TRBV27, TRBJ2-1)
CACSNGGGSSNEQFF

SEQ ID NO: 582249 - protein, 14 aa, Homo sapiens
  CDR3 for alpha chain variable domain of TCR clone 291125 (TRAV14/DV4, TRAJ42)
CPRGSLRSQGNLIF

SEQ ID NO: 582250 - protein, 16 aa, Homo sapiens
  CDR3 for beta chain variable domain of TCR clone 291125 (TRBV7-6, TRBJ2-6)
CASSLPGLSGANVLTF

SEQ ID NO: 582251 - protein, 11 aa, Homo sapiens
  CDR3 for alpha chain variable domain of TCR clone 291126 (TRAV1-2, TRAJ31)
CAVNNNARLMF

SEQ ID NO: 582252 - protein, 15 aa, Homo sapiens
  CDR3 for beta chain variable domain of TCR clone 291126 (TRBV19, TRBJ2-1)
CASSIVRGEGREQFF

SEQ ID NO: 582253 - protein, 15 aa, Homo sapiens
  CDR3 for alpha chain variable domain of TCR clone 291127 (TRAV30, TRAJ13)
CGTQGVTGGYQKVTF

SEQ ID NO: 582254 - protein, 17 aa, Homo sapiens
  CDR3 for beta chain variable domain of TCR clone 291127 (TRBV20-1, TRBJ2-2)
CSARVKRTHVRSGEPFF

SEQ ID NO: 582255 - protein, 13 aa, Homo sapiens
  CDR3 for alpha chain variable domain of TCR clone 291128 (TRAV13-1, TRAJ6)
CAASSGGSYIPTF

SEQ ID NO: 582256 - protein, 14 aa, Homo sapiens
  CDR3 for beta chain variable domain of TCR clone 291128 (TRBV20-1, TRBJ2-4)
CSAVAGGPGNIQFF

SEQ ID NO: 582257 - protein, 12 aa, Homo sapiens
  CDR3 for alpha chain variable domain of TCR clone 291129 (TRAV24, TRAJ26)
CALDNYGQNFVF

SEQ ID NO: 582258 - protein, 15 aa, Homo sapiens
  CDR3 for beta chain variable domain of TCR clone 291129 (TRBV7-2, TRBJ1-1)
CASSFTGDRDTEAFF

SEQ ID NO: 582259 - protein, 17 aa, Homo sapiens
  CDR3 for alpha chain variable domain of TCR clone 291130 (TRAV8-6, TRAJ58)
CAVSSWVGETSGSRFTF

SEQ ID NO: 582260 - protein, 14 aa, Homo sapiens
  CDR3 for beta chain variable domain of TCR clone 291130 (TRBV4-2, TRBJ2-1)
CASGLDRAYNEQYF

SEQ ID NO: 582261 - protein, 15 aa, Homo sapiens
  CDR3 for alpha chain variable domain of TCR clone 291131 (TRAV14/DV4, TRAJ28)
CAKLFSGAGSYQLTF

SEQ ID NO: 582262 - protein, 16 aa, Homo sapiens
  CDR3 for beta chain variable domain of TCR clone 291131 (TRBV20-1, TRBJ1-4)
CSAPGQGLLTNEKLFF

SEQ ID NO: 582263 - protein, 16 aa, Homo sapiens
  CDR3 for alpha chain variable domain of TCR clone 291132 (TRAV12-3, TRAJ4)
CAMTRLFSGGYNKLIF

SEQ ID NO: 582264 - protein, 16 aa, Homo sapiens
  CDR3 for beta chain variable domain of TCR clone 291132 (TRBV27, TRBJ2-1)
CASSARLAGVYNDQFF

SEQ ID NO: 582265 - protein, 17 aa, Homo sapiens
  CDR3 for alpha chain variable domain of TCR clone 291133 (TRAV23/DV6, TRAJ57)
CGASSTLSQGGSEKLVF

SEQ ID NO: 582266 - protein, 14 aa, Homo sapiens
  CDR3 for beta chain variable domain of TCR clone 291133 (TRBV25-1, TRBJ1-1)
CASTHLGGNTEAFF

SEQ ID NO: 582267 - protein, 15 aa, Homo sapiens
  CDR3 for alpha chain variable domain of TCR clone 291134 (TRAV12-1, TRAJ15)
CVVNSYGQAGTALIF

SEQ ID NO: 582268 - protein, 11 aa, Homo sapiens
  CDR3 for beta chain variable domain of TCR clone 291134 (TRBV12-4, TRBJ2-3)
CASTATDTQYF

SEQ ID NO: 582269 - protein, 14 aa, Homo sapiens
  CDR3 for alpha chain variable domain of TCR clone 291135 (TRAV12-3, TRAJ33)
CAMSVPGSNYQLIW

SEQ ID NO: 582270 - protein, 14 aa, Homo sapiens
  CDR3 for beta chain variable domain of TCR clone 291135 (TRBV19, TRBJ2-1)
CASPTFVLSGEQFF

SEQ ID NO: 582271 - protein, 12 aa, Homo sapiens
  CDR3 for alpha chain variable domain of TCR clone 291136 (TRAV3, TRAJ20)
CAVRDGDYKLSF

SEQ ID NO: 582272 - protein, 14 aa, Homo sapiens
  CDR3 for beta chain variable domain of TCR clone 291136 (TRBV6-3, TRBJ2-1)
CASLHAAYYNEQFF

SEQ ID NO: 582273 - protein, 14 aa, Homo sapiens
  CDR3 for alpha chain variable domain of TCR clone 291137 (TRAV8-4, TRAJ13)
CAVTLSGGYQKVTF

SEQ ID NO: 582274 - protein, 16 aa, Homo sapiens
  CDR3 for beta chain variable domain of TCR clone 291137 (TRBV28, TRBJ1-1)
CASSSGGQPVATEAFF

SEQ ID NO: 582275 - protein, 13 aa, Homo sapiens
  CDR3 for alpha chain variable domain of TCR clone 291138 (TRAV13-1, TRAJ39)
CSKYSNAGNMLTF

SEQ ID NO: 582276 - protein, 13 aa, Homo sapiens
  CDR3 for beta chain variable domain of TCR clone 291138 (TRBV20-1, TRBJ1-1)
CSARGGVNTEAFF

SEQ ID NO: 582277 - protein, 14 aa, Homo sapiens
  CDR3 for alpha chain variable domain of TCR clone 291139 (TRAV12-2, TRAJ39)
SATYLFAVNNMLTF

SEQ ID NO: 582278 - protein, 16 aa, Homo sapiens
  CDR3 for beta chain variable domain of TCR clone 291139 (TRBV5-3, TRBJ2-2)
CARSFGTGTNTGELFF

SEQ ID NO: 582279 - protein, 13 aa, Homo sapiens
  CDR3 for alpha chain variable domain of TCR clone 291140 (TRAV2, TRAJ29)
CAAQNSGNTPLVF

SEQ ID NO: 582280 - protein, 14 aa, Homo sapiens
  CDR3 for beta chain variable domain of TCR clone 291140 (TRBV7-9, TRBJ2-4)
CASSVAMGGNMQYF

SEQ ID NO: 582281 - protein, 13 aa, Homo sapiens
  CDR3 for alpha chain variable domain of TCR clone 291141 (TRAV26-1, TRAJ34)
CIVRPWITDKLIF

SEQ ID NO: 582282 - protein, 17 aa, Homo sapiens
  CDR3 for beta chain variable domain of TCR clone 291141 (TRBV20-1, TRBJ2-1)
CSAPPRLAGTRYNEQFF

SEQ ID NO: 582283 - protein, 12 aa, Homo sapiens
  CDR3 for alpha chain variable domain of TCR clone 291142 (TRAV12-3, TRAJ17)
CAMTLTGNNLTF

SEQ ID NO: 582284 - protein, 14 aa, Homo sapiens
  CDR3 for beta chain variable domain of TCR clone 291142 (TRBV7-2, TRBJ2-7)
CASRSQGAAYEQYF

SEQ ID NO: 582285 - protein, 14 aa, Homo sapiens
  CDR3 for alpha chain variable domain of TCR clone 291143 (TRAV12-3, TRAJ9)
CAMSPNTGGFKTIF

SEQ ID NO: 582286 - protein, 15 aa, Homo sapiens
  CDR3 for beta chain variable domain of TCR clone 291143 (TRBV3-1, TRBJ2-7)
CASSQVRQGAYEQYF

SEQ ID NO: 582287 - protein, 12 aa, Homo sapiens
  CDR3 for alpha chain variable domain of TCR clone 291144 (TRAV12-2, TRAJ47)
CAVAEYGNKLVF

SEQ ID NO: 582288 - protein, 12 aa, Homo sapiens
  CDR3 for beta chain variable domain of TCR clone 291144 (TRBV7-9, TRBJ2-7)
CASSIKREEQYF

SEQ ID NO: 582289 - protein, 15 aa, Homo sapiens
  CDR3 for alpha chain variable domain of TCR clone 291145 (TRAV21, TRAJ24)
CAARSSTDSWGKLQF

SEQ ID NO: 582290 - protein, 13 aa, Homo sapiens
  CDR3 for beta chain variable domain of TCR clone 291145 (TRBV19, TRBJ1-2)
CASSIVGARGYTF

SEQ ID NO: 582291 - protein, 13 aa, Homo sapiens
  CDR3 for alpha chain variable domain of TCR clone 291146 (TRAV35, TRAJ12)
LGRRMDSSYKLIF

SEQ ID NO: 582292 - protein, 14 aa, Homo sapiens
  CDR3 for beta chain variable domain of TCR clone 291146 (TRBV19, TRBJ1-1)
CASSPNRGDTEDFF

SEQ ID NO: 582293 - protein, 12 aa, Homo sapiens
  CDR3 for alpha chain variable domain of TCR clone 291147 (TRAV12-1, TRAJ16)
CVVFRDGQKMLF

SEQ ID NO: 582294 - protein, 16 aa, Homo sapiens
  CDR3 for beta chain variable domain of TCR clone 291147 (TRBV27, TRBJ2-5)
CASSYGPGGQKETQYF

SEQ ID NO: 582295 - protein, 16 aa, Homo sapiens
  CDR3 for alpha chain variable domain of TCR clone 291148 (TRAV12-2, TRAJ52)
CRLANAGGTSYGKLTF

SEQ ID NO: 582296 - protein, 14 aa, Homo sapiens
  CDR3 for beta chain variable domain of TCR clone 291148 (TRBV7-2, TRBJ2-7)
CASRSQGAAYEQYF

SEQ ID NO: 582297 - protein, 16 aa, Homo sapiens
  CDR3 for alpha chain variable domain of TCR clone 291149 (TRAV26-1, TRAJ28)
CIVRGYSGAGSYQLTF

SEQ ID NO: 582298 - protein, 17 aa, Homo sapiens
  CDR3 for beta chain variable domain of TCR clone 291149 (TRBV24-1, TRBJ2-2)
CATSDFGGVPYAGELFF

SEQ ID NO: 582299 - protein, 21 aa, Homo sapiens
  CDR3 for alpha chain variable domain of TCR clone 291150 (TRAV8-3, TRAJ32)
CAVEVVLQTSSSLELALCLLA

SEQ ID NO: 582300 - protein, 15 aa, Homo sapiens
  CDR3 for beta chain variable domain of TCR clone 291150 (TRBV7-2, TRBJ2-1)
CASSSRTSREDEQFF

SEQ ID NO: 582301 - protein, 16 aa, Homo sapiens
  CDR3 for alpha chain variable domain of TCR clone 291151 (TRAV38-1, TRAJ56)
CAFMKRQTGANSKLTF

SEQ ID NO: 582302 - protein, 12 aa, Homo sapiens
  CDR3 for beta chain variable domain of TCR clone 291151 (TRBV20-1, TRBJ2-7)
CSASSGANEQYF

SEQ ID NO: 582303 - protein, 18 aa, Homo sapiens
  CDR3 for alpha chain variable domain of TCR clone 291152 (TRAV29/DV5, TRAJ52)
CAAGFRGAGGTSYGKLTF

SEQ ID NO: 582304 - protein, 11 aa, Homo sapiens
  CDR3 for beta chain variable domain of TCR clone 291152 (TRBV28, TRBJ2-7)
CASSFAYEQYF

SEQ ID NO: 582305 - protein, 15 aa, Homo sapiens
  CDR3 for alpha chain variable domain of TCR clone 291153 (TRAV16, TRAJ22)
CSRGRLSHVPPELTF

SEQ ID NO: 582306 - protein, 15 aa, Homo sapiens
  CDR3 for beta chain variable domain of TCR clone 291153 (TRBV7-9, TRBJ1-6)
CASSSQGRGNSPLHF

SEQ ID NO: 582307 - protein, 15 aa, Homo sapiens
  CDR3 for alpha chain variable domain of TCR clone 291154 (TRAV3, TRAJ3)
CAVRDRDSSASKIIF

SEQ ID NO: 582308 - protein, 14 aa, Homo sapiens
  CDR3 for beta chain variable domain of TCR clone 291154 (TRBV7-2, TRBJ2-7)
CASSLPPGQGPQYF

SEQ ID NO: 582309 - protein, 14 aa, Homo sapiens
  CDR3 for alpha chain variable domain of TCR clone 291155 (TRAV35, TRAJ33)
CAGSSQDSNYQLIW

SEQ ID NO: 582310 - protein, 12 aa, Homo sapiens
  CDR3 for beta chain variable domain of TCR clone 291155 (TRBV5-1, TRBJ1-2)
CASSQDTYGYTF

SEQ ID NO: 582311 - protein, 14 aa, Homo sapiens
  CDR3 for alpha chain variable domain of TCR clone 291156 (TRAV12-3, TRAJ7)
CAMSEIGGNNRLVF

SEQ ID NO: 582312 - protein, 12 aa, Homo sapiens
  CDR3 for beta chain variable domain of TCR clone 291156 (TRBV5-4, TRBJ1-1)
CASSLDRREAFF

SEQ ID NO: 582313 - protein, 13 aa, Homo sapiens
  CDR3 for alpha chain variable domain of TCR clone 291157 (TRAV20, TRAJ37)
CAGCSSNTGKLIF

SEQ ID NO: 582314 - protein, 14 aa, Homo sapiens
  CDR3 for beta chain variable domain of TCR clone 291157 (TRBV11-2, TRBJ1-2)
CASSLGTANYGYTF

SEQ ID NO: 582315 - protein, 12 aa, Homo sapiens
  CDR3 for alpha chain variable domain of TCR clone 291158 (TRAV12-3, TRAJ17)
GAMTLTGNKLTF

SEQ ID NO: 582316 - protein, 14 aa, Homo sapiens
  CDR3 for beta chain variable domain of TCR clone 291158 (TRBV4-1, TRBJ2-7)
CASSQDREHVEQYF

SEQ ID NO: 582317 - protein, 13 aa, Homo sapiens
  CDR3 for alpha chain variable domain of TCR clone 291159 (TRAV29/DV5, TRAJ31)
CAASRNNNARLMF

SEQ ID NO: 582318 - protein, 14 aa, Homo sapiens
  CDR3 for beta chain variable domain of TCR clone 291159 (TRBV19, TRBJ2-1)
CASPTCVLSGEQFF

SEQ ID NO: 582319 - protein, 15 aa, Homo sapiens
  CDR3 for alpha chain variable domain of TCR clone 291160 (TRAV3, TRAJ5)
CAVRDLDTGRRALIF

SEQ ID NO: 582320 - protein, 13 aa, Homo sapiens
  CDR3 for beta chain variable domain of TCR clone 291160 (TRBV12-4, TRBJ2-7)
CASSPTEAYEQYF

SEQ ID NO: 582321 - protein, 14 aa, Homo sapiens
  CDR3 for alpha chain variable domain of TCR clone 291161 (TRAV3, TRAJ22)
CCERPGRFCKALTF

SEQ ID NO: 582322 - protein, 16 aa, Homo sapiens
  CDR3 for beta chain variable domain of TCR clone 291161 (TRBV5-4, TRBJ2-3)
CASQQPGAGGADTQYF

SEQ ID NO: 582323 - protein, 14 aa, Homo sapiens
  CDR3 for alpha chain variable domain of TCR clone 291162 (TRAV12-1, TRAJ12)
CVVIAMDSSYKLIF

SEQ ID NO: 582324 - protein, 17 aa, Homo sapiens
  CDR3 for beta chain variable domain of TCR clone 291162 (TRBV13, TRBJ2-3)
CASSLSRVAGGRNTQYF

SEQ ID NO: 582325 - protein, 15 aa, Homo sapiens
  CDR3 for alpha chain variable domain of TCR clone 291163 (TRAV8-4, TRAJ7)
CAVSGGNYGNNRLAF

SEQ ID NO: 582326 - protein, 18 aa, Homo sapiens
  CDR3 for beta chain variable domain of TCR clone 291163 (TRBV20-1, TRBJ2-6)
CSAETTPTHGSGANVLTF

SEQ ID NO: 582327 - protein, 15 aa, Homo sapiens
  CDR3 for alpha chain variable domain of TCR clone 291164 (TRAV2, TRAJ9)
CAVEDRGTGGFKTIF

SEQ ID NO: 582328 - protein, 17 aa, Homo sapiens
  CDR3 for beta chain variable domain of TCR clone 291164 (TRBV3-1, TRBJ2-5)
CASSNWGGTSGQETQYF

SEQ ID NO: 582329 - protein, 13 aa, Homo sapiens
  CDR3 for alpha chain variable domain of TCR clone 291165 (TRAV12-2, TRAJ20)
CAAYPSNDYKLRF

SEQ ID NO: 582330 - protein, 14 aa, Homo sapiens
  CDR3 for beta chain variable domain of TCR clone 291165 (TRBV27, TRBJ2-5)
CQQFIPAGGETQYF

SEQ ID NO: 582331 - protein, 16 aa, Homo sapiens
  CDR3 for alpha chain variable domain of TCR clone 291166 (TRAV12-3, TRAJ53)
CAMSPGSGGSNYKLTF

SEQ ID NO: 582332 - protein, 13 aa, Homo sapiens
  CDR3 for beta chain variable domain of TCR clone 291166 (TRBV6-5, TRBJ2-5)
CASSPQGGETQYF

SEQ ID NO: 582333 - protein, 16 aa, Homo sapiens
  CDR3 for alpha chain variable domain of TCR clone 291167 (TRAV1-1, TRAJ45)
CAVRAYSGGRADGLTF

SEQ ID NO: 582334 - protein, 13 aa, Homo sapiens
  CDR3 for beta chain variable domain of TCR clone 291167 (TRBV20-1, TRBJ1-2)
CSARGTADYGYTF

SEQ ID NO: 582335 - protein, 10 aa, Homo sapiens
  CDR3 for alpha chain variable domain of TCR clone 291168 (TRAV3, TRAJ30)
CAVREIEIIC

SEQ ID NO: 582336 - protein, 14 aa, Homo sapiens
  CDR3 for beta chain variable domain of TCR clone 291168 (TRBV15, TRBJ2-3)
CATRSGTSTDTQYF

SEQ ID NO: 582337 - protein, 11 aa, Homo sapiens
  CDR3 for alpha chain variable domain of TCR clone 291169 (TRAV1-1, TRAJ23)
CAVRQGGKLIF

SEQ ID NO: 582338 - protein, 20 aa, Homo sapiens
  CDR3 for beta chain variable domain of TCR clone 291169 (TRBV7-8, TRBJ2-2)
CASSPLFPGPTIHITGELFF

SEQ ID NO: 582339 - protein, 14 aa, Homo sapiens
  CDR3 for alpha chain variable domain of TCR clone 291170 (TRAV2, TRAJ22)
CAVGRGGSARQLTF

SEQ ID NO: 582340 - protein, 12 aa, Homo sapiens
  CDR3 for beta chain variable domain of TCR clone 291170 (TRBV19, TRBJ2-1)
CASSMQDTEQLF

SEQ ID NO: 582341 - protein, 14 aa, Homo sapiens
  CDR3 for alpha chain variable domain of TCR clone 291171 (TRAV12-1, TRAJ17)
CVVNYKAAGNKLTF

SEQ ID NO: 582342 - protein, 15 aa, Homo sapiens
  CDR3 for beta chain variable domain of TCR clone 291171 (TRBV7-2, TRBJ2-7)
CANSLALGSAYEQYF

SEQ ID NO: 582343 - protein, 21 aa, Homo sapiens
  CDR3 for alpha chain variable domain of TCR clone 291172 (TRAV13-1, TRAJ37)
CAATPTEIKHRQTNLWARDNF

SEQ ID NO: 582344 - protein, 13 aa, Homo sapiens
  CDR3 for beta chain variable domain of TCR clone 291172 (TRBV20-1, TRBJ2-7)
CSATSEDSYEQYF

SEQ ID NO: 582345 - protein, 19 aa, Homo sapiens
  CDR3 for alpha chain variable domain of TCR clone 291173 (TRAV26-1, TRAJ50)
CCVLFHRQNPKTSYDKVIF

SEQ ID NO: 582346 - protein, 17 aa, Homo sapiens
  CDR3 for beta chain variable domain of TCR clone 291173 (TRBV4-1, TRBJ1-4)
CASSQEGPRGVEEKLFF

SEQ ID NO: 582347 - protein, 14 aa, Homo sapiens
  CDR3 for alpha chain variable domain of TCR clone 291174 (TRAV16, TRAJ33)
CALSAMDSNYQLIW

SEQ ID NO: 582348 - protein, 16 aa, Homo sapiens
  CDR3 for beta chain variable domain of TCR clone 291174 (TRBV24-1, TRBJ2-3)
CATSDPGTGATDTQYF

SEQ ID NO: 582349 - protein, 14 aa, Homo sapiens
  CDR3 for alpha chain variable domain of TCR clone 291175 (TRAV1-2, TRAJ16)
CAVNRFSDGQKLLF

SEQ ID NO: 582350 - protein, 16 aa, Homo sapiens
  CDR3 for beta chain variable domain of TCR clone 291175 (TRBV19, TRBJ2-1)
CASSKAGPSCYNEQFF

SEQ ID NO: 582351 - protein, 14 aa, Homo sapiens
  CDR3 for alpha chain variable domain of TCR clone 291176 (TRAV16, TRAJ4)
CALHFSGGYNKLIF

SEQ ID NO: 582352 - protein, 18 aa, Homo sapiens
  CDR3 for beta chain variable domain of TCR clone 291176 (TRBV9, TRBJ2-5)
CASSVAEGTNAFGETQYF

SEQ ID NO: 582353 - protein, 12 aa, Homo sapiens
  CDR3 for alpha chain variable domain of TCR clone 291177 (TRAV8-4, TRAJ43)
CAVSVDNNDMRL

SEQ ID NO: 582354 - protein, 18 aa, Homo sapiens
  CDR3 for beta chain variable domain of TCR clone 291177 (TRBV5-7, TRBJ2-2)
CASSLGASGGLNTGELFF

SEQ ID NO: 582355 - protein, 13 aa, Homo sapiens
  CDR3 for alpha chain variable domain of TCR clone 291178 (TRAV13-2, TRAJ53)
CAENMGSNYKLTF

SEQ ID NO: 582356 - protein, 17 aa, Homo sapiens
  CDR3 for beta chain variable domain of TCR clone 291178 (TRBV5-1, TRBJ1-6)
CASSFGEVSSYNSPLHF

SEQ ID NO: 582357 - protein, 16 aa, Homo sapiens
  CDR3 for alpha chain variable domain of TCR clone 291179 (TRAV13-1, TRAJ15)
CAANGGPVRAGTALIF

SEQ ID NO: 582358 - protein, 16 aa, Homo sapiens
  CDR3 for beta chain variable domain of TCR clone 291179 (TRBV5-7, TRBJ2-1)
CASSGGLAGTYNEQFF

SEQ ID NO: 582359 - protein, 12 aa, Homo sapiens
  CDR3 for alpha chain variable domain of TCR clone 291180 (TRAV21, TRAJ6)
CAVKGGSYIPTF

SEQ ID NO: 582360 - protein, 13 aa, Homo sapiens
  CDR3 for beta chain variable domain of TCR clone 291180 (TRBV11-2, TRBJ1-1)
CASSFTENTETFF

SEQ ID NO: 582361 - protein, 14 aa, Homo sapiens
  CDR3 for alpha chain variable domain of TCR clone 291181 (TRAV29/DV5, TRAJ30)
CAARLMNRDEKIFF

SEQ ID NO: 582362 - protein, 17 aa, Homo sapiens
  CDR3 for beta chain variable domain of TCR clone 291181 (TRBV12-4, TRBJ2-3)
CASSGPGLAGGADTQYF

SEQ ID NO: 582363 - protein, 15 aa, Homo sapiens
  CDR3 for alpha chain variable domain of TCR clone 291182 (TRAV12-1, TRAJ44)
WVVFVNTGTASKLTF

SEQ ID NO: 582364 - protein, 17 aa, Homo sapiens
  CDR3 for beta chain variable domain of TCR clone 291182 (TRBV7-8, TRBJ2-6)
YASSAGTGGAGANVLTF

SEQ ID NO: 582365 - protein, 15 aa, Homo sapiens
  CDR3 for alpha chain variable domain of TCR clone 291183 (TRAV3, TRAJ5)
CAVRDLDTGRRARTF

SEQ ID NO: 582366 - protein, 16 aa, Homo sapiens
  CDR3 for beta chain variable domain of TCR clone 291183 (TRBV20-1, TRBJ1-2)
CSASMGQGVANYGYTF

SEQ ID NO: 582367 - protein, 19 aa, Homo sapiens
  CDR3 for alpha chain variable domain of TCR clone 291184 (TRAV2, TRAJ20)
ILQVREADAAVYRDGKLSF

SEQ ID NO: 582368 - protein, 16 aa, Homo sapiens
  CDR3 for beta chain variable domain of TCR clone 291184 (TRBV24-1, TRBJ2-3)
CATSDPGTGATDTQYF

SEQ ID NO: 582369 - protein, 11 aa, Homo sapiens
  CDR3 for alpha chain variable domain of TCR clone 291185 (TRAV12-1, TRAJ21)
CVVNNFNKFCF

SEQ ID NO: 582370 - protein, 11 aa, Homo sapiens
  CDR3 for beta chain variable domain of TCR clone 291185 (TRBV10-3, TRBJ2-7)
CAISEGLEQYF

SEQ ID NO: 582371 - protein, 12 aa, Homo sapiens
  CDR3 for alpha chain variable domain of TCR clone 291186 (TRAV21, TRAJ33)
CAKMDSNYQLIW

SEQ ID NO: 582372 - protein, 17 aa, Homo sapiens
  CDR3 for beta chain variable domain of TCR clone 291186 (TRBV20-1, TRBJ2-2)
CGASGSGQGGLTGELFF

SEQ ID NO: 582373 - protein, 11 aa, Homo sapiens
  CDR3 for alpha chain variable domain of TCR clone 291187 (TRAV12-2, TRAJ29)
FAVTLRSPLVF

SEQ ID NO: 582374 - protein, 16 aa, Homo sapiens
  CDR3 for beta chain variable domain of TCR clone 291187 (TRBV19, TRBJ1-5)
CASSIDRGGPRQPQHF

SEQ ID NO: 582375 - protein, 11 aa, Homo sapiens
  CDR3 for alpha chain variable domain of TCR clone 291188 (TRAV23/DV6, TRAJ58)
CAARLLRGETS

SEQ ID NO: 582376 - protein, 17 aa, Homo sapiens
  CDR3 for beta chain variable domain of TCR clone 291188 (TRBV9, TRBJ2-7)
CASSVEDSGVPSYEQYF

SEQ ID NO: 582377 - protein, 15 aa, Homo sapiens
  CDR3 for alpha chain variable domain of TCR clone 291189 (TRAV30, TRAJ32)
CGTEILGGATNKLIF

SEQ ID NO: 582378 - protein, 17 aa, Homo sapiens
  CDR3 for beta chain variable domain of TCR clone 291189 (TRBV5-4, TRBJ2-1)
CASSSAGGRGPHNEQFF

SEQ ID NO: 582379 - protein, 12 aa, Homo sapiens
  CDR3 for alpha chain variable domain of TCR clone 291190 (TRAV21, TRAJ26)
CAVDNYGQNFVF

SEQ ID NO: 582380 - protein, 12 aa, Homo sapiens
  CDR3 for beta chain variable domain of TCR clone 291190 (TRBV12-4, TRBJ2-7)
CASSLGGYEQYF

SEQ ID NO: 582381 - protein, 15 aa, Homo sapiens
  CDR3 for alpha chain variable domain of TCR clone 291191 (TRAV27, TRAJ38)
CAARRNAGNNRKMIG

SEQ ID NO: 582382 - protein, 13 aa, Homo sapiens
  CDR3 for beta chain variable domain of TCR clone 291191 (TRBV12-5, TRBJ2-3)
CASGDRQSDTQYF

SEQ ID NO: 582383 - protein, 15 aa, Homo sapiens
  CDR3 for alpha chain variable domain of TCR clone 291192 (TRAV8-3, TRAJ45)
CASSYSGGGADGLSF

SEQ ID NO: 582384 - protein, 15 aa, Homo sapiens
  CDR3 for beta chain variable domain of TCR clone 291192 (TRBV27, TRBJ1-4)
CASSPRHATNEKLFF

SEQ ID NO: 582385 - protein, 16 aa, Homo sapiens
  CDR3 for alpha chain variable domain of TCR clone 291193 (TRAV3, TRAJ10)
CAVRDMRAGGGNKLTF

SEQ ID NO: 582386 - protein, 16 aa, Homo sapiens
  CDR3 for beta chain variable domain of TCR clone 291193 (TRBV12-4, TRBJ1-5)
CASSRPVGGSIQPQHF

SEQ ID NO: 582387 - protein, 10 aa, Homo sapiens
  CDR3 for alpha chain variable domain of TCR clone 291194 (TRAV1-2, TRAJ31)
CVSEDARLLF

SEQ ID NO: 582388 - protein, 14 aa, Homo sapiens
  CDR3 for beta chain variable domain of TCR clone 291194 (TRBV20-1, TRBJ1-3)
CSASPTGAGNTIYF

SEQ ID NO: 582389 - protein, 16 aa, Homo sapiens
  CDR3 for alpha chain variable domain of TCR clone 291195 (TRAV26-2, TRAJ57)
CILRDVGSGGSEKLVS

SEQ ID NO: 582390 - protein, 13 aa, Homo sapiens
  CDR3 for beta chain variable domain of TCR clone 291195 (TRBV18, TRBJ2-3)
CASSPGVTDTQYF

SEQ ID NO: 582391 - protein, 14 aa, Homo sapiens
  CDR3 for alpha chain variable domain of TCR clone 291196 (TRAV21, TRAJ35)
CAVMLIGFGNVLHC

SEQ ID NO: 582392 - protein, 12 aa, Homo sapiens
  CDR3 for beta chain variable domain of TCR clone 291196 (TRBV7-9, TRBJ2-7)
CASSSKREEQYF

SEQ ID NO: 582393 - protein, 15 aa, Homo sapiens
  CDR3 for alpha chain variable domain of TCR clone 291197 (TRAV13-1, TRAJ32)
CAASNGWWRYKQAHL

SEQ ID NO: 582394 - protein, 15 aa, Homo sapiens
  CDR3 for beta chain variable domain of TCR clone 291197 (TRBV20-1, TRBJ1-2)
CSAIRTGAFNYGYTF

SEQ ID NO: 582395 - protein, 13 aa, Homo sapiens
  CDR3 for alpha chain variable domain of TCR clone 291198 (TRAV21, TRAJ20)
CAVGLRVDYKPSF

SEQ ID NO: 582396 - protein, 21 aa, Homo sapiens
  CDR3 for beta chain variable domain of TCR clone 291198 (TRBV15, TRBJ2-1)
AWGTQPCTCVPPAEVDTARFF

SEQ ID NO: 582397 - protein, 14 aa, Homo sapiens
  CDR3 for alpha chain variable domain of TCR clone 291199 (TRAV8-2, TRAJ40)
CVVSPSGGYNKLIF

SEQ ID NO: 582398 - protein, 16 aa, Homo sapiens
  CDR3 for beta chain variable domain of TCR clone 291199 (TRBV7-3, TRBJ2-1)
CASSLEGYRSYNEQFF

SEQ ID NO: 582399 - protein, 15 aa, Homo sapiens
  CDR3 for alpha chain variable domain of TCR clone 291200 (TRAV35, TRAJ40)
CAGQLGQAGTYKYLF

SEQ ID NO: 582400 - protein, 14 aa, Homo sapiens
  CDR3 for beta chain variable domain of TCR clone 291200 (TRBV7-3, TRBJ2-1)
CASSLTGGANEQFF

SEQ ID NO: 582401 - protein, 15 aa, Homo sapiens
  CDR3 for alpha chain variable domain of TCR clone 291201 (TRAV23/DV6, TRAJ38)
CAASGGAGNNRKLIW

SEQ ID NO: 582402 - protein, 13 aa, Homo sapiens
  CDR3 for beta chain variable domain of TCR clone 291201 (TRBV7-2, TRBJ1-2)
CASSLPGLCGYAF

SEQ ID NO: 582403 - protein, 14 aa, Homo sapiens
  CDR3 for alpha chain variable domain of TCR clone 291202 (TRAV1-2, TRAJ29)
CAVRTDSGNTPLVF

SEQ ID NO: 582404 - protein, 13 aa, Homo sapiens
  CDR3 for beta chain variable domain of TCR clone 291202 (TRBV20-1, TRBJ1-1)
CSPRGGGNTEAFF

SEQ ID NO: 582405 - protein, 12 aa, Homo sapiens
  CDR3 for alpha chain variable domain of TCR clone 291203 (TRAV13-1, TRAJ21)
CAAKEGFSKFYF

SEQ ID NO: 582406 - protein, 13 aa, Homo sapiens
  CDR3 for beta chain variable domain of TCR clone 291203 (TRBV19, TRBJ1-2)
CASSVPGQDGYTF

SEQ ID NO: 582407 - protein, 13 aa, Homo sapiens
  CDR3 for alpha chain variable domain of TCR clone 291204 (TRAV26-1, TRAJ29)
CIVRRSGNTPLVF

SEQ ID NO: 582408 - protein, 14 aa, Homo sapiens
  CDR3 for beta chain variable domain of TCR clone 291204 (TRBV20-1, TRBJ1-1)
CSAKTPGANTEAFV

SEQ ID NO: 582409 - protein, 12 aa, Homo sapiens
  CDR3 for alpha chain variable domain of TCR clone 291205 (TRAV12-3, TRAJ17)
CAMTLTGNKLTF

SEQ ID NO: 582410 - protein, 14 aa, Homo sapiens
  CDR3 for beta chain variable domain of TCR clone 291205 (TRBV19, TRBJ2-5)
CAISMTGQQETQYF

SEQ ID NO: 582411 - protein, 16 aa, Homo sapiens
  CDR3 for alpha chain variable domain of TCR clone 291206 (TRAV30, TRAJ24)
FGTEIVDAASWGKFQF

SEQ ID NO: 582412 - protein, 14 aa, Homo sapiens
  CDR3 for beta chain variable domain of TCR clone 291206 (TRBV12-5, TRBJ2-5)
CASGSRTHQETQYF

SEQ ID NO: 582413 - protein, 13 aa, Homo sapiens
  CDR3 for alpha chain variable domain of TCR clone 291207 (TRAV16, TRAJ34)
CALSPYNTDKLIF

SEQ ID NO: 582414 - protein, 15 aa, Homo sapiens
  CDR3 for beta chain variable domain of TCR clone 291207 (TRBV10-2, TRBJ2-6)
CASSEQGTGANVLTF

SEQ ID NO: 582415 - protein, 15 aa, Homo sapiens
  CDR3 for alpha chain variable domain of TCR clone 291208 (TRAV26-1, TRAJ29)
CIVRVEGSGNTPLVF

SEQ ID NO: 582416 - protein, 13 aa, Homo sapiens
  CDR3 for beta chain variable domain of TCR clone 291208 (TRBV12-4, TRBJ1-5)
CASSSRSYQPQHF

SEQ ID NO: 582417 - protein, 16 aa, Homo sapiens
  CDR3 for alpha chain variable domain of TCR clone 291209 (TRAV30, TRAJ24)
CGTEIVDADSWGKFQC

SEQ ID NO: 582418 - protein, 12 aa, Homo sapiens
  CDR3 for beta chain variable domain of TCR clone 291209 (TRBV10-3, TRBJ1-1)
CATMDRPPEAFF

SEQ ID NO: 582419 - protein, 15 aa, Homo sapiens
  CDR3 for alpha chain variable domain of TCR clone 291210 (TRAV21, TRAJ53)
CATLNSGGSNYKLTF

SEQ ID NO: 582420 - protein, 13 aa, Homo sapiens
  CDR3 for beta chain variable domain of TCR clone 291210 (TRBV20-1, TRBJ1-6)
CSAPLGVGSPLHF

SEQ ID NO: 582421 - protein, 12 aa, Homo sapiens
  CDR3 for alpha chain variable domain of TCR clone 291211 (TRAV26-2, TRAJ30)
CILCYRDDKIIF

SEQ ID NO: 582422 - protein, 15 aa, Homo sapiens
  CDR3 for beta chain variable domain of TCR clone 291211 (TRBV20-1, TRBJ2-7)
CSARVPAAYFYEQYF

SEQ ID NO: 582423 - protein, 17 aa, Homo sapiens
  CDR3 for alpha chain variable domain of TCR clone 291212 (TRAV3, TRAJ38)
CAVRDCLNAGNNRKLIW

SEQ ID NO: 582424 - protein, 14 aa, Homo sapiens
  CDR3 for beta chain variable domain of TCR clone 291212 (TRBV7-3, TRBJ1-1)
CASSLGTGYTEAFF

SEQ ID NO: 582425 - protein, 13 aa, Homo sapiens
  CDR3 for alpha chain variable domain of TCR clone 291213 (TRAV20, TRAJ37)
CAGCSSNTGKLIF

SEQ ID NO: 582426 - protein, 16 aa, Homo sapiens
  CDR3 for beta chain variable domain of TCR clone 291213 (TRBV7-9, TRBJ2-1)
CASSLGTGWDYNEQFF

SEQ ID NO: 582427 - protein, 15 aa, Homo sapiens
  CDR3 for alpha chain variable domain of TCR clone 291214 (TRAV8-2, TRAJ24)
CVVSDRTDSWGKLQF

SEQ ID NO: 582428 - protein, 17 aa, Homo sapiens
  CDR3 for beta chain variable domain of TCR clone 291214 (TRBV11-2, TRBJ2-1)
CASSLALAEFGRNEQFF

SEQ ID NO: 582429 - protein, 14 aa, Homo sapiens
  CDR3 for alpha chain variable domain of TCR clone 291215 (TRAV1-2, TRAJ8)
CAVREDTGFEKLVF

SEQ ID NO: 582430 - protein, 11 aa, Homo sapiens
  CDR3 for beta chain variable domain of TCR clone 291215 (TRBV20-1, TRBJ2-7)
CSASGRIEQYF

SEQ ID NO: 582431 - protein, 12 aa, Homo sapiens
  CDR3 for alpha chain variable domain of TCR clone 291216 (TRAV16, TRAJ27)
CALNTNAGKSTF

SEQ ID NO: 582432 - protein, 13 aa, Homo sapiens
  CDR3 for beta chain variable domain of TCR clone 291216 (TRBV7-9, TRBJ2-3)
CASSPGSTDTQYF

SEQ ID NO: 582433 - protein, 13 aa, Homo sapiens
  CDR3 for alpha chain variable domain of TCR clone 291217 (TRAV2, TRAJ12)
CAVGADSSYKLIF

SEQ ID NO: 582434 - protein, 13 aa, Homo sapiens
  CDR3 for beta chain variable domain of TCR clone 291217 (TRBV20-1, TRBJ2-1)
CSARSSPRDEQFI

SEQ ID NO: 582435 - protein, 13 aa, Homo sapiens
  CDR3 for alpha chain variable domain of TCR clone 291218 (TRAV13-1, TRAJ6)
CARGSGGSYIPTF

SEQ ID NO: 582436 - protein, 15 aa, Homo sapiens
  CDR3 for beta chain variable domain of TCR clone 291218 (TRBV6-3, TRBJ2-7)
CASSSPGTVFYEQYF

SEQ ID NO: 582437 - protein, 13 aa, Homo sapiens
  CDR3 for alpha chain variable domain of TCR clone 291219 (TRAV17, TRAJ21)
CATDGGNFNKFYF

SEQ ID NO: 582438 - protein, 16 aa, Homo sapiens
  CDR3 for beta chain variable domain of TCR clone 291219 (TRBV12-4, TRBJ2-3)
CASSLRLAETTDTQYF

SEQ ID NO: 582439 - protein, 18 aa, Homo sapiens
  CDR3 for alpha chain variable domain of TCR clone 291220 (TRAV26-1, TRAJ23)
CIVRVGLEVWNQGGKLIF

SEQ ID NO: 582440 - protein, 16 aa, Homo sapiens
  CDR3 for beta chain variable domain of TCR clone 291220 (TRBV12-4, TRBJ2-5)
CASSVFGRGRQETQYF

SEQ ID NO: 582441 - protein, 10 aa, Homo sapiens
  CDR3 for alpha chain variable domain of TCR clone 291221 (TRAV27, TRAJ43)
CAGANNDMRF

SEQ ID NO: 582442 - protein, 16 aa, Homo sapiens
  CDR3 for beta chain variable domain of TCR clone 291221 (TRBV19, TRBJ2-1)
CASSKAGPSSYNEQFF

SEQ ID NO: 582443 - protein, 13 aa, Homo sapiens
  CDR3 for alpha chain variable domain of TCR clone 291222 (TRAV21, TRAJ15)
CAVANQAGTALIF

SEQ ID NO: 582444 - protein, 14 aa, Homo sapiens
  CDR3 for beta chain variable domain of TCR clone 291222 (TRBV27, TRBJ2-2)
CTCSLGAATGELFF

SEQ ID NO: 582445 - protein, 15 aa, Homo sapiens
  CDR3 for alpha chain variable domain of TCR clone 291223 (TRAV38-2/DV8, TRAJ39)
CAYRTSNNAGNMLTF

SEQ ID NO: 582446 - protein, 14 aa, Homo sapiens
  CDR3 for beta chain variable domain of TCR clone 291223 (TRBV12-5, TRBJ2-5)
CASGSRTHQETQYF

SEQ ID NO: 582447 - protein, 16 aa, Homo sapiens
  CDR3 for alpha chain variable domain of TCR clone 291224 (TRAV2, TRAJ4)
CAVEDRFSGGYNKLIF

SEQ ID NO: 582448 - protein, 13 aa, Homo sapiens
  CDR3 for beta chain variable domain of TCR clone 291224 (TRBV7-7, TRBJ2-5)
CASNHSGQETQYF

SEQ ID NO: 582449 - protein, 15 aa, Homo sapiens
  CDR3 for alpha chain variable domain of TCR clone 291225 (TRAV3, TRAJ29)
CAVRDLYSGNTPLVF

SEQ ID NO: 582450 - protein, 13 aa, Homo sapiens
  CDR3 for beta chain variable domain of TCR clone 291225 (TRBV4-2, TRBJ1-1)
CASSQAGNTEAFF

SEQ ID NO: 582451 - protein, 14 aa, Homo sapiens
  CDR3 for alpha chain variable domain of TCR clone 291226 (TRAV12-3, TRAJ10)
SHLPLTGGGNKLTF

SEQ ID NO: 582452 - protein, 19 aa, Homo sapiens
  CDR3 for beta chain variable domain of TCR clone 291226 (TRBV4-1, TRBJ1-1)
CASSRIILTRRGVNTEAFF

SEQ ID NO: 582453 - protein, 14 aa, Homo sapiens
  CDR3 for alpha chain variable domain of TCR clone 291227 (TRAV12-2, TRAJ36)
CAVIISTGANNLFF

SEQ ID NO: 582454 - protein, 14 aa, Homo sapiens
  CDR3 for beta chain variable domain of TCR clone 291227 (TRBV25-1, TRBJ1-2)
CASSDTTGVVGYTF

SEQ ID NO: 582455 - protein, 16 aa, Homo sapiens
  CDR3 for alpha chain variable domain of TCR clone 291228 (TRAV3, TRAJ37)
CAVRGKGSGNTGKLIF

SEQ ID NO: 582456 - protein, 16 aa, Homo sapiens
  CDR3 for beta chain variable domain of TCR clone 291228 (TRBV28, TRBJ1-5)
CASSVRGGCSNQPQHF

SEQ ID NO: 582457 - protein, 16 aa, Homo sapiens
  CDR3 for alpha chain variable domain of TCR clone 291229 (TRAV20, TRAJ52)
CAVLPDGGTSYGKLTF

SEQ ID NO: 582458 - protein, 17 aa, Homo sapiens
  CDR3 for beta chain variable domain of TCR clone 291229 (TRBV7-8, TRBJ2-6)
CASSAGTGGAGANVLTF

SEQ ID NO: 582459 - protein, 14 aa, Homo sapiens
  CDR3 for alpha chain variable domain of TCR clone 291230 (TRAV12-2, TRAJ45)
CALPERGGADGLTF

SEQ ID NO: 582460 - protein, 14 aa, Homo sapiens
  CDR3 for beta chain variable domain of TCR clone 291230 (TRBV18, TRBJ1-5)
CASSPGNSNQALHF

SEQ ID NO: 582461 - protein, 15 aa, Homo sapiens
  CDR3 for alpha chain variable domain of TCR clone 291231 (TRAV16, TRAJ4)
CALEDPSGGYNKLIF

SEQ ID NO: 582462 - protein, 12 aa, Homo sapiens
  CDR3 for beta chain variable domain of TCR clone 291231 (TRBV7-3, TRBJ2-2)
CASSLGGGELFF

SEQ ID NO: 582463 - protein, 14 aa, Homo sapiens
  CDR3 for alpha chain variable domain of TCR clone 291232 (TRAV12-2, TRAJ17)
CAVNIKAAGNKLTF

SEQ ID NO: 582464 - protein, 15 aa, Homo sapiens
  CDR3 for beta chain variable domain of TCR clone 291232 (TRBV18, TRBJ1-2)
CASSPGNGLGYGYTF

SEQ ID NO: 582465 - protein, 12 aa, Homo sapiens
  CDR3 for alpha chain variable domain of TCR clone 291233 (TRAV25, TRAJ54)
CAGGWGAQKLVF

SEQ ID NO: 582466 - protein, 14 aa, Homo sapiens
  CDR3 for beta chain variable domain of TCR clone 291233 (TRBV5-5, TRBJ1-5)
CASSGQGVDQPQHF

SEQ ID NO: 582467 - protein, 14 aa, Homo sapiens
  CDR3 for alpha chain variable domain of TCR clone 291234 (TRAV17, TRAJ12)
CAILPMDSSYKLIF

SEQ ID NO: 582468 - protein, 16 aa, Homo sapiens
  CDR3 for beta chain variable domain of TCR clone 291234 (TRBV7-6, TRBJ2-1)
CASSAPGPSSYNEQFF

SEQ ID NO: 582469 - protein, 17 aa, Homo sapiens
  CDR3 for alpha chain variable domain of TCR clone 291235 (TRAV3, TRAJ38)
CAVRDCLNAGNNRKLIW

SEQ ID NO: 582470 - protein, 14 aa, Homo sapiens
  CDR3 for beta chain variable domain of TCR clone 291235 (TRBV6-1, TRBJ1-3)
CASVQGGGGNTMYF

SEQ ID NO: 582471 - protein, 12 aa, Homo sapiens
  CDR3 for alpha chain variable domain of TCR clone 291236 (TRAV3, TRAJ43)
CCERGRNNDMRF

SEQ ID NO: 582472 - protein, 16 aa, Homo sapiens
  CDR3 for beta chain variable domain of TCR clone 291236 (TRBV7-3, TRBJ2-2)
CASSLKRGTLSGELFF

SEQ ID NO: 582473 - protein, 12 aa, Homo sapiens
  CDR3 for alpha chain variable domain of TCR clone 291237 (TRAV8-3, TRAJ26)
CAGANYGQNFVF

SEQ ID NO: 582474 - protein, 14 aa, Homo sapiens
  CDR3 for beta chain variable domain of TCR clone 291237 (TRBV11-2, TRBJ2-5)
CASRPLAGRETQYF

SEQ ID NO: 582475 - protein, 15 aa, Homo sapiens
  CDR3 for alpha chain variable domain of TCR clone 291238 (TRAV26-1, TRAJ40)
CIVRAVPSGTYKDIF

SEQ ID NO: 582476 - protein, 14 aa, Homo sapiens
  CDR3 for beta chain variable domain of TCR clone 291238 (TRBV19, TRBJ2-1)
CASKDPGLANEQFF

SEQ ID NO: 582477 - protein, 14 aa, Homo sapiens
  CDR3 for alpha chain variable domain of TCR clone 291239 (TRAV2, TRAJ9)
CAVEDRSGGFKTTF

SEQ ID NO: 582478 - protein, 17 aa, Homo sapiens
  CDR3 for beta chain variable domain of TCR clone 291239 (TRBV13, TRBJ2-3)
CASSLSRVAGGRNTQYF

SEQ ID NO: 582479 - protein, 15 aa, Homo sapiens
  CDR3 for alpha chain variable domain of TCR clone 291240 (TRAV26-1, TRAJ53)
CIVRVEGGSNYKLTF

SEQ ID NO: 582480 - protein, 17 aa, Homo sapiens
  CDR3 for beta chain variable domain of TCR clone 291240 (TRBV13, TRBJ2-3)
CASSLSRVAGGRNTQYF

SEQ ID NO: 582481 - protein, 15 aa, Homo sapiens
  CDR3 for alpha chain variable domain of TCR clone 291241 (TRAV3, TRAJ22)
CAVRDRGGSSRQLTF

SEQ ID NO: 582482 - protein, 16 aa, Homo sapiens
  CDR3 for beta chain variable domain of TCR clone 291241 (TRBV5-4, TRBJ2-3)
CARQQPGAGGADTQYF

SEQ ID NO: 582483 - protein, 13 aa, Homo sapiens
  CDR3 for alpha chain variable domain of TCR clone 291242 (TRAV8-3, TRAJ6)
CAARRGGSYIPTC

SEQ ID NO: 582484 - protein, 15 aa, Homo sapiens
  CDR3 for beta chain variable domain of TCR clone 291242 (TRBV4-1, TRBJ2-3)
CASSNLAGGRDTQYF

SEQ ID NO: 582485 - protein, 14 aa, Homo sapiens
  CDR3 for alpha chain variable domain of TCR clone 291243 (TRAV12-3, TRAJ58)
CAMSTETSGSRLTF

SEQ ID NO: 582486 - protein, 12 aa, Homo sapiens
  CDR3 for beta chain variable domain of TCR clone 291243 (TRBV7-9, TRBJ1-4)
CASSTDREKLFF

SEQ ID NO: 582487 - protein, 18 aa, Homo sapiens
  CDR3 for alpha chain variable domain of TCR clone 291244 (TRAV21, TRAJ52)
CAVRPSPAGGTSYGKLTF

SEQ ID NO: 582488 - protein, 16 aa, Homo sapiens
  CDR3 for beta chain variable domain of TCR clone 291244 (TRBV13, TRBJ2-2)
CASSPRTGDHTGELFF

SEQ ID NO: 582489 - protein, 16 aa, Homo sapiens
  CDR3 for alpha chain variable domain of TCR clone 291245 (TRAV30, TRAJ24)
CGTEIVDADSWGKFPF

SEQ ID NO: 582490 - protein, 16 aa, Homo sapiens
  CDR3 for beta chain variable domain of TCR clone 291245 (TRBV20-1, TRBJ2-4)
CSATSLAELAKNIQYF

SEQ ID NO: 582491 - protein, 14 aa, Homo sapiens
  CDR3 for alpha chain variable domain of TCR clone 291246 (TRAV8-6, TRAJ4)
CAVSGSGGYNKLLF

SEQ ID NO: 582492 - protein, 13 aa, Homo sapiens
  CDR3 for beta chain variable domain of TCR clone 291246 (TRBV3-1, TRBJ2-5)
CASSPGLQETQYF

SEQ ID NO: 582493 - protein, 16 aa, Homo sapiens
  CDR3 for alpha chain variable domain of TCR clone 291247 (TRAV30, TRAJ24)
CGTEIVDADSWGKFQF

SEQ ID NO: 582494 - protein, 14 aa, Homo sapiens
  CDR3 for beta chain variable domain of TCR clone 291247 (TRBV12-5, TRBJ2-5)
CASGSRTHQETQYL

SEQ ID NO: 582495 - protein, 15 aa, Homo sapiens
  CDR3 for alpha chain variable domain of TCR clone 291248 (TRAV3, TRAJ17)
GAVSPKEAAGNKLTF

SEQ ID NO: 582496 - protein, 12 aa, Homo sapiens
  CDR3 for beta chain variable domain of TCR clone 291248 (TRBV7-9, TRBJ1-6)
CASSLMTSPLHF

SEQ ID NO: 582497 - protein, 13 aa, Homo sapiens
  CDR3 for alpha chain variable domain of TCR clone 291249 (TRAV12-3, TRAJ20)
CAVGLRVDYKLSF

SEQ ID NO: 582498 - protein, 11 aa, Homo sapiens
  CDR3 for beta chain variable domain of TCR clone 291249 (TRBV25-1, TRBJ2-1)
CATTRISEQFF

SEQ ID NO: 582499 - protein, 14 aa, Homo sapiens
  CDR3 for alpha chain variable domain of TCR clone 291250 (TRAV12-2, TRAJ5)
CAVNRSTGRIALTF

SEQ ID NO: 582500 - protein, 12 aa, Homo sapiens
  CDR3 for beta chain variable domain of TCR clone 291250 (TRBV19, TRBJ1-5)
CASSIAQQPQQF

SEQ ID NO: 582501 - protein, 14 aa, Homo sapiens
  CDR3 for alpha chain variable domain of TCR clone 291251 (TRAV12-3, TRAJ10)
SHLPLTGGGNKLTF

SEQ ID NO: 582502 - protein, 16 aa, Homo sapiens
  CDR3 for beta chain variable domain of TCR clone 291251 (TRBV10-3, TRBJ2-1)
CAISGVGDGGGGQQFF

SEQ ID NO: 582503 - protein, 15 aa, Homo sapiens
  CDR3 for alpha chain variable domain of TCR clone 291252 (TRAV3, TRAJ3)
CAVRAGHSSASKIIF

SEQ ID NO: 582504 - protein, 14 aa, Homo sapiens
  CDR3 for beta chain variable domain of TCR clone 291252 (TRBV28, TRBJ1-4)
CASSFGTFDEKLFF

SEQ ID NO: 582505 - protein, 11 aa, Homo sapiens
  CDR3 for alpha chain variable domain of TCR clone 291253 (TRAV3, TRAJ21)
CAVGNFNKFYF

SEQ ID NO: 582506 - protein, 16 aa, Homo sapiens
  CDR3 for beta chain variable domain of TCR clone 291253 (TRBV27, TRBJ2-5)
CASRPTQGGIRQTQYF

SEQ ID NO: 582507 - protein, 15 aa, Homo sapiens
  CDR3 for alpha chain variable domain of TCR clone 291254 (TRAV13-1, TRAJ45)
CAASGSGGGADGLTF

SEQ ID NO: 582508 - protein, 14 aa, Homo sapiens
  CDR3 for beta chain variable domain of TCR clone 291254 (TRBV12-4, TRBJ1-2)
CASSFVGTAYGYTS

SEQ ID NO: 582509 - protein, 14 aa, Homo sapiens
  CDR3 for alpha chain variable domain of TCR clone 291255 (TRAV16, TRAJ32)
CALKSGCATNKLIF

SEQ ID NO: 582510 - protein, 17 aa, Homo sapiens
  CDR3 for beta chain variable domain of TCR clone 291255 (TRBV20-1, TRBJ2-1)
CSASSSGLAGSYNEQFF

SEQ ID NO: 582511 - protein, 11 aa, Homo sapiens
  CDR3 for alpha chain variable domain of TCR clone 291256 (TRAV17, TRAJ9)
RGFTGGFKTIF

SEQ ID NO: 582512 - protein, 14 aa, Homo sapiens
  CDR3 for beta chain variable domain of TCR clone 291256 (TRBV7-9, TRBJ2-2)
CASSLVQDTGELLF

SEQ ID NO: 582513 - protein, 15 aa, Homo sapiens
  CDR3 for alpha chain variable domain of TCR clone 291257 (TRAV21, TRAJ37)
CAVRPTLSNTGKLIF

SEQ ID NO: 582514 - protein, 15 aa, Homo sapiens
  CDR3 for beta chain variable domain of TCR clone 291257 (TRBV7-3, TRBJ2-1)
CASSLSSGSFDEQFF

SEQ ID NO: 582515 - protein, 10 aa, Homo sapiens
  CDR3 for alpha chain variable domain of TCR clone 291258 (TRAV1-2, TRAJ31)
CAFFDARLMF

SEQ ID NO: 582516 - protein, 17 aa, Homo sapiens
  CDR3 for beta chain variable domain of TCR clone 291258 (TRBV5-4, TRBJ2-1)
CASSSAGGRGPYNEQFF

SEQ ID NO: 582517 - protein, 13 aa, Homo sapiens
  CDR3 for alpha chain variable domain of TCR clone 291259 (TRAV8-3, TRAJ37)
FAVPSSNTGKLIF

SEQ ID NO: 582518 - protein, 12 aa, Homo sapiens
  CDR3 for beta chain variable domain of TCR clone 291259 (TRBV11-2, TRBJ2-1)
CASSPGNNEQFF

SEQ ID NO: 582519 - protein, 17 aa, Homo sapiens
  CDR3 for alpha chain variable domain of TCR clone 291260 (TRAV2, TRAJ22)
ILQVREADAAEQRQLTF

SEQ ID NO: 582520 - protein, 15 aa, Homo sapiens
  CDR3 for beta chain variable domain of TCR clone 291260 (TRBV11-3, TRBJ2-3)
CASLKDGREGDTQYF

SEQ ID NO: 582521 - protein, 16 aa, Homo sapiens
  CDR3 for alpha chain variable domain of TCR clone 291261 (TRAV3, TRAJ10)
CAVRDMNAGVGNKLTL

SEQ ID NO: 582522 - protein, 16 aa, Homo sapiens
  CDR3 for beta chain variable domain of TCR clone 291261 (TRBV6-3, TRBJ1-2)
CASSYSRRASNYGYTF

SEQ ID NO: 582523 - protein, 15 aa, Homo sapiens
  CDR3 for alpha chain variable domain of TCR clone 291262 (TRAV26-1, TRAJ44)
CIVRANTGTARKLPF

SEQ ID NO: 582524 - protein, 16 aa, Homo sapiens
  CDR3 for beta chain variable domain of TCR clone 291262 (TRBV7-7, TRBJ2-1)
CASSLASGTSYNEQFF

SEQ ID NO: 582525 - protein, 16 aa, Homo sapiens
  CDR3 for alpha chain variable domain of TCR clone 291263 (TRAV3, TRAJ37)
CAVRPHGSGNTGKLIF

SEQ ID NO: 582526 - protein, 15 aa, Homo sapiens
  CDR3 for beta chain variable domain of TCR clone 291263 (TRBV9, TRBJ1-2)
CSSVEEKVSPYGYTF

SEQ ID NO: 582527 - protein, 13 aa, Homo sapiens
  CDR3 for alpha chain variable domain of TCR clone 291264 (TRAV12-3, TRAJ7)
CAMSASGNNRLAF

SEQ ID NO: 582528 - protein, 16 aa, Homo sapiens
  CDR3 for beta chain variable domain of TCR clone 291264 (TRBV18, TRBJ1-1)
CASSPGVGGRGGEAFF

SEQ ID NO: 582529 - protein, 15 aa, Homo sapiens
  CDR3 for alpha chain variable domain of TCR clone 291265 (TRAV13-1, TRAJ45)
CAASGSGGGADGLTS

SEQ ID NO: 582530 - protein, 14 aa, Homo sapiens
  CDR3 for beta chain variable domain of TCR clone 291265 (TRBV12-4, TRBJ1-2)
CASSFVETAYGYTF

SEQ ID NO: 582531 - protein, 18 aa, Homo sapiens
  CDR3 for alpha chain variable domain of TCR clone 291266 (TRAV13-1, TRAJ52)
CAASKRSAGGTSYGTLTF

SEQ ID NO: 582532 - protein, 13 aa, Homo sapiens
  CDR3 for beta chain variable domain of TCR clone 291266 (TRBV12-4, TRBJ1-2)
CASSLRQGKGYSF

SEQ ID NO: 582533 - protein, 13 aa, Homo sapiens
  CDR3 for alpha chain variable domain of TCR clone 291267 (TRAV35, TRAJ44)
CAGLSGTASKLTF

SEQ ID NO: 582534 - protein, 14 aa, Homo sapiens
  CDR3 for beta chain variable domain of TCR clone 291267 (TRBV7-8, TRBJ2-3)
CASSLEAGTDTQYF

SEQ ID NO: 582535 - protein, 14 aa, Homo sapiens
  CDR3 for alpha chain variable domain of TCR clone 291268 (TRAV12-2, TRAJ17)
CAVLFKAAGNKPTF

SEQ ID NO: 582536 - protein, 13 aa, Homo sapiens
  CDR3 for beta chain variable domain of TCR clone 291268 (TRBV19, TRBJ1-2)
CASSQGQVYGYTF

SEQ ID NO: 582537 - protein, 16 aa, Homo sapiens
  CDR3 for alpha chain variable domain of TCR clone 291269 (TRAV3, TRAJ21)
CAVRDIERGNFNKFYF

SEQ ID NO: 582538 - protein, 14 aa, Homo sapiens
  CDR3 for beta chain variable domain of TCR clone 291269 (TRBV19, TRBJ2-1)
CASPAFVLSGEQFF

SEQ ID NO: 582539 - protein, 10 aa, Homo sapiens
  CDR3 for alpha chain variable domain of TCR clone 291270 (TRAV38-2/DV8, TRAJ40)
CASGTYKYIF

SEQ ID NO: 582540 - protein, 13 aa, Homo sapiens
  CDR3 for beta chain variable domain of TCR clone 291270 (TRBV27, TRBJ1-1)
CASSLSIGAEAFF

SEQ ID NO: 582541 - protein, 13 aa, Homo sapiens
  CDR3 for alpha chain variable domain of TCR clone 291271 (TRAV35, TRAJ37)
CAGSFGNTGKLIF

SEQ ID NO: 582542 - protein, 16 aa, Homo sapiens
  CDR3 for beta chain variable domain of TCR clone 291271 (TRBV10-3, TRBJ2-1)
CAISLTSGNSYNEQFF

SEQ ID NO: 582543 - protein, 14 aa, Homo sapiens
  CDR3 for alpha chain variable domain of TCR clone 291272 (TRAV1-2, TRAJ16)
CAVNRFSDGQKLVF

SEQ ID NO: 582544 - protein, 13 aa, Homo sapiens
  CDR3 for beta chain variable domain of TCR clone 291272 (TRBV12-4, TRBJ1-5)
CASSPDRAQPQHF

SEQ ID NO: 582545 - protein, 14 aa, Homo sapiens
  CDR3 for alpha chain variable domain of TCR clone 291273 (TRAV21, TRAJ13)
CAVKKTGGYQKVTF

SEQ ID NO: 582546 - protein, 15 aa, Homo sapiens
  CDR3 for beta chain variable domain of TCR clone 291273 (TRBV27, TRBJ2-1)
CASSNGGGSSNEQFF

SEQ ID NO: 582547 - protein, 14 aa, Homo sapiens
  CDR3 for alpha chain variable domain of TCR clone 291274 (TRAV12-2, TRAJ9)
CAVNALEGGFKTIF

SEQ ID NO: 582548 - protein, 16 aa, Homo sapiens
  CDR3 for beta chain variable domain of TCR clone 291274 (TRBV19, TRBJ1-6)
CASSVAPVAGNSPLHL

SEQ ID NO: 582549 - protein, 11 aa, Homo sapiens
  CDR3 for alpha chain variable domain of TCR clone 291275 (TRAV30, TRAJ23)
CGTEIAGKLIF

SEQ ID NO: 582550 - protein, 16 aa, Homo sapiens
  CDR3 for beta chain variable domain of TCR clone 291275 (TRBV7-2, TRBJ2-7)
CASTSQAPSGGYEQYF

SEQ ID NO: 582551 - protein, 12 aa, Homo sapiens
  CDR3 for alpha chain variable domain of TCR clone 291276 (TRAV1-1, TRAJ8)
CAGGTGFQKLVF

SEQ ID NO: 582552 - protein, 12 aa, Homo sapiens
  CDR3 for beta chain variable domain of TCR clone 291276 (TRBV2, TRBJ2-1)
CAKREGYNEQFF

SEQ ID NO: 582553 - protein, 13 aa, Homo sapiens
  CDR3 for alpha chain variable domain of TCR clone 291277 (TRAV3, TRAJ15)
CAVRDQAGTALIF

SEQ ID NO: 582554 - protein, 15 aa, Homo sapiens
  CDR3 for beta chain variable domain of TCR clone 291277 (TRBV11-2, TRBJ2-1)
CASSSPSTRYNEQFF

SEQ ID NO: 582555 - protein, 13 aa, Homo sapiens
  CDR3 for alpha chain variable domain of TCR clone 291278 (TRAV17, TRAJ29)
CATGPSGNTPLVF

SEQ ID NO: 582556 - protein, 14 aa, Homo sapiens
  CDR3 for beta chain variable domain of TCR clone 291278 (TRBV2, TRBJ1-6)
CASEVSSYNSHLHF

SEQ ID NO: 582557 - protein, 17 aa, Homo sapiens
  CDR3 for alpha chain variable domain of TCR clone 291279 (TRAV13-2, TRAJ28)
CAEEPAGSGAGSYQLTF

SEQ ID NO: 582558 - protein, 15 aa, Homo sapiens
  CDR3 for beta chain variable domain of TCR clone 291279 (TRBV9, TRBJ1-6)
CASSVAGTGDSPLHF

SEQ ID NO: 582559 - protein, 14 aa, Homo sapiens
  CDR3 for alpha chain variable domain of TCR clone 291280 (TRAV35, TRAJ33)
CAGSSQDSNYQLIW

SEQ ID NO: 582560 - protein, 14 aa, Homo sapiens
  CDR3 for beta chain variable domain of TCR clone 291280 (TRBV20-1, TRBJ1-1)
CSAQTRIGGTEAFF

SEQ ID NO: 582561 - protein, 14 aa, Homo sapiens
  CDR3 for alpha chain variable domain of TCR clone 291281 (TRAV13-1, TRAJ15)
CAASTNQAGTALLF

SEQ ID NO: 582562 - protein, 11 aa, Homo sapiens
  CDR3 for beta chain variable domain of TCR clone 291281 (TRBV7-2, TRBJ2-1)
CASSLRDNEFF

SEQ ID NO: 582563 - protein, 14 aa, Homo sapiens
  CDR3 for alpha chain variable domain of TCR clone 291282 (TRAV16, TRAJ17)
CALSVRAAGNKLTF

SEQ ID NO: 582564 - protein, 15 aa, Homo sapiens
  CDR3 for beta chain variable domain of TCR clone 291282 (TRBV3-1, TRBJ1-2)
CASSPTRLPEGGYTF

SEQ ID NO: 582565 - protein, 13 aa, Homo sapiens
  CDR3 for alpha chain variable domain of TCR clone 291283 (TRAV12-1, TRAJ11)
CVVNRAGYSTITF

SEQ ID NO: 582566 - protein, 15 aa, Homo sapiens
  CDR3 for beta chain variable domain of TCR clone 291283 (TRBV7-3, TRBJ2-2)
CASSETGQGTGELFF

SEQ ID NO: 582567 - protein, 14 aa, Homo sapiens
  CDR3 for alpha chain variable domain of TCR clone 291284 (TRAV9-2, TRAJ33)
CALSIMDSNYQLIC

SEQ ID NO: 582568 - protein, 14 aa, Homo sapiens
  CDR3 for beta chain variable domain of TCR clone 291284 (TRBV7-2, TRBJ1-2)
CASSQTGSTYGYTF

SEQ ID NO: 582569 - protein, 12 aa, Homo sapiens
  CDR3 for alpha chain variable domain of TCR clone 291285 (TRAV6, TRAJ41)
CSSPLGRYALNF

SEQ ID NO: 582570 - protein, 14 aa, Homo sapiens
  CDR3 for beta chain variable domain of TCR clone 291285 (TRBV18, TRBJ2-5)
CASSPGVSQETQYF

SEQ ID NO: 582571 - protein, 13 aa, Homo sapiens
  CDR3 for alpha chain variable domain of TCR clone 291286 (TRAV13-1, TRAJ40)
CAAISPGTYKYIF

SEQ ID NO: 582572 - protein, 15 aa, Homo sapiens
  CDR3 for beta chain variable domain of TCR clone 291286 (TRBV12-4, TRBJ2-5)
CASSPPTGLQETQYF

SEQ ID NO: 582573 - protein, 14 aa, Homo sapiens
  CDR3 for alpha chain variable domain of TCR clone 291287 (TRAV9-2, TRAJ39)
CALYIYNAGNMLTF

SEQ ID NO: 582574 - protein, 13 aa, Homo sapiens
  CDR3 for beta chain variable domain of TCR clone 291287 (TRBV19, TRBJ2-5)
CASRDSRRETQYF

SEQ ID NO: 582575 - protein, 14 aa, Homo sapiens
  CDR3 for alpha chain variable domain of TCR clone 291288 (TRAV23/DV6, TRAJ12)
CAASRMDSSYKLIF

SEQ ID NO: 582576 - protein, 11 aa, Homo sapiens
  CDR3 for beta chain variable domain of TCR clone 291288 (TRBV19, TRBJ1-1)
CASSIGSEAFF

SEQ ID NO: 582577 - protein, 13 aa, Homo sapiens
  CDR3 for alpha chain variable domain of TCR clone 291289 (TRAV2, TRAJ15)
CAVASQAGTALIF

SEQ ID NO: 582578 - protein, 16 aa, Homo sapiens
  CDR3 for beta chain variable domain of TCR clone 291289 (TRBV2, TRBJ2-1)
CASRLDTASAYNEQFF

SEQ ID NO: 582579 - protein, 11 aa, Homo sapiens
  CDR3 for alpha chain variable domain of TCR clone 291290 (TRAV17, TRAJ9)
CATTGGFKTIF

SEQ ID NO: 582580 - protein, 14 aa, Homo sapiens
  CDR3 for beta chain variable domain of TCR clone 291290 (TRBV7-9, TRBJ2-2)
CASSVLADTGELLF

SEQ ID NO: 582581 - protein, 13 aa, Homo sapiens
  CDR3 for alpha chain variable domain of TCR clone 291291 (TRAV8-3, TRAJ43)
CAVVPPNNNDMRF

SEQ ID NO: 582582 - protein, 17 aa, Homo sapiens
  CDR3 for beta chain variable domain of TCR clone 291291 (TRBV7-7, TRBJ1-1)
CASIGDRPNLGVTEAFF

SEQ ID NO: 582583 - protein, 16 aa, Homo sapiens
  CDR3 for alpha chain variable domain of TCR clone 291292 (TRAV3, TRAJ10)
CAVRDMRAGGGNKLTF

SEQ ID NO: 582584 - protein, 14 aa, Homo sapiens
  CDR3 for beta chain variable domain of TCR clone 291292 (TRBV25-1, TRBJ1-1)
CASTRLGVNTEAFF

SEQ ID NO: 582585 - protein, 16 aa, Homo sapiens
  CDR3 for alpha chain variable domain of TCR clone 291293 (TRAV26-1, TRAJ53)
CIVRVAMGGSNYKLTF

SEQ ID NO: 582586 - protein, 12 aa, Homo sapiens
  CDR3 for beta chain variable domain of TCR clone 291293 (TRBV11-2, TRBJ2-2)
CASSLPTGELFF

SEQ ID NO: 582587 - protein, 12 aa, Homo sapiens
  CDR3 for alpha chain variable domain of TCR clone 291294 (TRAV21, TRAJ45)
CATGGGADGLTF

SEQ ID NO: 582588 - protein, 12 aa, Homo sapiens
  CDR3 for beta chain variable domain of TCR clone 291294 (TRBV20-1, TRBJ2-7)
CSAITPTKEQYF

SEQ ID NO: 582589 - protein, 17 aa, Homo sapiens
  CDR3 for alpha chain variable domain of TCR clone 291295 (TRAV3, TRAJ6)
CAVRDGPRAGGSYIPTV

SEQ ID NO: 582590 - protein, 16 aa, Homo sapiens
  CDR3 for beta chain variable domain of TCR clone 291295 (TRBV7-9, TRBJ1-3)
CASSQTSGLRMGTIYF

SEQ ID NO: 582591 - protein, 15 aa, Homo sapiens
  CDR3 for alpha chain variable domain of TCR clone 291296 (TRAV8-3, TRAJ45)
CASSYSGGGADGLTF

SEQ ID NO: 582592 - protein, 13 aa, Homo sapiens
  CDR3 for beta chain variable domain of TCR clone 291296 (TRBV10-3, TRBJ2-7)
CASKLGVNCEQYF

SEQ ID NO: 582593 - protein, 14 aa, Homo sapiens
  CDR3 for alpha chain variable domain of TCR clone 291297 (TRAV27, TRAJ15)
CAGFDNQAGTALIF

SEQ ID NO: 582594 - protein, 13 aa, Homo sapiens
  CDR3 for beta chain variable domain of TCR clone 291297 (TRBV9, TRBJ2-1)
CASSPSGGNEQFF

SEQ ID NO: 582595 - protein, 18 aa, Homo sapiens
  CDR3 for alpha chain variable domain of TCR clone 291298 (TRAV26-1, TRAJ23)
CIVRVGLEVWNQGGKLIF

SEQ ID NO: 582596 - protein, 15 aa, Homo sapiens
  CDR3 for beta chain variable domain of TCR clone 291298 (TRBV6-6, TRBJ2-5)
CASSYGKIIQETQYF

SEQ ID NO: 582597 - protein, 13 aa, Homo sapiens
  CDR3 for alpha chain variable domain of TCR clone 291299 (TRAV39, TRAJ49)
CAVDRNTGNQFYF

SEQ ID NO: 582598 - protein, 15 aa, Homo sapiens
  CDR3 for beta chain variable domain of TCR clone 291299 (TRBV20-1, TRBJ2-7)
CSARDRVSGMDEQYF

SEQ ID NO: 582599 - protein, 12 aa, Homo sapiens
  CDR3 for alpha chain variable domain of TCR clone 291300 (TRAV26-1, TRAJ17)
CIVRSAGNKLTV

SEQ ID NO: 582600 - protein, 16 aa, Homo sapiens
  CDR3 for beta chain variable domain of TCR clone 291300 (TRBV6-5, TRBJ2-7)
CASSYFRVGISDEQYF

SEQ ID NO: 582601 - protein, 16 aa, Homo sapiens
  CDR3 for alpha chain variable domain of TCR clone 291301 (TRAV8-3, TRAJ38)
CAVGASNAGNNRKLIW

SEQ ID NO: 582602 - protein, 15 aa, Homo sapiens
  CDR3 for beta chain variable domain of TCR clone 291301 (TRBV11-3, TRBJ1-3)
CASSLFGPSGNTMYF

SEQ ID NO: 582603 - protein, 15 aa, Homo sapiens
  CDR3 for alpha chain variable domain of TCR clone 291302 (TRAV4, TRAJ39)
CLVGPNNNAGKMLTF

SEQ ID NO: 582604 - protein, 14 aa, Homo sapiens
  CDR3 for beta chain variable domain of TCR clone 291302 (TRBV19, TRBJ2-7)
CASNFRDTFTGMYF

SEQ ID NO: 582605 - protein, 12 aa, Homo sapiens
  CDR3 for alpha chain variable domain of TCR clone 291303 (TRAV12-1, TRAJ40)
CVVHSGTYKYIF

SEQ ID NO: 582606 - protein, 12 aa, Homo sapiens
  CDR3 for beta chain variable domain of TCR clone 291303 (TRBV11-2, TRBJ2-3)
GASRGAPNTQYF

SEQ ID NO: 582607 - protein, 13 aa, Homo sapiens
  CDR3 for alpha chain variable domain of TCR clone 291304 (TRAV27, TRAJ49)
CAPRPYTGIQFYF

SEQ ID NO: 582608 - protein, 16 aa, Homo sapiens
  CDR3 for beta chain variable domain of TCR clone 291304 (TRBV4-1, TRBJ1-2)
CASSQDAGQVPYGYTF

SEQ ID NO: 582609 - protein, 11 aa, Homo sapiens
  CDR3 for alpha chain variable domain of TCR clone 291305 (TRAV3, TRAJ21)
CAVGNFNKFYF

SEQ ID NO: 582610 - protein, 18 aa, Homo sapiens
  CDR3 for beta chain variable domain of TCR clone 291305 (TRBV20-1, TRBJ2-3)
CSARDPWGQGLSTDTQYF

SEQ ID NO: 582611 - protein, 11 aa, Homo sapiens
  CDR3 for alpha chain variable domain of TCR clone 291306 (TRAV2, TRAJ21)
CAVFNFNKFYF

SEQ ID NO: 582612 - protein, 13 aa, Homo sapiens
  CDR3 for beta chain variable domain of TCR clone 291306 (TRBV20-1, TRBJ1-1)
CSARGGGNTEAFF

SEQ ID NO: 582613 - protein, 16 aa, Homo sapiens
  CDR3 for alpha chain variable domain of TCR clone 291307 (TRAV30, TRAJ24)
CGTEIMDADSWGKFQF

SEQ ID NO: 582614 - protein, 13 aa, Homo sapiens
  CDR3 for beta chain variable domain of TCR clone 291307 (TRBV7-9, TRBJ1-2)
CASSLKQNYGYTF

SEQ ID NO: 582615 - protein, 14 aa, Homo sapiens
  CDR3 for alpha chain variable domain of TCR clone 291308 (TRAV12-2, TRAJ53)
CAVKGGGSNCKLTF

SEQ ID NO: 582616 - protein, 15 aa, Homo sapiens
  CDR3 for beta chain variable domain of TCR clone 291308 (TRBV10-3, TRBJ2-3)
CAISLTSGGTDTQYF

SEQ ID NO: 582617 - protein, 17 aa, Homo sapiens
  CDR3 for alpha chain variable domain of TCR clone 291309 (TRAV3, TRAJ6)
CAVRDGPRAGGSYIPTF

SEQ ID NO: 582618 - protein, 14 aa, Homo sapiens
  CDR3 for beta chain variable domain of TCR clone 291309 (TRBV7-9, TRBJ2-7)
CASSIGQGAGEQYF

SEQ ID NO: 582619 - protein, 16 aa, Homo sapiens
  CDR3 for alpha chain variable domain of TCR clone 291310 (TRAV30, TRAJ32)
CGTESSYGGATNKLIF

SEQ ID NO: 582620 - protein, 15 aa, Homo sapiens
  CDR3 for beta chain variable domain of TCR clone 291310 (TRBV6-3, TRBJ2-7)
CASSSPGTVFYEQYF

SEQ ID NO: 582621 - protein, 14 aa, Homo sapiens
  CDR3 for alpha chain variable domain of TCR clone 291311 (TRAV13-1, TRAJ44)
CAAKATGTASKLTF

SEQ ID NO: 582622 - protein, 16 aa, Homo sapiens
  CDR3 for beta chain variable domain of TCR clone 291311 (TRBV7-9, TRBJ2-6)
CASSLKGPLRANALTF

SEQ ID NO: 582623 - protein, 16 aa, Homo sapiens
  CDR3 for alpha chain variable domain of TCR clone 291312 (TRAV12-2, TRAJ32)
CAVNLGQGGATNKLFF

SEQ ID NO: 582624 - protein, 15 aa, Homo sapiens
  CDR3 for beta chain variable domain of TCR clone 291312 (TRBV20-1, TRBJ2-7)
CSARGPLAGGREQYF

SEQ ID NO: 582625 - protein, 18 aa, Homo sapiens
  CDR3 for alpha chain variable domain of TCR clone 291313 (TRAV3, TRAJ42)
CAVRDPENYGGSQGNLIF

SEQ ID NO: 582626 - protein, 11 aa, Homo sapiens
  CDR3 for beta chain variable domain of TCR clone 291313 (TRBV27, TRBJ2-2)
CASKEAGELFF

SEQ ID NO: 582627 - protein, 12 aa, Homo sapiens
  CDR3 for alpha chain variable domain of TCR clone 291314 (TRAV17, TRAJ39)
CATGAAGNMLTF

SEQ ID NO: 582628 - protein, 15 aa, Homo sapiens
  CDR3 for beta chain variable domain of TCR clone 291314 (TRBV29-1, TRBJ2-7)
CSVEFFDRGSYEQYF

SEQ ID NO: 582629 - protein, 16 aa, Homo sapiens
  CDR3 for alpha chain variable domain of TCR clone 291315 (TRAV26-2, TRAJ57)
CILRDVGSGGSEKLVC

SEQ ID NO: 582630 - protein, 13 aa, Homo sapiens
  CDR3 for beta chain variable domain of TCR clone 291315 (TRBV18, TRBJ2-3)
CASSPGVTDTQYF

SEQ ID NO: 582631 - protein, 13 aa, Homo sapiens
  CDR3 for alpha chain variable domain of TCR clone 291316 (TRAV13-1, TRAJ43)
CAASKNNNNDMRF

SEQ ID NO: 582632 - protein, 12 aa, Homo sapiens
  CDR3 for beta chain variable domain of TCR clone 291316 (TRBV12-4, TRBJ1-3)
CASSFSGNTIYF

SEQ ID NO: 582633 - protein, 18 aa, Homo sapiens
  CDR3 for alpha chain variable domain of TCR clone 291317 (TRAV8-3, TRAJ6)
CAVGAEHQEEATYLHLEE

SEQ ID NO: 582634 - protein, 14 aa, Homo sapiens
  CDR3 for beta chain variable domain of TCR clone 291317 (TRBV6-6, TRBJ2-7)
CESSDSGAGYEQYF

SEQ ID NO: 582635 - protein, 15 aa, Homo sapiens
  CDR3 for alpha chain variable domain of TCR clone 291318 (TRAV13-1, TRAJ17)
CAASIEMAAGNKRTF

SEQ ID NO: 582636 - protein, 15 aa, Homo sapiens
  CDR3 for beta chain variable domain of TCR clone 291318 (TRBV6-3, TRBJ2-7)
CASSSPGTVFYEQYF

SEQ ID NO: 582637 - protein, 15 aa, Homo sapiens
  CDR3 for alpha chain variable domain of TCR clone 291319 (TRAV14/DV4, TRAJ12)
CAMREERDSSDKLIF

SEQ ID NO: 582638 - protein, 16 aa, Homo sapiens
  CDR3 for beta chain variable domain of TCR clone 291319 (TRBV11-2, TRBJ1-2)
CASSLDRGGNNYGYTF

SEQ ID NO: 582639 - protein, 13 aa, Homo sapiens
  CDR3 for alpha chain variable domain of TCR clone 291320 (TRAV8-3, TRAJ43)
CAMVPYNNNDMRF

SEQ ID NO: 582640 - protein, 17 aa, Homo sapiens
  CDR3 for beta chain variable domain of TCR clone 291320 (TRBV7-7, TRBJ1-1)
CASIGDRPNLGVTEAFF

SEQ ID NO: 582641 - protein, 15 aa, Homo sapiens
  CDR3 for alpha chain variable domain of TCR clone 291321 (TRAV21, TRAJ53)
CATLNSRGINYKLTF

SEQ ID NO: 582642 - protein, 17 aa, Homo sapiens
  CDR3 for beta chain variable domain of TCR clone 291321 (TRBV20-1, TRBJ2-2)
CSASGSGQGGLTGELFF

SEQ ID NO: 582643 - protein, 14 aa, Homo sapiens
  CDR3 for alpha chain variable domain of TCR clone 291322 (TRAV12-2, TRAJ44)
CAVNKAGTASKLTF

SEQ ID NO: 582644 - protein, 12 aa, Homo sapiens
  CDR3 for beta chain variable domain of TCR clone 291322 (TRBV11-2, TRBJ2-1)
CASSPGNNEQFF

SEQ ID NO: 582645 - protein, 11 aa, Homo sapiens
  CDR3 for alpha chain variable domain of TCR clone 291323 (TRAV35, TRAJ57)
GPQGGSETLVF

SEQ ID NO: 582646 - protein, 16 aa, Homo sapiens
  CDR3 for beta chain variable domain of TCR clone 291323 (TRBV7-2, TRBJ1-5)
CASSWTGGPGNQPQHF

SEQ ID NO: 582647 - protein, 11 aa, Homo sapiens
  CDR3 for alpha chain variable domain of TCR clone 291324 (TRAV13-1, TRAJ52)
PGGTSYGKLPF

SEQ ID NO: 582648 - protein, 16 aa, Homo sapiens
  CDR3 for beta chain variable domain of TCR clone 291324 (TRBV28, TRBJ2-7)
CASSPWVATGDLSQYF

SEQ ID NO: 582649 - protein, 15 aa, Homo sapiens
  CDR3 for alpha chain variable domain of TCR clone 291325 (TRAV8-2, TRAJ36)
CVVSENWGKQPPLWD

SEQ ID NO: 582650 - protein, 13 aa, Homo sapiens
  CDR3 for beta chain variable domain of TCR clone 291325 (TRBV7-9, TRBJ1-2)
CASSLKQNYGYTF

SEQ ID NO: 582651 - protein, 15 aa, Homo sapiens
  CDR3 for alpha chain variable domain of TCR clone 291326 (TRAV17, TRAJ6)
CATDLPSGGSYIPTF

SEQ ID NO: 582652 - protein, 16 aa, Homo sapiens
  CDR3 for beta chain variable domain of TCR clone 291326 (TRBV4-1, TRBJ2-7)
CASSQDPTGYSYQQYF

SEQ ID NO: 582653 - protein, 10 aa, Homo sapiens
  CDR3 for alpha chain variable domain of TCR clone 291327 (TRAV13-1, TRAJ27)
CAPLARQINF

SEQ ID NO: 582654 - protein, 13 aa, Homo sapiens
  CDR3 for beta chain variable domain of TCR clone 291327 (TRBV7-3, TRBJ1-1)
CASSQDWGAEAFF

SEQ ID NO: 582655 - protein, 16 aa, Homo sapiens
  CDR3 for alpha chain variable domain of TCR clone 291328 (TRAV3, TRAJ5)
CAVRNLMDTGRRALTF

SEQ ID NO: 582656 - protein, 12 aa, Homo sapiens
  CDR3 for beta chain variable domain of TCR clone 291328 (TRBV5-4, TRBJ2-5)
CASSSARETQYF

SEQ ID NO: 582657 - protein, 13 aa, Homo sapiens
  CDR3 for alpha chain variable domain of TCR clone 291329 (TRAV35, TRAJ44)
CAGLSGTASKLTF

SEQ ID NO: 582658 - protein, 17 aa, Homo sapiens
  CDR3 for beta chain variable domain of TCR clone 291329 (TRBV7-8, TRBJ1-2)
CASSLRTLQGHLYGYTF

SEQ ID NO: 582659 - protein, 12 aa, Homo sapiens
  CDR3 for alpha chain variable domain of TCR clone 291330 (TRAV12-1, TRAJ40)
CVVCSGTYKYIF

SEQ ID NO: 582660 - protein, 17 aa, Homo sapiens
  CDR3 for beta chain variable domain of TCR clone 291330 (TRBV11-2, TRBJ2-3)
CQQLRGASRGAPNTQYF

SEQ ID NO: 582661 - protein, 14 aa, Homo sapiens
  CDR3 for alpha chain variable domain of TCR clone 291331 (TRAV1-2, TRAJ8)
CAVREDTGFQKLVV

SEQ ID NO: 582662 - protein, 16 aa, Homo sapiens
  CDR3 for beta chain variable domain of TCR clone 291331 (TRBV6-1, TRBJ2-5)
CASSETLDRGAETQYF

SEQ ID NO: 582663 - protein, 14 aa, Homo sapiens
  CDR3 for alpha chain variable domain of TCR clone 291332 (TRAV8-3, TRAJ4)
CPVGAAGGYNKLIF

SEQ ID NO: 582664 - protein, 15 aa, Homo sapiens
  CDR3 for beta chain variable domain of TCR clone 291332 (TRBV6-5, TRBJ2-1)
CASSYDAGAGNEQFF

SEQ ID NO: 582665 - protein, 12 aa, Homo sapiens
  CDR3 for alpha chain variable domain of TCR clone 291333 (TRAV10, TRAJ34)
CVVSGKHRQAHL

SEQ ID NO: 582666 - protein, 14 aa, Homo sapiens
  CDR3 for beta chain variable domain of TCR clone 291333 (TRBV19, TRBJ2-1)
CASPTFVLSGEQFC

SEQ ID NO: 582667 - protein, 16 aa, Homo sapiens
  CDR3 for alpha chain variable domain of TCR clone 291334 (TRAV30, TRAJ24)
CGTEIVDADSWGNSSL

SEQ ID NO: 582668 - protein, 13 aa, Homo sapiens
  CDR3 for beta chain variable domain of TCR clone 291334 (TRBV20-1, TRBJ1-1)
CSARGGGNTEAFF

SEQ ID NO: 582669 - protein, 13 aa, Homo sapiens
  CDR3 for alpha chain variable domain of TCR clone 291335 (TRAV8-3, TRAJ43)
CAVGPDNNNDMRF

SEQ ID NO: 582670 - protein, 14 aa, Homo sapiens
  CDR3 for beta chain variable domain of TCR clone 291335 (TRBV19, TRBJ2-1)
CASPNFVLSGEQFF

SEQ ID NO: 582671 - protein, 12 aa, Homo sapiens
  CDR3 for alpha chain variable domain of TCR clone 291336 (TRAV26-1, TRAJ26)
CIVYNYGQNFVF

SEQ ID NO: 582672 - protein, 13 aa, Homo sapiens
  CDR3 for beta chain variable domain of TCR clone 291336 (TRBV7-2, TRBJ2-2)
CASSSVRAGELFF

SEQ ID NO: 582673 - protein, 18 aa, Homo sapiens
  CDR3 for alpha chain variable domain of TCR clone 291337 (TRAV26-2, TRAJ54)
CILRDVEVGIQGAQKLVF

SEQ ID NO: 582674 - protein, 17 aa, Homo sapiens
  CDR3 for beta chain variable domain of TCR clone 291337 (TRBV25-1, TRBJ2-7)
CASSDARVVFSSYEQYF

SEQ ID NO: 582675 - protein, 12 aa, Homo sapiens
  CDR3 for alpha chain variable domain of TCR clone 291338 (TRAV2, TRAJ31)
CAVEDNNARLMY

SEQ ID NO: 582676 - protein, 19 aa, Homo sapiens
  CDR3 for beta chain variable domain of TCR clone 291338 (TRBV25-1, TRBJ2-2)
CAILVYRVDRGRKTGELFF

SEQ ID NO: 582677 - protein, 17 aa, Homo sapiens
  CDR3 for alpha chain variable domain of TCR clone 291339 (TRAV3, TRAJ42)
CAVRDRDYGGSQRNLIF

SEQ ID NO: 582678 - protein, 14 aa, Homo sapiens
  CDR3 for beta chain variable domain of TCR clone 291339 (TRBV11-2, TRBJ2-7)
CASSSTGEGYEQYF

SEQ ID NO: 582679 - protein, 12 aa, Homo sapiens
  CDR3 for alpha chain variable domain of TCR clone 291340 (TRAV12-1, TRAJ23)
CVVNNQGGKLIF

SEQ ID NO: 582680 - protein, 16 aa, Homo sapiens
  CDR3 for beta chain variable domain of TCR clone 291340 (TRBV11-1, TRBJ2-7)
CASSAQTETLSYEQYF

SEQ ID NO: 582681 - protein, 11 aa, Homo sapiens
  CDR3 for alpha chain variable domain of TCR clone 291341 (TRAV21, TRAJ48)
CAVDGNEKLTF

SEQ ID NO: 582682 - protein, 13 aa, Homo sapiens
  CDR3 for beta chain variable domain of TCR clone 291341 (TRBV19, TRBJ1-2)
CASSVPGQDGYTF

SEQ ID NO: 582683 - protein, 12 aa, Homo sapiens
  CDR3 for alpha chain variable domain of TCR clone 291342 (TRAV16, TRAJ10)
CSRTGGGNKLTF

SEQ ID NO: 582684 - protein, 16 aa, Homo sapiens
  CDR3 for beta chain variable domain of TCR clone 291342 (TRBV7-9, TRBJ2-7)
CASSYPDREGGYEQYF

SEQ ID NO: 582685 - protein, 16 aa, Homo sapiens
  CDR3 for alpha chain variable domain of TCR clone 291343 (TRAV21, TRAJ32)
CAVIYGYGGATNKLIF

SEQ ID NO: 582686 - protein, 14 aa, Homo sapiens
  CDR3 for beta chain variable domain of TCR clone 291343 (TRBV4-1, TRBJ2-2)
CASSQAVNTGELFF

SEQ ID NO: 582687 - protein, 11 aa, Homo sapiens
  CDR3 for alpha chain variable domain of TCR clone 291344 (TRAV13-2, TRAJ20)
CADSNDYKLSF

SEQ ID NO: 582688 - protein, 12 aa, Homo sapiens
  CDR3 for beta chain variable domain of TCR clone 291344 (TRBV11-2, TRBJ2-2)
CASSLGGGQLFF

SEQ ID NO: 582689 - protein, 15 aa, Homo sapiens
  CDR3 for alpha chain variable domain of TCR clone 291345 (TRAV2, TRAJ9)
CAVEDRGTGGFKTIF

SEQ ID NO: 582690 - protein, 17 aa, Homo sapiens
  CDR3 for beta chain variable domain of TCR clone 291345 (TRBV7-9, TRBJ2-6)
CASSFGAGYSGANVLTF

SEQ ID NO: 582691 - protein, 17 aa, Homo sapiens
  CDR3 for alpha chain variable domain of TCR clone 291346 (TRAV16, TRAJ58)
CITVLSNGETSGSRLNF

SEQ ID NO: 582692 - protein, 17 aa, Homo sapiens
  CDR3 for beta chain variable domain of TCR clone 291346 (TRBV18, TRBJ2-1)
CASSKGLSGGADNEQFF

SEQ ID NO: 582693 - protein, 14 aa, Homo sapiens
  CDR3 for alpha chain variable domain of TCR clone 291347 (TRAV29/DV5, TRAJ49)
CAASLSNTGNQFYF

SEQ ID NO: 582694 - protein, 15 aa, Homo sapiens
  CDR3 for beta chain variable domain of TCR clone 291347 (TRBV19, TRBJ1-2)
CASSVGQVLNYGYTF

SEQ ID NO: 582695 - protein, 15 aa, Homo sapiens
  CDR3 for alpha chain variable domain of TCR clone 291348 (TRAV34, TRAJ37)
CGAAYGSSNTGKLIF

SEQ ID NO: 582696 - protein, 13 aa, Homo sapiens
  CDR3 for beta chain variable domain of TCR clone 291348 (TRBV28, TRBJ2-7)
CASSLPSRYEQYF

SEQ ID NO: 582697 - protein, 12 aa, Homo sapiens
  CDR3 for alpha chain variable domain of TCR clone 291349 (TRAV21, TRAJ31)
CVLAGHNARLMF

SEQ ID NO: 582698 - protein, 16 aa, Homo sapiens
  CDR3 for beta chain variable domain of TCR clone 291349 (TRBV27, TRBJ2-5)
CASSFGPGGTKETQYF

SEQ ID NO: 582699 - protein, 18 aa, Homo sapiens
  CDR3 for alpha chain variable domain of TCR clone 291350 (TRAV26-2, TRAJ45)
CILRLWGYSGGGADGLTF

SEQ ID NO: 582700 - protein, 17 aa, Homo sapiens
  CDR3 for beta chain variable domain of TCR clone 291350 (TRBV28, TRBJ2-3)
CASSPTPAGGRVDTQYL

SEQ ID NO: 582701 - protein, 14 aa, Homo sapiens
  CDR3 for alpha chain variable domain of TCR clone 291351 (TRAV8-1, TRAJ5)
CAVRTDTGRRALTF

SEQ ID NO: 582702 - protein, 15 aa, Homo sapiens
  CDR3 for beta chain variable domain of TCR clone 291351 (TRBV7-2, TRBJ2-1)
CASTHGTGIYNEQFF

SEQ ID NO: 582703 - protein, 15 aa, Homo sapiens
  CDR3 for alpha chain variable domain of TCR clone 291352 (TRAV27, TRAJ53)
CRAINSGGSNYKLTF

SEQ ID NO: 582704 - protein, 14 aa, Homo sapiens
  CDR3 for beta chain variable domain of TCR clone 291352 (TRBV7-3, TRBJ2-1)
CASSLAGGTNQQFF

SEQ ID NO: 582705 - protein, 14 aa, Homo sapiens
  CDR3 for alpha chain variable domain of TCR clone 291353 (TRAV13-1, TRAJ32)
CAARGSGATNKLIF

SEQ ID NO: 582706 - protein, 14 aa, Homo sapiens
  CDR3 for beta chain variable domain of TCR clone 291353 (TRBV11-2, TRBJ1-2)
CASSLGTANYGYTF

SEQ ID NO: 582707 - protein, 15 aa, Homo sapiens
  CDR3 for alpha chain variable domain of TCR clone 291354 (TRAV21, TRAJ53)
CATLNSGGSNYKLTL

SEQ ID NO: 582708 - protein, 13 aa, Homo sapiens
  CDR3 for beta chain variable domain of TCR clone 291354 (TRBV12-5, TRBJ2-1)
CASGLGRGNEQFF

SEQ ID NO: 582709 - protein, 12 aa, Homo sapiens
  CDR3 for alpha chain variable domain of TCR clone 291355 (TRAV1-2, TRAJ17)
CAMTLTGNKLTF

SEQ ID NO: 582710 - protein, 17 aa, Homo sapiens
  CDR3 for beta chain variable domain of TCR clone 291355 (TRBV7-3, TRBJ2-3)
CASSLMKRMRGADTQYF

SEQ ID NO: 582711 - protein, 14 aa, Homo sapiens
  CDR3 for alpha chain variable domain of TCR clone 291356 (TRAV8-3, TRAJ36)
CAVGPITGANNLFF

SEQ ID NO: 582712 - protein, 15 aa, Homo sapiens
  CDR3 for beta chain variable domain of TCR clone 291356 (TRBV4-1, TRBJ2-1)
CASSKDPGNYNEQFF

SEQ ID NO: 582713 - protein, 15 aa, Homo sapiens
  CDR3 for alpha chain variable domain of TCR clone 291357 (TRAV3, TRAJ22)
CAVRDRGGSARQLTF

SEQ ID NO: 582714 - protein, 16 aa, Homo sapiens
  CDR3 for beta chain variable domain of TCR clone 291357 (TRBV7-3, TRBJ2-2)
CASSLTGTGTTGELFF

SEQ ID NO: 582715 - protein, 21 aa, Homo sapiens
  CDR3 for alpha chain variable domain of TCR clone 291358 (TRAV12-1, TRAJ32)
SSVIQPPTSMNDGGATNKLIF

SEQ ID NO: 582716 - protein, 18 aa, Homo sapiens
  CDR3 for beta chain variable domain of TCR clone 291358 (TRBV20-1, TRBJ2-3)
CSASGLAGGPGTTDTQYF

SEQ ID NO: 582717 - protein, 14 aa, Homo sapiens
  CDR3 for alpha chain variable domain of TCR clone 291359 (TRAV12-2, TRAJ13)
CAVKKTGGYQKVTF

SEQ ID NO: 582718 - protein, 21 aa, Homo sapiens
  CDR3 for beta chain variable domain of TCR clone 291359 (TRBV15, TRBJ1-6)
AWGTQPCTCVPPRGLNSPLHF

SEQ ID NO: 582719 - protein, 13 aa, Homo sapiens
  CDR3 for alpha chain variable domain of TCR clone 291360 (TRAV21, TRAJ26)
CAVLDNYGQNFVF

SEQ ID NO: 582720 - protein, 16 aa, Homo sapiens
  CDR3 for beta chain variable domain of TCR clone 291360 (TRBV12-4, TRBJ1-5)
CASSRPVGGSNQPQHF

SEQ ID NO: 582721 - protein, 14 aa, Homo sapiens
  CDR3 for alpha chain variable domain of TCR clone 291361 (TRAV12-2, TRAJ10)
CAVNPAGTASKPTF

SEQ ID NO: 582722 - protein, 13 aa, Homo sapiens
  CDR3 for beta chain variable domain of TCR clone 291361 (TRBV20-1, TRBJ1-6)
CSAPVGVGSPLHF

SEQ ID NO: 582723 - protein, 12 aa, Homo sapiens
  CDR3 for alpha chain variable domain of TCR clone 291362 (TRAV30, TRAJ43)
CGTEERGNDMRF

SEQ ID NO: 582724 - protein, 15 aa, Homo sapiens
  CDR3 for beta chain variable domain of TCR clone 291362 (TRBV19, TRBJ1-1)
CASTSGQIQNTEAFF

SEQ ID NO: 582725 - protein, 11 aa, Homo sapiens
  CDR3 for alpha chain variable domain of TCR clone 291363 (TRAV17, TRAJ49)
CATDAGNQFYF

SEQ ID NO: 582726 - protein, 15 aa, Homo sapiens
  CDR3 for beta chain variable domain of TCR clone 291363 (TRBV6-5, TRBJ2-1)
CASSYDAGAGNEQFF

SEQ ID NO: 582727 - protein, 15 aa, Homo sapiens
  CDR3 for alpha chain variable domain of TCR clone 291364 (TRAV8-4, TRAJ13)
CAVSDWSGGYQKVTF

SEQ ID NO: 582728 - protein, 16 aa, Homo sapiens
  CDR3 for beta chain variable domain of TCR clone 291364 (TRBV27, TRBJ2-2)
CASSFRGLVRTGELFF

SEQ ID NO: 582729 - protein, 16 aa, Homo sapiens
  CDR3 for alpha chain variable domain of TCR clone 291365 (TRAV3, TRAJ37)
CAARGKGSGNTGKLIF

SEQ ID NO: 582730 - protein, 13 aa, Homo sapiens
  CDR3 for beta chain variable domain of TCR clone 291365 (TRBV7-2, TRBJ2-2)
CASSSVRAGELFF

SEQ ID NO: 582731 - protein, 14 aa, Homo sapiens
  CDR3 for alpha chain variable domain of TCR clone 291366 (TRAV38-1, TRAJ40)
CALRPTSGTYKYIF

SEQ ID NO: 582732 - protein, 11 aa, Homo sapiens
  CDR3 for beta chain variable domain of TCR clone 291366 (TRBV29-1, TRBJ2-5)
CSEDRTGTQYF

SEQ ID NO: 582733 - protein, 15 aa, Homo sapiens
  CDR3 for alpha chain variable domain of TCR clone 291367 (TRAV21, TRAJ53)
CATLNSGGSNYKLTF

SEQ ID NO: 582734 - protein, 16 aa, Homo sapiens
  CDR3 for beta chain variable domain of TCR clone 291367 (TRBV20-1, TRBJ1-4)
CSATGQGLLTNEKLFF

SEQ ID NO: 582735 - protein, 13 aa, Homo sapiens
  CDR3 for alpha chain variable domain of TCR clone 291368 (TRAV13-1, TRAJ12)
CAASPVSSYKLIF

SEQ ID NO: 582736 - protein, 16 aa, Homo sapiens
  CDR3 for beta chain variable domain of TCR clone 291368 (TRBV15, TRBJ2-1)
CATSRERLAGAYEQFF

SEQ ID NO: 582737 - protein, 14 aa, Homo sapiens
  CDR3 for alpha chain variable domain of TCR clone 291369 (TRAV26-1, TRAJ39)
CIVRAYNAGNMLTF

SEQ ID NO: 582738 - protein, 16 aa, Homo sapiens
  CDR3 for beta chain variable domain of TCR clone 291369 (TRBV15, TRBJ2-7)
CATSRDFGAAVYGQYC

SEQ ID NO: 582739 - protein, 13 aa, Homo sapiens
  CDR3 for alpha chain variable domain of TCR clone 291370 (TRAV2, TRAJ15)
CAVASRAGTALIF

SEQ ID NO: 582740 - protein, 15 aa, Homo sapiens
  CDR3 for beta chain variable domain of TCR clone 291370 (TRBV6-6, TRBJ2-7)
CASSYSYGGSYEQYF

SEQ ID NO: 582741 - protein, 17 aa, Homo sapiens
  CDR3 for alpha chain variable domain of TCR clone 291371 (TRAV3, TRAJ6)
CAVRDGPRAGGSYIPTF

SEQ ID NO: 582742 - protein, 17 aa, Homo sapiens
  CDR3 for beta chain variable domain of TCR clone 291371 (TRBV20-1, TRBJ1-5)
RSASLSPGQGGNQPQHF

SEQ ID NO: 582743 - protein, 13 aa, Homo sapiens
  CDR3 for alpha chain variable domain of TCR clone 291372 (TRAV20, TRAJ37)
CAGCSSNTGKLIF

SEQ ID NO: 582744 - protein, 21 aa, Homo sapiens
  CDR3 for beta chain variable domain of TCR clone 291372 (TRBV4-2, TRBJ2-3)
PCSQKTRPGISVPAAPDTQYF

SEQ ID NO: 582745 - protein, 18 aa, Homo sapiens
  CDR3 for alpha chain variable domain of TCR clone 291373 (TRAV2, TRAJ45)
TTVLWRIRSGGGADGLTF

SEQ ID NO: 582746 - protein, 15 aa, Homo sapiens
  CDR3 for beta chain variable domain of TCR clone 291373 (TRBV11-2, TRBJ2-2)
CASSSDRVNAGELFF

SEQ ID NO: 582747 - protein, 13 aa, Homo sapiens
  CDR3 for alpha chain variable domain of TCR clone 291374 (TRAV8-3, TRAJ48)
CAVVPFGYEKLTF

SEQ ID NO: 582748 - protein, 12 aa, Homo sapiens
  CDR3 for beta chain variable domain of TCR clone 291374 (TRBV11-2, TRBJ2-2)
CASSLGGGELFF

SEQ ID NO: 582749 - protein, 15 aa, Homo sapiens
  CDR3 for alpha chain variable domain of TCR clone 291375 (TRAV8-3, TRAJ27)
CAVGTSKTNAGKSTF

SEQ ID NO: 582750 - protein, 13 aa, Homo sapiens
  CDR3 for beta chain variable domain of TCR clone 291375 (TRBV12-5, TRBJ1-2)
CASGVRTGNGYTF

SEQ ID NO: 582751 - protein, 14 aa, Homo sapiens
  CDR3 for alpha chain variable domain of TCR clone 291376 (TRAV1-2, TRAJ8)
CVVREDTGFQKLVF

SEQ ID NO: 582752 - protein, 15 aa, Homo sapiens
  CDR3 for beta chain variable domain of TCR clone 291376 (TRBV11-3, TRBJ2-3)
CASLKDGREGDTQYF

SEQ ID NO: 582753 - protein, 12 aa, Homo sapiens
  CDR3 for alpha chain variable domain of TCR clone 291377 (TRAV12-3, TRAJ17)
CAMTLTGNKLTF

SEQ ID NO: 582754 - protein, 20 aa, Homo sapiens
  CDR3 for beta chain variable domain of TCR clone 291377 (TRBV19, TRBJ2-1)
CASSISRTVTSARLNNEQFF

SEQ ID NO: 582755 - protein, 17 aa, Homo sapiens
  CDR3 for alpha chain variable domain of TCR clone 291378 (TRAV23/DV6, TRAJ57)
CAASSTLSQCGSEKLVF

SEQ ID NO: 582756 - protein, 14 aa, Homo sapiens
  CDR3 for beta chain variable domain of TCR clone 291378 (TRBV7-9, TRBJ2-3)
CASSLEDGTDTQYF

SEQ ID NO: 582757 - protein, 16 aa, Homo sapiens
  CDR3 for alpha chain variable domain of TCR clone 291379 (TRAV30, TRAJ24)
CGTEIVDADSWGKFQF

SEQ ID NO: 582758 - protein, 14 aa, Homo sapiens
  CDR3 for beta chain variable domain of TCR clone 291379 (TRBV7-9, TRBJ2-7)
CASSPKTSFYEQYF

SEQ ID NO: 582759 - protein, 12 aa, Homo sapiens
  CDR3 for alpha chain variable domain of TCR clone 291380 (TRAV27, TRAJ9)
CAGESGGFKTIF

SEQ ID NO: 582760 - protein, 17 aa, Homo sapiens
  CDR3 for beta chain variable domain of TCR clone 291380 (TRBV12-4, TRBJ2-1)
CASSPGLAGGRINEQFF

SEQ ID NO: 582761 - protein, 15 aa, Homo sapiens
  CDR3 for alpha chain variable domain of TCR clone 291381 (TRAV3, TRAJ22)
CAVRDRCGSARQLTF

SEQ ID NO: 582762 - protein, 13 aa, Homo sapiens
  CDR3 for beta chain variable domain of TCR clone 291381 (TRBV20-1, TRBJ1-1)
CSARVGGNTEAFF

SEQ ID NO: 582763 - protein, 14 aa, Homo sapiens
  CDR3 for alpha chain variable domain of TCR clone 291382 (TRAV12-2, TRAJ45)
CAVNIGGGADGLTF

SEQ ID NO: 582764 - protein, 12 aa, Homo sapiens
  CDR3 for beta chain variable domain of TCR clone 291382 (TRBV24-1, TRBJ1-1)
CATSDSDRGAFF

SEQ ID NO: 582765 - protein, 14 aa, Homo sapiens
  CDR3 for alpha chain variable domain of TCR clone 291383 (TRAV1-2, TRAJ16)
CAVNRFSDGQKLLF

SEQ ID NO: 582766 - protein, 14 aa, Homo sapiens
  CDR3 for beta chain variable domain of TCR clone 291383 (TRBV4-1, TRBJ2-2)
CVSSQAVNTGELFF

SEQ ID NO: 582767 - protein, 15 aa, Homo sapiens
  CDR3 for alpha chain variable domain of TCR clone 291384 (TRAV17, TRAJ56)
CATDATTGANSKLTF

SEQ ID NO: 582768 - protein, 12 aa, Homo sapiens
  CDR3 for beta chain variable domain of TCR clone 291384 (TRBV7-8, TRBJ2-7)
CASSLGDREQYF

SEQ ID NO: 582769 - protein, 12 aa, Homo sapiens
  CDR3 for alpha chain variable domain of TCR clone 291385 (TRAV12-3, TRAJ17)
CAMTLKGNKLTF

SEQ ID NO: 582770 - protein, 15 aa, Homo sapiens
  CDR3 for beta chain variable domain of TCR clone 291385 (TRBV12-4, TRBJ2-5)
CASSPPTGLQETQSF

SEQ ID NO: 582771 - protein, 14 aa, Homo sapiens
  CDR3 for alpha chain variable domain of TCR clone 291386 (TRAV12-2, TRAJ44)
CAVNPAGTASKLTF

SEQ ID NO: 582772 - protein, 12 aa, Homo sapiens
  CDR3 for beta chain variable domain of TCR clone 291386 (TRBV7-9, TRBJ1-5)
CASSPQGQPQHF

SEQ ID NO: 582773 - protein, 13 aa, Homo sapiens
  CDR3 for alpha chain variable domain of TCR clone 291387 (TRAV2, TRAJ47)
CAVDREFGNKLVF

SEQ ID NO: 582774 - protein, 17 aa, Homo sapiens
  CDR3 for beta chain variable domain of TCR clone 291387 (TRBV15, TRBJ1-5)
CATSRVKGIYSNQPQHF

SEQ ID NO: 582775 - protein, 12 aa, Homo sapiens
  CDR3 for alpha chain variable domain of TCR clone 291388 (TRAV13-1, TRAJ21)
CAAKEGFNKFYF

SEQ ID NO: 582776 - protein, 14 aa, Homo sapiens
  CDR3 for beta chain variable domain of TCR clone 291388 (TRBV18, TRBJ2-7)
CASSPRRGAYEQYF

SEQ ID NO: 582777 - protein, 15 aa, Homo sapiens
  CDR3 for alpha chain variable domain of TCR clone 291389 (TRAV6, TRAJ37)
CALGGGSGNTGTLIF

SEQ ID NO: 582778 - protein, 14 aa, Homo sapiens
  CDR3 for beta chain variable domain of TCR clone 291389 (TRBV5-7, TRBJ2-5)
CASSVWTVQETQYF

SEQ ID NO: 582779 - protein, 14 aa, Homo sapiens
  CDR3 for alpha chain variable domain of TCR clone 291390 (TRAV9-2, TRAJ39)
CALYIYNAGNMLTF

SEQ ID NO: 582780 - protein, 15 aa, Homo sapiens
  CDR3 for beta chain variable domain of TCR clone 291390 (TRBV5-1, TRBJ2-7)
FASSLDLTSSYEQYF

SEQ ID NO: 582781 - protein, 15 aa, Homo sapiens
  CDR3 for alpha chain variable domain of TCR clone 291391 (TRAV8-6, TRAJ38)
CAVSSNAGNNRKLIW

SEQ ID NO: 582782 - protein, 14 aa, Homo sapiens
  CDR3 for beta chain variable domain of TCR clone 291391 (TRBV14, TRBJ2-1)
CASSQVQGRGEQFC

SEQ ID NO: 582783 - protein, 16 aa, Homo sapiens
  CDR3 for alpha chain variable domain of TCR clone 291392 (TRAV30, TRAJ24)
CGTEIVDADSWGKFQF

SEQ ID NO: 582784 - protein, 16 aa, Homo sapiens
  CDR3 for beta chain variable domain of TCR clone 291392 (TRBV7-6, TRBJ1-6)
CASSSLPAGEYSHLHF

SEQ ID NO: 582785 - protein, 12 aa, Homo sapiens
  CDR3 for alpha chain variable domain of TCR clone 291393 (TRAV12-3, TRAJ17)
CAMTLTGNKLTF

SEQ ID NO: 582786 - protein, 17 aa, Homo sapiens
  CDR3 for beta chain variable domain of TCR clone 291393 (TRBV2, TRBJ2-1)
CASSRNSLLAGGDEQFF

SEQ ID NO: 582787 - protein, 10 aa, Homo sapiens
  CDR3 for alpha chain variable domain of TCR clone 291394 (TRAV12-2, TRAJ48)
CAVTSEKLTF

SEQ ID NO: 582788 - protein, 17 aa, Homo sapiens
  CDR3 for beta chain variable domain of TCR clone 291394 (TRBV11-1, TRBJ2-7)
CANSLTGSFGLGYEQYF

SEQ ID NO: 582789 - protein, 14 aa, Homo sapiens
  CDR3 for alpha chain variable domain of TCR clone 291395 (TRAV8-3, TRAJ4)
CAVGAAGGYNKLIF

SEQ ID NO: 582790 - protein, 18 aa, Homo sapiens
  CDR3 for beta chain variable domain of TCR clone 291395 (TRBV11-2, TRBJ2-3)
CASSLGGTSRGAPNTQYF

SEQ ID NO: 582791 - protein, 16 aa, Homo sapiens
  CDR3 for alpha chain variable domain of TCR clone 291396 (TRAV30, TRAJ24)
CGTEIVGSDSWGKFQF

SEQ ID NO: 582792 - protein, 19 aa, Homo sapiens
  CDR3 for beta chain variable domain of TCR clone 291396 (TRBV7-2, TRBJ2-3)
CASSFLSRNWGGGTDTQYF

SEQ ID NO: 582793 - protein, 13 aa, Homo sapiens
  CDR3 for alpha chain variable domain of TCR clone 291397 (TRAV13-1, TRAJ32)
QVTDGGVTNKLIF

SEQ ID NO: 582794 - protein, 15 aa, Homo sapiens
  CDR3 for beta chain variable domain of TCR clone 291397 (TRBV20-1, TRBJ1-2)
CSAIRTGAFNYGYTF

SEQ ID NO: 582795 - protein, 14 aa, Homo sapiens
  CDR3 for alpha chain variable domain of TCR clone 291398 (TRAV8-1, TRAJ5)
CAVGTDTGRRALTF

SEQ ID NO: 582796 - protein, 14 aa, Homo sapiens
  CDR3 for beta chain variable domain of TCR clone 291398 (TRBV5-5, TRBJ1-2)
CASSLDPYNYGYAV

SEQ ID NO: 582797 - protein, 14 aa, Homo sapiens
  CDR3 for alpha chain variable domain of TCR clone 291399 (TRAV8-4, TRAJ5)
CAVSTDTGRRALTL

SEQ ID NO: 582798 - protein, 14 aa, Homo sapiens
  CDR3 for beta chain variable domain of TCR clone 291399 (TRBV5-1, TRBJ2-2)
CASSLGGGSGELFF

SEQ ID NO: 582799 - protein, 13 aa, Homo sapiens
  CDR3 for alpha chain variable domain of TCR clone 291400 (TRAV8-4, TRAJ49)
CAVRTLTGNQFYF

SEQ ID NO: 582800 - protein, 16 aa, Homo sapiens
  CDR3 for beta chain variable domain of TCR clone 291400 (TRBV5-7, TRBJ2-5)
CVSTLAPAGGRETQYF

SEQ ID NO: 582801 - protein, 14 aa, Homo sapiens
  CDR3 for alpha chain variable domain of TCR clone 291401 (TRAV12-3, TRAJ10)
SHLPLTGGGNKLTF

SEQ ID NO: 582802 - protein, 16 aa, Homo sapiens
  CDR3 for beta chain variable domain of TCR clone 291401 (TRBV28, TRBJ2-1)
CASSSPEDPRDNEQFF

SEQ ID NO: 582803 - protein, 11 aa, Homo sapiens
  CDR3 for alpha chain variable domain of TCR clone 291402 (TRAV1-1, TRAJ23)
CAVRQGGKLIF

SEQ ID NO: 582804 - protein, 16 aa, Homo sapiens
  CDR3 for beta chain variable domain of TCR clone 291402 (TRBV7-3, TRBJ2-1)
CASSVTGRRSYNEQFF

SEQ ID NO: 582805 - protein, 11 aa, Homo sapiens
  CDR3 for alpha chain variable domain of TCR clone 291403 (TRAV3, TRAJ49)
CAPITDNQFYF

SEQ ID NO: 582806 - protein, 16 aa, Homo sapiens
  CDR3 for beta chain variable domain of TCR clone 291403 (TRBV5-1, TRBJ2-3)
CASSVFPMSSTDTQYF

SEQ ID NO: 582807 - protein, 16 aa, Homo sapiens
  CDR3 for alpha chain variable domain of TCR clone 291404 (TRAV27, TRAJ56)
CAGVSRKDGAKSKLTF

SEQ ID NO: 582808 - protein, 11 aa, Homo sapiens
  CDR3 for beta chain variable domain of TCR clone 291404 (TRBV10-3, TRBJ2-7)
CAISEGLEQYF

SEQ ID NO: 582809 - protein, 14 aa, Homo sapiens
  CDR3 for alpha chain variable domain of TCR clone 291405 (TRAV1-2, TRAJ8)
CAVREDTGFQQLVF

SEQ ID NO: 582810 - protein, 13 aa, Homo sapiens
  CDR3 for beta chain variable domain of TCR clone 291405 (TRBV7-3, TRBJ2-1)
CASSLDSYNEQFF

SEQ ID NO: 582811 - protein, 14 aa, Homo sapiens
  CDR3 for alpha chain variable domain of TCR clone 291406 (TRAV30, TRAJ39)
CGTEWRNAGNMLTF

SEQ ID NO: 582812 - protein, 14 aa, Homo sapiens
  CDR3 for beta chain variable domain of TCR clone 291406 (TRBV6-1, TRBJ2-7)
CASSDIGRPYEQYF

SEQ ID NO: 582813 - protein, 11 aa, Homo sapiens
  CDR3 for alpha chain variable domain of TCR clone 291407 (TRAV12-3, TRAJ27)
CAMANAGKSTF

SEQ ID NO: 582814 - protein, 13 aa, Homo sapiens
  CDR3 for beta chain variable domain of TCR clone 291407 (TRBV20-1, TRBJ1-1)
CSARVGGNAEASF

SEQ ID NO: 582815 - protein, 12 aa, Homo sapiens
  CDR3 for alpha chain variable domain of TCR clone 291408 (TRAV13-1, TRAJ21)
CAAKGGFNKFYF

SEQ ID NO: 582816 - protein, 13 aa, Homo sapiens
  CDR3 for beta chain variable domain of TCR clone 291408 (TRBV7-3, TRBJ1-1)
CASSQDWGAEAFF

SEQ ID NO: 582817 - protein, 13 aa, Homo sapiens
  CDR3 for alpha chain variable domain of TCR clone 291409 (TRAV35, TRAJ42)
CAGFPGSQGYLIF

SEQ ID NO: 582818 - protein, 14 aa, Homo sapiens
  CDR3 for beta chain variable domain of TCR clone 291409 (TRBV19, TRBJ2-1)
CASPTFVLSGEQFF

SEQ ID NO: 582819 - protein, 12 aa, Homo sapiens
  CDR3 for alpha chain variable domain of TCR clone 291410 (TRAV12-3, TRAJ17)
SAMTLTGNKLTF

SEQ ID NO: 582820 - protein, 15 aa, Homo sapiens
  CDR3 for beta chain variable domain of TCR clone 291410 (TRBV20-1, TRBJ2-7)
CGARDRVSGMDEQYF

SEQ ID NO: 582821 - protein, 16 aa, Homo sapiens
  CDR3 for alpha chain variable domain of TCR clone 291411 (TRAV3, TRAJ37)
CAVRPHGSGNTGKLIF

SEQ ID NO: 582822 - protein, 14 aa, Homo sapiens
  CDR3 for beta chain variable domain of TCR clone 291411 (TRBV11-2, TRBJ2-5)
CASSRTGGIETQYF

SEQ ID NO: 582823 - protein, 17 aa, Homo sapiens
  CDR3 for alpha chain variable domain of TCR clone 291412 (TRAV3, TRAJ6)
CAVRDGPRAGGSYIPTF

SEQ ID NO: 582824 - protein, 14 aa, Homo sapiens
  CDR3 for beta chain variable domain of TCR clone 291412 (TRBV7-2, TRBJ2-7)
CASSSKPSFYEQYF

SEQ ID NO: 582825 - protein, 14 aa, Homo sapiens
  CDR3 for alpha chain variable domain of TCR clone 291413 (TRAV1-2, TRAJ16)
CAVNRFSDGQKLLF

SEQ ID NO: 582826 - protein, 16 aa, Homo sapiens
  CDR3 for beta chain variable domain of TCR clone 291413 (TRBV7-3, TRBJ2-2)
CASSYPPGDETGELFF

SEQ ID NO: 582827 - protein, 14 aa, Homo sapiens
  CDR3 for alpha chain variable domain of TCR clone 291414 (TRAV12-3, TRAJ10)
SHLPLTGGGNKLTF

SEQ ID NO: 582828 - protein, 16 aa, Homo sapiens
  CDR3 for beta chain variable domain of TCR clone 291414 (TRBV27, TRBJ2-7)
CASSSERRDSAYEQYF

SEQ ID NO: 582829 - protein, 14 aa, Homo sapiens
  CDR3 for alpha chain variable domain of TCR clone 291415 (TRAV1-2, TRAJ8)
CAVREDTGFQKLVF

SEQ ID NO: 582830 - protein, 15 aa, Homo sapiens
  CDR3 for beta chain variable domain of TCR clone 291415 (TRBV7-2, TRBJ1-2)
CASSLVAGGDYGYTF

SEQ ID NO: 582831 - protein, 12 aa, Homo sapiens
  CDR3 for alpha chain variable domain of TCR clone 291416 (TRAV8-3, TRAJ26)
CAGDNYGQNFVF

SEQ ID NO: 582832 - protein, 18 aa, Homo sapiens
  CDR3 for beta chain variable domain of TCR clone 291416 (TRBV12-4, TRBJ2-2)
CGSSLVAGTRGRTGELFF

SEQ ID NO: 582833 - protein, 15 aa, Homo sapiens
  CDR3 for alpha chain variable domain of TCR clone 291417 (TRAV8-3, TRAJ6)
CAVGSAGGGSYIPTF

SEQ ID NO: 582834 - protein, 13 aa, Homo sapiens
  CDR3 for beta chain variable domain of TCR clone 291417 (TRBV12-4, TRBJ1-2)
CASSLRQGKGDTF

SEQ ID NO: 582835 - protein, 15 aa, Homo sapiens
  CDR3 for alpha chain variable domain of TCR clone 291418 (TRAV26-1, TRAJ56)
CIVRVDNGANSKLTF

SEQ ID NO: 582836 - protein, 15 aa, Homo sapiens
  CDR3 for beta chain variable domain of TCR clone 291418 (TRBV20-1, TRBJ2-7)
GSARDPTEVGHEQYF

SEQ ID NO: 582837 - protein, 14 aa, Homo sapiens
  CDR3 for alpha chain variable domain of TCR clone 291419 (TRAV34, TRAJ22)
CGADTSGSARQLTF

SEQ ID NO: 582838 - protein, 16 aa, Homo sapiens
  CDR3 for beta chain variable domain of TCR clone 291419 (TRBV2, TRBJ2-3)
CPHRGAPRRWTDTQYF

SEQ ID NO: 582839 - protein, 14 aa, Homo sapiens
  CDR3 for alpha chain variable domain of TCR clone 291420 (TRAV29/DV5, TRAJ54)
CAASRSPGAPKLLF

SEQ ID NO: 582840 - protein, 13 aa, Homo sapiens
  CDR3 for beta chain variable domain of TCR clone 291420 (TRBV7-2, TRBJ2-5)
CASSQTSVETQYF

SEQ ID NO: 582841 - protein, 14 aa, Homo sapiens
  CDR3 for alpha chain variable domain of TCR clone 291421 (TRAV12-2, TRAJ17)
CAVNIKAAGNKLTV

SEQ ID NO: 582842 - protein, 13 aa, Homo sapiens
  CDR3 for beta chain variable domain of TCR clone 291421 (TRBV7-8, TRBJ2-7)
CASSLTGGREQYF

SEQ ID NO: 582843 - protein, 11 aa, Homo sapiens
  CDR3 for alpha chain variable domain of TCR clone 291422 (TRAV21, TRAJ37)
CCEGNTGKLIF

SEQ ID NO: 582844 - protein, 14 aa, Homo sapiens
  CDR3 for beta chain variable domain of TCR clone 291422 (TRBV19, TRBJ2-1)
CASPTFVLSGEQFF

SEQ ID NO: 582845 - protein, 14 aa, Homo sapiens
  CDR3 for alpha chain variable domain of TCR clone 291423 (TRAV8-4, TRAJ15)
CAVTIREAGTALIF

SEQ ID NO: 582846 - protein, 13 aa, Homo sapiens
  CDR3 for beta chain variable domain of TCR clone 291423 (TRBV10-3, TRBJ2-7)
CASSEKGGYEQYF

SEQ ID NO: 582847 - protein, 13 aa, Homo sapiens
  CDR3 for alpha chain variable domain of TCR clone 291424 (TRAV12-1, TRAJ16)
CVVKGPDGQKLLF

SEQ ID NO: 582848 - protein, 15 aa, Homo sapiens
  CDR3 for beta chain variable domain of TCR clone 291424 (TRBV6-3, TRBJ2-7)
RASSSPGTVFYEQYF

SEQ ID NO: 582849 - protein, 11 aa, Homo sapiens
  CDR3 for alpha chain variable domain of TCR clone 291425 (TRAV26-1, TRAJ37)
CIVRVGRKLIL

SEQ ID NO: 582850 - protein, 14 aa, Homo sapiens
  CDR3 for beta chain variable domain of TCR clone 291425 (TRBV2, TRBJ1-5)
CASSEAAGGQPQHF

SEQ ID NO: 582851 - protein, 16 aa, Homo sapiens
  CDR3 for alpha chain variable domain of TCR clone 291426 (TRAV30, TRAJ24)
CGTEIVDADSWGKFQF

SEQ ID NO: 582852 - protein, 16 aa, Homo sapiens
  CDR3 for beta chain variable domain of TCR clone 291426 (TRBV7-2, TRBJ2-1)
CASSLVGGPELNEQFF

SEQ ID NO: 582853 - protein, 12 aa, Homo sapiens
  CDR3 for alpha chain variable domain of TCR clone 291427 (TRAV12-3, TRAJ17)
CAMTLTGNTLTF

SEQ ID NO: 582854 - protein, 15 aa, Homo sapiens
  CDR3 for beta chain variable domain of TCR clone 291427 (TRBV7-9, TRBJ2-2)
CASGPLDTFPGELFF

SEQ ID NO: 582855 - protein, 20 aa, Homo sapiens
  CDR3 for alpha chain variable domain of TCR clone 291428 (TRAV21, )
CAVRQDAGSNHIQNPDPAVY

SEQ ID NO: 582856 - protein, 16 aa, Homo sapiens
  CDR3 for beta chain variable domain of TCR clone 291428 (TRBV4-2, TRBJ1-1)
CASRPLDGGGDTEAFF

SEQ ID NO: 582857 - protein, 14 aa, Homo sapiens
  CDR3 for alpha chain variable domain of TCR clone 291429 (TRAV16, TRAJ33)
FALSAMDSNYQLIW

SEQ ID NO: 582858 - protein, 15 aa, Homo sapiens
  CDR3 for beta chain variable domain of TCR clone 291429 (TRBV28, TRBJ2-7)
CSSSLEAYPIYEQYF

SEQ ID NO: 582859 - protein, 15 aa, Homo sapiens
  CDR3 for alpha chain variable domain of TCR clone 291430 (TRAV27, TRAJ38)
CAARRNAGNNRKRVL

SEQ ID NO: 582860 - protein, 13 aa, Homo sapiens
  CDR3 for beta chain variable domain of TCR clone 291430 (TRBV12-5, TRBJ2-3)
CASGDRQSDTQYF

SEQ ID NO: 582861 - protein, 14 aa, Homo sapiens
  CDR3 for alpha chain variable domain of TCR clone 291431 (TRAV12-2, TRAJ24)
CAVTPADSWGKLQF

SEQ ID NO: 582862 - protein, 14 aa, Homo sapiens
  CDR3 for beta chain variable domain of TCR clone 291431 (TRBV2, TRBJ2-7)
CASSLTSGGYEQYF

SEQ ID NO: 582863 - protein, 12 aa, Homo sapiens
  CDR3 for alpha chain variable domain of TCR clone 291432 (TRAV12-3, TRAJ17)
CAMTPTGNKLTF

SEQ ID NO: 582864 - protein, 16 aa, Homo sapiens
  CDR3 for beta chain variable domain of TCR clone 291432 (TRBV19, TRBJ2-2)
CASRSPGTGATGELFF

SEQ ID NO: 582865 - protein, 14 aa, Homo sapiens
  CDR3 for alpha chain variable domain of TCR clone 291433 (TRAV12-3, TRAJ10)
SHLPLTGGGNKLTF

SEQ ID NO: 582866 - protein, 13 aa, Homo sapiens
  CDR3 for beta chain variable domain of TCR clone 291433 (TRBV20-1, TRBJ2-1)
TSGALPPGSEQFF

SEQ ID NO: 582867 - protein, 15 aa, Homo sapiens
  CDR3 for alpha chain variable domain of TCR clone 291434 (TRAV9-2, TRAJ50)
CALSGMKTSYDKVIF

SEQ ID NO: 582868 - protein, 15 aa, Homo sapiens
  CDR3 for beta chain variable domain of TCR clone 291434 (TRBV28, TRBJ2-7)
CASSPGGRGFYEQYF

SEQ ID NO: 582869 - protein, 13 aa, Homo sapiens
  CDR3 for alpha chain variable domain of TCR clone 291435 (TRAV12-3, TRAJ49)
CAMIPTGWAQFYF

SEQ ID NO: 582870 - protein, 14 aa, Homo sapiens
  CDR3 for beta chain variable domain of TCR clone 291435 (TRBV5-1, TRBJ1-5)
CASSLAGWHQPQHF

SEQ ID NO: 582871 - protein, 16 aa, Homo sapiens
  CDR3 for alpha chain variable domain of TCR clone 291436 (TRAV12-1, TRAJ22)
CVVNLFLDRSARQLTF

SEQ ID NO: 582872 - protein, 16 aa, Homo sapiens
  CDR3 for beta chain variable domain of TCR clone 291436 (TRBV19, TRBJ2-2)
CASRSPGTGATGELFF

SEQ ID NO: 582873 - protein, 14 aa, Homo sapiens
  CDR3 for alpha chain variable domain of TCR clone 291437 (TRAV23/DV6, TRAJ11)
CAASLASGYSTLTL

SEQ ID NO: 582874 - protein, 13 aa, Homo sapiens
  CDR3 for beta chain variable domain of TCR clone 291437 (TRBV4-1, TRBJ2-5)
CASSLTRGETQYF

SEQ ID NO: 582875 - protein, 18 aa, Homo sapiens
  CDR3 for alpha chain variable domain of TCR clone 291438 (TRAV21, TRAJ52)
CAVRPSPAGGTSYGKLTF

SEQ ID NO: 582876 - protein, 16 aa, Homo sapiens
  CDR3 for beta chain variable domain of TCR clone 291438 (TRBV6-5, TRBJ2-1)
CASSETLAGHYNEQFF

SEQ ID NO: 582877 - protein, 12 aa, Homo sapiens
  CDR3 for alpha chain variable domain of TCR clone 291439 (TRAV3, TRAJ20)
CAVRDGDYKLSF

SEQ ID NO: 582878 - protein, 15 aa, Homo sapiens
  CDR3 for beta chain variable domain of TCR clone 291439 (TRBV4-1, TRBJ2-5)
CASSQWDLYQETQYF

SEQ ID NO: 582879 - protein, 14 aa, Homo sapiens
  CDR3 for alpha chain variable domain of TCR clone 291440 (TRAV1-2, TRAJ8)
CAVREDTGFQKLVF

SEQ ID NO: 582880 - protein, 15 aa, Homo sapiens
  CDR3 for beta chain variable domain of TCR clone 291440 (TRBV6-5, TRBJ2-2)
CASRPGQTNTGELFF

SEQ ID NO: 582881 - protein, 15 aa, Homo sapiens
  CDR3 for alpha chain variable domain of TCR clone 291441 (TRAV23/DV6, TRAJ18)
CAARYRGSTLGRPYF

SEQ ID NO: 582882 - protein, 13 aa, Homo sapiens
  CDR3 for beta chain variable domain of TCR clone 291441 (TRBV7-2, TRBJ2-7)
CASRSPSGSEQYF

SEQ ID NO: 582883 - protein, 16 aa, Homo sapiens
  CDR3 for alpha chain variable domain of TCR clone 291442 (TRAV30, TRAJ24)
CGTEIVDADSWGKLQF

SEQ ID NO: 582884 - protein, 16 aa, Homo sapiens
  CDR3 for beta chain variable domain of TCR clone 291442 (TRBV12-5, TRBJ2-5)
CASGPRTSGNQETQYF

SEQ ID NO: 582885 - protein, 15 aa, Homo sapiens
  CDR3 for alpha chain variable domain of TCR clone 291443 (TRAV17, TRAJ13)
CATDAGSGGYQKVTF

SEQ ID NO: 582886 - protein, 17 aa, Homo sapiens
  CDR3 for beta chain variable domain of TCR clone 291443 (TRBV11-2, TRBJ2-1)
CASSLYPPGVEYNEKFF

SEQ ID NO: 582887 - protein, 15 aa, Homo sapiens
  CDR3 for alpha chain variable domain of TCR clone 291444 (TRAV13-1, TRAJ32)
CAASIYGGATNKLIF

SEQ ID NO: 582888 - protein, 15 aa, Homo sapiens
  CDR3 for beta chain variable domain of TCR clone 291444 (TRBV12-4, TRBJ2-5)
CASSPPTGLQETQYF

SEQ ID NO: 582889 - protein, 21 aa, Homo sapiens
  CDR3 for alpha chain variable domain of TCR clone 291445 (TRAV13-1, TRAJ37)
CAASSLGSSNTQTNLWARDNF

SEQ ID NO: 582890 - protein, 12 aa, Homo sapiens
  CDR3 for beta chain variable domain of TCR clone 291445 (TRBV6-1, TRBJ2-5)
CASSEGRETQYF

SEQ ID NO: 582891 - protein, 14 aa, Homo sapiens
  CDR3 for alpha chain variable domain of TCR clone 291446 (TRAV1-2, TRAJ16)
CAVNRFSDGQKLLF

SEQ ID NO: 582892 - protein, 21 aa, Homo sapiens
  CDR3 for beta chain variable domain of TCR clone 291446 (TRBV11-2, TRBJ2-1)
CASSLGLAGGAVLRARDTAHR

SEQ ID NO: 582893 - protein, 12 aa, Homo sapiens
  CDR3 for alpha chain variable domain of TCR clone 291447 (TRAV13-1, TRAJ21)
CAAKEGFNKFYF

SEQ ID NO: 582894 - protein, 15 aa, Homo sapiens
  CDR3 for beta chain variable domain of TCR clone 291447 (TRBV19, TRBJ2-1)
CASSKGRGPYNEQFF

SEQ ID NO: 582895 - protein, 14 aa, Homo sapiens
  CDR3 for alpha chain variable domain of TCR clone 291448 (TRAV8-3, TRAJ26)
CALAPGNYGQNFVF

SEQ ID NO: 582896 - protein, 16 aa, Homo sapiens
  CDR3 for beta chain variable domain of TCR clone 291448 (TRBV3-1, TRBJ2-1)
CASSQVGGTSYNEQFF

SEQ ID NO: 582897 - protein, 16 aa, Homo sapiens
  CDR3 for alpha chain variable domain of TCR clone 291449 (TRAV26-1, TRAJ28)
CIVRARYSGWELPTHF

SEQ ID NO: 582898 - protein, 10 aa, Homo sapiens
  CDR3 for beta chain variable domain of TCR clone 291449 (TRBV12-4, TRBJ2-7)
CASLTFEQYF

SEQ ID NO: 582899 - protein, 14 aa, Homo sapiens
  CDR3 for alpha chain variable domain of TCR clone 291450 (TRAV1-2, TRAJ12)
CAASGTDSSYKLIF

SEQ ID NO: 582900 - protein, 15 aa, Homo sapiens
  CDR3 for beta chain variable domain of TCR clone 291450 (TRBV2, TRBJ2-4)
CASSGTNLAKNIQYF

SEQ ID NO: 582901 - protein, 16 aa, Homo sapiens
  CDR3 for alpha chain variable domain of TCR clone 291451 (TRAV26-1, TRAJ53)
CIVRVAMGGSNYKLTF

SEQ ID NO: 582902 - protein, 13 aa, Homo sapiens
  CDR3 for beta chain variable domain of TCR clone 291451 (TRBV11-2, TRBJ2-1)
CASSLRLTNEQFF

SEQ ID NO: 582903 - protein, 12 aa, Homo sapiens
  CDR3 for alpha chain variable domain of TCR clone 291452 (TRAV3, TRAJ43)
CAVRDPNNAMRF

SEQ ID NO: 582904 - protein, 13 aa, Homo sapiens
  CDR3 for beta chain variable domain of TCR clone 291452 (TRBV19, TRBJ1-2)
CASSVPGQDGYTF

SEQ ID NO: 582905 - protein, 21 aa, Homo sapiens
  CDR3 for alpha chain variable domain of TCR clone 291453 (TRAV12-1, TRAJ32)
SSVIQPPTSINYGGATNKLIF

SEQ ID NO: 582906 - protein, 15 aa, Homo sapiens
  CDR3 for beta chain variable domain of TCR clone 291453 (TRBV7-9, TRBJ2-2)
CASGPLDTFPGELFF

SEQ ID NO: 582907 - protein, 12 aa, Homo sapiens
  CDR3 for alpha chain variable domain of TCR clone 291454 (TRAV29/DV5, TRAJ49)
CAATDTGNQFYF

SEQ ID NO: 582908 - protein, 14 aa, Homo sapiens
  CDR3 for beta chain variable domain of TCR clone 291454 (TRBV6-3, TRBJ2-2)
CASTYTPDTGELFF

SEQ ID NO: 582909 - protein, 12 aa, Homo sapiens
  CDR3 for alpha chain variable domain of TCR clone 291455 (TRAV2, TRAJ9)
CAVGAGGFKTIL

SEQ ID NO: 582910 - protein, 16 aa, Homo sapiens
  CDR3 for beta chain variable domain of TCR clone 291455 (TRBV13, TRBJ2-2)
CASSTRTGEHTGELFF

SEQ ID NO: 582911 - protein, 16 aa, Homo sapiens
  CDR3 for alpha chain variable domain of TCR clone 291456 (TRAV3, TRAJ10)
CAVRDMRAGGGNKLTF

SEQ ID NO: 582912 - protein, 14 aa, Homo sapiens
  CDR3 for beta chain variable domain of TCR clone 291456 (TRBV4-1, TRBJ2-5)
CASSQERGRETQYF

SEQ ID NO: 582913 - protein, 13 aa, Homo sapiens
  CDR3 for alpha chain variable domain of TCR clone 291457 (TRAV21, TRAJ27)
CAALNTNAGKSTF

SEQ ID NO: 582914 - protein, 16 aa, Homo sapiens
  CDR3 for beta chain variable domain of TCR clone 291457 (TRBV12-4, TRBJ2-3)
CASSFPSNTNTDTQCF

SEQ ID NO: 582915 - protein, 17 aa, Homo sapiens
  CDR3 for alpha chain variable domain of TCR clone 291458 (TRAV4, TRAJ18)
CLVGERSVGSTLGRLYF

SEQ ID NO: 582916 - protein, 13 aa, Homo sapiens
  CDR3 for beta chain variable domain of TCR clone 291458 (TRBV19, TRBJ2-2)
CASKVSAAGELFF

SEQ ID NO: 582917 - protein, 12 aa, Homo sapiens
  CDR3 for alpha chain variable domain of TCR clone 291459 (TRAV13-1, TRAJ27)
CAAHTNAGKSTF

SEQ ID NO: 582918 - protein, 14 aa, Homo sapiens
  CDR3 for beta chain variable domain of TCR clone 291459 (TRBV19, TRBJ2-2)
CASSGQGIPGELFF

SEQ ID NO: 582919 - protein, 14 aa, Homo sapiens
  CDR3 for alpha chain variable domain of TCR clone 291460 (TRAV8-1, TRAJ5)
CAVSMDTGRRALTF

SEQ ID NO: 582920 - protein, 13 aa, Homo sapiens
  CDR3 for beta chain variable domain of TCR clone 291460 (TRBV12-5, TRBJ2-3)
CASGDRQSDTQYF

SEQ ID NO: 582921 - protein, 18 aa, Homo sapiens
  CDR3 for alpha chain variable domain of TCR clone 291461 (TRAV21, TRAJ52)
CAVRPSPAGGTSYGKLPL

SEQ ID NO: 582922 - protein, 14 aa, Homo sapiens
  CDR3 for beta chain variable domain of TCR clone 291461 (TRBV7-9, TRBJ2-1)
CASSLVVGADEQFF

SEQ ID NO: 582923 - protein, 12 aa, Homo sapiens
  CDR3 for alpha chain variable domain of TCR clone 291462 (TRAV12-3, TRAJ40)
CAMSTGTSKYIF

SEQ ID NO: 582924 - protein, 15 aa, Homo sapiens
  CDR3 for beta chain variable domain of TCR clone 291462 (TRBV11-2, TRBJ2-3)
CASSPRSGGTDTQYF

SEQ ID NO: 582925 - protein, 15 aa, Homo sapiens
  CDR3 for alpha chain variable domain of TCR clone 291463 (TRAV8-4, TRAJ12)
CAVRDRVGSSYKLIF

SEQ ID NO: 582926 - protein, 15 aa, Homo sapiens
  CDR3 for beta chain variable domain of TCR clone 291463 (TRBV11-3, TRBJ2-1)
CASSLAGQTYNEQFF

SEQ ID NO: 582927 - protein, 13 aa, Homo sapiens
  CDR3 for alpha chain variable domain of TCR clone 291464 (TRAV8-3, TRAJ47)
CAVSMEYENKLVF

SEQ ID NO: 582928 - protein, 14 aa, Homo sapiens
  CDR3 for beta chain variable domain of TCR clone 291464 (TRBV2, TRBJ1-5)
CASSGTGFNQPQHF

SEQ ID NO: 582929 - protein, 14 aa, Homo sapiens
  CDR3 for alpha chain variable domain of TCR clone 291465 (TRAV12-2, TRAJ13)
CAVKKTGGYQKVTF

SEQ ID NO: 582930 - protein, 15 aa, Homo sapiens
  CDR3 for beta chain variable domain of TCR clone 291465 (TRBV15, TRBJ2-3)
CATSRDPRGTDTQYF

SEQ ID NO: 582931 - protein, 14 aa, Homo sapiens
  CDR3 for alpha chain variable domain of TCR clone 291466 (TRAV12-2, TRAJ13)
CAVKKTGGYQKVTF

SEQ ID NO: 582932 - protein, 12 aa, Homo sapiens
  CDR3 for beta chain variable domain of TCR clone 291466 (TRBV19, TRBJ1-1)
CASSTTGIEAFF

SEQ ID NO: 582933 - protein, 18 aa, Homo sapiens
  CDR3 for alpha chain variable domain of TCR clone 291467 (TRAV1-2, TRAJ18)
CAVRDMGDRGSTLGRLYF

SEQ ID NO: 582934 - protein, 12 aa, Homo sapiens
  CDR3 for beta chain variable domain of TCR clone 291467 (TRBV29-1, TRBJ2-3)
CSVTGGADTQYF

SEQ ID NO: 582935 - protein, 23 aa, Homo sapiens
  CDR3 for alpha chain variable domain of TCR clone 291468 (TRAV27, TRAJ40)
TAAQPGDTGLCLSLTSGTYKYIF

SEQ ID NO: 582936 - protein, 12 aa, Homo sapiens
  CDR3 for beta chain variable domain of TCR clone 291468 (TRBV18, TRBJ2-3)
CQLNQNTDTQYF

SEQ ID NO: 582937 - protein, 15 aa, Homo sapiens
  CDR3 for alpha chain variable domain of TCR clone 291469 (TRAV1-2, TRAJ24)
CAVRGSTDNWGKFQV

SEQ ID NO: 582938 - protein, 16 aa, Homo sapiens
  CDR3 for beta chain variable domain of TCR clone 291469 (TRBV20-1, TRBJ2-1)
CSAATQGPVSYNEQFF

SEQ ID NO: 582939 - protein, 15 aa, Homo sapiens
  CDR3 for alpha chain variable domain of TCR clone 291470 (TRAV26-1, TRAJ38)
CIVRAEGCNNRKLIW

SEQ ID NO: 582940 - protein, 14 aa, Homo sapiens
  CDR3 for beta chain variable domain of TCR clone 291470 (TRBV7-6, TRBJ2-5)
CASSSPSGSETQYF

SEQ ID NO: 582941 - protein, 14 aa, Homo sapiens
  CDR3 for alpha chain variable domain of TCR clone 291471 (TRAV1-2, TRAJ8)
CAVREDTGFQKLVF

SEQ ID NO: 582942 - protein, 15 aa, Homo sapiens
  CDR3 for beta chain variable domain of TCR clone 291471 (TRBV20-1, TRBJ2-7)
YSARDRVSGMDEQYF

SEQ ID NO: 582943 - protein, 15 aa, Homo sapiens
  CDR3 for alpha chain variable domain of TCR clone 291472 (TRAV25, TRAJ52)
CAGTSGGTSYGKLTF

SEQ ID NO: 582944 - protein, 16 aa, Homo sapiens
  CDR3 for beta chain variable domain of TCR clone 291472 (TRBV15, TRBJ1-2)
CATSRGRRTGGGGYTF

SEQ ID NO: 582945 - protein, 19 aa, Homo sapiens
  CDR3 for alpha chain variable domain of TCR clone 291473 (TRAV26-1, TRAJ44)
CCVLLHRQNCTGTASKLTF

SEQ ID NO: 582946 - protein, 15 aa, Homo sapiens
  CDR3 for beta chain variable domain of TCR clone 291473 (TRBV7-6, TRBJ2-1)
CASSSLAGEGNEQFF

SEQ ID NO: 582947 - protein, 12 aa, Homo sapiens
  CDR3 for alpha chain variable domain of TCR clone 291474 (TRAV16, TRAJ26)
CALRSYGQNFVF

SEQ ID NO: 582948 - protein, 13 aa, Homo sapiens
  CDR3 for beta chain variable domain of TCR clone 291474 (TRBV12-4, TRBJ1-1)
CASSPGTGFEDFF

SEQ ID NO: 582949 - protein, 12 aa, Homo sapiens
  CDR3 for alpha chain variable domain of TCR clone 291475 (TRAV12-3, TRAJ17)
CAMTLTGNKLTF

SEQ ID NO: 582950 - protein, 17 aa, Homo sapiens
  CDR3 for beta chain variable domain of TCR clone 291475 (TRBV20-1, TRBJ2-7)
CSATRAGGGAGVEEQYF

SEQ ID NO: 582951 - protein, 13 aa, Homo sapiens
  CDR3 for alpha chain variable domain of TCR clone 291476 (TRAV12-3, TRAJ5)
CAMIYTGRRALTF

SEQ ID NO: 582952 - protein, 18 aa, Homo sapiens
  CDR3 for beta chain variable domain of TCR clone 291476 (TRBV12-4, TRBJ2-2)
CASSRSGGAIPNTGELFF

SEQ ID NO: 582953 - protein, 16 aa, Homo sapiens
  CDR3 for alpha chain variable domain of TCR clone 291477 (TRAV3, TRAJ37)
CAVRGKGSGNTGKIIF

SEQ ID NO: 582954 - protein, 15 aa, Homo sapiens
  CDR3 for beta chain variable domain of TCR clone 291477 (TRBV7-9, TRBJ2-2)
CASGPLDTFPGELFF

SEQ ID NO: 582955 - protein, 14 aa, Homo sapiens
  CDR3 for alpha chain variable domain of TCR clone 291478 (TRAV23/DV6, TRAJ8)
CAASKATGFQKLVF

SEQ ID NO: 582956 - protein, 15 aa, Homo sapiens
  CDR3 for beta chain variable domain of TCR clone 291478 (TRBV28, TRBJ2-3)
CASSPDRQGPNTQYF

SEQ ID NO: 582957 - protein, 12 aa, Homo sapiens
  CDR3 for alpha chain variable domain of TCR clone 291479 (TRAV21, TRAJ13)
PGPSGGYQKVTF

SEQ ID NO: 582958 - protein, 15 aa, Homo sapiens
  CDR3 for beta chain variable domain of TCR clone 291479 (TRBV7-9, TRBJ1-6)
CGSSSPGRGNSPLHF

SEQ ID NO: 582959 - protein, 14 aa, Homo sapiens
  CDR3 for alpha chain variable domain of TCR clone 291480 (TRAV1-2, TRAJ8)
CAVREDTGFQKLVF

SEQ ID NO: 582960 - protein, 20 aa, Homo sapiens
  CDR3 for beta chain variable domain of TCR clone 291480 (TRBV5-4, TRBJ2-5)
CASSLAGGGERDPVLRARHA

SEQ ID NO: 582961 - protein, 13 aa, Homo sapiens
  CDR3 for alpha chain variable domain of TCR clone 291481 (TRAV8-3, TRAJ28)
CAVGAVGSYQLTF

SEQ ID NO: 582962 - protein, 16 aa, Homo sapiens
  CDR3 for beta chain variable domain of TCR clone 291481 (TRBV7-9, TRBJ1-2)
CASSPGGGAINYGYTF

SEQ ID NO: 582963 - protein, 14 aa, Homo sapiens
  CDR3 for alpha chain variable domain of TCR clone 291482 (TRAV8-6, TRAJ49)
CAVSDPGTGNQFDF

SEQ ID NO: 582964 - protein, 16 aa, Homo sapiens
  CDR3 for beta chain variable domain of TCR clone 291482 (TRBV24-1, TRBJ2-1)
CATSGVAGANYNEQFF

SEQ ID NO: 582965 - protein, 14 aa, Homo sapiens
  CDR3 for alpha chain variable domain of TCR clone 291483 (TRAV3, TRAJ8)
CAVSRNTGFQKLVF

SEQ ID NO: 582966 - protein, 13 aa, Homo sapiens
  CDR3 for beta chain variable domain of TCR clone 291483 (TRBV19, TRBJ2-7)
CASSIRSSYEQYF

SEQ ID NO: 582967 - protein, 14 aa, Homo sapiens
  CDR3 for alpha chain variable domain of TCR clone 291484 (TRAV20, TRAJ42)
CAVQGWRSQGNLIF

SEQ ID NO: 582968 - protein, 15 aa, Homo sapiens
  CDR3 for beta chain variable domain of TCR clone 291484 (TRBV4-1, TRBJ2-7)
CASSQNTGRLYEQYF

SEQ ID NO: 582969 - protein, 20 aa, Homo sapiens
  CDR3 for alpha chain variable domain of TCR clone 291485 (TRAV2, TRAJ9)
CAVGAGGLKLSLEEEQDYLL

SEQ ID NO: 582970 - protein, 14 aa, Homo sapiens
  CDR3 for beta chain variable domain of TCR clone 291485 (TRBV6-1, TRBJ1-3)
CASVQGGGGNTIYF

SEQ ID NO: 582971 - protein, 11 aa, Homo sapiens
  CDR3 for alpha chain variable domain of TCR clone 291486 (TRAV2, TRAJ13)
CASGGYQKVIF

SEQ ID NO: 582972 - protein, 16 aa, Homo sapiens
  CDR3 for beta chain variable domain of TCR clone 291486 (TRBV19, TRBJ2-1)
CASSKAGPSSYNEQFF

SEQ ID NO: 582973 - protein, 13 aa, Homo sapiens
  CDR3 for alpha chain variable domain of TCR clone 291487 (TRAV12-1, TRAJ16)
CVVNGPDGQKLLF

SEQ ID NO: 582974 - protein, 12 aa, Homo sapiens
  CDR3 for beta chain variable domain of TCR clone 291487 (TRBV19, TRBJ2-1)
CASSPGTGRQFF

SEQ ID NO: 582975 - protein, 14 aa, Homo sapiens
  CDR3 for alpha chain variable domain of TCR clone 291488 (TRAV1-2, TRAJ16)
CSVNRFSDGQKLLF

SEQ ID NO: 582976 - protein, 13 aa, Homo sapiens
  CDR3 for beta chain variable domain of TCR clone 291488 (TRBV20-1, TRBJ1-1)
CSARGGGNTEAFF

SEQ ID NO: 582977 - protein, 14 aa, Homo sapiens
  CDR3 for alpha chain variable domain of TCR clone 291489 (TRAV8-2, TRAJ37)
CVVSISGNTGKLIF

SEQ ID NO: 582978 - protein, 13 aa, Homo sapiens
  CDR3 for beta chain variable domain of TCR clone 291489 (TRBV27, TRBJ2-1)
CASRTLGVGEQFF

SEQ ID NO: 582979 - protein, 14 aa, Homo sapiens
  CDR3 for alpha chain variable domain of TCR clone 291490 (TRAV16, TRAJ32)
CALKSGGATNKLIF

SEQ ID NO: 582980 - protein, 13 aa, Homo sapiens
  CDR3 for beta chain variable domain of TCR clone 291490 (TRBV15, TRBJ1-6)
CATSGGLSSPLHF

SEQ ID NO: 582981 - protein, 21 aa, Homo sapiens
  CDR3 for alpha chain variable domain of TCR clone 291491 (TRAV26-1, )
CIADNAGNHHIQNHDPAVYQL

SEQ ID NO: 582982 - protein, 12 aa, Homo sapiens
  CDR3 for beta chain variable domain of TCR clone 291491 (TRBV11-2, TRBJ2-2)
CASSLGGGELFF

SEQ ID NO: 582983 - protein, 14 aa, Homo sapiens
  CDR3 for alpha chain variable domain of TCR clone 291492 (TRAV8-4, TRAJ13)
CAVTLSGGYRKVTF

SEQ ID NO: 582984 - protein, 15 aa, Homo sapiens
  CDR3 for beta chain variable domain of TCR clone 291492 (TRBV10-2, TRBJ2-6)
CASSEQGTGANVLTF

SEQ ID NO: 582985 - protein, 16 aa, Homo sapiens
  CDR3 for alpha chain variable domain of TCR clone 291493 (TRAV30, TRAJ24)
CGTELVDADSWGRFQF

SEQ ID NO: 582986 - protein, 16 aa, Homo sapiens
  CDR3 for beta chain variable domain of TCR clone 291493 (TRBV2, TRBJ1-3)
CASSGGAGRSGNTIYF

SEQ ID NO: 582987 - protein, 10 aa, Homo sapiens
  CDR3 for alpha chain variable domain of TCR clone 291494 (TRAV12-1, TRAJ43)
CVVHNNDMRF

SEQ ID NO: 582988 - protein, 13 aa, Homo sapiens
  CDR3 for beta chain variable domain of TCR clone 291494 (TRBV24-1, TRBJ2-1)
CATSRGARNEQFF

SEQ ID NO: 582989 - protein, 16 aa, Homo sapiens
  CDR3 for alpha chain variable domain of TCR clone 291495 (TRAV23/DV6, TRAJ9)
CAASIGGNTGGFKTIF

SEQ ID NO: 582990 - protein, 14 aa, Homo sapiens
  CDR3 for beta chain variable domain of TCR clone 291495 (TRBV7-3, TRBJ1-1)
CASSPTGGVSEAFF

SEQ ID NO: 582991 - protein, 16 aa, Homo sapiens
  CDR3 for alpha chain variable domain of TCR clone 291496 (TRAV30, TRAJ24)
CGTEIVDADSWGKFQF

SEQ ID NO: 582992 - protein, 12 aa, Homo sapiens
  CDR3 for beta chain variable domain of TCR clone 291496 (TRBV28, TRBJ2-5)
CASSGQTETQYF

SEQ ID NO: 582993 - protein, 13 aa, Homo sapiens
  CDR3 for alpha chain variable domain of TCR clone 291497 (TRAV13-1, TRAJ20)
YAARVSNDYKLSF

SEQ ID NO: 582994 - protein, 16 aa, Homo sapiens
  CDR3 for beta chain variable domain of TCR clone 291497 (TRBV11-1, TRBJ1-1)
CATNPRDRAFNTEAFF

SEQ ID NO: 582995 - protein, 15 aa, Homo sapiens
  CDR3 for alpha chain variable domain of TCR clone 291498 (TRAV3, TRAJ11)
CAVRDRGPGYSTLTF

SEQ ID NO: 582996 - protein, 13 aa, Homo sapiens
  CDR3 for beta chain variable domain of TCR clone 291498 (TRBV7-9, TRBJ1-2)
CASSLKQNYGYTF

SEQ ID NO: 582997 - protein, 14 aa, Homo sapiens
  CDR3 for alpha chain variable domain of TCR clone 291499 (TRAV17, TRAJ57)
CATDPQGGSEKRVF

SEQ ID NO: 582998 - protein, 13 aa, Homo sapiens
  CDR3 for beta chain variable domain of TCR clone 291499 (TRBV19, TRBJ1-2)
CASSQGQVYGYTF

SEQ ID NO: 582999 - protein, 14 aa, Homo sapiens
  CDR3 for alpha chain variable domain of TCR clone 291500 (TRAV12-3, TRAJ28)
CAMWSGAGSYQLTF

SEQ ID NO: 583000 - protein, 14 aa, Homo sapiens
  CDR3 for beta chain variable domain of TCR clone 291500 (TRBV19, TRBJ1-5)
CAGSLSGGSQPQHF

SEQ ID NO: 583001 - protein, 10 aa, Homo sapiens
  CDR3 for alpha chain variable domain of TCR clone 291501 (TRAV21, TRAJ31)
CAVDNARLMF

SEQ ID NO: 583002 - protein, 13 aa, Homo sapiens
  CDR3 for beta chain variable domain of TCR clone 291501 (TRBV4-1, TRBJ1-1)
CASSRKMNTEAFC

SEQ ID NO: 583003 - protein, 13 aa, Homo sapiens
  CDR3 for alpha chain variable domain of TCR clone 291502 (TRAV17, TRAJ9)
CATDGTVGFKTIF

SEQ ID NO: 583004 - protein, 17 aa, Homo sapiens
  CDR3 for beta chain variable domain of TCR clone 291502 (TRBV6-5, TRBJ2-7)
CASSYSFWGQGSYEQYF

SEQ ID NO: 583005 - protein, 15 aa, Homo sapiens
  CDR3 for alpha chain variable domain of TCR clone 291503 (TRAV25, TRAJ52)
CAGRPGGTSYGKLTF

SEQ ID NO: 583006 - protein, 17 aa, Homo sapiens
  CDR3 for beta chain variable domain of TCR clone 291503 (TRBV7-8, TRBJ2-6)
CASSAGTGGPGANGLTF

SEQ ID NO: 583007 - protein, 15 aa, Homo sapiens
  CDR3 for alpha chain variable domain of TCR clone 291504 (TRAV23/DV6, TRAJ12)
CAAIDLGAMDSSYKL

SEQ ID NO: 583008 - protein, 15 aa, Homo sapiens
  CDR3 for beta chain variable domain of TCR clone 291504 (TRBV28, TRBJ1-3)
CASSMGWASGNTIYF

SEQ ID NO: 583009 - protein, 12 aa, Homo sapiens
  CDR3 for alpha chain variable domain of TCR clone 291505 (TRAV12-2, TRAJ30)
CAVRNRDDKIIF

SEQ ID NO: 583010 - protein, 14 aa, Homo sapiens
  CDR3 for beta chain variable domain of TCR clone 291505 (TRBV7-2, TRBJ2-7)
CASRSQGAAYEQYF

SEQ ID NO: 583011 - protein, 13 aa, Homo sapiens
  CDR3 for alpha chain variable domain of TCR clone 291506 (TRAV12-3, TRAJ29)
CAMTLSGNTPLVF

SEQ ID NO: 583012 - protein, 15 aa, Homo sapiens
  CDR3 for beta chain variable domain of TCR clone 291506 (TRBV5-1, TRBJ2-7)
CASSLNGGPAREQYF

SEQ ID NO: 583013 - protein, 11 aa, Homo sapiens
  CDR3 for alpha chain variable domain of TCR clone 291507 (TRAV3, TRAJ21)
CAVGNFNKFYF

SEQ ID NO: 583014 - protein, 12 aa, Homo sapiens
  CDR3 for beta chain variable domain of TCR clone 291507 (TRBV18, TRBJ2-5)
CASSPSKETQYF

SEQ ID NO: 583015 - protein, 14 aa, Homo sapiens
  CDR3 for alpha chain variable domain of TCR clone 291508 (TRAV20, TRAJ56)
CAVQFGGANSKLTF

SEQ ID NO: 583016 - protein, 16 aa, Homo sapiens
  CDR3 for beta chain variable domain of TCR clone 291508 (TRBV13, TRBJ2-2)
CASSPRTGEHTGELFF

SEQ ID NO: 583017 - protein, 15 aa, Homo sapiens
  CDR3 for alpha chain variable domain of TCR clone 291509 (TRAV27, TRAJ38)
CAARRNAGNNRKLIW

SEQ ID NO: 583018 - protein, 13 aa, Homo sapiens
  CDR3 for beta chain variable domain of TCR clone 291509 (TRBV7-9, TRBJ2-7)
CASSFAGAYEQYF

SEQ ID NO: 583019 - protein, 13 aa, Homo sapiens
  CDR3 for alpha chain variable domain of TCR clone 291510 (TRAV13-1, TRAJ21)
CAARIYNFNKLYF

SEQ ID NO: 583020 - protein, 14 aa, Homo sapiens
  CDR3 for beta chain variable domain of TCR clone 291510 (TRBV5-4, TRBJ2-2)
CASRLDGGTGELFF

SEQ ID NO: 583021 - protein, 15 aa, Homo sapiens
  CDR3 for alpha chain variable domain of TCR clone 291511 (TRAV4, TRAJ10)
CLVGDEEGGGNKLTF

SEQ ID NO: 583022 - protein, 17 aa, Homo sapiens
  CDR3 for beta chain variable domain of TCR clone 291511 (TRBV19, TRBJ2-6)
CASSTGQVFSGANGLTF

SEQ ID NO: 583023 - protein, 14 aa, Homo sapiens
  CDR3 for alpha chain variable domain of TCR clone 291512 (TRAV1-1, TRAJ23)
CAVSIYNQGGKLIF

SEQ ID NO: 583024 - protein, 15 aa, Homo sapiens
  CDR3 for beta chain variable domain of TCR clone 291512 (TRBV4-3, TRBJ2-7)
CASSQGGRGIYEQYF

SEQ ID NO: 583025 - protein, 12 aa, Homo sapiens
  CDR3 for alpha chain variable domain of TCR clone 291513 (TRAV12-2, TRAJ10)
WGVTGGGHKLTF

SEQ ID NO: 583026 - protein, 15 aa, Homo sapiens
  CDR3 for beta chain variable domain of TCR clone 291513 (TRBV6-3, TRBJ2-7)
CASSSPGTVFYEQYF

SEQ ID NO: 583027 - protein, 14 aa, Homo sapiens
  CDR3 for alpha chain variable domain of TCR clone 291514 (TRAV21, TRAJ40)
CAVSPQLGTYKYIF

SEQ ID NO: 583028 - protein, 15 aa, Homo sapiens
  CDR3 for beta chain variable domain of TCR clone 291514 (TRBV7-6, TRBJ1-1)
CASSPGAGPNTEAFF

SEQ ID NO: 583029 - protein, 14 aa, Homo sapiens
  CDR3 for alpha chain variable domain of TCR clone 291515 (TRAV8-4, TRAJ48)
CAVSETFGNEKLTF

SEQ ID NO: 583030 - protein, 12 aa, Homo sapiens
  CDR3 for beta chain variable domain of TCR clone 291515 (TRBV7-2, TRBJ1-2)
CASRDSIYGYTF

SEQ ID NO: 583031 - protein, 14 aa, Homo sapiens
  CDR3 for alpha chain variable domain of TCR clone 291516 (TRAV12-1, TRAJ22)
CVAFSSGSASQLTF

SEQ ID NO: 583032 - protein, 21 aa, Homo sapiens
  CDR3 for beta chain variable domain of TCR clone 291516 (TRBV15, TRBJ2-1)
AWGTQPCTCVPPAEVDTARFF

SEQ ID NO: 583033 - protein, 15 aa, Homo sapiens
  CDR3 for alpha chain variable domain of TCR clone 291517 (TRAV35, TRAJ50)
CAGQLRKTSYDKVIF

SEQ ID NO: 583034 - protein, 12 aa, Homo sapiens
  CDR3 for beta chain variable domain of TCR clone 291517 (TRBV5-1, TRBJ2-5)
CASSLCLETQYF

SEQ ID NO: 583035 - protein, 13 aa, Homo sapiens
  CDR3 for alpha chain variable domain of TCR clone 291518 (TRAV13-1, TRAJ10)
CAATAGGGNKLTL

SEQ ID NO: 583036 - protein, 14 aa, Homo sapiens
  CDR3 for beta chain variable domain of TCR clone 291518 (TRBV12-4, TRBJ2-7)
CASSPGGLKYEQYF

SEQ ID NO: 583037 - protein, 12 aa, Homo sapiens
  CDR3 for alpha chain variable domain of TCR clone 291519 (TRAV8-3, TRAJ43)
RAVGAGNNDMRF

SEQ ID NO: 583038 - protein, 14 aa, Homo sapiens
  CDR3 for beta chain variable domain of TCR clone 291519 (TRBV4-2, TRBJ1-5)
CASSRDRGNQPQHF

SEQ ID NO: 583039 - protein, 17 aa, Homo sapiens
  CDR3 for alpha chain variable domain of TCR clone 291520 (TRAV38-1, TRAJ45)
CAFMRSHSGGGADGLTL

SEQ ID NO: 583040 - protein, 15 aa, Homo sapiens
  CDR3 for beta chain variable domain of TCR clone 291520 (TRBV7-2, TRBJ2-3)
CASSLVVRGPDTQYF

SEQ ID NO: 583041 - protein, 16 aa, Homo sapiens
  CDR3 for alpha chain variable domain of TCR clone 291521 (TRAV3, TRAJ37)
CAVRPHGSGNTGKLLF

SEQ ID NO: 583042 - protein, 13 aa, Homo sapiens
  CDR3 for beta chain variable domain of TCR clone 291521 (TRBV2, TRBJ1-5)
CASGTGGYQPQHF

SEQ ID NO: 583043 - protein, 14 aa, Homo sapiens
  CDR3 for alpha chain variable domain of TCR clone 291522 (TRAV20, TRAJ20)
CAVRRGYNDYKLNF

SEQ ID NO: 583044 - protein, 20 aa, Homo sapiens
  CDR3 for beta chain variable domain of TCR clone 291522 (TRBV28, TRBJ2-1)
CASTPIGRSPGLAGGNEQFF

SEQ ID NO: 583045 - protein, 14 aa, Homo sapiens
  CDR3 for alpha chain variable domain of TCR clone 291523 (TRAV27, TRAJ22)
CAGLPSGSARQLTF

SEQ ID NO: 583046 - protein, 15 aa, Homo sapiens
  CDR3 for beta chain variable domain of TCR clone 291523 (TRBV7-2, TRBJ2-7)
CASSTPGLTRGEQYF

SEQ ID NO: 583047 - protein, 11 aa, Homo sapiens
  CDR3 for alpha chain variable domain of TCR clone 291524 (TRAV17, TRAJ31)
CATSNNARLMF

SEQ ID NO: 583048 - protein, 15 aa, Homo sapiens
  CDR3 for beta chain variable domain of TCR clone 291524 (TRBV7-9, TRBJ1-5)
CASSQGHQPNQPQHF

SEQ ID NO: 583049 - protein, 14 aa, Homo sapiens
  CDR3 for alpha chain variable domain of TCR clone 291525 (TRAV12-2, TRAJ45)
CAVYSGGGADGLTF

SEQ ID NO: 583050 - protein, 12 aa, Homo sapiens
  CDR3 for beta chain variable domain of TCR clone 291525 (TRBV7-8, TRBJ2-7)
CASSLGDREQYF

SEQ ID NO: 583051 - protein, 17 aa, Homo sapiens
  CDR3 for alpha chain variable domain of TCR clone 291526 (TRAV12-1, TRAJ36)
CVVIKRSNWGKQPLLWD

SEQ ID NO: 583052 - protein, 14 aa, Homo sapiens
  CDR3 for beta chain variable domain of TCR clone 291526 (TRBV6-1, TRBJ1-3)
CASVQGRGGNTIYF

SEQ ID NO: 583053 - protein, 14 aa, Homo sapiens
  CDR3 for alpha chain variable domain of TCR clone 291527 (TRAV17, TRAJ32)
CATDPGGATNKLIF

SEQ ID NO: 583054 - protein, 12 aa, Homo sapiens
  CDR3 for beta chain variable domain of TCR clone 291527 (TRBV28, TRBJ2-3)
CASSLYRDTQDF

SEQ ID NO: 583055 - protein, 18 aa, Homo sapiens
  CDR3 for alpha chain variable domain of TCR clone 291528 (TRAV21, TRAJ52)
CAVRPSPAGGTSYGKLTF

SEQ ID NO: 583056 - protein, 17 aa, Homo sapiens
  CDR3 for beta chain variable domain of TCR clone 291528 (TRBV13, TRBJ2-3)
CAGILSRVAGGRNTQYF

SEQ ID NO: 583057 - protein, 16 aa, Homo sapiens
  CDR3 for alpha chain variable domain of TCR clone 291529 (TRAV30, TRAJ24)
CGTETVDADSWGKFQF

SEQ ID NO: 583058 - protein, 13 aa, Homo sapiens
  CDR3 for beta chain variable domain of TCR clone 291529 (TRBV7-9, TRBJ1-2)
CASSLKQNYGYTF

SEQ ID NO: 583059 - protein, 14 aa, Homo sapiens
  CDR3 for alpha chain variable domain of TCR clone 291530 (TRAV1-2, TRAJ8)
CAVREDTGFQKLVF

SEQ ID NO: 583060 - protein, 14 aa, Homo sapiens
  CDR3 for beta chain variable domain of TCR clone 291530 (TRBV11-2, TRBJ2-3)
CASSRRARTDTQYF

SEQ ID NO: 583061 - protein, 13 aa, Homo sapiens
  CDR3 for alpha chain variable domain of TCR clone 291531 (TRAV29/DV5, TRAJ31)
CAASRNNNARLMF

SEQ ID NO: 583062 - protein, 10 aa, Homo sapiens
  CDR3 for beta chain variable domain of TCR clone 291531 (TRBV2, TRBJ2-7)
CASSLQGPIF

SEQ ID NO: 583063 - protein, 13 aa, Homo sapiens
  CDR3 for alpha chain variable domain of TCR clone 291532 (TRAV2, TRAJ40)
CAVVTSGTYKYIF

SEQ ID NO: 583064 - protein, 10 aa, Homo sapiens
  CDR3 for beta chain variable domain of TCR clone 291532 (TRBV15, TRBJ2-7)
AETGGYEQYF

SEQ ID NO: 583065 - protein, 16 aa, Homo sapiens
  CDR3 for alpha chain variable domain of TCR clone 291533 (TRAV3, TRAJ13)
CAVRDFEYGGYQKVTF

SEQ ID NO: 583066 - protein, 16 aa, Homo sapiens
  CDR3 for beta chain variable domain of TCR clone 291533 (TRBV27, TRBJ2-5)
CASSYGPGGQKETQYF

SEQ ID NO: 583067 - protein, 16 aa, Homo sapiens
  CDR3 for alpha chain variable domain of TCR clone 291534 (TRAV12-2, TRAJ52)
CRLANAGGTSYGKLTF

SEQ ID NO: 583068 - protein, 14 aa, Homo sapiens
  CDR3 for beta chain variable domain of TCR clone 291534 (TRBV7-6, TRBJ2-3)
CASSLGTVTETQYF

SEQ ID NO: 583069 - protein, 17 aa, Homo sapiens
  CDR3 for alpha chain variable domain of TCR clone 291535 (TRAV26-1, TRAJ27)
CIVSTPWINTNAGKSTF

SEQ ID NO: 583070 - protein, 13 aa, Homo sapiens
  CDR3 for beta chain variable domain of TCR clone 291535 (TRBV7-3, TRBJ1-1)
CASSQDWGAEAFF

SEQ ID NO: 583071 - protein, 13 aa, Homo sapiens
  CDR3 for alpha chain variable domain of TCR clone 291536 (TRAV2, TRAJ40)
CAVVTSGTYKYIF

SEQ ID NO: 583072 - protein, 13 aa, Homo sapiens
  CDR3 for beta chain variable domain of TCR clone 291536 (TRBV24-1, TRBJ2-2)
CATTATRTGELFF

SEQ ID NO: 583073 - protein, 14 aa, Homo sapiens
  CDR3 for alpha chain variable domain of TCR clone 291537 (TRAV16, TRAJ3)
CALSQYSSASKIIF

SEQ ID NO: 583074 - protein, 14 aa, Homo sapiens
  CDR3 for beta chain variable domain of TCR clone 291537 (TRBV6-3, TRBJ2-1)
CASLHSAYYNEQFF

SEQ ID NO: 583075 - protein, 13 aa, Homo sapiens
  CDR3 for alpha chain variable domain of TCR clone 291538 (TRAV2, TRAJ29)
CGAGNSGNTPLVF

SEQ ID NO: 583076 - protein, 16 aa, Homo sapiens
  CDR3 for beta chain variable domain of TCR clone 291538 (TRBV7-9, TRBJ1-2)
CASSPGGGAINYGYTF

SEQ ID NO: 583077 - protein, 12 aa, Homo sapiens
  CDR3 for alpha chain variable domain of TCR clone 291539 (TRAV26-1, TRAJ36)
CIVRVRADNLFF

SEQ ID NO: 583078 - protein, 15 aa, Homo sapiens
  CDR3 for beta chain variable domain of TCR clone 291539 (TRBV7-2, TRBJ1-2)
YASSLVSGGDYGYTF

SEQ ID NO: 583079 - protein, 11 aa, Homo sapiens
  CDR3 for alpha chain variable domain of TCR clone 291540 (TRAV21, TRAJ34)
CAVPNTDKLIF

SEQ ID NO: 583080 - protein, 13 aa, Homo sapiens
  CDR3 for beta chain variable domain of TCR clone 291540 (TRBV20-1, TRBJ1-6)
CSAPLGVGSPLHF

SEQ ID NO: 583081 - protein, 12 aa, Homo sapiens
  CDR3 for alpha chain variable domain of TCR clone 291541 (TRAV12-1, TRAJ40)
CVVYSGTYKYTF

SEQ ID NO: 583082 - protein, 15 aa, Homo sapiens
  CDR3 for beta chain variable domain of TCR clone 291541 (TRBV7-9, TRBJ1-5)
CASSQGHQPNQPQHF

SEQ ID NO: 583083 - protein, 15 aa, Homo sapiens
  CDR3 for alpha chain variable domain of TCR clone 291542 (TRAV23/DV6, TRAJ38)
CAARSNAGNNRKLTW

SEQ ID NO: 583084 - protein, 16 aa, Homo sapiens
  CDR3 for beta chain variable domain of TCR clone 291542 (TRBV10-2, TRBJ1-5)
CASSRDRDYSNQPQHF

SEQ ID NO: 583085 - protein, 13 aa, Homo sapiens
  CDR3 for alpha chain variable domain of TCR clone 291543 (TRAV16, TRAJ5)
CALTNTGRRALTF

SEQ ID NO: 583086 - protein, 15 aa, Homo sapiens
  CDR3 for beta chain variable domain of TCR clone 291543 (TRBV11-2, TRBJ2-4)
CASSRPGTGINIQYV

SEQ ID NO: 583087 - protein, 13 aa, Homo sapiens
  CDR3 for alpha chain variable domain of TCR clone 291544 (TRAV17, TRAJ9)
CATDGTGGFKTIF

SEQ ID NO: 583088 - protein, 13 aa, Homo sapiens
  CDR3 for beta chain variable domain of TCR clone 291544 (TRBV7-9, TRBJ1-2)
CASSLKQNYGYTF

SEQ ID NO: 583089 - protein, 12 aa, Homo sapiens
  CDR3 for alpha chain variable domain of TCR clone 291545 (TRAV21, TRAJ11)
CAATSGYSTLTF

SEQ ID NO: 583090 - protein, 13 aa, Homo sapiens
  CDR3 for beta chain variable domain of TCR clone 291545 (TRBV12-4, TRBJ2-7)
CASSLSGVYEQYF

SEQ ID NO: 583091 - protein, 12 aa, Homo sapiens
  CDR3 for alpha chain variable domain of TCR clone 291546 (TRAV22, TRAJ22)
CAVVGSARQPTF

SEQ ID NO: 583092 - protein, 14 aa, Homo sapiens
  CDR3 for beta chain variable domain of TCR clone 291546 (TRBV7-2, TRBJ1-2)
CASSQTGSTYGYTF

SEQ ID NO: 583093 - protein, 17 aa, Homo sapiens
  CDR3 for alpha chain variable domain of TCR clone 291547 (TRAV3, TRAJ38)
CAVRDCLNARNNRKLIW

SEQ ID NO: 583094 - protein, 14 aa, Homo sapiens
  CDR3 for beta chain variable domain of TCR clone 291547 (TRBV5-5, TRBJ1-5)
CASSGQGVDQPQHF

SEQ ID NO: 583095 - protein, 11 aa, Homo sapiens
  CDR3 for alpha chain variable domain of TCR clone 291548 (TRAV12-1, TRAJ34)
CVVNKGRELIF

SEQ ID NO: 583096 - protein, 12 aa, Homo sapiens
  CDR3 for beta chain variable domain of TCR clone 291548 (TRBV11-2, TRBJ1-2)
CASSREGDGYTF

SEQ ID NO: 583097 - protein, 16 aa, Homo sapiens
  CDR3 for alpha chain variable domain of TCR clone 291549 (TRAV17, TRAJ53)
CATDALSGGSNYKLTF

SEQ ID NO: 583098 - protein, 15 aa, Homo sapiens
  CDR3 for beta chain variable domain of TCR clone 291549 (TRBV11-2, TRBJ2-2)
CASSSDRVNAGELFF

SEQ ID NO: 583099 - protein, 12 aa, Homo sapiens
  CDR3 for alpha chain variable domain of TCR clone 291550 (TRAV2, TRAJ33)
CAFMDSNYQLIW

SEQ ID NO: 583100 - protein, 14 aa, Homo sapiens
  CDR3 for beta chain variable domain of TCR clone 291550 (TRBV7-6, TRBJ2-3)
CASSLGTVTDTQYF

SEQ ID NO: 583101 - protein, 14 aa, Homo sapiens
  CDR3 for alpha chain variable domain of TCR clone 291551 (TRAV21, TRAJ38)
CAVMGAGNNRKLIW

SEQ ID NO: 583102 - protein, 13 aa, Homo sapiens
  CDR3 for beta chain variable domain of TCR clone 291551 (TRBV7-3, TRBJ2-5)
CASGIGFFEAQYF

SEQ ID NO: 583103 - protein, 15 aa, Homo sapiens
  CDR3 for alpha chain variable domain of TCR clone 291552 (TRAV35, TRAJ58)
CAWRRQETSGSRLTF

SEQ ID NO: 583104 - protein, 11 aa, Homo sapiens
  CDR3 for beta chain variable domain of TCR clone 291552 (TRBV11-2, TRBJ1-1)
CASSINTEAFF

SEQ ID NO: 583105 - protein, 16 aa, Homo sapiens
  CDR3 for alpha chain variable domain of TCR clone 291553 (TRAV30, TRAJ24)
CGTEIVDADSWGKFQF

SEQ ID NO: 583106 - protein, 10 aa, Homo sapiens
  CDR3 for beta chain variable domain of TCR clone 291553 (TRBV11-2, TRBJ2-1)
PGVEYNEQFF

SEQ ID NO: 583107 - protein, 11 aa, Homo sapiens
  CDR3 for alpha chain variable domain of TCR clone 291554 (TRAV3, TRAJ21)
CAVGNLIKFYF

SEQ ID NO: 583108 - protein, 16 aa, Homo sapiens
  CDR3 for beta chain variable domain of TCR clone 291554 (TRBV19, TRBJ2-1)
CASSKAGPSSYNEQFF

SEQ ID NO: 583109 - protein, 16 aa, Homo sapiens
  CDR3 for alpha chain variable domain of TCR clone 291555 (TRAV12-3, TRAJ53)
SAMSPGSGGSNYKLTF

SEQ ID NO: 583110 - protein, 13 aa, Homo sapiens
  CDR3 for beta chain variable domain of TCR clone 291555 (TRBV10-3, TRBJ2-7)
CASKLAVNYEQYF

SEQ ID NO: 583111 - protein, 16 aa, Homo sapiens
  CDR3 for alpha chain variable domain of TCR clone 291556 (TRAV27, TRAJ45)
CPPRGRRGGGADGLNF

SEQ ID NO: 583112 - protein, 16 aa, Homo sapiens
  CDR3 for beta chain variable domain of TCR clone 291556 (TRBV7-2, TRBJ1-3)
CASSRLEASSGNTIYF

SEQ ID NO: 583113 - protein, 14 aa, Homo sapiens
  CDR3 for alpha chain variable domain of TCR clone 291557 (TRAV1-2, TRAJ8)
CAVREDTGSQKLVF

SEQ ID NO: 583114 - protein, 16 aa, Homo sapiens
  CDR3 for beta chain variable domain of TCR clone 291557 (TRBV4-1, TRBJ2-3)
CASSQSTSGAEDTQYF

SEQ ID NO: 583115 - protein, 13 aa, Homo sapiens
  CDR3 for alpha chain variable domain of TCR clone 291558 (TRAV12-3, TRAJ9)
CAMRNTGGFKTSF

SEQ ID NO: 583116 - protein, 12 aa, Homo sapiens
  CDR3 for beta chain variable domain of TCR clone 291558 (TRBV5-4, TRBJ2-5)
CASSSTRETQYF

SEQ ID NO: 583117 - protein, 15 aa, Homo sapiens
  CDR3 for alpha chain variable domain of TCR clone 291559 (TRAV20, TRAJ58)
CAVQDLETSGSRLTF

SEQ ID NO: 583118 - protein, 12 aa, Homo sapiens
  CDR3 for beta chain variable domain of TCR clone 291559 (TRBV9, TRBJ2-2)
CANSARTGELFF

SEQ ID NO: 583119 - protein, 14 aa, Homo sapiens
  CDR3 for alpha chain variable domain of TCR clone 291560 (TRAV13-1, TRAJ15)
CAASTNQAGTAMLF

SEQ ID NO: 583120 - protein, 11 aa, Homo sapiens
  CDR3 for beta chain variable domain of TCR clone 291560 (TRBV7-2, TRBJ2-1)
CASSLRDNEFF

SEQ ID NO: 583121 - protein, 21 aa, Homo sapiens
  CDR3 for alpha chain variable domain of TCR clone 291561 (TRAV12-3, TRAJ6)
CATHQEEATYLHLEEEPALLF

SEQ ID NO: 583122 - protein, 14 aa, Homo sapiens
  CDR3 for beta chain variable domain of TCR clone 291561 (TRBV19, TRBJ1-1)
CASSRDRDATEAFF

SEQ ID NO: 583123 - protein, 10 aa, Homo sapiens
  CDR3 for alpha chain variable domain of TCR clone 291562 (TRAV12-3, TRAJ49)
CAMNDDRFYL

SEQ ID NO: 583124 - protein, 13 aa, Homo sapiens
  CDR3 for beta chain variable domain of TCR clone 291562 (TRBV12-4, TRBJ1-1)
CASSPGTGFEAFF

SEQ ID NO: 583125 - protein, 15 aa, Homo sapiens
  CDR3 for alpha chain variable domain of TCR clone 291563 (TRAV8-3, TRAJ45)
CASSYSGGGAGGLTF

SEQ ID NO: 583126 - protein, 12 aa, Homo sapiens
  CDR3 for beta chain variable domain of TCR clone 291563 (TRBV10-3, TRBJ2-7)
CLQLAVNYGQYF

SEQ ID NO: 583127 - protein, 15 aa, Homo sapiens
  CDR3 for alpha chain variable domain of TCR clone 291564 (TRAV12-3, TRAJ11)
CAMSEENSGYSTRTF

SEQ ID NO: 583128 - protein, 16 aa, Homo sapiens
  CDR3 for beta chain variable domain of TCR clone 291564 (TRBV5-1, TRBJ2-7)
CASSLEGLAGLYEQYF

SEQ ID NO: 583129 - protein, 14 aa, Homo sapiens
  CDR3 for alpha chain variable domain of TCR clone 291565 (TRAV13-2, TRAJ11)
CRESSYSGYSTLTF

SEQ ID NO: 583130 - protein, 15 aa, Homo sapiens
  CDR3 for beta chain variable domain of TCR clone 291565 (TRBV20-1, TRBJ2-3)
CSATGTSGFTDTQYF

SEQ ID NO: 583131 - protein, 16 aa, Homo sapiens
  CDR3 for alpha chain variable domain of TCR clone 291566 (TRAV30, TRAJ24)
CGTEIVDADSWGKFQF

SEQ ID NO: 583132 - protein, 16 aa, Homo sapiens
  CDR3 for beta chain variable domain of TCR clone 291566 (TRBV6-3, TRBJ1-2)
CASSYSRRASNYGYTF

SEQ ID NO: 583133 - protein, 17 aa, Homo sapiens
  CDR3 for alpha chain variable domain of TCR clone 291567 (TRAV38-1, TRAJ45)
CAFIRSHSGGGADGLTF

SEQ ID NO: 583134 - protein, 15 aa, Homo sapiens
  CDR3 for beta chain variable domain of TCR clone 291567 (TRBV7-2, TRBJ2-3)
CASSLVVRGPDTQYF

SEQ ID NO: 583135 - protein, 17 aa, Homo sapiens
  CDR3 for alpha chain variable domain of TCR clone 291568 (TRAV26-1, TRAJ11)
CIVRVGQSNSGYSTLTF

SEQ ID NO: 583136 - protein, 16 aa, Homo sapiens
  CDR3 for beta chain variable domain of TCR clone 291568 (TRBV19, TRBJ2-1)
CASSKAGPSSYNEQFF

SEQ ID NO: 583137 - protein, 12 aa, Homo sapiens
  CDR3 for alpha chain variable domain of TCR clone 291569 (TRAV21, TRAJ12)
CAVMDSSYKLIF

SEQ ID NO: 583138 - protein, 16 aa, Homo sapiens
  CDR3 for beta chain variable domain of TCR clone 291569 (TRBV7-9, TRBJ2-5)
CASRLEIVTRKETQYF

SEQ ID NO: 583139 - protein, 17 aa, Homo sapiens
  CDR3 for alpha chain variable domain of TCR clone 291570 (TRAV26-1, TRAJ37)
CIVRVITVSSNTGKLIF

SEQ ID NO: 583140 - protein, 14 aa, Homo sapiens
  CDR3 for beta chain variable domain of TCR clone 291570 (TRBV15, TRBJ1-5)
CATSKAGDNQPQHF

SEQ ID NO: 583141 - protein, 22 aa, Homo sapiens
  CDR3 for alpha chain variable domain of TCR clone 291571 (TRAV39, TRAJ49)
PCMNSLPPTSVPWTNTGNQFYF

SEQ ID NO: 583142 - protein, 17 aa, Homo sapiens
  CDR3 for beta chain variable domain of TCR clone 291571 (TRBV20-1, TRBJ2-1)
CSARDRRRASSYNEQFF

SEQ ID NO: 583143 - protein, 12 aa, Homo sapiens
  CDR3 for alpha chain variable domain of TCR clone 291572 (TRAV2, TRAJ9)
CAVGAGGFKTIF

SEQ ID NO: 583144 - protein, 16 aa, Homo sapiens
  CDR3 for beta chain variable domain of TCR clone 291572 (TRBV13, TRBJ2-2)
CARSPRTGEHTGELLF

SEQ ID NO: 583145 - protein, 15 aa, Homo sapiens
  CDR3 for alpha chain variable domain of TCR clone 291573 (TRAV12-2, TRAJ53)
CAVNGGGGSNYKLTF

SEQ ID NO: 583146 - protein, 16 aa, Homo sapiens
  CDR3 for beta chain variable domain of TCR clone 291573 (TRBV11-2, TRBJ2-7)
CASSLAPTGVNYEQYF

SEQ ID NO: 583147 - protein, 15 aa, Homo sapiens
  CDR3 for alpha chain variable domain of TCR clone 291574 (TRAV20, TRAJ43)
CAVQAGKSSNNDMRF

SEQ ID NO: 583148 - protein, 14 aa, Homo sapiens
  CDR3 for beta chain variable domain of TCR clone 291574 (TRBV7-2, TRBJ1-1)
CASSFLTGTTEAFF

SEQ ID NO: 583149 - protein, 16 aa, Homo sapiens
  CDR3 for alpha chain variable domain of TCR clone 291575 (TRAV12-1, TRAJ48)
CVVNMVSNFGNEKLTF

SEQ ID NO: 583150 - protein, 18 aa, Homo sapiens
  CDR3 for beta chain variable domain of TCR clone 291575 (TRBV11-2, TRBJ2-6)
CASSLNPFLGTGANVLTF

SEQ ID NO: 583151 - protein, 14 aa, Homo sapiens
  CDR3 for alpha chain variable domain of TCR clone 291576 (TRAV1-2, TRAJ16)
CAVNRFSDGQKLLF

SEQ ID NO: 583152 - protein, 13 aa, Homo sapiens
  CDR3 for beta chain variable domain of TCR clone 291576 (TRBV5-8, TRBJ2-3)
CASSLRSDNTQYF

SEQ ID NO: 583153 - protein, 14 aa, Homo sapiens
  CDR3 for alpha chain variable domain of TCR clone 291577 (TRAV26-1, TRAJ39)
CIVRGSRAGNMITF

SEQ ID NO: 583154 - protein, 15 aa, Homo sapiens
  CDR3 for beta chain variable domain of TCR clone 291577 (TRBV28, TRBJ2-5)
CASSPGQGSIETQYF

SEQ ID NO: 583155 - protein, 19 aa, Homo sapiens
  CDR3 for alpha chain variable domain of TCR clone 291578 (TRAV2, TRAJ20)
ILQVREADAAVYRDCKPSF

SEQ ID NO: 583156 - protein, 12 aa, Homo sapiens
  CDR3 for beta chain variable domain of TCR clone 291578 (TRBV11-2, TRBJ2-2)
CASSLGGGELFF

SEQ ID NO: 583157 - protein, 14 aa, Homo sapiens
  CDR3 for alpha chain variable domain of TCR clone 291579 (TRAV4, TRAJ26)
CLVGPHNYGPNFVF

SEQ ID NO: 583158 - protein, 17 aa, Homo sapiens
  CDR3 for beta chain variable domain of TCR clone 291579 (TRBV24-1, TRBJ2-1)
CATSDVSTSGTYNEQFF

SEQ ID NO: 583159 - protein, 18 aa, Homo sapiens
  CDR3 for alpha chain variable domain of TCR clone 291580 (TRAV13-1, TRAJ52)
CAAKNPNAGGTSYGKLTF

SEQ ID NO: 583160 - protein, 17 aa, Homo sapiens
  CDR3 for beta chain variable domain of TCR clone 291580 (TRBV20-1, TRBJ2-1)
CSASSSGLAGSYNEQFL

SEQ ID NO: 583161 - protein, 16 aa, Homo sapiens
  CDR3 for alpha chain variable domain of TCR clone 291581 (TRAV30, TRAJ24)
CVTEIVDADSGGKFQF

SEQ ID NO: 583162 - protein, 14 aa, Homo sapiens
  CDR3 for beta chain variable domain of TCR clone 291581 (TRBV12-5, TRBJ2-5)
CASGSRTHQETQYF

SEQ ID NO: 583163 - protein, 13 aa, Homo sapiens
  CDR3 for alpha chain variable domain of TCR clone 291582 (TRAV35, TRAJ53)
CAGQESSNDKLTF

SEQ ID NO: 583164 - protein, 11 aa, Homo sapiens
  CDR3 for beta chain variable domain of TCR clone 291582 (TRBV29-1, TRBJ2-5)
CSEDRTGTQYF

SEQ ID NO: 583165 - protein, 12 aa, Homo sapiens
  CDR3 for alpha chain variable domain of TCR clone 291583 (TRAV13-1, TRAJ27)
CAVHTNAGKSTF

SEQ ID NO: 583166 - protein, 14 aa, Homo sapiens
  CDR3 for beta chain variable domain of TCR clone 291583 (TRBV19, TRBJ2-2)
CASSGQGIAGELFF

SEQ ID NO: 583167 - protein, 14 aa, Homo sapiens
  CDR3 for alpha chain variable domain of TCR clone 291584 (TRAV13-1, TRAJ44)
CAAKAAGTASKLTF

SEQ ID NO: 583168 - protein, 13 aa, Homo sapiens
  CDR3 for beta chain variable domain of TCR clone 291584 (TRBV5-5, TRBJ1-2)
CASSFRRGEDYTF

SEQ ID NO: 583169 - protein, 12 aa, Homo sapiens
  CDR3 for alpha chain variable domain of TCR clone 291585 (TRAV12-3, TRAJ17)
CASTLTGNKLTF

SEQ ID NO: 583170 - protein, 15 aa, Homo sapiens
  CDR3 for beta chain variable domain of TCR clone 291585 (TRBV20-1, TRBJ2-7)
CSARDRVSGMDEQYF

SEQ ID NO: 583171 - protein, 18 aa, Homo sapiens
  CDR3 for alpha chain variable domain of TCR clone 291586 (TRAV21, TRAJ52)
CAVRPSPAGGTSYGKLTF

SEQ ID NO: 583172 - protein, 14 aa, Homo sapiens
  CDR3 for beta chain variable domain of TCR clone 291586 (TRBV28, TRBJ1-1)
CASSHRTRWAEAFF

SEQ ID NO: 583173 - protein, 15 aa, Homo sapiens
  CDR3 for alpha chain variable domain of TCR clone 291587 (TRAV8-2, TRAJ16)
CVVSDGFSDGQTLLF

SEQ ID NO: 583174 - protein, 14 aa, Homo sapiens
  CDR3 for beta chain variable domain of TCR clone 291587 (TRBV7-3, TRBJ1-1)
CASSLGTGYTEAFF

SEQ ID NO: 583175 - protein, 16 aa, Homo sapiens
  CDR3 for alpha chain variable domain of TCR clone 291588 (TRAV12-1, TRAJ53)
CVVTSVAGGSNYKPTF

SEQ ID NO: 583176 - protein, 16 aa, Homo sapiens
  CDR3 for beta chain variable domain of TCR clone 291588 (TRBV6-6, TRBJ2-3)
CASSYSHAGATDTQYF

SEQ ID NO: 583177 - protein, 17 aa, Homo sapiens
  CDR3 for alpha chain variable domain of TCR clone 291589 (TRAV3, TRAJ7)
CAVRDMSPLEGTPDSLL

SEQ ID NO: 583178 - protein, 17 aa, Homo sapiens
  CDR3 for beta chain variable domain of TCR clone 291589 (TRBV15, TRBJ1-2)
CATSGREIDVVNYGYTF

SEQ ID NO: 583179 - protein, 12 aa, Homo sapiens
  CDR3 for alpha chain variable domain of TCR clone 291590 (TRAV1-2, TRAJ33)
FAALGSNYQLIW

SEQ ID NO: 583180 - protein, 16 aa, Homo sapiens
  CDR3 for beta chain variable domain of TCR clone 291590 (TRBV6-4, TRBJ1-2)
CASSEAVGDPNYGYTF

SEQ ID NO: 583181 - protein, 12 aa, Homo sapiens
  CDR3 for alpha chain variable domain of TCR clone 291591 (TRAV12-3, TRAJ17)
CAMTLTGNKLTF

SEQ ID NO: 583182 - protein, 17 aa, Homo sapiens
  CDR3 for beta chain variable domain of TCR clone 291591 (TRBV23-1, TRBJ1-2)
CASSNTGGGLLWLHLRF

SEQ ID NO: 583183 - protein, 14 aa, Homo sapiens
  CDR3 for alpha chain variable domain of TCR clone 291592 (TRAV20, TRAJ17)
CAVRREAAGNKLTC

SEQ ID NO: 583184 - protein, 13 aa, Homo sapiens
  CDR3 for beta chain variable domain of TCR clone 291592 (TRBV23-1, TRBJ2-1)
CASNRETYNEQFF

SEQ ID NO: 583185 - protein, 13 aa, Homo sapiens
  CDR3 for alpha chain variable domain of TCR clone 291593 (TRAV8-4, TRAJ30)
CAVSVHRDDKIIF

SEQ ID NO: 583186 - protein, 13 aa, Homo sapiens
  CDR3 for beta chain variable domain of TCR clone 291593 (TRBV3-1, TRBJ2-2)
CASLARGSGELFF

SEQ ID NO: 583187 - protein, 14 aa, Homo sapiens
  CDR3 for alpha chain variable domain of TCR clone 291594 (TRAV12-3, TRAJ10)
SHLPLTGGGNKLTF

SEQ ID NO: 583188 - protein, 12 aa, Homo sapiens
  CDR3 for beta chain variable domain of TCR clone 291594 (TRBV11-2, TRBJ2-2)
CASRLGGGELFF

SEQ ID NO: 583189 - protein, 16 aa, Homo sapiens
  CDR3 for alpha chain variable domain of TCR clone 291595 (TRAV8-3, TRAJ8)
CAVPRDGNTGFQKLVF

SEQ ID NO: 583190 - protein, 14 aa, Homo sapiens
  CDR3 for beta chain variable domain of TCR clone 291595 (TRBV4-1, TRBJ2-2)
CASSQAVDTGELFF

SEQ ID NO: 583191 - protein, 13 aa, Homo sapiens
  CDR3 for alpha chain variable domain of TCR clone 291596 (TRAV25, TRAJ30)
CAGRVDRDDKNIF

SEQ ID NO: 583192 - protein, 17 aa, Homo sapiens
  CDR3 for beta chain variable domain of TCR clone 291596 (TRBV7-9, TRBJ2-6)
CASSFGAGYSGANDLTF

SEQ ID NO: 583193 - protein, 15 aa, Homo sapiens
  CDR3 for alpha chain variable domain of TCR clone 291597 (TRAV21, TRAJ24)
CAARSSTDSWGKLQF

SEQ ID NO: 583194 - protein, 15 aa, Homo sapiens
  CDR3 for beta chain variable domain of TCR clone 291597 (TRBV4-1, TRBJ2-7)
CASSQNKGRLYEQYF

SEQ ID NO: 583195 - protein, 16 aa, Homo sapiens
  CDR3 for alpha chain variable domain of TCR clone 291598 (TRAV12-2, TRAJ6)
CAAPLAGSGGSYIPTF

SEQ ID NO: 583196 - protein, 13 aa, Homo sapiens
  CDR3 for beta chain variable domain of TCR clone 291598 (TRBV6-9, TRBJ2-5)
CASKGDGRRTPYF

SEQ ID NO: 583197 - protein, 15 aa, Homo sapiens
  CDR3 for alpha chain variable domain of TCR clone 291599 (TRAV12-3, TRAJ42)
CAMSGHGGSQGNLIF

SEQ ID NO: 583198 - protein, 15 aa, Homo sapiens
  CDR3 for beta chain variable domain of TCR clone 291599 (TRBV9, TRBJ2-1)
CASSLAGSSYNEQFF

SEQ ID NO: 583199 - protein, 12 aa, Homo sapiens
  CDR3 for alpha chain variable domain of TCR clone 291600 (TRAV13-2, TRAJ23)
CAERHRGGKLIS

SEQ ID NO: 583200 - protein, 15 aa, Homo sapiens
  CDR3 for beta chain variable domain of TCR clone 291600 (TRBV12-4, TRBJ2-5)
CASSPPTGLQETQYF

SEQ ID NO: 583201 - protein, 13 aa, Homo sapiens
  CDR3 for alpha chain variable domain of TCR clone 291601 (TRAV23/DV6, TRAJ22)
CASRAGSARQLTF

SEQ ID NO: 583202 - protein, 14 aa, Homo sapiens
  CDR3 for beta chain variable domain of TCR clone 291601 (TRBV7-2, TRBJ2-7)
CASSPKASFYEQYF

SEQ ID NO: 583203 - protein, 13 aa, Homo sapiens
  CDR3 for alpha chain variable domain of TCR clone 291602 (TRAV1-2, TRAJ12)
CAVSMDSSYKLTF

SEQ ID NO: 583204 - protein, 14 aa, Homo sapiens
  CDR3 for beta chain variable domain of TCR clone 291602 (TRBV19, TRBJ2-1)
CASSSGRDYNEQFF

SEQ ID NO: 583205 - protein, 13 aa, Homo sapiens
  CDR3 for alpha chain variable domain of TCR clone 291603 (TRAV1-2, TRAJ9)
CAALNTGGFKTIF

SEQ ID NO: 583206 - protein, 14 aa, Homo sapiens
  CDR3 for beta chain variable domain of TCR clone 291603 (TRBV6-1, TRBJ1-3)
CASVQGGGGNTMYF

SEQ ID NO: 583207 - protein, 14 aa, Homo sapiens
  CDR3 for alpha chain variable domain of TCR clone 291604 (TRAV8-3, TRAJ9)
CAVVHNTGGVKTIF

SEQ ID NO: 583208 - protein, 14 aa, Homo sapiens
  CDR3 for beta chain variable domain of TCR clone 291604 (TRBV7-3, TRBJ2-2)
CASSSGGYTGELFF

SEQ ID NO: 583209 - protein, 12 aa, Homo sapiens
  CDR3 for alpha chain variable domain of TCR clone 291605 (TRAV17, TRAJ30)
CATDARDDKIIF

SEQ ID NO: 583210 - protein, 15 aa, Homo sapiens
  CDR3 for beta chain variable domain of TCR clone 291605 (TRBV4-1, TRBJ2-1)
CASSQGGGLYNEQFF

SEQ ID NO: 583211 - protein, 15 aa, Homo sapiens
  CDR3 for alpha chain variable domain of TCR clone 291606 (TRAV8-6, TRAJ10)
CAVSDQAGGGNKLTF

SEQ ID NO: 583212 - protein, 20 aa, Homo sapiens
  CDR3 for beta chain variable domain of TCR clone 291606 (TRBV19, TRBJ2-1)
CASSISRTVTSTRLNNEQFF

SEQ ID NO: 583213 - protein, 14 aa, Homo sapiens
  CDR3 for alpha chain variable domain of TCR clone 291607 (TRAV4, TRAJ9)
CLVGSGTGGFKTIF

SEQ ID NO: 583214 - protein, 14 aa, Homo sapiens
  CDR3 for beta chain variable domain of TCR clone 291607 (TRBV4-1, TRBJ1-4)
CASSSTRAREELFF

SEQ ID NO: 583215 - protein, 13 aa, Homo sapiens
  CDR3 for alpha chain variable domain of TCR clone 291608 (TRAV20, TRAJ54)
CAVQAGGAQKPVF

SEQ ID NO: 583216 - protein, 14 aa, Homo sapiens
  CDR3 for beta chain variable domain of TCR clone 291608 (TRBV20-1, TRBJ2-7)
CSAKAGTGGYEQYF

SEQ ID NO: 583217 - protein, 13 aa, Homo sapiens
  CDR3 for alpha chain variable domain of TCR clone 291609 (TRAV21, TRAJ27)
CAARPGNAGKSTF

SEQ ID NO: 583218 - protein, 14 aa, Homo sapiens
  CDR3 for beta chain variable domain of TCR clone 291609 (TRBV11-2, TRBJ2-7)
CASSLGAGSDEQYF

SEQ ID NO: 583219 - protein, 11 aa, Homo sapiens
  CDR3 for alpha chain variable domain of TCR clone 291610 (TRAV1-1, TRAJ30)
CAQNRDDTIIF

SEQ ID NO: 583220 - protein, 14 aa, Homo sapiens
  CDR3 for beta chain variable domain of TCR clone 291610 (TRBV7-8, TRBJ2-7)
CASSPGLADYEQYF

SEQ ID NO: 583221 - protein, 14 aa, Homo sapiens
  CDR3 for alpha chain variable domain of TCR clone 291611 (TRAV26-1, TRAJ38)
CIADNAGNNRKLIW

SEQ ID NO: 583222 - protein, 14 aa, Homo sapiens
  CDR3 for beta chain variable domain of TCR clone 291611 (TRBV7-9, TRBJ2-4)
CASTTGGAKNIQYF

SEQ ID NO: 583223 - protein, 14 aa, Homo sapiens
  CDR3 for alpha chain variable domain of TCR clone 291612 (TRAV3, TRAJ9)
CAVRLNTGGFKTIF

SEQ ID NO: 583224 - protein, 13 aa, Homo sapiens
  CDR3 for beta chain variable domain of TCR clone 291612 (TRBV24-1, TRBJ2-2)
CATTAMRTGELFF

SEQ ID NO: 583225 - protein, 17 aa, Homo sapiens
  CDR3 for alpha chain variable domain of TCR clone 291613 (TRAV3, TRAJ6)
CAVRDGPRTGGSYIPTF

SEQ ID NO: 583226 - protein, 12 aa, Homo sapiens
  CDR3 for beta chain variable domain of TCR clone 291613 (TRBV11-2, TRBJ2-1)
CASSPGNNEQFF

SEQ ID NO: 583227 - protein, 14 aa, Homo sapiens
  CDR3 for alpha chain variable domain of TCR clone 291614 (TRAV2, TRAJ9)
CAVEDRSGGFKTIF

SEQ ID NO: 583228 - protein, 14 aa, Homo sapiens
  CDR3 for beta chain variable domain of TCR clone 291614 (TRBV18, TRBJ2-7)
CVSSPRGGAYEQYF

SEQ ID NO: 583229 - protein, 12 aa, Homo sapiens
  CDR3 for alpha chain variable domain of TCR clone 291615 (TRAV36/DV7, TRAJ40)
CAVGTGTYKYIF

SEQ ID NO: 583230 - protein, 16 aa, Homo sapiens
  CDR3 for beta chain variable domain of TCR clone 291615 (TRBV18, TRBJ2-2)
CASSPPRTANTGELFF

SEQ ID NO: 583231 - protein, 13 aa, Homo sapiens
  CDR3 for alpha chain variable domain of TCR clone 291616 (TRAV21, TRAJ20)
CAAGLRVDYKPSF

SEQ ID NO: 583232 - protein, 13 aa, Homo sapiens
  CDR3 for beta chain variable domain of TCR clone 291616 (TRBV6-1, TRBJ1-1)
CASSRQGNTGAFF

SEQ ID NO: 583233 - protein, 20 aa, Homo sapiens
  CDR3 for alpha chain variable domain of TCR clone 291617 (TRAV30, TRAJ54)
SAAQSRSETQVVQGAQELVF

SEQ ID NO: 583234 - protein, 14 aa, Homo sapiens
  CDR3 for beta chain variable domain of TCR clone 291617 (TRBV25-1, TRBJ2-4)
CASPETKTCSASAP

SEQ ID NO: 583235 - protein, 14 aa, Homo sapiens
  CDR3 for alpha chain variable domain of TCR clone 291618 (TRAV12-3, TRAJ9)
CAMSPNTGGVKTIF

SEQ ID NO: 583236 - protein, 12 aa, Homo sapiens
  CDR3 for beta chain variable domain of TCR clone 291618 (TRBV11-2, TRBJ2-2)
CASSLGGGELFF

SEQ ID NO: 583237 - protein, 15 aa, Homo sapiens
  CDR3 for alpha chain variable domain of TCR clone 291619 (TRAV38-1, TRAJ37)
CAFIFGSGNTGKLIF

SEQ ID NO: 583238 - protein, 13 aa, Homo sapiens
  CDR3 for beta chain variable domain of TCR clone 291619 (TRBV19, TRBJ1-2)
CASSVPGQDGYSF

SEQ ID NO: 583239 - protein, 12 aa, Homo sapiens
  CDR3 for alpha chain variable domain of TCR clone 291620 (TRAV13-1, TRAJ53)
CAAGGSNYKLTF

SEQ ID NO: 583240 - protein, 11 aa, Homo sapiens
  CDR3 for beta chain variable domain of TCR clone 291620 (TRBV7-8, TRBJ2-7)
CASSLSLEQYF

SEQ ID NO: 583241 - protein, 16 aa, Homo sapiens
  CDR3 for alpha chain variable domain of TCR clone 291621 (TRAV17, TRAJ22)
CATDAISSGSARQLTF

SEQ ID NO: 583242 - protein, 15 aa, Homo sapiens
  CDR3 for beta chain variable domain of TCR clone 291621 (TRBV5-1, TRBJ2-1)
CASSPPKAPYNEQFF

SEQ ID NO: 583243 - protein, 13 aa, Homo sapiens
  CDR3 for alpha chain variable domain of TCR clone 291622 (TRAV38-1, TRAJ42)
CARWGGSQGNLIF

SEQ ID NO: 583244 - protein, 12 aa, Homo sapiens
  CDR3 for beta chain variable domain of TCR clone 291622 (TRBV7-9, TRBJ2-7)
CASSLEGYEQYF

SEQ ID NO: 583245 - protein, 14 aa, Homo sapiens
  CDR3 for alpha chain variable domain of TCR clone 291623 (TRAV26-1, TRAJ38)
CIADNAGNNRKLIW

SEQ ID NO: 583246 - protein, 15 aa, Homo sapiens
  CDR3 for beta chain variable domain of TCR clone 291623 (TRBV29-1, TRBJ2-7)
CSVEFFDRGSYEQYF

SEQ ID NO: 583247 - protein, 14 aa, Homo sapiens
  CDR3 for alpha chain variable domain of TCR clone 291624 (TRAV12-1, TRAJ17)
CVVNYKAAGNKLTF

SEQ ID NO: 583248 - protein, 16 aa, Homo sapiens
  CDR3 for beta chain variable domain of TCR clone 291624 (TRBV24-1, TRBJ2-3)
CATSDRRQDLTDTQYF

SEQ ID NO: 583249 - protein, 16 aa, Homo sapiens
  CDR3 for alpha chain variable domain of TCR clone 291625 (TRAV3, TRAJ5)
CAVRNLMDTGRRALTF

SEQ ID NO: 583250 - protein, 16 aa, Homo sapiens
  CDR3 for beta chain variable domain of TCR clone 291625 (TRBV4-2, TRBJ2-7)
CASSQEGIAISYEQYF

SEQ ID NO: 583251 - protein, 17 aa, Homo sapiens
  CDR3 for alpha chain variable domain of TCR clone 291626 (TRAV3, TRAJ6)
CAVRDGPRAGGSCLPTF

SEQ ID NO: 583252 - protein, 14 aa, Homo sapiens
  CDR3 for beta chain variable domain of TCR clone 291626 (TRBV7-2, TRBJ2-7)
CASSPKTSFYEQYF

SEQ ID NO: 583253 - protein, 14 aa, Homo sapiens
  CDR3 for alpha chain variable domain of TCR clone 291627 (TRAV1-2, TRAJ8)
CAAREDTGFQKLVF

SEQ ID NO: 583254 - protein, 13 aa, Homo sapiens
  CDR3 for beta chain variable domain of TCR clone 291627 (TRBV6-4, TRBJ2-3)
CASSVSWAETQYF

SEQ ID NO: 583255 - protein, 13 aa, Homo sapiens
  CDR3 for alpha chain variable domain of TCR clone 291628 (TRAV20, TRAJ21)
CAVEGYNFNKFYF

SEQ ID NO: 583256 - protein, 16 aa, Homo sapiens
  CDR3 for beta chain variable domain of TCR clone 291628 (TRBV19, TRBJ2-1)
CASSKAGPSSYNEQFF

SEQ ID NO: 583257 - protein, 15 aa, Homo sapiens
  CDR3 for alpha chain variable domain of TCR clone 291629 (TRAV13-1, TRAJ32)
CAASNGWWCYKQAHL

SEQ ID NO: 583258 - protein, 17 aa, Homo sapiens
  CDR3 for beta chain variable domain of TCR clone 291629 (TRBV15, TRBJ1-2)
CATSGREIDVVNYGYAF

SEQ ID NO: 583259 - protein, 16 aa, Homo sapiens
  CDR3 for alpha chain variable domain of TCR clone 291630 (TRAV30, TRAJ24)
CGTEIVDADSWGKFQF

SEQ ID NO: 583260 - protein, 14 aa, Homo sapiens
  CDR3 for beta chain variable domain of TCR clone 291630 (TRBV20-1, TRBJ1-1)
RSAQTRIGGTEAFF

SEQ ID NO: 583261 - protein, 17 aa, Homo sapiens
  CDR3 for alpha chain variable domain of TCR clone 291631 (TRAV26-2, TRAJ42)
CILRDVGYGGSQGNLIF

SEQ ID NO: 583262 - protein, 16 aa, Homo sapiens
  CDR3 for beta chain variable domain of TCR clone 291631 (TRBV6-1, TRBJ2-1)
CASILRQGSSYNEQFF

SEQ ID NO: 583263 - protein, 14 aa, Homo sapiens
  CDR3 for alpha chain variable domain of TCR clone 291632 (TRAV35, TRAJ33)
CAGSSQDSNYQLIW

SEQ ID NO: 583264 - protein, 16 aa, Homo sapiens
  CDR3 for beta chain variable domain of TCR clone 291632 (TRBV10-2, TRBJ2-7)
CASSESPGSSGFEQYF

SEQ ID NO: 583265 - protein, 13 aa, Homo sapiens
  CDR3 for alpha chain variable domain of TCR clone 291633 (TRAV35, TRAJ32)
CAGVGGATNKLIF

SEQ ID NO: 583266 - protein, 13 aa, Homo sapiens
  CDR3 for beta chain variable domain of TCR clone 291633 (TRBV10-3, TRBJ2-7)
CASKLAVNYEQYF

SEQ ID NO: 583267 - protein, 14 aa, Homo sapiens
  CDR3 for alpha chain variable domain of TCR clone 291634 (TRAV2, TRAJ9)
CAVEDRSGGFKTIF

SEQ ID NO: 583268 - protein, 15 aa, Homo sapiens
  CDR3 for beta chain variable domain of TCR clone 291634 (TRBV19, TRBJ1-5)
CASSIVWADNQPQHF

SEQ ID NO: 583269 - protein, 13 aa, Homo sapiens
  CDR3 for alpha chain variable domain of TCR clone 291635 (TRAV29/DV5, TRAJ31)
CAASRNNNARLMF

SEQ ID NO: 583270 - protein, 18 aa, Homo sapiens
  CDR3 for beta chain variable domain of TCR clone 291635 (TRBV2, TRBJ2-2)
CQQSTGTSGGGNTGELFF

SEQ ID NO: 583271 - protein, 16 aa, Homo sapiens
  CDR3 for alpha chain variable domain of TCR clone 291636 (TRAV26-1, TRAJ37)
CIYARHGSSNTGKLIF

SEQ ID NO: 583272 - protein, 13 aa, Homo sapiens
  CDR3 for beta chain variable domain of TCR clone 291636 (TRBV12-4, TRBJ1-1)
CASSPGTGFEAFF

SEQ ID NO: 583273 - protein, 17 aa, Homo sapiens
  CDR3 for alpha chain variable domain of TCR clone 291637 (TRAV26-1, TRAJ58)
CIVRVGAEETSGSRLTF

SEQ ID NO: 583274 - protein, 13 aa, Homo sapiens
  CDR3 for beta chain variable domain of TCR clone 291637 (TRBV12-5, TRBJ1-2)
CASGVRAGNGYTF

SEQ ID NO: 583275 - protein, 14 aa, Homo sapiens
  CDR3 for alpha chain variable domain of TCR clone 291638 (TRAV2, TRAJ9)
CAVEDRSGGFKTIF

SEQ ID NO: 583276 - protein, 12 aa, Homo sapiens
  CDR3 for beta chain variable domain of TCR clone 291638 (TRBV11-2, TRBJ2-1)
CVSSPGNNEQFF

SEQ ID NO: 583277 - protein, 13 aa, Homo sapiens
  CDR3 for alpha chain variable domain of TCR clone 291639 (TRAV17, TRAJ5)
CAPMDTGRRALTF

SEQ ID NO: 583278 - protein, 14 aa, Homo sapiens
  CDR3 for beta chain variable domain of TCR clone 291639 (TRBV7-6, TRBJ2-3)
CASSLGTVTDTQYF

SEQ ID NO: 583279 - protein, 16 aa, Homo sapiens
  CDR3 for alpha chain variable domain of TCR clone 291640 (TRAV3, TRAJ21)
CAVRDIERGNFNKFYF

SEQ ID NO: 583280 - protein, 15 aa, Homo sapiens
  CDR3 for beta chain variable domain of TCR clone 291640 (TRBV7-9, TRBJ1-6)
CASSSPGRGNSPLHF

SEQ ID NO: 583281 - protein, 15 aa, Homo sapiens
  CDR3 for alpha chain variable domain of TCR clone 291641 (TRAV9-2, TRAJ49)
CALSPPDHTGNQSYF

SEQ ID NO: 583282 - protein, 14 aa, Homo sapiens
  CDR3 for beta chain variable domain of TCR clone 291641 (TRBV12-4, TRBJ1-1)
CASSLGTGGTEAFF

SEQ ID NO: 583283 - protein, 13 aa, Homo sapiens
  CDR3 for alpha chain variable domain of TCR clone 291642 (TRAV1-2, TRAJ20)
CAVRDGNDYKLSF

SEQ ID NO: 583284 - protein, 16 aa, Homo sapiens
  CDR3 for beta chain variable domain of TCR clone 291642 (TRBV19, TRBJ2-1)
CASSKAGPSSYNEQFF

SEQ ID NO: 583285 - protein, 13 aa, Homo sapiens
  CDR3 for alpha chain variable domain of TCR clone 291643 (TRAV13-1, TRAJ43)
CAASLSNNNDMRF

SEQ ID NO: 583286 - protein, 16 aa, Homo sapiens
  CDR3 for beta chain variable domain of TCR clone 291643 (TRBV24-1, TRBJ2-3)
CATSDPGTGATDTQYF

SEQ ID NO: 583287 - protein, 13 aa, Homo sapiens
  CDR3 for alpha chain variable domain of TCR clone 291644 (TRAV2, TRAJ40)
CAVVTSGTYKYIF

SEQ ID NO: 583288 - protein, 15 aa, Homo sapiens
  CDR3 for beta chain variable domain of TCR clone 291644 (TRBV7-3, TRBJ2-1)
CQQLRGLSLLNEQFF

SEQ ID NO: 583289 - protein, 12 aa, Homo sapiens
  CDR3 for alpha chain variable domain of TCR clone 291645 (TRAV21, TRAJ52)
CAVRSSYGKLTF

SEQ ID NO: 583290 - protein, 14 aa, Homo sapiens
  CDR3 for beta chain variable domain of TCR clone 291645 (TRBV2, TRBJ1-1)
CASSRQGANTEAFF

SEQ ID NO: 583291 - protein, 14 aa, Homo sapiens
  CDR3 for alpha chain variable domain of TCR clone 291646 (TRAV29/DV5, TRAJ36)
CAARRKTGANNLIF

SEQ ID NO: 583292 - protein, 12 aa, Homo sapiens
  CDR3 for beta chain variable domain of TCR clone 291646 (TRBV12-5, TRBJ2-5)
CASGQGVETQYF

SEQ ID NO: 583293 - protein, 14 aa, Homo sapiens
  CDR3 for alpha chain variable domain of TCR clone 291647 (TRAV3, TRAJ21)
CAVRDTYNFNKFYF

SEQ ID NO: 583294 - protein, 17 aa, Homo sapiens
  CDR3 for beta chain variable domain of TCR clone 291647 (TRBV20-1, TRBJ1-6)
CSARGGYTFSYNSPLHF

SEQ ID NO: 583295 - protein, 11 aa, Homo sapiens
  CDR3 for alpha chain variable domain of TCR clone 291648 (TRAV1-1, TRAJ23)
CAVRPGGKLIF

SEQ ID NO: 583296 - protein, 12 aa, Homo sapiens
  CDR3 for beta chain variable domain of TCR clone 291648 (TRBV19, TRBJ1-5)
CASSIAQQPQHF

SEQ ID NO: 583297 - protein, 11 aa, Homo sapiens
  CDR3 for alpha chain variable domain of TCR clone 291649 (TRAV12-1, TRAJ43)
CVEYDNNDMRF

SEQ ID NO: 583298 - protein, 13 aa, Homo sapiens
  CDR3 for beta chain variable domain of TCR clone 291649 (TRBV19, TRBJ2-1)
CASSMYRVNEQFF

SEQ ID NO: 583299 - protein, 13 aa, Homo sapiens
  CDR3 for alpha chain variable domain of TCR clone 291650 (TRAV8-2, TRAJ21)
CVVSQYNFNKFYF

SEQ ID NO: 583300 - protein, 12 aa, Homo sapiens
  CDR3 for beta chain variable domain of TCR clone 291650 (TRBV5-5, TRBJ2-5)
CASSYFGETQYF

SEQ ID NO: 583301 - protein, 14 aa, Homo sapiens
  CDR3 for alpha chain variable domain of TCR clone 291651 (TRAV1-2, TRAJ16)
CAVNRFSDGQKLFF

SEQ ID NO: 583302 - protein, 13 aa, Homo sapiens
  CDR3 for beta chain variable domain of TCR clone 291651 (TRBV11-2, TRBJ2-5)
CASSFSSQETQYF

SEQ ID NO: 583303 - protein, 12 aa, Homo sapiens
  CDR3 for alpha chain variable domain of TCR clone 291652 (TRAV21, TRAJ33)
CAKMDSNYQLIW

SEQ ID NO: 583304 - protein, 14 aa, Homo sapiens
  CDR3 for beta chain variable domain of TCR clone 291652 (TRBV11-2, TRBJ2-1)
CASSRATSYNEQFF

SEQ ID NO: 583305 - protein, 17 aa, Homo sapiens
  CDR3 for alpha chain variable domain of TCR clone 291653 (TRAV26-1, TRAJ36)
CIVRPPGDQTGANNLFF

SEQ ID NO: 583306 - protein, 14 aa, Homo sapiens
  CDR3 for beta chain variable domain of TCR clone 291653 (TRBV10-3, TRBJ2-6)
CHPRGCLWANVLTF

SEQ ID NO: 583307 - protein, 12 aa, Homo sapiens
  CDR3 for alpha chain variable domain of TCR clone 291654 (TRAV27, TRAJ13)
CAGVRCYQQVTF

SEQ ID NO: 583308 - protein, 16 aa, Homo sapiens
  CDR3 for beta chain variable domain of TCR clone 291654 (TRBV28, TRBJ2-1)
CASSSSYSGSLNEQFF

SEQ ID NO: 583309 - protein, 14 aa, Homo sapiens
  CDR3 for alpha chain variable domain of TCR clone 291655 (TRAV1-2, TRAJ16)
CAVNRFSDGQKLLF

SEQ ID NO: 583310 - protein, 15 aa, Homo sapiens
  CDR3 for beta chain variable domain of TCR clone 291655 (TRBV20-1, TRBJ1-1)
CSASRGGTGNTEAFF

SEQ ID NO: 583311 - protein, 13 aa, Homo sapiens
  CDR3 for alpha chain variable domain of TCR clone 291656 (TRAV12-1, TRAJ6)
CVVFPGGSYIPTF

SEQ ID NO: 583312 - protein, 12 aa, Homo sapiens
  CDR3 for beta chain variable domain of TCR clone 291656 (TRBV11-2, TRBJ2-2)
CASSLGGRELFF

SEQ ID NO: 583313 - protein, 13 aa, Homo sapiens
  CDR3 for alpha chain variable domain of TCR clone 291657 (TRAV8-2, TRAJ8)
CVVSDLSFQKLVF

SEQ ID NO: 583314 - protein, 14 aa, Homo sapiens
  CDR3 for beta chain variable domain of TCR clone 291657 (TRBV18, TRBJ1-1)
CASSPGFQGVEAFF

SEQ ID NO: 583315 - protein, 14 aa, Homo sapiens
  CDR3 for alpha chain variable domain of TCR clone 291658 (TRAV1-2, TRAJ8)
CAVREDTGFQKLVF

SEQ ID NO: 583316 - protein, 15 aa, Homo sapiens
  CDR3 for beta chain variable domain of TCR clone 291658 (TRBV5-4, TRBJ2-5)
CASSWAGGAKETQYF

SEQ ID NO: 583317 - protein, 15 aa, Homo sapiens
  CDR3 for alpha chain variable domain of TCR clone 291659 (TRAV8-4, TRAJ3)
CAVTGENLVKQCFQD

SEQ ID NO: 583318 - protein, 15 aa, Homo sapiens
  CDR3 for beta chain variable domain of TCR clone 291659 (TRBV19, TRBJ1-2)
CASSVGQVLNYGYTF

SEQ ID NO: 583319 - protein, 18 aa, Homo sapiens
  CDR3 for alpha chain variable domain of TCR clone 291660 (TRAV26-2, TRAJ45)
CILRVDRYSGGGADGLTF

SEQ ID NO: 583320 - protein, 16 aa, Homo sapiens
  CDR3 for beta chain variable domain of TCR clone 291660 (TRBV2, TRBJ1-4)
CASNLLQGATNEKLFF

SEQ ID NO: 583321 - protein, 17 aa, Homo sapiens
  CDR3 for alpha chain variable domain of TCR clone 291661 (TRAV4, TRAJ18)
CLVGERSVGSTLGRLYF

SEQ ID NO: 583322 - protein, 14 aa, Homo sapiens
  CDR3 for beta chain variable domain of TCR clone 291661 (TRBV25-1, TRBJ1-2)
CASSDTTGVVGYTF

SEQ ID NO: 583323 - protein, 15 aa, Homo sapiens
  CDR3 for alpha chain variable domain of TCR clone 291662 (TRAV8-3, TRAJ45)
CASSYSGGGAAGLTF

SEQ ID NO: 583324 - protein, 13 aa, Homo sapiens
  CDR3 for beta chain variable domain of TCR clone 291662 (TRBV7-9, TRBJ2-7)
CASSLAGAYEQYF

SEQ ID NO: 583325 - protein, 15 aa, Homo sapiens
  CDR3 for alpha chain variable domain of TCR clone 291663 (TRAV34, TRAJ38)
CGADFNPGNNRKLIW

SEQ ID NO: 583326 - protein, 16 aa, Homo sapiens
  CDR3 for beta chain variable domain of TCR clone 291663 (TRBV12-5, TRBJ2-5)
CASGPRTSGNQETQYF

SEQ ID NO: 583327 - protein, 11 aa, Homo sapiens
  CDR3 for alpha chain variable domain of TCR clone 291664 (TRAV3, TRAJ21)
CAVGNFNKFYF

SEQ ID NO: 583328 - protein, 15 aa, Homo sapiens
  CDR3 for beta chain variable domain of TCR clone 291664 (TRBV18, TRBJ2-3)
CASSPLAGETDTQYF

SEQ ID NO: 583329 - protein, 15 aa, Homo sapiens
  CDR3 for alpha chain variable domain of TCR clone 291665 (TRAV12-1, TRAJ45)
CVVVSGGGGADGLTF

SEQ ID NO: 583330 - protein, 13 aa, Homo sapiens
  CDR3 for beta chain variable domain of TCR clone 291665 (TRBV7-3, TRBJ1-1)
CASSQDWGAEAFF

SEQ ID NO: 583331 - protein, 11 aa, Homo sapiens
  CDR3 for alpha chain variable domain of TCR clone 291666 (TRAV3, TRAJ17)
PRGAAGNKLTF

SEQ ID NO: 583332 - protein, 13 aa, Homo sapiens
  CDR3 for beta chain variable domain of TCR clone 291666 (TRBV4-2, TRBJ1-1)
CASSQAGNTEAFF

SEQ ID NO: 583333 - protein, 23 aa, Homo sapiens
  CDR3 for alpha chain variable domain of TCR clone 291667 (TRAV12-2, TRAJ36)
SLLIRDSQPSDSATLERANNLFF

SEQ ID NO: 583334 - protein, 12 aa, Homo sapiens
  CDR3 for beta chain variable domain of TCR clone 291667 (TRBV11-2, TRBJ2-2)
CASSLPTGELFF

SEQ ID NO: 583335 - protein, 14 aa, Homo sapiens
  CDR3 for alpha chain variable domain of TCR clone 291668 (TRAV35, TRAJ33)
CAGSSQDSNYQLIW

SEQ ID NO: 583336 - protein, 14 aa, Homo sapiens
  CDR3 for beta chain variable domain of TCR clone 291668 (TRBV20-1, TRBJ2-1)
CSAQIGGSANDQFF

SEQ ID NO: 583337 - protein, 14 aa, Homo sapiens
  CDR3 for alpha chain variable domain of TCR clone 291669 (TRAV1-2, TRAJ16)
CAVNRFSDGQKLLF

SEQ ID NO: 583338 - protein, 14 aa, Homo sapiens
  CDR3 for beta chain variable domain of TCR clone 291669 (TRBV5-7, TRBJ2-4)
CASAREGVANIQYF

SEQ ID NO: 583339 - protein, 13 aa, Homo sapiens
  CDR3 for alpha chain variable domain of TCR clone 291670 (TRAV12-3, TRAJ7)
CVMSASGNNRLAF

SEQ ID NO: 583340 - protein, 14 aa, Homo sapiens
  CDR3 for beta chain variable domain of TCR clone 291670 (TRBV13, TRBJ2-5)
CASSLGPRGETQYF

SEQ ID NO: 583341 - protein, 16 aa, Homo sapiens
  CDR3 for alpha chain variable domain of TCR clone 291671 (TRAV12-3, TRAJ53)
CAMSPGSGGSNYKLTF

SEQ ID NO: 583342 - protein, 17 aa, Homo sapiens
  CDR3 for beta chain variable domain of TCR clone 291671 (TRBV7-2, TRBJ1-4)
CASGFKAGPTTNEKLFF

SEQ ID NO: 583343 - protein, 14 aa, Homo sapiens
  CDR3 for alpha chain variable domain of TCR clone 291672 (TRAV17, TRAJ6)
CATVFQGGSYIPTF

SEQ ID NO: 583344 - protein, 16 aa, Homo sapiens
  CDR3 for beta chain variable domain of TCR clone 291672 (TRBV7-3, TRBJ2-2)
CASSLKRGTLSGELFF

SEQ ID NO: 583345 - protein, 13 aa, Homo sapiens
  CDR3 for alpha chain variable domain of TCR clone 291673 (TRAV12-1, TRAJ6)
CVVYTGGSYIPTF

SEQ ID NO: 583346 - protein, 13 aa, Homo sapiens
  CDR3 for beta chain variable domain of TCR clone 291673 (TRBV20-1, TRBJ1-3)
CSAGAYSGNTIYF

SEQ ID NO: 583347 - protein, 16 aa, Homo sapiens
  CDR3 for alpha chain variable domain of TCR clone 291674 (TRAV17, TRAJ52)
CATSNAGGTSYGKLTF

SEQ ID NO: 583348 - protein, 14 aa, Homo sapiens
  CDR3 for beta chain variable domain of TCR clone 291674 (TRBV19, TRBJ2-1)
CASSKDRGQDEQFF

SEQ ID NO: 583349 - protein, 16 aa, Homo sapiens
  CDR3 for alpha chain variable domain of TCR clone 291675 (TRAV38-1, TRAJ56)
CAFMKRQTGANSKPTF

SEQ ID NO: 583350 - protein, 13 aa, Homo sapiens
  CDR3 for beta chain variable domain of TCR clone 291675 (TRBV7-2, TRBJ1-5)
CASSTQGSQPQHF

SEQ ID NO: 583351 - protein, 16 aa, Homo sapiens
  CDR3 for alpha chain variable domain of TCR clone 291676 (TRAV8-4, TRAJ5)
CAVSPFTDTGRRALTF

SEQ ID NO: 583352 - protein, 16 aa, Homo sapiens
  CDR3 for beta chain variable domain of TCR clone 291676 (TRBV11-2, TRBJ2-7)
CASSPTTGGVSYEQYF

SEQ ID NO: 583353 - protein, 13 aa, Homo sapiens
  CDR3 for alpha chain variable domain of TCR clone 291677 (TRAV8-3, TRAJ34)
CAAGGGNTDKLIF

SEQ ID NO: 583354 - protein, 16 aa, Homo sapiens
  CDR3 for beta chain variable domain of TCR clone 291677 (TRBV7-8, TRBJ1-4)
CASSLGVGTSNEKLFF

SEQ ID NO: 583355 - protein, 16 aa, Homo sapiens
  CDR3 for alpha chain variable domain of TCR clone 291678 (TRAV30, TRAJ24)
CGTEIVDADSWGKFQF

SEQ ID NO: 583356 - protein, 16 aa, Homo sapiens
  CDR3 for beta chain variable domain of TCR clone 291678 (TRBV28, TRBJ2-7)
CASSLFFETGGPEQYC

SEQ ID NO: 583357 - protein, 16 aa, Homo sapiens
  CDR3 for alpha chain variable domain of TCR clone 291679 (TRAV26-1, TRAJ40)
CIVRGYPTSGIYKYIF

SEQ ID NO: 583358 - protein, 14 aa, Homo sapiens
  CDR3 for beta chain variable domain of TCR clone 291679 (TRBV5-1, TRBJ1-4)
CASSSGQGGEKLFF

SEQ ID NO: 583359 - protein, 13 aa, Homo sapiens
  CDR3 for alpha chain variable domain of TCR clone 291680 (TRAV12-3, TRAJ7)
CAMTPYGHNRLAF

SEQ ID NO: 583360 - protein, 16 aa, Homo sapiens
  CDR3 for beta chain variable domain of TCR clone 291680 (TRBV20-1, TRBJ1-4)
CSARPYGGELNEKLFF

SEQ ID NO: 583361 - protein, 12 aa, Homo sapiens
  CDR3 for alpha chain variable domain of TCR clone 291681 (TRAV2, TRAJ31)
CAVEDNNARLMV

SEQ ID NO: 583362 - protein, 15 aa, Homo sapiens
  CDR3 for beta chain variable domain of TCR clone 291681 (TRBV11-2, TRBJ2-1)
CASSKNRGLIYEQFF

SEQ ID NO: 583363 - protein, 11 aa, Homo sapiens
  CDR3 for alpha chain variable domain of TCR clone 291682 (TRAV23/DV6, TRAJ58)
CAARLLRGETS

SEQ ID NO: 583364 - protein, 16 aa, Homo sapiens
  CDR3 for beta chain variable domain of TCR clone 291682 (TRBV2, TRBJ2-5)
CASSARGLGGRETQYF

SEQ ID NO: 583365 - protein, 11 aa, Homo sapiens
  CDR3 for alpha chain variable domain of TCR clone 291683 (TRAV2, TRAJ13)
CASGGYQKVTF

SEQ ID NO: 583366 - protein, 13 aa, Homo sapiens
  CDR3 for beta chain variable domain of TCR clone 291683 (TRBV20-1, TRBJ2-2)
CSASAAGTGELFS

SEQ ID NO: 583367 - protein, 14 aa, Homo sapiens
  CDR3 for alpha chain variable domain of TCR clone 291684 (TRAV26-1, TRAJ38)
CIADNAGNNRKQIW

SEQ ID NO: 583368 - protein, 14 aa, Homo sapiens
  CDR3 for beta chain variable domain of TCR clone 291684 (TRBV6-1, TRBJ1-3)
CASVQGGGGNTIYF

SEQ ID NO: 583369 - protein, 11 aa, Homo sapiens
  CDR3 for alpha chain variable domain of TCR clone 291685 (TRAV21, TRAJ11)
CAVHGYSTLTF

SEQ ID NO: 583370 - protein, 17 aa, Homo sapiens
  CDR3 for beta chain variable domain of TCR clone 291685 (TRBV18, TRBJ2-3)
CASSAAGTSGSTDTQYF

SEQ ID NO: 583371 - protein, 15 aa, Homo sapiens
  CDR3 for alpha chain variable domain of TCR clone 291686 (TRAV3, TRAJ3)
CAVRDGHSSASKIIF

SEQ ID NO: 583372 - protein, 14 aa, Homo sapiens
  CDR3 for beta chain variable domain of TCR clone 291686 (TRBV7-9, TRBJ2-2)
CASSLGHRTGELFF

SEQ ID NO: 583373 - protein, 13 aa, Homo sapiens
  CDR3 for alpha chain variable domain of TCR clone 291687 (TRAV2, TRAJ21)
CAVEDNNFNKFYF

SEQ ID NO: 583374 - protein, 16 aa, Homo sapiens
  CDR3 for beta chain variable domain of TCR clone 291687 (TRBV7-3, TRBJ2-2)
CASSLKRGTLSGELFF

SEQ ID NO: 583375 - protein, 12 aa, Homo sapiens
  CDR3 for alpha chain variable domain of TCR clone 291688 (TRAV12-2, TRAJ21)
CAVNWNFNKFYF

SEQ ID NO: 583376 - protein, 14 aa, Homo sapiens
  CDR3 for beta chain variable domain of TCR clone 291688 (TRBV12-4, TRBJ2-3)
CASSLSGATDTQYF

SEQ ID NO: 583377 - protein, 15 aa, Homo sapiens
  CDR3 for alpha chain variable domain of TCR clone 291689 (TRAV20, TRAJ6)
CAVRLQSGGSYIPTF

SEQ ID NO: 583378 - protein, 13 aa, Homo sapiens
  CDR3 for beta chain variable domain of TCR clone 291689 (TRBV10-3, TRBJ2-7)
CASKLAVNYEQYF

SEQ ID NO: 583379 - protein, 14 aa, Homo sapiens
  CDR3 for alpha chain variable domain of TCR clone 291690 (TRAV12-2, TRAJ17)
CAVLFQSCRQQANF

SEQ ID NO: 583380 - protein, 17 aa, Homo sapiens
  CDR3 for beta chain variable domain of TCR clone 291690 (TRBV20-1, TRBJ2-2)
CSASGSGQGGLTGELFF

SEQ ID NO: 583381 - protein, 14 aa, Homo sapiens
  CDR3 for alpha chain variable domain of TCR clone 291691 (TRAV20, TRAJ56)
CAVQFGGANSKLTF

SEQ ID NO: 583382 - protein, 18 aa, Homo sapiens
  CDR3 for beta chain variable domain of TCR clone 291691 (TRBV6-6, TRBJ1-3)
CASSYSKWDSISGNTIYF

SEQ ID NO: 583383 - protein, 14 aa, Homo sapiens
  CDR3 for alpha chain variable domain of TCR clone 291692 (TRAV10, TRAJ32)
CGEPRGGSTNKPIF

SEQ ID NO: 583384 - protein, 14 aa, Homo sapiens
  CDR3 for beta chain variable domain of TCR clone 291692 (TRBV5-4, TRBJ2-2)
CASRLDGGTGELFF

SEQ ID NO: 583385 - protein, 14 aa, Homo sapiens
  CDR3 for alpha chain variable domain of TCR clone 291693 (TRAV8-4, TRAJ48)
CAVSETFGNEKLTF

SEQ ID NO: 583386 - protein, 12 aa, Homo sapiens
  CDR3 for beta chain variable domain of TCR clone 291693 (TRBV6-1, TRBJ2-1)
CATQKGGGHLFF

SEQ ID NO: 583387 - protein, 14 aa, Homo sapiens
  CDR3 for alpha chain variable domain of TCR clone 291694 (TRAV12-3, TRAJ10)
SHLPLTGGGNKLTF

SEQ ID NO: 583388 - protein, 16 aa, Homo sapiens
  CDR3 for beta chain variable domain of TCR clone 291694 (TRBV5-7, TRBJ1-2)
CASSRGVTGGSYGYTF

SEQ ID NO: 583389 - protein, 11 aa, Homo sapiens
  CDR3 for alpha chain variable domain of TCR clone 291695 (TRAV2, TRAJ33)
CAVESNYQLIW

SEQ ID NO: 583390 - protein, 15 aa, Homo sapiens
  CDR3 for beta chain variable domain of TCR clone 291695 (TRBV7-3, TRBJ2-1)
CQQLQTSGRYNEQFF

SEQ ID NO: 583391 - protein, 14 aa, Homo sapiens
  CDR3 for alpha chain variable domain of TCR clone 291696 (TRAV12-2, TRAJ24)
CAVTPADSWGKLQF

SEQ ID NO: 583392 - protein, 15 aa, Homo sapiens
  CDR3 for beta chain variable domain of TCR clone 291696 (TRBV11-2, TRBJ2-1)
CASSLGPDSYNEQFF

SEQ ID NO: 583393 - protein, 16 aa, Homo sapiens
  CDR3 for alpha chain variable domain of TCR clone 291697 (TRAV25, TRAJ24)
CAQRRGTTDSWGKLQF

SEQ ID NO: 583394 - protein, 13 aa, Homo sapiens
  CDR3 for beta chain variable domain of TCR clone 291697 (TRBV7-3, TRBJ1-1)
CASSQDWGAEAFF

SEQ ID NO: 583395 - protein, 16 aa, Homo sapiens
  CDR3 for alpha chain variable domain of TCR clone 291698 (TRAV30, TRAJ24)
CGTEIVDADSWGKFQF

SEQ ID NO: 583396 - protein, 13 aa, Homo sapiens
  CDR3 for beta chain variable domain of TCR clone 291698 (TRBV20-1, TRBJ1-1)
CSTPPGGHTEAFF

SEQ ID NO: 583397 - protein, 14 aa, Homo sapiens
  CDR3 for alpha chain variable domain of TCR clone 291699 (TRAV12-1, TRAJ40)
CVVNRVSGTYKYIF

SEQ ID NO: 583398 - protein, 12 aa, Homo sapiens
  CDR3 for beta chain variable domain of TCR clone 291699 (TRBV7-9, TRBJ2-7)
CASSLFDYEQYF

SEQ ID NO: 583399 - protein, 13 aa, Homo sapiens
  CDR3 for alpha chain variable domain of TCR clone 291700 (TRAV2, TRAJ40)
CAVVTSGTYKYIF

SEQ ID NO: 583400 - protein, 13 aa, Homo sapiens
  CDR3 for beta chain variable domain of TCR clone 291700 (TRBV11-3, TRBJ2-3)
CASSLSRADTQYF

SEQ ID NO: 583401 - protein, 14 aa, Homo sapiens
  CDR3 for alpha chain variable domain of TCR clone 291701 (TRAV12-2, TRAJ3)
CAVKGYSSASKIIF

SEQ ID NO: 583402 - protein, 15 aa, Homo sapiens
  CDR3 for beta chain variable domain of TCR clone 291701 (TRBV12-4, TRBJ2-5)
CASSPPTGLQETQYF

SEQ ID NO: 583403 - protein, 11 aa, Homo sapiens
  CDR3 for alpha chain variable domain of TCR clone 291702 (TRAV17, TRAJ9)
CATTGGFKTIF

SEQ ID NO: 583404 - protein, 16 aa, Homo sapiens
  CDR3 for beta chain variable domain of TCR clone 291702 (TRBV28, TRBJ1-1)
CASSLWIPQMNTEAFF

SEQ ID NO: 583405 - protein, 11 aa, Homo sapiens
  CDR3 for alpha chain variable domain of TCR clone 291703 (TRAV12-1, TRAJ8)
CVVTGFQKLVF

SEQ ID NO: 583406 - protein, 12 aa, Homo sapiens
  CDR3 for beta chain variable domain of TCR clone 291703 (TRBV12-5, TRBJ2-5)
CASGQGVETQYF

SEQ ID NO: 583407 - protein, 17 aa, Homo sapiens
  CDR3 for alpha chain variable domain of TCR clone 291704 (TRAV13-1, TRAJ28)
CAASPPYSGAGSYQLTF

SEQ ID NO: 583408 - protein, 15 aa, Homo sapiens
  CDR3 for beta chain variable domain of TCR clone 291704 (TRBV6-3, TRBJ2-2)
CASSCLATLTGELFF

SEQ ID NO: 583409 - protein, 12 aa, Homo sapiens
  CDR3 for alpha chain variable domain of TCR clone 291705 (TRAV27, TRAJ9)
CAGESGGLKTIF

SEQ ID NO: 583410 - protein, 16 aa, Homo sapiens
  CDR3 for beta chain variable domain of TCR clone 291705 (TRBV5-1, TRBJ2-5)
CASSSSGLGGAETQYF

SEQ ID NO: 583411 - protein, 14 aa, Homo sapiens
  CDR3 for alpha chain variable domain of TCR clone 291706 (TRAV12-2, TRAJ17)
CAVNIKAAGNKLTF

SEQ ID NO: 583412 - protein, 13 aa, Homo sapiens
  CDR3 for beta chain variable domain of TCR clone 291706 (TRBV2, TRBJ1-1)
CASSVTSNTEAFF

SEQ ID NO: 583413 - protein, 15 aa, Homo sapiens
  CDR3 for alpha chain variable domain of TCR clone 291707 (TRAV16, TRAJ48)
CALLVSNFGNEKLTF

SEQ ID NO: 583414 - protein, 15 aa, Homo sapiens
  CDR3 for beta chain variable domain of TCR clone 291707 (TRBV5-4, TRBJ2-7)
CASSRFVTGSYEQYF

SEQ ID NO: 583415 - protein, 16 aa, Homo sapiens
  CDR3 for alpha chain variable domain of TCR clone 291708 (TRAV3, TRAJ10)
CAVRDMRAGGGNKPTF

SEQ ID NO: 583416 - protein, 14 aa, Homo sapiens
  CDR3 for beta chain variable domain of TCR clone 291708 (TRBV6-1, TRBJ1-3)
CASVQGGGGNTIYF

SEQ ID NO: 583417 - protein, 12 aa, Homo sapiens
  CDR3 for alpha chain variable domain of TCR clone 291709 (TRAV21, TRAJ42)
CAVGGSQGNLIF

SEQ ID NO: 583418 - protein, 14 aa, Homo sapiens
  CDR3 for beta chain variable domain of TCR clone 291709 (TRBV12-4, TRBJ1-1)
CASSLGTGGTEASF

SEQ ID NO: 583419 - protein, 13 aa, Homo sapiens
  CDR3 for alpha chain variable domain of TCR clone 291710 (TRAV13-1, TRAJ5)
CAAEHTGRRALNF

SEQ ID NO: 583420 - protein, 16 aa, Homo sapiens
  CDR3 for beta chain variable domain of TCR clone 291710 (TRBV4-2, TRBJ2-3)
CASSQELAGDTDTQYF

SEQ ID NO: 583421 - protein, 12 aa, Homo sapiens
  CDR3 for alpha chain variable domain of TCR clone 291711 (TRAV13-2, TRAJ23)
CAERHRGGKLIF

SEQ ID NO: 583422 - protein, 19 aa, Homo sapiens
  CDR3 for beta chain variable domain of TCR clone 291711 (TRBV19, TRBJ2-5)
CTSSIGQVTDFFLGETQYF

SEQ ID NO: 583423 - protein, 12 aa, Homo sapiens
  CDR3 for alpha chain variable domain of TCR clone 291712 (TRAV16, TRAJ57)
CALEGGSEKLVF

SEQ ID NO: 583424 - protein, 17 aa, Homo sapiens
  CDR3 for beta chain variable domain of TCR clone 291712 (TRBV28, TRBJ2-1)
CASSLSVAGGPVDEQFF

SEQ ID NO: 583425 - protein, 14 aa, Homo sapiens
  CDR3 for alpha chain variable domain of TCR clone 291713 (TRAV21, TRAJ35)
CAVMPIGFGNVLHC

SEQ ID NO: 583426 - protein, 16 aa, Homo sapiens
  CDR3 for beta chain variable domain of TCR clone 291713 (TRBV18, TRBJ1-3)
CASSLGILNGENTIYF

SEQ ID NO: 583427 - protein, 18 aa, Homo sapiens
  CDR3 for alpha chain variable domain of TCR clone 291714 (TRAV13-1, TRAJ52)
CSASKRSAGGTSYGKLTF

SEQ ID NO: 583428 - protein, 14 aa, Homo sapiens
  CDR3 for beta chain variable domain of TCR clone 291714 (TRBV19, TRBJ2-1)
CASPTFVLSGEQFF

SEQ ID NO: 583429 - protein, 15 aa, Homo sapiens
  CDR3 for alpha chain variable domain of TCR clone 291715 (TRAV12-2, TRAJ53)
CAVNGGGGSNYKLTF

SEQ ID NO: 583430 - protein, 16 aa, Homo sapiens
  CDR3 for beta chain variable domain of TCR clone 291715 (TRBV27, TRBJ2-5)
CASSSQTSGFQETQYF

SEQ ID NO: 583431 - protein, 13 aa, Homo sapiens
  CDR3 for alpha chain variable domain of TCR clone 291716 (TRAV1-1, TRAJ9)
CAAKNTGGFTTVF

SEQ ID NO: 583432 - protein, 14 aa, Homo sapiens
  CDR3 for beta chain variable domain of TCR clone 291716 (TRBV20-1, TRBJ2-1)
CSAQIGGSANEQFF

SEQ ID NO: 583433 - protein, 11 aa, Homo sapiens
  CDR3 for alpha chain variable domain of TCR clone 291717 (TRAV12-1, TRAJ21)
CVVNNFNKFSV

SEQ ID NO: 583434 - protein, 17 aa, Homo sapiens
  CDR3 for beta chain variable domain of TCR clone 291717 (TRBV7-8, TRBJ2-1)
CASSPPTGTLAYNEQFF

SEQ ID NO: 583435 - protein, 14 aa, Homo sapiens
  CDR3 for alpha chain variable domain of TCR clone 291718 (TRAV12-3, TRAJ29)
CAMSPYSGNTPLVF

SEQ ID NO: 583436 - protein, 12 aa, Homo sapiens
  CDR3 for beta chain variable domain of TCR clone 291718 (TRBV9, TRBJ2-1)
CGSSVGGTDIFF

SEQ ID NO: 583437 - protein, 14 aa, Homo sapiens
  CDR3 for alpha chain variable domain of TCR clone 291719 (TRAV1-2, TRAJ8)
CAVREDTGFQKLVF

SEQ ID NO: 583438 - protein, 16 aa, Homo sapiens
  CDR3 for beta chain variable domain of TCR clone 291719 (TRBV5-1, TRBJ2-3)
CASSLTSGTSGGTQYF

SEQ ID NO: 583439 - protein, 12 aa, Homo sapiens
  CDR3 for alpha chain variable domain of TCR clone 291720 (TRAV12-2, TRAJ8)
CAVNTGFQKLVF

SEQ ID NO: 583440 - protein, 14 aa, Homo sapiens
  CDR3 for beta chain variable domain of TCR clone 291720 (TRBV18, TRBJ2-5)
CASSPGVSQETQYF

SEQ ID NO: 583441 - protein, 13 aa, Homo sapiens
  CDR3 for alpha chain variable domain of TCR clone 291721 (TRAV10, TRAJ15)
CVVSGQAGTALSF

SEQ ID NO: 583442 - protein, 15 aa, Homo sapiens
  CDR3 for beta chain variable domain of TCR clone 291721 (TRBV6-1, TRBJ1-2)
CASSDTIDRGYGYTF

SEQ ID NO: 583443 - protein, 11 aa, Homo sapiens
  CDR3 for alpha chain variable domain of TCR clone 291722 (TRAV21, TRAJ34)
CAVTNTDKLIF

SEQ ID NO: 583444 - protein, 16 aa, Homo sapiens
  CDR3 for beta chain variable domain of TCR clone 291722 (TRBV18, TRBJ1-1)
CASAPGVGGRGGEAFF

SEQ ID NO: 583445 - protein, 16 aa, Homo sapiens
  CDR3 for alpha chain variable domain of TCR clone 291723 (TRAV1-2, TRAJ40)
CAVRGSRTSGTYKYIF

SEQ ID NO: 583446 - protein, 14 aa, Homo sapiens
  CDR3 for beta chain variable domain of TCR clone 291723 (TRBV4-1, TRBJ2-3)
CASSRDSGTDTQYF

SEQ ID NO: 583447 - protein, 12 aa, Homo sapiens
  CDR3 for alpha chain variable domain of TCR clone 291724 (TRAV2, TRAJ9)
CAVRAGVLKTIF

SEQ ID NO: 583448 - protein, 16 aa, Homo sapiens
  CDR3 for beta chain variable domain of TCR clone 291724 (TRBV13, TRBJ2-2)
CASSPRTGEHTGELFF

SEQ ID NO: 583449 - protein, 14 aa, Homo sapiens
  CDR3 for alpha chain variable domain of TCR clone 291725 (TRAV13-1, TRAJ13)
CAASRVGGYQRVTF

SEQ ID NO: 583450 - protein, 17 aa, Homo sapiens
  CDR3 for beta chain variable domain of TCR clone 291725 (TRBV15, TRBJ1-5)
CATSRAPPGTRNQPQHF

SEQ ID NO: 583451 - protein, 12 aa, Homo sapiens
  CDR3 for alpha chain variable domain of TCR clone 291726 (TRAV2, TRAJ10)
CASTGGVNKLTF

SEQ ID NO: 583452 - protein, 14 aa, Homo sapiens
  CDR3 for beta chain variable domain of TCR clone 291726 (TRBV7-2, TRBJ2-2)
CASRGQGAAGELFF

SEQ ID NO: 583453 - protein, 16 aa, Homo sapiens
  CDR3 for alpha chain variable domain of TCR clone 291727 (TRAV17, TRAJ22)
CATGPISSGSARQLTF

SEQ ID NO: 583454 - protein, 12 aa, Homo sapiens
  CDR3 for beta chain variable domain of TCR clone 291727 (TRBV11-2, TRBJ2-1)
CQSLGLAGGRFF

SEQ ID NO: 583455 - protein, 15 aa, Homo sapiens
  CDR3 for alpha chain variable domain of TCR clone 291728 (TRAV2, TRAJ22)
CAVPSRGVSARQLTF

SEQ ID NO: 583456 - protein, 11 aa, Homo sapiens
  CDR3 for beta chain variable domain of TCR clone 291728 (TRBV27, TRBJ2-3)
CASSLGDTQYF

SEQ ID NO: 583457 - protein, 15 aa, Homo sapiens
  CDR3 for alpha chain variable domain of TCR clone 291729 (TRAV25, TRAJ53)
CPTSNSGGSNYKLTF

SEQ ID NO: 583458 - protein, 14 aa, Homo sapiens
  CDR3 for beta chain variable domain of TCR clone 291729 (TRBV18, TRBJ2-5)
CASSPGVSQETQYF

SEQ ID NO: 583459 - protein, 15 aa, Homo sapiens
  CDR3 for alpha chain variable domain of TCR clone 291730 (TRAV3, TRAJ17)
CAVSPKEAAGNKLTF

SEQ ID NO: 583460 - protein, 14 aa, Homo sapiens
  CDR3 for beta chain variable domain of TCR clone 291730 (TRBV12-5, TRBJ2-5)
CASGSRTHQETQYF

SEQ ID NO: 583461 - protein, 12 aa, Homo sapiens
  CDR3 for alpha chain variable domain of TCR clone 291731 (TRAV30, TRAJ43)
CGTEERGNDMRF

SEQ ID NO: 583462 - protein, 11 aa, Homo sapiens
  CDR3 for beta chain variable domain of TCR clone 291731 (TRBV29-1, TRBJ2-5)
WSEDRTGTQYF

SEQ ID NO: 583463 - protein, 17 aa, Homo sapiens
  CDR3 for alpha chain variable domain of TCR clone 291732 (TRAV8-6, TRAJ58)
CAVSSWVGETSGPRLTF

SEQ ID NO: 583464 - protein, 15 aa, Homo sapiens
  CDR3 for beta chain variable domain of TCR clone 291732 (TRBV6-5, TRBJ2-1)
CASSYDAGAGNEQFF

SEQ ID NO: 583465 - protein, 13 aa, Homo sapiens
  CDR3 for alpha chain variable domain of TCR clone 291733 (TRAV9-2, TRAJ6)
CALSAGGSYIPTF

SEQ ID NO: 583466 - protein, 13 aa, Homo sapiens
  CDR3 for beta chain variable domain of TCR clone 291733 (TRBV12-4, TRBJ2-7)
CASSATETYEQYF

SEQ ID NO: 583467 - protein, 13 aa, Homo sapiens
  CDR3 for alpha chain variable domain of TCR clone 291734 (TRAV13-1, TRAJ21)
CAASIYNFNNFYF

SEQ ID NO: 583468 - protein, 13 aa, Homo sapiens
  CDR3 for beta chain variable domain of TCR clone 291734 (TRBV27, TRBJ1-4)
CASSLVGDEKLFF

SEQ ID NO: 583469 - protein, 13 aa, Homo sapiens
  CDR3 for alpha chain variable domain of TCR clone 291735 (TRAV21, TRAJ27)
CAARPGTSGKSTF

SEQ ID NO: 583470 - protein, 14 aa, Homo sapiens
  CDR3 for beta chain variable domain of TCR clone 291735 (TRBV7-6, TRBJ2-3)
CASSLGTVTDTQYF

SEQ ID NO: 583471 - protein, 10 aa, Homo sapiens
  CDR3 for alpha chain variable domain of TCR clone 291736 (TRAV3, TRAJ30)
CAVREIKIIF

SEQ ID NO: 583472 - protein, 12 aa, Homo sapiens
  CDR3 for beta chain variable domain of TCR clone 291736 (TRBV20-1, TRBJ2-3)
CSADGAGDTQYF

SEQ ID NO: 583473 - protein, 13 aa, Homo sapiens
  CDR3 for alpha chain variable domain of TCR clone 291737 (TRAV2, TRAJ29)
CAAGNSGNTPLVF

SEQ ID NO: 583474 - protein, 16 aa, Homo sapiens
  CDR3 for beta chain variable domain of TCR clone 291737 (TRBV7-9, TRBJ1-2)
CASSPGGGALNYGYTF

SEQ ID NO: 583475 - protein, 12 aa, Homo sapiens
  CDR3 for alpha chain variable domain of TCR clone 291738 (TRAV2, TRAJ33)
CAVPDSNYQLIR

SEQ ID NO: 583476 - protein, 17 aa, Homo sapiens
  CDR3 for beta chain variable domain of TCR clone 291738 (TRBV6-5, TRBJ2-3)
CASSYGTSLYKSDTQYF

SEQ ID NO: 583477 - protein, 16 aa, Homo sapiens
  CDR3 for alpha chain variable domain of TCR clone 291739 (TRAV13-1, TRAJ22)
CAAKGGRSGSPRQLTF

SEQ ID NO: 583478 - protein, 15 aa, Homo sapiens
  CDR3 for beta chain variable domain of TCR clone 291739 (TRBV9, TRBJ1-6)
CASSVAGTGDSPLHF

SEQ ID NO: 583479 - protein, 13 aa, Homo sapiens
  CDR3 for alpha chain variable domain of TCR clone 291740 (TRAV8-6, TRAJ13)
CAVSSGGYHKVTF

SEQ ID NO: 583480 - protein, 15 aa, Homo sapiens
  CDR3 for beta chain variable domain of TCR clone 291740 (TRBV7-9, TRBJ2-7)
CASSLPMGQANEQYF

SEQ ID NO: 583481 - protein, 12 aa, Homo sapiens
  CDR3 for alpha chain variable domain of TCR clone 291741 (TRAV16, TRAJ56)
CAPTGANSKLTF

SEQ ID NO: 583482 - protein, 17 aa, Homo sapiens
  CDR3 for beta chain variable domain of TCR clone 291741 (TRBV27, TRBJ2-6)
WASSLTGFASGANVLTF

SEQ ID NO: 583483 - protein, 14 aa, Homo sapiens
  CDR3 for alpha chain variable domain of TCR clone 291742 (TRAV8-1, TRAJ5)
CAVSMDTGRRALTF

SEQ ID NO: 583484 - protein, 17 aa, Homo sapiens
  CDR3 for beta chain variable domain of TCR clone 291742 (TRBV20-1, TRBJ2-1)
CSASSSGLAGSHNEQFF

SEQ ID NO: 583485 - protein, 18 aa, Homo sapiens
  CDR3 for alpha chain variable domain of TCR clone 291743 (TRAV3, TRAJ17)
CAVRARRGGRSCRQQANF

SEQ ID NO: 583486 - protein, 14 aa, Homo sapiens
  CDR3 for beta chain variable domain of TCR clone 291743 (TRBV4-1, TRBJ2-2)
CASSQSVNTGELFF

SEQ ID NO: 583487 - protein, 12 aa, Homo sapiens
  CDR3 for alpha chain variable domain of TCR clone 291744 (TRAV12-3, TRAJ17)
CAMTLTGNKLTF

SEQ ID NO: 583488 - protein, 14 aa, Homo sapiens
  CDR3 for beta chain variable domain of TCR clone 291744 (TRBV28, TRBJ1-1)
CASSSEQGYTEAFF

SEQ ID NO: 583489 - protein, 14 aa, Homo sapiens
  CDR3 for alpha chain variable domain of TCR clone 291745 (TRAV38-1, TRAJ45)
CAYYSGGGADGLTF

SEQ ID NO: 583490 - protein, 13 aa, Homo sapiens
  CDR3 for beta chain variable domain of TCR clone 291745 (TRBV2, TRBJ2-3)
CASILAGGQGQYF

SEQ ID NO: 583491 - protein, 11 aa, Homo sapiens
  CDR3 for alpha chain variable domain of TCR clone 291746 (TRAV1-2, TRAJ31)
CAVNNNARLMS

SEQ ID NO: 583492 - protein, 14 aa, Homo sapiens
  CDR3 for beta chain variable domain of TCR clone 291746 (TRBV28, TRBJ2-1)
CQQYIAGGRSEQFF

SEQ ID NO: 583493 - protein, 13 aa, Homo sapiens
  CDR3 for alpha chain variable domain of TCR clone 291747 (TRAV13-1, TRAJ33)
CAASRAGNYQLIW

SEQ ID NO: 583494 - protein, 17 aa, Homo sapiens
  CDR3 for beta chain variable domain of TCR clone 291747 (TRBV7-3, TRBJ2-3)
CASSLMKRMRGADTQYF

SEQ ID NO: 583495 - protein, 11 aa, Homo sapiens
  CDR3 for alpha chain variable domain of TCR clone 291748 (TRAV12-3, TRAJ49)
CAANTGNQFYF

SEQ ID NO: 583496 - protein, 15 aa, Homo sapiens
  CDR3 for beta chain variable domain of TCR clone 291748 (TRBV11-2, TRBJ2-1)
CASSLGTSGLNEQFL

SEQ ID NO: 583497 - protein, 17 aa, Homo sapiens
  CDR3 for alpha chain variable domain of TCR clone 291749 (TRAV3, TRAJ7)
CAVRDMSPLEGTTDSLL

SEQ ID NO: 583498 - protein, 17 aa, Homo sapiens
  CDR3 for beta chain variable domain of TCR clone 291749 (TRBV15, TRBJ1-2)
CATTGREIDVVNYGYTF

SEQ ID NO: 583499 - protein, 14 aa, Homo sapiens
  CDR3 for alpha chain variable domain of TCR clone 291750 (TRAV1-2, TRAJ8)
CAVRADTGFQKLVF

SEQ ID NO: 583500 - protein, 15 aa, Homo sapiens
  CDR3 for beta chain variable domain of TCR clone 291750 (TRBV7-9, TRBJ1-6)
CASSSPGRGNSPLHF

SEQ ID NO: 583501 - protein, 13 aa, Homo sapiens
  CDR3 for alpha chain variable domain of TCR clone 291751 (TRAV3, TRAJ21)
CAVREPDFNKFYF

SEQ ID NO: 583502 - protein, 11 aa, Homo sapiens
  CDR3 for beta chain variable domain of TCR clone 291751 (TRBV12-4, TRBJ1-2)
CASRGDRGYTF

SEQ ID NO: 583503 - protein, 13 aa, Homo sapiens
  CDR3 for alpha chain variable domain of TCR clone 291752 (TRAV8-3, TRAJ48)
CCGCNFGNAKLTF

SEQ ID NO: 583504 - protein, 12 aa, Homo sapiens
  CDR3 for beta chain variable domain of TCR clone 291752 (TRBV7-2, TRBJ2-5)
CASSQYQETQYF

SEQ ID NO: 583505 - protein, 12 aa, Homo sapiens
  CDR3 for alpha chain variable domain of TCR clone 291753 (TRAV13-1, TRAJ49)
CAAPNTGNQFYF

SEQ ID NO: 583506 - protein, 17 aa, Homo sapiens
  CDR3 for beta chain variable domain of TCR clone 291753 (TRBV7-8, TRBJ2-6)
CASSAGTGGAGANVLTF

SEQ ID NO: 583507 - protein, 14 aa, Homo sapiens
  CDR3 for alpha chain variable domain of TCR clone 291754 (TRAV8-3, TRAJ28)
CAVVPGAGSYQLTF

SEQ ID NO: 583508 - protein, 15 aa, Homo sapiens
  CDR3 for beta chain variable domain of TCR clone 291754 (TRBV10-2, TRBJ2-6)
CASSEQGTGANVLTF

SEQ ID NO: 583509 - protein, 15 aa, Homo sapiens
  CDR3 for alpha chain variable domain of TCR clone 291755 (TRAV20, TRAJ53)
CAVQASGGSNSKLTF

SEQ ID NO: 583510 - protein, 12 aa, Homo sapiens
  CDR3 for beta chain variable domain of TCR clone 291755 (TRBV7-6, TRBJ2-5)
CASSLSQETQYF

SEQ ID NO: 583511 - protein, 12 aa, Homo sapiens
  CDR3 for alpha chain variable domain of TCR clone 291756 (TRAV3, TRAJ31)
CAVRDGNARLMF

SEQ ID NO: 583512 - protein, 14 aa, Homo sapiens
  CDR3 for beta chain variable domain of TCR clone 291756 (TRBV12-5, TRBJ2-5)
CASGSQTHQETQYF

SEQ ID NO: 583513 - protein, 13 aa, Homo sapiens
  CDR3 for alpha chain variable domain of TCR clone 291757 (TRAV36/DV7, TRAJ29)
CAVEPPGNTPLVF

SEQ ID NO: 583514 - protein, 14 aa, Homo sapiens
  CDR3 for beta chain variable domain of TCR clone 291757 (TRBV5-1, TRBJ2-7)
CASSRGESLYEQYF

SEQ ID NO: 583515 - protein, 16 aa, Homo sapiens
  CDR3 for alpha chain variable domain of TCR clone 291758 (TRAV8-3, TRAJ22)
CAVDLLGPGSARQLIF

SEQ ID NO: 583516 - protein, 14 aa, Homo sapiens
  CDR3 for beta chain variable domain of TCR clone 291758 (TRBV11-2, TRBJ2-7)
CASSLELEGYEQYF

SEQ ID NO: 583517 - protein, 14 aa, Homo sapiens
  CDR3 for alpha chain variable domain of TCR clone 291759 (TRAV8-3, TRAJ20)
CAVGSSSNDYKLSF

SEQ ID NO: 583518 - protein, 15 aa, Homo sapiens
  CDR3 for beta chain variable domain of TCR clone 291759 (TRBV20-1, TRBJ2-7)
CSARVPAAYFYEQYF

SEQ ID NO: 583519 - protein, 14 aa, Homo sapiens
  CDR3 for alpha chain variable domain of TCR clone 291760 (TRAV17, TRAJ16)
CATADFSDGQKLLF

SEQ ID NO: 583520 - protein, 14 aa, Homo sapiens
  CDR3 for beta chain variable domain of TCR clone 291760 (TRBV5-5, TRBJ1-2)
CASSLDPYNYGYTF

SEQ ID NO: 583521 - protein, 12 aa, Homo sapiens
  CDR3 for alpha chain variable domain of TCR clone 291761 (TRAV12-3, TRAJ41)
CAMSYSGYALNF

SEQ ID NO: 583522 - protein, 16 aa, Homo sapiens
  CDR3 for beta chain variable domain of TCR clone 291761 (TRBV27, TRBJ2-2)
CASSFRGLVRTGELFF

SEQ ID NO: 583523 - protein, 14 aa, Homo sapiens
  CDR3 for alpha chain variable domain of TCR clone 291762 (TRAV8-4, TRAJ13)
CAVTLSGGYQKVTF

SEQ ID NO: 583524 - protein, 14 aa, Homo sapiens
  CDR3 for beta chain variable domain of TCR clone 291762 (TRBV7-2, TRBJ1-2)
CASSKTGSTYGYTF

SEQ ID NO: 583525 - protein, 14 aa, Homo sapiens
  CDR3 for alpha chain variable domain of TCR clone 291763 (TRAV2, TRAJ9)
CAVEDRSGGFKTIF

SEQ ID NO: 583526 - protein, 14 aa, Homo sapiens
  CDR3 for beta chain variable domain of TCR clone 291763 (TRBV18, TRBJ1-5)
CASSRQRRNQPQHF

SEQ ID NO: 583527 - protein, 16 aa, Homo sapiens
  CDR3 for alpha chain variable domain of TCR clone 291764 (TRAV3, TRAJ10)
CAVRDMRAGGGNKITF

SEQ ID NO: 583528 - protein, 15 aa, Homo sapiens
  CDR3 for beta chain variable domain of TCR clone 291764 (TRBV20-1, TRBJ2-7)
CSARDRVSGMDEQYF

SEQ ID NO: 583529 - protein, 18 aa, Homo sapiens
  CDR3 for alpha chain variable domain of TCR clone 291765 (TRAV1-2, TRAJ18)
GAVRDMGDRGSTLGRLYF

SEQ ID NO: 583530 - protein, 16 aa, Homo sapiens
  CDR3 for beta chain variable domain of TCR clone 291765 (TRBV29-1, TRBJ1-2)
CSVEANRDIANYGYTF

SEQ ID NO: 583531 - protein, 16 aa, Homo sapiens
  CDR3 for alpha chain variable domain of TCR clone 291766 (TRAV12-2, TRAJ28)
CAVVTDSGAGSYQLTF

SEQ ID NO: 583532 - protein, 14 aa, Homo sapiens
  CDR3 for beta chain variable domain of TCR clone 291766 (TRBV28, TRBJ1-1)
CASSPRTRWAEAFF

SEQ ID NO: 583533 - protein, 14 aa, Homo sapiens
  CDR3 for alpha chain variable domain of TCR clone 291767 (TRAV10, TRAJ15)
CVVSASQAGTALIF

SEQ ID NO: 583534 - protein, 16 aa, Homo sapiens
  CDR3 for beta chain variable domain of TCR clone 291767 (TRBV12-5, TRBJ2-5)
CASGPRTSGNQETQYF

SEQ ID NO: 583535 - protein, 13 aa, Homo sapiens
  CDR3 for alpha chain variable domain of TCR clone 291768 (TRAV2, TRAJ40)
CAVVTSGTYKYIF

SEQ ID NO: 583536 - protein, 17 aa, Homo sapiens
  CDR3 for beta chain variable domain of TCR clone 291768 (TRBV7-3, TRBJ2-3)
YASSLMKRMRGADTQYF

SEQ ID NO: 583537 - protein, 14 aa, Homo sapiens
  CDR3 for alpha chain variable domain of TCR clone 291769 (TRAV1-1, TRAJ27)
CAVIYNTNAGKSTF

SEQ ID NO: 583538 - protein, 13 aa, Homo sapiens
  CDR3 for beta chain variable domain of TCR clone 291769 (TRBV20-1, TRBJ2-5)
CSAREAFQETQYF

SEQ ID NO: 583539 - protein, 14 aa, Homo sapiens
  CDR3 for alpha chain variable domain of TCR clone 291770 (TRAV2, TRAJ9)
CAVEDRSGGFKTIF

SEQ ID NO: 583540 - protein, 13 aa, Homo sapiens
  CDR3 for beta chain variable domain of TCR clone 291770 (TRBV19, TRBJ1-2)
CASSVPGQDCYTF

SEQ ID NO: 583541 - protein, 12 aa, Homo sapiens
  CDR3 for alpha chain variable domain of TCR clone 291771 (TRAV21, TRAJ49)
CAVRNTGNQFYF

SEQ ID NO: 583542 - protein, 15 aa, Homo sapiens
  CDR3 for beta chain variable domain of TCR clone 291771 (TRBV11-3, TRBJ2-3)
CASLKDGREGDTQYF

SEQ ID NO: 583543 - protein, 14 aa, Homo sapiens
  CDR3 for alpha chain variable domain of TCR clone 291772 (TRAV8-1, TRAJ5)
CAVGTDTGRRALTF

SEQ ID NO: 583544 - protein, 12 aa, Homo sapiens
  CDR3 for beta chain variable domain of TCR clone 291772 (TRBV7-8, TRBJ2-5)
CASSPRVETQYF

SEQ ID NO: 583545 - protein, 14 aa, Homo sapiens
  CDR3 for alpha chain variable domain of TCR clone 291773 (TRAV12-3, TRAJ10)
SHLPLTGGGNKLTF

SEQ ID NO: 583546 - protein, 15 aa, Homo sapiens
  CDR3 for beta chain variable domain of TCR clone 291773 (TRBV29-1, TRBJ2-6)
CSAGDRGSGANGLTF

SEQ ID NO: 583547 - protein, 18 aa, Homo sapiens
  CDR3 for alpha chain variable domain of TCR clone 291774 (TRAV38-2/DV8, TRAJ42)
CAYRSAALTGGSQGNLIF

SEQ ID NO: 583548 - protein, 12 aa, Homo sapiens
  CDR3 for beta chain variable domain of TCR clone 291774 (TRBV11-3, TRBJ2-2)
CASSLGGGELFF

SEQ ID NO: 583549 - protein, 16 aa, Homo sapiens
  CDR3 for alpha chain variable domain of TCR clone 291775 (TRAV16, TRAJ52)
CALSAAGGTSYGKLTF

SEQ ID NO: 583550 - protein, 19 aa, Homo sapiens
  CDR3 for beta chain variable domain of TCR clone 291775 (TRBV19, TRBJ2-5)
CASSIGQVTDFCLGETQYF

SEQ ID NO: 583551 - protein, 16 aa, Homo sapiens
  CDR3 for alpha chain variable domain of TCR clone 291776 (TRAV1-2, TRAJ35)
CAARGLTIGFGNVLHC

SEQ ID NO: 583552 - protein, 13 aa, Homo sapiens
  CDR3 for beta chain variable domain of TCR clone 291776 (TRBV6-6, TRBJ2-1)
CASSLHQGDEQFF

SEQ ID NO: 583553 - protein, 11 aa, Homo sapiens
  CDR3 for alpha chain variable domain of TCR clone 291777 (TRAV2, TRAJ13)
CASGGYQKVTF

SEQ ID NO: 583554 - protein, 14 aa, Homo sapiens
  CDR3 for beta chain variable domain of TCR clone 291777 (TRBV19, TRBJ1-5)
CASSFTGSNQPQHF

SEQ ID NO: 583555 - protein, 16 aa, Homo sapiens
  CDR3 for alpha chain variable domain of TCR clone 291778 (TRAV12-3, TRAJ53)
CAMSPGSGGSNYKLTF

SEQ ID NO: 583556 - protein, 12 aa, Homo sapiens
  CDR3 for beta chain variable domain of TCR clone 291778 (TRBV7-8, TRBJ2-7)
CASSLVDREQYF

SEQ ID NO: 583557 - protein, 14 aa, Homo sapiens
  CDR3 for alpha chain variable domain of TCR clone 291779 (TRAV12-2, TRAJ13)
CAVKKTGGYQKVTF

SEQ ID NO: 583558 - protein, 13 aa, Homo sapiens
  CDR3 for beta chain variable domain of TCR clone 291779 (TRBV12-4, TRBJ1-5)
RASSPDRAQPQHF

SEQ ID NO: 583559 - protein, 14 aa, Homo sapiens
  CDR3 for alpha chain variable domain of TCR clone 291780 (TRAV12-3, TRAJ10)
SHLPLTGGGNKLTF

SEQ ID NO: 583560 - protein, 12 aa, Homo sapiens
  CDR3 for beta chain variable domain of TCR clone 291780 (TRBV19, TRBJ1-1)
CASTSGGGEAFF

SEQ ID NO: 583561 - protein, 14 aa, Homo sapiens
  CDR3 for alpha chain variable domain of TCR clone 291781 (TRAV21, TRAJ32)
CYGDYRGATNKLIF

SEQ ID NO: 583562 - protein, 13 aa, Homo sapiens
  CDR3 for beta chain variable domain of TCR clone 291781 (TRBV2, TRBJ1-6)
CASGRGGISPLHF

SEQ ID NO: 583563 - protein, 14 aa, Homo sapiens
  CDR3 for alpha chain variable domain of TCR clone 291782 (TRAV17, TRAJ11)
CATDTSRGYSTLTF

SEQ ID NO: 583564 - protein, 13 aa, Homo sapiens
  CDR3 for beta chain variable domain of TCR clone 291782 (TRBV19, TRBJ2-5)
CASRDSRLETQYF

SEQ ID NO: 583565 - protein, 19 aa, Homo sapiens
  CDR3 for alpha chain variable domain of TCR clone 291783 (TRAV29/DV5, TRAJ49)
CSVLLCSKLTVDTGNQSYF

SEQ ID NO: 583566 - protein, 16 aa, Homo sapiens
  CDR3 for beta chain variable domain of TCR clone 291783 (TRBV7-3, TRBJ2-2)
CASSLKRGTLSGELFF

SEQ ID NO: 583567 - protein, 13 aa, Homo sapiens
  CDR3 for alpha chain variable domain of TCR clone 291784 (TRAV12-2, TRAJ52)
CAVSGTSYGKLTF

SEQ ID NO: 583568 - protein, 15 aa, Homo sapiens
  CDR3 for beta chain variable domain of TCR clone 291784 (TRBV6-5, TRBJ2-1)
CASSYDAGAGNEQFF

SEQ ID NO: 583569 - protein, 14 aa, Homo sapiens
  CDR3 for alpha chain variable domain of TCR clone 291785 (TRAV13-1, TRAJ35)
CAASKGGFGNVLHC

SEQ ID NO: 583570 - protein, 14 aa, Homo sapiens
  CDR3 for beta chain variable domain of TCR clone 291785 (TRBV6-3, TRBJ2-2)
CASTYTPDTGELFF

SEQ ID NO: 583571 - protein, 13 aa, Homo sapiens
  CDR3 for alpha chain variable domain of TCR clone 291786 (TRAV12-2, TRAJ20)
CAVYPSNDDKLSF

SEQ ID NO: 583572 - protein, 15 aa, Homo sapiens
  CDR3 for beta chain variable domain of TCR clone 291786 (TRBV27, TRBJ2-5)
CASSLCPRGGETQYF

SEQ ID NO: 583573 - protein, 13 aa, Homo sapiens
  CDR3 for alpha chain variable domain of TCR clone 291787 (TRAV38-1, TRAJ42)
CARGGGSQGNPIF

SEQ ID NO: 583574 - protein, 17 aa, Homo sapiens
  CDR3 for beta chain variable domain of TCR clone 291787 (TRBV20-1, TRBJ2-1)
CSARDPLAGVWDNEQFF

SEQ ID NO: 583575 - protein, 20 aa, Homo sapiens
  CDR3 for alpha chain variable domain of TCR clone 291788 (TRAV25, TRAJ21)
TATQTTDVGTYPLSFNKFYF

SEQ ID NO: 583576 - protein, 14 aa, Homo sapiens
  CDR3 for beta chain variable domain of TCR clone 291788 (TRBV7-2, TRBJ2-7)
CASRSQGAAYEQYF

SEQ ID NO: 583577 - protein, 14 aa, Homo sapiens
  CDR3 for alpha chain variable domain of TCR clone 291789 (TRAV12-2, TRAJ9)
CAVNTEGGGFKTIF

SEQ ID NO: 583578 - protein, 15 aa, Homo sapiens
  CDR3 for beta chain variable domain of TCR clone 291789 (TRBV7-2, TRBJ2-1)
CASSSGLAGGNEQFF

SEQ ID NO: 583579 - protein, 14 aa, Homo sapiens
  CDR3 for alpha chain variable domain of TCR clone 291790 (TRAV8-2, TRAJ4)
CVVSPSGGYNKLIF

SEQ ID NO: 583580 - protein, 14 aa, Homo sapiens
  CDR3 for beta chain variable domain of TCR clone 291790 (TRBV19, TRBJ2-5)
CASSSSGIQETQYL

SEQ ID NO: 583581 - protein, 12 aa, Homo sapiens
  CDR3 for alpha chain variable domain of TCR clone 291791 (TRAV1-2, TRAJ26)
CAVRYYGQNFVF

SEQ ID NO: 583582 - protein, 15 aa, Homo sapiens
  CDR3 for beta chain variable domain of TCR clone 291791 (TRBV28, TRBJ2-1)
CACSIIAGGRSEQFF

SEQ ID NO: 583583 - protein, 10 aa, Homo sapiens
  CDR3 for alpha chain variable domain of TCR clone 291792 (TRAV26-1, TRAJ40)
CIAGTYKYIF

SEQ ID NO: 583584 - protein, 15 aa, Homo sapiens
  CDR3 for beta chain variable domain of TCR clone 291792 (TRBV5-5, TRBJ1-5)
CASSLKGGGEQPQHF

SEQ ID NO: 583585 - protein, 14 aa, Homo sapiens
  CDR3 for alpha chain variable domain of TCR clone 291793 (TRAV17, TRAJ56)
CATVPAGANSKLTF

SEQ ID NO: 583586 - protein, 16 aa, Homo sapiens
  CDR3 for beta chain variable domain of TCR clone 291793 (TRBV12-4, TRBJ2-1)
CASSAVGQGNGDEQFF

SEQ ID NO: 583587 - protein, 12 aa, Homo sapiens
  CDR3 for alpha chain variable domain of TCR clone 291794 (TRAV13-2, TRAJ23)
CAEHHRGGKLIF

SEQ ID NO: 583588 - protein, 15 aa, Homo sapiens
  CDR3 for beta chain variable domain of TCR clone 291794 (TRBV19, TRBJ1-2)
CASSVGQVLNYGYTF

SEQ ID NO: 583589 - protein, 13 aa, Homo sapiens
  CDR3 for alpha chain variable domain of TCR clone 291795 (TRAV20, TRAJ34)
CAVSSYNTDELIF

SEQ ID NO: 583590 - protein, 15 aa, Homo sapiens
  CDR3 for beta chain variable domain of TCR clone 291795 (TRBV20-1, TRBJ1-2)
CSAAGEGARIYGYTF

SEQ ID NO: 583591 - protein, 16 aa, Homo sapiens
  CDR3 for alpha chain variable domain of TCR clone 291796 (TRAV26-1, TRAJ47)
CIVRDVLSQYGNKLVF

SEQ ID NO: 583592 - protein, 16 aa, Homo sapiens
  CDR3 for beta chain variable domain of TCR clone 291796 (TRBV5-1, TRBJ2-1)
CASSFGVSGSYNEQFF

SEQ ID NO: 583593 - protein, 16 aa, Homo sapiens
  CDR3 for alpha chain variable domain of TCR clone 291797 (TRAV35, TRAJ52)
CSGQGSGGTSYGKLTF

SEQ ID NO: 583594 - protein, 17 aa, Homo sapiens
  CDR3 for beta chain variable domain of TCR clone 291797 (TRBV13, TRBJ2-3)
CASSLSRVAGGRNTQYF

SEQ ID NO: 583595 - protein, 17 aa, Homo sapiens
  CDR3 for alpha chain variable domain of TCR clone 291798 (TRAV3, TRAJ28)
CAVREAYSGAGSYQLTF

SEQ ID NO: 583596 - protein, 14 aa, Homo sapiens
  CDR3 for beta chain variable domain of TCR clone 291798 (TRBV25-1, TRBJ1-1)
CASTHLGGNTEAFF

SEQ ID NO: 583597 - protein, 16 aa, Homo sapiens
  CDR3 for alpha chain variable domain of TCR clone 291799 (TRAV38-2/DV8, TRAJ47)
CAYRSAIMKYGNKLVF

SEQ ID NO: 583598 - protein, 14 aa, Homo sapiens
  CDR3 for beta chain variable domain of TCR clone 291799 (TRBV19, TRBJ2-7)
CASSIFAGTYEQYF

SEQ ID NO: 583599 - protein, 17 aa, Homo sapiens
  CDR3 for alpha chain variable domain of TCR clone 291800 (TRAV17, TRAJ28)
CATDPRRGGAGSYPITF

SEQ ID NO: 583600 - protein, 16 aa, Homo sapiens
  CDR3 for beta chain variable domain of TCR clone 291800 (TRBV25-1, TRBJ1-1)
CASSGDRDRGRIEAFF

SEQ ID NO: 583601 - protein, 11 aa, Homo sapiens
  CDR3 for alpha chain variable domain of TCR clone 291801 (TRAV1-2, TRAJ20)
CAVRFDYKLSF

SEQ ID NO: 583602 - protein, 13 aa, Homo sapiens
  CDR3 for beta chain variable domain of TCR clone 291801 (TRBV10-1, TRBJ2-7)
CASSGTSAYEQYF

SEQ ID NO: 583603 - protein, 15 aa, Homo sapiens
  CDR3 for alpha chain variable domain of TCR clone 291802 (TRAV3, TRAJ22)
CAVRDRGGSARQLTF

SEQ ID NO: 583604 - protein, 14 aa, Homo sapiens
  CDR3 for beta chain variable domain of TCR clone 291802 (TRBV19, TRBJ2-2)
CASTVTANTGELFF

SEQ ID NO: 583605 - protein, 14 aa, Homo sapiens
  CDR3 for alpha chain variable domain of TCR clone 291803 (TRAV17, TRAJ57)
CATDPQGGSEKLAF

SEQ ID NO: 583606 - protein, 13 aa, Homo sapiens
  CDR3 for beta chain variable domain of TCR clone 291803 (TRBV10-3, TRBJ1-1)
CAIIPEGGTEAFF

SEQ ID NO: 583607 - protein, 14 aa, Homo sapiens
  CDR3 for alpha chain variable domain of TCR clone 291804 (TRAV12-1, TRAJ42)
CVVIYGGSQGNLIF

SEQ ID NO: 583608 - protein, 17 aa, Homo sapiens
  CDR3 for beta chain variable domain of TCR clone 291804 (TRBV3-1, TRBJ2-6)
CASSPNTGPAGANVLAF

SEQ ID NO: 583609 - protein, 14 aa, Homo sapiens
  CDR3 for alpha chain variable domain of TCR clone 291805 (TRAV17, TRAJ57)
CATDPQGGSEKLVF

SEQ ID NO: 583610 - protein, 13 aa, Homo sapiens
  CDR3 for beta chain variable domain of TCR clone 291805 (TRBV10-3, TRBJ2-1)
CAISEFSGREQFF

SEQ ID NO: 583611 - protein, 13 aa, Homo sapiens
  CDR3 for alpha chain variable domain of TCR clone 291806 (TRAV27, TRAJ45)
CRSSGGGSDRLTF

SEQ ID NO: 583612 - protein, 17 aa, Homo sapiens
  CDR3 for beta chain variable domain of TCR clone 291806 (TRBV11-2, TRBJ2-1)
CASSLYPPGVEYNEQFF

SEQ ID NO: 583613 - protein, 15 aa, Homo sapiens
  CDR3 for alpha chain variable domain of TCR clone 291807 (TRAV27, TRAJ38)
CAARHNAGNDRKLIW

SEQ ID NO: 583614 - protein, 13 aa, Homo sapiens
  CDR3 for beta chain variable domain of TCR clone 291807 (TRBV12-5, TRBJ2-3)
CASGDRQSDTQYF

SEQ ID NO: 583615 - protein, 11 aa, Homo sapiens
  CDR3 for alpha chain variable domain of TCR clone 291808 (TRAV12-1, TRAJ47)
CVVNPSNKLVF

SEQ ID NO: 583616 - protein, 12 aa, Homo sapiens
  CDR3 for beta chain variable domain of TCR clone 291808 (TRBV28, TRBJ2-3)
CASSLYRDTQYF

SEQ ID NO: 583617 - protein, 19 aa, Homo sapiens
  CDR3 for alpha chain variable domain of TCR clone 291809 (TRAV38-1, TRAJ53)
CAFMKHWLESGGSNYKLTF

SEQ ID NO: 583618 - protein, 13 aa, Homo sapiens
  CDR3 for beta chain variable domain of TCR clone 291809 (TRBV19, TRBJ2-7)
CASSPRQSYEQYF

SEQ ID NO: 583619 - protein, 14 aa, Homo sapiens
  CDR3 for alpha chain variable domain of TCR clone 291810 (TRAV12-2, TRAJ31)
CAVSRGPDNARLMF

SEQ ID NO: 583620 - protein, 11 aa, Homo sapiens
  CDR3 for beta chain variable domain of TCR clone 291810 (TRBV29-1, TRBJ2-5)
CSEDRTGTQYF

SEQ ID NO: 583621 - protein, 14 aa, Homo sapiens
  CDR3 for alpha chain variable domain of TCR clone 291811 (TRAV1-2, TRAJ16)
CAVNRFSDGQKLLF

SEQ ID NO: 583622 - protein, 15 aa, Homo sapiens
  CDR3 for beta chain variable domain of TCR clone 291811 (TRBV5-5, TRBJ2-7)
CASSWEAGGPYEQYF

SEQ ID NO: 583623 - protein, 14 aa, Homo sapiens
  CDR3 for alpha chain variable domain of TCR clone 291812 (TRAV14/DV4, TRAJ42)
CPRGSLRSQGNLIF

SEQ ID NO: 583624 - protein, 18 aa, Homo sapiens
  CDR3 for beta chain variable domain of TCR clone 291812 (TRBV20-1, TRBJ2-3)
CRASGLAGGPGTTDTQYF

SEQ ID NO: 583625 - protein, 14 aa, Homo sapiens
  CDR3 for alpha chain variable domain of TCR clone 291813 (TRAV35, TRAJ38)
CAGSNAGNNRKLIW

SEQ ID NO: 583626 - protein, 12 aa, Homo sapiens
  CDR3 for beta chain variable domain of TCR clone 291813 (TRBV19, TRBJ2-7)
CASSDRGYEQYF

SEQ ID NO: 583627 - protein, 15 aa, Homo sapiens
  CDR3 for alpha chain variable domain of TCR clone 291814 (TRAV17, TRAJ16)
CATALRFSDGKKLLF

SEQ ID NO: 583628 - protein, 12 aa, Homo sapiens
  CDR3 for beta chain variable domain of TCR clone 291814 (TRBV2, TRBJ2-7)
CASSDPDYEQYF

SEQ ID NO: 583629 - protein, 13 aa, Homo sapiens
  CDR3 for alpha chain variable domain of TCR clone 291815 (TRAV17, TRAJ5)
CALRGTGRRALTF

SEQ ID NO: 583630 - protein, 13 aa, Homo sapiens
  CDR3 for beta chain variable domain of TCR clone 291815 (TRBV4-1, TRBJ2-2)
CASSQENTGELFF

SEQ ID NO: 583631 - protein, 12 aa, Homo sapiens
  CDR3 for alpha chain variable domain of TCR clone 291816 (TRAV36/DV7, TRAJ54)
CAVVRGVQKLVF

SEQ ID NO: 583632 - protein, 13 aa, Homo sapiens
  CDR3 for beta chain variable domain of TCR clone 291816 (TRBV7-9, TRBJ1-2)
CASSLKQNYGYTF

SEQ ID NO: 583633 - protein, 15 aa, Homo sapiens
  CDR3 for alpha chain variable domain of TCR clone 291817 (TRAV26-2, TRAJ26)
CILRDFDNYSQNFVF

SEQ ID NO: 583634 - protein, 16 aa, Homo sapiens
  CDR3 for beta chain variable domain of TCR clone 291817 (TRBV4-2, TRBJ1-1)
CASSQAGFGMNTEAFF

SEQ ID NO: 583635 - protein, 15 aa, Homo sapiens
  CDR3 for alpha chain variable domain of TCR clone 291818 (TRAV2, TRAJ28)
CAVPYSGAGSYQLTF

SEQ ID NO: 583636 - protein, 16 aa, Homo sapiens
  CDR3 for beta chain variable domain of TCR clone 291818 (TRBV7-9, TRBJ2-1)
CASSDVAGGSYNEQFF

SEQ ID NO: 583637 - protein, 12 aa, Homo sapiens
  CDR3 for alpha chain variable domain of TCR clone 291819 (TRAV16, TRAJ10)
CSRTGGGNKLTF

SEQ ID NO: 583638 - protein, 16 aa, Homo sapiens
  CDR3 for beta chain variable domain of TCR clone 291819 (TRBV9, TRBJ2-1)
CASSPFEGSSYNEQFF

SEQ ID NO: 583639 - protein, 14 aa, Homo sapiens
  CDR3 for alpha chain variable domain of TCR clone 291820 (TRAV16, TRAJ39)
CALSKNNAGNMLTF

SEQ ID NO: 583640 - protein, 15 aa, Homo sapiens
  CDR3 for beta chain variable domain of TCR clone 291820 (TRBV5-4, TRBJ1-4)
CASSPAWGTNEKLFF

SEQ ID NO: 583641 - protein, 15 aa, Homo sapiens
  CDR3 for alpha chain variable domain of TCR clone 291821 (TRAV26-1, TRAJ29)
CIVRVEGSGNTPVVF

SEQ ID NO: 583642 - protein, 15 aa, Homo sapiens
  CDR3 for beta chain variable domain of TCR clone 291821 (TRBV7-9, TRBJ1-5)
CASSQGHQPNQPQHF

SEQ ID NO: 583643 - protein, 17 aa, Homo sapiens
  CDR3 for alpha chain variable domain of TCR clone 291822 (TRAV8-6, TRAJ8)
CAVKEGIENTGLQKLVF

SEQ ID NO: 583644 - protein, 19 aa, Homo sapiens
  CDR3 for beta chain variable domain of TCR clone 291822 (TRBV28, TRBJ2-7)
CASSYSGTSRLGWVYEQYF

SEQ ID NO: 583645 - protein, 17 aa, Homo sapiens
  CDR3 for alpha chain variable domain of TCR clone 291823 (TRAV4, TRAJ42)
CLVGVLNYGGSQGNLIF

SEQ ID NO: 583646 - protein, 12 aa, Homo sapiens
  CDR3 for beta chain variable domain of TCR clone 291823 (TRBV11-2, TRBJ2-2)
SASSLGGGELFF

SEQ ID NO: 583647 - protein, 13 aa, Homo sapiens
  CDR3 for alpha chain variable domain of TCR clone 291824 (TRAV8-2, TRAJ29)
CALPGAGNTPLVF

SEQ ID NO: 583648 - protein, 20 aa, Homo sapiens
  CDR3 for beta chain variable domain of TCR clone 291824 (TRBV7-8, TRBJ2-2)
CASSHLFPGPTIHITGELFF

SEQ ID NO: 583649 - protein, 13 aa, Homo sapiens
  CDR3 for alpha chain variable domain of TCR clone 291825 (TRAV12-2, TRAJ10)
CAVPTGGGNKLTF

SEQ ID NO: 583650 - protein, 16 aa, Homo sapiens
  CDR3 for beta chain variable domain of TCR clone 291825 (TRBV20-1, TRBJ1-4)
CSAPGQGLLTNEKLFF

SEQ ID NO: 583651 - protein, 11 aa, Homo sapiens
  CDR3 for alpha chain variable domain of TCR clone 291826 (TRAV21, TRAJ23)
CAPPRRGKLIF

SEQ ID NO: 583652 - protein, 14 aa, Homo sapiens
  CDR3 for beta chain variable domain of TCR clone 291826 (TRBV12-4, TRBJ1-1)
CASTWTGHDTEAFF

SEQ ID NO: 583653 - protein, 15 aa, Homo sapiens
  CDR3 for alpha chain variable domain of TCR clone 291827 (TRAV17, TRAJ57)
CATGPSQGGSEKLFF

SEQ ID NO: 583654 - protein, 15 aa, Homo sapiens
  CDR3 for beta chain variable domain of TCR clone 291827 (TRBV12-4, TRBJ2-5)
CASTLKSGRGETQYF

SEQ ID NO: 583655 - protein, 14 aa, Homo sapiens
  CDR3 for alpha chain variable domain of TCR clone 291828 (TRAV12-1, TRAJ44)
CGVRKYSTASKLTF

SEQ ID NO: 583656 - protein, 17 aa, Homo sapiens
  CDR3 for beta chain variable domain of TCR clone 291828 (TRBV7-8, TRBJ2-6)
CASSAGTGGAGANVLTF

SEQ ID NO: 583657 - protein, 16 aa, Homo sapiens
  CDR3 for alpha chain variable domain of TCR clone 291829 (TRAV26-1, TRAJ38)
CIVRAYNAGNNRKLIL

SEQ ID NO: 583658 - protein, 13 aa, Homo sapiens
  CDR3 for beta chain variable domain of TCR clone 291829 (TRBV4-2, TRBJ2-7)
CASSRDPHDEQYF

SEQ ID NO: 583659 - protein, 12 aa, Homo sapiens
  CDR3 for alpha chain variable domain of TCR clone 291830 (TRAV16, TRAJ10)
CSRTGGGNKPTF

SEQ ID NO: 583660 - protein, 15 aa, Homo sapiens
  CDR3 for beta chain variable domain of TCR clone 291830 (TRBV5-1, TRBJ2-7)
CASSLDLTSSYEQYF

SEQ ID NO: 583661 - protein, 11 aa, Homo sapiens
  CDR3 for alpha chain variable domain of TCR clone 291831 (TRAV13-1, TRAJ15)
CAATPGTALIF

SEQ ID NO: 583662 - protein, 15 aa, Homo sapiens
  CDR3 for beta chain variable domain of TCR clone 291831 (TRBV28, TRBJ2-5)
CSSSPPWSYQETQYF

SEQ ID NO: 583663 - protein, 15 aa, Homo sapiens
  CDR3 for alpha chain variable domain of TCR clone 291832 (TRAV26-2, TRAJ26)
CILRDFDNYGRILSL

SEQ ID NO: 583664 - protein, 14 aa, Homo sapiens
  CDR3 for beta chain variable domain of TCR clone 291832 (TRBV29-1, TRBJ2-5)
CSFWTPYAGETQYF

SEQ ID NO: 583665 - protein, 15 aa, Homo sapiens
  CDR3 for alpha chain variable domain of TCR clone 291833 (TRAV12-3, TRAJ49)
CAMAVTPNTGNQFYF

SEQ ID NO: 583666 - protein, 17 aa, Homo sapiens
  CDR3 for beta chain variable domain of TCR clone 291833 (TRBV4-1, TRBJ1-5)
RQQPRPRGQGLNQPQHF

SEQ ID NO: 583667 - protein, 13 aa, Homo sapiens
  CDR3 for alpha chain variable domain of TCR clone 291834 (TRAV12-3, TRAJ13)
CARTSGGYQKVTF

SEQ ID NO: 583668 - protein, 13 aa, Homo sapiens
  CDR3 for beta chain variable domain of TCR clone 291834 (TRBV7-9, TRBJ1-2)
CASSLKQNYGYTF

SEQ ID NO: 583669 - protein, 16 aa, Homo sapiens
  CDR3 for alpha chain variable domain of TCR clone 291835 (TRAV3, TRAJ37)
CAVRGKGSGNTGKLIF

SEQ ID NO: 583670 - protein, 15 aa, Homo sapiens
  CDR3 for beta chain variable domain of TCR clone 291835 (TRBV7-2, TRBJ2-3)
CASSLAGAFIDTQYF

SEQ ID NO: 583671 - protein, 16 aa, Homo sapiens
  CDR3 for alpha chain variable domain of TCR clone 291836 (TRAV16, TRAJ57)
CAPYLITQVGSEKLVF

SEQ ID NO: 583672 - protein, 17 aa, Homo sapiens
  CDR3 for beta chain variable domain of TCR clone 291836 (TRBV24-1, TRBJ2-4)
CATSDAEARGVRNSQYF

SEQ ID NO: 583673 - protein, 12 aa, Homo sapiens
  CDR3 for alpha chain variable domain of TCR clone 291837 (TRAV27, TRAJ34)
CAGAKNTDKLIF

SEQ ID NO: 583674 - protein, 13 aa, Homo sapiens
  CDR3 for beta chain variable domain of TCR clone 291837 (TRBV4-1, TRBJ2-1)
RASSQEVQYEQFF

SEQ ID NO: 583675 - protein, 23 aa, Homo sapiens
  CDR3 for alpha chain variable domain of TCR clone 291838 (TRAV1-2, TRAJ13)
LLKELQMKDPASYLCAVPPYFTF

SEQ ID NO: 583676 - protein, 15 aa, Homo sapiens
  CDR3 for beta chain variable domain of TCR clone 291838 (TRBV5-1, TRBJ2-3)
CASSLDPASTDTQYF

SEQ ID NO: 583677 - protein, 11 aa, Homo sapiens
  CDR3 for alpha chain variable domain of TCR clone 291839 (TRAV2, TRAJ26)
CAVEDGPWSEF

SEQ ID NO: 583678 - protein, 14 aa, Homo sapiens
  CDR3 for beta chain variable domain of TCR clone 291839 (TRBV25-1, TRBJ1-1)
CASTHPGGNTEAFF

SEQ ID NO: 583679 - protein, 16 aa, Homo sapiens
  CDR3 for alpha chain variable domain of TCR clone 291840 (TRAV3, TRAJ10)
CAVRDMRAGGGNKLTC

SEQ ID NO: 583680 - protein, 14 aa, Homo sapiens
  CDR3 for beta chain variable domain of TCR clone 291840 (TRBV25-1, TRBJ1-1)
CASTHLGGNTEAFF

SEQ ID NO: 583681 - protein, 11 aa, Homo sapiens
  CDR3 for alpha chain variable domain of TCR clone 291841 (TRAV3, TRAJ21)
CAVGNFNKFYF

SEQ ID NO: 583682 - protein, 11 aa, Homo sapiens
  CDR3 for beta chain variable domain of TCR clone 291841 (TRBV7-2, TRBJ2-7)
CASSSGLWQYF

SEQ ID NO: 583683 - protein, 11 aa, Homo sapiens
  CDR3 for alpha chain variable domain of TCR clone 291842 (TRAV12-2, TRAJ49)
CAVTGGNQFYL

SEQ ID NO: 583684 - protein, 15 aa, Homo sapiens
  CDR3 for beta chain variable domain of TCR clone 291842 (TRBV7-8, TRBJ1-5)
CASSLERRGLEPQHF

SEQ ID NO: 583685 - protein, 15 aa, Homo sapiens
  CDR3 for alpha chain variable domain of TCR clone 291843 (TRAV12-2, TRAJ53)
CAVNGGGGSNYKLTS

SEQ ID NO: 583686 - protein, 12 aa, Homo sapiens
  CDR3 for beta chain variable domain of TCR clone 291843 (TRBV11-2, TRBJ2-1)
CASSPGNNEQFF

SEQ ID NO: 583687 - protein, 10 aa, Homo sapiens
  CDR3 for alpha chain variable domain of TCR clone 291844 (TRAV23/DV6, TRAJ57)
CAASSTLSQG

SEQ ID NO: 583688 - protein, 17 aa, Homo sapiens
  CDR3 for beta chain variable domain of TCR clone 291844 (TRBV4-2, TRBJ1-1)
CASTQCGGGSGNTEAFF

SEQ ID NO: 583689 - protein, 13 aa, Homo sapiens
  CDR3 for alpha chain variable domain of TCR clone 291845 (TRAV27, TRAJ6)
CAGGTRGSYIPTF

SEQ ID NO: 583690 - protein, 13 aa, Homo sapiens
  CDR3 for beta chain variable domain of TCR clone 291845 (TRBV4-1, TRBJ2-2)
CASSQENTGELFL

SEQ ID NO: 583691 - protein, 15 aa, Homo sapiens
  CDR3 for alpha chain variable domain of TCR clone 291846 (TRAV3, TRAJ22)
CAVRDRGGSARQLTF

SEQ ID NO: 583692 - protein, 14 aa, Homo sapiens
  CDR3 for beta chain variable domain of TCR clone 291846 (TRBV6-6, TRBJ1-5)
CASVDSGFNQPQHF

SEQ ID NO: 583693 - protein, 11 aa, Homo sapiens
  CDR3 for alpha chain variable domain of TCR clone 291847 (TRAV1-2, TRAJ20)
CAVANDYKLSF

SEQ ID NO: 583694 - protein, 16 aa, Homo sapiens
  CDR3 for beta chain variable domain of TCR clone 291847 (TRBV4-3, TRBJ1-6)
CASSQDPGVYKSPLHF

SEQ ID NO: 583695 - protein, 12 aa, Homo sapiens
  CDR3 for alpha chain variable domain of TCR clone 291848 (TRAV12-2, TRAJ10)
WGVTGGGNKLTF

SEQ ID NO: 583696 - protein, 15 aa, Homo sapiens
  CDR3 for beta chain variable domain of TCR clone 291848 (TRBV6-1, TRBJ2-3)
CASSERGGITDTQYF

SEQ ID NO: 583697 - protein, 15 aa, Homo sapiens
  CDR3 for alpha chain variable domain of TCR clone 291849 (TRAV17, TRAJ4)
CATGTWSGGYNKLIF

SEQ ID NO: 583698 - protein, 15 aa, Homo sapiens
  CDR3 for beta chain variable domain of TCR clone 291849 (TRBV19, TRBJ1-1)
CASTSGQIQNTEAFF

SEQ ID NO: 583699 - protein, 15 aa, Homo sapiens
  CDR3 for alpha chain variable domain of TCR clone 291850 (TRAV13-1, TRAJ17)
CAASIERAAGNKLTF

SEQ ID NO: 583700 - protein, 14 aa, Homo sapiens
  CDR3 for beta chain variable domain of TCR clone 291850 (TRBV7-8, TRBJ2-7)
CASSPGLADYEQYF

SEQ ID NO: 583701 - protein, 13 aa, Homo sapiens
  CDR3 for alpha chain variable domain of TCR clone 291851 (TRAV2, TRAJ35)
CAVSCGFGNVLHC

SEQ ID NO: 583702 - protein, 15 aa, Homo sapiens
  CDR3 for beta chain variable domain of TCR clone 291851 (TRBV5-1, TRBJ1-2)
CASSLGTGENYGYTF

SEQ ID NO: 583703 - protein, 11 aa, Homo sapiens
  CDR3 for alpha chain variable domain of TCR clone 291852 (TRAV3, TRAJ13)
CAVTSSQKVTF

SEQ ID NO: 583704 - protein, 15 aa, Homo sapiens
  CDR3 for beta chain variable domain of TCR clone 291852 (TRBV7-9, TRBJ2-7)
CASSSSGLAVYEQYF

SEQ ID NO: 583705 - protein, 12 aa, Homo sapiens
  CDR3 for alpha chain variable domain of TCR clone 291853 (TRAV12-3, TRAJ20)
CAMVRGDYKLSF

SEQ ID NO: 583706 - protein, 14 aa, Homo sapiens
  CDR3 for beta chain variable domain of TCR clone 291853 (TRBV5-5, TRBJ1-5)
CASSGQGVDQPQHV

SEQ ID NO: 583707 - protein, 10 aa, Homo sapiens
  CDR3 for alpha chain variable domain of TCR clone 291854 (TRAV1-2, TRAJ20)
CACNDYNLSF

SEQ ID NO: 583708 - protein, 16 aa, Homo sapiens
  CDR3 for beta chain variable domain of TCR clone 291854 (TRBV20-1, TRBJ2-1)
CSARDLKQGMNNEQFF

SEQ ID NO: 583709 - protein, 15 aa, Homo sapiens
  CDR3 for alpha chain variable domain of TCR clone 291855 (TRAV14/DV4, TRAJ48)
CAMRAPNFGNEKLTF

SEQ ID NO: 583710 - protein, 15 aa, Homo sapiens
  CDR3 for beta chain variable domain of TCR clone 291855 (TRBV6-6, TRBJ1-5)
CASSSIQGTNQPQHF

SEQ ID NO: 583711 - protein, 12 aa, Homo sapiens
  CDR3 for alpha chain variable domain of TCR clone 291856 (TRAV16, TRAJ26)
CALRMYGQNFVF

SEQ ID NO: 583712 - protein, 17 aa, Homo sapiens
  CDR3 for beta chain variable domain of TCR clone 291856 (TRBV6-1, TRBJ2-3)
CASSEALRLISTDTQYF

SEQ ID NO: 583713 - protein, 13 aa, Homo sapiens
  CDR3 for alpha chain variable domain of TCR clone 291857 (TRAV8-3, TRAJ37)
CAVPSSNTGKLIF

SEQ ID NO: 583714 - protein, 14 aa, Homo sapiens
  CDR3 for beta chain variable domain of TCR clone 291857 (TRBV4-1, TRBJ2-2)
CASSQAVNTGELFF

SEQ ID NO: 583715 - protein, 12 aa, Homo sapiens
  CDR3 for alpha chain variable domain of TCR clone 291858 (TRAV23/DV6, TRAJ30)
CAASKGDDKIIF

SEQ ID NO: 583716 - protein, 14 aa, Homo sapiens
  CDR3 for beta chain variable domain of TCR clone 291858 (TRBV19, TRBJ2-7)
CASSMGQGAIEQYF

SEQ ID NO: 583717 - protein, 12 aa, Homo sapiens
  CDR3 for alpha chain variable domain of TCR clone 291859 (TRAV2, TRAJ9)
CAVGVGGFKNIF

SEQ ID NO: 583718 - protein, 16 aa, Homo sapiens
  CDR3 for beta chain variable domain of TCR clone 291859 (TRBV13, TRBJ2-2)
CASSPRTGEHTGELFF

SEQ ID NO: 583719 - protein, 15 aa, Homo sapiens
  CDR3 for alpha chain variable domain of TCR clone 291860 (TRAV26-2, TRAJ39)
CSPRGNNNAGNMLTF

SEQ ID NO: 583720 - protein, 14 aa, Homo sapiens
  CDR3 for beta chain variable domain of TCR clone 291860 (TRBV5-4, TRBJ2-5)
CASSFSGGQETQYF

SEQ ID NO: 583721 - protein, 11 aa, Homo sapiens
  CDR3 for alpha chain variable domain of TCR clone 291861 (TRAV3, TRAJ21)
CAVCNFNKFYF

SEQ ID NO: 583722 - protein, 16 aa, Homo sapiens
  CDR3 for beta chain variable domain of TCR clone 291861 (TRBV19, TRBJ2-1)
FASSKAGPSSYNEQFF

SEQ ID NO: 583723 - protein, 10 aa, Homo sapiens
  CDR3 for alpha chain variable domain of TCR clone 291862 (TRAV36/DV7, TRAJ48)
CAVGNEKLTF

SEQ ID NO: 583724 - protein, 15 aa, Homo sapiens
  CDR3 for beta chain variable domain of TCR clone 291862 (TRBV20-1, TRBJ2-7)
CSARDRVSGMDEQYF

SEQ ID NO: 583725 - protein, 14 aa, Homo sapiens
  CDR3 for alpha chain variable domain of TCR clone 291863 (TRAV16, TRAJ17)
CALSGRAAGNKLTF

SEQ ID NO: 583726 - protein, 15 aa, Homo sapiens
  CDR3 for beta chain variable domain of TCR clone 291863 (TRBV3-1, TRBJ1-2)
CASIPTRLPEGGYTF

SEQ ID NO: 583727 - protein, 12 aa, Homo sapiens
  CDR3 for alpha chain variable domain of TCR clone 291864 (TRAV26-1, TRAJ17)
CIVRSAGNKLTF

SEQ ID NO: 583728 - protein, 19 aa, Homo sapiens
  CDR3 for beta chain variable domain of TCR clone 291864 (TRBV2, TRBJ2-7)
CASSDDETSGRANYYEQYF

SEQ ID NO: 583729 - protein, 13 aa, Homo sapiens
  CDR3 for alpha chain variable domain of TCR clone 291865 (TRAV8-3, TRAJ43)
CAVGPDNNNDMRF

SEQ ID NO: 583730 - protein, 16 aa, Homo sapiens
  CDR3 for beta chain variable domain of TCR clone 291865 (TRBV12-5, TRBJ2-5)
CASGPRTSGNQETQYF

SEQ ID NO: 583731 - protein, 13 aa, Homo sapiens
  CDR3 for alpha chain variable domain of TCR clone 291866 (TRAV12-3, TRAJ33)
CAMSVNSNYQLIW

SEQ ID NO: 583732 - protein, 16 aa, Homo sapiens
  CDR3 for beta chain variable domain of TCR clone 291866 (TRBV7-3, TRBJ2-3)
FASSLSGYRPEDTQYF

SEQ ID NO: 583733 - protein, 13 aa, Homo sapiens
  CDR3 for alpha chain variable domain of TCR clone 291867 (TRAV3, TRAJ21)
CVLREPDFNKFYF

SEQ ID NO: 583734 - protein, 18 aa, Homo sapiens
  CDR3 for beta chain variable domain of TCR clone 291867 (TRBV11-2, TRBJ2-3)
CASSLGGASRGAPNTQYF

SEQ ID NO: 583735 - protein, 13 aa, Homo sapiens
  CDR3 for alpha chain variable domain of TCR clone 291868 (TRAV1-2, TRAJ9)
CAALNTGGFKTIF

SEQ ID NO: 583736 - protein, 13 aa, Homo sapiens
  CDR3 for beta chain variable domain of TCR clone 291868 (TRBV27, TRBJ2-1)
CASSIWGADEQFF

SEQ ID NO: 583737 - protein, 13 aa, Homo sapiens
  CDR3 for alpha chain variable domain of TCR clone 291869 (TRAV8-1, TRAJ34)
CAVSPYNTDKLIF

SEQ ID NO: 583738 - protein, 15 aa, Homo sapiens
  CDR3 for beta chain variable domain of TCR clone 291869 (TRBV7-9, TRBJ1-3)
CASSLRSGSGNTIYF

SEQ ID NO: 583739 - protein, 14 aa, Homo sapiens
  CDR3 for alpha chain variable domain of TCR clone 291870 (TRAV1-2, TRAJ16)
CAVNRFSDGQKLLF

SEQ ID NO: 583740 - protein, 13 aa, Homo sapiens
  CDR3 for beta chain variable domain of TCR clone 291870 (TRBV5-1, TRBJ1-5)
CASSLAQDQPQHF

SEQ ID NO: 583741 - protein, 15 aa, Homo sapiens
  CDR3 for alpha chain variable domain of TCR clone 291871 (TRAV8-4, TRAJ37)
CAVSRGSGNTGKLIF

SEQ ID NO: 583742 - protein, 14 aa, Homo sapiens
  CDR3 for beta chain variable domain of TCR clone 291871 (TRBV5-7, TRBJ2-1)
CASSSVANYNEQFF

SEQ ID NO: 583743 - protein, 15 aa, Homo sapiens
  CDR3 for alpha chain variable domain of TCR clone 291872 (TRAV27, TRAJ38)
CAARRNAGNNRKLIW

SEQ ID NO: 583744 - protein, 13 aa, Homo sapiens
  CDR3 for beta chain variable domain of TCR clone 291872 (TRBV19, TRBJ1-2)
CASSVPGQDGYTF

SEQ ID NO: 583745 - protein, 17 aa, Homo sapiens
  CDR3 for alpha chain variable domain of TCR clone 291873 (TRAV3, TRAJ6)
CAVRDGPRAGGSYIPTF

SEQ ID NO: 583746 - protein, 15 aa, Homo sapiens
  CDR3 for beta chain variable domain of TCR clone 291873 (TRBV4-2, TRBJ1-2)
CASSQRTGGRDGYTF

SEQ ID NO: 583747 - protein, 15 aa, Homo sapiens
  CDR3 for alpha chain variable domain of TCR clone 291874 (TRAV1-2, TRAJ12)
CAVIPAVDSSYKLIF

SEQ ID NO: 583748 - protein, 16 aa, Homo sapiens
  CDR3 for beta chain variable domain of TCR clone 291874 (TRBV11-1, TRBJ1-1)
CASSPRGAHMNSEAFF

SEQ ID NO: 583749 - protein, 16 aa, Homo sapiens
  CDR3 for alpha chain variable domain of TCR clone 291875 (TRAV3, TRAJ48)
CAVRVLTNFGNEKLTF

SEQ ID NO: 583750 - protein, 15 aa, Homo sapiens
  CDR3 for beta chain variable domain of TCR clone 291875 (TRBV5-1, TRBJ2-1)
CASSPPRAPYNEQFF

SEQ ID NO: 583751 - protein, 18 aa, Homo sapiens
  CDR3 for alpha chain variable domain of TCR clone 291876 (TRAV21, TRAJ52)
CAVRPSPTGGTSYGKLTF

SEQ ID NO: 583752 - protein, 14 aa, Homo sapiens
  CDR3 for beta chain variable domain of TCR clone 291876 (TRBV11-2, TRBJ2-7)
CASSLGAGAYEQYF

SEQ ID NO: 583753 - protein, 13 aa, Homo sapiens
  CDR3 for alpha chain variable domain of TCR clone 291877 (TRAV13-2, TRAJ13)
CAERPGGYQKVTF

SEQ ID NO: 583754 - protein, 17 aa, Homo sapiens
  CDR3 for beta chain variable domain of TCR clone 291877 (TRBV11-2, TRBJ2-1)
FASSLYPPGVEYNEQFF

SEQ ID NO: 583755 - protein, 15 aa, Homo sapiens
  CDR3 for alpha chain variable domain of TCR clone 291878 (TRAV12-3, TRAJ6)
CAMSATTGGSYIPTF

SEQ ID NO: 583756 - protein, 16 aa, Homo sapiens
  CDR3 for beta chain variable domain of TCR clone 291878 (TRBV20-1, TRBJ1-2)
CIASMGQGVANYGYTF

SEQ ID NO: 583757 - protein, 15 aa, Homo sapiens
  CDR3 for alpha chain variable domain of TCR clone 291879 (TRAV3, TRAJ20)
CAVRDIKLSDYKLSF

SEQ ID NO: 583758 - protein, 12 aa, Homo sapiens
  CDR3 for beta chain variable domain of TCR clone 291879 (TRBV7-9, TRBJ2-7)
CASSFGSYEQYF

SEQ ID NO: 583759 - protein, 12 aa, Homo sapiens
  CDR3 for alpha chain variable domain of TCR clone 291880 (TRAV21, TRAJ33)
RAKMDSNYQLIW

SEQ ID NO: 583760 - protein, 14 aa, Homo sapiens
  CDR3 for beta chain variable domain of TCR clone 291880 (TRBV2, TRBJ2-7)
CASSLTAGGYEQYF

SEQ ID NO: 583761 - protein, 10 aa, Homo sapiens
  CDR3 for alpha chain variable domain of TCR clone 291881 (TRAV12-3, TRAJ49)
CAMNDDQFYF

SEQ ID NO: 583762 - protein, 14 aa, Homo sapiens
  CDR3 for beta chain variable domain of TCR clone 291881 (TRBV6-1, TRBJ1-3)
CASVQGGGGNTIYF

SEQ ID NO: 583763 - protein, 16 aa, Homo sapiens
  CDR3 for alpha chain variable domain of TCR clone 291882 (TRAV21, TRAJ52)
CAVTNAGGTSYGKLTF

SEQ ID NO: 583764 - protein, 14 aa, Homo sapiens
  CDR3 for beta chain variable domain of TCR clone 291882 (TRBV7-3, TRBJ1-1)
CQQLRGQMNTEAFF

SEQ ID NO: 583765 - protein, 11 aa, Homo sapiens
  CDR3 for alpha chain variable domain of TCR clone 291883 (TRAV26-1, TRAJ37)
CIVRVGRKLIF

SEQ ID NO: 583766 - protein, 15 aa, Homo sapiens
  CDR3 for beta chain variable domain of TCR clone 291883 (TRBV18, TRBJ1-1)
CASSPMGQGAAEAFF

SEQ ID NO: 583767 - protein, 10 aa, Homo sapiens
  CDR3 for alpha chain variable domain of TCR clone 291884 (TRAV1-2, TRAJ18)
CAVSGEAQPW

SEQ ID NO: 583768 - protein, 13 aa, Homo sapiens
  CDR3 for beta chain variable domain of TCR clone 291884 (TRBV20-1, TRBJ1-1)
CSARVGGNTEAFF

SEQ ID NO: 583769 - protein, 14 aa, Homo sapiens
  CDR3 for alpha chain variable domain of TCR clone 291885 (TRAV12-3, TRAJ10)
SHLPLTGGGNKLTF

SEQ ID NO: 583770 - protein, 14 aa, Homo sapiens
  CDR3 for beta chain variable domain of TCR clone 291885 (TRBV5-1, TRBJ2-2)
CASSLGGGSGELFF

SEQ ID NO: 583771 - protein, 16 aa, Homo sapiens
  CDR3 for alpha chain variable domain of TCR clone 291886 (TRAV1-1, TRAJ28)
CAVRDDSWAGSYQLTF

SEQ ID NO: 583772 - protein, 12 aa, Homo sapiens
  CDR3 for beta chain variable domain of TCR clone 291886 (TRBV11-2, TRBJ2-5)
CASSLDTQTQYF

SEQ ID NO: 583773 - protein, 11 aa, Homo sapiens
  CDR3 for alpha chain variable domain of TCR clone 291887 (TRAV12-3, TRAJ33)
CAVTSNYQLIW

SEQ ID NO: 583774 - protein, 14 aa, Homo sapiens
  CDR3 for beta chain variable domain of TCR clone 291887 (TRBV12-4, TRBJ2-2)
CASNQGANTGELFF

SEQ ID NO: 583775 - protein, 18 aa, Homo sapiens
  CDR3 for alpha chain variable domain of TCR clone 291888 (TRAV21, TRAJ52)
CAVRPSPAGGTSYGKLTF

SEQ ID NO: 583776 - protein, 14 aa, Homo sapiens
  CDR3 for beta chain variable domain of TCR clone 291888 (TRBV12-4, TRBJ1-2)
CASSFVGTAYGYTF

SEQ ID NO: 583777 - protein, 14 aa, Homo sapiens
  CDR3 for alpha chain variable domain of TCR clone 291889 (TRAV35, TRAJ13)
CAGRSPGGYQKVTC

SEQ ID NO: 583778 - protein, 14 aa, Homo sapiens
  CDR3 for beta chain variable domain of TCR clone 291889 (TRBV19, TRBJ2-2)
CASSMVGLSGELFF

SEQ ID NO: 583779 - protein, 15 aa, Homo sapiens
  CDR3 for alpha chain variable domain of TCR clone 291890 (TRAV13-1, TRAJ52)
CAASSPSTSYGKLTF

SEQ ID NO: 583780 - protein, 16 aa, Homo sapiens
  CDR3 for beta chain variable domain of TCR clone 291890 (TRBV19, TRBJ2-1)
CASSKAGPSSYNEQFF

SEQ ID NO: 583781 - protein, 14 aa, Homo sapiens
  CDR3 for alpha chain variable domain of TCR clone 291891 (TRAV2, TRAJ9)
CAVEDRSGGFKTIF

SEQ ID NO: 583782 - protein, 16 aa, Homo sapiens
  CDR3 for beta chain variable domain of TCR clone 291891 (TRBV7-2, TRBJ2-2)
CASSLYRGPNTGELFF

SEQ ID NO: 583783 - protein, 13 aa, Homo sapiens
  CDR3 for alpha chain variable domain of TCR clone 291892 (TRAV20, TRAJ49)
CAVQARTGNQFYF

SEQ ID NO: 583784 - protein, 14 aa, Homo sapiens
  CDR3 for beta chain variable domain of TCR clone 291892 (TRBV5-1, TRBJ1-1)
CASSLRGASTEAFF

SEQ ID NO: 583785 - protein, 15 aa, Homo sapiens
  CDR3 for alpha chain variable domain of TCR clone 291893 (TRAV12-1, TRAJ44)
CVVFVNTGNASKLTF

SEQ ID NO: 583786 - protein, 17 aa, Homo sapiens
  CDR3 for beta chain variable domain of TCR clone 291893 (TRBV7-8, TRBJ2-6)
CASSAGTGGAGANVLTF

SEQ ID NO: 583787 - protein, 13 aa, Homo sapiens
  CDR3 for alpha chain variable domain of TCR clone 291894 (TRAV21, TRAJ27)
CAARPGNAGKSTL

SEQ ID NO: 583788 - protein, 14 aa, Homo sapiens
  CDR3 for beta chain variable domain of TCR clone 291894 (TRBV20-1, TRBJ2-1)
CSAAGSGEYNGQFF

SEQ ID NO: 583789 - protein, 17 aa, Homo sapiens
  CDR3 for alpha chain variable domain of TCR clone 291895 (TRAV4, TRAJ13)
CIVGVQGSSGGYQKDTF

SEQ ID NO: 583790 - protein, 18 aa, Homo sapiens
  CDR3 for beta chain variable domain of TCR clone 291895 (TRBV15, TRBJ2-3)
CATSRDGARSWDTDTQYF

SEQ ID NO: 583791 - protein, 14 aa, Homo sapiens
  CDR3 for alpha chain variable domain of TCR clone 291896 (TRAV12-2, TRAJ9)
CAVNALERGFKTIF

SEQ ID NO: 583792 - protein, 16 aa, Homo sapiens
  CDR3 for beta chain variable domain of TCR clone 291896 (TRBV19, TRBJ1-6)
CASSVAPVAGNSPLHF

SEQ ID NO: 583793 - protein, 15 aa, Homo sapiens
  CDR3 for alpha chain variable domain of TCR clone 291897 (TRAV21, TRAJ52)
CAVRGGGTSYGKLTF

SEQ ID NO: 583794 - protein, 13 aa, Homo sapiens
  CDR3 for beta chain variable domain of TCR clone 291897 (TRBV6-5, TRBJ2-5)
CATAPSPQETLYF

SEQ ID NO: 583795 - protein, 16 aa, Homo sapiens
  CDR3 for alpha chain variable domain of TCR clone 291898 (TRAV27, TRAJ37)
CVLLSVGSGNTGKLIF

SEQ ID NO: 583796 - protein, 14 aa, Homo sapiens
  CDR3 for beta chain variable domain of TCR clone 291898 (TRBV20-1, TRBJ2-5)
CSASDSGSGETQYF

SEQ ID NO: 583797 - protein, 15 aa, Homo sapiens
  CDR3 for alpha chain variable domain of TCR clone 291899 (TRAV8-6, TRAJ38)
CAVSSNAGNNRKLIW

SEQ ID NO: 583798 - protein, 15 aa, Homo sapiens
  CDR3 for beta chain variable domain of TCR clone 291899 (TRBV7-9, TRBJ2-7)
CASSLALAEAYEQYF

SEQ ID NO: 583799 - protein, 15 aa, Homo sapiens
  CDR3 for alpha chain variable domain of TCR clone 291900 (TRAV17, TRAJ22)
CATVAPSGSARQLTF

SEQ ID NO: 583800 - protein, 14 aa, Homo sapiens
  CDR3 for beta chain variable domain of TCR clone 291900 (TRBV20-1, TRBJ1-5)
CSSRDGGSVQPQHF

SEQ ID NO: 583801 - protein, 12 aa, Homo sapiens
  CDR3 for alpha chain variable domain of TCR clone 291901 (TRAV27, TRAJ35)
CAGADFGNVLHC

SEQ ID NO: 583802 - protein, 15 aa, Homo sapiens
  CDR3 for beta chain variable domain of TCR clone 291901 (TRBV27, TRBJ2-5)
CASSLYPRGGETQYF

SEQ ID NO: 583803 - protein, 15 aa, Homo sapiens
  CDR3 for alpha chain variable domain of TCR clone 291902 (TRAV12-1, TRAJ9)
CVVSFGDTGGFKTIF

SEQ ID NO: 583804 - protein, 15 aa, Homo sapiens
  CDR3 for beta chain variable domain of TCR clone 291902 (TRBV7-3, TRBJ1-6)
CASSLGRGAGSPLHF

SEQ ID NO: 583805 - protein, 12 aa, Homo sapiens
  CDR3 for alpha chain variable domain of TCR clone 291903 (TRAV17, TRAJ20)
CATDSNDYKLSF

SEQ ID NO: 583806 - protein, 14 aa, Homo sapiens
  CDR3 for beta chain variable domain of TCR clone 291903 (TRBV7-6, TRBJ2-3)
CASSLGTGLDTQYF

SEQ ID NO: 583807 - protein, 14 aa, Homo sapiens
  CDR3 for alpha chain variable domain of TCR clone 291904 (TRAV13-2, TRAJ12)
CAETLMDSSYKLIF

SEQ ID NO: 583808 - protein, 13 aa, Homo sapiens
  CDR3 for beta chain variable domain of TCR clone 291904 (TRBV7-3, TRBJ1-1)
CASSQDWGAEAFF

SEQ ID NO: 583809 - protein, 14 aa, Homo sapiens
  CDR3 for alpha chain variable domain of TCR clone 291905 (TRAV1-2, TRAJ16)
CAVNRFSDGQKLLF

SEQ ID NO: 583810 - protein, 11 aa, Homo sapiens
  CDR3 for beta chain variable domain of TCR clone 291905 (TRBV3-1, TRBJ2-7)
CASTSLGEQYF

SEQ ID NO: 583811 - protein, 13 aa, Homo sapiens
  CDR3 for alpha chain variable domain of TCR clone 291906 (TRAV12-1, TRAJ49)
CVVSKSTGNQFYF

SEQ ID NO: 583812 - protein, 14 aa, Homo sapiens
  CDR3 for beta chain variable domain of TCR clone 291906 (TRBV27, TRBJ2-3)
CASSLSILTEPGYF

SEQ ID NO: 583813 - protein, 12 aa, Homo sapiens
  CDR3 for alpha chain variable domain of TCR clone 291907 (TRAV25, TRAJ11)
CAGYSGYSTLTF

SEQ ID NO: 583814 - protein, 14 aa, Homo sapiens
  CDR3 for beta chain variable domain of TCR clone 291907 (TRBV20-1, TRBJ2-3)
CSARGGTSTDTQYF

SEQ ID NO: 583815 - protein, 14 aa, Homo sapiens
  CDR3 for alpha chain variable domain of TCR clone 291908 (TRAV38-1, TRAJ29)
CAFITPSGNTPLVF

SEQ ID NO: 583816 - protein, 14 aa, Homo sapiens
  CDR3 for beta chain variable domain of TCR clone 291908 (TRBV6-1, TRBJ2-2)
CASTWQGNTGELFF

SEQ ID NO: 583817 - protein, 12 aa, Homo sapiens
  CDR3 for alpha chain variable domain of TCR clone 291909 (TRAV1-2, TRAJ36)
CALDRGANNLFF

SEQ ID NO: 583818 - protein, 15 aa, Homo sapiens
  CDR3 for beta chain variable domain of TCR clone 291909 (TRBV19, TRBJ1-2)
CASSVGQVLNYGYTF

SEQ ID NO: 583819 - protein, 12 aa, Homo sapiens
  CDR3 for alpha chain variable domain of TCR clone 291910 (TRAV13-1, TRAJ43)
CAAGRFNNDMRF

SEQ ID NO: 583820 - protein, 16 aa, Homo sapiens
  CDR3 for beta chain variable domain of TCR clone 291910 (TRBV7-3, TRBJ2-1)
CASSLEGYRSYNEQFF

SEQ ID NO: 583821 - protein, 17 aa, Homo sapiens
  CDR3 for alpha chain variable domain of TCR clone 291911 (TRAV27, TRAJ42)
CAERVIYYGGSQGNLIF

SEQ ID NO: 583822 - protein, 14 aa, Homo sapiens
  CDR3 for beta chain variable domain of TCR clone 291911 (TRBV7-2, TRBJ2-3)
CARSLGGGRDTQYF

SEQ ID NO: 583823 - protein, 14 aa, Homo sapiens
  CDR3 for alpha chain variable domain of TCR clone 291912 (TRAV23/DV6, TRAJ37)
CEASTSSTTGKLIF

SEQ ID NO: 583824 - protein, 13 aa, Homo sapiens
  CDR3 for beta chain variable domain of TCR clone 291912 (TRBV7-7, TRBJ1-1)
CASSLGANTEAFF

SEQ ID NO: 583825 - protein, 13 aa, Homo sapiens
  CDR3 for alpha chain variable domain of TCR clone 291913 (TRAV26-1, TRAJ30)
CIVRVESNDKIIF

SEQ ID NO: 583826 - protein, 13 aa, Homo sapiens
  CDR3 for beta chain variable domain of TCR clone 291913 (TRBV6-1, TRBJ1-1)
CASSRQGNTEAFF

SEQ ID NO: 583827 - protein, 12 aa, Homo sapiens
  CDR3 for alpha chain variable domain of TCR clone 291914 (TRAV21, TRAJ31)
CAVSPARGRLMF

SEQ ID NO: 583828 - protein, 14 aa, Homo sapiens
  CDR3 for beta chain variable domain of TCR clone 291914 (TRBV28, TRBJ2-7)
CASSLRRMSYEQYF

SEQ ID NO: 583829 - protein, 23 aa, Homo sapiens
  CDR3 for alpha chain variable domain of TCR clone 291915 (TRAV1-1, TRAJ11)
LLQELQMKDSASYFCAGYSTLTF

SEQ ID NO: 583830 - protein, 12 aa, Homo sapiens
  CDR3 for beta chain variable domain of TCR clone 291915 (TRBV12-4, TRBJ2-5)
CASGDYEETQYF

SEQ ID NO: 583831 - protein, 12 aa, Homo sapiens
  CDR3 for alpha chain variable domain of TCR clone 291916 (TRAV12-1, TRAJ40)
CVVYSGTYKYIF

SEQ ID NO: 583832 - protein, 14 aa, Homo sapiens
  CDR3 for beta chain variable domain of TCR clone 291916 (TRBV11-2, TRBJ2-1)
CASSLGGGADEQFF

SEQ ID NO: 583833 - protein, 16 aa, Homo sapiens
  CDR3 for alpha chain variable domain of TCR clone 291917 (TRAV3, TRAJ37)
CAVSGKGSGNTGKLIF

SEQ ID NO: 583834 - protein, 12 aa, Homo sapiens
  CDR3 for beta chain variable domain of TCR clone 291917 (TRBV12-4, TRBJ2-3)
CASSTLPDTQYF

SEQ ID NO: 583835 - protein, 15 aa, Homo sapiens
  CDR3 for alpha chain variable domain of TCR clone 291918 (TRAV25, TRAJ52)
CAGRPGGTSYGKLTF

SEQ ID NO: 583836 - protein, 18 aa, Homo sapiens
  CDR3 for beta chain variable domain of TCR clone 291918 (TRBV11-2, TRBJ2-3)
CASRLGGASRGAPNTQYF

SEQ ID NO: 583837 - protein, 15 aa, Homo sapiens
  CDR3 for alpha chain variable domain of TCR clone 291919 (TRAV12-3, TRAJ27)
CAMRAYNTNAGKSTF

SEQ ID NO: 583838 - protein, 15 aa, Homo sapiens
  CDR3 for beta chain variable domain of TCR clone 291919 (TRBV7-9, TRBJ1-5)
CASSQGHQPNQPQHF

SEQ ID NO: 583839 - protein, 14 aa, Homo sapiens
  CDR3 for alpha chain variable domain of TCR clone 291920 (TRAV12-3, TRAJ10)
SHLPLTGGGNKLTF

SEQ ID NO: 583840 - protein, 15 aa, Homo sapiens
  CDR3 for beta chain variable domain of TCR clone 291920 (TRBV7-9, TRAJ28)
CASSRTGGFNEKLFF

SEQ ID NO: 583841 - protein, 14 aa, Homo sapiens
  CDR3 for alpha chain variable domain of TCR clone 291921 (TRAV38-1, TRAJ29)
CAFITPSGNTPLVF

SEQ ID NO: 583842 - protein, 22 aa, Homo sapiens
  CDR3 for beta chain variable domain of TCR clone 291921 (TRBV29-1, TRBJ2-5)
TVSNMSPEDSSIYLCSAGTQYF

SEQ ID NO: 583843 - protein, 13 aa, Homo sapiens
  CDR3 for alpha chain variable domain of TCR clone 291922 (TRAV6, TRAJ20)
CALAVSNNYKLSF

SEQ ID NO: 583844 - protein, 16 aa, Homo sapiens
  CDR3 for beta chain variable domain of TCR clone 291922 (TRBV7-9, TRBJ2-1)
CASSDVAGGSYNEQFF

SEQ ID NO: 583845 - protein, 14 aa, Homo sapiens
  CDR3 for alpha chain variable domain of TCR clone 291923 (TRAV1-1, TRAJ27)
CAVSYNTNAGKSTF

SEQ ID NO: 583846 - protein, 15 aa, Homo sapiens
  CDR3 for beta chain variable domain of TCR clone 291923 (TRBV6-3, TRBJ2-7)
CASSSPGTVFYEQYF

SEQ ID NO: 583847 - protein, 14 aa, Homo sapiens
  CDR3 for alpha chain variable domain of TCR clone 291924 (TRAV13-1, TRAJ35)
CAASKGGFGNVLHC

SEQ ID NO: 583848 - protein, 15 aa, Homo sapiens
  CDR3 for beta chain variable domain of TCR clone 291924 (TRBV7-9, TRBJ1-6)
CARSSPGRGNSPLHF

SEQ ID NO: 583849 - protein, 13 aa, Homo sapiens
  CDR3 for alpha chain variable domain of TCR clone 291925 (TRAV1-1, TRAJ13)
CAVNSGGYQKFTF

SEQ ID NO: 583850 - protein, 12 aa, Homo sapiens
  CDR3 for beta chain variable domain of TCR clone 291925 (TRBV28, TRBJ2-1)
CASSVQINEQFF

SEQ ID NO: 583851 - protein, 16 aa, Homo sapiens
  CDR3 for alpha chain variable domain of TCR clone 291926 (TRAV3, TRAJ10)
CALRDMRAGGGNKLTF

SEQ ID NO: 583852 - protein, 15 aa, Homo sapiens
  CDR3 for beta chain variable domain of TCR clone 291926 (TRBV9, TRBJ1-6)
CASSVAGTGDSPLHF

SEQ ID NO: 583853 - protein, 15 aa, Homo sapiens
  CDR3 for alpha chain variable domain of TCR clone 291927 (TRAV3, TRAJ11)
CAVRDRGSGYSTLTF

SEQ ID NO: 583854 - protein, 13 aa, Homo sapiens
  CDR3 for beta chain variable domain of TCR clone 291927 (TRBV27, TRBJ1-4)
CASSLMGDEKLLF

SEQ ID NO: 583855 - protein, 14 aa, Homo sapiens
  CDR3 for alpha chain variable domain of TCR clone 291928 (TRAV8-3, TRAJ4)
CAVGAAGGYNKLIF

SEQ ID NO: 583856 - protein, 16 aa, Homo sapiens
  CDR3 for beta chain variable domain of TCR clone 291928 (TRBV13, TRBJ2-2)
CASSPRTGEYTGELFF

SEQ ID NO: 583857 - protein, 12 aa, Homo sapiens
  CDR3 for alpha chain variable domain of TCR clone 291929 (TRAV17, TRAJ12)
CATLRSSYKLIF

SEQ ID NO: 583858 - protein, 16 aa, Homo sapiens
  CDR3 for beta chain variable domain of TCR clone 291929 (TRBV28, TRBJ2-7)
CASSLFSETGGPKQYF

SEQ ID NO: 583859 - protein, 19 aa, Homo sapiens
  CDR3 for alpha chain variable domain of TCR clone 291930 (TRAV1-2, TRAJ26)
CLLPLCCERPDNYGQSFVF

SEQ ID NO: 583860 - protein, 11 aa, Homo sapiens
  CDR3 for beta chain variable domain of TCR clone 291930 (TRBV29-1, TRBJ2-5)
CSEDRTGTQYF

SEQ ID NO: 583861 - protein, 14 aa, Homo sapiens
  CDR3 for alpha chain variable domain of TCR clone 291931 (TRAV1-2, TRAJ16)
CADNRFSDGQKLLF

SEQ ID NO: 583862 - protein, 15 aa, Homo sapiens
  CDR3 for beta chain variable domain of TCR clone 291931 (TRBV2, TRBJ2-1)
CASSEEREGDNEQFF

SEQ ID NO: 583863 - protein, 17 aa, Homo sapiens
  CDR3 for alpha chain variable domain of TCR clone 291932 (TRAV21, TRAJ10)
CAVRGYILTGGGNKLTF

SEQ ID NO: 583864 - protein, 16 aa, Homo sapiens
  CDR3 for beta chain variable domain of TCR clone 291932 (TRBV20-1, TRBJ1-2)
CSASMGQGVANYGYTF

SEQ ID NO: 583865 - protein, 17 aa, Homo sapiens
  CDR3 for alpha chain variable domain of TCR clone 291933 (TRAV4, TRAJ18)
CLVGERSVGSTLGRLYF

SEQ ID NO: 583866 - protein, 15 aa, Homo sapiens
  CDR3 for beta chain variable domain of TCR clone 291933 (TRBV7-9, TRBJ2-7)
CASSPGGGLTYEQYF

SEQ ID NO: 583867 - protein, 13 aa, Homo sapiens
  CDR3 for alpha chain variable domain of TCR clone 291934 (TRAV12-3, TRAJ20)
CAMRRSNAYKLSF

SEQ ID NO: 583868 - protein, 15 aa, Homo sapiens
  CDR3 for beta chain variable domain of TCR clone 291934 (TRBV9, TRBJ2-3)
CASSVAGGRSDTQYF

SEQ ID NO: 583869 - protein, 14 aa, Homo sapiens
  CDR3 for alpha chain variable domain of TCR clone 291935 (TRAV8-4, TRAJ38)
CARLNAGNNRKLIC

SEQ ID NO: 583870 - protein, 12 aa, Homo sapiens
  CDR3 for beta chain variable domain of TCR clone 291935 (TRBV6-1, TRBJ2-7)
CASSEPLYEQYF

SEQ ID NO: 583871 - protein, 15 aa, Homo sapiens
  CDR3 for alpha chain variable domain of TCR clone 291936 (TRAV2, TRAJ22)
CAVPSRGGSARQLTF

SEQ ID NO: 583872 - protein, 16 aa, Homo sapiens
  CDR3 for beta chain variable domain of TCR clone 291936 (TRBV5-4, TRBJ2-7)
CASSSKMTSGTYEQYF

SEQ ID NO: 583873 - protein, 14 aa, Homo sapiens
  CDR3 for alpha chain variable domain of TCR clone 291937 (TRAV12-2, TRAJ17)
CAVLFKAAGNQLTF

SEQ ID NO: 583874 - protein, 14 aa, Homo sapiens
  CDR3 for beta chain variable domain of TCR clone 291937 (TRBV4-1, TRBJ2-2)
CASSQAVNTGELFF

SEQ ID NO: 583875 - protein, 14 aa, Homo sapiens
  CDR3 for alpha chain variable domain of TCR clone 291938 (TRAV21, TRAJ42)
CAVLGGGSQGNLIF

SEQ ID NO: 583876 - protein, 13 aa, Homo sapiens
  CDR3 for beta chain variable domain of TCR clone 291938 (TRBV10-3, TRBJ2-7)
CASKLAVNYEQYF

SEQ ID NO: 583877 - protein, 15 aa, Homo sapiens
  CDR3 for alpha chain variable domain of TCR clone 291939 (TRAV14/DV4, TRAJ47)
CAMREAMEYGNKLVF

SEQ ID NO: 583878 - protein, 18 aa, Homo sapiens
  CDR3 for beta chain variable domain of TCR clone 291939 (TRBV20-1, TRBJ2-1)
CSASIFGSSGQGINEQFF

SEQ ID NO: 583879 - protein, 13 aa, Homo sapiens
  CDR3 for alpha chain variable domain of TCR clone 291940 (TRAV2, TRAJ40)
CAVVTSGTYKYIF

SEQ ID NO: 583880 - protein, 15 aa, Homo sapiens
  CDR3 for beta chain variable domain of TCR clone 291940 (TRBV7-3, TRBJ2-7)
CASSPPVALNYEQYF

SEQ ID NO: 583881 - protein, 14 aa, Homo sapiens
  CDR3 for alpha chain variable domain of TCR clone 291941 (TRAV12-2, TRAJ11)
CAVNRESGYSTLTS

SEQ ID NO: 583882 - protein, 10 aa, Homo sapiens
  CDR3 for beta chain variable domain of TCR clone 291941 (TRBV20-1, TRBJ2-5)
CSARFETQYF

SEQ ID NO: 583883 - protein, 17 aa, Homo sapiens
  CDR3 for alpha chain variable domain of TCR clone 291942 (TRAV4, TRAJ13)
CLVGVHGSSGGYQKVTF

SEQ ID NO: 583884 - protein, 18 aa, Homo sapiens
  CDR3 for beta chain variable domain of TCR clone 291942 (TRBV15, TRBJ2-3)
CATSRDGARSWDTDTQYF

SEQ ID NO: 583885 - protein, 14 aa, Homo sapiens
  CDR3 for alpha chain variable domain of TCR clone 291943 (TRAV4, TRAJ26)
CLVGPLNYGQNFVF

SEQ ID NO: 583886 - protein, 17 aa, Homo sapiens
  CDR3 for beta chain variable domain of TCR clone 291943 (TRBV24-1, TRBJ2-1)
CATSDVSTSGTYNEQFF

SEQ ID NO: 583887 - protein, 13 aa, Homo sapiens
  CDR3 for alpha chain variable domain of TCR clone 291944 (TRAV35, TRAJ42)
CAGLPGSQGNLIF

SEQ ID NO: 583888 - protein, 11 aa, Homo sapiens
  CDR3 for beta chain variable domain of TCR clone 291944 (TRBV29-1, TRBJ2-1)
SAALKAGEQFF

SEQ ID NO: 583889 - protein, 14 aa, Homo sapiens
  CDR3 for alpha chain variable domain of TCR clone 291945 (TRAV13-1, TRAJ44)
CAAKATGTASKLTF

SEQ ID NO: 583890 - protein, 16 aa, Homo sapiens
  CDR3 for beta chain variable domain of TCR clone 291945 (TRBV15, TRBJ1-2)
CATSRGPRTGGSGYTF

SEQ ID NO: 583891 - protein, 13 aa, Homo sapiens
  CDR3 for alpha chain variable domain of TCR clone 291946 (TRAV8-3, TRAJ28)
CAVGAVGSYQLTF

SEQ ID NO: 583892 - protein, 18 aa, Homo sapiens
  CDR3 for beta chain variable domain of TCR clone 291946 (TRBV12-4, TRBJ1-2)
CASSPNPGQAGPYYGYTF

SEQ ID NO: 583893 - protein, 10 aa, Homo sapiens
  CDR3 for alpha chain variable domain of TCR clone 291947 (TRAV12-2, TRAJ52)
RSTSYGKLTF

SEQ ID NO: 583894 - protein, 14 aa, Homo sapiens
  CDR3 for beta chain variable domain of TCR clone 291947 (TRBV7-2, TRBJ2-7)
CASRSQGAAYEQYF

SEQ ID NO: 583895 - protein, 13 aa, Homo sapiens
  CDR3 for alpha chain variable domain of TCR clone 291948 (TRAV13-1, TRAJ20)
CAASVSNDYKLSF

SEQ ID NO: 583896 - protein, 12 aa, Homo sapiens
  CDR3 for beta chain variable domain of TCR clone 291948 (TRBV20-1, TRBJ2-1)
CSARLGTDEQFF

SEQ ID NO: 583897 - protein, 15 aa, Homo sapiens
  CDR3 for alpha chain variable domain of TCR clone 291949 (TRAV3, TRAJ17)
CAVRDTGAAGNKLTF

SEQ ID NO: 583898 - protein, 14 aa, Homo sapiens
  CDR3 for beta chain variable domain of TCR clone 291949 (TRBV6-3, TRBJ1-1)
CASSNLLRGAEAFF

SEQ ID NO: 583899 - protein, 13 aa, Homo sapiens
  CDR3 for alpha chain variable domain of TCR clone 291950 (TRAV1-1, TRAJ23)
CAVVANQGGKLIF

SEQ ID NO: 583900 - protein, 16 aa, Homo sapiens
  CDR3 for beta chain variable domain of TCR clone 291950 (TRBV20-1, TRBJ2-3)
CSAREQLASSSDTQYF

SEQ ID NO: 583901 - protein, 11 aa, Homo sapiens
  CDR3 for alpha chain variable domain of TCR clone 291951 (TRAV12-1, TRAJ30)
CVVNGQDEIIV

SEQ ID NO: 583902 - protein, 12 aa, Homo sapiens
  CDR3 for beta chain variable domain of TCR clone 291951 (TRBV27, TRBJ2-2)
CASKLFTGELFF

SEQ ID NO: 583903 - protein, 13 aa, Homo sapiens
  CDR3 for alpha chain variable domain of TCR clone 291952 (TRAV12-3, TRAJ7)
CAMSASGNNRLAF

SEQ ID NO: 583904 - protein, 14 aa, Homo sapiens
  CDR3 for beta chain variable domain of TCR clone 291952 (TRBV13, TRBJ2-5)
CASSLGPRGKTQYF

SEQ ID NO: 583905 - protein, 15 aa, Homo sapiens
  CDR3 for alpha chain variable domain of TCR clone 291953 (TRAV8-2, TRAJ16)
CVVSDGFSDGQKLPF

SEQ ID NO: 583906 - protein, 15 aa, Homo sapiens
  CDR3 for beta chain variable domain of TCR clone 291953 (TRBV12-4, TRBJ2-5)
CASSPPTGLQETQYF

SEQ ID NO: 583907 - protein, 10 aa, Homo sapiens
  CDR3 for alpha chain variable domain of TCR clone 291954 (TRAV8-4, TRAJ39)
CAVSGNMLTF

SEQ ID NO: 583908 - protein, 16 aa, Homo sapiens
  CDR3 for beta chain variable domain of TCR clone 291954 (TRBV9, TRBJ2-1)
CASSVGGGGNYNEQFF

SEQ ID NO: 583909 - protein, 15 aa, Homo sapiens
  CDR3 for alpha chain variable domain of TCR clone 291955 (TRAV12-2, TRAJ53)
CAVNGGGGSNYKLTF

SEQ ID NO: 583910 - protein, 13 aa, Homo sapiens
  CDR3 for beta chain variable domain of TCR clone 291955 (TRBV3-1, TRBJ1-1)
CASSPGVINEAFF

SEQ ID NO: 583911 - protein, 14 aa, Homo sapiens
  CDR3 for alpha chain variable domain of TCR clone 291956 (TRAV1-2, TRAJ8)
CAVREDTGFQKLVF

SEQ ID NO: 583912 - protein, 15 aa, Homo sapiens
  CDR3 for beta chain variable domain of TCR clone 291956 (TRBV15, TRBJ1-1)
CATSLQGGRNTETFF

SEQ ID NO: 583913 - protein, 13 aa, Homo sapiens
  CDR3 for alpha chain variable domain of TCR clone 291957 (TRAV8-3, TRAJ28)
CAVGAVGSYQLTF

SEQ ID NO: 583914 - protein, 14 aa, Homo sapiens
  CDR3 for beta chain variable domain of TCR clone 291957 (TRBV7-3, TRBJ2-3)
CASSFGASTDTQYF

SEQ ID NO: 583915 - protein, 14 aa, Homo sapiens
  CDR3 for alpha chain variable domain of TCR clone 291958 (TRAV2, TRAJ27)
CCGFYNTNAGKLTF

SEQ ID NO: 583916 - protein, 18 aa, Homo sapiens
  CDR3 for beta chain variable domain of TCR clone 291958 (TRBV7-9, TRBJ2-7)
CASSLTTSGSRTWYEQYF

SEQ ID NO: 583917 - protein, 15 aa, Homo sapiens
  CDR3 for alpha chain variable domain of TCR clone 291959 (TRAV8-3, TRAJ45)
CASSYSGGGADGLTF

SEQ ID NO: 583918 - protein, 17 aa, Homo sapiens
  CDR3 for beta chain variable domain of TCR clone 291959 (TRBV7-8, TRBJ1-2)
CASSLRPLLGHLYGYTF

SEQ ID NO: 583919 - protein, 15 aa, Homo sapiens
  CDR3 for alpha chain variable domain of TCR clone 291960 (TRAV8-6, TRAJ26)
CAVSEEESGGQNFVF

SEQ ID NO: 583920 - protein, 15 aa, Homo sapiens
  CDR3 for beta chain variable domain of TCR clone 291960 (TRBV5-5, TRBJ1-1)
CASSLVGKDNTEAFF

SEQ ID NO: 583921 - protein, 12 aa, Homo sapiens
  CDR3 for alpha chain variable domain of TCR clone 291961 (TRAV8-3, TRAJ20)
WAVDFNDYKLSF

SEQ ID NO: 583922 - protein, 13 aa, Homo sapiens
  CDR3 for beta chain variable domain of TCR clone 291961 (TRBV5-7, TRBJ2-3)
CASSLGRTETQYF

SEQ ID NO: 583923 - protein, 16 aa, Homo sapiens
  CDR3 for alpha chain variable domain of TCR clone 291962 (TRAV3, TRAJ37)
CAVRGKGSGNTGKLIV

SEQ ID NO: 583924 - protein, 12 aa, Homo sapiens
  CDR3 for beta chain variable domain of TCR clone 291962 (TRBV11-2, TRBJ2-2)
CASSLGGGELFF

SEQ ID NO: 583925 - protein, 15 aa, Homo sapiens
  CDR3 for alpha chain variable domain of TCR clone 291963 (TRAV17, TRAJ13)
CATVPNSVGYQKVTF

SEQ ID NO: 583926 - protein, 13 aa, Homo sapiens
  CDR3 for beta chain variable domain of TCR clone 291963 (TRBV3-1, TRBJ1-5)
CASSQAGGQPQHF

SEQ ID NO: 583927 - protein, 15 aa, Homo sapiens
  CDR3 for alpha chain variable domain of TCR clone 291964 (TRAV26-1, TRAJ29)
CIVRVEGSGNTPLVF

SEQ ID NO: 583928 - protein, 15 aa, Homo sapiens
  CDR3 for beta chain variable domain of TCR clone 291964 (TRBV5-7, TRBJ2-7)
CASSLPGQVFYEQYF

SEQ ID NO: 583929 - protein, 14 aa, Homo sapiens
  CDR3 for alpha chain variable domain of TCR clone 291965 (TRAV9-2, TRAJ39)
CSLYIYNAGNMLTF

SEQ ID NO: 583930 - protein, 12 aa, Homo sapiens
  CDR3 for beta chain variable domain of TCR clone 291965 (TRBV12-4, TRBJ2-1)
CASSLQGSEQFF

SEQ ID NO: 583931 - protein, 12 aa, Homo sapiens
  CDR3 for alpha chain variable domain of TCR clone 291966 (TRAV8-4, TRAJ43)
CAVSVNNNDMRF

SEQ ID NO: 583932 - protein, 14 aa, Homo sapiens
  CDR3 for beta chain variable domain of TCR clone 291966 (TRBV19, TRBJ2-1)
CASPTFVLSGEQFF

SEQ ID NO: 583933 - protein, 13 aa, Homo sapiens
  CDR3 for alpha chain variable domain of TCR clone 291967 (TRAV8-3, TRAJ28)
CAVGAVGSYQLTF

SEQ ID NO: 583934 - protein, 18 aa, Homo sapiens
  CDR3 for beta chain variable domain of TCR clone 291967 (TRBV11-2, TRBJ2-3)
CASSLGGASRGAPNTQYF

SEQ ID NO: 583935 - protein, 16 aa, Homo sapiens
  CDR3 for alpha chain variable domain of TCR clone 291968 (TRAV30, TRAJ24)
CGTEIVDADSWGKFQF

SEQ ID NO: 583936 - protein, 16 aa, Homo sapiens
  CDR3 for beta chain variable domain of TCR clone 291968 (TRBV12-4, TRBJ2-3)
CASSLRLAETTDTQYF

SEQ ID NO: 583937 - protein, 13 aa, Homo sapiens
  CDR3 for alpha chain variable domain of TCR clone 291969 (TRAV8-2, TRAJ5)
CVVSGAGRRALTF

SEQ ID NO: 583938 - protein, 13 aa, Homo sapiens
  CDR3 for beta chain variable domain of TCR clone 291969 (TRBV12-4, TRBJ1-2)
CASSLRQGKGYTF

SEQ ID NO: 583939 - protein, 13 aa, Homo sapiens
  CDR3 for alpha chain variable domain of TCR clone 291970 (TRAV21, TRAJ24)
GLMTTDSWGKLQF

SEQ ID NO: 583940 - protein, 12 aa, Homo sapiens
  CDR3 for beta chain variable domain of TCR clone 291970 (TRBV11-2, TRBJ2-7)
CASSPHADEQYF

SEQ ID NO: 583941 - protein, 13 aa, Homo sapiens
  CDR3 for alpha chain variable domain of TCR clone 291971 (TRAV20, TRAJ34)
CAVSSYNTDKLLF

SEQ ID NO: 583942 - protein, 15 aa, Homo sapiens
  CDR3 for beta chain variable domain of TCR clone 291971 (TRBV20-1, TRBJ1-2)
CSAAGEGARIYGYTF

SEQ ID NO: 583943 - protein, 12 aa, Homo sapiens
  CDR3 for alpha chain variable domain of TCR clone 291972 (TRAV17, TRAJ12)
CATLRSSYKLIF

SEQ ID NO: 583944 - protein, 16 aa, Homo sapiens
  CDR3 for beta chain variable domain of TCR clone 291972 (TRBV28, TRBJ2-7)
CACSLFFETGGPEQYF

SEQ ID NO: 583945 - protein, 16 aa, Homo sapiens
  CDR3 for alpha chain variable domain of TCR clone 291973 (TRAV12-2, TRAJ45)
CAVNRGSGGCADGLTF

SEQ ID NO: 583946 - protein, 14 aa, Homo sapiens
  CDR3 for beta chain variable domain of TCR clone 291973 (TRBV23-1, TRBJ2-2)
EDRGVEKDTGELFF

SEQ ID NO: 583947 - protein, 14 aa, Homo sapiens
  CDR3 for alpha chain variable domain of TCR clone 291974 (TRAV29/DV5, TRAJ47)
CAASSIEYGNKLVF

SEQ ID NO: 583948 - protein, 12 aa, Homo sapiens
  CDR3 for beta chain variable domain of TCR clone 291974 (TRBV7-8, TRBJ2-7)
CASSLGDREQYF

SEQ ID NO: 583949 - protein, 17 aa, Homo sapiens
  CDR3 for alpha chain variable domain of TCR clone 291975 (TRAV17, TRAJ52)
CATERPSGGTSYGKLTF

SEQ ID NO: 583950 - protein, 13 aa, Homo sapiens
  CDR3 for beta chain variable domain of TCR clone 291975 (TRBV3-1, TRBJ2-7)
CASSPGLAHTEYF

SEQ ID NO: 583951 - protein, 13 aa, Homo sapiens
  CDR3 for alpha chain variable domain of TCR clone 291976 (TRAV29/DV5, TRAJ48)
CAASSFGNGKLTF

SEQ ID NO: 583952 - protein, 14 aa, Homo sapiens
  CDR3 for beta chain variable domain of TCR clone 291976 (TRBV3-1, TRBJ2-2)
CASSQDWVQGELFF

SEQ ID NO: 583953 - protein, 17 aa, Homo sapiens
  CDR3 for alpha chain variable domain of TCR clone 291977 (TRAV8-6, TRAJ8)
CAVKEGLENTGFQKLVF

SEQ ID NO: 583954 - protein, 12 aa, Homo sapiens
  CDR3 for beta chain variable domain of TCR clone 291977 (TRBV19, TRBJ1-4)
CASKDWPGGLFF

SEQ ID NO: 583955 - protein, 17 aa, Homo sapiens
  CDR3 for alpha chain variable domain of TCR clone 291978 (TRAV21, TRAJ52)
CAVGVNAGGTSYGQLTF

SEQ ID NO: 583956 - protein, 13 aa, Homo sapiens
  CDR3 for beta chain variable domain of TCR clone 291978 (TRBV5-1, TRBJ1-2)
CASGFQGNYGYTF

SEQ ID NO: 583957 - protein, 14 aa, Homo sapiens
  CDR3 for alpha chain variable domain of TCR clone 291979 (TRAV4, TRAJ9)
CLVGSGTGGFKTIF

SEQ ID NO: 583958 - protein, 16 aa, Homo sapiens
  CDR3 for beta chain variable domain of TCR clone 291979 (TRBV12-4, TRBJ2-7)
CASRSTGTGPSYEQYF

SEQ ID NO: 583959 - protein, 15 aa, Homo sapiens
  CDR3 for alpha chain variable domain of TCR clone 291980 (TRAV20, TRAJ16)
CAVQIRFSDGQKLLF

SEQ ID NO: 583960 - protein, 17 aa, Homo sapiens
  CDR3 for beta chain variable domain of TCR clone 291980 (TRBV7-8, TRBJ2-6)
CASSAVTGGAGANVLTF

SEQ ID NO: 583961 - protein, 17 aa, Homo sapiens
  CDR3 for alpha chain variable domain of TCR clone 291981 (TRAV3, TRAJ6)
CAVRDGPRAGGSYIPNF

SEQ ID NO: 583962 - protein, 15 aa, Homo sapiens
  CDR3 for beta chain variable domain of TCR clone 291981 (TRBV11-3, TRBJ2-7)
CASSPGPASSYEQYF

SEQ ID NO: 583963 - protein, 10 aa, Homo sapiens
  CDR3 for alpha chain variable domain of TCR clone 291982 (TRAV8-2, TRAJ29)
CTGGNTPLVF

SEQ ID NO: 583964 - protein, 13 aa, Homo sapiens
  CDR3 for beta chain variable domain of TCR clone 291982 (TRBV20-1, TRBJ1-1)
CSARGGGNTEALF

SEQ ID NO: 583965 - protein, 14 aa, Homo sapiens
  CDR3 for alpha chain variable domain of TCR clone 291983 (TRAV12-2, TRAJ44)
CAVNKAGTASKLTF

SEQ ID NO: 583966 - protein, 15 aa, Homo sapiens
  CDR3 for beta chain variable domain of TCR clone 291983 (TRBV4-3, TRBJ2-5)
CASSRGTGHRETQYF

SEQ ID NO: 583967 - protein, 13 aa, Homo sapiens
  CDR3 for alpha chain variable domain of TCR clone 291984 (TRAV8-4, TRAJ30)
CAVSVNRDDKIIF

SEQ ID NO: 583968 - protein, 13 aa, Homo sapiens
  CDR3 for beta chain variable domain of TCR clone 291984 (TRBV3-1, TRBJ2-2)
CASLARGSGEMFF

SEQ ID NO: 583969 - protein, 14 aa, Homo sapiens
  CDR3 for alpha chain variable domain of TCR clone 291985 (TRAV16, TRAJ39)
CALSKNNAGNMLTF

SEQ ID NO: 583970 - protein, 16 aa, Homo sapiens
  CDR3 for beta chain variable domain of TCR clone 291985 (TRBV6-6, TRBJ2-1)
YASSYSFSGSYNEQFF

SEQ ID NO: 583971 - protein, 14 aa, Homo sapiens
  CDR3 for alpha chain variable domain of TCR clone 291986 (TRAV29/DV5, TRAJ36)
CAARRKTGANNLFF

SEQ ID NO: 583972 - protein, 12 aa, Homo sapiens
  CDR3 for beta chain variable domain of TCR clone 291986 (TRBV11-2, TRBJ2-1)
CASSPGNNEQFF

SEQ ID NO: 583973 - protein, 14 aa, Homo sapiens
  CDR3 for alpha chain variable domain of TCR clone 291987 (TRAV2, TRAJ20)
CAVDLRKHDYKLSF

SEQ ID NO: 583974 - protein, 14 aa, Homo sapiens
  CDR3 for beta chain variable domain of TCR clone 291987 (TRBV15, TRBJ2-5)
CATSMGGSGETQYF

SEQ ID NO: 583975 - protein, 16 aa, Homo sapiens
  CDR3 for alpha chain variable domain of TCR clone 291988 (TRAV26-2, TRAJ45)
CTTASPIGGGADGLTF

SEQ ID NO: 583976 - protein, 20 aa, Homo sapiens
  CDR3 for beta chain variable domain of TCR clone 291988 (TRBV28, TRBJ2-1)
CANTPIGRSPGLAGGDEQFF

SEQ ID NO: 583977 - protein, 14 aa, Homo sapiens
  CDR3 for alpha chain variable domain of TCR clone 291989 (TRAV1-2, TRAJ16)
CAVNRFSDGQKLLF

SEQ ID NO: 583978 - protein, 15 aa, Homo sapiens
  CDR3 for beta chain variable domain of TCR clone 291989 (TRBV3-1, TRBJ2-5)
CASSANLGGPETHYF

SEQ ID NO: 583979 - protein, 16 aa, Homo sapiens
  CDR3 for alpha chain variable domain of TCR clone 291990 (TRAV27, TRAJ52)
CAGAGAGGTSYGKLTF

SEQ ID NO: 583980 - protein, 17 aa, Homo sapiens
  CDR3 for beta chain variable domain of TCR clone 291990 (TRBV24-1, TRBJ2-3)
CVTSDLPSGEDTDTQYF

SEQ ID NO: 583981 - protein, 20 aa, Homo sapiens
  CDR3 for alpha chain variable domain of TCR clone 291991 (TRAV26-1, TRAJ42)
CCVLLHRQTYYGGSQGNLIF

SEQ ID NO: 583982 - protein, 16 aa, Homo sapiens
  CDR3 for beta chain variable domain of TCR clone 291991 (TRBV7-3, TRBJ2-5)
CASSLMGGASQETQYF

SEQ ID NO: 583983 - protein, 14 aa, Homo sapiens
  CDR3 for alpha chain variable domain of TCR clone 291992 (TRAV8-6, TRAJ38)
CAAYNAGNNRKLIW

SEQ ID NO: 583984 - protein, 12 aa, Homo sapiens
  CDR3 for beta chain variable domain of TCR clone 291992 (TRBV11-2, TRBJ2-2)
CASSLPTGELFF

SEQ ID NO: 583985 - protein, 23 aa, Homo sapiens
  CDR3 for alpha chain variable domain of TCR clone 291993 (TRAV8-3, TRAJ38)
CAVGASNAGNNHIQNPDPAVYQL

SEQ ID NO: 583986 - protein, 15 aa, Homo sapiens
  CDR3 for beta chain variable domain of TCR clone 291993 (TRBV11-3, TRBJ1-3)
CASSLFGPSGNIIYF

SEQ ID NO: 583987 - protein, 12 aa, Homo sapiens
  CDR3 for alpha chain variable domain of TCR clone 291994 (TRAV23/DV6, TRAJ30)
CAANKGDDKIIF

SEQ ID NO: 583988 - protein, 15 aa, Homo sapiens
  CDR3 for beta chain variable domain of TCR clone 291994 (TRBV29-1, TRBJ2-1)
CSGRDGKSSYNEQFF

SEQ ID NO: 583989 - protein, 14 aa, Homo sapiens
  CDR3 for alpha chain variable domain of TCR clone 291995 (TRAV1-2, TRAJ8)
CAVREDTGFQKLVF

SEQ ID NO: 583990 - protein, 14 aa, Homo sapiens
  CDR3 for beta chain variable domain of TCR clone 291995 (TRBV4-1, TRBJ1-1)
CASSPLPVPRGAFF

SEQ ID NO: 583991 - protein, 16 aa, Homo sapiens
  CDR3 for alpha chain variable domain of TCR clone 291996 (TRAV3, TRAJ21)
CAVRDIERGNFKKFYF

SEQ ID NO: 583992 - protein, 16 aa, Homo sapiens
  CDR3 for beta chain variable domain of TCR clone 291996 (TRBV12-4, TRBJ1-5)
CSSSRPVGGSNQPQHF

SEQ ID NO: 583993 - protein, 18 aa, Homo sapiens
  CDR3 for alpha chain variable domain of TCR clone 291997 (TRAV13-1, TRAJ52)
CAAKNPNAGGTSYGKLTF

SEQ ID NO: 583994 - protein, 14 aa, Homo sapiens
  CDR3 for beta chain variable domain of TCR clone 291997 (TRBV7-6, TRBJ2-3)
CASSLGKVTDTQYF

SEQ ID NO: 583995 - protein, 13 aa, Homo sapiens
  CDR3 for alpha chain variable domain of TCR clone 291998 (TRAV3, TRAJ27)
CAVRLLGAGKSTF

SEQ ID NO: 583996 - protein, 12 aa, Homo sapiens
  CDR3 for beta chain variable domain of TCR clone 291998 (TRBV6-1, TRBJ2-7)
CASSDYSYEQYF

SEQ ID NO: 583997 - protein, 13 aa, Homo sapiens
  CDR3 for alpha chain variable domain of TCR clone 291999 (TRAV26-1, TRAJ36)
CIVVGTGANNLFF

SEQ ID NO: 583998 - protein, 13 aa, Homo sapiens
  CDR3 for beta chain variable domain of TCR clone 291999 (TRBV6-5, TRBJ2-6)
CASSTSWPLRLDF

SEQ ID NO: 583999 - protein, 16 aa, Homo sapiens
  CDR3 for alpha chain variable domain of TCR clone 292000 (TRAV12-1, TRAJ43)
CVVNPHRFGAGTRLTV

SEQ ID NO: 584000 - protein, 16 aa, Homo sapiens
  CDR3 for beta chain variable domain of TCR clone 292000 (TRBV20-1, TRBJ1-4)
CSARPYGGELNEKLFF

SEQ ID NO: 584001 - protein, 13 aa, Homo sapiens
  CDR3 for alpha chain variable domain of TCR clone 292001 (TRAV35, TRAJ42)
CAGFPGSQGNLIF

SEQ ID NO: 584002 - protein, 14 aa, Homo sapiens
  CDR3 for beta chain variable domain of TCR clone 292001 (TRBV28, TRBJ2-1)
CASSLNGRNNEQFF

SEQ ID NO: 584003 - protein, 10 aa, Homo sapiens
  CDR3 for alpha chain variable domain of TCR clone 292002 (TRAV26-1, TRAJ22)
CIVSLNFFWF

SEQ ID NO: 584004 - protein, 13 aa, Homo sapiens
  CDR3 for beta chain variable domain of TCR clone 292002 (TRBV11-3, TRBJ2-5)
CASSSGLQETQYF

SEQ ID NO: 584005 - protein, 15 aa, Homo sapiens
  CDR3 for alpha chain variable domain of TCR clone 292003 (TRAV13-1, TRAJ17)
CAASIERAAGNKLTF

SEQ ID NO: 584006 - protein, 12 aa, Homo sapiens
  CDR3 for beta chain variable domain of TCR clone 292003 (TRBV5-7, TRBJ1-1)
RASSLGRGKAFF

SEQ ID NO: 584007 - protein, 13 aa, Homo sapiens
  CDR3 for alpha chain variable domain of TCR clone 292004 (TRAV1-2, TRAJ35)
CAVQIGFGNVLHC

SEQ ID NO: 584008 - protein, 15 aa, Homo sapiens
  CDR3 for beta chain variable domain of TCR clone 292004 (TRBV2, TRBJ2-3)
CASSDFEKATDTQYF

SEQ ID NO: 584009 - protein, 14 aa, Homo sapiens
  CDR3 for alpha chain variable domain of TCR clone 292005 (TRAV1-2, TRAJ8)
CAVREDTGFQKLVF

SEQ ID NO: 584010 - protein, 16 aa, Homo sapiens
  CDR3 for beta chain variable domain of TCR clone 292005 (TRBV4-1, TRBJ1-4)
CASSPDLRRGGEKLFF

SEQ ID NO: 584011 - protein, 14 aa, Homo sapiens
  CDR3 for alpha chain variable domain of TCR clone 292006 (TRAV17, TRAJ57)
CATDPQGGSVKLVF

SEQ ID NO: 584012 - protein, 18 aa, Homo sapiens
  CDR3 for beta chain variable domain of TCR clone 292006 (TRBV25-1, TRBJ2-1)
CASSESRAGGPGYNEQFF

SEQ ID NO: 584013 - protein, 11 aa, Homo sapiens
  CDR3 for alpha chain variable domain of TCR clone 292007 (TRAV1-1, TRAJ23)
CAVRQGGKLIF

SEQ ID NO: 584014 - protein, 13 aa, Homo sapiens
  CDR3 for beta chain variable domain of TCR clone 292007 (TRBV27, TRBJ1-4)
CASSLMGDENLFF

SEQ ID NO: 584015 - protein, 14 aa, Homo sapiens
  CDR3 for alpha chain variable domain of TCR clone 292008 (TRAV35, TRAJ38)
CAGSNAGNNRKLVW

SEQ ID NO: 584016 - protein, 12 aa, Homo sapiens
  CDR3 for beta chain variable domain of TCR clone 292008 (TRBV19, TRBJ2-7)
CASTDRGYEQYF

SEQ ID NO: 584017 - protein, 18 aa, Homo sapiens
  CDR3 for alpha chain variable domain of TCR clone 292009 (TRAV26-1, TRAJ22)
CIVRVSFWFFKATDLLIW

SEQ ID NO: 584018 - protein, 13 aa, Homo sapiens
  CDR3 for beta chain variable domain of TCR clone 292009 (TRBV7-9, TRBJ1-2)
CASSVKQNYGYTF

SEQ ID NO: 584019 - protein, 14 aa, Homo sapiens
  CDR3 for alpha chain variable domain of TCR clone 292010 (TRAV8-3, TRAJ4)
CAVGAAGGYNKLIF

SEQ ID NO: 584020 - protein, 13 aa, Homo sapiens
  CDR3 for beta chain variable domain of TCR clone 292010 (TRBV12-4, TRBJ1-1)
CASSPGTGSEAFF

SEQ ID NO: 584021 - protein, 15 aa, Homo sapiens
  CDR3 for alpha chain variable domain of TCR clone 292011 (TRAV29/DV5, TRAJ44)
CAASAGTGTASKLTF

SEQ ID NO: 584022 - protein, 15 aa, Homo sapiens
  CDR3 for beta chain variable domain of TCR clone 292011 (TRBV11-2, TRBJ2-1)
CASSLGTSGLNEQFF

SEQ ID NO: 584023 - protein, 11 aa, Homo sapiens
  CDR3 for alpha chain variable domain of TCR clone 292012 (TRAV1-2, TRAJ20)
CAVSNDYKLSS

SEQ ID NO: 584024 - protein, 16 aa, Homo sapiens
  CDR3 for beta chain variable domain of TCR clone 292012 (TRBV29-1, TRBJ2-6)
CSVEDITYSGANVLTS

SEQ ID NO: 584025 - protein, 14 aa, Homo sapiens
  CDR3 for alpha chain variable domain of TCR clone 292013 (TRAV17, TRAJ54)
CATDANQGAQKLVF

SEQ ID NO: 584026 - protein, 12 aa, Homo sapiens
  CDR3 for beta chain variable domain of TCR clone 292013 (TRBV4-3, TRBJ2-1)
CASSLSGYEQFF

SEQ ID NO: 584027 - protein, 13 aa, Homo sapiens
  CDR3 for alpha chain variable domain of TCR clone 292014 (TRAV38-2/DV8, TRAJ34)
CAYRTWNTDKLIF

SEQ ID NO: 584028 - protein, 15 aa, Homo sapiens
  CDR3 for beta chain variable domain of TCR clone 292014 (TRBV20-1, TRBJ2-7)
CSARDRVSGMDEQYF

SEQ ID NO: 584029 - protein, 11 aa, Homo sapiens
  CDR3 for alpha chain variable domain of TCR clone 292015 (TRAV35, TRAJ30)
CAPGGDDKVIF

SEQ ID NO: 584030 - protein, 15 aa, Homo sapiens
  CDR3 for beta chain variable domain of TCR clone 292015 (TRBV9, TRBJ1-6)
CASSVAGTGDSPLHF

SEQ ID NO: 584031 - protein, 15 aa, Homo sapiens
  CDR3 for alpha chain variable domain of TCR clone 292016 (TRAV29/DV5, TRAJ42)
CAAKTDGGSQGNLIS

SEQ ID NO: 584032 - protein, 15 aa, Homo sapiens
  CDR3 for beta chain variable domain of TCR clone 292016 (TRBV5-1, TRBJ2-2)
CASSSQGGNTGELFF

SEQ ID NO: 584033 - protein, 14 aa, Homo sapiens
  CDR3 for alpha chain variable domain of TCR clone 292017 (TRAV26-1, TRAJ38)
CIADNAGNNRKLIW

SEQ ID NO: 584034 - protein, 17 aa, Homo sapiens
  CDR3 for beta chain variable domain of TCR clone 292017 (TRBV7-9, TRBJ2-3)
CASSPNVAGDLTDTQYF

SEQ ID NO: 584035 - protein, 14 aa, Homo sapiens
  CDR3 for alpha chain variable domain of TCR clone 292018 (TRAV17, TRAJ56)
CATEDTGADSKLTF

SEQ ID NO: 584036 - protein, 16 aa, Homo sapiens
  CDR3 for beta chain variable domain of TCR clone 292018 (TRBV19, TRBJ2-1)
CASSIKLAGSYNEQFF

SEQ ID NO: 584037 - protein, 18 aa, Homo sapiens
  CDR3 for alpha chain variable domain of TCR clone 292019 (TRAV26-2, TRAJ45)
CILRVDKYSAGGADGLTF

SEQ ID NO: 584038 - protein, 17 aa, Homo sapiens
  CDR3 for beta chain variable domain of TCR clone 292019 (TRBV25-1, TRBJ2-1)
CAGSAYGQGRGVYEQFF

SEQ ID NO: 584039 - protein, 12 aa, Homo sapiens
  CDR3 for alpha chain variable domain of TCR clone 292020 (TRAV1-1, TRAJ30)
CAVRGRDDTIIF

SEQ ID NO: 584040 - protein, 14 aa, Homo sapiens
  CDR3 for beta chain variable domain of TCR clone 292020 (TRBV6-1, TRBJ1-3)
CASMQGGGGNTIYF

SEQ ID NO: 584041 - protein, 10 aa, Homo sapiens
  CDR3 for alpha chain variable domain of TCR clone 292021 (TRAV12-1, TRAJ33)
CVASTYQLIW

SEQ ID NO: 584042 - protein, 15 aa, Homo sapiens
  CDR3 for beta chain variable domain of TCR clone 292021 (TRBV5-4, TRBJ1-4)
CASSHGDGENEKLFF

SEQ ID NO: 584043 - protein, 12 aa, Homo sapiens
  CDR3 for alpha chain variable domain of TCR clone 292022 (TRAV16, TRAJ10)
CSRTRGGNKLTF

SEQ ID NO: 584044 - protein, 14 aa, Homo sapiens
  CDR3 for beta chain variable domain of TCR clone 292022 (TRBV7-2, TRBJ2-7)
CASRSQGAAYEQYF

SEQ ID NO: 584045 - protein, 14 aa, Homo sapiens
  CDR3 for alpha chain variable domain of TCR clone 292023 (TRAV35, TRAJ50)
CAGHRKTSYDKVIL

SEQ ID NO: 584046 - protein, 15 aa, Homo sapiens
  CDR3 for beta chain variable domain of TCR clone 292023 (TRBV6-3, TRBJ2-7)
CASSSPGTVFYEQYF

SEQ ID NO: 584047 - protein, 12 aa, Homo sapiens
  CDR3 for alpha chain variable domain of TCR clone 292024 (TRAV13-1, TRAJ15)
CAANQAGTALIF

SEQ ID NO: 584048 - protein, 14 aa, Homo sapiens
  CDR3 for beta chain variable domain of TCR clone 292024 (TRBV20-1, TRBJ2-5)
FSARYRGLQETQYF

SEQ ID NO: 584049 - protein, 13 aa, Homo sapiens
  CDR3 for alpha chain variable domain of TCR clone 292025 (TRAV12-1, TRAJ26)
CVVRRNYGQNFVF

SEQ ID NO: 584050 - protein, 16 aa, Homo sapiens
  CDR3 for beta chain variable domain of TCR clone 292025 (TRBV3-1, TRBJ2-7)
CASGQGATGVAYEQYF

SEQ ID NO: 584051 - protein, 13 aa, Homo sapiens
  CDR3 for alpha chain variable domain of TCR clone 292026 (TRAV29/DV5, TRAJ49)
CAASTNTGNQFYF

SEQ ID NO: 584052 - protein, 13 aa, Homo sapiens
  CDR3 for beta chain variable domain of TCR clone 292026 (TRBV7-2, TRBJ1-4)
CASSLARLEKLFF

SEQ ID NO: 584053 - protein, 16 aa, Homo sapiens
  CDR3 for alpha chain variable domain of TCR clone 292027 (TRAV4, TRAJ18)
CCVLLIGGSTLGRLYF

SEQ ID NO: 584054 - protein, 15 aa, Homo sapiens
  CDR3 for beta chain variable domain of TCR clone 292027 (TRBV19, TRBJ1-2)
CASSVGQVLNYGYTF

SEQ ID NO: 584055 - protein, 14 aa, Homo sapiens
  CDR3 for alpha chain variable domain of TCR clone 292028 (TRAV14/DV4, TRAJ54)
CAMREAPGAQKRVF

SEQ ID NO: 584056 - protein, 13 aa, Homo sapiens
  CDR3 for beta chain variable domain of TCR clone 292028 (TRBV7-9, TRBJ1-2)
CASSLKQNYGYTF

SEQ ID NO: 584057 - protein, 16 aa, Homo sapiens
  CDR3 for alpha chain variable domain of TCR clone 292029 (TRAV14/DV4, TRAJ53)
CAMREGGGGSNYKLTF

SEQ ID NO: 584058 - protein, 20 aa, Homo sapiens
  CDR3 for beta chain variable domain of TCR clone 292029 (TRBV11-2, TRBJ2-2)
LRTRPCISVPAALEAGSCFF

SEQ ID NO: 584059 - protein, 10 aa, Homo sapiens
  CDR3 for alpha chain variable domain of TCR clone 292030 (TRAV16, TRAJ22)
SAMYLRQLNF

SEQ ID NO: 584060 - protein, 15 aa, Homo sapiens
  CDR3 for beta chain variable domain of TCR clone 292030 (TRBV7-9, TRBJ1-6)
CASSSPGRGNSPLLF

SEQ ID NO: 584061 - protein, 14 aa, Homo sapiens
  CDR3 for alpha chain variable domain of TCR clone 292031 (TRAV12-3, TRAJ10)
SHLPLTGGGNKLTF

SEQ ID NO: 584062 - protein, 15 aa, Homo sapiens
  CDR3 for beta chain variable domain of TCR clone 292031 (TRBV7-9, TRBJ1-4)
FASSRTGGFNEKLFF

SEQ ID NO: 584063 - protein, 13 aa, Homo sapiens
  CDR3 for alpha chain variable domain of TCR clone 292032 (TRAV8-6, TRAJ13)
CAVSSGGYQKVTF

SEQ ID NO: 584064 - protein, 15 aa, Homo sapiens
  CDR3 for beta chain variable domain of TCR clone 292032 (TRBV6-3, TRBJ2-7)
CASSSPGTVFYEQYF

SEQ ID NO: 584065 - protein, 14 aa, Homo sapiens
  CDR3 for alpha chain variable domain of TCR clone 292033 (TRAV13-1, TRAJ52)
CAAAGGTSYGKLTF

SEQ ID NO: 584066 - protein, 17 aa, Homo sapiens
  CDR3 for beta chain variable domain of TCR clone 292033 (TRBV19, TRBJ1-1)
CASSKCGTGGPYTEAFF

SEQ ID NO: 584067 - protein, 18 aa, Homo sapiens
  CDR3 for alpha chain variable domain of TCR clone 292034 (TRAV38-2/DV8, TRAJ42)
CAYRSADLTGGSQGKLIF

SEQ ID NO: 584068 - protein, 12 aa, Homo sapiens
  CDR3 for beta chain variable domain of TCR clone 292034 (TRBV11-3, TRBJ2-2)
CASSLGGGELFF

SEQ ID NO: 584069 - protein, 16 aa, Homo sapiens
  CDR3 for alpha chain variable domain of TCR clone 292035 (TRAV3, TRAJ37)
CAVRGKGSGNTGKLIL

SEQ ID NO: 584070 - protein, 16 aa, Homo sapiens
  CDR3 for beta chain variable domain of TCR clone 292035 (TRBV12-4, TRBJ1-5)
CASSRPVGGSNQPQHF

SEQ ID NO: 584071 - protein, 12 aa, Homo sapiens
  CDR3 for alpha chain variable domain of TCR clone 292036 (TRAV1-1, TRAJ20)
CAVREDDYKLSF

SEQ ID NO: 584072 - protein, 17 aa, Homo sapiens
  CDR3 for beta chain variable domain of TCR clone 292036 (TRBV7-9, TRBJ1-1)
CASSSPPGQGQNTEAFF

SEQ ID NO: 584073 - protein, 18 aa, Homo sapiens
  CDR3 for alpha chain variable domain of TCR clone 292037 (TRAV29/DV5, TRAJ52)
CAAGFRGAGGTSCGKLTL

SEQ ID NO: 584074 - protein, 16 aa, Homo sapiens
  CDR3 for beta chain variable domain of TCR clone 292037 (TRBV7-3, TRBJ2-2)
CASSLKRGTLSGELFF

SEQ ID NO: 584075 - protein, 13 aa, Homo sapiens
  CDR3 for alpha chain variable domain of TCR clone 292038 (TRAV36/DV7, TRAJ29)
CSVEPSGNTPLVF

SEQ ID NO: 584076 - protein, 11 aa, Homo sapiens
  CDR3 for beta chain variable domain of TCR clone 292038 (TRBV19, TRBJ2-7)
CASGNSYEQYF

SEQ ID NO: 584077 - protein, 18 aa, Homo sapiens
  CDR3 for alpha chain variable domain of TCR clone 292039 (TRAV12-3, TRAJ52)
CAMSVGGAGGTSYGKLTF

SEQ ID NO: 584078 - protein, 17 aa, Homo sapiens
  CDR3 for beta chain variable domain of TCR clone 292039 (TRBV13, TRBJ2-3)
CASRLSRVAGGRNTQYF

SEQ ID NO: 584079 - protein, 16 aa, Homo sapiens
  CDR3 for alpha chain variable domain of TCR clone 292040 (TRAV27, TRAJ13)
CAGAKSDSGGYQKVTF

SEQ ID NO: 584080 - protein, 15 aa, Homo sapiens
  CDR3 for beta chain variable domain of TCR clone 292040 (TRBV3-1, TRBJ1-2)
CDSSPTRLPEGGYAF

SEQ ID NO: 584081 - protein, 11 aa, Homo sapiens
  CDR3 for alpha chain variable domain of TCR clone 292041 (TRAV12-1, TRAJ21)
CVGNNFNKFYF

SEQ ID NO: 584082 - protein, 14 aa, Homo sapiens
  CDR3 for beta chain variable domain of TCR clone 292041 (TRBV15, TRBJ1-5)
CATSREQSNQPQHF

SEQ ID NO: 584083 - protein, 12 aa, Homo sapiens
  CDR3 for alpha chain variable domain of TCR clone 292042 (TRAV8-3, TRAJ20)
CAVGANDYKLSF

SEQ ID NO: 584084 - protein, 14 aa, Homo sapiens
  CDR3 for beta chain variable domain of TCR clone 292042 (TRBV9, TRBJ2-4)
CASSPSGTSGFQYF

SEQ ID NO: 584085 - protein, 11 aa, Homo sapiens
  CDR3 for alpha chain variable domain of TCR clone 292043 (TRAV3, TRAJ21)
CTVGNLNKFYF

SEQ ID NO: 584086 - protein, 16 aa, Homo sapiens
  CDR3 for beta chain variable domain of TCR clone 292043 (TRBV19, TRBJ2-1)
CASSKAGPSSYNEQFF

SEQ ID NO: 584087 - protein, 13 aa, Homo sapiens
  CDR3 for alpha chain variable domain of TCR clone 292044 (TRAV27, TRAJ6)
CAGGTRGGYIPTF

SEQ ID NO: 584088 - protein, 13 aa, Homo sapiens
  CDR3 for beta chain variable domain of TCR clone 292044 (TRBV7-9, TRBJ1-2)
CASSLKQNYGYTF

SEQ ID NO: 584089 - protein, 13 aa, Homo sapiens
  CDR3 for alpha chain variable domain of TCR clone 292045 (TRAV13-2, TRAJ13)
CAERPGGYQKVTL

SEQ ID NO: 584090 - protein, 19 aa, Homo sapiens
  CDR3 for beta chain variable domain of TCR clone 292045 (TRBV4-1, TRBJ2-1)
CASSQGPLPGLGSRNEQFF

SEQ ID NO: 584091 - protein, 11 aa, Homo sapiens
  CDR3 for alpha chain variable domain of TCR clone 292046 (TRAV3, TRAJ32)
CAVSPKGMVVL

SEQ ID NO: 584092 - protein, 12 aa, Homo sapiens
  CDR3 for beta chain variable domain of TCR clone 292046 (TRBV11-2, TRBJ2-2)
CASSLGGGELFF

SEQ ID NO: 584093 - protein, 15 aa, Homo sapiens
  CDR3 for alpha chain variable domain of TCR clone 292047 (TRAV17, TRAJ48)
CATDETNFGNDKLTF

SEQ ID NO: 584094 - protein, 14 aa, Homo sapiens
  CDR3 for beta chain variable domain of TCR clone 292047 (TRBV10-3, TRBJ1-3)
CAIRGQRAGNTIYF

SEQ ID NO: 584095 - protein, 17 aa, Homo sapiens
  CDR3 for alpha chain variable domain of TCR clone 292048 (TRAV3, TRAJ6)
CAVRDGPRAGGSYIPTF

SEQ ID NO: 584096 - protein, 15 aa, Homo sapiens
  CDR3 for beta chain variable domain of TCR clone 292048 (TRBV7-9, TRBJ1-6)
CASSSPGRGNAPLHF

SEQ ID NO: 584097 - protein, 14 aa, Homo sapiens
  CDR3 for alpha chain variable domain of TCR clone 292049 (TRAV13-2, TRAJ41)
CAERPDWAGYALNF

SEQ ID NO: 584098 - protein, 15 aa, Homo sapiens
  CDR3 for beta chain variable domain of TCR clone 292049 (TRBV13, TRBJ1-2)
CASSLGRQPGYGYTF

SEQ ID NO: 584099 - protein, 14 aa, Homo sapiens
  CDR3 for alpha chain variable domain of TCR clone 292050 (TRAV27, TRAJ15)
CAGFDNQAGTAQIF

SEQ ID NO: 584100 - protein, 11 aa, Homo sapiens
  CDR3 for beta chain variable domain of TCR clone 292050 (TRBV29-1, TRBJ1-1)
CSVEVGTRTFF

SEQ ID NO: 584101 - protein, 15 aa, Homo sapiens
  CDR3 for alpha chain variable domain of TCR clone 292051 (TRAV3, TRAJ22)
CAVRDRVGSARQLTF

SEQ ID NO: 584102 - protein, 14 aa, Homo sapiens
  CDR3 for beta chain variable domain of TCR clone 292051 (TRBV20-1, TRBJ1-1)
CSAQTRIGGTEAFF

SEQ ID NO: 584103 - protein, 16 aa, Homo sapiens
  CDR3 for alpha chain variable domain of TCR clone 292052 (TRAV13-1, TRAJ15)
CAADGGPVRAGTALIF

SEQ ID NO: 584104 - protein, 14 aa, Homo sapiens
  CDR3 for beta chain variable domain of TCR clone 292052 (TRBV7-3, TRBJ2-1)
CASSLAGGTNEQFF

SEQ ID NO: 584105 - protein, 12 aa, Homo sapiens
  CDR3 for alpha chain variable domain of TCR clone 292053 (TRAV4, TRAJ26)
CLVGDYSQNFVF

SEQ ID NO: 584106 - protein, 16 aa, Homo sapiens
  CDR3 for beta chain variable domain of TCR clone 292053 (TRBV7-2, TRBJ1-2)
CASSSNQDRRGHGYTF

SEQ ID NO: 584107 - protein, 14 aa, Homo sapiens
  CDR3 for alpha chain variable domain of TCR clone 292054 (TRAV16, TRAJ32)
CALKSGGATNRLIF

SEQ ID NO: 584108 - protein, 13 aa, Homo sapiens
  CDR3 for beta chain variable domain of TCR clone 292054 (TRBV15, TRBJ1-6)
CATSGGLNSPLHF

SEQ ID NO: 584109 - protein, 16 aa, Homo sapiens
  CDR3 for alpha chain variable domain of TCR clone 292055 (TRAV21, TRAJ37)
CAVRTAGSSNTGKLIF

SEQ ID NO: 584110 - protein, 16 aa, Homo sapiens
  CDR3 for beta chain variable domain of TCR clone 292055 (TRBV24-1, TRBJ2-3)
CATSDPGTGATDTQYF

SEQ ID NO: 584111 - protein, 14 aa, Homo sapiens
  CDR3 for alpha chain variable domain of TCR clone 292056 (TRAV23/DV6, TRAJ37)
CAASTSSKTGKLIF

SEQ ID NO: 584112 - protein, 13 aa, Homo sapiens
  CDR3 for beta chain variable domain of TCR clone 292056 (TRBV18, TRBJ2-5)
CASSPIPGETQYF

SEQ ID NO: 584113 - protein, 12 aa, Homo sapiens
  CDR3 for alpha chain variable domain of TCR clone 292057 (TRAV2, TRAJ10)
CASTVGGNKLTF

SEQ ID NO: 584114 - protein, 20 aa, Homo sapiens
  CDR3 for beta chain variable domain of TCR clone 292057 (TRBV7-8, TRBJ2-2)
CASSHLFPGPTIHITGELFF

SEQ ID NO: 584115 - protein, 15 aa, Homo sapiens
  CDR3 for alpha chain variable domain of TCR clone 292058 (TRAV3, TRAJ5)
CAVRDRKTGRRALTF

SEQ ID NO: 584116 - protein, 16 aa, Homo sapiens
  CDR3 for beta chain variable domain of TCR clone 292058 (TRBV4-2, TRBJ1-1)
CASSPSPGRAAPEAFF

SEQ ID NO: 584117 - protein, 13 aa, Homo sapiens
  CDR3 for alpha chain variable domain of TCR clone 292059 (TRAV23/DV6, TRAJ22)
CAPYSGSARQLTS

SEQ ID NO: 584118 - protein, 15 aa, Homo sapiens
  CDR3 for beta chain variable domain of TCR clone 292059 (TRBV11-2, TRBJ1-6)
CASSLDPWAVSPLHF

SEQ ID NO: 584119 - protein, 14 aa, Homo sapiens
  CDR3 for alpha chain variable domain of TCR clone 292060 (TRAV26-1, TRAJ44)
CIVRPTGPASKLTF

SEQ ID NO: 584120 - protein, 12 aa, Homo sapiens
  CDR3 for beta chain variable domain of TCR clone 292060 (TRBV11-3, TRBJ1-1)
CASSLRDSEAFF

SEQ ID NO: 584121 - protein, 13 aa, Homo sapiens
  CDR3 for alpha chain variable domain of TCR clone 292061 (TRAV13-1, TRAJ43)
CAASKNNNNDMRF

SEQ ID NO: 584122 - protein, 14 aa, Homo sapiens
  CDR3 for beta chain variable domain of TCR clone 292061 (TRBV14, TRBJ2-1)
CASSQVQGRGEQFL

SEQ ID NO: 584123 - protein, 17 aa, Homo sapiens
  CDR3 for alpha chain variable domain of TCR clone 292062 (TRAV26-1, TRAJ28)
CIVRVPESGAGSYQLTF

SEQ ID NO: 584124 - protein, 17 aa, Homo sapiens
  CDR3 for beta chain variable domain of TCR clone 292062 (TRBV28, TRBJ2-7)
CASSPLPAGGKSYEQYF

SEQ ID NO: 584125 - protein, 15 aa, Homo sapiens
  CDR3 for alpha chain variable domain of TCR clone 292063 (TRAV2, TRAJ15)
CVVEDRGQAGTALIF

SEQ ID NO: 584126 - protein, 13 aa, Homo sapiens
  CDR3 for beta chain variable domain of TCR clone 292063 (TRBV10-2, TRBJ2-7)
CASGASGGYEQYF

SEQ ID NO: 584127 - protein, 15 aa, Homo sapiens
  CDR3 for alpha chain variable domain of TCR clone 292064 (TRAV8-2, TRAJ13)
CVVSDLSGGYQKVTF

SEQ ID NO: 584128 - protein, 15 aa, Homo sapiens
  CDR3 for beta chain variable domain of TCR clone 292064 (TRBV7-9, TRBJ1-6)
CASSSPGRGNSPLLF

SEQ ID NO: 584129 - protein, 15 aa, Homo sapiens
  CDR3 for alpha chain variable domain of TCR clone 292065 (TRAV27, TRAJ50)
CAGVGRGTSYDKVIF

SEQ ID NO: 584130 - protein, 14 aa, Homo sapiens
  CDR3 for beta chain variable domain of TCR clone 292065 (TRBV7-2, TRBJ1-1)
CASSFYDLNTEDFF

SEQ ID NO: 584131 - protein, 13 aa, Homo sapiens
  CDR3 for alpha chain variable domain of TCR clone 292066 (TRAV8-6, TRAJ21)
FAVSPSSLNKFSF

SEQ ID NO: 584132 - protein, 14 aa, Homo sapiens
  CDR3 for beta chain variable domain of TCR clone 292066 (TRBV7-9, TRBJ2-5)
CASSLDTAQETQYF

SEQ ID NO: 584133 - protein, 13 aa, Homo sapiens
  CDR3 for alpha chain variable domain of TCR clone 292067 (TRAV38-1, TRAJ42)
CARRGGSQGNLIF

SEQ ID NO: 584134 - protein, 14 aa, Homo sapiens
  CDR3 for beta chain variable domain of TCR clone 292067 (TRBV12-4, TRBJ2-1)
CASSLGQGASEQFF

SEQ ID NO: 584135 - protein, 13 aa, Homo sapiens
  CDR3 for alpha chain variable domain of TCR clone 292068 (TRAV17, TRAJ26)
CATVDNYGQNFVF

SEQ ID NO: 584136 - protein, 14 aa, Homo sapiens
  CDR3 for beta chain variable domain of TCR clone 292068 (TRBV19, TRBJ2-7)
CASSIFAGTYEQYF

SEQ ID NO: 584137 - protein, 14 aa, Homo sapiens
  CDR3 for alpha chain variable domain of TCR clone 292069 (TRAV23/DV6, TRAJ8)
CAASKATGFQKLVF

SEQ ID NO: 584138 - protein, 16 aa, Homo sapiens
  CDR3 for beta chain variable domain of TCR clone 292069 (TRBV5-4, TRBJ2-3)
CASQQPGAGGADTQYF

SEQ ID NO: 584139 - protein, 13 aa, Homo sapiens
  CDR3 for alpha chain variable domain of TCR clone 292070 (TRAV12-1, TRAJ39)
CVVPQRAGNMLTF

SEQ ID NO: 584140 - protein, 15 aa, Homo sapiens
  CDR3 for beta chain variable domain of TCR clone 292070 (TRBV20-1, TRBJ1-1)
CSASRGVTGNTEAFF

SEQ ID NO: 584141 - protein, 12 aa, Homo sapiens
  CDR3 for alpha chain variable domain of TCR clone 292071 (TRAV1-2, TRAJ26)
SAVRYYGQNFVF

SEQ ID NO: 584142 - protein, 15 aa, Homo sapiens
  CDR3 for beta chain variable domain of TCR clone 292071 (TRBV28, TRBJ2-1)
CASSIIAGGRSEQFF

SEQ ID NO: 584143 - protein, 15 aa, Homo sapiens
  CDR3 for alpha chain variable domain of TCR clone 292072 (TRAV13-1, TRAJ15)
CAASIERRAGTALIF

SEQ ID NO: 584144 - protein, 13 aa, Homo sapiens
  CDR3 for beta chain variable domain of TCR clone 292072 (TRBV5-1, TRBJ2-7)
CASSATGGNEQYF

SEQ ID NO: 584145 - protein, 17 aa, Homo sapiens
  CDR3 for alpha chain variable domain of TCR clone 292073 (TRAV8-6, TRAJ58)
CAVSSWVGETSGSRLTF

SEQ ID NO: 584146 - protein, 22 aa, Homo sapiens
  CDR3 for beta chain variable domain of TCR clone 292073 (TRBV6-1, TRBJ1-3)
CASVQGGGWKHHIFWRGKLAHC

SEQ ID NO: 584147 - protein, 13 aa, Homo sapiens
  CDR3 for alpha chain variable domain of TCR clone 292074 (TRAV12-1, TRAJ49)
CVVGANTGNQFYF

SEQ ID NO: 584148 - protein, 13 aa, Homo sapiens
  CDR3 for beta chain variable domain of TCR clone 292074 (TRBV19, TRBJ2-7)
CASSPRQSYEQYF

SEQ ID NO: 584149 - protein, 16 aa, Homo sapiens
  CDR3 for alpha chain variable domain of TCR clone 292075 (TRAV30, TRAJ49)
SAAQRVGPNTGNKFYF

SEQ ID NO: 584150 - protein, 15 aa, Homo sapiens
  CDR3 for beta chain variable domain of TCR clone 292075 (TRBV2, TRBJ2-1)
CASSELAGSYNEQFF

SEQ ID NO: 584151 - protein, 12 aa, Homo sapiens
  CDR3 for alpha chain variable domain of TCR clone 292076 (TRAV20, TRAJ54)
CAVQEGAQQLVF

SEQ ID NO: 584152 - protein, 17 aa, Homo sapiens
  CDR3 for beta chain variable domain of TCR clone 292076 (TRBV13, TRBJ2-3)
CASSLSRVAGGRNTQYF

SEQ ID NO: 584153 - protein, 14 aa, Homo sapiens
  CDR3 for alpha chain variable domain of TCR clone 292077 (TRAV16, TRAJ16)
CALSVLSDGQKLLF

SEQ ID NO: 584154 - protein, 14 aa, Homo sapiens
  CDR3 for beta chain variable domain of TCR clone 292077 (TRBV7-9, TRBJ2-5)
CASSLDTAQETQYF

SEQ ID NO: 584155 - protein, 13 aa, Homo sapiens
  CDR3 for alpha chain variable domain of TCR clone 292078 (TRAV3, TRAJ4)
CSVRDGGYNKLIF

SEQ ID NO: 584156 - protein, 14 aa, Homo sapiens
  CDR3 for beta chain variable domain of TCR clone 292078 (TRBV12-4, TRBJ1-2)
CASSSSAAGSSYTF

SEQ ID NO: 584157 - protein, 16 aa, Homo sapiens
  CDR3 for alpha chain variable domain of TCR clone 292079 (TRAV12-2, TRAJ43)
CAGDDMRFGAGTRLTV

SEQ ID NO: 584158 - protein, 16 aa, Homo sapiens
  CDR3 for beta chain variable domain of TCR clone 292079 (TRBV2, TRBJ2-4)
CPSSEAPGGEQNIQYF

SEQ ID NO: 584159 - protein, 14 aa, Homo sapiens
  CDR3 for alpha chain variable domain of TCR clone 292080 (TRAV12-1, TRAJ9)
CVVTGYTGGFKTSF

SEQ ID NO: 584160 - protein, 13 aa, Homo sapiens
  CDR3 for beta chain variable domain of TCR clone 292080 (TRBV20-1, TRBJ1-1)
CSARDEGNTEAFF

SEQ ID NO: 584161 - protein, 20 aa, Homo sapiens
  CDR3 for alpha chain variable domain of TCR clone 292081 (TRAV12-3, TRAJ41)
SLFIRDSQPSDSATPEALNF

SEQ ID NO: 584162 - protein, 15 aa, Homo sapiens
  CDR3 for beta chain variable domain of TCR clone 292081 (TRBV7-2, TRBJ2-3)
CASSSTGLETDTQYF

SEQ ID NO: 584163 - protein, 17 aa, Homo sapiens
  CDR3 for alpha chain variable domain of TCR clone 292082 (TRAV35, TRAJ38)
CAGQLQRNAGNNRKLIW

SEQ ID NO: 584164 - protein, 15 aa, Homo sapiens
  CDR3 for beta chain variable domain of TCR clone 292082 (TRBV19, TRBJ2-2)
CASSPRTGWTGELFF

SEQ ID NO: 584165 - protein, 13 aa, Homo sapiens
  CDR3 for alpha chain variable domain of TCR clone 292083 (TRAV3, TRAJ21)
CAVREPDFNKFYF

SEQ ID NO: 584166 - protein, 14 aa, Homo sapiens
  CDR3 for beta chain variable domain of TCR clone 292083 (TRBV11-2, TRBJ2-5)
CASSRTGGIETQYF

SEQ ID NO: 584167 - protein, 13 aa, Homo sapiens
  CDR3 for alpha chain variable domain of TCR clone 292084 (TRAV3, TRAJ20)
CAVRLSNDYKLSF

SEQ ID NO: 584168 - protein, 13 aa, Homo sapiens
  CDR3 for beta chain variable domain of TCR clone 292084 (TRBV20-1, TRBJ1-1)
CSARGGGNTEAFF

SEQ ID NO: 584169 - protein, 14 aa, Homo sapiens
  CDR3 for alpha chain variable domain of TCR clone 292085 (TRAV1-2, TRAJ16)
CAVKRFSDGQKLLF

SEQ ID NO: 584170 - protein, 11 aa, Homo sapiens
  CDR3 for beta chain variable domain of TCR clone 292085 (TRBV29-1, TRBJ2-5)
CSEDRTGTQYF

SEQ ID NO: 584171 - protein, 14 aa, Homo sapiens
  CDR3 for alpha chain variable domain of TCR clone 292086 (TRAV1-2, TRAJ16)
CAVNRFLDGQKLLF

SEQ ID NO: 584172 - protein, 20 aa, Homo sapiens
  CDR3 for beta chain variable domain of TCR clone 292086 (TRBV7-8, TRBJ2-2)
CASSHLFPGPTIHITGELFF

SEQ ID NO: 584173 - protein, 12 aa, Homo sapiens
  CDR3 for alpha chain variable domain of TCR clone 292087 (TRAV13-1, TRAJ36)
RRGGAGANNLFF

SEQ ID NO: 584174 - protein, 16 aa, Homo sapiens
  CDR3 for beta chain variable domain of TCR clone 292087 (TRBV7-9, TRBJ2-5)
CASRLEIGTRKETQYF

SEQ ID NO: 584175 - protein, 13 aa, Homo sapiens
  CDR3 for alpha chain variable domain of TCR clone 292088 (TRAV2, TRAJ40)
CAVVTSGTYKYIF

SEQ ID NO: 584176 - protein, 13 aa, Homo sapiens
  CDR3 for beta chain variable domain of TCR clone 292088 (TRBV19, TRBJ2-7)
CASRKAGGSEQYF

SEQ ID NO: 584177 - protein, 18 aa, Homo sapiens
  CDR3 for alpha chain variable domain of TCR clone 292089 (TRAV29/DV5, TRAJ52)
FSAGFRGAGGTSYGKLTF

SEQ ID NO: 584178 - protein, 16 aa, Homo sapiens
  CDR3 for beta chain variable domain of TCR clone 292089 (TRBV7-3, TRBJ2-2)
CASSLKRGTLSGELFF

SEQ ID NO: 584179 - protein, 16 aa, Homo sapiens
  CDR3 for alpha chain variable domain of TCR clone 292090 (TRAV30, TRAJ24)
CGTEIVDADRWGKFQF

SEQ ID NO: 584180 - protein, 14 aa, Homo sapiens
  CDR3 for beta chain variable domain of TCR clone 292090 (TRBV12-5, TRBJ2-5)
CASGSWTHQETQYF

SEQ ID NO: 584181 - protein, 16 aa, Homo sapiens
  CDR3 for alpha chain variable domain of TCR clone 292091 (TRAV3, TRAJ37)
CAVSGKGSGNTGKLIF

SEQ ID NO: 584182 - protein, 16 aa, Homo sapiens
  CDR3 for beta chain variable domain of TCR clone 292091 (TRBV12-5, TRBJ2-5)
CASGPRTSGNQETQYF

SEQ ID NO: 584183 - protein, 16 aa, Homo sapiens
  CDR3 for alpha chain variable domain of TCR clone 292092 (TRAV38-1, TRAJ56)
CAFMKSQTGANSKLTF

SEQ ID NO: 584184 - protein, 11 aa, Homo sapiens
  CDR3 for beta chain variable domain of TCR clone 292092 (TRBV11-2, TRBJ1-1)
CASSINTEAFF

SEQ ID NO: 584185 - protein, 14 aa, Homo sapiens
  CDR3 for alpha chain variable domain of TCR clone 292093 (TRAV1-2, TRAJ8)
CAVRADTGSQKLVF

SEQ ID NO: 584186 - protein, 14 aa, Homo sapiens
  CDR3 for beta chain variable domain of TCR clone 292093 (TRBV11-2, TRBJ2-3)
CASSRLARTDTQYF

SEQ ID NO: 584187 - protein, 16 aa, Homo sapiens
  CDR3 for alpha chain variable domain of TCR clone 292094 (TRAV3, TRAJ37)
CAVRGKGSGKTGKLIF

SEQ ID NO: 584188 - protein, 14 aa, Homo sapiens
  CDR3 for beta chain variable domain of TCR clone 292094 (TRBV20-1, TRBJ2-3)
CSARGGTSTDTQYF

SEQ ID NO: 584189 - protein, 16 aa, Homo sapiens
  CDR3 for alpha chain variable domain of TCR clone 292095 (TRAV12-3, TRAJ58)
CAMTDTEETSGSRLTF

SEQ ID NO: 584190 - protein, 14 aa, Homo sapiens
  CDR3 for beta chain variable domain of TCR clone 292095 (TRBV28, TRBJ2-7)
CASTFYGRAHEQYF

SEQ ID NO: 584191 - protein, 12 aa, Homo sapiens
  CDR3 for alpha chain variable domain of TCR clone 292096 (TRAV17, TRAJ12)
CATLRTSYKLIF

SEQ ID NO: 584192 - protein, 16 aa, Homo sapiens
  CDR3 for beta chain variable domain of TCR clone 292096 (TRBV28, TRBJ2-7)
CASSLFCETGGPEQYF

SEQ ID NO: 584193 - protein, 12 aa, Homo sapiens
  CDR3 for alpha chain variable domain of TCR clone 292097 (TRAV21, TRAJ11)
CAATSGYSTLTF

SEQ ID NO: 584194 - protein, 14 aa, Homo sapiens
  CDR3 for beta chain variable domain of TCR clone 292097 (TRBV13, TRBJ2-7)
CASSLKGASYEQYF

SEQ ID NO: 584195 - protein, 16 aa, Homo sapiens
  CDR3 for alpha chain variable domain of TCR clone 292098 (TRAV26-1, TRAJ40)
CIVRGDPTSGTYKYIF

SEQ ID NO: 584196 - protein, 14 aa, Homo sapiens
  CDR3 for beta chain variable domain of TCR clone 292098 (TRBV5-1, TRBJ1-4)
CASSSGQGGEKLFF

SEQ ID NO: 584197 - protein, 14 aa, Homo sapiens
  CDR3 for alpha chain variable domain of TCR clone 292099 (TRAV1-2, TRAJ8)
CAVREDTGFQKLVF

SEQ ID NO: 584198 - protein, 12 aa, Homo sapiens
  CDR3 for beta chain variable domain of TCR clone 292099 (TRBV7-9, TRBJ1-4)
CASSNDREKLFF

SEQ ID NO: 584199 - protein, 15 aa, Homo sapiens
  CDR3 for alpha chain variable domain of TCR clone 292100 (TRAV26-1, TRAJ29)
FIVRVEGSGNTPLAF

SEQ ID NO: 584200 - protein, 14 aa, Homo sapiens
  CDR3 for beta chain variable domain of TCR clone 292100 (TRBV18, TRBJ2-5)
CASSPGVSQETQYF

SEQ ID NO: 584201 - protein, 13 aa, Homo sapiens
  CDR3 for alpha chain variable domain of TCR clone 292101 (TRAV12-2, TRAJ4)
CAVRSGGYNKLIF

SEQ ID NO: 584202 - protein, 14 aa, Homo sapiens
  CDR3 for beta chain variable domain of TCR clone 292101 (TRBV19, TRBJ2-1)
CASPTFVLSGEQFF

SEQ ID NO: 584203 - protein, 13 aa, Homo sapiens
  CDR3 for alpha chain variable domain of TCR clone 292102 (TRAV8-6, TRAJ49)
CAVITNTGNQFYF

SEQ ID NO: 584204 - protein, 16 aa, Homo sapiens
  CDR3 for beta chain variable domain of TCR clone 292102 (TRBV28, TRBJ1-5)
CASLPGGQGSAQPQHF

SEQ ID NO: 584205 - protein, 12 aa, Homo sapiens
  CDR3 for alpha chain variable domain of TCR clone 292103 (TRAV8-3, TRAJ41)
CAVALSGYALNF

SEQ ID NO: 584206 - protein, 16 aa, Homo sapiens
  CDR3 for beta chain variable domain of TCR clone 292103 (TRBV27, TRBJ2-7)
CASSSERRDSADEQYF

SEQ ID NO: 584207 - protein, 13 aa, Homo sapiens
  CDR3 for alpha chain variable domain of TCR clone 292104 (TRAV17, TRAJ26)
FATVGNCGQNFVF

SEQ ID NO: 584208 - protein, 16 aa, Homo sapiens
  CDR3 for beta chain variable domain of TCR clone 292104 (TRBV2, TRBJ2-1)
CASSVGGSLSYNEQFF

SEQ ID NO: 584209 - protein, 15 aa, Homo sapiens
  CDR3 for alpha chain variable domain of TCR clone 292105 (TRAV3, TRAJ3)
CAVRDRESSASMIIF

SEQ ID NO: 584210 - protein, 15 aa, Homo sapiens
  CDR3 for beta chain variable domain of TCR clone 292105 (TRBV29-1, TRBJ2-7)
CSVEFFDRGSYEQYF

SEQ ID NO: 584211 - protein, 14 aa, Homo sapiens
  CDR3 for alpha chain variable domain of TCR clone 292106 (TRAV26-1, TRAJ8)
CIVRVDTGFQKLVF

SEQ ID NO: 584212 - protein, 13 aa, Homo sapiens
  CDR3 for beta chain variable domain of TCR clone 292106 (TRBV4-2, TRBJ2-2)
CASEDRGTGELFF

SEQ ID NO: 584213 - protein, 15 aa, Homo sapiens
  CDR3 for alpha chain variable domain of TCR clone 292107 (TRAV25, TRAJ52)
CAGRPGGTSYGELTF

SEQ ID NO: 584214 - protein, 18 aa, Homo sapiens
  CDR3 for beta chain variable domain of TCR clone 292107 (TRBV11-2, TRBJ2-3)
CASSLGGASRGAPNTQYF

SEQ ID NO: 584215 - protein, 12 aa, Homo sapiens
  CDR3 for alpha chain variable domain of TCR clone 292108 (TRAV26-2, TRAJ21)
CILKGNFNKFYF

SEQ ID NO: 584216 - protein, 10 aa, Homo sapiens
  CDR3 for beta chain variable domain of TCR clone 292108 (TRBV7-9, TRBJ1-1)
CASSFTEAFF

SEQ ID NO: 584217 - protein, 15 aa, Homo sapiens
  CDR3 for alpha chain variable domain of TCR clone 292109 (TRAV8-3, TRAJ27)
CAVGPSKTNAGNQPL

SEQ ID NO: 584218 - protein, 15 aa, Homo sapiens
  CDR3 for beta chain variable domain of TCR clone 292109 (TRBV27, TRBJ2-1)
CASSNGGGPSNEQFF

SEQ ID NO: 584219 - protein, 15 aa, Homo sapiens
  CDR3 for alpha chain variable domain of TCR clone 292110 (TRAV17, TRAJ35)
CATAFVIGLGNVLHC

SEQ ID NO: 584220 - protein, 15 aa, Homo sapiens
  CDR3 for beta chain variable domain of TCR clone 292110 (TRBV7-9, TRBJ2-7)
CASSLALAEAYEQYF

SEQ ID NO: 584221 - protein, 14 aa, Homo sapiens
  CDR3 for alpha chain variable domain of TCR clone 292111 (TRAV12-3, TRAJ10)
SHLPLTGGGNKLTF

SEQ ID NO: 584222 - protein, 14 aa, Homo sapiens
  CDR3 for beta chain variable domain of TCR clone 292111 (TRBV11-2, TRBJ1-2)
CASSLYRGNYGYSF

SEQ ID NO: 584223 - protein, 12 aa, Homo sapiens
  CDR3 for alpha chain variable domain of TCR clone 292112 (TRAV4, TRAJ26)
CLVGDYGQNFVF

SEQ ID NO: 584224 - protein, 12 aa, Homo sapiens
  CDR3 for beta chain variable domain of TCR clone 292112 (TRBV2, TRBJ2-1)
CAYGPPGNEQFF

SEQ ID NO: 584225 - protein, 14 aa, Homo sapiens
  CDR3 for alpha chain variable domain of TCR clone 292113 (TRAV13-1, TRAJ3)
CAAGGYSSASKIIF

SEQ ID NO: 584226 - protein, 14 aa, Homo sapiens
  CDR3 for beta chain variable domain of TCR clone 292113 (TRBV19, TRBJ2-5)
CASSSSGIQETQYF

SEQ ID NO: 584227 - protein, 15 aa, Homo sapiens
  CDR3 for alpha chain variable domain of TCR clone 292114 (TRAV13-1, TRAJ45)
CAASGSGGGADGITF

SEQ ID NO: 584228 - protein, 12 aa, Homo sapiens
  CDR3 for beta chain variable domain of TCR clone 292114 (TRBV11-2, TRBJ2-2)
CASSLGGGELFF

SEQ ID NO: 584229 - protein, 11 aa, Homo sapiens
  CDR3 for alpha chain variable domain of TCR clone 292115 (TRAV12-1, TRAJ31)
CVGRVQCQTHV

SEQ ID NO: 584230 - protein, 13 aa, Homo sapiens
  CDR3 for beta chain variable domain of TCR clone 292115 (TRBV3-1, TRBJ1-5)
CASSQDLDQPQHF

SEQ ID NO: 584231 - protein, 15 aa, Homo sapiens
  CDR3 for alpha chain variable domain of TCR clone 292116 (TRAV8-4, TRAJ48)
CAVSATYFGNEKLTF

SEQ ID NO: 584232 - protein, 12 aa, Homo sapiens
  CDR3 for beta chain variable domain of TCR clone 292116 (TRBV3-1, TRBJ2-5)
CASSQRGETQYF

SEQ ID NO: 584233 - protein, 16 aa, Homo sapiens
  CDR3 for alpha chain variable domain of TCR clone 292117 (TRAV14/DV4, TRAJ54)
CAMREGRIQGAQKLVF

SEQ ID NO: 584234 - protein, 19 aa, Homo sapiens
  CDR3 for beta chain variable domain of TCR clone 292117 (TRBV19, TRBJ2-5)
CASSIGQVTDFFLGETQYF

SEQ ID NO: 584235 - protein, 14 aa, Homo sapiens
  CDR3 for alpha chain variable domain of TCR clone 292118 (TRAV12-2, TRAJ17)
CAVNIKAAGNKLTF

SEQ ID NO: 584236 - protein, 11 aa, Homo sapiens
  CDR3 for beta chain variable domain of TCR clone 292118 (TRBV11-2, TRBJ2-2)
CASSLPGELFF

SEQ ID NO: 584237 - protein, 13 aa, Homo sapiens
  CDR3 for alpha chain variable domain of TCR clone 292119 (TRAV2, TRAJ40)
CAVVTSGTYKYIF

SEQ ID NO: 584238 - protein, 14 aa, Homo sapiens
  CDR3 for beta chain variable domain of TCR clone 292119 (TRBV28, TRBJ2-1)
CASSLNGRNNEQFF

SEQ ID NO: 584239 - protein, 18 aa, Homo sapiens
  CDR3 for alpha chain variable domain of TCR clone 292120 (TRAV26-1, TRAJ56)
CIVRAASRGTGANSKLTF

SEQ ID NO: 584240 - protein, 15 aa, Homo sapiens
  CDR3 for beta chain variable domain of TCR clone 292120 (TRBV7-9, TRBJ2-5)
CASSDTGRGRETQYF

SEQ ID NO: 584241 - protein, 11 aa, Homo sapiens
  CDR3 for alpha chain variable domain of TCR clone 292121 (TRAV12-2, TRAJ33)
CAVTSNYHLIW

SEQ ID NO: 584242 - protein, 13 aa, Homo sapiens
  CDR3 for beta chain variable domain of TCR clone 292121 (TRBV19, TRBJ1-2)
CASSVPGQDGYTF

SEQ ID NO: 584243 - protein, 10 aa, Homo sapiens
  CDR3 for alpha chain variable domain of TCR clone 292122 (TRAV21, TRAJ43)
CAVRIGDMRF

SEQ ID NO: 584244 - protein, 17 aa, Homo sapiens
  CDR3 for beta chain variable domain of TCR clone 292122 (TRBV20-1, TRBJ2-7)
CSAPGLGLRAVLRAGHQ

SEQ ID NO: 584245 - protein, 12 aa, Homo sapiens
  CDR3 for alpha chain variable domain of TCR clone 292123 (TRAV20, TRAJ39)
CAVGNAGNMLTF

SEQ ID NO: 584246 - protein, 16 aa, Homo sapiens
  CDR3 for beta chain variable domain of TCR clone 292123 (TRBV15, TRBJ1-2)
CATSRGPRKGGGGYSF

SEQ ID NO: 584247 - protein, 11 aa, Homo sapiens
  CDR3 for alpha chain variable domain of TCR clone 292124 (TRAV14/DV4, TRAJ31)
CAMRENARLMF

SEQ ID NO: 584248 - protein, 15 aa, Homo sapiens
  CDR3 for beta chain variable domain of TCR clone 292124 (TRBV7-2, TRBJ2-7)
CASSLVSSGSYEQYF

SEQ ID NO: 584249 - protein, 13 aa, Homo sapiens
  CDR3 for alpha chain variable domain of TCR clone 292125 (TRAV21, TRAJ45)
CAVMGGGADGLTF

SEQ ID NO: 584250 - protein, 12 aa, Homo sapiens
  CDR3 for beta chain variable domain of TCR clone 292125 (TRBV2, TRBJ1-5)
CASSGRDQPQHF

SEQ ID NO: 584251 - protein, 13 aa, Homo sapiens
  CDR3 for alpha chain variable domain of TCR clone 292126 (TRAV13-1, TRAJ43)
CAASKNNNNDMRF

SEQ ID NO: 584252 - protein, 13 aa, Homo sapiens
  CDR3 for beta chain variable domain of TCR clone 292126 (TRBV4-2, TRBJ1-1)
CASSQAGNTEACF

SEQ ID NO: 584253 - protein, 12 aa, Homo sapiens
  CDR3 for alpha chain variable domain of TCR clone 292127 (TRAV12-3, TRAJ29)
CAAREGNTPLVF

SEQ ID NO: 584254 - protein, 17 aa, Homo sapiens
  CDR3 for beta chain variable domain of TCR clone 292127 (TRBV18, TRBJ2-1)
CASAPLAAGAGDNEQFF

SEQ ID NO: 584255 - protein, 12 aa, Homo sapiens
  CDR3 for alpha chain variable domain of TCR clone 292128 (TRAV12-2, TRAJ21)
CAPSDNVNKFYF

SEQ ID NO: 584256 - protein, 13 aa, Homo sapiens
  CDR3 for beta chain variable domain of TCR clone 292128 (TRBV7-3, TRBJ1-1)
CASSQDWGAEAFF

SEQ ID NO: 584257 - protein, 12 aa, Homo sapiens
  CDR3 for alpha chain variable domain of TCR clone 292129 (TRAV8-3, TRAJ41)
CAVALSGYAFNF

SEQ ID NO: 584258 - protein, 16 aa, Homo sapiens
  CDR3 for beta chain variable domain of TCR clone 292129 (TRBV27, TRBJ2-7)
CASSSERRDSAYEQYF

SEQ ID NO: 584259 - protein, 15 aa, Homo sapiens
  CDR3 for alpha chain variable domain of TCR clone 292130 (TRAV27, TRAJ42)
CAGAEYGGSQGNLIF

SEQ ID NO: 584260 - protein, 12 aa, Homo sapiens
  CDR3 for beta chain variable domain of TCR clone 292130 (TRBV11-2, TRBJ2-1)
CASSPGNNEQFF

SEQ ID NO: 584261 - protein, 14 aa, Homo sapiens
  CDR3 for alpha chain variable domain of TCR clone 292131 (TRAV26-1, TRAJ12)
CIVRVMDSSYKLIF

SEQ ID NO: 584262 - protein, 16 aa, Homo sapiens
  CDR3 for beta chain variable domain of TCR clone 292131 (TRBV2, TRBJ2-1)
CASSVGGSLSYNEQFF

SEQ ID NO: 584263 - protein, 13 aa, Homo sapiens
  CDR3 for alpha chain variable domain of TCR clone 292132 (TRAV13-2, TRAJ48)
CPEMDFGNEKLTF

SEQ ID NO: 584264 - protein, 15 aa, Homo sapiens
  CDR3 for beta chain variable domain of TCR clone 292132 (TRBV7-9, TRBJ1-6)
CASSSPGRGNSPLHF

SEQ ID NO: 584265 - protein, 16 aa, Homo sapiens
  CDR3 for alpha chain variable domain of TCR clone 292133 (TRAV17, TRAJ52)
CATDGAGGTSYGKLTF

SEQ ID NO: 584266 - protein, 14 aa, Homo sapiens
  CDR3 for beta chain variable domain of TCR clone 292133 (TRBV6-1, TRBJ2-1)
CASSLGLAGLWEYF

SEQ ID NO: 584267 - protein, 16 aa, Homo sapiens
  CDR3 for alpha chain variable domain of TCR clone 292134 (TRAV12-3, TRAJ53)
CAMSPGSGGSNDKLTL

SEQ ID NO: 584268 - protein, 11 aa, Homo sapiens
  CDR3 for beta chain variable domain of TCR clone 292134 (TRBV29-1, TRBJ2-5)
CSEDRTGTQYF

SEQ ID NO: 584269 - protein, 12 aa, Homo sapiens
  CDR3 for alpha chain variable domain of TCR clone 292135 (TRAV8-3, TRAJ34)
CAVLTNTDKLIF

SEQ ID NO: 584270 - protein, 14 aa, Homo sapiens
  CDR3 for beta chain variable domain of TCR clone 292135 (TRBV7-2, TRBJ1-1)
CASSFLTGTTEAFF

SEQ ID NO: 584271 - protein, 13 aa, Homo sapiens
  CDR3 for alpha chain variable domain of TCR clone 292136 (TRAV12-2, TRAJ20)
CAVYPSNDYKPSF

SEQ ID NO: 584272 - protein, 18 aa, Homo sapiens
  CDR3 for beta chain variable domain of TCR clone 292136 (TRBV11-2, TRBJ2-3)
CASSLGGASRGAPNTRYF

SEQ ID NO: 584273 - protein, 15 aa, Homo sapiens
  CDR3 for alpha chain variable domain of TCR clone 292137 (TRAV29/DV5, TRAJ42)
CVAKTDGGSQGNLIF

SEQ ID NO: 584274 - protein, 15 aa, Homo sapiens
  CDR3 for beta chain variable domain of TCR clone 292137 (TRBV5-1, TRBJ2-2)
CASSSQGGNTGELFF

SEQ ID NO: 584275 - protein, 13 aa, Homo sapiens
  CDR3 for alpha chain variable domain of TCR clone 292138 (TRAV12-3, TRAJ9)
CAMRNTGGFKTIF

SEQ ID NO: 584276 - protein, 16 aa, Homo sapiens
  CDR3 for beta chain variable domain of TCR clone 292138 (TRBV10-3, TRBJ2-1)
CAISGVGDGGGGEPFF

SEQ ID NO: 584277 - protein, 14 aa, Homo sapiens
  CDR3 for alpha chain variable domain of TCR clone 292139 (TRAV16, TRAJ32)
CALKSGGATNKLIF

SEQ ID NO: 584278 - protein, 13 aa, Homo sapiens
  CDR3 for beta chain variable domain of TCR clone 292139 (TRBV15, TRBJ1-6)
CATSGGLNPPLHF

SEQ ID NO: 584279 - protein, 14 aa, Homo sapiens
  CDR3 for alpha chain variable domain of TCR clone 292140 (TRAV21, TRAJ35)
CAVMPIGFGNVLHC

SEQ ID NO: 584280 - protein, 13 aa, Homo sapiens
  CDR3 for beta chain variable domain of TCR clone 292140 (TRBV23-1, TRBJ1-4)
CASRGKFNEKLFC

SEQ ID NO: 584281 - protein, 13 aa, Homo sapiens
  CDR3 for alpha chain variable domain of TCR clone 292141 (TRAV23/DV6, TRAJ22)
CAPYSGSVRQLTF

SEQ ID NO: 584282 - protein, 15 aa, Homo sapiens
  CDR3 for beta chain variable domain of TCR clone 292141 (TRBV11-2, TRBJ1-6)
CASSLDPWAVSPLHF

SEQ ID NO: 584283 - protein, 16 aa, Homo sapiens
  CDR3 for alpha chain variable domain of TCR clone 292142 (TRAV3, TRAJ37)
CAVRPHGSGNTGKLIF

SEQ ID NO: 584284 - protein, 16 aa, Homo sapiens
  CDR3 for beta chain variable domain of TCR clone 292142 (TRBV9, TRBJ1-2)
CASSVEEKVSPYVDTF

SEQ ID NO: 584285 - protein, 12 aa, Homo sapiens
  CDR3 for alpha chain variable domain of TCR clone 292143 (TRAV13-1, TRAJ21)
CAAKEGINKFYF

SEQ ID NO: 584286 - protein, 16 aa, Homo sapiens
  CDR3 for beta chain variable domain of TCR clone 292143 (TRBV2, TRBJ2-7)
CASSEPWTGPSDEQYF

SEQ ID NO: 584287 - protein, 18 aa, Homo sapiens
  CDR3 for alpha chain variable domain of TCR clone 292144 (TRAV13-1, TRAJ28)
CAASPVPILWGWELPTQF

SEQ ID NO: 584288 - protein, 13 aa, Homo sapiens
  CDR3 for beta chain variable domain of TCR clone 292144 (TRBV15, TRBJ2-7)
CATSTTGHYEQYF

SEQ ID NO: 584289 - protein, 12 aa, Homo sapiens
  CDR3 for alpha chain variable domain of TCR clone 292145 (TRAV3, TRAJ27)
CAVRDKAGKSTF

SEQ ID NO: 584290 - protein, 14 aa, Homo sapiens
  CDR3 for beta chain variable domain of TCR clone 292145 (TRBV5-1, TRBJ1-2)
CASSVDITNYGYTF

SEQ ID NO: 584291 - protein, 17 aa, Homo sapiens
  CDR3 for alpha chain variable domain of TCR clone 292146 (TRAV8-6, TRAJ8)
CAVKEGIENTGFQKLVF

SEQ ID NO: 584292 - protein, 12 aa, Homo sapiens
  CDR3 for beta chain variable domain of TCR clone 292146 (TRBV19, TRBJ1-4)
CASKDGPGGLFF

SEQ ID NO: 584293 - protein, 13 aa, Homo sapiens
  CDR3 for alpha chain variable domain of TCR clone 292147 (TRAV2, TRAJ40)
CAVVTSGTYKYIF

SEQ ID NO: 584294 - protein, 18 aa, Homo sapiens
  CDR3 for beta chain variable domain of TCR clone 292147 (TRBV28, TRBJ2-5)
CASSFPNFGTGGGETQYF

SEQ ID NO: 584295 - protein, 14 aa, Homo sapiens
  CDR3 for alpha chain variable domain of TCR clone 292148 (TRAV12-3, TRAJ10)
SHLPLTGGGNKLTF

SEQ ID NO: 584296 - protein, 14 aa, Homo sapiens
  CDR3 for beta chain variable domain of TCR clone 292148 (TRBV7-9, TRBJ2-7)
CASSLVAGPYEQYF

SEQ ID NO: 584297 - protein, 13 aa, Homo sapiens
  CDR3 for alpha chain variable domain of TCR clone 292149 (TRAV13-1, TRAJ10)
CSATAGGGNKLTF

SEQ ID NO: 584298 - protein, 14 aa, Homo sapiens
  CDR3 for beta chain variable domain of TCR clone 292149 (TRBV12-4, TRBJ2-7)
CASSPAGLKYEQYF

SEQ ID NO: 584299 - protein, 18 aa, Homo sapiens
  CDR3 for alpha chain variable domain of TCR clone 292150 (TRAV12-3, TRAJ52)
CAMSRTHAGGTSYGKLTF

SEQ ID NO: 584300 - protein, 17 aa, Homo sapiens
  CDR3 for beta chain variable domain of TCR clone 292150 (TRBV7-3, TRBJ2-3)
CASSLMKRMRGADTQYF

SEQ ID NO: 584301 - protein, 10 aa, Homo sapiens
  CDR3 for alpha chain variable domain of TCR clone 292151 (TRAV12-1, TRAJ41)
CVVPELKFRV

SEQ ID NO: 584302 - protein, 14 aa, Homo sapiens
  CDR3 for beta chain variable domain of TCR clone 292151 (TRBV6-1, TRBJ1-3)
CASVQGGGGNTIYF

SEQ ID NO: 584303 - protein, 14 aa, Homo sapiens
  CDR3 for alpha chain variable domain of TCR clone 292152 (TRAV12-2, TRAJ13)
CAVKKTGGYQKVTF

SEQ ID NO: 584304 - protein, 13 aa, Homo sapiens
  CDR3 for beta chain variable domain of TCR clone 292152 (TRBV20-1, TRBJ2-3)
CSAGLAGTDTQYF

SEQ ID NO: 584305 - protein, 12 aa, Homo sapiens
  CDR3 for alpha chain variable domain of TCR clone 292153 (TRAV36/DV7, TRAJ40)
CAVGTGTYKYIF

SEQ ID NO: 584306 - protein, 13 aa, Homo sapiens
  CDR3 for beta chain variable domain of TCR clone 292153 (TRBV7-7, TRBJ1-5)
CASSPGKHQPQHF

SEQ ID NO: 584307 - protein, 11 aa, Homo sapiens
  CDR3 for alpha chain variable domain of TCR clone 292154 (TRAV1-2, TRAJ20)
CAVANDYKLSF

SEQ ID NO: 584308 - protein, 14 aa, Homo sapiens
  CDR3 for beta chain variable domain of TCR clone 292154 (TRBV12-5, TRBJ2-5)
CASGSRTHQATQYF

SEQ ID NO: 584309 - protein, 14 aa, Homo sapiens
  CDR3 for alpha chain variable domain of TCR clone 292155 (TRAV13-1, TRAJ35)
CTASKGGFGNVLHC

SEQ ID NO: 584310 - protein, 13 aa, Homo sapiens
  CDR3 for beta chain variable domain of TCR clone 292155 (TRBV7-3, TRBJ1-1)
CASSQDWGAEAFF

SEQ ID NO: 584311 - protein, 13 aa, Homo sapiens
  CDR3 for alpha chain variable domain of TCR clone 292156 (TRAV29/DV5, TRAJ31)
CAASRNNNARLMF

SEQ ID NO: 584312 - protein, 12 aa, Homo sapiens
  CDR3 for beta chain variable domain of TCR clone 292156 (TRBV14, TRBJ1-1)
CASSQLKGLAFS

SEQ ID NO: 584313 - protein, 14 aa, Homo sapiens
  CDR3 for alpha chain variable domain of TCR clone 292157 (TRAV12-2, TRAJ40)
CAVKIPSGTYKYIF

SEQ ID NO: 584314 - protein, 20 aa, Homo sapiens
  CDR3 for beta chain variable domain of TCR clone 292157 (TRBV28, TRBJ2-1)
CASTPIGRSTGLAGGNEQFF

SEQ ID NO: 584315 - protein, 12 aa, Homo sapiens
  CDR3 for alpha chain variable domain of TCR clone 292158 (TRAV3, TRAJ31)
CAVRPRGPRLMF

SEQ ID NO: 584316 - protein, 17 aa, Homo sapiens
  CDR3 for beta chain variable domain of TCR clone 292158 (TRBV7-9, TRBJ1-5)
CASSASQGGYSNQRQHF

SEQ ID NO: 584317 - protein, 14 aa, Homo sapiens
  CDR3 for alpha chain variable domain of TCR clone 292159 (TRAV1-2, TRAJ16)
CAVNRFSDGQKLLF

SEQ ID NO: 584318 - protein, 16 aa, Homo sapiens
  CDR3 for beta chain variable domain of TCR clone 292159 (TRBV20-1, TRBJ1-5)
CSAKGSRGISNQPQHF

SEQ ID NO: 584319 - protein, 15 aa, Homo sapiens
  CDR3 for alpha chain variable domain of TCR clone 292160 (TRAV14/DV4, TRAJ33)
CAMREGRDSNYQLIW

SEQ ID NO: 584320 - protein, 15 aa, Homo sapiens
  CDR3 for beta chain variable domain of TCR clone 292160 (TRBV5-5, TRBJ1-5)
CASSLTPGSNQPQHF

SEQ ID NO: 584321 - protein, 16 aa, Homo sapiens
  CDR3 for alpha chain variable domain of TCR clone 292161 (TRAV30, TRAJ24)
CGTEIVDADSWGKFQF

SEQ ID NO: 584322 - protein, 17 aa, Homo sapiens
  CDR3 for beta chain variable domain of TCR clone 292161 (TRBV5-1, TRBJ2-1)
CASSTGTSGYSYNEQFF

SEQ ID NO: 584323 - protein, 14 aa, Homo sapiens
  CDR3 for alpha chain variable domain of TCR clone 292162 (TRAV1-2, TRAJ16)
CAVNRFSDGQKLLF

SEQ ID NO: 584324 - protein, 15 aa, Homo sapiens
  CDR3 for beta chain variable domain of TCR clone 292162 (TRBV20-1, TRBJ2-1)
CSARGIGVTYNEQFF

SEQ ID NO: 584325 - protein, 14 aa, Homo sapiens
  CDR3 for alpha chain variable domain of TCR clone 292163 (TRAV12-2, TRAJ13)
CAVKKSGGYQKVTF

SEQ ID NO: 584326 - protein, 13 aa, Homo sapiens
  CDR3 for beta chain variable domain of TCR clone 292163 (TRBV15, TRBJ2-7)
CATSTTGHYEQYF

SEQ ID NO: 584327 - protein, 13 aa, Homo sapiens
  CDR3 for alpha chain variable domain of TCR clone 292164 (TRAV12-2, TRAJ20)
CAVYPSNDYKLRF

SEQ ID NO: 584328 - protein, 14 aa, Homo sapiens
  CDR3 for beta chain variable domain of TCR clone 292164 (TRBV27, TRBJ2-5)
CQQFIPAGGETQYF

SEQ ID NO: 584329 - protein, 14 aa, Homo sapiens
  CDR3 for alpha chain variable domain of TCR clone 292165 (TRAV12-3, TRAJ56)
CAMSVTGANSKLTF

SEQ ID NO: 584330 - protein, 17 aa, Homo sapiens
  CDR3 for beta chain variable domain of TCR clone 292165 (TRBV20-1, TRBJ2-3)
CSASLLGRGGSVDTQYF

SEQ ID NO: 584331 - protein, 11 aa, Homo sapiens
  CDR3 for alpha chain variable domain of TCR clone 292166 (TRAV12-3, TRAJ43)
CAMSVSNDIRF

SEQ ID NO: 584332 - protein, 16 aa, Homo sapiens
  CDR3 for beta chain variable domain of TCR clone 292166 (TRBV2, TRBJ2-3)
CASSTSVDGVTDTQYF

SEQ ID NO: 584333 - protein, 16 aa, Homo sapiens
  CDR3 for alpha chain variable domain of TCR clone 292167 (TRAV8-3, TRAJ44)
CAVGASNTGTASKLTF

SEQ ID NO: 584334 - protein, 15 aa, Homo sapiens
  CDR3 for beta chain variable domain of TCR clone 292167 (TRBV27, TRBJ1-5)
CASTFNRGSNHPQHF

SEQ ID NO: 584335 - protein, 14 aa, Homo sapiens
  CDR3 for alpha chain variable domain of TCR clone 292168 (TRAV12-3, TRAJ10)
SHLPLTGGGNKLTF

SEQ ID NO: 584336 - protein, 19 aa, Homo sapiens
  CDR3 for beta chain variable domain of TCR clone 292168 (TRBV2, TRBJ2-2)
CASSQPGLAGGGNTGELFF

SEQ ID NO: 584337 - protein, 12 aa, Homo sapiens
  CDR3 for alpha chain variable domain of TCR clone 292169 (TRAV23/DV6, TRAJ17)
CAMTLTGNKLTF

SEQ ID NO: 584338 - protein, 13 aa, Homo sapiens
  CDR3 for beta chain variable domain of TCR clone 292169 (TRBV5-1, TRBJ1-2)
CASSSTGVYGYTF

SEQ ID NO: 584339 - protein, 13 aa, Homo sapiens
  CDR3 for alpha chain variable domain of TCR clone 292170 (TRAV27, TRAJ6)
CAGGTRGSYIPTF

SEQ ID NO: 584340 - protein, 13 aa, Homo sapiens
  CDR3 for beta chain variable domain of TCR clone 292170 (TRBV18, TRBJ2-3)
CASSTGRTDTQYF

SEQ ID NO: 584341 - protein, 15 aa, Homo sapiens
  CDR3 for alpha chain variable domain of TCR clone 292171 (TRAV21, TRAJ24)
CASRSSTDSWGKLQF

SEQ ID NO: 584342 - protein, 11 aa, Homo sapiens
  CDR3 for beta chain variable domain of TCR clone 292171 (TRBV11-2, TRBJ2-2)
CASSLPGELFC

SEQ ID NO: 584343 - protein, 17 aa, Homo sapiens
  CDR3 for alpha chain variable domain of TCR clone 292172 (TRAV8-6, TRAJ58)
CAVSSWVGETIGTRLTF

SEQ ID NO: 584344 - protein, 14 aa, Homo sapiens
  CDR3 for beta chain variable domain of TCR clone 292172 (TRBV4-2, TRBJ2-1)
CASGLDRAYNEQFF

SEQ ID NO: 584345 - protein, 12 aa, Homo sapiens
  CDR3 for alpha chain variable domain of TCR clone 292173 (TRAV27, TRAJ35)
CAGADFGNVLHC

SEQ ID NO: 584346 - protein, 16 aa, Homo sapiens
  CDR3 for beta chain variable domain of TCR clone 292173 (TRBV25-1, TRBJ1-1)
CASSGDRDRGRIEAFF

SEQ ID NO: 584347 - protein, 13 aa, Homo sapiens
  CDR3 for alpha chain variable domain of TCR clone 292174 (TRAV2, TRAJ40)
CAVVTSGTYKYIF

SEQ ID NO: 584348 - protein, 14 aa, Homo sapiens
  CDR3 for beta chain variable domain of TCR clone 292174 (TRBV7-9, TRBJ2-3)
CASSLEQGTNTQYF

SEQ ID NO: 584349 - protein, 10 aa, Homo sapiens
  CDR3 for alpha chain variable domain of TCR clone 292175 (TRAV5, TRAJ34)
CAEDTDKLIF

SEQ ID NO: 584350 - protein, 14 aa, Homo sapiens
  CDR3 for beta chain variable domain of TCR clone 292175 (TRBV7-2, TRBJ2-7)
CASSPKTSFYEQYF

SEQ ID NO: 584351 - protein, 12 aa, Homo sapiens
  CDR3 for alpha chain variable domain of TCR clone 292176 (TRAV1-2, TRAJ29)
CAVPSGNTPLVF

SEQ ID NO: 584352 - protein, 13 aa, Homo sapiens
  CDR3 for beta chain variable domain of TCR clone 292176 (TRBV5-4, TRBJ1-1)
CASSVDLGTDAFF

SEQ ID NO: 584353 - protein, 13 aa, Homo sapiens
  CDR3 for alpha chain variable domain of TCR clone 292177 (TRAV13-1, TRAJ39)
CAAIIWAGDMLTF

SEQ ID NO: 584354 - protein, 15 aa, Homo sapiens
  CDR3 for beta chain variable domain of TCR clone 292177 (TRBV7-9, TRBJ1-1)
CASSLLEQGGTEAFF

SEQ ID NO: 584355 - protein, 12 aa, Homo sapiens
  CDR3 for alpha chain variable domain of TCR clone 292178 (TRAV21, TRAJ33)
CAKMDSNYQLIW

SEQ ID NO: 584356 - protein, 16 aa, Homo sapiens
  CDR3 for beta chain variable domain of TCR clone 292178 (TRBV19, TRBJ2-2)
CASSFPGQGLAGELFF

SEQ ID NO: 584357 - protein, 19 aa, Homo sapiens
  CDR3 for alpha chain variable domain of TCR clone 292179 (TRAV1-2, TRAJ26)
CLLPLCCERPDNYGQNFVF

SEQ ID NO: 584358 - protein, 12 aa, Homo sapiens
  CDR3 for beta chain variable domain of TCR clone 292179 (TRBV20-1, TRBJ2-1)
CSAQHTYNEQFF

SEQ ID NO: 584359 - protein, 18 aa, Homo sapiens
  CDR3 for alpha chain variable domain of TCR clone 292180 (TRAV8-6, TRAJ36)
CAVSDGLRDWGKQPLLWA

SEQ ID NO: 584360 - protein, 16 aa, Homo sapiens
  CDR3 for beta chain variable domain of TCR clone 292180 (TRBV28, TRBJ2-1)
CASSSPEYPRDNEQFF

SEQ ID NO: 584361 - protein, 12 aa, Homo sapiens
  CDR3 for alpha chain variable domain of TCR clone 292181 (TRAV1-2, TRAJ24)
CAVGGSWGKFQL

SEQ ID NO: 584362 - protein, 13 aa, Homo sapiens
  CDR3 for beta chain variable domain of TCR clone 292181 (TRBV20-1, TRBJ1-1)
CSASKRGLTEAFF

SEQ ID NO: 584363 - protein, 14 aa, Homo sapiens
  CDR3 for alpha chain variable domain of TCR clone 292182 (TRAV13-1, TRAJ35)
CAASKGGFGNVLHC

SEQ ID NO: 584364 - protein, 13 aa, Homo sapiens
  CDR3 for beta chain variable domain of TCR clone 292182 (TRBV7-3, TRBJ1-1)
CASSQDGGAEASF

SEQ ID NO: 584365 - protein, 14 aa, Homo sapiens
  CDR3 for alpha chain variable domain of TCR clone 292183 (TRAV12-2, TRAJ40)
CAVKIPSGTYKYIF

SEQ ID NO: 584366 - protein, 13 aa, Homo sapiens
  CDR3 for beta chain variable domain of TCR clone 292183 (TRBV20-1, TRBJ2-7)
CSARWGYNYEQYF

SEQ ID NO: 584367 - protein, 14 aa, Homo sapiens
  CDR3 for alpha chain variable domain of TCR clone 292184 (TRAV4, TRAJ9)
CLVGAGTGGFKTIF

SEQ ID NO: 584368 - protein, 14 aa, Homo sapiens
  CDR3 for beta chain variable domain of TCR clone 292184 (TRBV7-9, TRBJ2-4)
CASSLAMGGNMQYF

SEQ ID NO: 584369 - protein, 15 aa, Homo sapiens
  CDR3 for alpha chain variable domain of TCR clone 292185 (TRAV13-1, TRAJ52)
SYYNAGGNSYGKLTF

SEQ ID NO: 584370 - protein, 11 aa, Homo sapiens
  CDR3 for beta chain variable domain of TCR clone 292185 (TRBV12-4, TRBJ2-2)
CASSSAGELFF

SEQ ID NO: 584371 - protein, 15 aa, Homo sapiens
  CDR3 for alpha chain variable domain of TCR clone 292186 (TRAV1-2, TRAJ32)
CAVRGYCGATNKLIF

SEQ ID NO: 584372 - protein, 15 aa, Homo sapiens
  CDR3 for beta chain variable domain of TCR clone 292186 (TRBV25-1, TRBJ2-5)
CASSDTGTHQETQYF

SEQ ID NO: 584373 - protein, 12 aa, Homo sapiens
  CDR3 for alpha chain variable domain of TCR clone 292187 (TRAV12-3, TRAJ17)
CAMTLTGNKLTF

SEQ ID NO: 584374 - protein, 20 aa, Homo sapiens
  CDR3 for beta chain variable domain of TCR clone 292187 (TRBV7-8, TRBJ2-2)
CAISHLFPGPTIHITGELFF

SEQ ID NO: 584375 - protein, 11 aa, Homo sapiens
  CDR3 for alpha chain variable domain of TCR clone 292188 (TRAV23/DV6, TRAJ58)
CAARLLRGETS

SEQ ID NO: 584376 - protein, 13 aa, Homo sapiens
  CDR3 for beta chain variable domain of TCR clone 292188 (TRBV6-4, TRBJ1-5)
CASSTDLNQPQHF

SEQ ID NO: 584377 - protein, 11 aa, Homo sapiens
  CDR3 for alpha chain variable domain of TCR clone 292189 (TRAV17, TRAJ31)
CATSNNARLMF

SEQ ID NO: 584378 - protein, 16 aa, Homo sapiens
  CDR3 for beta chain variable domain of TCR clone 292189 (TRBV7-8, TRBJ2-4)
CASSAERTVAKNIQYF

SEQ ID NO: 584379 - protein, 13 aa, Homo sapiens
  CDR3 for alpha chain variable domain of TCR clone 292190 (TRAV3, TRAJ20)
CAVRSLKDYKLSF

SEQ ID NO: 584380 - protein, 13 aa, Homo sapiens
  CDR3 for beta chain variable domain of TCR clone 292190 (TRBV6-1, TRBJ2-1)
CAGMDPTNNEQFF

SEQ ID NO: 584381 - protein, 12 aa, Homo sapiens
  CDR3 for alpha chain variable domain of TCR clone 292191 (TRAV21, TRAJ33)
CAKMDSNYQLIW

SEQ ID NO: 584382 - protein, 12 aa, Homo sapiens
  CDR3 for beta chain variable domain of TCR clone 292191 (TRBV11-3, TRBJ1-1)
CASSLRDSEAFF

SEQ ID NO: 584383 - protein, 16 aa, Homo sapiens
  CDR3 for alpha chain variable domain of TCR clone 292192 (TRAV30, TRAJ24)
CGTEIVDADSWGKFQL

SEQ ID NO: 584384 - protein, 15 aa, Homo sapiens
  CDR3 for beta chain variable domain of TCR clone 292192 (TRBV6-3, TRBJ2-7)
CASSSPGTVFYEQYF

SEQ ID NO: 584385 - protein, 14 aa, Homo sapiens
  CDR3 for alpha chain variable domain of TCR clone 292193 (TRAV14/DV4, TRAJ15)
CAMRRDQAGTALIF

SEQ ID NO: 584386 - protein, 15 aa, Homo sapiens
  CDR3 for beta chain variable domain of TCR clone 292193 (TRBV7-8, TRBJ2-1)
CASSLAGGLYNEQFF

SEQ ID NO: 584387 - protein, 14 aa, Homo sapiens
  CDR3 for alpha chain variable domain of TCR clone 292194 (TRAV12-2, TRAJ13)
CAVKTTGGYQKVTF

SEQ ID NO: 584388 - protein, 16 aa, Homo sapiens
  CDR3 for beta chain variable domain of TCR clone 292194 (TRBV12-5, TRBJ2-5)
CASGPRTSGNQETQYF

SEQ ID NO: 584389 - protein, 15 aa, Homo sapiens
  CDR3 for alpha chain variable domain of TCR clone 292195 (TRAV9-2, TRAJ13)
CALSDWSGGYQKVTF

SEQ ID NO: 584390 - protein, 14 aa, Homo sapiens
  CDR3 for beta chain variable domain of TCR clone 292195 (TRBV7-8, TRBJ1-5)
CASSTGTVGGPQHF

SEQ ID NO: 584391 - protein, 15 aa, Homo sapiens
  CDR3 for alpha chain variable domain of TCR clone 292196 (TRAV27, TRAJ38)
CAARRNAGNNRKLIW

SEQ ID NO: 584392 - protein, 13 aa, Homo sapiens
  CDR3 for beta chain variable domain of TCR clone 292196 (TRBV11-2, TRBJ2-5)
CASSSTGEETQYF

SEQ ID NO: 584393 - protein, 16 aa, Homo sapiens
  CDR3 for alpha chain variable domain of TCR clone 292197 (TRAV8-3, TRAJ13)
CAVGAYPSGGYQKVTF

SEQ ID NO: 584394 - protein, 15 aa, Homo sapiens
  CDR3 for beta chain variable domain of TCR clone 292197 (TRBV28, TRBJ1-5)
CASSRTGGYVQPQHF

SEQ ID NO: 584395 - protein, 16 aa, Homo sapiens
  CDR3 for alpha chain variable domain of TCR clone 292198 (TRAV17, TRAJ36)
CATVSLNWGKQPLLWD

SEQ ID NO: 584396 - protein, 14 aa, Homo sapiens
  CDR3 for beta chain variable domain of TCR clone 292198 (TRBV28, TRBJ1-3)
CAGSFRDRVNTIYF

SEQ ID NO: 584397 - protein, 17 aa, Homo sapiens
  CDR3 for alpha chain variable domain of TCR clone 292199 (TRAV8-1, TRAJ43)
CAVTNDMRFGAGTRLTV

SEQ ID NO: 584398 - protein, 17 aa, Homo sapiens
  CDR3 for beta chain variable domain of TCR clone 292199 (TRBV5-4, TRBJ2-1)
CDSSSAGGRGPYNEQFF

SEQ ID NO: 584399 - protein, 20 aa, Homo sapiens
  CDR3 for alpha chain variable domain of TCR clone 292200 (TRAV25, TRAJ21)
TATQTTDVGTYPLSFNKFYF

SEQ ID NO: 584400 - protein, 14 aa, Homo sapiens
  CDR3 for beta chain variable domain of TCR clone 292200 (TRBV6-1, TRBJ2-1)
CASAKYGFYNEQFF

SEQ ID NO: 584401 - protein, 15 aa, Homo sapiens
  CDR3 for alpha chain variable domain of TCR clone 292201 (TRAV8-3, TRAJ27)
CAVGPSKTNAGNSTF

SEQ ID NO: 584402 - protein, 15 aa, Homo sapiens
  CDR3 for beta chain variable domain of TCR clone 292201 (TRBV7-3, TRBJ2-1)
CASSPTGGGEVEQFF

SEQ ID NO: 584403 - protein, 18 aa, Homo sapiens
  CDR3 for alpha chain variable domain of TCR clone 292202 (TRAV8-4, TRAJ52)
CAVTRANAGGTSYGKLTF

SEQ ID NO: 584404 - protein, 17 aa, Homo sapiens
  CDR3 for beta chain variable domain of TCR clone 292202 (TRBV13, TRBJ2-3)
CASSLSRVAGGRNTQYF

SEQ ID NO: 584405 - protein, 15 aa, Homo sapiens
  CDR3 for alpha chain variable domain of TCR clone 292203 (TRAV6, TRAJ21)
CAGLDTTSTNFTLDL

SEQ ID NO: 584406 - protein, 14 aa, Homo sapiens
  CDR3 for beta chain variable domain of TCR clone 292203 (TRBV23-1, TRBJ2-3)
QQSRLAGVPDTQYF

SEQ ID NO: 584407 - protein, 15 aa, Homo sapiens
  CDR3 for alpha chain variable domain of TCR clone 292204 (TRAV8-3, TRAJ34)
DAAEHFRAIPGKLIF

SEQ ID NO: 584408 - protein, 15 aa, Homo sapiens
  CDR3 for beta chain variable domain of TCR clone 292204 (TRBV5-7, TRBJ2-1)
CASSRRLAGDNEQFF

SEQ ID NO: 584409 - protein, 18 aa, Homo sapiens
  CDR3 for alpha chain variable domain of TCR clone 292205 (TRAV13-1, TRAJ52)
CAAKNPNAGGTSYGKLTF

SEQ ID NO: 584410 - protein, 18 aa, Homo sapiens
  CDR3 for beta chain variable domain of TCR clone 292205 (TRBV11-2, TRBJ2-3)
CASSLGGASRGDPNTQYF

SEQ ID NO: 584411 - protein, 12 aa, Homo sapiens
  CDR3 for alpha chain variable domain of TCR clone 292206 (TRAV36/DV7, TRAJ54)
CAVVRGAQKPVF

SEQ ID NO: 584412 - protein, 13 aa, Homo sapiens
  CDR3 for beta chain variable domain of TCR clone 292206 (TRBV7-9, TRBJ1-2)
CASSLKQNYGYTF

SEQ ID NO: 584413 - protein, 14 aa, Homo sapiens
  CDR3 for alpha chain variable domain of TCR clone 292207 (TRAV12-2, TRAJ36)
CAVNPPAGANNLFF

SEQ ID NO: 584414 - protein, 13 aa, Homo sapiens
  CDR3 for beta chain variable domain of TCR clone 292207 (TRBV20-1, TRBJ1-6)
CSAPTGLGSPLHF

SEQ ID NO: 584415 - protein, 22 aa, Homo sapiens
  CDR3 for alpha chain variable domain of TCR clone 292208 (TRAV27, TRAJ41)
CAVRTQIPDIQNPDPAVYQLRD

SEQ ID NO: 584416 - protein, 15 aa, Homo sapiens
  CDR3 for beta chain variable domain of TCR clone 292208 (TRBV20-1, TRBJ2-7)
CSARKGLAESYEQYF

SEQ ID NO: 584417 - protein, 10 aa, Homo sapiens
  CDR3 for alpha chain variable domain of TCR clone 292209 (TRAV23/DV6, TRAJ57)
CAASSTLSQG

SEQ ID NO: 584418 - protein, 12 aa, Homo sapiens
  CDR3 for beta chain variable domain of TCR clone 292209 (TRBV28, TRBJ2-1)
CASSFRGNEQFF

SEQ ID NO: 584419 - protein, 15 aa, Homo sapiens
  CDR3 for alpha chain variable domain of TCR clone 292210 (TRAV27, TRAJ38)
CAARRNAGNNRKLIW

SEQ ID NO: 584420 - protein, 13 aa, Homo sapiens
  CDR3 for beta chain variable domain of TCR clone 292210 (TRBV7-8, TRBJ2-7)
CASSFAGLYEQYF

SEQ ID NO: 584421 - protein, 12 aa, Homo sapiens
  CDR3 for alpha chain variable domain of TCR clone 292211 (TRAV13-2, TRAJ23)
CAECHRGGKLIF

SEQ ID NO: 584422 - protein, 16 aa, Homo sapiens
  CDR3 for beta chain variable domain of TCR clone 292211 (TRBV11-2, TRBJ1-1)
CASSLRQGGEHATAFF

SEQ ID NO: 584423 - protein, 12 aa, Homo sapiens
  CDR3 for alpha chain variable domain of TCR clone 292212 (TRAV38-1, TRAJ47)
CAFETYGNKLVF

SEQ ID NO: 584424 - protein, 15 aa, Homo sapiens
  CDR3 for beta chain variable domain of TCR clone 292212 (TRBV5-7, TRBJ2-7)
CASSGGRPVTYEQYF

SEQ ID NO: 584425 - protein, 15 aa, Homo sapiens
  CDR3 for alpha chain variable domain of TCR clone 292213 (TRAV17, TRAJ57)
CATGPSPGGSEKLVF

SEQ ID NO: 584426 - protein, 14 aa, Homo sapiens
  CDR3 for beta chain variable domain of TCR clone 292213 (TRBV12-5, TRBJ2-5)
CASGSRTRQETQYF

SEQ ID NO: 584427 - protein, 13 aa, Homo sapiens
  CDR3 for alpha chain variable domain of TCR clone 292214 (TRAV13-2, TRAJ13)
CAERPGGYQTVTF

SEQ ID NO: 584428 - protein, 15 aa, Homo sapiens
  CDR3 for beta chain variable domain of TCR clone 292214 (TRBV11-3, TRBJ2-7)
CASSPGPASSYEQYF

SEQ ID NO: 584429 - protein, 15 aa, Homo sapiens
  CDR3 for alpha chain variable domain of TCR clone 292215 (TRAV29/DV5, TRAJ10)
CAAFGVTGGGNKLTF

SEQ ID NO: 584430 - protein, 15 aa, Homo sapiens
  CDR3 for beta chain variable domain of TCR clone 292215 (TRBV7-8, TRBJ2-3)
CASSLSADSGGAQYF

SEQ ID NO: 584431 - protein, 15 aa, Homo sapiens
  CDR3 for alpha chain variable domain of TCR clone 292216 (TRAV26-1, TRAJ23)
CIVRVAGYKGGKLIF

SEQ ID NO: 584432 - protein, 18 aa, Homo sapiens
  CDR3 for beta chain variable domain of TCR clone 292216 (TRBV28, TRBJ2-1)
CASSSTSGRANYYNEQFF

SEQ ID NO: 584433 - protein, 11 aa, Homo sapiens
  CDR3 for alpha chain variable domain of TCR clone 292217 (TRAV3, TRAJ21)
CAVCNFNKFYF

SEQ ID NO: 584434 - protein, 14 aa, Homo sapiens
  CDR3 for beta chain variable domain of TCR clone 292217 (TRBV18, TRBJ2-5)
CASSPGVSQETQYF

SEQ ID NO: 584435 - protein, 17 aa, Homo sapiens
  CDR3 for alpha chain variable domain of TCR clone 292218 (TRAV3, TRAJ6)
CAVRDGRRAGGSYIPTF

SEQ ID NO: 584436 - protein, 16 aa, Homo sapiens
  CDR3 for beta chain variable domain of TCR clone 292218 (TRBV7-8, TRBJ2-3)
CASSAEGQRETDTQYF

SEQ ID NO: 584437 - protein, 14 aa, Homo sapiens
  CDR3 for alpha chain variable domain of TCR clone 292219 (TRAV2, TRAJ9)
CAVEDRSGVFKTIF

SEQ ID NO: 584438 - protein, 17 aa, Homo sapiens
  CDR3 for beta chain variable domain of TCR clone 292219 (TRBV11-2, TRBJ2-1)
CASSLYPPGVEYNEQFF

SEQ ID NO: 584439 - protein, 12 aa, Homo sapiens
  CDR3 for alpha chain variable domain of TCR clone 292220 (TRAV3, TRAJ21)
CAVYYNFNKFYF

SEQ ID NO: 584440 - protein, 14 aa, Homo sapiens
  CDR3 for beta chain variable domain of TCR clone 292220 (TRBV7-8, TRBJ2-3)
CASSLEAGTDTQYF

SEQ ID NO: 584441 - protein, 15 aa, Homo sapiens
  CDR3 for alpha chain variable domain of TCR clone 292221 (TRAV29/DV5, TRAJ53)
CAASASGGSNYKLTF

SEQ ID NO: 584442 - protein, 14 aa, Homo sapiens
  CDR3 for beta chain variable domain of TCR clone 292221 (TRBV20-1, TRBJ1-1)
CSAQTRTGGTEAFF

SEQ ID NO: 584443 - protein, 14 aa, Homo sapiens
  CDR3 for alpha chain variable domain of TCR clone 292222 (TRAV12-3, TRAJ12)
CASVRMDSSYKLIF

SEQ ID NO: 584444 - protein, 17 aa, Homo sapiens
  CDR3 for beta chain variable domain of TCR clone 292222 (TRBV4-1, TRBJ1-5)
CASSQQPPTVANQPQHF

SEQ ID NO: 584445 - protein, 12 aa, Homo sapiens
  CDR3 for alpha chain variable domain of TCR clone 292223 (TRAV30, TRAJ43)
CGTVERGNDMRF

SEQ ID NO: 584446 - protein, 13 aa, Homo sapiens
  CDR3 for beta chain variable domain of TCR clone 292223 (TRBV7-9, TRBJ2-3)
CASSPGSTDTQYF

SEQ ID NO: 584447 - protein, 13 aa, Homo sapiens
  CDR3 for alpha chain variable domain of TCR clone 292224 (TRAV21, TRAJ20)
CAVGLRVDYKLSF

SEQ ID NO: 584448 - protein, 15 aa, Homo sapiens
  CDR3 for beta chain variable domain of TCR clone 292224 (TRBV7-8, TRBJ1-2)
CASSLVRDGGLGYTF

SEQ ID NO: 584449 - protein, 15 aa, Homo sapiens
  CDR3 for alpha chain variable domain of TCR clone 292225 (TRAV8-4, TRAJ3)
CAVTGENLVQQCFQD

SEQ ID NO: 584450 - protein, 16 aa, Homo sapiens
  CDR3 for beta chain variable domain of TCR clone 292225 (TRBV4-2, TRBJ1-1)
CASSQAGFGMNTEGFL

SEQ ID NO: 584451 - protein, 12 aa, Homo sapiens
  CDR3 for alpha chain variable domain of TCR clone 292226 (TRAV29/DV5, TRAJ41)
CAAISSGYALNF

SEQ ID NO: 584452 - protein, 16 aa, Homo sapiens
  CDR3 for beta chain variable domain of TCR clone 292226 (TRBV18, TRBJ2-1)
CQLKGLSGGADNEQFF

SEQ ID NO: 584453 - protein, 16 aa, Homo sapiens
  CDR3 for alpha chain variable domain of TCR clone 292227 (TRAV3, TRAJ10)
CAVRDMRAGGGNKLTF

SEQ ID NO: 584454 - protein, 16 aa, Homo sapiens
  CDR3 for beta chain variable domain of TCR clone 292227 (TRBV6-1, TRBJ2-7)
CASSDFGPGGLFEQYF

SEQ ID NO: 584455 - protein, 14 aa, Homo sapiens
  CDR3 for alpha chain variable domain of TCR clone 292228 (TRAV12-1, TRAJ17)
CMVNFKAAGNKLTF

SEQ ID NO: 584456 - protein, 17 aa, Homo sapiens
  CDR3 for beta chain variable domain of TCR clone 292228 (TRBV20-1, TRBJ2-1)
CSASASGLAGSYNEQFF

SEQ ID NO: 584457 - protein, 16 aa, Homo sapiens
  CDR3 for alpha chain variable domain of TCR clone 292229 (TRAV30, TRAJ24)
CGTEIVDADSWGKFQF

SEQ ID NO: 584458 - protein, 15 aa, Homo sapiens
  CDR3 for beta chain variable domain of TCR clone 292229 (TRBV9, TRBJ1-6)
CASSVAGTGDSPRHF

SEQ ID NO: 584459 - protein, 13 aa, Homo sapiens
  CDR3 for alpha chain variable domain of TCR clone 292230 (TRAV12-1, TRAJ16)
CVVNGPDGQKLLF

SEQ ID NO: 584460 - protein, 15 aa, Homo sapiens
  CDR3 for beta chain variable domain of TCR clone 292230 (TRBV6-3, TRBJ2-7)
CASSSPGTVFYQQYF

SEQ ID NO: 584461 - protein, 16 aa, Homo sapiens
  CDR3 for alpha chain variable domain of TCR clone 292231 (TRAV4, TRAJ5)
CLVGPDHGHGQESTYF

SEQ ID NO: 584462 - protein, 17 aa, Homo sapiens
  CDR3 for beta chain variable domain of TCR clone 292231 (TRBV11-2, TRBJ2-1)
CASSVSPPGVEYNEQFF

SEQ ID NO: 584463 - protein, 16 aa, Homo sapiens
  CDR3 for alpha chain variable domain of TCR clone 292232 (TRAV3, TRAJ37)
CAVRGKGSGNTGKLIF

SEQ ID NO: 584464 - protein, 14 aa, Homo sapiens
  CDR3 for beta chain variable domain of TCR clone 292232 (TRBV12-4, TRBJ2-5)
CASSAGLVSETQYF

SEQ ID NO: 584465 - protein, 16 aa, Homo sapiens
  CDR3 for alpha chain variable domain of TCR clone 292233 (TRAV12-3, TRAJ45)
CAMGWGSGGGADGLTF

SEQ ID NO: 584466 - protein, 14 aa, Homo sapiens
  CDR3 for beta chain variable domain of TCR clone 292233 (TRBV19, TRBJ2-1)
CASPTFVLSGEQFF

SEQ ID NO: 584467 - protein, 11 aa, Homo sapiens
  CDR3 for alpha chain variable domain of TCR clone 292234 (TRAV3, TRAJ21)
CAVGNFNKFYF

SEQ ID NO: 584468 - protein, 16 aa, Homo sapiens
  CDR3 for beta chain variable domain of TCR clone 292234 (TRBV19, TRBJ2-1)
CASSRAGPSSYNEQLF

SEQ ID NO: 584469 - protein, 13 aa, Homo sapiens
  CDR3 for alpha chain variable domain of TCR clone 292235 (TRAV26-2, TRAJ43)
CILRAVNNNDMRF

SEQ ID NO: 584470 - protein, 20 aa, Homo sapiens
  CDR3 for beta chain variable domain of TCR clone 292235 (TRBV11-2, TRBJ2-7)
CASSPVGRERAGGPSYEQYF

SEQ ID NO: 584471 - protein, 13 aa, Homo sapiens
  CDR3 for alpha chain variable domain of TCR clone 292236 (TRAV26-2, TRAJ20)
CILRYSNDYKLSF

SEQ ID NO: 584472 - protein, 14 aa, Homo sapiens
  CDR3 for beta chain variable domain of TCR clone 292236 (TRBV9, TRBJ2-4)
CASSPSGTSGFQYF

SEQ ID NO: 584473 - protein, 15 aa, Homo sapiens
  CDR3 for alpha chain variable domain of TCR clone 292237 (TRAV21, TRAJ53)
CAVRQSGGSNYKLTF

SEQ ID NO: 584474 - protein, 18 aa, Homo sapiens
  CDR3 for beta chain variable domain of TCR clone 292237 (TRBV7-2, TRBJ2-3)
CASSLKREGSGITDTQYF

SEQ ID NO: 584475 - protein, 13 aa, Homo sapiens
  CDR3 for alpha chain variable domain of TCR clone 292238 (TRAV27, TRAJ54)
CAGAGQGAQKLVF

SEQ ID NO: 584476 - protein, 15 aa, Homo sapiens
  CDR3 for beta chain variable domain of TCR clone 292238 (TRBV18, TRBJ2-6)
CASSPSYAGANVLAF

SEQ ID NO: 584477 - protein, 11 aa, Homo sapiens
  CDR3 for alpha chain variable domain of TCR clone 292239 (TRAV12-1, TRAJ31)
CVTDNNARLMF

SEQ ID NO: 584478 - protein, 13 aa, Homo sapiens
  CDR3 for beta chain variable domain of TCR clone 292239 (TRBV7-9, TRBJ2-7)
CASSFAGAYEQYF

SEQ ID NO: 584479 - protein, 13 aa, Homo sapiens
  CDR3 for alpha chain variable domain of TCR clone 292240 (TRAV2, TRAJ40)
CAAVTSGTYKYIF

SEQ ID NO: 584480 - protein, 14 aa, Homo sapiens
  CDR3 for beta chain variable domain of TCR clone 292240 (TRBV19, TRBJ2-1)
CASPAFVLSGEQFF

SEQ ID NO: 584481 - protein, 16 aa, Homo sapiens
  CDR3 for alpha chain variable domain of TCR clone 292241 (TRAV14/DV4, TRAJ48)
CAMREGGNFGNEKLTF

SEQ ID NO: 584482 - protein, 13 aa, Homo sapiens
  CDR3 for beta chain variable domain of TCR clone 292241 (TRBV10-3, TRBJ2-7)
CASKLAVNYEQYF

SEQ ID NO: 584483 - protein, 14 aa, Homo sapiens
  CDR3 for alpha chain variable domain of TCR clone 292242 (TRAV8-3, TRAJ4)
CAVGAAVGYNKLIF

SEQ ID NO: 584484 - protein, 15 aa, Homo sapiens
  CDR3 for beta chain variable domain of TCR clone 292242 (TRBV6-5, TRBJ2-1)
CASSYDAGAGNEKFF

SEQ ID NO: 584485 - protein, 11 aa, Homo sapiens
  CDR3 for alpha chain variable domain of TCR clone 292243 (TRAV3, TRAJ21)
CAVGNFNKFYF

SEQ ID NO: 584486 - protein, 16 aa, Homo sapiens
  CDR3 for beta chain variable domain of TCR clone 292243 (TRBV19, TRBJ2-1)
CASSTAGPSAYNEQFF

SEQ ID NO: 584487 - protein, 15 aa, Homo sapiens
  CDR3 for alpha chain variable domain of TCR clone 292244 (TRAV12-2, TRAJ9)
CAVNIERTGGFKTIF

SEQ ID NO: 584488 - protein, 14 aa, Homo sapiens
  CDR3 for beta chain variable domain of TCR clone 292244 (TRBV4-1, TRBJ1-4)
CASSQERKNEKLFF

SEQ ID NO: 584489 - protein, 14 aa, Homo sapiens
  CDR3 for alpha chain variable domain of TCR clone 292245 (TRAV1-2, TRAJ8)
CAVREDTGFQKLVF

SEQ ID NO: 584490 - protein, 17 aa, Homo sapiens
  CDR3 for beta chain variable domain of TCR clone 292245 (TRBV20-1, TRBJ2-1)
RSASSSGLAGSYNEQFF

SEQ ID NO: 584491 - protein, 16 aa, Homo sapiens
  CDR3 for alpha chain variable domain of TCR clone 292246 (TRAV12-1, TRAJ52)
CVVPPAGGTSYGKLTF

SEQ ID NO: 584492 - protein, 16 aa, Homo sapiens
  CDR3 for beta chain variable domain of TCR clone 292246 (TRBV20-1, TRBJ1-4)
CSAPGQGLLTNEKLFF

SEQ ID NO: 584493 - protein, 14 aa, Homo sapiens
  CDR3 for alpha chain variable domain of TCR clone 292247 (TRAV23/DV6, TRAJ13)
CAAMYSGGYQKVTF

SEQ ID NO: 584494 - protein, 16 aa, Homo sapiens
  CDR3 for beta chain variable domain of TCR clone 292247 (TRBV19, TRBJ2-2)
CASSAAGTGGTGELFF

SEQ ID NO: 584495 - protein, 11 aa, Homo sapiens
  CDR3 for alpha chain variable domain of TCR clone 292248 (TRAV12-1, TRAJ26)
CVVAYGQTFVF

SEQ ID NO: 584496 - protein, 15 aa, Homo sapiens
  CDR3 for beta chain variable domain of TCR clone 292248 (TRBV12-4, TRBJ2-5)
CASSGTGQAQETQYF

SEQ ID NO: 584497 - protein, 12 aa, Homo sapiens
  CDR3 for alpha chain variable domain of TCR clone 292249 (TRAV25, TRAJ11)
CAGASGYSTLTF

SEQ ID NO: 584498 - protein, 16 aa, Homo sapiens
  CDR3 for beta chain variable domain of TCR clone 292249 (TRBV15, TRBJ1-2)
CATRRGPRTGGGGYTF

SEQ ID NO: 584499 - protein, 15 aa, Homo sapiens
  CDR3 for alpha chain variable domain of TCR clone 292250 (TRAV21, TRAJ53)
CATLNSVGSNYKLTF

SEQ ID NO: 584500 - protein, 15 aa, Homo sapiens
  CDR3 for beta chain variable domain of TCR clone 292250 (TRBV7-9, TRBJ1-5)
CASSQGHQPNQPQHF

SEQ ID NO: 584501 - protein, 15 aa, Homo sapiens
  CDR3 for alpha chain variable domain of TCR clone 292251 (TRAV19, TRAJ53)
CALSSCGGSNYKLTF

SEQ ID NO: 584502 - protein, 13 aa, Homo sapiens
  CDR3 for beta chain variable domain of TCR clone 292251 (TRBV7-6, TRBJ2-7)
CASSLDHTHEQYF

SEQ ID NO: 584503 - protein, 15 aa, Homo sapiens
  CDR3 for alpha chain variable domain of TCR clone 292252 (TRAV35, TRAJ50)
CAGQLRKTSYAKVIF

SEQ ID NO: 584504 - protein, 12 aa, Homo sapiens
  CDR3 for beta chain variable domain of TCR clone 292252 (TRBV5-1, TRBJ2-5)
CASSLGLGTQYF

SEQ ID NO: 584505 - protein, 14 aa, Homo sapiens
  CDR3 for alpha chain variable domain of TCR clone 292253 (TRAV26-1, TRAJ37)
CIVPSSSNTGKLIF

SEQ ID NO: 584506 - protein, 15 aa, Homo sapiens
  CDR3 for beta chain variable domain of TCR clone 292253 (TRBV9, TRBJ1-6)
CASSVAGTGDSPLHF

SEQ ID NO: 584507 - protein, 14 aa, Homo sapiens
  CDR3 for alpha chain variable domain of TCR clone 292254 (TRAV17, TRAJ49)
CATDARDTGNQFYF

SEQ ID NO: 584508 - protein, 14 aa, Homo sapiens
  CDR3 for beta chain variable domain of TCR clone 292254 (TRBV5-5, TRBJ1-2)
CASRFGQINYGYTF

SEQ ID NO: 584509 - protein, 11 aa, Homo sapiens
  CDR3 for alpha chain variable domain of TCR clone 292255 (TRAV21, TRAJ11)
CAVNGYSTLTF

SEQ ID NO: 584510 - protein, 11 aa, Homo sapiens
  CDR3 for beta chain variable domain of TCR clone 292255 (TRBV11-2, TRBJ2-7)
CASSSDYEHYF

SEQ ID NO: 584511 - protein, 18 aa, Homo sapiens
  CDR3 for alpha chain variable domain of TCR clone 292256 (TRAV20, TRAJ4)
CAVQPYYRFSGGYNKLIF

SEQ ID NO: 584512 - protein, 13 aa, Homo sapiens
  CDR3 for beta chain variable domain of TCR clone 292256 (TRBV19, TRBJ2-3)
CATWDKITDTQYF

SEQ ID NO: 584513 - protein, 13 aa, Homo sapiens
  CDR3 for alpha chain variable domain of TCR clone 292257 (TRAV12-2, TRAJ39)
CAVNNNAGNMLTF

SEQ ID NO: 584514 - protein, 13 aa, Homo sapiens
  CDR3 for beta chain variable domain of TCR clone 292257 (TRBV2, TRBJ1-5)
CAPAGPGNQPQHF

SEQ ID NO: 584515 - protein, 17 aa, Homo sapiens
  CDR3 for alpha chain variable domain of TCR clone 292258 (TRAV3, TRAJ42)
CAVRYRDYGGSKGNLIF

SEQ ID NO: 584516 - protein, 15 aa, Homo sapiens
  CDR3 for beta chain variable domain of TCR clone 292258 (TRBV6-6, TRBJ2-7)
CASSYSYGGSYEQYF

SEQ ID NO: 584517 - protein, 14 aa, Homo sapiens
  CDR3 for alpha chain variable domain of TCR clone 292259 (TRAV12-2, TRAJ13)
CAVKKTGGYQKVTF

SEQ ID NO: 584518 - protein, 15 aa, Homo sapiens
  CDR3 for beta chain variable domain of TCR clone 292259 (TRBV7-9, TRBJ1-6)
CASSSPGRENSPLHF

SEQ ID NO: 584519 - protein, 15 aa, Homo sapiens
  CDR3 for alpha chain variable domain of TCR clone 292260 (TRAV26-1, TRAJ29)
CIVRVEGAGNTPLVF

SEQ ID NO: 584520 - protein, 15 aa, Homo sapiens
  CDR3 for beta chain variable domain of TCR clone 292260 (TRBV7-9, TRBJ1-5)
CASSQVHQPNQPQHF

SEQ ID NO: 584521 - protein, 11 aa, Homo sapiens
  CDR3 for alpha chain variable domain of TCR clone 292261 (TRAV13-1, TRAJ6)
CATLGSYIPTF

SEQ ID NO: 584522 - protein, 12 aa, Homo sapiens
  CDR3 for beta chain variable domain of TCR clone 292261 (TRBV11-2, TRBJ2-1)
CASSPGNNAQFF

SEQ ID NO: 584523 - protein, 12 aa, Homo sapiens
  CDR3 for alpha chain variable domain of TCR clone 292262 (TRAV21, TRAJ29)
CAVTSGNTPLVF

SEQ ID NO: 584524 - protein, 13 aa, Homo sapiens
  CDR3 for beta chain variable domain of TCR clone 292262 (TRBV4-1, TRBJ2-2)
CASSQENTGELFF

SEQ ID NO: 584525 - protein, 14 aa, Homo sapiens
  CDR3 for alpha chain variable domain of TCR clone 292263 (TRAV8-1, TRAJ6)
CAVNASGGSYIPTF

SEQ ID NO: 584526 - protein, 14 aa, Homo sapiens
  CDR3 for beta chain variable domain of TCR clone 292263 (TRBV4-2, TRBJ2-1)
CASGLDRAYNEQFF

SEQ ID NO: 584527 - protein, 14 aa, Homo sapiens
  CDR3 for alpha chain variable domain of TCR clone 292264 (TRAV1-2, TRAJ8)
CAVSEDTGFQKLVF

SEQ ID NO: 584528 - protein, 16 aa, Homo sapiens
  CDR3 for beta chain variable domain of TCR clone 292264 (TRBV28, TRBJ1-4)
CASSPPYRGRSEKLFF

SEQ ID NO: 584529 - protein, 14 aa, Homo sapiens
  CDR3 for alpha chain variable domain of TCR clone 292265 (TRAV21, TRAJ45)
CAVRSGGGADGLTF

SEQ ID NO: 584530 - protein, 15 aa, Homo sapiens
  CDR3 for beta chain variable domain of TCR clone 292265 (TRBV6-1, TRBJ2-4)
CASSEAVWTINIQYF

SEQ ID NO: 584531 - protein, 12 aa, Homo sapiens
  CDR3 for alpha chain variable domain of TCR clone 292266 (TRAV2, TRAJ31)
CAVEDNNARLMF

SEQ ID NO: 584532 - protein, 13 aa, Homo sapiens
  CDR3 for beta chain variable domain of TCR clone 292266 (TRBV10-3, TRBJ1-2)
CAISERDSYGYTF

SEQ ID NO: 584533 - protein, 15 aa, Homo sapiens
  CDR3 for alpha chain variable domain of TCR clone 292267 (TRAV21, TRAJ10)
CAVPLLTGGGNKLTF

SEQ ID NO: 584534 - protein, 20 aa, Homo sapiens
  CDR3 for beta chain variable domain of TCR clone 292267 (TRBV28, TRBJ2-1)
CASTPIGRSPGLAGGNEQFF

SEQ ID NO: 584535 - protein, 15 aa, Homo sapiens
  CDR3 for alpha chain variable domain of TCR clone 292268 (TRAV3, TRAJ5)
CAVRDRKTGRRALTF

SEQ ID NO: 584536 - protein, 14 aa, Homo sapiens
  CDR3 for beta chain variable domain of TCR clone 292268 (TRBV18, TRBJ2-5)
CASSPGVSQETQYF

SEQ ID NO: 584537 - protein, 18 aa, Homo sapiens
  CDR3 for alpha chain variable domain of TCR clone 292269 (TRAV12-3, TRAJ52)
CVMCVGGAGGTSYGKLTF

SEQ ID NO: 584538 - protein, 15 aa, Homo sapiens
  CDR3 for beta chain variable domain of TCR clone 292269 (TRBV27, TRBJ1-6)
CASSFDRGLGSPLHF

SEQ ID NO: 584539 - protein, 11 aa, Homo sapiens
  CDR3 for alpha chain variable domain of TCR clone 292270 (TRAV17, TRAJ49)
CSTDAGNQFYF

SEQ ID NO: 584540 - protein, 16 aa, Homo sapiens
  CDR3 for beta chain variable domain of TCR clone 292270 (TRBV7-2, TRBJ1-2)
CASSPTSGTSLGGYTF

SEQ ID NO: 584541 - protein, 12 aa, Homo sapiens
  CDR3 for alpha chain variable domain of TCR clone 292271 (TRAV29/DV5, TRAJ34)
CAASGNTDKLIF

SEQ ID NO: 584542 - protein, 16 aa, Homo sapiens
  CDR3 for beta chain variable domain of TCR clone 292271 (TRBV12-4, TRBJ1-5)
CASRQSVEGSNQPQHF

SEQ ID NO: 584543 - protein, 17 aa, Homo sapiens
  CDR3 for alpha chain variable domain of TCR clone 292272 (TRAV38-1, TRAJ45)
CAFMKHYMGGGADGLTF

SEQ ID NO: 584544 - protein, 19 aa, Homo sapiens
  CDR3 for beta chain variable domain of TCR clone 292272 (TRBV6-1, TRBJ2-5)
CASSEQGLAGGLYQETQFF

SEQ ID NO: 584545 - protein, 13 aa, Homo sapiens
  CDR3 for alpha chain variable domain of TCR clone 292273 (TRAV8-6, TRAJ49)
CAVITNPGNQFYF

SEQ ID NO: 584546 - protein, 14 aa, Homo sapiens
  CDR3 for beta chain variable domain of TCR clone 292273 (TRBV7-6, TRBJ2-3)
CASSLGTVTDTQYF

SEQ ID NO: 584547 - protein, 15 aa, Homo sapiens
  CDR3 for alpha chain variable domain of TCR clone 292274 (TRAV8-6, TRAJ10)
CAVSDQAGGGNKLTF

SEQ ID NO: 584548 - protein, 15 aa, Homo sapiens
  CDR3 for beta chain variable domain of TCR clone 292274 (TRBV7-9, TRBJ1-4)
CASSRTGGFNEKLFF

SEQ ID NO: 584549 - protein, 12 aa, Homo sapiens
  CDR3 for alpha chain variable domain of TCR clone 292275 (TRAV35, TRAJ54)
RADLQGAQKLVF

SEQ ID NO: 584550 - protein, 16 aa, Homo sapiens
  CDR3 for beta chain variable domain of TCR clone 292275 (TRBV20-1, TRBJ2-6)
CSASSQGYDGANVLTF

SEQ ID NO: 584551 - protein, 15 aa, Homo sapiens
  CDR3 for alpha chain variable domain of TCR clone 292276 (TRAV17, TRAJ57)
CATGPSQGGSEKLVF

SEQ ID NO: 584552 - protein, 16 aa, Homo sapiens
  CDR3 for beta chain variable domain of TCR clone 292276 (TRBV12-4, TRBJ1-5)
CASSRPVGGSKQHQHF

SEQ ID NO: 584553 - protein, 16 aa, Homo sapiens
  CDR3 for alpha chain variable domain of TCR clone 292277 (TRAV30, TRAJ24)
CGTEIVDADSWGQFQI

SEQ ID NO: 584554 - protein, 15 aa, Homo sapiens
  CDR3 for beta chain variable domain of TCR clone 292277 (TRBV20-1, TRBJ2-7)
CSARDRVSGMDEQYF

SEQ ID NO: 584555 - protein, 16 aa, Homo sapiens
  CDR3 for alpha chain variable domain of TCR clone 292278 (TRAV30, TRAJ24)
CGTEIGGADSWGKFQF

SEQ ID NO: 584556 - protein, 15 aa, Homo sapiens
  CDR3 for beta chain variable domain of TCR clone 292278 (TRBV7-9, TRBJ1-4)
CASSARTGGNEKLFF

SEQ ID NO: 584557 - protein, 13 aa, Homo sapiens
  CDR3 for alpha chain variable domain of TCR clone 292279 (TRAV3, TRAJ20)
CCEAFCNDYKLSF

SEQ ID NO: 584558 - protein, 15 aa, Homo sapiens
  CDR3 for beta chain variable domain of TCR clone 292279 (TRBV19, TRBJ2-6)
CASVRRDSRANVLTF

SEQ ID NO: 584559 - protein, 13 aa, Homo sapiens
  CDR3 for alpha chain variable domain of TCR clone 292280 (TRAV8-3, TRAJ28)
YAVGAVGSYQLTF

SEQ ID NO: 584560 - protein, 12 aa, Homo sapiens
  CDR3 for beta chain variable domain of TCR clone 292280 (TRBV11-2, TRBJ2-2)
CASSLGGGELFF

SEQ ID NO: 584561 - protein, 15 aa, Homo sapiens
  CDR3 for alpha chain variable domain of TCR clone 292281 (TRAV17, TRAJ4)
CATGTWSGGYNKLIF

SEQ ID NO: 584562 - protein, 12 aa, Homo sapiens
  CDR3 for beta chain variable domain of TCR clone 292281 (TRBV11-2, TRBJ2-2)
CASSLGGGELFF

SEQ ID NO: 584563 - protein, 16 aa, Homo sapiens
  CDR3 for alpha chain variable domain of TCR clone 292282 (TRAV13-2, TRAJ37)
CAENIRGSSNTGKLIF

SEQ ID NO: 584564 - protein, 15 aa, Homo sapiens
  CDR3 for beta chain variable domain of TCR clone 292282 (TRBV5-1, TRBJ2-7)
CASSPQGRPHDEQYF

SEQ ID NO: 584565 - protein, 14 aa, Homo sapiens
  CDR3 for alpha chain variable domain of TCR clone 292283 (TRAV12-2, TRAJ40)
CAVKIPSGTYKYIF

SEQ ID NO: 584566 - protein, 17 aa, Homo sapiens
  CDR3 for beta chain variable domain of TCR clone 292283 (TRBV10-3, TRBJ2-4)
CTSVPSVNKGSKNNQYF

SEQ ID NO: 584567 - protein, 11 aa, Homo sapiens
  CDR3 for alpha chain variable domain of TCR clone 292284 (TRAV13-1, TRAJ9)
CAASEGWRLQN

SEQ ID NO: 584568 - protein, 12 aa, Homo sapiens
  CDR3 for beta chain variable domain of TCR clone 292284 (TRBV7-9, TRBJ2-7)
CASSLEGYEQYF

SEQ ID NO: 584569 - protein, 13 aa, Homo sapiens
  CDR3 for alpha chain variable domain of TCR clone 292285 (TRAV21, TRAJ27)
CAARPGNAGKSTF

SEQ ID NO: 584570 - protein, 14 aa, Homo sapiens
  CDR3 for beta chain variable domain of TCR clone 292285 (TRBV19, TRBJ2-1)
CASGRSTQYNEQFF

SEQ ID NO: 584571 - protein, 15 aa, Homo sapiens
  CDR3 for alpha chain variable domain of TCR clone 292286 (TRAV8-3, TRAJ45)
CASSYSGGGADGLTF

SEQ ID NO: 584572 - protein, 15 aa, Homo sapiens
  CDR3 for beta chain variable domain of TCR clone 292286 (TRBV27, TRBJ2-1)
CASSNGGGSSNEQSF

SEQ ID NO: 584573 - protein, 14 aa, Homo sapiens
  CDR3 for alpha chain variable domain of TCR clone 292287 (TRAV17, TRAJ6)
CATNPAGGSYIPTF

SEQ ID NO: 584574 - protein, 15 aa, Homo sapiens
  CDR3 for beta chain variable domain of TCR clone 292287 (TRBV2, TRBJ2-5)
CASSGTVAAGETRYF

SEQ ID NO: 584575 - protein, 12 aa, Homo sapiens
  CDR3 for alpha chain variable domain of TCR clone 292288 (TRAV2, TRAJ10)
CASTGGGNKLTF

SEQ ID NO: 584576 - protein, 16 aa, Homo sapiens
  CDR3 for beta chain variable domain of TCR clone 292288 (TRBV7-9, TRBJ2-5)
CASSPSGQGVKGTQYF

SEQ ID NO: 584577 - protein, 12 aa, Homo sapiens
  CDR3 for alpha chain variable domain of TCR clone 292289 (TRAV12-3, TRAJ17)
CPMTLTGNKLTF

SEQ ID NO: 584578 - protein, 15 aa, Homo sapiens
  CDR3 for beta chain variable domain of TCR clone 292289 (TRBV11-2, TRBJ2-2)
CASSSDRVDAGELFF

SEQ ID NO: 584579 - protein, 13 aa, Homo sapiens
  CDR3 for alpha chain variable domain of TCR clone 292290 (TRAV8-3, TRAJ28)
CAVGAVGSYQLTF

SEQ ID NO: 584580 - protein, 14 aa, Homo sapiens
  CDR3 for beta chain variable domain of TCR clone 292290 (TRBV7-2, TRBJ2-5)
CASSPGTGKGTQYF

SEQ ID NO: 584581 - protein, 12 aa, Homo sapiens
  CDR3 for alpha chain variable domain of TCR clone 292291 (TRAV3, TRAJ31)
CAVRPRGPRLMF

SEQ ID NO: 584582 - protein, 13 aa, Homo sapiens
  CDR3 for beta chain variable domain of TCR clone 292291 (TRBV10-3, TRBJ2-7)
CASKLAVNYEQYF

SEQ ID NO: 584583 - protein, 12 aa, Homo sapiens
  CDR3 for alpha chain variable domain of TCR clone 292292 (TRAV13-2, TRAJ23)
FAERHRGGKLIF

SEQ ID NO: 584584 - protein, 13 aa, Homo sapiens
  CDR3 for beta chain variable domain of TCR clone 292292 (TRBV2, TRBJ1-6)
CADSGSYNSPLHF

SEQ ID NO: 584585 - protein, 12 aa, Homo sapiens
  CDR3 for alpha chain variable domain of TCR clone 292293 (TRAV13-1, TRAJ15)
CATSQAGTALIF

SEQ ID NO: 584586 - protein, 18 aa, Homo sapiens
  CDR3 for beta chain variable domain of TCR clone 292293 (TRBV7-9, TRBJ2-3)
CASSLPINGQISTDTQYF

SEQ ID NO: 584587 - protein, 19 aa, Homo sapiens
  CDR3 for alpha chain variable domain of TCR clone 292294 (TRAV1-2, TRAJ26)
CLLPLCCERPDNYGQNFVF

SEQ ID NO: 584588 - protein, 16 aa, Homo sapiens
  CDR3 for beta chain variable domain of TCR clone 292294 (TRBV4-3, TRBJ2-1)
CASSPALDRGVNEQFF

SEQ ID NO: 584589 - protein, 13 aa, Homo sapiens
  CDR3 for alpha chain variable domain of TCR clone 292295 (TRAV20, TRAJ45)
CAVKKRRCRRTHL

SEQ ID NO: 584590 - protein, 14 aa, Homo sapiens
  CDR3 for beta chain variable domain of TCR clone 292295 (TRBV15, TRBJ2-5)
CTTSIGGLGETQYF

SEQ ID NO: 584591 - protein, 20 aa, Homo sapiens
  CDR3 for alpha chain variable domain of TCR clone 292296 (TRAV25, TRAJ21)
TATQTTDVGTYPLSFNKFYF

SEQ ID NO: 584592 - protein, 14 aa, Homo sapiens
  CDR3 for beta chain variable domain of TCR clone 292296 (TRBV6-1, TRBJ2-1)
CASAEDGFYNEQFF

SEQ ID NO: 584593 - protein, 14 aa, Homo sapiens
  CDR3 for alpha chain variable domain of TCR clone 292297 (TRAV12-1, TRAJ42)
CVVIYGGSQGNLIF

SEQ ID NO: 584594 - protein, 13 aa, Homo sapiens
  CDR3 for beta chain variable domain of TCR clone 292297 (TRBV18, TRBJ2-5)
CASSPPCKETQYF

SEQ ID NO: 584595 - protein, 14 aa, Homo sapiens
  CDR3 for alpha chain variable domain of TCR clone 292298 (TRAV29/DV5, TRAJ45)
CAASSRGGADGLTF

SEQ ID NO: 584596 - protein, 15 aa, Homo sapiens
  CDR3 for beta chain variable domain of TCR clone 292298 (TRBV9, TRBJ1-6)
CASSVAGTGDSPLHF

SEQ ID NO: 584597 - protein, 16 aa, Homo sapiens
  CDR3 for alpha chain variable domain of TCR clone 292299 (TRAV30, TRAJ24)
CGTEIVDADSWGKFQF

SEQ ID NO: 584598 - protein, 14 aa, Homo sapiens
  CDR3 for beta chain variable domain of TCR clone 292299 (TRBV19, TRBJ2-1)
CASPTFVWSGEQFF

SEQ ID NO: 584599 - protein, 17 aa, Homo sapiens
  CDR3 for alpha chain variable domain of TCR clone 292300 (TRAV3, TRAJ6)
CAVRDGPRAGGSSIPKF

SEQ ID NO: 584600 - protein, 14 aa, Homo sapiens
  CDR3 for beta chain variable domain of TCR clone 292300 (TRBV7-2, TRBJ2-7)
CASSPKTSCYEQYF

SEQ ID NO: 584601 - protein, 15 aa, Homo sapiens
  CDR3 for alpha chain variable domain of TCR clone 292301 (TRAV17, TRAJ57)
CATGPSQGGSEKLVF

SEQ ID NO: 584602 - protein, 14 aa, Homo sapiens
  CDR3 for beta chain variable domain of TCR clone 292301 (TRBV4-1, TRBJ2-7)
CASSPVAGGDEQYF

SEQ ID NO: 584603 - protein, 11 aa, Homo sapiens
  CDR3 for alpha chain variable domain of TCR clone 292302 (TRAV13-2, TRAJ31)
CAENMDARLMF

SEQ ID NO: 584604 - protein, 14 aa, Homo sapiens
  CDR3 for beta chain variable domain of TCR clone 292302 (TRBV7-8, TRBJ2-3)
CASSLEAGTDTQYF

SEQ ID NO: 584605 - protein, 13 aa, Homo sapiens
  CDR3 for alpha chain variable domain of TCR clone 292303 (TRAV20, TRAJ37)
CAGCSSNPGKLIF

SEQ ID NO: 584606 - protein, 14 aa, Homo sapiens
  CDR3 for beta chain variable domain of TCR clone 292303 (TRBV20-1, TRBJ2-5)
CSARDGRAGETQYF

SEQ ID NO: 584607 - protein, 17 aa, Homo sapiens
  CDR3 for alpha chain variable domain of TCR clone 292304 (TRAV12-1, TRAJ42)
CVVMRMNYGGSQGNLIF

SEQ ID NO: 584608 - protein, 13 aa, Homo sapiens
  CDR3 for beta chain variable domain of TCR clone 292304 (TRBV7-2, TRBJ1-1)
CASSLARTAEAFF

SEQ ID NO: 584609 - protein, 16 aa, Homo sapiens
  CDR3 for alpha chain variable domain of TCR clone 292305 (TRAV3, TRAJ37)
CDVRPHGSGNTVKLIF

SEQ ID NO: 584610 - protein, 17 aa, Homo sapiens
  CDR3 for beta chain variable domain of TCR clone 292305 (TRBV7-2, TRBJ2-7)
CASSFETSGSTSSTSGR

SEQ ID NO: 584611 - protein, 14 aa, Homo sapiens
  CDR3 for alpha chain variable domain of TCR clone 292306 (TRAV12-3, TRAJ57)
CAMSAWGGSEKLVF

SEQ ID NO: 584612 - protein, 14 aa, Homo sapiens
  CDR3 for beta chain variable domain of TCR clone 292306 (TRBV7-8, TRBJ2-7)
CASSARDRVYEQYF

SEQ ID NO: 584613 - protein, 17 aa, Homo sapiens
  CDR3 for alpha chain variable domain of TCR clone 292307 (TRAV20, TRAJ28)
CAVQGGYSGAGSYQLTS

SEQ ID NO: 584614 - protein, 15 aa, Homo sapiens
  CDR3 for beta chain variable domain of TCR clone 292307 (TRBV7-2, TRBJ2-7)
CASSLSSGRTYEQYF

SEQ ID NO: 584615 - protein, 15 aa, Homo sapiens
  CDR3 for alpha chain variable domain of TCR clone 292308 (TRAV13-1, TRAJ5)
CAVYIRYTGRRALTF

SEQ ID NO: 584616 - protein, 16 aa, Homo sapiens
  CDR3 for beta chain variable domain of TCR clone 292308 (TRBV12-4, TRBJ2-1)
CASTEQGMDRSNEQFF

SEQ ID NO: 584617 - protein, 16 aa, Homo sapiens
  CDR3 for alpha chain variable domain of TCR clone 292309 (TRAV21, TRAJ17)
CAVRPGEDAAGNKLTF

SEQ ID NO: 584618 - protein, 16 aa, Homo sapiens
  CDR3 for beta chain variable domain of TCR clone 292309 (TRBV2, TRBJ2-7)
CASSEPWTGPSYEQYF

SEQ ID NO: 584619 - protein, 14 aa, Homo sapiens
  CDR3 for alpha chain variable domain of TCR clone 292310 (TRAV12-3, TRAJ10)
SHLPLTGGGNKLTF

SEQ ID NO: 584620 - protein, 15 aa, Homo sapiens
  CDR3 for beta chain variable domain of TCR clone 292310 (TRBV27, TRBJ1-5)
CASRLGTGFDQPQHF

SEQ ID NO: 584621 - protein, 14 aa, Homo sapiens
  CDR3 for alpha chain variable domain of TCR clone 292311 (TRAV2, TRAJ20)
CAVDLRKHDYKLSL

SEQ ID NO: 584622 - protein, 13 aa, Homo sapiens
  CDR3 for beta chain variable domain of TCR clone 292311 (TRBV7-2, TRBJ2-2)
CASSLAATGELFF

SEQ ID NO: 584623 - protein, 14 aa, Homo sapiens
  CDR3 for alpha chain variable domain of TCR clone 292312 (TRAV1-1, TRAJ5)
CAVRDGAGRRALTS

SEQ ID NO: 584624 - protein, 14 aa, Homo sapiens
  CDR3 for beta chain variable domain of TCR clone 292312 (TRBV28, TRBJ2-1)
CASSYYTAYNEQFF

SEQ ID NO: 584625 - protein, 14 aa, Homo sapiens
  CDR3 for alpha chain variable domain of TCR clone 292313 (TRAV38-1, TRAJ45)
CAYYSGGGADGLPF

SEQ ID NO: 584626 - protein, 13 aa, Homo sapiens
  CDR3 for beta chain variable domain of TCR clone 292313 (TRBV29-1, TRBJ1-1)
CSVGDSRNTEAFF

SEQ ID NO: 584627 - protein, 15 aa, Homo sapiens
  CDR3 for alpha chain variable domain of TCR clone 292314 (TRAV12-1, TRAJ44)
CVADLPTGTASKLTF

SEQ ID NO: 584628 - protein, 15 aa, Homo sapiens
  CDR3 for beta chain variable domain of TCR clone 292314 (TRBV7-2, TRBJ2-1)
CASSLASGRVNEQFF

SEQ ID NO: 584629 - protein, 15 aa, Homo sapiens
  CDR3 for alpha chain variable domain of TCR clone 292315 (TRAV3, TRAJ36)
CAVRASQTGANNHFF

SEQ ID NO: 584630 - protein, 13 aa, Homo sapiens
  CDR3 for beta chain variable domain of TCR clone 292315 (TRBV10-3, TRBJ1-2)
CAISERDSYGYTF

SEQ ID NO: 584631 - protein, 13 aa, Homo sapiens
  CDR3 for alpha chain variable domain of TCR clone 292316 (TRAV12-3, TRAJ47)
CAMKKVYGNKLVF

SEQ ID NO: 584632 - protein, 15 aa, Homo sapiens
  CDR3 for beta chain variable domain of TCR clone 292316 (TRBV20-1, TRBJ2-7)
CSARDRVSGMDEQYF

SEQ ID NO: 584633 - protein, 13 aa, Homo sapiens
  CDR3 for alpha chain variable domain of TCR clone 292317 (TRAV21, TRAJ49)
CAVRQSTGNQFYF

SEQ ID NO: 584634 - protein, 12 aa, Homo sapiens
  CDR3 for beta chain variable domain of TCR clone 292317 (TRBV11-2, TRBJ2-2)
CASSLGGGELFF

SEQ ID NO: 584635 - protein, 17 aa, Homo sapiens
  CDR3 for alpha chain variable domain of TCR clone 292318 (TRAV26-1, TRAJ53)
CIVRVDDSGGSNYKLTF

SEQ ID NO: 584636 - protein, 14 aa, Homo sapiens
  CDR3 for beta chain variable domain of TCR clone 292318 (TRBV7-6, TRBJ2-3)
CASSLGTVTDTQYF

SEQ ID NO: 584637 - protein, 15 aa, Homo sapiens
  CDR3 for alpha chain variable domain of TCR clone 292319 (TRAV3, TRAJ3)
CFERPRYSSASKIIF

SEQ ID NO: 584638 - protein, 16 aa, Homo sapiens
  CDR3 for beta chain variable domain of TCR clone 292319 (TRBV19, TRBJ1-5)
CASSIDRGGPRQPQHF

SEQ ID NO: 584639 - protein, 17 aa, Homo sapiens
  CDR3 for alpha chain variable domain of TCR clone 292320 (TRAV4, TRAJ13)
CLAGVQGSSGGYQKVTF

SEQ ID NO: 584640 - protein, 18 aa, Homo sapiens
  CDR3 for beta chain variable domain of TCR clone 292320 (TRBV15, TRBJ2-3)
CATSRDGARSWDTDTQYF

SEQ ID NO: 584641 - protein, 13 aa, Homo sapiens
  CDR3 for alpha chain variable domain of TCR clone 292321 (TRAV21, TRAJ27)
CAARPGNAGKSTF

SEQ ID NO: 584642 - protein, 13 aa, Homo sapiens
  CDR3 for beta chain variable domain of TCR clone 292321 (TRBV13, TRBJ2-1)
CASILGGRGEHFF

SEQ ID NO: 584643 - protein, 13 aa, Homo sapiens
  CDR3 for alpha chain variable domain of TCR clone 292322 (TRAV27, TRAJ53)
CAGQGGSIYKLTF

SEQ ID NO: 584644 - protein, 13 aa, Homo sapiens
  CDR3 for beta chain variable domain of TCR clone 292322 (TRBV29-1, TRBJ1-1)
CSVESGFGTEAFF

SEQ ID NO: 584645 - protein, 14 aa, Homo sapiens
  CDR3 for alpha chain variable domain of TCR clone 292323 (TRAV13-1, TRAJ35)
CAASKGGFGNVLHC

SEQ ID NO: 584646 - protein, 12 aa, Homo sapiens
  CDR3 for beta chain variable domain of TCR clone 292323 (TRBV7-3, TRBJ1-1)
CQQPGLGAEAFF

SEQ ID NO: 584647 - protein, 14 aa, Homo sapiens
  CDR3 for alpha chain variable domain of TCR clone 292324 (TRAV12-2, TRAJ37)
CAVILSSNTGKLIF

SEQ ID NO: 584648 - protein, 15 aa, Homo sapiens
  CDR3 for beta chain variable domain of TCR clone 292324 (TRBV7-3, TRBJ2-2)
CASSETGQGTGELFF

SEQ ID NO: 584649 - protein, 14 aa, Homo sapiens
  CDR3 for alpha chain variable domain of TCR clone 292325 (TRAV8-3, TRAJ4)
CAVGAAGGYNKLIF

SEQ ID NO: 584650 - protein, 19 aa, Homo sapiens
  CDR3 for beta chain variable domain of TCR clone 292325 (TRBV7-2, TRBJ2-3)
CASSFLSRNWGGGTDTQYF

SEQ ID NO: 584651 - protein, 14 aa, Homo sapiens
  CDR3 for alpha chain variable domain of TCR clone 292326 (TRAV26-1, TRAJ38)
CIADNAGNNRKLIW

SEQ ID NO: 584652 - protein, 17 aa, Homo sapiens
  CDR3 for beta chain variable domain of TCR clone 292326 (TRBV7-9, TRBJ2-3)
CASSPTVAGDLTGTQYF

SEQ ID NO: 584653 - protein, 15 aa, Homo sapiens
  CDR3 for alpha chain variable domain of TCR clone 292327 (TRAV29/DV5, TRAJ40)
CAASAQGSGTYKYIF

SEQ ID NO: 584654 - protein, 16 aa, Homo sapiens
  CDR3 for beta chain variable domain of TCR clone 292327 (TRBV13, TRBJ2-2)
CASSPRTGEHTGELFF

SEQ ID NO: 584655 - protein, 15 aa, Homo sapiens
  CDR3 for alpha chain variable domain of TCR clone 292328 (TRAV35, TRAJ42)
CAVQGYGGSQGNLIF

SEQ ID NO: 584656 - protein, 13 aa, Homo sapiens
  CDR3 for beta chain variable domain of TCR clone 292328 (TRBV7-2, TRBJ1-1)
CASSLVQGAEAFF

SEQ ID NO: 584657 - protein, 11 aa, Homo sapiens
  CDR3 for alpha chain variable domain of TCR clone 292329 (TRAV21, TRAJ11)
CAVNGYSTLTF

SEQ ID NO: 584658 - protein, 13 aa, Homo sapiens
  CDR3 for beta chain variable domain of TCR clone 292329 (TRBV27, TRBJ1-4)
CASSLMGDEKLFF

SEQ ID NO: 584659 - protein, 15 aa, Homo sapiens
  CDR3 for alpha chain variable domain of TCR clone 292330 (TRAV35, TRAJ40)
CAGQLGTSGAYKYIF

SEQ ID NO: 584660 - protein, 14 aa, Homo sapiens
  CDR3 for beta chain variable domain of TCR clone 292330 (TRBV7-2, TRBJ2-7)
CASSPKTSFYEQYF

SEQ ID NO: 584661 - protein, 11 aa, Homo sapiens
  CDR3 for alpha chain variable domain of TCR clone 292331 (TRAV2, TRAJ13)
CASVGYQKVTF

SEQ ID NO: 584662 - protein, 13 aa, Homo sapiens
  CDR3 for beta chain variable domain of TCR clone 292331 (TRBV20-1, TRBJ1-1)
CSTPLGGGTEAFF

SEQ ID NO: 584663 - protein, 15 aa, Homo sapiens
  CDR3 for alpha chain variable domain of TCR clone 292332 (TRAV26-1, TRAJ44)
CIVRSNTGTASKLTF

SEQ ID NO: 584664 - protein, 15 aa, Homo sapiens
  CDR3 for beta chain variable domain of TCR clone 292332 (TRBV7-3, TRBJ2-1)
CASSSLAGVHNEQFF

SEQ ID NO: 584665 - protein, 14 aa, Homo sapiens
  CDR3 for alpha chain variable domain of TCR clone 292333 (TRAV12-3, TRAJ58)
CALSTETSGSRLTF

SEQ ID NO: 584666 - protein, 15 aa, Homo sapiens
  CDR3 for beta chain variable domain of TCR clone 292333 (TRBV11-3, TRBJ2-3)
CASLKDGREGDTQYF

SEQ ID NO: 584667 - protein, 11 aa, Homo sapiens
  CDR3 for alpha chain variable domain of TCR clone 292334 (TRAV3, TRAJ21)
RAVGNFNKFYF

SEQ ID NO: 584668 - protein, 16 aa, Homo sapiens
  CDR3 for beta chain variable domain of TCR clone 292334 (TRBV19, TRBJ2-1)
RASSKAGPSSYNEQFF

SEQ ID NO: 584669 - protein, 13 aa, Homo sapiens
  CDR3 for alpha chain variable domain of TCR clone 292335 (TRAV12-1, TRAJ15)
CVVTNQAGTALIF

SEQ ID NO: 584670 - protein, 15 aa, Homo sapiens
  CDR3 for beta chain variable domain of TCR clone 292335 (TRBV7-2, TRBJ1-2)
CASSLVSGGDYGYTF

SEQ ID NO: 584671 - protein, 14 aa, Homo sapiens
  CDR3 for alpha chain variable domain of TCR clone 292336 (TRAV12-2, TRAJ45)
CAVYSGGGADGLTF

SEQ ID NO: 584672 - protein, 15 aa, Homo sapiens
  CDR3 for beta chain variable domain of TCR clone 292336 (TRBV4-1, TRBJ1-4)
CASSDTGGTNEELFF

SEQ ID NO: 584673 - protein, 15 aa, Homo sapiens
  CDR3 for alpha chain variable domain of TCR clone 292337 (TRAV12-1, TRAJ5)
CVVNMLETGRRALTF

SEQ ID NO: 584674 - protein, 16 aa, Homo sapiens
  CDR3 for beta chain variable domain of TCR clone 292337 (TRBV12-5, TRBJ2-5)
CASGPRTNGNQETQYF

SEQ ID NO: 584675 - protein, 16 aa, Homo sapiens
  CDR3 for alpha chain variable domain of TCR clone 292338 (TRAV12-3, TRAJ45)
CAMGWGSGGGADGLTF

SEQ ID NO: 584676 - protein, 18 aa, Homo sapiens
  CDR3 for beta chain variable domain of TCR clone 292338 (TRBV12-4, TRBJ2-2)
CASNLVAGTRGRTGELFF

SEQ ID NO: 584677 - protein, 14 aa, Homo sapiens
  CDR3 for alpha chain variable domain of TCR clone 292339 (TRAV26-1, TRAJ38)
CIADNAGNNRKLIW

SEQ ID NO: 584678 - protein, 12 aa, Homo sapiens
  CDR3 for beta chain variable domain of TCR clone 292339 (TRBV5-1, TRBJ2-7)
CASSVRGYEQYF

SEQ ID NO: 584679 - protein, 14 aa, Homo sapiens
  CDR3 for alpha chain variable domain of TCR clone 292340 (TRAV12-2, TRAJ5)
CAVNRSTGRRALTF

SEQ ID NO: 584680 - protein, 12 aa, Homo sapiens
  CDR3 for beta chain variable domain of TCR clone 292340 (TRBV19, TRBJ1-5)
CASSIAQQPQLF

SEQ ID NO: 584681 - protein, 13 aa, Homo sapiens
  CDR3 for alpha chain variable domain of TCR clone 292341 (TRAV12-2, TRAJ20)
CAVYPSNDYKLSF

SEQ ID NO: 584682 - protein, 20 aa, Homo sapiens
  CDR3 for beta chain variable domain of TCR clone 292341 (TRBV20-1, TRBJ2-1)
CSARPYSVAGGPSYYNEQFF

SEQ ID NO: 584683 - protein, 12 aa, Homo sapiens
  CDR3 for alpha chain variable domain of TCR clone 292342 (TRAV3, TRAJ31)
CAVRPRCPRLMF

SEQ ID NO: 584684 - protein, 17 aa, Homo sapiens
  CDR3 for beta chain variable domain of TCR clone 292342 (TRBV7-9, TRBJ1-5)
CASSASQGGYSNQPQHF

SEQ ID NO: 584685 - protein, 16 aa, Homo sapiens
  CDR3 for alpha chain variable domain of TCR clone 292343 (TRAV30, TRAJ24)
CGTEIVDADSWGKFQF

SEQ ID NO: 584686 - protein, 12 aa, Homo sapiens
  CDR3 for beta chain variable domain of TCR clone 292343 (TRBV11-2, TRBJ2-2)
CASSLHTGELFF

SEQ ID NO: 584687 - protein, 12 aa, Homo sapiens
  CDR3 for alpha chain variable domain of TCR clone 292344 (TRAV21, TRAJ33)
CAKMDSNYQLIW

SEQ ID NO: 584688 - protein, 15 aa, Homo sapiens
  CDR3 for beta chain variable domain of TCR clone 292344 (TRBV4-2, TRBJ2-6)
CASSLQGTGANDLTF

SEQ ID NO: 584689 - protein, 18 aa, Homo sapiens
  CDR3 for alpha chain variable domain of TCR clone 292345 (TRAV26-2, TRAJ45)
CILRVDKYSGGGADGLTF

SEQ ID NO: 584690 - protein, 17 aa, Homo sapiens
  CDR3 for beta chain variable domain of TCR clone 292345 (TRBV12-4, TRBJ2-3)
CASSGPGLAGGADTQYF

SEQ ID NO: 584691 - protein, 14 aa, Homo sapiens
  CDR3 for alpha chain variable domain of TCR clone 292346 (TRAV2, TRAJ9)
CAGEDRSGGFKTIF

SEQ ID NO: 584692 - protein, 14 aa, Homo sapiens
  CDR3 for beta chain variable domain of TCR clone 292346 (TRBV20-1, TRBJ2-1)
CSAQIGGSANEQFF

SEQ ID NO: 584693 - protein, 13 aa, Homo sapiens
  CDR3 for alpha chain variable domain of TCR clone 292347 (TRAV12-2, TRAJ42)
CAVKRGSQGNLIF

SEQ ID NO: 584694 - protein, 13 aa, Homo sapiens
  CDR3 for beta chain variable domain of TCR clone 292347 (TRBV7-9, TRBJ2-3)
CASSPGSTDTQYV

SEQ ID NO: 584695 - protein, 13 aa, Homo sapiens
  CDR3 for alpha chain variable domain of TCR clone 292348 (TRAV1-1, TRAJ9)
CAAKNTGGFKTIF

SEQ ID NO: 584696 - protein, 12 aa, Homo sapiens
  CDR3 for beta chain variable domain of TCR clone 292348 (TRBV11-2, TRBJ2-2)
CASSLPTGELFF

SEQ ID NO: 584697 - protein, 13 aa, Homo sapiens
  CDR3 for alpha chain variable domain of TCR clone 292349 (TRAV2, TRAJ40)
CAVVTSGTCKYIF

SEQ ID NO: 584698 - protein, 14 aa, Homo sapiens
  CDR3 for beta chain variable domain of TCR clone 292349 (TRBV19, TRBJ2-3)
CASSAPRGTDTQYL

SEQ ID NO: 584699 - protein, 14 aa, Homo sapiens
  CDR3 for alpha chain variable domain of TCR clone 292350 (TRAV35, TRAJ22)
CAGLRPGSARQLTF

SEQ ID NO: 584700 - protein, 15 aa, Homo sapiens
  CDR3 for beta chain variable domain of TCR clone 292350 (TRBV27, TRBJ2-3)
CASSLGLAATDTQYF

SEQ ID NO: 584701 - protein, 14 aa, Homo sapiens
  CDR3 for alpha chain variable domain of TCR clone 292351 (TRAV21, TRAJ38)
CAVANAGNNRKLIW

SEQ ID NO: 584702 - protein, 12 aa, Homo sapiens
  CDR3 for beta chain variable domain of TCR clone 292351 (TRBV7-8, TRBJ2-7)
CASSLGDREQYF

SEQ ID NO: 584703 - protein, 14 aa, Homo sapiens
  CDR3 for alpha chain variable domain of TCR clone 292352 (TRAV12-3, TRAJ9)
CAMSVETAGFKTIF

SEQ ID NO: 584704 - protein, 13 aa, Homo sapiens
  CDR3 for beta chain variable domain of TCR clone 292352 (TRBV2, TRBJ1-5)
CASSVGWDQPQHF

SEQ ID NO: 584705 - protein, 16 aa, Homo sapiens
  CDR3 for alpha chain variable domain of TCR clone 292353 (TRAV30, TRAJ24)
CGTEIVDADSWGKFQF

SEQ ID NO: 584706 - protein, 16 aa, Homo sapiens
  CDR3 for beta chain variable domain of TCR clone 292353 (TRBV19, TRBJ1-5)
CASSIDRGGPRQPQHF

SEQ ID NO: 584707 - protein, 15 aa, Homo sapiens
  CDR3 for alpha chain variable domain of TCR clone 292354 (TRAV26-1, TRAJ29)
CIVRVEGSGNTPLVS

SEQ ID NO: 584708 - protein, 15 aa, Homo sapiens
  CDR3 for beta chain variable domain of TCR clone 292354 (TRBV7-9, TRBJ1-5)
CARSQGHQPNQPQHF

SEQ ID NO: 584709 - protein, 16 aa, Homo sapiens
  CDR3 for alpha chain variable domain of TCR clone 292355 (TRAV30, TRAJ24)
CCTEIVDADSWGKFQF

SEQ ID NO: 584710 - protein, 12 aa, Homo sapiens
  CDR3 for beta chain variable domain of TCR clone 292355 (TRBV11-2, TRBJ2-2)
CASSLGGGELFF

SEQ ID NO: 584711 - protein, 15 aa, Homo sapiens
  CDR3 for alpha chain variable domain of TCR clone 292356 (TRAV8-3, TRAJ45)
CASSYSGGGADGLTF

SEQ ID NO: 584712 - protein, 17 aa, Homo sapiens
  CDR3 for beta chain variable domain of TCR clone 292356 (TRBV28, TRBJ2-7)
CASSPGLAGGDSSEQYF

SEQ ID NO: 584713 - protein, 15 aa, Homo sapiens
  CDR3 for alpha chain variable domain of TCR clone 292357 (TRAV13-1, TRAJ27)
CAASGGNTHAGKSTF

SEQ ID NO: 584714 - protein, 15 aa, Homo sapiens
  CDR3 for beta chain variable domain of TCR clone 292357 (TRBV12-4, TRBJ1-5)
CASTRQGSGNQPQHF

SEQ ID NO: 584715 - protein, 15 aa, Homo sapiens
  CDR3 for alpha chain variable domain of TCR clone 292358 (TRAV12-2, TRAJ43)
CAFDMRFGAGTRLTG

SEQ ID NO: 584716 - protein, 16 aa, Homo sapiens
  CDR3 for beta chain variable domain of TCR clone 292358 (TRBV20-1, TRBJ1-4)
CSAPGQGLLTNEKLFF

SEQ ID NO: 584717 - protein, 12 aa, Homo sapiens
  CDR3 for alpha chain variable domain of TCR clone 292359 (TRAV2, TRAJ29)
CAVDSGNIPLVF

SEQ ID NO: 584718 - protein, 14 aa, Homo sapiens
  CDR3 for beta chain variable domain of TCR clone 292359 (TRBV7-8, TRBJ2-7)
CASSLRGSSYEQYF

SEQ ID NO: 584719 - protein, 15 aa, Homo sapiens
  CDR3 for alpha chain variable domain of TCR clone 292360 (TRAV26-1, TRAJ40)
CIVSFATSGTYKYIF

SEQ ID NO: 584720 - protein, 14 aa, Homo sapiens
  CDR3 for beta chain variable domain of TCR clone 292360 (TRBV6-1, TRBJ1-3)
CASVQGGGGNTIYF

SEQ ID NO: 584721 - protein, 14 aa, Homo sapiens
  CDR3 for alpha chain variable domain of TCR clone 292361 (TRAV2, TRAJ9)
CAVEDRSGGFKTIF

SEQ ID NO: 584722 - protein, 11 aa, Homo sapiens
  CDR3 for beta chain variable domain of TCR clone 292361 (TRBV7-9, TRBJ2-5)
CASSLGETHYF

SEQ ID NO: 584723 - protein, 12 aa, Homo sapiens
  CDR3 for alpha chain variable domain of TCR clone 292362 (TRAV3, TRAJ39)
CAVIEWSNMLTV

SEQ ID NO: 584724 - protein, 14 aa, Homo sapiens
  CDR3 for beta chain variable domain of TCR clone 292362 (TRBV7-8, TRBJ2-3)
CASSFPDGQDTQYF

SEQ ID NO: 584725 - protein, 14 aa, Homo sapiens
  CDR3 for alpha chain variable domain of TCR clone 292363 (TRAV1-2, TRAJ16)
CSVNRFSDGQKLLF

SEQ ID NO: 584726 - protein, 15 aa, Homo sapiens
  CDR3 for beta chain variable domain of TCR clone 292363 (TRBV5-1, TRBJ2-2)
CASSSQGGNTGELFF

SEQ ID NO: 584727 - protein, 16 aa, Homo sapiens
  CDR3 for alpha chain variable domain of TCR clone 292364 (TRAV3, TRAJ10)
CAVRDMRAGGGNKLTF

SEQ ID NO: 584728 - protein, 15 aa, Homo sapiens
  CDR3 for beta chain variable domain of TCR clone 292364 (TRBV11-2, TRBJ1-6)
CVSTGFGTAVSPLHF

SEQ ID NO: 584729 - protein, 14 aa, Homo sapiens
  CDR3 for alpha chain variable domain of TCR clone 292365 (TRAV3, TRAJ36)
CAVSDGTGANNPFF

SEQ ID NO: 584730 - protein, 16 aa, Homo sapiens
  CDR3 for beta chain variable domain of TCR clone 292365 (TRBV7-3, TRBJ2-5)
CASIQPGGSVQETQYF

SEQ ID NO: 584731 - protein, 12 aa, Homo sapiens
  CDR3 for alpha chain variable domain of TCR clone 292366 (TRAV21, TRAJ49)
SAVSWTGNQFYF

SEQ ID NO: 584732 - protein, 18 aa, Homo sapiens
  CDR3 for beta chain variable domain of TCR clone 292366 (TRBV7-8, TRBJ2-1)
CASSPAEGLAGGLNEQFF

SEQ ID NO: 584733 - protein, 10 aa, Homo sapiens
  CDR3 for alpha chain variable domain of TCR clone 292367 (TRAV30, TRAJ48)
CGIGNEKLTF

SEQ ID NO: 584734 - protein, 12 aa, Homo sapiens
  CDR3 for beta chain variable domain of TCR clone 292367 (TRBV7-2, TRBJ2-5)
CASSQYQETQYF

SEQ ID NO: 584735 - protein, 14 aa, Homo sapiens
  CDR3 for alpha chain variable domain of TCR clone 292368 (TRAV3, TRAJ21)
CAVDSQANFNKFYF

SEQ ID NO: 584736 - protein, 12 aa, Homo sapiens
  CDR3 for beta chain variable domain of TCR clone 292368 (TRBV6-3, TRBJ2-7)
CASSLTPYEQYF

SEQ ID NO: 584737 - protein, 14 aa, Homo sapiens
  CDR3 for alpha chain variable domain of TCR clone 292369 (TRAV35, TRAJ13)
CAGSPSGGYQKVTF

SEQ ID NO: 584738 - protein, 17 aa, Homo sapiens
  CDR3 for beta chain variable domain of TCR clone 292369 (TRBV7-6, TRBJ2-5)
CVSSPGLADPWGETQYF

SEQ ID NO: 584739 - protein, 14 aa, Homo sapiens
  CDR3 for alpha chain variable domain of TCR clone 292370 (TRAV35, TRAJ22)
CAGLRPGSARQLTF

SEQ ID NO: 584740 - protein, 15 aa, Homo sapiens
  CDR3 for beta chain variable domain of TCR clone 292370 (TRBV12-4, TRBJ2-5)
CASSPPTSLQETKYF

SEQ ID NO: 584741 - protein, 15 aa, Homo sapiens
  CDR3 for alpha chain variable domain of TCR clone 292371 (TRAV8-2, TRAJ16)
CVVSDGVSDGQMLLF

SEQ ID NO: 584742 - protein, 14 aa, Homo sapiens
  CDR3 for beta chain variable domain of TCR clone 292371 (TRBV7-3, TRBJ1-1)
CASSLGTGYTEAFF

SEQ ID NO: 584743 - protein, 14 aa, Homo sapiens
  CDR3 for alpha chain variable domain of TCR clone 292372 (TRAV12-3, TRAJ22)
CTMSLFGSARQLTF

SEQ ID NO: 584744 - protein, 11 aa, Homo sapiens
  CDR3 for beta chain variable domain of TCR clone 292372 (TRBV12-4, TRBJ2-2)
CASSAAGELFF

SEQ ID NO: 584745 - protein, 14 aa, Homo sapiens
  CDR3 for alpha chain variable domain of TCR clone 292373 (TRAV1-2, TRAJ8)
CAVRKDTGFQKLVF

SEQ ID NO: 584746 - protein, 16 aa, Homo sapiens
  CDR3 for beta chain variable domain of TCR clone 292373 (TRBV7-3, TRBJ2-2)
CASSLKRGTLSGELFF

SEQ ID NO: 584747 - protein, 12 aa, Homo sapiens
  CDR3 for alpha chain variable domain of TCR clone 292374 (TRAV23/DV6, TRAJ49)
CAAEAPGNQFYF

SEQ ID NO: 584748 - protein, 13 aa, Homo sapiens
  CDR3 for beta chain variable domain of TCR clone 292374 (TRBV9, TRBJ2-7)
CASSASDSYEQYF

SEQ ID NO: 584749 - protein, 14 aa, Homo sapiens
  CDR3 for alpha chain variable domain of TCR clone 292375 (TRAV1-2, TRAJ8)
CAVREDTGFQKLEF

SEQ ID NO: 584750 - protein, 14 aa, Homo sapiens
  CDR3 for beta chain variable domain of TCR clone 292375 (TRBV12-5, TRBJ2-5)
CASGPRTHQETQYF

SEQ ID NO: 584751 - protein, 10 aa, Homo sapiens
  CDR3 for alpha chain variable domain of TCR clone 292376 (TRAV12-3, TRAJ49)
CAMNDDQFYF

SEQ ID NO: 584752 - protein, 16 aa, Homo sapiens
  CDR3 for beta chain variable domain of TCR clone 292376 (TRBV4-2, TRBJ1-1)
CASSQAGFGMNTEAFF

SEQ ID NO: 584753 - protein, 15 aa, Homo sapiens
  CDR3 for alpha chain variable domain of TCR clone 292377 (TRAV16, TRAJ23)
CALSGIYNQGGKLIF

SEQ ID NO: 584754 - protein, 18 aa, Homo sapiens
  CDR3 for beta chain variable domain of TCR clone 292377 (TRBV7-8, TRBJ2-3)
CASSLSWTGGFSIDTQYF

SEQ ID NO: 584755 - protein, 14 aa, Homo sapiens
  CDR3 for alpha chain variable domain of TCR clone 292378 (TRAV8-4, TRAJ23)
CAVSAPGSGGELIF

SEQ ID NO: 584756 - protein, 17 aa, Homo sapiens
  CDR3 for beta chain variable domain of TCR clone 292378 (TRBV4-3, TRBJ2-3)
CASSQDPLAGAVDTQYF

SEQ ID NO: 584757 - protein, 14 aa, Homo sapiens
  CDR3 for alpha chain variable domain of TCR clone 292379 (TRAV1-2, TRAJ16)
CAVNRFSDGQKLLF

SEQ ID NO: 584758 - protein, 15 aa, Homo sapiens
  CDR3 for beta chain variable domain of TCR clone 292379 (TRBV27, TRBJ2-5)
CDSSLIPSGGETQYF

SEQ ID NO: 584759 - protein, 12 aa, Homo sapiens
  CDR3 for alpha chain variable domain of TCR clone 292380 (TRAV8-3, TRAJ27)
CAVGVESGKSTF

SEQ ID NO: 584760 - protein, 14 aa, Homo sapiens
  CDR3 for beta chain variable domain of TCR clone 292380 (TRBV2, TRBJ2-1)
CASRLIVGHDEQFF

SEQ ID NO: 584761 - protein, 14 aa, Homo sapiens
  CDR3 for alpha chain variable domain of TCR clone 292381 (TRAV20, TRAJ56)
GAVQFGGANSKLTF

SEQ ID NO: 584762 - protein, 14 aa, Homo sapiens
  CDR3 for beta chain variable domain of TCR clone 292381 (TRBV20-1, TRBJ2-7)
CSAKRGRSSYEQYF

SEQ ID NO: 584763 - protein, 15 aa, Homo sapiens
  CDR3 for alpha chain variable domain of TCR clone 292382 (TRAV13-1, TRAJ44)
CAASRNTGTASQLTF

SEQ ID NO: 584764 - protein, 14 aa, Homo sapiens
  CDR3 for beta chain variable domain of TCR clone 292382 (TRBV2, TRBJ2-7)
CASSLTSGGYEQYF

SEQ ID NO: 584765 - protein, 14 aa, Homo sapiens
  CDR3 for alpha chain variable domain of TCR clone 292383 (TRAV8-4, TRAJ13)
CAVTLSGGYQKVTF

SEQ ID NO: 584766 - protein, 12 aa, Homo sapiens
  CDR3 for beta chain variable domain of TCR clone 292383 (TRBV7-8, TRBJ2-7)
CASSLGDREQYF

SEQ ID NO: 584767 - protein, 12 aa, Homo sapiens
  CDR3 for alpha chain variable domain of TCR clone 292384 (TRAV3, TRAJ43)
CAVRDPNNDMRF

SEQ ID NO: 584768 - protein, 13 aa, Homo sapiens
  CDR3 for beta chain variable domain of TCR clone 292384 (TRBV7-7, TRBJ2-3)
CASSLSRADTQYF

SEQ ID NO: 584769 - protein, 13 aa, Homo sapiens
  CDR3 for alpha chain variable domain of TCR clone 292385 (TRAV1-1, TRAJ30)
CAVRSDRDDKIIF

SEQ ID NO: 584770 - protein, 14 aa, Homo sapiens
  CDR3 for beta chain variable domain of TCR clone 292385 (TRBV4-1, TRBJ2-2)
CASSQAVNTGELFF

SEQ ID NO: 584771 - protein, 14 aa, Homo sapiens
  CDR3 for alpha chain variable domain of TCR clone 292386 (TRAV12-3, TRAJ10)
SHLPLTGGGNKLSF

SEQ ID NO: 584772 - protein, 16 aa, Homo sapiens
  CDR3 for beta chain variable domain of TCR clone 292386 (TRBV12-4, TRBJ2-7)
CASSLIGGTGTYEQYF

SEQ ID NO: 584773 - protein, 12 aa, Homo sapiens
  CDR3 for alpha chain variable domain of TCR clone 292387 (TRAV12-2, TRAJ7)
CAVMRGNNRLAF

SEQ ID NO: 584774 - protein, 17 aa, Homo sapiens
  CDR3 for beta chain variable domain of TCR clone 292387 (TRBV7-9, TRBJ2-3)
CASSPTVAGDLTDTQYF

SEQ ID NO: 584775 - protein, 14 aa, Homo sapiens
  CDR3 for alpha chain variable domain of TCR clone 292388 (TRAV12-2, TRAJ5)
CAVNRSTGRRALTF

SEQ ID NO: 584776 - protein, 16 aa, Homo sapiens
  CDR3 for beta chain variable domain of TCR clone 292388 (TRBV4-2, TRBJ1-4)
CASSQARGPTNEKLFF

SEQ ID NO: 584777 - protein, 14 aa, Homo sapiens
  CDR3 for alpha chain variable domain of TCR clone 292389 (TRAV1-2, TRAJ16)
CAVNRFSDGQKLLF

SEQ ID NO: 584778 - protein, 10 aa, Homo sapiens
  CDR3 for beta chain variable domain of TCR clone 292389 (TRBV20-1, TRBJ2-7)
RVSGMDAQYF

SEQ ID NO: 584779 - protein, 16 aa, Homo sapiens
  CDR3 for alpha chain variable domain of TCR clone 292390 (TRAV30, TRAJ24)
CGTEIVDADSWGKFQF

SEQ ID NO: 584780 - protein, 14 aa, Homo sapiens
  CDR3 for beta chain variable domain of TCR clone 292390 (TRBV12-5, TRBJ2-5)
CASGSRTHQWTQYF

SEQ ID NO: 584781 - protein, 14 aa, Homo sapiens
  CDR3 for alpha chain variable domain of TCR clone 292391 (TRAV8-3, TRAJ36)
CAAVGNNGANNLFF

SEQ ID NO: 584782 - protein, 15 aa, Homo sapiens
  CDR3 for beta chain variable domain of TCR clone 292391 (TRBV27, TRBJ2-5)
CASSLYPRGGETQYF

SEQ ID NO: 584783 - protein, 14 aa, Homo sapiens
  CDR3 for alpha chain variable domain of TCR clone 292392 (TRAV13-1, TRAJ44)
CAAKATGTASKLTF

SEQ ID NO: 584784 - protein, 17 aa, Homo sapiens
  CDR3 for beta chain variable domain of TCR clone 292392 (TRBV28, TRBJ1-1)
CASSLSGTGYENTEAFF

SEQ ID NO: 584785 - protein, 10 aa, Homo sapiens
  CDR3 for alpha chain variable domain of TCR clone 292393 (TRAV12-1, TRAJ43)
CVVHNNDMRF

SEQ ID NO: 584786 - protein, 13 aa, Homo sapiens
  CDR3 for beta chain variable domain of TCR clone 292393 (TRBV7-3, TRBJ1-1)
CASSQDWGAEAFF

SEQ ID NO: 584787 - protein, 16 aa, Homo sapiens
  CDR3 for alpha chain variable domain of TCR clone 292394 (TRAV3, TRAJ3)
CAVRDRAKSSASKIHF

SEQ ID NO: 584788 - protein, 16 aa, Homo sapiens
  CDR3 for beta chain variable domain of TCR clone 292394 (TRBV20-1, TRBJ2-4)
CSATSLAELAKNIQYF

SEQ ID NO: 584789 - protein, 13 aa, Homo sapiens
  CDR3 for alpha chain variable domain of TCR clone 292395 (TRAV27, TRAJ45)
CAGARGGAGGLTF

SEQ ID NO: 584790 - protein, 13 aa, Homo sapiens
  CDR3 for beta chain variable domain of TCR clone 292395 (TRBV4-2, TRBJ1-1)
CASSQAGNTEAFF

SEQ ID NO: 584791 - protein, 14 aa, Homo sapiens
  CDR3 for alpha chain variable domain of TCR clone 292396 (TRAV21, TRAJ37)
CAVKGSSNTGKLIF

SEQ ID NO: 584792 - protein, 18 aa, Homo sapiens
  CDR3 for beta chain variable domain of TCR clone 292396 (TRBV7-9, TRBJ2-7)
CASSLTTSGSRTWYEQYF

SEQ ID NO: 584793 - protein, 16 aa, Homo sapiens
  CDR3 for alpha chain variable domain of TCR clone 292397 (TRAV3, TRAJ21)
CAVRDIERGNFNKLYF

SEQ ID NO: 584794 - protein, 13 aa, Homo sapiens
  CDR3 for beta chain variable domain of TCR clone 292397 (TRBV27, TRBJ2-7)
CASSVTTGYEQYF

SEQ ID NO: 584795 - protein, 15 aa, Homo sapiens
  CDR3 for alpha chain variable domain of TCR clone 292398 (TRAV8-3, TRAJ6)
CAVGEDRGGSYILTF

SEQ ID NO: 584796 - protein, 14 aa, Homo sapiens
  CDR3 for beta chain variable domain of TCR clone 292398 (TRBV27, TRBJ2-2)
CASLRSPPGGELFF

SEQ ID NO: 584797 - protein, 11 aa, Homo sapiens
  CDR3 for alpha chain variable domain of TCR clone 292399 (TRAV20, TRAJ47)
CAALYGNKLVF

SEQ ID NO: 584798 - protein, 12 aa, Homo sapiens
  CDR3 for beta chain variable domain of TCR clone 292399 (TRBV7-8, TRBJ2-7)
CASSLGDREQYF

SEQ ID NO: 584799 - protein, 16 aa, Homo sapiens
  CDR3 for alpha chain variable domain of TCR clone 292400 (TRAV8-2, TRAJ48)
CVVSDVSNFGNEKLTF

SEQ ID NO: 584800 - protein, 14 aa, Homo sapiens
  CDR3 for beta chain variable domain of TCR clone 292400 (TRBV7-2, TRBJ2-7)
CASSPKTSFYEQYF

SEQ ID NO: 584801 - protein, 17 aa, Homo sapiens
  CDR3 for alpha chain variable domain of TCR clone 292401 (TRAV3, TRAJ42)
CAVSDRDYGGSPGNLIF

SEQ ID NO: 584802 - protein, 14 aa, Homo sapiens
  CDR3 for beta chain variable domain of TCR clone 292401 (TRBV7-2, TRBJ2-5)
CASSPRGSSETQYF

SEQ ID NO: 584803 - protein, 16 aa, Homo sapiens
  CDR3 for alpha chain variable domain of TCR clone 292402 (TRAV21, TRAJ22)
CAVKKVSSGSARQLTF

SEQ ID NO: 584804 - protein, 14 aa, Homo sapiens
  CDR3 for beta chain variable domain of TCR clone 292402 (TRBV7-2, TRBJ2-5)
CASSPRGSSETQYF

SEQ ID NO: 584805 - protein, 14 aa, Homo sapiens
  CDR3 for alpha chain variable domain of TCR clone 292403 (TRAV13-1, TRAJ39)
CAASYNNAGNMLTF

SEQ ID NO: 584806 - protein, 13 aa, Homo sapiens
  CDR3 for beta chain variable domain of TCR clone 292403 (TRBV24-1, TRBJ1-4)
CATNNGRSERLFL

SEQ ID NO: 584807 - protein, 14 aa, Homo sapiens
  CDR3 for alpha chain variable domain of TCR clone 292404 (TRAV8-2, TRAJ26)
CVVSDWNYGQNFVF

SEQ ID NO: 584808 - protein, 14 aa, Homo sapiens
  CDR3 for beta chain variable domain of TCR clone 292404 (TRBV12-5, TRBJ2-5)
CTSGSRTHQETQYF

SEQ ID NO: 584809 - protein, 13 aa, Homo sapiens
  CDR3 for alpha chain variable domain of TCR clone 292405 (TRAV1-2, TRAJ9)
CAALHTGGFKTIF

SEQ ID NO: 584810 - protein, 16 aa, Homo sapiens
  CDR3 for beta chain variable domain of TCR clone 292405 (TRBV11-2, TRBJ2-1)
CASSPRLAGVYNEQFF

SEQ ID NO: 584811 - protein, 13 aa, Homo sapiens
  CDR3 for alpha chain variable domain of TCR clone 292406 (TRAV17, TRAJ7)
CATDNYGNNRLAF

SEQ ID NO: 584812 - protein, 16 aa, Homo sapiens
  CDR3 for beta chain variable domain of TCR clone 292406 (TRBV4-1, TRBJ2-5)
CTSSQAIAASSATQYF

SEQ ID NO: 584813 - protein, 15 aa, Homo sapiens
  CDR3 for alpha chain variable domain of TCR clone 292407 (TRAV26-1, TRAJ15)
CIVRPANQAGTALIF

SEQ ID NO: 584814 - protein, 14 aa, Homo sapiens
  CDR3 for beta chain variable domain of TCR clone 292407 (TRBV7-2, TRBJ2-7)
CASRSQGAAYEQYF

SEQ ID NO: 584815 - protein, 11 aa, Homo sapiens
  CDR3 for alpha chain variable domain of TCR clone 292408 (TRAV3, TRAJ20)
CAVRPSVTTTS

SEQ ID NO: 584816 - protein, 15 aa, Homo sapiens
  CDR3 for beta chain variable domain of TCR clone 292408 (TRBV6-5, TRBJ2-1)
CASSYDAGAGDEQFF

SEQ ID NO: 584817 - protein, 12 aa, Homo sapiens
  CDR3 for alpha chain variable domain of TCR clone 292409 (TRAV12-2, TRAJ42)
CAVGGSQGNLIF

SEQ ID NO: 584818 - protein, 14 aa, Homo sapiens
  CDR3 for beta chain variable domain of TCR clone 292409 (TRBV12-4, TRBJ1-1)
CASSPIRRTGEAFF

SEQ ID NO: 584819 - protein, 15 aa, Homo sapiens
  CDR3 for alpha chain variable domain of TCR clone 292410 (TRAV26-1, TRAJ29)
CIVRVEGSGNTPLVF

SEQ ID NO: 584820 - protein, 14 aa, Homo sapiens
  CDR3 for beta chain variable domain of TCR clone 292410 (TRBV7-9, TRBJ1-1)
CASTHPGGNTEAFF

SEQ ID NO: 584821 - protein, 11 aa, Homo sapiens
  CDR3 for alpha chain variable domain of TCR clone 292411 (TRAV12-2, TRAJ33)
CAVGSNYQLIW

SEQ ID NO: 584822 - protein, 13 aa, Homo sapiens
  CDR3 for beta chain variable domain of TCR clone 292411 (TRBV3-1, TRBJ1-1)
CASSPGVITEAFF

SEQ ID NO: 584823 - protein, 14 aa, Homo sapiens
  CDR3 for alpha chain variable domain of TCR clone 292412 (TRAV35, TRAJ46)
CAGPQKSSGDKLTF

SEQ ID NO: 584824 - protein, 17 aa, Homo sapiens
  CDR3 for beta chain variable domain of TCR clone 292412 (TRBV11-2, TRBJ2-1)
CASSLYPPGVEYNEQFF

SEQ ID NO: 584825 - protein, 11 aa, Homo sapiens
  CDR3 for alpha chain variable domain of TCR clone 292413 (TRAV21, TRAJ34)
CAVTNTDKLIF

SEQ ID NO: 584826 - protein, 13 aa, Homo sapiens
  CDR3 for beta chain variable domain of TCR clone 292413 (TRBV5-5, TRBJ1-2)
CASSFWRGEEYTF

SEQ ID NO: 584827 - protein, 14 aa, Homo sapiens
  CDR3 for alpha chain variable domain of TCR clone 292414 (TRAV12-1, TRAJ38)
CVVNDAGNNRKLIW

SEQ ID NO: 584828 - protein, 13 aa, Homo sapiens
  CDR3 for beta chain variable domain of TCR clone 292414 (TRBV19, TRBJ1-3)
CASRLSLGNTIYF

SEQ ID NO: 584829 - protein, 14 aa, Homo sapiens
  CDR3 for alpha chain variable domain of TCR clone 292415 (TRAV1-2, TRAJ16)
CAVSRFSDGQKLLF

SEQ ID NO: 584830 - protein, 17 aa, Homo sapiens
  CDR3 for beta chain variable domain of TCR clone 292415 (TRBV28, TRBJ2-5)
CASSRQGGLAGAETQYF

SEQ ID NO: 584831 - protein, 15 aa, Homo sapiens
  CDR3 for alpha chain variable domain of TCR clone 292416 (TRAV12-1, TRAJ44)
CVADLPTGTASKLTF

SEQ ID NO: 584832 - protein, 17 aa, Homo sapiens
  CDR3 for beta chain variable domain of TCR clone 292416 (TRBV5-5, TRBJ1-1)
CASSLRFRGLMNTEAFF

SEQ ID NO: 584833 - protein, 12 aa, Homo sapiens
  CDR3 for alpha chain variable domain of TCR clone 292417 (TRAV3, TRAJ43)
CAVRDTNNDMRF

SEQ ID NO: 584834 - protein, 13 aa, Homo sapiens
  CDR3 for beta chain variable domain of TCR clone 292417 (TRBV19, TRBJ1-2)
CASSVPGQDGYTF

SEQ ID NO: 584835 - protein, 12 aa, Homo sapiens
  CDR3 for alpha chain variable domain of TCR clone 292418 (TRAV2, TRAJ33)
CAFMDSNYQLIW

SEQ ID NO: 584836 - protein, 16 aa, Homo sapiens
  CDR3 for beta chain variable domain of TCR clone 292418 (TRBV2, TRBJ2-7)
CASSEPWTGPSYEQCF

SEQ ID NO: 584837 - protein, 14 aa, Homo sapiens
  CDR3 for alpha chain variable domain of TCR clone 292419 (TRAV12-1, TRAJ9)
CVVTLNTGGFKPIF

SEQ ID NO: 584838 - protein, 11 aa, Homo sapiens
  CDR3 for beta chain variable domain of TCR clone 292419 (TRBV29-1, TRBJ2-5)
CSEDRTGTQYF

SEQ ID NO: 584839 - protein, 13 aa, Homo sapiens
  CDR3 for alpha chain variable domain of TCR clone 292420 (TRAV27, TRAJ54)
CAGAGQGAQKLVC

SEQ ID NO: 584840 - protein, 15 aa, Homo sapiens
  CDR3 for beta chain variable domain of TCR clone 292420 (TRBV18, TRBJ2-6)
CASSPSYAGANVLTF

SEQ ID NO: 584841 - protein, 13 aa, Homo sapiens
  CDR3 for alpha chain variable domain of TCR clone 292421 (TRAV35, TRAJ21)
CAGQLSNFNKFYF

SEQ ID NO: 584842 - protein, 14 aa, Homo sapiens
  CDR3 for beta chain variable domain of TCR clone 292421 (TRBV4-1, TRBJ1-6)
CASSPGSDSSPLHF

SEQ ID NO: 584843 - protein, 11 aa, Homo sapiens
  CDR3 for alpha chain variable domain of TCR clone 292422 (TRAV12-2, )
CAVASLATTIS

SEQ ID NO: 584844 - protein, 16 aa, Homo sapiens
  CDR3 for beta chain variable domain of TCR clone 292422 (TRBV5-1, TRBJ2-2)
CASSSRTGGRTGELLF

SEQ ID NO: 584845 - protein, 13 aa, Homo sapiens
  CDR3 for alpha chain variable domain of TCR clone 292423 (TRAV27, TRAJ42)
CAGARGSQGNLIF

SEQ ID NO: 584846 - protein, 15 aa, Homo sapiens
  CDR3 for beta chain variable domain of TCR clone 292423 (TRBV10-3, TRBJ2-3)
CAISLTSGGTDTQYF

SEQ ID NO: 584847 - protein, 16 aa, Homo sapiens
  CDR3 for alpha chain variable domain of TCR clone 292424 (TRAV30, TRAJ24)
CGTEIVDADSWGKFQF

SEQ ID NO: 584848 - protein, 17 aa, Homo sapiens
  CDR3 for beta chain variable domain of TCR clone 292424 (TRBV7-2, TRBJ2-7)
CASSPVGSSGPSPEQYF

SEQ ID NO: 584849 - protein, 14 aa, Homo sapiens
  CDR3 for alpha chain variable domain of TCR clone 292425 (TRAV12-1, TRAJ17)
CVVNYKAAGNKLTF

SEQ ID NO: 584850 - protein, 15 aa, Homo sapiens
  CDR3 for beta chain variable domain of TCR clone 292425 (TRBV18, TRBJ2-7)
CASSPTVMDSYEQYF

SEQ ID NO: 584851 - protein, 12 aa, Homo sapiens
  CDR3 for alpha chain variable domain of TCR clone 292426 (TRAV13-1, TRAJ27)
CAAHTNAGKSTF

SEQ ID NO: 584852 - protein, 14 aa, Homo sapiens
  CDR3 for beta chain variable domain of TCR clone 292426 (TRBV12-5, TRBJ2-5)
CASGSRTHQETQCF

SEQ ID NO: 584853 - protein, 13 aa, Homo sapiens
  CDR3 for alpha chain variable domain of TCR clone 292427 (TRAV8-3, TRAJ43)
CAVGPDNNNDMRF

SEQ ID NO: 584854 - protein, 16 aa, Homo sapiens
  CDR3 for beta chain variable domain of TCR clone 292427 (TRBV20-1, TRBJ1-4)
CSAPGQGLLTNEKLFF

SEQ ID NO: 584855 - protein, 11 aa, Homo sapiens
  CDR3 for alpha chain variable domain of TCR clone 292428 (TRAV12-3, TRAJ27)
CAMANAGKSTF

SEQ ID NO: 584856 - protein, 16 aa, Homo sapiens
  CDR3 for beta chain variable domain of TCR clone 292428 (TRBV19, TRBJ2-1)
CASSMGGGSSYNEQFF

SEQ ID NO: 584857 - protein, 14 aa, Homo sapiens
  CDR3 for alpha chain variable domain of TCR clone 292429 (TRAV12-2, TRAJ11)
CAVEGGSGYSTLTF

SEQ ID NO: 584858 - protein, 17 aa, Homo sapiens
  CDR3 for beta chain variable domain of TCR clone 292429 (TRBV20-1, TRBJ2-2)
CSASGSGQGGLTGELFF

SEQ ID NO: 584859 - protein, 17 aa, Homo sapiens
  CDR3 for alpha chain variable domain of TCR clone 292430 (TRAV29/DV5, TRAJ42)
CAASAGNYVGSQGNLIF

SEQ ID NO: 584860 - protein, 16 aa, Homo sapiens
  CDR3 for beta chain variable domain of TCR clone 292430 (TRBV27, TRBJ2-2)
CASSFRGLVRTGELFF

SEQ ID NO: 584861 - protein, 12 aa, Homo sapiens
  CDR3 for alpha chain variable domain of TCR clone 292431 (TRAV38-1, TRAJ20)
CAFIRNDYKLSF

SEQ ID NO: 584862 - protein, 14 aa, Homo sapiens
  CDR3 for beta chain variable domain of TCR clone 292431 (TRBV19, TRBJ2-1)
CASSMGSGATEQFF

SEQ ID NO: 584863 - protein, 13 aa, Homo sapiens
  CDR3 for alpha chain variable domain of TCR clone 292432 (TRAV21, TRAJ57)
CAVMEGGSEKLVF

SEQ ID NO: 584864 - protein, 15 aa, Homo sapiens
  CDR3 for beta chain variable domain of TCR clone 292432 (TRBV10-3, TRBJ2-5)
CAISEFGRGQETQYF

SEQ ID NO: 584865 - protein, 14 aa, Homo sapiens
  CDR3 for alpha chain variable domain of TCR clone 292433 (TRAV23/DV6, TRAJ22)
CAASVSGSASHLTF

SEQ ID NO: 584866 - protein, 16 aa, Homo sapiens
  CDR3 for beta chain variable domain of TCR clone 292433 (TRBV19, TRBJ2-2)
CASSFPGQGLAGELFF

SEQ ID NO: 584867 - protein, 12 aa, Homo sapiens
  CDR3 for alpha chain variable domain of TCR clone 292434 (TRAV12-3, TRAJ17)
CAMTLTGNKLTF

SEQ ID NO: 584868 - protein, 12 aa, Homo sapiens
  CDR3 for beta chain variable domain of TCR clone 292434 (TRBV28, TRBJ2-6)
CAIQAGANALTF

SEQ ID NO: 584869 - protein, 15 aa, Homo sapiens
  CDR3 for alpha chain variable domain of TCR clone 292435 (TRAV3, TRAJ20)
CAVRDIKLSDYKLSF

SEQ ID NO: 584870 - protein, 15 aa, Homo sapiens
  CDR3 for beta chain variable domain of TCR clone 292435 (TRBV7-9, TRBJ1-6)
WASSSPGRGNSPLHF

SEQ ID NO: 584871 - protein, 10 aa, Homo sapiens
  CDR3 for alpha chain variable domain of TCR clone 292436 (TRAV38-2/DV8, TRAJ40)
CSSGTYKYIF

SEQ ID NO: 584872 - protein, 14 aa, Homo sapiens
  CDR3 for beta chain variable domain of TCR clone 292436 (TRBV7-9, TRBJ2-1)
CASSPRDALYEQFF

SEQ ID NO: 584873 - protein, 15 aa, Homo sapiens
  CDR3 for alpha chain variable domain of TCR clone 292437 (TRAV9-2, TRAJ49)
CALRPPDHTGNQFYF

SEQ ID NO: 584874 - protein, 14 aa, Homo sapiens
  CDR3 for beta chain variable domain of TCR clone 292437 (TRBV12-4, TRBJ1-1)
CASSLGTGGTEAFF

SEQ ID NO: 584875 - protein, 18 aa, Homo sapiens
  CDR3 for alpha chain variable domain of TCR clone 292438 (TRAV13-1, TRAJ52)
CAAKNPNDCGTSYGKLTF

SEQ ID NO: 584876 - protein, 18 aa, Homo sapiens
  CDR3 for beta chain variable domain of TCR clone 292438 (TRBV4-1, TRBJ1-4)
CASGPRTGGAWTNEKLFF

SEQ ID NO: 584877 - protein, 13 aa, Homo sapiens
  CDR3 for alpha chain variable domain of TCR clone 292439 (TRAV36/DV7, TRAJ54)
CAVDIQGAQKLVF

SEQ ID NO: 584878 - protein, 14 aa, Homo sapiens
  CDR3 for beta chain variable domain of TCR clone 292439 (TRBV19, TRBJ2-7)
CACNFRDTFTGMYF

SEQ ID NO: 584879 - protein, 14 aa, Homo sapiens
  CDR3 for alpha chain variable domain of TCR clone 292440 (TRAV14/DV4, TRAJ15)
CAMRRDKAGTALIF

SEQ ID NO: 584880 - protein, 16 aa, Homo sapiens
  CDR3 for beta chain variable domain of TCR clone 292440 (TRBV15, TRBJ2-3)
CATSRDLGIVTDTQYF

SEQ ID NO: 584881 - protein, 15 aa, Homo sapiens
  CDR3 for alpha chain variable domain of TCR clone 292441 (TRAV23/DV6, TRAJ16)
CSASPWFSDGQKLLF

SEQ ID NO: 584882 - protein, 13 aa, Homo sapiens
  CDR3 for beta chain variable domain of TCR clone 292441 (TRBV7-9, TRBJ1-2)
CASSLKQNYGYTF

SEQ ID NO: 584883 - protein, 15 aa, Homo sapiens
  CDR3 for alpha chain variable domain of TCR clone 292442 (TRAV2, TRAJ20)
CAPLNSFGAGTTVTV

SEQ ID NO: 584884 - protein, 16 aa, Homo sapiens
  CDR3 for beta chain variable domain of TCR clone 292442 (TRBV15, TRBJ2-5)
CATSRYLEAAQETQYF

SEQ ID NO: 584885 - protein, 16 aa, Homo sapiens
  CDR3 for alpha chain variable domain of TCR clone 292443 (TRAV29/DV5, TRAJ30)
QCTSVQQANRDDKIIF

SEQ ID NO: 584886 - protein, 13 aa, Homo sapiens
  CDR3 for beta chain variable domain of TCR clone 292443 (TRBV27, TRBJ1-4)
CASSLMGDEKLFF

SEQ ID NO: 584887 - protein, 14 aa, Homo sapiens
  CDR3 for alpha chain variable domain of TCR clone 292444 (TRAV3, TRAJ17)
CAVRDAAAGNKLTF

SEQ ID NO: 584888 - protein, 13 aa, Homo sapiens
  CDR3 for beta chain variable domain of TCR clone 292444 (TRBV20-1, TRBJ2-7)
CSATHTSGYEQYF

SEQ ID NO: 584889 - protein, 16 aa, Homo sapiens
  CDR3 for alpha chain variable domain of TCR clone 292445 (TRAV16, TRAJ37)
CSTWPDGSSNTGKLIF

SEQ ID NO: 584890 - protein, 13 aa, Homo sapiens
  CDR3 for beta chain variable domain of TCR clone 292445 (TRBV7-2, TRBJ2-2)
CASSLAVTGELFF

SEQ ID NO: 584891 - protein, 12 aa, Homo sapiens
  CDR3 for alpha chain variable domain of TCR clone 292446 (TRAV22, TRAJ36)
CAVGTGANNLFF

SEQ ID NO: 584892 - protein, 17 aa, Homo sapiens
  CDR3 for beta chain variable domain of TCR clone 292446 (TRBV15, TRBJ1-4)
CATSRYGTGDPYEKLFF

SEQ ID NO: 584893 - protein, 14 aa, Homo sapiens
  CDR3 for alpha chain variable domain of TCR clone 292447 (TRAV21, TRAJ45)
CAVSSGGGADGLTF

SEQ ID NO: 584894 - protein, 15 aa, Homo sapiens
  CDR3 for beta chain variable domain of TCR clone 292447 (TRBV20-1, TRBJ2-7)
CSARVPAAYFYEQYL

SEQ ID NO: 584895 - protein, 13 aa, Homo sapiens
  CDR3 for alpha chain variable domain of TCR clone 292448 (TRAV8-4, TRAJ10)
GAAFTGGGNQLTF

SEQ ID NO: 584896 - protein, 15 aa, Homo sapiens
  CDR3 for beta chain variable domain of TCR clone 292448 (TRBV2, TRBJ2-3)
CASSDFEKATDTQYF

SEQ ID NO: 584897 - protein, 18 aa, Homo sapiens
  CDR3 for alpha chain variable domain of TCR clone 292449 (TRAV35, TRAJ28)
CAGHNYPLSGAGSYQLTF

SEQ ID NO: 584898 - protein, 12 aa, Homo sapiens
  CDR3 for beta chain variable domain of TCR clone 292449 (TRBV11-2, TRBJ2-2)
CASSLGGGELFF

SEQ ID NO: 584899 - protein, 11 aa, Homo sapiens
  CDR3 for alpha chain variable domain of TCR clone 292450 (TRAV21, TRAJ48)
CAVDGNEKLTF

SEQ ID NO: 584900 - protein, 16 aa, Homo sapiens
  CDR3 for beta chain variable domain of TCR clone 292450 (TRBV12-4, TRBJ1-5)
CASSSGPRGSNHPQHF

SEQ ID NO: 584901 - protein, 14 aa, Homo sapiens
  CDR3 for alpha chain variable domain of TCR clone 292451 (TRAV12-2, TRAJ17)
CAVLFNAAGNKLTF

SEQ ID NO: 584902 - protein, 15 aa, Homo sapiens
  CDR3 for beta chain variable domain of TCR clone 292451 (TRBV10-3, TRBJ2-5)
CAISEFGRGQETQYF

SEQ ID NO: 584903 - protein, 13 aa, Homo sapiens
  CDR3 for alpha chain variable domain of TCR clone 292452 (TRAV12-2, TRAJ52)
CAAHGSSYGKLTF

SEQ ID NO: 584904 - protein, 15 aa, Homo sapiens
  CDR3 for beta chain variable domain of TCR clone 292452 (TRBV10-3, TRBJ2-7)
CAISTFSGVKGEQYF

SEQ ID NO: 584905 - protein, 14 aa, Homo sapiens
  CDR3 for alpha chain variable domain of TCR clone 292453 (TRAV8-4, TRAJ48)
FAVSETFGNEKLTF

SEQ ID NO: 584906 - protein, 14 aa, Homo sapiens
  CDR3 for beta chain variable domain of TCR clone 292453 (TRBV13, TRBJ2-7)
CASSLKGASYEQYF

SEQ ID NO: 584907 - protein, 14 aa, Homo sapiens
  CDR3 for alpha chain variable domain of TCR clone 292454 (TRAV12-2, TRAJ9)
CAVNMEGGGFKTIF

SEQ ID NO: 584908 - protein, 13 aa, Homo sapiens
  CDR3 for beta chain variable domain of TCR clone 292454 (TRBV14, TRBJ1-1)
CASSQEAGTEAFF

SEQ ID NO: 584909 - protein, 16 aa, Homo sapiens
  CDR3 for alpha chain variable domain of TCR clone 292455 (TRAV3, TRAJ37)
CAVRPHGSGRTGKLIF

SEQ ID NO: 584910 - protein, 11 aa, Homo sapiens
  CDR3 for beta chain variable domain of TCR clone 292455 (TRBV10-3, TRBJ2-7)
CAISEGLEQYF

SEQ ID NO: 584911 - protein, 11 aa, Homo sapiens
  CDR3 for alpha chain variable domain of TCR clone 292456 (TRAV3, TRAJ21)
CAVGNFNKFYF

SEQ ID NO: 584912 - protein, 14 aa, Homo sapiens
  CDR3 for beta chain variable domain of TCR clone 292456 (TRBV27, TRBJ1-1)
CASSPQGKRAEAFF

SEQ ID NO: 584913 - protein, 12 aa, Homo sapiens
  CDR3 for alpha chain variable domain of TCR clone 292457 (TRAV8-3, TRAJ35)
CAARGFGNVLHC

SEQ ID NO: 584914 - protein, 15 aa, Homo sapiens
  CDR3 for beta chain variable domain of TCR clone 292457 (TRBV7-9, TRBJ1-6)
CASSSPGRGNSPLHF

SEQ ID NO: 584915 - protein, 13 aa, Homo sapiens
  CDR3 for alpha chain variable domain of TCR clone 292458 (TRAV17, TRAJ5)
CAPMDTGRRALNF

SEQ ID NO: 584916 - protein, 15 aa, Homo sapiens
  CDR3 for beta chain variable domain of TCR clone 292458 (TRBV6-6, TRBJ2-5)
CASSPGGGLEETQYF

SEQ ID NO: 584917 - protein, 16 aa, Homo sapiens
  CDR3 for alpha chain variable domain of TCR clone 292459 (TRAV16, TRAJ4)
CALSRMFSGGYNKLIF

SEQ ID NO: 584918 - protein, 15 aa, Homo sapiens
  CDR3 for beta chain variable domain of TCR clone 292459 (TRBV6-5, TRBJ1-2)
CASSYSPPRFYGYTF

SEQ ID NO: 584919 - protein, 14 aa, Homo sapiens
  CDR3 for alpha chain variable domain of TCR clone 292460 (TRAV12-3, TRAJ10)
SHLPLTGGGNKLTF

SEQ ID NO: 584920 - protein, 15 aa, Homo sapiens
  CDR3 for beta chain variable domain of TCR clone 292460 (TRBV7-3, TRBJ2-2)
YASSETGQGTGELFF

SEQ ID NO: 584921 - protein, 11 aa, Homo sapiens
  CDR3 for alpha chain variable domain of TCR clone 292461 (TRAV12-1, TRAJ34)
CVVNKGRELIF

SEQ ID NO: 584922 - protein, 15 aa, Homo sapiens
  CDR3 for beta chain variable domain of TCR clone 292461 (TRBV7-3, TRBJ2-2)
CASSETGQGTGELFF

SEQ ID NO: 584923 - protein, 16 aa, Homo sapiens
  CDR3 for alpha chain variable domain of TCR clone 292462 (TRAV1-2, TRAJ33)
CAVRAISMDSNYQLIW

SEQ ID NO: 584924 - protein, 16 aa, Homo sapiens
  CDR3 for beta chain variable domain of TCR clone 292462 (TRBV19, TRBJ2-1)
CASSKAGPSSYNEQFF

SEQ ID NO: 584925 - protein, 10 aa, Homo sapiens
  CDR3 for alpha chain variable domain of TCR clone 292463 (TRAV17, TRAJ36)
CATVAGNLFF

SEQ ID NO: 584926 - protein, 12 aa, Homo sapiens
  CDR3 for beta chain variable domain of TCR clone 292463 (TRBV11-2, TRBJ2-4)
CASSSASRSEYF

SEQ ID NO: 584927 - protein, 23 aa, Homo sapiens
  CDR3 for alpha chain variable domain of TCR clone 292464 (TRAV12-2, TRAJ36)
SLLIRDSQPSDSATLERANNLFF

SEQ ID NO: 584928 - protein, 13 aa, Homo sapiens
  CDR3 for beta chain variable domain of TCR clone 292464 (TRBV12-4, TRBJ1-1)
CASITGLNTEAFF

SEQ ID NO: 584929 - protein, 15 aa, Homo sapiens
  CDR3 for alpha chain variable domain of TCR clone 292465 (TRAV23/DV6, TRAJ12)
CAAIDLGAIDSSYKL

SEQ ID NO: 584930 - protein, 15 aa, Homo sapiens
  CDR3 for beta chain variable domain of TCR clone 292465 (TRBV12-4, TRBJ2-5)
CASTLNSGRGETQYF

SEQ ID NO: 584931 - protein, 14 aa, Homo sapiens
  CDR3 for alpha chain variable domain of TCR clone 292466 (TRAV23/DV6, TRAJ21)
CAAYKSGPRDKFYF

SEQ ID NO: 584932 - protein, 13 aa, Homo sapiens
  CDR3 for beta chain variable domain of TCR clone 292466 (TRBV14, TRBJ2-7)
CASSQDRRYEQYF

SEQ ID NO: 584933 - protein, 13 aa, Homo sapiens
  CDR3 for alpha chain variable domain of TCR clone 292467 (TRAV4, TRAJ20)
CLVGSSNDYNLSF

SEQ ID NO: 584934 - protein, 13 aa, Homo sapiens
  CDR3 for beta chain variable domain of TCR clone 292467 (TRBV7-3, TRBJ1-1)
CASSQDWGAEAFF

SEQ ID NO: 584935 - protein, 12 aa, Homo sapiens
  CDR3 for alpha chain variable domain of TCR clone 292468 (TRAV29/DV5, TRAJ31)
CAASSHNARLMF

SEQ ID NO: 584936 - protein, 17 aa, Homo sapiens
  CDR3 for beta chain variable domain of TCR clone 292468 (TRBV18, TRBJ2-6)
CASSPRKGAVGANVLTF

SEQ ID NO: 584937 - protein, 12 aa, Homo sapiens
  CDR3 for alpha chain variable domain of TCR clone 292469 (TRAV1-2, TRAJ26)
CAVSPYGQNFVF

SEQ ID NO: 584938 - protein, 15 aa, Homo sapiens
  CDR3 for beta chain variable domain of TCR clone 292469 (TRBV2, TRBJ2-1)
CASSELAGSYNEQFF

SEQ ID NO: 584939 - protein, 13 aa, Homo sapiens
  CDR3 for alpha chain variable domain of TCR clone 292470 (TRAV6, TRAJ33)
CALPMDSNYQLIW

SEQ ID NO: 584940 - protein, 13 aa, Homo sapiens
  CDR3 for beta chain variable domain of TCR clone 292470 (TRBV19, TRBJ2-2)
CASSIWSTGELFF

SEQ ID NO: 584941 - protein, 15 aa, Homo sapiens
  CDR3 for alpha chain variable domain of TCR clone 292471 (TRAV21, TRAJ24)
CAARSSTDSWGRLPF

SEQ ID NO: 584942 - protein, 15 aa, Homo sapiens
  CDR3 for beta chain variable domain of TCR clone 292471 (TRBV19, TRBJ1-1)
CASTSGQIQNTEAFF

SEQ ID NO: 584943 - protein, 13 aa, Homo sapiens
  CDR3 for alpha chain variable domain of TCR clone 292472 (TRAV8-6, TRAJ49)
CAVITDTGNQFYF

SEQ ID NO: 584944 - protein, 14 aa, Homo sapiens
  CDR3 for beta chain variable domain of TCR clone 292472 (TRBV13, TRBJ2-5)
CASSLERVGETQYF

SEQ ID NO: 584945 - protein, 13 aa, Homo sapiens
  CDR3 for alpha chain variable domain of TCR clone 292473 (TRAV13-1, TRAJ21)
CAASIYNFNKFYF

SEQ ID NO: 584946 - protein, 15 aa, Homo sapiens
  CDR3 for beta chain variable domain of TCR clone 292473 (TRBV3-1, TRBJ1-2)
CASSHPGTPGYGYAF

SEQ ID NO: 584947 - protein, 14 aa, Homo sapiens
  CDR3 for alpha chain variable domain of TCR clone 292474 (TRAV8-4, TRAJ40)
CAVIPTSGTYKYIL

SEQ ID NO: 584948 - protein, 15 aa, Homo sapiens
  CDR3 for beta chain variable domain of TCR clone 292474 (TRBV7-2, TRBJ2-1)
CASTSASGGYNEQFF

SEQ ID NO: 584949 - protein, 10 aa, Homo sapiens
  CDR3 for alpha chain variable domain of TCR clone 292475 (TRAV12-3, TRAJ49)
CAMNDDQFYF

SEQ ID NO: 584950 - protein, 14 aa, Homo sapiens
  CDR3 for beta chain variable domain of TCR clone 292475 (TRBV11-3, TRBJ2-7)
CASSLGVGDYEQYF

SEQ ID NO: 584951 - protein, 17 aa, Homo sapiens
  CDR3 for alpha chain variable domain of TCR clone 292476 (TRAV4, TRAJ18)
CLVGERSVGSTLGRLYF

SEQ ID NO: 584952 - protein, 14 aa, Homo sapiens
  CDR3 for beta chain variable domain of TCR clone 292476 (TRBV18, TRBJ2-7)
CASSPRGGSYEQYF

SEQ ID NO: 584953 - protein, 11 aa, Homo sapiens
  CDR3 for alpha chain variable domain of TCR clone 292477 (TRAV1-2, TRAJ20)
CAVANDYKLSF

SEQ ID NO: 584954 - protein, 18 aa, Homo sapiens
  CDR3 for beta chain variable domain of TCR clone 292477 (TRBV20-1, TRBJ2-6)
CSAETTPTPGSGANVLTS

SEQ ID NO: 584955 - protein, 13 aa, Homo sapiens
  CDR3 for alpha chain variable domain of TCR clone 292478 (TRAV12-1, TRAJ13)
CVVNLGGYQKVTF

SEQ ID NO: 584956 - protein, 13 aa, Homo sapiens
  CDR3 for beta chain variable domain of TCR clone 292478 (TRBV7-2, TRBJ2-7)
CASSSPSGSEQYF

SEQ ID NO: 584957 - protein, 14 aa, Homo sapiens
  CDR3 for alpha chain variable domain of TCR clone 292479 (TRAV1-2, TRAJ8)
CAVREDTGFQKLVF

SEQ ID NO: 584958 - protein, 14 aa, Homo sapiens
  CDR3 for beta chain variable domain of TCR clone 292479 (TRBV7-8, TRBJ1-2)
CASSPDSLSYGYTF

SEQ ID NO: 584959 - protein, 16 aa, Homo sapiens
  CDR3 for alpha chain variable domain of TCR clone 292480 (TRAV3, TRAJ5)
CAVRNLLDTGRIALTF

SEQ ID NO: 584960 - protein, 16 aa, Homo sapiens
  CDR3 for beta chain variable domain of TCR clone 292480 (TRBV12-5, TRBJ2-5)
CASGPRTSGNQETQYF

SEQ ID NO: 584961 - protein, 16 aa, Homo sapiens
  CDR3 for alpha chain variable domain of TCR clone 292481 (TRAV21, TRAJ17)
CAVRPGEAAAGSKLTF

SEQ ID NO: 584962 - protein, 16 aa, Homo sapiens
  CDR3 for beta chain variable domain of TCR clone 292481 (TRBV2, TRBJ2-7)
CASSEPWTGPSYEQYF

SEQ ID NO: 584963 - protein, 12 aa, Homo sapiens
  CDR3 for alpha chain variable domain of TCR clone 292482 (TRAV1-1, TRAJ8)
CAGGTGFQKLVF

SEQ ID NO: 584964 - protein, 15 aa, Homo sapiens
  CDR3 for beta chain variable domain of TCR clone 292482 (TRBV7-9, TRBJ1-4)
CGSSRTGGFNEKLFF

SEQ ID NO: 584965 - protein, 17 aa, Homo sapiens
  CDR3 for alpha chain variable domain of TCR clone 292483 (TRAV23/DV6, TRAJ57)
CAASSTLSKGGSETLVF

SEQ ID NO: 584966 - protein, 14 aa, Homo sapiens
  CDR3 for beta chain variable domain of TCR clone 292483 (TRBV25-1, TRBJ1-1)
CASTHLGGNTEAFF

SEQ ID NO: 584967 - protein, 13 aa, Homo sapiens
  CDR3 for alpha chain variable domain of TCR clone 292484 (TRAV27, TRAJ6)
CAGGTRGSYIPTF

SEQ ID NO: 584968 - protein, 15 aa, Homo sapiens
  CDR3 for beta chain variable domain of TCR clone 292484 (TRBV20-1, TRBJ1-1)
CSASRGVTGNTEAFF

SEQ ID NO: 584969 - protein, 13 aa, Homo sapiens
  CDR3 for alpha chain variable domain of TCR clone 292485 (TRAV12-1, TRAJ53)
CVVNAESNYKLTF

SEQ ID NO: 584970 - protein, 14 aa, Homo sapiens
  CDR3 for beta chain variable domain of TCR clone 292485 (TRBV7-2, TRBJ2-7)
CASSPKSSFYEQYF

SEQ ID NO: 584971 - protein, 12 aa, Homo sapiens
  CDR3 for alpha chain variable domain of TCR clone 292486 (TRAV17, TRAJ45)
CSAGGGADGLTF

SEQ ID NO: 584972 - protein, 15 aa, Homo sapiens
  CDR3 for beta chain variable domain of TCR clone 292486 (TRBV20-1, TRBJ2-7)
CSARDRVSGMDEQYF

SEQ ID NO: 584973 - protein, 12 aa, Homo sapiens
  CDR3 for alpha chain variable domain of TCR clone 292487 (TRAV20, TRAJ56)
CAVTGANSKLTF

SEQ ID NO: 584974 - protein, 14 aa, Homo sapiens
  CDR3 for beta chain variable domain of TCR clone 292487 (TRBV20-1, TRBJ2-5)
SSALVPGYQETQYF

SEQ ID NO: 584975 - protein, 12 aa, Homo sapiens
  CDR3 for alpha chain variable domain of TCR clone 292488 (TRAV16, TRAJ10)
CSRTGGGDKLTF

SEQ ID NO: 584976 - protein, 16 aa, Homo sapiens
  CDR3 for beta chain variable domain of TCR clone 292488 (TRBV27, TRBJ2-1)
SMNVEPGTSGDNEQFF

SEQ ID NO: 584977 - protein, 13 aa, Homo sapiens
  CDR3 for alpha chain variable domain of TCR clone 292489 (TRAV6, TRAJ16)
CALYDSDGQKLLF

SEQ ID NO: 584978 - protein, 16 aa, Homo sapiens
  CDR3 for beta chain variable domain of TCR clone 292489 (TRBV12-4, TRBJ1-6)
CASNLQGKGSPLHLGT

SEQ ID NO: 584979 - protein, 11 aa, Homo sapiens
  CDR3 for alpha chain variable domain of TCR clone 292490 (TRAV2, TRAJ13)
CASGGYQKVTF

SEQ ID NO: 584980 - protein, 14 aa, Homo sapiens
  CDR3 for beta chain variable domain of TCR clone 292490 (TRBV19, TRBJ2-1)
CASPTFVLRGEQFF

SEQ ID NO: 584981 - protein, 10 aa, Homo sapiens
  CDR3 for alpha chain variable domain of TCR clone 292491 (TRAV30, TRAJ48)
CGIGNEKLTF

SEQ ID NO: 584982 - protein, 13 aa, Homo sapiens
  CDR3 for beta chain variable domain of TCR clone 292491 (TRBV29-1, TRBJ2-7)
CSVGPSGGYEQYV

SEQ ID NO: 584983 - protein, 13 aa, Homo sapiens
  CDR3 for alpha chain variable domain of TCR clone 292492 (TRAV23/DV6, TRAJ16)
CAASISDGQKLLL

SEQ ID NO: 584984 - protein, 15 aa, Homo sapiens
  CDR3 for beta chain variable domain of TCR clone 292492 (TRBV2, TRBJ2-2)
CASSREAVGTGELFF

SEQ ID NO: 584985 - protein, 12 aa, Homo sapiens
  CDR3 for alpha chain variable domain of TCR clone 292493 (TRAV21, TRAJ11)
CAATSGYSTLTF

SEQ ID NO: 584986 - protein, 14 aa, Homo sapiens
  CDR3 for beta chain variable domain of TCR clone 292493 (TRBV20-1, TRBJ2-7)
SSAPELAGVGEQYF

SEQ ID NO: 584987 - protein, 12 aa, Homo sapiens
  CDR3 for alpha chain variable domain of TCR clone 292494 (TRAV12-1, TRAJ31)
CGELNNNARLMF

SEQ ID NO: 584988 - protein, 15 aa, Homo sapiens
  CDR3 for beta chain variable domain of TCR clone 292494 (TRBV4-1, TRBJ1-2)
CASSQGQGAAYGYTF

SEQ ID NO: 584989 - protein, 12 aa, Homo sapiens
  CDR3 for alpha chain variable domain of TCR clone 292495 (TRAV27, TRAJ13)
CAGAGAYQKVTF

SEQ ID NO: 584990 - protein, 15 aa, Homo sapiens
  CDR3 for beta chain variable domain of TCR clone 292495 (TRBV20-1, TRBJ2-6)
CSARDRGPGANVLTF

SEQ ID NO: 584991 - protein, 18 aa, Homo sapiens
  CDR3 for alpha chain variable domain of TCR clone 292496 (TRAV13-1, TRAJ52)
CAADFPNAGGTSYGKLTF

SEQ ID NO: 584992 - protein, 15 aa, Homo sapiens
  CDR3 for beta chain variable domain of TCR clone 292496 (TRBV10-3, TRBJ2-3)
CAISVLGQETDTQYF

SEQ ID NO: 584993 - protein, 15 aa, Homo sapiens
  CDR3 for alpha chain variable domain of TCR clone 292497 (TRAV2, TRAJ15)
CAVEDRGQAGTALIV

SEQ ID NO: 584994 - protein, 15 aa, Homo sapiens
  CDR3 for beta chain variable domain of TCR clone 292497 (TRBV7-2, TRBJ2-3)
CASSLVVRGPDTQYF

SEQ ID NO: 584995 - protein, 17 aa, Homo sapiens
  CDR3 for alpha chain variable domain of TCR clone 292498 (TRAV12-2, TRAJ48)
CASNEKLTFGTGTRLTI

SEQ ID NO: 584996 - protein, 13 aa, Homo sapiens
  CDR3 for beta chain variable domain of TCR clone 292498 (TRBV7-3, TRBJ2-1)
CASSLDSYNEQFF

SEQ ID NO: 584997 - protein, 23 aa, Homo sapiens
  CDR3 for alpha chain variable domain of TCR clone 292499 (TRAV26-1, TRAJ38)
CIADNAGNNHIQNLDPAVYQLRD

SEQ ID NO: 584998 - protein, 15 aa, Homo sapiens
  CDR3 for beta chain variable domain of TCR clone 292499 (TRBV27, TRBJ2-1)
CASSNGGGSSNEQFF

SEQ ID NO: 584999 - protein, 16 aa, Homo sapiens
  CDR3 for alpha chain variable domain of TCR clone 292500 (TRAV26-1, TRAJ45)
CIVEKFSGGGADGLTF

SEQ ID NO: 585000 - protein, 16 aa, Homo sapiens
  CDR3 for beta chain variable domain of TCR clone 292500 (TRBV10-3, TRBJ1-6)
CAISERRGQGNSPLHF

SEQ ID NO: 585001 - protein, 14 aa, Homo sapiens
  CDR3 for alpha chain variable domain of TCR clone 292501 (TRAV17, TRAJ54)
CATDANQGAQKLVF

SEQ ID NO: 585002 - protein, 13 aa, Homo sapiens
  CDR3 for beta chain variable domain of TCR clone 292501 (TRBV6-1, TRBJ2-3)
CASSGVPTDTQYF

SEQ ID NO: 585003 - protein, 14 aa, Homo sapiens
  CDR3 for alpha chain variable domain of TCR clone 292502 (TRAV12-2, TRAJ24)
CAVTPADSWGKLHV

SEQ ID NO: 585004 - protein, 12 aa, Homo sapiens
  CDR3 for beta chain variable domain of TCR clone 292502 (TRBV3-1, TRBJ2-1)
CASSQGSSGQFF

SEQ ID NO: 585005 - protein, 17 aa, Homo sapiens
  CDR3 for alpha chain variable domain of TCR clone 292503 (TRAV23/DV6, TRAJ57)
CAASSTLSQGGSEKLVF

SEQ ID NO: 585006 - protein, 11 aa, Homo sapiens
  CDR3 for beta chain variable domain of TCR clone 292503 (TRBV7-8, TRBJ2-7)
CASSLSLEQYF

SEQ ID NO: 585007 - protein, 14 aa, Homo sapiens
  CDR3 for alpha chain variable domain of TCR clone 292504 (TRAV23/DV6, TRAJ11)
CAASLESGYSTLNF

SEQ ID NO: 585008 - protein, 15 aa, Homo sapiens
  CDR3 for beta chain variable domain of TCR clone 292504 (TRBV28, TRBJ2-7)
CASSSPGTEPFEQYF

SEQ ID NO: 585009 - protein, 15 aa, Homo sapiens
  CDR3 for alpha chain variable domain of TCR clone 292505 (TRAV12-2, TRAJ43)
CAFDMRFGAGTRLTV

SEQ ID NO: 585010 - protein, 15 aa, Homo sapiens
  CDR3 for beta chain variable domain of TCR clone 292505 (TRBV7-9, TRBJ2-5)
CASSRRTGGGETQYF

SEQ ID NO: 585011 - protein, 12 aa, Homo sapiens
  CDR3 for alpha chain variable domain of TCR clone 292506 (TRAV13-1, TRAJ5)
CAAKAGRRALTF

SEQ ID NO: 585012 - protein, 19 aa, Homo sapiens
  CDR3 for beta chain variable domain of TCR clone 292506 (TRBV7-9, TRBJ2-6)
CASSLESATVLPGANVLTF

SEQ ID NO: 585013 - protein, 15 aa, Homo sapiens
  CDR3 for alpha chain variable domain of TCR clone 292507 (TRAV3, TRAJ4)
CAVRDGTGGYNKLIF

SEQ ID NO: 585014 - protein, 15 aa, Homo sapiens
  CDR3 for beta chain variable domain of TCR clone 292507 (TRBV27, TRBJ2-1)
CASSNGGGSSNDQFF

SEQ ID NO: 585015 - protein, 13 aa, Homo sapiens
  CDR3 for alpha chain variable domain of TCR clone 292508 (TRAV3, TRAJ41)
CAVSSNSGYELNF

SEQ ID NO: 585016 - protein, 14 aa, Homo sapiens
  CDR3 for beta chain variable domain of TCR clone 292508 (TRBV7-2, TRBJ2-7)
CASSSKTSFYEQYF

SEQ ID NO: 585017 - protein, 20 aa, Homo sapiens
  CDR3 for alpha chain variable domain of TCR clone 292509 (TRAV12-3, TRAJ41)
SLFIRDSQPSDSATPGALNF

SEQ ID NO: 585018 - protein, 15 aa, Homo sapiens
  CDR3 for beta chain variable domain of TCR clone 292509 (TRBV5-1, TRBJ2-7)
CASSLDLTSSYEQYF

SEQ ID NO: 585019 - protein, 12 aa, Homo sapiens
  CDR3 for alpha chain variable domain of TCR clone 292510 (TRAV38-1, TRAJ20)
RAFIWNDYKLSF

SEQ ID NO: 585020 - protein, 14 aa, Homo sapiens
  CDR3 for beta chain variable domain of TCR clone 292510 (TRBV27, TRBJ1-1)
CASSLQGKRAEAFF

SEQ ID NO: 585021 - protein, 11 aa, Homo sapiens
  CDR3 for alpha chain variable domain of TCR clone 292511 (TRAV21, TRAJ34)
CAHYNTDKLIS

SEQ ID NO: 585022 - protein, 13 aa, Homo sapiens
  CDR3 for beta chain variable domain of TCR clone 292511 (TRBV7-6, TRBJ1-2)
CASSLVADYRYTF

SEQ ID NO: 585023 - protein, 15 aa, Homo sapiens
  CDR3 for alpha chain variable domain of TCR clone 292512 (TRAV20, TRAJ53)
CAVQASGGSNYKLTF

SEQ ID NO: 585024 - protein, 11 aa, Homo sapiens
  CDR3 for beta chain variable domain of TCR clone 292512 (TRBV11-2, TRBJ2-2)
SASSLPGELFF

SEQ ID NO: 585025 - protein, 13 aa, Homo sapiens
  CDR3 for alpha chain variable domain of TCR clone 292513 (TRAV13-1, TRAJ11)
CEASKEGYSTLTF

SEQ ID NO: 585026 - protein, 21 aa, Homo sapiens
  CDR3 for beta chain variable domain of TCR clone 292513 (TRBV23-1, TRBJ2-5)
CASTPPGQGPGGDPVLRARHA

SEQ ID NO: 585027 - protein, 12 aa, Homo sapiens
  CDR3 for alpha chain variable domain of TCR clone 292514 (TRAV13-1, TRAJ21)
SAAKEGFNKFYF

SEQ ID NO: 585028 - protein, 16 aa, Homo sapiens
  CDR3 for beta chain variable domain of TCR clone 292514 (TRBV4-2, TRBJ2-3)
CASSQELAGDTDTQYF

SEQ ID NO: 585029 - protein, 14 aa, Homo sapiens
  CDR3 for alpha chain variable domain of TCR clone 292515 (TRAV1-2, TRAJ16)
CAVNRFSDGHKLLF

SEQ ID NO: 585030 - protein, 15 aa, Homo sapiens
  CDR3 for beta chain variable domain of TCR clone 292515 (TRBV10-1, TRBJ2-3)
CASSRAGTLGDTQYF

SEQ ID NO: 585031 - protein, 14 aa, Homo sapiens
  CDR3 for alpha chain variable domain of TCR clone 292516 (TRAV12-3, TRAJ10)
SHLPLTGGGNKLTF

SEQ ID NO: 585032 - protein, 15 aa, Homo sapiens
  CDR3 for beta chain variable domain of TCR clone 292516 (TRBV6-1, TRBJ2-2)
CASSRLRGDTGELFF

SEQ ID NO: 585033 - protein, 14 aa, Homo sapiens
  CDR3 for alpha chain variable domain of TCR clone 292517 (TRAV1-1, TRAJ27)
CAVIYNTNAGKSTF

SEQ ID NO: 585034 - protein, 12 aa, Homo sapiens
  CDR3 for beta chain variable domain of TCR clone 292517 (TRBV11-2, TRBJ2-1)
CASSPGTNEQFF

SEQ ID NO: 585035 - protein, 13 aa, Homo sapiens
  CDR3 for alpha chain variable domain of TCR clone 292518 (TRAV1-2, TRAJ31)
CAVRGYNNAKLMF

SEQ ID NO: 585036 - protein, 14 aa, Homo sapiens
  CDR3 for beta chain variable domain of TCR clone 292518 (TRBV12-4, TRBJ1-3)
CASTLTGAGNTIYF

SEQ ID NO: 585037 - protein, 17 aa, Homo sapiens
  CDR3 for alpha chain variable domain of TCR clone 292519 (TRAV17, TRAJ7)
CATLGRLAFGKGNQVVV

SEQ ID NO: 585038 - protein, 13 aa, Homo sapiens
  CDR3 for beta chain variable domain of TCR clone 292519 (TRBV7-9, TRBJ1-2)
CASSLKQNYGYTF

SEQ ID NO: 585039 - protein, 10 aa, Homo sapiens
  CDR3 for alpha chain variable domain of TCR clone 292520 (TRAV1-2, TRAJ23)
CAGQGGELIF

SEQ ID NO: 585040 - protein, 14 aa, Homo sapiens
  CDR3 for beta chain variable domain of TCR clone 292520 (TRBV11-2, TRBJ1-1)
CASSLRQGGGTLES

SEQ ID NO: 585041 - protein, 12 aa, Homo sapiens
  CDR3 for alpha chain variable domain of TCR clone 292521 (TRAV3, TRAJ43)
CAVRDPNNDMRF

SEQ ID NO: 585042 - protein, 13 aa, Homo sapiens
  CDR3 for beta chain variable domain of TCR clone 292521 (TRBV19, TRBJ1-2)
CASSVPGQDGHTF

SEQ ID NO: 585043 - protein, 14 aa, Homo sapiens
  CDR3 for alpha chain variable domain of TCR clone 292522 (TRAV12-2, TRAJ40)
CSVKIPSGTYKYIF

SEQ ID NO: 585044 - protein, 15 aa, Homo sapiens
  CDR3 for beta chain variable domain of TCR clone 292522 (TRBV9, TRBJ1-6)
CASSVAGTGDSPLHF

SEQ ID NO: 585045 - protein, 14 aa, Homo sapiens
  CDR3 for alpha chain variable domain of TCR clone 292523 (TRAV2, TRAJ9)
CAVEDRSGGFKTIF

SEQ ID NO: 585046 - protein, 16 aa, Homo sapiens
  CDR3 for beta chain variable domain of TCR clone 292523 (TRBV13, TRBJ2-2)
CASSLGRGYGTGELFF

SEQ ID NO: 585047 - protein, 15 aa, Homo sapiens
  CDR3 for alpha chain variable domain of TCR clone 292524 (TRAV12-1, TRAJ4)
FVVNPFSGGYNKLIF

SEQ ID NO: 585048 - protein, 14 aa, Homo sapiens
  CDR3 for beta chain variable domain of TCR clone 292524 (TRBV28, TRBJ1-5)
CASSGQALYQPQHF

SEQ ID NO: 585049 - protein, 18 aa, Homo sapiens
  CDR3 for alpha chain variable domain of TCR clone 292525 (TRAV3, TRAJ17)
CAVRARRGVRSCRQQANF

SEQ ID NO: 585050 - protein, 14 aa, Homo sapiens
  CDR3 for beta chain variable domain of TCR clone 292525 (TRBV4-1, TRBJ2-2)
CASSQAVNTGELFF

SEQ ID NO: 585051 - protein, 11 aa, Homo sapiens
  CDR3 for alpha chain variable domain of TCR clone 292526 (TRAV2, TRAJ13)
CASGGYQKVTF

SEQ ID NO: 585052 - protein, 14 aa, Homo sapiens
  CDR3 for beta chain variable domain of TCR clone 292526 (TRBV18, TRBJ1-2)
CASSPDRVVYGYIF

SEQ ID NO: 585053 - protein, 14 aa, Homo sapiens
  CDR3 for alpha chain variable domain of TCR clone 292527 (TRAV12-3, TRAJ9)
CAMSPNTGGFKTIF

SEQ ID NO: 585054 - protein, 12 aa, Homo sapiens
  CDR3 for beta chain variable domain of TCR clone 292527 (TRBV19, TRBJ1-5)
CASSISQQPQYF

SEQ ID NO: 585055 - protein, 13 aa, Homo sapiens
  CDR3 for alpha chain variable domain of TCR clone 292528 (TRAV3, TRAJ4)
CAVRDGGYNKLIF

SEQ ID NO: 585056 - protein, 14 aa, Homo sapiens
  CDR3 for beta chain variable domain of TCR clone 292528 (TRBV12-4, TRBJ1-2)
CARSSSAAGSSYTF

SEQ ID NO: 585057 - protein, 12 aa, Homo sapiens
  CDR3 for alpha chain variable domain of TCR clone 292529 (TRAV3, TRAJ26)
CAVIDYGQNFVF

SEQ ID NO: 585058 - protein, 16 aa, Homo sapiens
  CDR3 for beta chain variable domain of TCR clone 292529 (TRBV11-2, TRBJ1-2)
CASSPSGREANYGYTF

SEQ ID NO: 585059 - protein, 13 aa, Homo sapiens
  CDR3 for alpha chain variable domain of TCR clone 292530 (TRAV8-6, TRAJ49)
CAVITNTGNQFYF

SEQ ID NO: 585060 - protein, 13 aa, Homo sapiens
  CDR3 for beta chain variable domain of TCR clone 292530 (TRBV10-3, TRBJ2-7)
CASKLAVNYGQYF

SEQ ID NO: 585061 - protein, 14 aa, Homo sapiens
  CDR3 for alpha chain variable domain of TCR clone 292531 (TRAV2, TRAJ37)
CAVDFTSNTGKLIF

SEQ ID NO: 585062 - protein, 16 aa, Homo sapiens
  CDR3 for beta chain variable domain of TCR clone 292531 (TRBV4-3, TRBJ2-2)
CASSHLQGSGTGELFF

SEQ ID NO: 585063 - protein, 15 aa, Homo sapiens
  CDR3 for alpha chain variable domain of TCR clone 292532 (TRAV26-1, TRAJ29)
CIVRVEGSGTTPLVF

SEQ ID NO: 585064 - protein, 14 aa, Homo sapiens
  CDR3 for beta chain variable domain of TCR clone 292532 (TRBV18, TRBJ2-5)
CASSPGLSQETQYF

SEQ ID NO: 585065 - protein, 18 aa, Homo sapiens
  CDR3 for alpha chain variable domain of TCR clone 292533 (TRAV21, TRAJ52)
CAVRPSPAGGTSYGKLQF

SEQ ID NO: 585066 - protein, 15 aa, Homo sapiens
  CDR3 for beta chain variable domain of TCR clone 292533 (TRBV7-9, TRBJ2-7)
CASSSSGLAVYEQYF

SEQ ID NO: 585067 - protein, 14 aa, Homo sapiens
  CDR3 for alpha chain variable domain of TCR clone 292534 (TRAV12-2, TRAJ17)
CAVLFKAAGNKLTF

SEQ ID NO: 585068 - protein, 17 aa, Homo sapiens
  CDR3 for beta chain variable domain of TCR clone 292534 (TRBV20-1, TRBJ2-2)
FSASGSGQCGLTGELFF

SEQ ID NO: 585069 - protein, 15 aa, Homo sapiens
  CDR3 for alpha chain variable domain of TCR clone 292535 (TRAV3, TRAJ22)
CAVRDRGGSARQRTV

SEQ ID NO: 585070 - protein, 12 aa, Homo sapiens
  CDR3 for beta chain variable domain of TCR clone 292535 (TRBV12-4, TRBJ1-2)
CASSFIWLHLRF

SEQ ID NO: 585071 - protein, 12 aa, Homo sapiens
  CDR3 for alpha chain variable domain of TCR clone 292536 (TRAV12-3, TRAJ43)
CAISSNNNDMRF

SEQ ID NO: 585072 - protein, 14 aa, Homo sapiens
  CDR3 for beta chain variable domain of TCR clone 292536 (TRBV7-8, TRBJ2-3)
CASSLEAGTDTQYF

SEQ ID NO: 585073 - protein, 16 aa, Homo sapiens
  CDR3 for alpha chain variable domain of TCR clone 292537 (TRAV30, TRAJ24)
CGTEIVDADRWGKFQF

SEQ ID NO: 585074 - protein, 14 aa, Homo sapiens
  CDR3 for beta chain variable domain of TCR clone 292537 (TRBV12-5, TRBJ2-5)
CASGSRKHQETQYF

SEQ ID NO: 585075 - protein, 14 aa, Homo sapiens
  CDR3 for alpha chain variable domain of TCR clone 292538 (TRAV1-2, TRAJ8)
CAVREDTGFQKLVF

SEQ ID NO: 585076 - protein, 11 aa, Homo sapiens
  CDR3 for beta chain variable domain of TCR clone 292538 (TRBV11-3, TRBJ2-7)
CASSRTSEQYF

SEQ ID NO: 585077 - protein, 15 aa, Homo sapiens
  CDR3 for alpha chain variable domain of TCR clone 292539 (TRAV12-3, TRAJ42)
CAMSGHGGSQGNLIF

SEQ ID NO: 585078 - protein, 13 aa, Homo sapiens
  CDR3 for beta chain variable domain of TCR clone 292539 (TRBV19, TRBJ1-2)
CASSVPGQDGYTS

SEQ ID NO: 585079 - protein, 19 aa, Homo sapiens
  CDR3 for alpha chain variable domain of TCR clone 292540 (TRAV2, TRAJ20)
ILQVREADAAVYRDCKLSF

SEQ ID NO: 585080 - protein, 17 aa, Homo sapiens
  CDR3 for beta chain variable domain of TCR clone 292540 (TRBV11-2, TRBJ2-1)
CAGSLYPPGVEYNEQFF

SEQ ID NO: 585081 - protein, 13 aa, Homo sapiens
  CDR3 for alpha chain variable domain of TCR clone 292541 (TRAV12-1, TRAJ12)
CVVNIEGSYKLIF

SEQ ID NO: 585082 - protein, 15 aa, Homo sapiens
  CDR3 for beta chain variable domain of TCR clone 292541 (TRBV2, TRBJ2-5)
CASSSSVAGGETQYF

SEQ ID NO: 585083 - protein, 14 aa, Homo sapiens
  CDR3 for alpha chain variable domain of TCR clone 292542 (TRAV4, TRAJ17)
CLVGDMSAGNKLTF

SEQ ID NO: 585084 - protein, 14 aa, Homo sapiens
  CDR3 for beta chain variable domain of TCR clone 292542 (TRBV4-1, TRBJ2-7)
CASGPVAGGDEQYF

SEQ ID NO: 585085 - protein, 15 aa, Homo sapiens
  CDR3 for alpha chain variable domain of TCR clone 292543 (TRAV14/DV4, TRAJ15)
CNERGPAQAGTALIF

SEQ ID NO: 585086 - protein, 12 aa, Homo sapiens
  CDR3 for beta chain variable domain of TCR clone 292543 (TRBV28, TRBJ2-6)
CAIQAGANVLTF

SEQ ID NO: 585087 - protein, 15 aa, Homo sapiens
  CDR3 for alpha chain variable domain of TCR clone 292544 (TRAV3, TRAJ22)
CAVRDRGGSARQLTF

SEQ ID NO: 585088 - protein, 15 aa, Homo sapiens
  CDR3 for beta chain variable domain of TCR clone 292544 (TRBV28, TRBJ2-7)
CASSPGGRGFYEQYF

SEQ ID NO: 585089 - protein, 14 aa, Homo sapiens
  CDR3 for alpha chain variable domain of TCR clone 292545 (TRAV8-6, TRAJ10)
CAVTSTGGGNKITF

SEQ ID NO: 585090 - protein, 13 aa, Homo sapiens
  CDR3 for beta chain variable domain of TCR clone 292545 (TRBV5-7, TRBJ2-5)
CASRSSGGGTQYF

SEQ ID NO: 585091 - protein, 12 aa, Homo sapiens
  CDR3 for alpha chain variable domain of TCR clone 292546 (TRAV17, TRAJ57)
CATDGGSEKLVF

SEQ ID NO: 585092 - protein, 16 aa, Homo sapiens
  CDR3 for beta chain variable domain of TCR clone 292546 (TRBV10-3, TRBJ2-1)
CAISGVGDGGGGEQFF

SEQ ID NO: 585093 - protein, 14 aa, Homo sapiens
  CDR3 for alpha chain variable domain of TCR clone 292547 (TRAV16, TRAJ17)
CAARIKAAGNKLTF

SEQ ID NO: 585094 - protein, 17 aa, Homo sapiens
  CDR3 for beta chain variable domain of TCR clone 292547 (TRBV7-2, TRBJ2-3)
CASSSYSGTRRADTQYF

SEQ ID NO: 585095 - protein, 15 aa, Homo sapiens
  CDR3 for alpha chain variable domain of TCR clone 292548 (TRAV23/DV6, TRAJ13)
CAAWPGGGGYPKVTF

SEQ ID NO: 585096 - protein, 12 aa, Homo sapiens
  CDR3 for beta chain variable domain of TCR clone 292548 (TRBV12-4, TRBJ1-3)
CASSFSGNTIYF

SEQ ID NO: 585097 - protein, 13 aa, Homo sapiens
  CDR3 for alpha chain variable domain of TCR clone 292549 (TRAV27, TRAJ41)
CAGDGNSGYALNF

SEQ ID NO: 585098 - protein, 14 aa, Homo sapiens
  CDR3 for beta chain variable domain of TCR clone 292549 (TRBV25-1, TRBJ1-1)
CASTHLGGNTEAFF

SEQ ID NO: 585099 - protein, 22 aa, Homo sapiens
  CDR3 for alpha chain variable domain of TCR clone 292550 (TRAV2, TRAJ38)
CAVEDFPNAGNNHIQNPDPAVY

SEQ ID NO: 585100 - protein, 14 aa, Homo sapiens
  CDR3 for beta chain variable domain of TCR clone 292550 (TRBV29-1, TRBJ1-4)
CSVSGLQGGEKLFF

SEQ ID NO: 585101 - protein, 14 aa, Homo sapiens
  CDR3 for alpha chain variable domain of TCR clone 292551 (TRAV13-1, TRAJ26)
CAASSAHYGQNFVF

SEQ ID NO: 585102 - protein, 17 aa, Homo sapiens
  CDR3 for beta chain variable domain of TCR clone 292551 (TRBV25-1, TRBJ2-5)
CASSRRGVRGGQETQYF

SEQ ID NO: 585103 - protein, 17 aa, Homo sapiens
  CDR3 for alpha chain variable domain of TCR clone 292552 (TRAV13-1, TRAJ28)
CAASPPYSGAGSYQLTF

SEQ ID NO: 585104 - protein, 13 aa, Homo sapiens
  CDR3 for beta chain variable domain of TCR clone 292552 (TRBV24-1, TRBJ1-5)
CATSDRGDQPQHF

SEQ ID NO: 585105 - protein, 13 aa, Homo sapiens
  CDR3 for alpha chain variable domain of TCR clone 292553 (TRAV3, TRAJ21)
CAVREPDFNKFYF

SEQ ID NO: 585106 - protein, 15 aa, Homo sapiens
  CDR3 for beta chain variable domain of TCR clone 292553 (TRBV6-6, TRBJ1-5)
CASSSIQGTNQPQHF

SEQ ID NO: 585107 - protein, 15 aa, Homo sapiens
  CDR3 for alpha chain variable domain of TCR clone 292554 (TRAV17, TRAJ57)
CATGPSQGGSEKLVF

SEQ ID NO: 585108 - protein, 16 aa, Homo sapiens
  CDR3 for beta chain variable domain of TCR clone 292554 (TRBV12-4, TRBJ1-5)
CAGSRPAGGSNQPQHF

SEQ ID NO: 585109 - protein, 15 aa, Homo sapiens
  CDR3 for alpha chain variable domain of TCR clone 292555 (TRAV12-2, TRAJ53)
CAVNGGGGSNYKLTF

SEQ ID NO: 585110 - protein, 14 aa, Homo sapiens
  CDR3 for beta chain variable domain of TCR clone 292555 (TRBV15, TRBJ2-3)
CATRSGTSTDTQYF

SEQ ID NO: 585111 - protein, 11 aa, Homo sapiens
  CDR3 for alpha chain variable domain of TCR clone 292556 (TRAV3, TRAJ31)
CAVRPDARLMF

SEQ ID NO: 585112 - protein, 16 aa, Homo sapiens
  CDR3 for beta chain variable domain of TCR clone 292556 (TRBV11-2, TRBJ1-2)
CASSLDTGGADYGYTF

SEQ ID NO: 585113 - protein, 16 aa, Homo sapiens
  CDR3 for alpha chain variable domain of TCR clone 292557 (TRAV30, TRAJ24)
CGTEIVDADSWGKFKF

SEQ ID NO: 585114 - protein, 15 aa, Homo sapiens
  CDR3 for beta chain variable domain of TCR clone 292557 (TRBV15, TRBJ1-5)
CATSRDPVSNQPQHF

SEQ ID NO: 585115 - protein, 13 aa, Homo sapiens
  CDR3 for alpha chain variable domain of TCR clone 292558 (TRAV13-1, TRAJ39)
CAASIWAGDMLTF

SEQ ID NO: 585116 - protein, 15 aa, Homo sapiens
  CDR3 for beta chain variable domain of TCR clone 292558 (TRBV7-9, TRBJ1-1)
CASSLLEQGSTEAFF

SEQ ID NO: 585117 - protein, 12 aa, Homo sapiens
  CDR3 for alpha chain variable domain of TCR clone 292559 (TRAV1-1, TRAJ39)
CAVPVVGNMITF

SEQ ID NO: 585118 - protein, 15 aa, Homo sapiens
  CDR3 for beta chain variable domain of TCR clone 292559 (TRBV27, TRBJ2-1)
CASSNGGGSSNEQFF

SEQ ID NO: 585119 - protein, 13 aa, Homo sapiens
  CDR3 for alpha chain variable domain of TCR clone 292560 (TRAV13-1, TRAJ5)
CAARVTGRRALTF

SEQ ID NO: 585120 - protein, 14 aa, Homo sapiens
  CDR3 for beta chain variable domain of TCR clone 292560 (TRBV7-8, TRBJ2-3)
CASSLEAGTDTQYF

SEQ ID NO: 585121 - protein, 10 aa, Homo sapiens
  CDR3 for alpha chain variable domain of TCR clone 292561 (TRAV1-2, TRAJ34)
RAVNTDKLIF

SEQ ID NO: 585122 - protein, 13 aa, Homo sapiens
  CDR3 for beta chain variable domain of TCR clone 292561 (TRBV10-1, TRBJ2-1)
CASSAGPDNEQFF

SEQ ID NO: 585123 - protein, 13 aa, Homo sapiens
  CDR3 for alpha chain variable domain of TCR clone 292562 (TRAV23/DV6, TRAJ44)
CSINTVTASKLTF

SEQ ID NO: 585124 - protein, 14 aa, Homo sapiens
  CDR3 for beta chain variable domain of TCR clone 292562 (TRBV2, TRBJ2-1)
CASSEALDGNEQFF

SEQ ID NO: 585125 - protein, 11 aa, Homo sapiens
  CDR3 for alpha chain variable domain of TCR clone 292563 (TRAV12-3, TRAJ27)
CAMANAGKSTF

SEQ ID NO: 585126 - protein, 13 aa, Homo sapiens
  CDR3 for beta chain variable domain of TCR clone 292563 (TRBV20-1, TRBJ1-1)
CSARVGGNTEDSF

SEQ ID NO: 585127 - protein, 14 aa, Homo sapiens
  CDR3 for alpha chain variable domain of TCR clone 292564 (TRAV12-2, TRAJ13)
CAVKKTGGYQKDTF

SEQ ID NO: 585128 - protein, 12 aa, Homo sapiens
  CDR3 for beta chain variable domain of TCR clone 292564 (TRBV12-4, TRBJ1-2)
CASSFIWLHLRF

SEQ ID NO: 585129 - protein, 12 aa, Homo sapiens
  CDR3 for alpha chain variable domain of TCR clone 292565 (TRAV13-1, TRAJ21)
CAAKEGFNKFYF

SEQ ID NO: 585130 - protein, 16 aa, Homo sapiens
  CDR3 for beta chain variable domain of TCR clone 292565 (TRBV7-9, TRBJ2-2)
CASSGFGGANTGELFF

SEQ ID NO: 585131 - protein, 14 aa, Homo sapiens
  CDR3 for alpha chain variable domain of TCR clone 292566 (TRAV12-3, TRAJ13)
FAMRNSGGYQKVTF

SEQ ID NO: 585132 - protein, 14 aa, Homo sapiens
  CDR3 for beta chain variable domain of TCR clone 292566 (TRBV4-1, TRBJ1-6)
CASSPGSDSSPLHF

SEQ ID NO: 585133 - protein, 12 aa, Homo sapiens
  CDR3 for alpha chain variable domain of TCR clone 292567 (TRAV21, TRAJ6)
CAVKGGSYIPTF

SEQ ID NO: 585134 - protein, 15 aa, Homo sapiens
  CDR3 for beta chain variable domain of TCR clone 292567 (TRBV7-9, TRBJ2-7)
CASSLALAEAYEQYF

SEQ ID NO: 585135 - protein, 14 aa, Homo sapiens
  CDR3 for alpha chain variable domain of TCR clone 292568 (TRAV17, TRAJ15)
CDTAPNQAGTALIF

SEQ ID NO: 585136 - protein, 14 aa, Homo sapiens
  CDR3 for beta chain variable domain of TCR clone 292568 (TRBV19, TRBJ2-7)
CASSMGQGAIEQYV

SEQ ID NO: 585137 - protein, 15 aa, Homo sapiens
  CDR3 for alpha chain variable domain of TCR clone 292569 (TRAV2, TRAJ9)
CAVEDRGTGGFTTIF

SEQ ID NO: 585138 - protein, 16 aa, Homo sapiens
  CDR3 for beta chain variable domain of TCR clone 292569 (TRBV24-1, TRBJ2-3)
CATSDPGTGATGTQYF

SEQ ID NO: 585139 - protein, 12 aa, Homo sapiens
  CDR3 for alpha chain variable domain of TCR clone 292570 (TRAV3, TRAJ20)
CAVRDPDYKLSF

SEQ ID NO: 585140 - protein, 13 aa, Homo sapiens
  CDR3 for beta chain variable domain of TCR clone 292570 (TRBV9, TRBJ2-1)
CASSVGQGCEQFF

SEQ ID NO: 585141 - protein, 11 aa, Homo sapiens
  CDR3 for alpha chain variable domain of TCR clone 292571 (TRAV2, TRAJ31)
CAAEPPARLMF

SEQ ID NO: 585142 - protein, 13 aa, Homo sapiens
  CDR3 for beta chain variable domain of TCR clone 292571 (TRBV4-1, TRBJ2-3)
CASSQPPTDTQYF

SEQ ID NO: 585143 - protein, 17 aa, Homo sapiens
  CDR3 for alpha chain variable domain of TCR clone 292572 (TRAV3, TRAJ12)
CAVRDGGRMDSSYKLIF

SEQ ID NO: 585144 - protein, 18 aa, Homo sapiens
  CDR3 for beta chain variable domain of TCR clone 292572 (TRBV11-2, TRBJ2-3)
CASSLGGASRGAPNTQYF

SEQ ID NO: 585145 - protein, 18 aa, Homo sapiens
  CDR3 for alpha chain variable domain of TCR clone 292573 (TRAV12-3, TRAJ52)
CAMSRTNAGGTTYGKLTF

SEQ ID NO: 585146 - protein, 17 aa, Homo sapiens
  CDR3 for beta chain variable domain of TCR clone 292573 (TRBV7-3, TRBJ2-3)
CASSLMKRMRGAETQYF

SEQ ID NO: 585147 - protein, 11 aa, Homo sapiens
  CDR3 for alpha chain variable domain of TCR clone 292574 (TRAV17, TRAJ9)
GGFTGGFKTIF

SEQ ID NO: 585148 - protein, 14 aa, Homo sapiens
  CDR3 for beta chain variable domain of TCR clone 292574 (TRBV7-9, TRBJ2-2)
RASSLVQDTGELFF

SEQ ID NO: 585149 - protein, 17 aa, Homo sapiens
  CDR3 for alpha chain variable domain of TCR clone 292575 (TRAV8-3, TRAJ34)
CAIPGKLIFGTGTRLQV

SEQ ID NO: 585150 - protein, 13 aa, Homo sapiens
  CDR3 for beta chain variable domain of TCR clone 292575 (TRBV12-4, TRBJ2-7)
CASSPTETYEQYF

SEQ ID NO: 585151 - protein, 13 aa, Homo sapiens
  CDR3 for alpha chain variable domain of TCR clone 292576 (TRAV30, TRAJ24)
CGTVTDSWGKWQF

SEQ ID NO: 585152 - protein, 15 aa, Homo sapiens
  CDR3 for beta chain variable domain of TCR clone 292576 (TRBV19, TRBJ1-1)
CASTSGQIQNTEAFF

SEQ ID NO: 585153 - protein, 15 aa, Homo sapiens
  CDR3 for alpha chain variable domain of TCR clone 292577 (TRAV13-1, TRAJ52)
CALRTGGTSYGKLTF

SEQ ID NO: 585154 - protein, 14 aa, Homo sapiens
  CDR3 for beta chain variable domain of TCR clone 292577 (TRBV20-1, TRBJ2-5)
CSASDSRSGETQYF

SEQ ID NO: 585155 - protein, 12 aa, Homo sapiens
  CDR3 for alpha chain variable domain of TCR clone 292578 (TRAV12-1, TRAJ34)
CVVTFNTEKLIF

SEQ ID NO: 585156 - protein, 14 aa, Homo sapiens
  CDR3 for beta chain variable domain of TCR clone 292578 (TRBV19, TRBJ1-1)
CASLRTGLNTEAFF

SEQ ID NO: 585157 - protein, 14 aa, Homo sapiens
  CDR3 for alpha chain variable domain of TCR clone 292579 (TRAV12-2, TRAJ40)
CAVKIPSGTYKYIF

SEQ ID NO: 585158 - protein, 15 aa, Homo sapiens
  CDR3 for beta chain variable domain of TCR clone 292579 (TRBV6-3, TRBJ2-7)
CARSSPRTVFYEQYF

SEQ ID NO: 585159 - protein, 14 aa, Homo sapiens
  CDR3 for alpha chain variable domain of TCR clone 292580 (TRAV13-1, TRAJ21)
CAAKEGFNKFTLDL

SEQ ID NO: 585160 - protein, 14 aa, Homo sapiens
  CDR3 for beta chain variable domain of TCR clone 292580 (TRBV4-2, TRBJ2-3)
CASRETRAPGMQYF

SEQ ID NO: 585161 - protein, 16 aa, Homo sapiens
  CDR3 for alpha chain variable domain of TCR clone 292581 (TRAV12-1, TRAJ42)
CVVTPYYGGSQGNLIF

SEQ ID NO: 585162 - protein, 12 aa, Homo sapiens
  CDR3 for beta chain variable domain of TCR clone 292581 (TRBV19, TRBJ2-5)
CASSISEETQYF

SEQ ID NO: 585163 - protein, 15 aa, Homo sapiens
  CDR3 for alpha chain variable domain of TCR clone 292582 (TRAV23/DV6, TRAJ13)
CAAWPGGGGYQKVTF

SEQ ID NO: 585164 - protein, 17 aa, Homo sapiens
  CDR3 for beta chain variable domain of TCR clone 292582 (TRBV19, TRBJ2-7)
CASSISFYDSYPYGQYF

SEQ ID NO: 585165 - protein, 15 aa, Homo sapiens
  CDR3 for alpha chain variable domain of TCR clone 292583 (TRAV16, TRAJ58)
CITVLSIPSGSRLTF

SEQ ID NO: 585166 - protein, 14 aa, Homo sapiens
  CDR3 for beta chain variable domain of TCR clone 292583 (TRBV6-5, TRBJ2-7)
CASSPHRGLREQYF

SEQ ID NO: 585167 - protein, 17 aa, Homo sapiens
  CDR3 for alpha chain variable domain of TCR clone 292584 (TRAV13-1, TRAJ52)
CAAGRNAGGTSYGKLTF

SEQ ID NO: 585168 - protein, 16 aa, Homo sapiens
  CDR3 for beta chain variable domain of TCR clone 292584 (TRBV4-2, TRBJ1-1)
CASSQAGFGMNTEAFF

SEQ ID NO: 585169 - protein, 13 aa, Homo sapiens
  CDR3 for alpha chain variable domain of TCR clone 292585 (TRAV3, TRAJ31)
CAVREGNNASLMF

SEQ ID NO: 585170 - protein, 15 aa, Homo sapiens
  CDR3 for beta chain variable domain of TCR clone 292585 (TRBV6-1, TRBJ1-1)
CASRTPGQLNTEAFF

SEQ ID NO: 585171 - protein, 10 aa, Homo sapiens
  CDR3 for alpha chain variable domain of TCR clone 292586 (TRAV26-2, TRAJ49)
CILLGTQFYF

SEQ ID NO: 585172 - protein, 13 aa, Homo sapiens
  CDR3 for beta chain variable domain of TCR clone 292586 (TRBV20-1, TRBJ2-7)
CSADPGATYEQYF

SEQ ID NO: 585173 - protein, 12 aa, Homo sapiens
  CDR3 for alpha chain variable domain of TCR clone 292587 (TRAV13-1, TRAJ30)
CAATHRDDKIIF

SEQ ID NO: 585174 - protein, 15 aa, Homo sapiens
  CDR3 for beta chain variable domain of TCR clone 292587 (TRBV6-6, TRBJ2-7)
CASSYSYGGSYEQYF

SEQ ID NO: 585175 - protein, 14 aa, Homo sapiens
  CDR3 for alpha chain variable domain of TCR clone 292588 (TRAV2, TRAJ20)
CAVEDGTNDYKLSF

SEQ ID NO: 585176 - protein, 13 aa, Homo sapiens
  CDR3 for beta chain variable domain of TCR clone 292588 (TRBV7-2, TRBJ1-1)
CASSRNTNTEAFY

SEQ ID NO: 585177 - protein, 15 aa, Homo sapiens
  CDR3 for alpha chain variable domain of TCR clone 292589 (TRAV26-1, TRAJ56)
CIVRVDNGANSKLTF

SEQ ID NO: 585178 - protein, 14 aa, Homo sapiens
  CDR3 for beta chain variable domain of TCR clone 292589 (TRBV20-1, TRBJ1-2)
CSARDARDNYGYTF

SEQ ID NO: 585179 - protein, 14 aa, Homo sapiens
  CDR3 for alpha chain variable domain of TCR clone 292590 (TRAV30, TRAJ26)
CGTEIVSYGQNFVF

SEQ ID NO: 585180 - protein, 15 aa, Homo sapiens
  CDR3 for beta chain variable domain of TCR clone 292590 (TRBV5-1, TRBJ2-1)
CASTGSGRTYNEQFF

SEQ ID NO: 585181 - protein, 21 aa, Homo sapiens
  CDR3 for alpha chain variable domain of TCR clone 292591 (TRAV1-1, TRAJ6)
CAVRREEATYLRLEEEPALLF

SEQ ID NO: 585182 - protein, 15 aa, Homo sapiens
  CDR3 for beta chain variable domain of TCR clone 292591 (TRBV6-6, TRBJ2-1)
CATRQGVSSYNEQFF

SEQ ID NO: 585183 - protein, 14 aa, Homo sapiens
  CDR3 for alpha chain variable domain of TCR clone 292592 (TRAV26-2, TRAJ11)
CIPRLNSGYSTLTF

SEQ ID NO: 585184 - protein, 16 aa, Homo sapiens
  CDR3 for beta chain variable domain of TCR clone 292592 (TRBV10-3, TRBJ2-1)
CAIRGGGRGDYNEQFF

SEQ ID NO: 585185 - protein, 14 aa, Homo sapiens
  CDR3 for alpha chain variable domain of TCR clone 292593 (TRAV20, TRAJ10)
CAVRVEGGGNKLTF

SEQ ID NO: 585186 - protein, 18 aa, Homo sapiens
  CDR3 for beta chain variable domain of TCR clone 292593 (TRBV24-1, TRBJ2-5)
CATSDLMFLGRGVHEQFF

SEQ ID NO: 585187 - protein, 15 aa, Homo sapiens
  CDR3 for alpha chain variable domain of TCR clone 292594 (TRAV1-2, TRAJ32)
CAVRGYGCATNKLIF

SEQ ID NO: 585188 - protein, 15 aa, Homo sapiens
  CDR3 for beta chain variable domain of TCR clone 292594 (TRBV25-1, TRBJ2-5)
CASSDTGTHQETQYF

SEQ ID NO: 585189 - protein, 19 aa, Homo sapiens
  CDR3 for alpha chain variable domain of TCR clone 292595 (TRAV1-2, TRAJ26)
CLLPLCCERPDNYGQNFVF

SEQ ID NO: 585190 - protein, 16 aa, Homo sapiens
  CDR3 for beta chain variable domain of TCR clone 292595 (TRBV2, TRBJ2-1)
CASSANPRDWQAEQFF

SEQ ID NO: 585191 - protein, 19 aa, Homo sapiens
  CDR3 for alpha chain variable domain of TCR clone 292596 (TRAV2, TRAJ20)
ILQVREADAAVYRDCKLGF

SEQ ID NO: 585192 - protein, 13 aa, Homo sapiens
  CDR3 for beta chain variable domain of TCR clone 292596 (TRBV15, TRBJ1-6)
CATSGGLNSPLHF

SEQ ID NO: 585193 - protein, 20 aa, Homo sapiens
  CDR3 for alpha chain variable domain of TCR clone 292597 (TRAV26-1, TRAJ42)
CCVLLHRQTYYGGSQGNLIF

SEQ ID NO: 585194 - protein, 15 aa, Homo sapiens
  CDR3 for beta chain variable domain of TCR clone 292597 (TRBV2, TRBJ2-7)
CASTLLGSGATEQYF

SEQ ID NO: 585195 - protein, 15 aa, Homo sapiens
  CDR3 for alpha chain variable domain of TCR clone 292598 (TRAV23/DV6, TRAJ42)
CAARGYGGSQGNLNF

SEQ ID NO: 585196 - protein, 13 aa, Homo sapiens
  CDR3 for beta chain variable domain of TCR clone 292598 (TRBV7-2, TRBJ1-5)
CASSTQGSQPQHF

SEQ ID NO: 585197 - protein, 15 aa, Homo sapiens
  CDR3 for alpha chain variable domain of TCR clone 292599 (TRAV29/DV5, TRAJ24)
CAASGATDSWGKFQF

SEQ ID NO: 585198 - protein, 14 aa, Homo sapiens
  CDR3 for beta chain variable domain of TCR clone 292599 (TRBV20-1, TRBJ2-7)
CSAKRGRSSYEQYF

SEQ ID NO: 585199 - protein, 13 aa, Homo sapiens
  CDR3 for alpha chain variable domain of TCR clone 292600 (TRAV21, TRAJ27)
CAALNINAGKSTF

SEQ ID NO: 585200 - protein, 14 aa, Homo sapiens
  CDR3 for beta chain variable domain of TCR clone 292600 (TRBV27, TRBJ1-1)
CASSLLRGLSEAFF

SEQ ID NO: 585201 - protein, 13 aa, Homo sapiens
  CDR3 for alpha chain variable domain of TCR clone 292601 (TRAV27, TRAJ45)
CRSSGGGADGLTF

SEQ ID NO: 585202 - protein, 13 aa, Homo sapiens
  CDR3 for beta chain variable domain of TCR clone 292601 (TRBV19, TRBJ1-1)
CASSPSNGGEAFF

SEQ ID NO: 585203 - protein, 14 aa, Homo sapiens
  CDR3 for alpha chain variable domain of TCR clone 292602 (TRAV1-2, TRAJ8)
CAVRGDTGFQKLVF

SEQ ID NO: 585204 - protein, 16 aa, Homo sapiens
  CDR3 for beta chain variable domain of TCR clone 292602 (TRBV12-4, TRBJ2-5)
CASSFFVRGRQETQYF

SEQ ID NO: 585205 - protein, 16 aa, Homo sapiens
  CDR3 for alpha chain variable domain of TCR clone 292603 (TRAV3, TRAJ37)
CAVRTHGSGNTGQLIF

SEQ ID NO: 585206 - protein, 17 aa, Homo sapiens
  CDR3 for beta chain variable domain of TCR clone 292603 (TRBV7-2, TRBJ2-7)
CASSFETSGSTSSTSGR

SEQ ID NO: 585207 - protein, 13 aa, Homo sapiens
  CDR3 for alpha chain variable domain of TCR clone 292604 (TRAV35, TRAJ32)
CAGVGGATNKLIF

SEQ ID NO: 585208 - protein, 16 aa, Homo sapiens
  CDR3 for beta chain variable domain of TCR clone 292604 (TRBV4-2, TRBJ2-3)
CASSLSSGGHTDTQYF

SEQ ID NO: 585209 - protein, 12 aa, Homo sapiens
  CDR3 for alpha chain variable domain of TCR clone 292605 (TRAV1-1, TRAJ43)
CAPRVSSNDMRF

SEQ ID NO: 585210 - protein, 10 aa, Homo sapiens
  CDR3 for beta chain variable domain of TCR clone 292605 (TRBV7-9, TRBJ1-1)
CASSFTEAFF

SEQ ID NO: 585211 - protein, 16 aa, Homo sapiens
  CDR3 for alpha chain variable domain of TCR clone 292606 (TRAV4, TRAJ5)
CLVGPDHGHGQGSTSF

SEQ ID NO: 585212 - protein, 15 aa, Homo sapiens
  CDR3 for beta chain variable domain of TCR clone 292606 (TRBV27, TRBJ2-5)
CASSLIPSGGETQYF

SEQ ID NO: 585213 - protein, 15 aa, Homo sapiens
  CDR3 for alpha chain variable domain of TCR clone 292607 (TRAV21, TRAJ53)
CATLNSGGSNYKPTF

SEQ ID NO: 585214 - protein, 13 aa, Homo sapiens
  CDR3 for beta chain variable domain of TCR clone 292607 (TRBV7-2, TRBJ2-7)
CASSSISGFSEQY

SEQ ID NO: 585215 - protein, 15 aa, Homo sapiens
  CDR3 for alpha chain variable domain of TCR clone 292608 (TRAV3, TRAJ3)
CAVRDGHTSASKIIF

SEQ ID NO: 585216 - protein, 17 aa, Homo sapiens
  CDR3 for beta chain variable domain of TCR clone 292608 (TRBV25-1, TRBJ2-7)
CASSDARVVFSSYEQYF

SEQ ID NO: 585217 - protein, 15 aa, Homo sapiens
  CDR3 for alpha chain variable domain of TCR clone 292609 (TRAV3, TRAJ3)
CVVRDRDSSASKIIF

SEQ ID NO: 585218 - protein, 18 aa, Homo sapiens
  CDR3 for beta chain variable domain of TCR clone 292609 (TRBV25-1, TRBJ1-2)
CASSGLQNGQGLIFGYTF

SEQ ID NO: 585219 - protein, 18 aa, Homo sapiens
  CDR3 for alpha chain variable domain of TCR clone 292610 (TRAV26-2, TRAJ54)
CIVRDVEVGIQGAQKLVF

SEQ ID NO: 585220 - protein, 16 aa, Homo sapiens
  CDR3 for beta chain variable domain of TCR clone 292610 (TRBV6-1, TRBJ2-5)
CASSETLDRGAETQYF

SEQ ID NO: 585221 - protein, 13 aa, Homo sapiens
  CDR3 for alpha chain variable domain of TCR clone 292611 (TRAV23/DV6, TRAJ12)
CAPGGDSSYKLIF

SEQ ID NO: 585222 - protein, 15 aa, Homo sapiens
  CDR3 for beta chain variable domain of TCR clone 292611 (TRBV7-9, TRBJ2-2)
CASRYQSSNTGELFF

SEQ ID NO: 585223 - protein, 16 aa, Homo sapiens
  CDR3 for alpha chain variable domain of TCR clone 292612 (TRAV17, TRAJ52)
CATSNAGGTSYGKLTF

SEQ ID NO: 585224 - protein, 16 aa, Homo sapiens
  CDR3 for beta chain variable domain of TCR clone 292612 (TRBV7-2, TRBJ2-5)
CASSPRGRGGGETQYF

SEQ ID NO: 585225 - protein, 16 aa, Homo sapiens
  CDR3 for alpha chain variable domain of TCR clone 292613 (TRAV3, TRAJ37)
CAVRGKGYGNTGKLIF

SEQ ID NO: 585226 - protein, 14 aa, Homo sapiens
  CDR3 for beta chain variable domain of TCR clone 292613 (TRBV25-1, TRBJ1-1)
CASTHLGGNTEAFF

SEQ ID NO: 585227 - protein, 13 aa, Homo sapiens
  CDR3 for alpha chain variable domain of TCR clone 292614 (TRAV3, TRAJ27)
CAVRPLGAGKSTF

SEQ ID NO: 585228 - protein, 12 aa, Homo sapiens
  CDR3 for beta chain variable domain of TCR clone 292614 (TRBV12-4, TRBJ2-1)
CASSPGRNEQFF

SEQ ID NO: 585229 - protein, 15 aa, Homo sapiens
  CDR3 for alpha chain variable domain of TCR clone 292615 (TRAV8-4, TRAJ37)
CAVTYGSSNTGKLLF

SEQ ID NO: 585230 - protein, 13 aa, Homo sapiens
  CDR3 for beta chain variable domain of TCR clone 292615 (TRBV12-4, TRBJ2-5)
CASSLGGSRTQYF

SEQ ID NO: 585231 - protein, 12 aa, Homo sapiens
  CDR3 for alpha chain variable domain of TCR clone 292616 (TRAV12-3, TRAJ17)
CVMTLTGNKLTF

SEQ ID NO: 585232 - protein, 14 aa, Homo sapiens
  CDR3 for beta chain variable domain of TCR clone 292616 (TRBV7-3, TRBJ2-1)
CASSLAGGTNEQFF

SEQ ID NO: 585233 - protein, 16 aa, Homo sapiens
  CDR3 for alpha chain variable domain of TCR clone 292617 (TRAV4, TRAJ8)
CLVGDSGNTGFQKLVL

SEQ ID NO: 585234 - protein, 15 aa, Homo sapiens
  CDR3 for beta chain variable domain of TCR clone 292617 (TRBV15, TRBJ1-2)
CATSRVRASGSGYTF

SEQ ID NO: 585235 - protein, 16 aa, Homo sapiens
  CDR3 for alpha chain variable domain of TCR clone 292618 (TRAV8-3, TRAJ10)
CAVGPGVTGAGNKLTF

SEQ ID NO: 585236 - protein, 13 aa, Homo sapiens
  CDR3 for beta chain variable domain of TCR clone 292618 (TRBV18, TRBJ1-1)
CASSPGPSGEAFF

SEQ ID NO: 585237 - protein, 14 aa, Homo sapiens
  CDR3 for alpha chain variable domain of TCR clone 292619 (TRAV12-2, TRAJ44)
CAVNPAGTASKLTF

SEQ ID NO: 585238 - protein, 16 aa, Homo sapiens
  CDR3 for beta chain variable domain of TCR clone 292619 (TRBV6-1, TRBJ2-5)
CASSETLDRGAETQYF

SEQ ID NO: 585239 - protein, 13 aa, Homo sapiens
  CDR3 for alpha chain variable domain of TCR clone 292620 (TRAV3, TRAJ20)
CAVRDTGDYKLSF

SEQ ID NO: 585240 - protein, 15 aa, Homo sapiens
  CDR3 for beta chain variable domain of TCR clone 292620 (TRBV27, TRBJ2-1)
CASSNGGGSSNEQFL

SEQ ID NO: 585241 - protein, 12 aa, Homo sapiens
  CDR3 for alpha chain variable domain of TCR clone 292621 (TRAV23/DV6, TRAJ58)
CAARLLRGETSG

SEQ ID NO: 585242 - protein, 15 aa, Homo sapiens
  CDR3 for beta chain variable domain of TCR clone 292621 (TRBV6-3, TRBJ2-7)
CASSSPGTVFYEQYF

SEQ ID NO: 585243 - protein, 18 aa, Homo sapiens
  CDR3 for alpha chain variable domain of TCR clone 292622 (TRAV1-2, TRAJ18)
CAVRDMGDRGSTLGMLYF

SEQ ID NO: 585244 - protein, 16 aa, Homo sapiens
  CDR3 for beta chain variable domain of TCR clone 292622 (TRBV29-1, TRBJ1-2)
CSVEANRDIANYGYTF

SEQ ID NO: 585245 - protein, 13 aa, Homo sapiens
  CDR3 for alpha chain variable domain of TCR clone 292623 (TRAV20, TRAJ21)
CAVEGYNFNKFYF

SEQ ID NO: 585246 - protein, 14 aa, Homo sapiens
  CDR3 for beta chain variable domain of TCR clone 292623 (TRBV3-1, TRBJ2-5)
CASSQGPDEETQYF

SEQ ID NO: 585247 - protein, 16 aa, Homo sapiens
  CDR3 for alpha chain variable domain of TCR clone 292624 (TRAV26-1, TRAJ53)
CIVRVAMGGSKYKLTF

SEQ ID NO: 585248 - protein, 13 aa, Homo sapiens
  CDR3 for beta chain variable domain of TCR clone 292624 (TRBV28, TRBJ2-7)
CASKAGGVYEQYF

SEQ ID NO: 585249 - protein, 14 aa, Homo sapiens
  CDR3 for alpha chain variable domain of TCR clone 292625 (TRAV26-1, TRAJ38)
CIADNAGNNRKLIW

SEQ ID NO: 585250 - protein, 15 aa, Homo sapiens
  CDR3 for beta chain variable domain of TCR clone 292625 (TRBV19, TRBJ1-1)
CASTPGQIQNTEAFF

SEQ ID NO: 585251 - protein, 14 aa, Homo sapiens
  CDR3 for alpha chain variable domain of TCR clone 292626 (TRAV9-2, TRAJ39)
CALHIYNAGNMLTF

SEQ ID NO: 585252 - protein, 16 aa, Homo sapiens
  CDR3 for beta chain variable domain of TCR clone 292626 (TRBV19, TRBJ2-1)
CASSKAGPSSYNEQFF

SEQ ID NO: 585253 - protein, 13 aa, Homo sapiens
  CDR3 for alpha chain variable domain of TCR clone 292627 (TRAV12-1, TRAJ31)
CVGIPNNNARLMF

SEQ ID NO: 585254 - protein, 15 aa, Homo sapiens
  CDR3 for beta chain variable domain of TCR clone 292627 (TRBV6-3, TRBJ2-7)
CASSSPGTVFYEQYF

SEQ ID NO: 585255 - protein, 12 aa, Homo sapiens
  CDR3 for alpha chain variable domain of TCR clone 292628 (TRAV12-3, TRAJ29)
CAAREGNTPLVF

SEQ ID NO: 585256 - protein, 17 aa, Homo sapiens
  CDR3 for beta chain variable domain of TCR clone 292628 (TRBV18, TRBJ2-1)
WASSPLAAGAGDNEQFF

SEQ ID NO: 585257 - protein, 13 aa, Homo sapiens
  CDR3 for alpha chain variable domain of TCR clone 292629 (TRAV27, TRAJ11)
CEGGGSGYSTLTF

SEQ ID NO: 585258 - protein, 15 aa, Homo sapiens
  CDR3 for beta chain variable domain of TCR clone 292629 (TRBV5-1, TRBJ1-1)
CASSLGQGRFAEAFF

SEQ ID NO: 585259 - protein, 14 aa, Homo sapiens
  CDR3 for alpha chain variable domain of TCR clone 292630 (TRAV8-4, TRAJ5)
CAVSTDTGRRALTF

SEQ ID NO: 585260 - protein, 15 aa, Homo sapiens
  CDR3 for beta chain variable domain of TCR clone 292630 (TRBV7-2, TRBJ2-3)
CASSFEGPPGDTQYF

SEQ ID NO: 585261 - protein, 13 aa, Homo sapiens
  CDR3 for alpha chain variable domain of TCR clone 292631 (TRAV21, TRAJ27)
CAARPGNAGKSTF

SEQ ID NO: 585262 - protein, 14 aa, Homo sapiens
  CDR3 for beta chain variable domain of TCR clone 292631 (TRBV20-1, TRBJ2-1)
CSAAGSGGYNEQFF

SEQ ID NO: 585263 - protein, 18 aa, Homo sapiens
  CDR3 for alpha chain variable domain of TCR clone 292632 (TRAV21, TRAJ52)
CAVRLSPAGGTSYGKLTF

SEQ ID NO: 585264 - protein, 13 aa, Homo sapiens
  CDR3 for beta chain variable domain of TCR clone 292632 (TRBV19, TRBJ1-2)
CASSVPGQDGYTF

SEQ ID NO: 585265 - protein, 12 aa, Homo sapiens
  CDR3 for alpha chain variable domain of TCR clone 292633 (TRAV13-1, TRAJ11)
CAGPSGYSTLTF

SEQ ID NO: 585266 - protein, 13 aa, Homo sapiens
  CDR3 for beta chain variable domain of TCR clone 292633 (TRBV12-4, TRBJ2-1)
CASSLAPSNEQFF

SEQ ID NO: 585267 - protein, 16 aa, Homo sapiens
  CDR3 for alpha chain variable domain of TCR clone 292634 (TRAV26-1, TRAJ38)
CIVRAYNAGNNRKLIW

SEQ ID NO: 585268 - protein, 13 aa, Homo sapiens
  CDR3 for beta chain variable domain of TCR clone 292634 (TRBV4-2, TRBJ2-7)
CASSRDPHHEQYF

SEQ ID NO: 585269 - protein, 15 aa, Homo sapiens
  CDR3 for alpha chain variable domain of TCR clone 292635 (TRAV8-3, TRAJ27)
CAVGPSKTNAGKSTF

SEQ ID NO: 585270 - protein, 14 aa, Homo sapiens
  CDR3 for beta chain variable domain of TCR clone 292635 (TRBV18, TRBJ2-7)
CASSPRGGAYEQYF

SEQ ID NO: 585271 - protein, 14 aa, Homo sapiens
  CDR3 for alpha chain variable domain of TCR clone 292636 (TRAV35, TRAJ33)
CAGSSQDSNYQLIW

SEQ ID NO: 585272 - protein, 15 aa, Homo sapiens
  CDR3 for beta chain variable domain of TCR clone 292636 (TRBV4-1, TRBJ2-7)
CASSQNTGRLYEQYF

SEQ ID NO: 585273 - protein, 15 aa, Homo sapiens
  CDR3 for alpha chain variable domain of TCR clone 292637 (TRAV27, TRAJ38)
CAARRNAGNNRKLIW

SEQ ID NO: 585274 - protein, 13 aa, Homo sapiens
  CDR3 for beta chain variable domain of TCR clone 292637 (TRBV27, TRBJ2-1)
CASSSGSYNEQFF

SEQ ID NO: 585275 - protein, 14 aa, Homo sapiens
  CDR3 for alpha chain variable domain of TCR clone 292638 (TRAV2, TRAJ9)
CAVEDRSGGFKTIF

SEQ ID NO: 585276 - protein, 16 aa, Homo sapiens
  CDR3 for beta chain variable domain of TCR clone 292638 (TRBV28, TRBJ2-7)
CASSLFFETGGPEQYF

SEQ ID NO: 585277 - protein, 13 aa, Homo sapiens
  CDR3 for alpha chain variable domain of TCR clone 292639 (TRAV35, TRAJ36)
CAGPRIGANNLFF

SEQ ID NO: 585278 - protein, 15 aa, Homo sapiens
  CDR3 for beta chain variable domain of TCR clone 292639 (TRBV28, TRBJ2-5)
CASSPPWSYQETQYC

SEQ ID NO: 585279 - protein, 15 aa, Homo sapiens
  CDR3 for alpha chain variable domain of TCR clone 292640 (TRAV4, TRAJ10)
CLVGDEEGGRNKLTF

SEQ ID NO: 585280 - protein, 15 aa, Homo sapiens
  CDR3 for beta chain variable domain of TCR clone 292640 (TRBV7-2, TRBJ2-7)
CASSLTGQGTYEQYF

SEQ ID NO: 585281 - protein, 15 aa, Homo sapiens
  CDR3 for alpha chain variable domain of TCR clone 292641 (TRAV13-1, TRAJ52)
CAATSPRTSYGKLTF

SEQ ID NO: 585282 - protein, 15 aa, Homo sapiens
  CDR3 for beta chain variable domain of TCR clone 292641 (TRBV2, TRBJ2-1)
CASSEEREGDNEQFF

SEQ ID NO: 585283 - protein, 12 aa, Homo sapiens
  CDR3 for alpha chain variable domain of TCR clone 292642 (TRAV35, TRAJ30)
FAGLNRDDKIIF

SEQ ID NO: 585284 - protein, 15 aa, Homo sapiens
  CDR3 for beta chain variable domain of TCR clone 292642 (TRBV18, TRBJ2-3)
CASSPLAGETDTQYF

SEQ ID NO: 585285 - protein, 14 aa, Homo sapiens
  CDR3 for alpha chain variable domain of TCR clone 292643 (TRAV14/DV4, TRAJ15)
CAMRRDQAGTALNF

SEQ ID NO: 585286 - protein, 16 aa, Homo sapiens
  CDR3 for beta chain variable domain of TCR clone 292643 (TRBV15, TRBJ2-3)
CATSRDLGIVTDTQYF

SEQ ID NO: 585287 - protein, 13 aa, Homo sapiens
  CDR3 for alpha chain variable domain of TCR clone 292644 (TRAV9-2, TRAJ53)
CALSGGSNYKLTF

SEQ ID NO: 585288 - protein, 17 aa, Homo sapiens
  CDR3 for beta chain variable domain of TCR clone 292644 (TRBV11-2, TRBJ2-1)
CASSLYPPGVEYNEQLF

SEQ ID NO: 585289 - protein, 14 aa, Homo sapiens
  CDR3 for alpha chain variable domain of TCR clone 292645 (TRAV1-2, TRAJ16)
CAVNRVSDGQKLLF

SEQ ID NO: 585290 - protein, 14 aa, Homo sapiens
  CDR3 for beta chain variable domain of TCR clone 292645 (TRBV12-5, TRBJ2-5)
CASGSRTHQETQYF

SEQ ID NO: 585291 - protein, 12 aa, Homo sapiens
  CDR3 for alpha chain variable domain of TCR clone 292646 (TRAV12-3, TRAJ17)
CAMTLTGNKLTF

SEQ ID NO: 585292 - protein, 13 aa, Homo sapiens
  CDR3 for beta chain variable domain of TCR clone 292646 (TRBV7-2, TRBJ2-2)
CASSLAVTGKLFF

SEQ ID NO: 585293 - protein, 12 aa, Homo sapiens
  CDR3 for alpha chain variable domain of TCR clone 292647 (TRAV12-3, TRAJ5)
SAMDTGRRALTF

SEQ ID NO: 585294 - protein, 13 aa, Homo sapiens
  CDR3 for beta chain variable domain of TCR clone 292647 (TRBV7-7, TRBJ2-2)
CASSLTSAGELFF

SEQ ID NO: 585295 - protein, 13 aa, Homo sapiens
  CDR3 for alpha chain variable domain of TCR clone 292648 (TRAV16, TRAJ27)
CALRRINAGKSTF

SEQ ID NO: 585296 - protein, 15 aa, Homo sapiens
  CDR3 for beta chain variable domain of TCR clone 292648 (TRBV18, TRBJ2-1)
CASSPPSASYNEQFF

SEQ ID NO: 585297 - protein, 11 aa, Homo sapiens
  CDR3 for alpha chain variable domain of TCR clone 292649 (TRAV23/DV6, TRAJ58)
CAARLLRGETR

SEQ ID NO: 585298 - protein, 14 aa, Homo sapiens
  CDR3 for beta chain variable domain of TCR clone 292649 (TRBV2, TRBJ2-7)
CASSLTSGGYEQYF

SEQ ID NO: 585299 - protein, 17 aa, Homo sapiens
  CDR3 for alpha chain variable domain of TCR clone 292650 (TRAV3, TRAJ38)
CAVRDCLNAGNNRKLIW

SEQ ID NO: 585300 - protein, 15 aa, Homo sapiens
  CDR3 for beta chain variable domain of TCR clone 292650 (TRBV7-3, TRBJ1-1)
CASSPRADRNTEAFF

SEQ ID NO: 585301 - protein, 13 aa, Homo sapiens
  CDR3 for alpha chain variable domain of TCR clone 292651 (TRAV12-2, TRAJ42)
CAVKRGSRGNLIF

SEQ ID NO: 585302 - protein, 12 aa, Homo sapiens
  CDR3 for beta chain variable domain of TCR clone 292651 (TRBV5-7, TRBJ1-2)
CASSLVQNGYTF

SEQ ID NO: 585303 - protein, 14 aa, Homo sapiens
  CDR3 for alpha chain variable domain of TCR clone 292652 (TRAV12-2, TRAJ40)
CAVKIPSGTYKYIF

SEQ ID NO: 585304 - protein, 13 aa, Homo sapiens
  CDR3 for beta chain variable domain of TCR clone 292652 (TRBV20-1, TRBJ2-7)
CSARGDTQDEQYF

SEQ ID NO: 585305 - protein, 13 aa, Homo sapiens
  CDR3 for alpha chain variable domain of TCR clone 292653 (TRAV21, TRAJ52)
CAVLPSPAGGTSY

SEQ ID NO: 585306 - protein, 15 aa, Homo sapiens
  CDR3 for beta chain variable domain of TCR clone 292653 (TRBV20-1, TRBJ2-5)
CSATPLTGDQETQFF

SEQ ID NO: 585307 - protein, 11 aa, Homo sapiens
  CDR3 for alpha chain variable domain of TCR clone 292654 (TRAV1-1, TRAJ23)
CAVRQGGKLIF

SEQ ID NO: 585308 - protein, 14 aa, Homo sapiens
  CDR3 for beta chain variable domain of TCR clone 292654 (TRBV7-3, TRBJ2-3)
CASSPSARTDTQYF

SEQ ID NO: 585309 - protein, 14 aa, Homo sapiens
  CDR3 for alpha chain variable domain of TCR clone 292655 (TRAV13-1, TRAJ44)
CAAKATGTASKLTY

SEQ ID NO: 585310 - protein, 16 aa, Homo sapiens
  CDR3 for beta chain variable domain of TCR clone 292655 (TRBV7-9, TRBJ2-6)
CASSLKGPLRANVLTF

SEQ ID NO: 585311 - protein, 15 aa, Homo sapiens
  CDR3 for alpha chain variable domain of TCR clone 292656 (TRAV17, TRAJ28)
CATVDSGAGSYQLTF

SEQ ID NO: 585312 - protein, 13 aa, Homo sapiens
  CDR3 for beta chain variable domain of TCR clone 292656 (TRBV5-4, TRBJ2-5)
WASSRQEGETQYF

SEQ ID NO: 585313 - protein, 15 aa, Homo sapiens
  CDR3 for alpha chain variable domain of TCR clone 292657 (TRAV21, TRAJ53)
CATWNSGGSNYKLTF

SEQ ID NO: 585314 - protein, 15 aa, Homo sapiens
  CDR3 for beta chain variable domain of TCR clone 292657 (TRBV20-1, TRBJ2-7)
CSARDRVSGMDEQYF

SEQ ID NO: 585315 - protein, 17 aa, Homo sapiens
  CDR3 for alpha chain variable domain of TCR clone 292658 (TRAV3, TRAJ38)
CAVRDCLNAGNNRKLIW

SEQ ID NO: 585316 - protein, 12 aa, Homo sapiens
  CDR3 for beta chain variable domain of TCR clone 292658 (TRBV14, TRBJ1-1)
CASSQLKGLAFF

SEQ ID NO: 585317 - protein, 18 aa, Homo sapiens
  CDR3 for alpha chain variable domain of TCR clone 292659 (TRAV21, TRAJ52)
CAVRPSPAGGTSYGKQTF

SEQ ID NO: 585318 - protein, 17 aa, Homo sapiens
  CDR3 for beta chain variable domain of TCR clone 292659 (TRBV13, TRBJ2-3)
CASSLTRVAGGRNTQYF

SEQ ID NO: 585319 - protein, 12 aa, Homo sapiens
  CDR3 for alpha chain variable domain of TCR clone 292660 (TRAV21, TRAJ24)
GLQLTAGGKLQF

SEQ ID NO: 585320 - protein, 15 aa, Homo sapiens
  CDR3 for beta chain variable domain of TCR clone 292660 (TRBV2, TRBJ2-1)
CASSEEREGDNEQFF

SEQ ID NO: 585321 - protein, 10 aa, Homo sapiens
  CDR3 for alpha chain variable domain of TCR clone 292661 (TRAV1-2, TRAJ20)
CALNDYKLSF

SEQ ID NO: 585322 - protein, 12 aa, Homo sapiens
  CDR3 for beta chain variable domain of TCR clone 292661 (TRBV5-5, TRBJ2-5)
CASSYFGETQYF

SEQ ID NO: 585323 - protein, 12 aa, Homo sapiens
  CDR3 for alpha chain variable domain of TCR clone 292662 (TRAV8-3, TRAJ41)
CAVGALGYALNF

SEQ ID NO: 585324 - protein, 16 aa, Homo sapiens
  CDR3 for beta chain variable domain of TCR clone 292662 (TRBV7-6, TRBJ2-3)
CASSDSRGQGTDTQYF

SEQ ID NO: 585325 - protein, 13 aa, Homo sapiens
  CDR3 for alpha chain variable domain of TCR clone 292663 (TRAV30, TRAJ31)
CGTETRNNARLMF

SEQ ID NO: 585326 - protein, 15 aa, Homo sapiens
  CDR3 for beta chain variable domain of TCR clone 292663 (TRBV15, TRBJ1-1)
CATSLQGGRNTEAFF

SEQ ID NO: 585327 - protein, 13 aa, Homo sapiens
  CDR3 for alpha chain variable domain of TCR clone 292664 (TRAV1-2, TRAJ9)
CAALNTGGFKTIF

SEQ ID NO: 585328 - protein, 14 aa, Homo sapiens
  CDR3 for beta chain variable domain of TCR clone 292664 (TRBV13, TRBJ2-3)
CASSSGSPTDTQYY

SEQ ID NO: 585329 - protein, 12 aa, Homo sapiens
  CDR3 for alpha chain variable domain of TCR clone 292665 (TRAV13-1, TRAJ9)
CASHTGGFKTIF

SEQ ID NO: 585330 - protein, 13 aa, Homo sapiens
  CDR3 for beta chain variable domain of TCR clone 292665 (TRBV12-4, TRBJ1-2)
CASSSGSKDGHSF

SEQ ID NO: 585331 - protein, 14 aa, Homo sapiens
  CDR3 for alpha chain variable domain of TCR clone 292666 (TRAV12-1, TRAJ17)
CVVNYKAAGNKLTF

SEQ ID NO: 585332 - protein, 12 aa, Homo sapiens
  CDR3 for beta chain variable domain of TCR clone 292666 (TRBV18, TRBJ1-4)
CASSPSREKLFF

SEQ ID NO: 585333 - protein, 23 aa, Homo sapiens
  CDR3 for alpha chain variable domain of TCR clone 292667 (TRAV13-1, TRAJ32)
CAASETVWWCYKQAHLWNWHSAF

SEQ ID NO: 585334 - protein, 15 aa, Homo sapiens
  CDR3 for beta chain variable domain of TCR clone 292667 (TRBV4-1, TRBJ1-4)
CASSDTGGTNEKLFF

SEQ ID NO: 585335 - protein, 14 aa, Homo sapiens
  CDR3 for alpha chain variable domain of TCR clone 292668 (TRAV1-2, TRAJ16)
CAVNRVSAGQKLLF

SEQ ID NO: 585336 - protein, 12 aa, Homo sapiens
  CDR3 for beta chain variable domain of TCR clone 292668 (TRBV24-1, TRBJ1-1)
CATLYPDTEAFF

SEQ ID NO: 585337 - protein, 16 aa, Homo sapiens
  CDR3 for alpha chain variable domain of TCR clone 292669 (TRAV3, TRAJ5)
CAVRNLMDTGRRALTF

SEQ ID NO: 585338 - protein, 16 aa, Homo sapiens
  CDR3 for beta chain variable domain of TCR clone 292669 (TRBV12-5, TRBJ2-5)
CASGPRTSGNEETQYF

SEQ ID NO: 585339 - protein, 17 aa, Homo sapiens
  CDR3 for alpha chain variable domain of TCR clone 292670 (TRAV3, TRAJ6)
CAVRDGPRAGGSYIPTF

SEQ ID NO: 585340 - protein, 19 aa, Homo sapiens
  CDR3 for beta chain variable domain of TCR clone 292670 (TRBV11-3, TRBJ2-1)
CASSLGTRKARSSYNEQFF

SEQ ID NO: 585341 - protein, 14 aa, Homo sapiens
  CDR3 for alpha chain variable domain of TCR clone 292671 (TRAV16, TRAJ33)
CALSAMDSNYQLIW

SEQ ID NO: 585342 - protein, 17 aa, Homo sapiens
  CDR3 for beta chain variable domain of TCR clone 292671 (TRBV28, TRBJ1-4)
CASSLVARGITNEKLFF

SEQ ID NO: 585343 - protein, 13 aa, Homo sapiens
  CDR3 for alpha chain variable domain of TCR clone 292672 (TRAV14/DV4, TRAJ23)
CATREVKGGKLIF

SEQ ID NO: 585344 - protein, 15 aa, Homo sapiens
  CDR3 for beta chain variable domain of TCR clone 292672 (TRBV6-3, TRBJ2-1)
CASSYASDAYNEQFF

SEQ ID NO: 585345 - protein, 11 aa, Homo sapiens
  CDR3 for alpha chain variable domain of TCR clone 292673 (TRAV2, TRAJ13)
CASGGYQKVTF

SEQ ID NO: 585346 - protein, 17 aa, Homo sapiens
  CDR3 for beta chain variable domain of TCR clone 292673 (TRBV20-1, TRBJ2-1)
CSARDPLAGVWDNEQSF

SEQ ID NO: 585347 - protein, 14 aa, Homo sapiens
  CDR3 for alpha chain variable domain of TCR clone 292674 (TRAV13-1, TRAJ44)
CAATSTGTASKLTF

SEQ ID NO: 585348 - protein, 15 aa, Homo sapiens
  CDR3 for beta chain variable domain of TCR clone 292674 (TRBV4-3, TRBJ1-1)
CASSQELGRGTEAFF

SEQ ID NO: 585349 - protein, 15 aa, Homo sapiens
  CDR3 for alpha chain variable domain of TCR clone 292675 (TRAV5, TRAJ33)
CAEAPAMDSNYQLIL

SEQ ID NO: 585350 - protein, 12 aa, Homo sapiens
  CDR3 for beta chain variable domain of TCR clone 292675 (TRBV6-3, TRBJ2-7)
CASSLTPYEQYF

SEQ ID NO: 585351 - protein, 18 aa, Homo sapiens
  CDR3 for alpha chain variable domain of TCR clone 292676 (TRAV12-3, TRAJ52)
CAMSVGGAGGTSHGKLTF

SEQ ID NO: 585352 - protein, 17 aa, Homo sapiens
  CDR3 for beta chain variable domain of TCR clone 292676 (TRBV13, TRBJ2-3)
CASSLSRVAGGRNTQYF

SEQ ID NO: 585353 - protein, 14 aa, Homo sapiens
  CDR3 for alpha chain variable domain of TCR clone 292677 (TRAV26-1, TRAJ34)
CIVRVANNTDKLIF

SEQ ID NO: 585354 - protein, 15 aa, Homo sapiens
  CDR3 for beta chain variable domain of TCR clone 292677 (TRBV20-1, TRBJ2-7)
CSARVPAAYFYEQYL

SEQ ID NO: 585355 - protein, 15 aa, Homo sapiens
  CDR3 for alpha chain variable domain of TCR clone 292678 (TRAV2, TRAJ9)
CAVEDRGTGGFKTIF

SEQ ID NO: 585356 - protein, 19 aa, Homo sapiens
  CDR3 for beta chain variable domain of TCR clone 292678 (TRBV28, TRBJ2-1)
CASSYSGTSRLGWVYEQYF

SEQ ID NO: 585357 - protein, 15 aa, Homo sapiens
  CDR3 for alpha chain variable domain of TCR clone 292679 (TRAV26-1, TRAJ40)
CIVRAVPSGTHTYIF

SEQ ID NO: 585358 - protein, 14 aa, Homo sapiens
  CDR3 for beta chain variable domain of TCR clone 292679 (TRBV19, TRBJ2-1)
CASKDPGLANEQFF

SEQ ID NO: 585359 - protein, 12 aa, Homo sapiens
  CDR3 for alpha chain variable domain of TCR clone 292680 (TRAV8-3, TRAJ26)
CAGDNYGQNFVF

SEQ ID NO: 585360 - protein, 11 aa, Homo sapiens
  CDR3 for beta chain variable domain of TCR clone 292680 (TRBV29-1, TRBJ2-5)
CSEDRTGTRYF

SEQ ID NO: 585361 - protein, 15 aa, Homo sapiens
  CDR3 for alpha chain variable domain of TCR clone 292681 (TRAV27, TRAJ53)
CRAINSGGSNYKLTF

SEQ ID NO: 585362 - protein, 19 aa, Homo sapiens
  CDR3 for beta chain variable domain of TCR clone 292681 (TRBV7-9, TRBJ2-1)
CASSHNRGALLRSYNEQFF

SEQ ID NO: 585363 - protein, 11 aa, Homo sapiens
  CDR3 for alpha chain variable domain of TCR clone 292682 (TRAV3, TRAJ13)
CAVTSYQKVTF

SEQ ID NO: 585364 - protein, 15 aa, Homo sapiens
  CDR3 for beta chain variable domain of TCR clone 292682 (TRBV7-3, TRBJ2-2)
CQQLKRGTLSGELFF

SEQ ID NO: 585365 - protein, 11 aa, Homo sapiens
  CDR3 for alpha chain variable domain of TCR clone 292683 (TRAV3, TRAJ49)
CAAITGNQFYF

SEQ ID NO: 585366 - protein, 16 aa, Homo sapiens
  CDR3 for beta chain variable domain of TCR clone 292683 (TRBV5-1, TRBJ2-3)
CASSVFPMSSTDTQYF

SEQ ID NO: 585367 - protein, 13 aa, Homo sapiens
  CDR3 for alpha chain variable domain of TCR clone 292684 (TRAV3, TRAJ21)
CAVREPDFNKFYF

SEQ ID NO: 585368 - protein, 15 aa, Homo sapiens
  CDR3 for beta chain variable domain of TCR clone 292684 (TRBV28, TRBJ2-7)
CASSLISGGSYEQYF

SEQ ID NO: 585369 - protein, 17 aa, Homo sapiens
  CDR3 for alpha chain variable domain of TCR clone 292685 (TRAV3, TRAJ42)
CAVRDRDYGGSQGNLIF

SEQ ID NO: 585370 - protein, 14 aa, Homo sapiens
  CDR3 for beta chain variable domain of TCR clone 292685 (TRBV12-4, TRBJ1-1)
CASSLGTGGTEAFF

SEQ ID NO: 585371 - protein, 15 aa, Homo sapiens
  CDR3 for alpha chain variable domain of TCR clone 292686 (TRAV8-3, TRAJ45)
CASSYAGGGADGLIF

SEQ ID NO: 585372 - protein, 16 aa, Homo sapiens
  CDR3 for beta chain variable domain of TCR clone 292686 (TRBV7-9, TRBJ2-2)
CASSGFGGANTGELFF

SEQ ID NO: 585373 - protein, 13 aa, Homo sapiens
  CDR3 for alpha chain variable domain of TCR clone 292687 (TRAV8-3, TRAJ28)
CAVGAVRSYQLTF

SEQ ID NO: 585374 - protein, 14 aa, Homo sapiens
  CDR3 for beta chain variable domain of TCR clone 292687 (TRBV7-2, TRBJ2-7)
CASGSQGAAYEQYF

SEQ ID NO: 585375 - protein, 13 aa, Homo sapiens
  CDR3 for alpha chain variable domain of TCR clone 292688 (TRAV17, TRAJ6)
CATGFGGSYIPTF

SEQ ID NO: 585376 - protein, 13 aa, Homo sapiens
  CDR3 for beta chain variable domain of TCR clone 292688 (TRBV7-3, TRBJ1-1)
CASSQDWGAEAFF

SEQ ID NO: 585377 - protein, 15 aa, Homo sapiens
  CDR3 for alpha chain variable domain of TCR clone 292689 (TRAV17, TRAJ54)
CATTRSEQGAQKLVF

SEQ ID NO: 585378 - protein, 15 aa, Homo sapiens
  CDR3 for beta chain variable domain of TCR clone 292689 (TRBV5-1, TRBJ2-2)
CASSSQGGNTGELFF

SEQ ID NO: 585379 - protein, 11 aa, Homo sapiens
  CDR3 for alpha chain variable domain of TCR clone 292690 (TRAV1-1, TRAJ30)
CAQNRDVKIIF

SEQ ID NO: 585380 - protein, 14 aa, Homo sapiens
  CDR3 for beta chain variable domain of TCR clone 292690 (TRBV7-8, TRBJ2-7)
CASSPGLADYEQYF

SEQ ID NO: 585381 - protein, 15 aa, Homo sapiens
  CDR3 for alpha chain variable domain of TCR clone 292691 (TRAV8-3, TRAJ45)
CASSYSGGGADGLTF

SEQ ID NO: 585382 - protein, 14 aa, Homo sapiens
  CDR3 for beta chain variable domain of TCR clone 292691 (TRBV2, TRBJ2-7)
CASSRDRSSYEQYF

SEQ ID NO: 585383 - protein, 13 aa, Homo sapiens
  CDR3 for alpha chain variable domain of TCR clone 292692 (TRAV16, TRAJ9)
CALLATGGFKTIF

SEQ ID NO: 585384 - protein, 16 aa, Homo sapiens
  CDR3 for beta chain variable domain of TCR clone 292692 (TRBV5-1, TRBJ1-3)
CASSRSWEDSGNTICF

SEQ ID NO: 585385 - protein, 14 aa, Homo sapiens
  CDR3 for alpha chain variable domain of TCR clone 292693 (TRAV1-2, TRAJ8)
CAVREDTGFQKLVF

SEQ ID NO: 585386 - protein, 15 aa, Homo sapiens
  CDR3 for beta chain variable domain of TCR clone 292693 (TRBV7-2, TRBJ2-7)
CASSTGLAGSYEQYF

SEQ ID NO: 585387 - protein, 11 aa, Homo sapiens
  CDR3 for alpha chain variable domain of TCR clone 292694 (TRAV25, TRAJ47)
CAGLYGNKLVF

SEQ ID NO: 585388 - protein, 14 aa, Homo sapiens
  CDR3 for beta chain variable domain of TCR clone 292694 (TRBV19, TRBJ2-1)
CARKEGVQVNEQFF

SEQ ID NO: 585389 - protein, 15 aa, Homo sapiens
  CDR3 for alpha chain variable domain of TCR clone 292695 (TRAV26-1, TRAJ22)
CIVRVSFCFCKATDL

SEQ ID NO: 585390 - protein, 13 aa, Homo sapiens
  CDR3 for beta chain variable domain of TCR clone 292695 (TRBV7-9, TRBJ1-2)
CASSVKQNYGYTF

SEQ ID NO: 585391 - protein, 13 aa, Homo sapiens
  CDR3 for alpha chain variable domain of TCR clone 292696 (TRAV27, TRAJ41)
CAGEGNSGYALNF

SEQ ID NO: 585392 - protein, 14 aa, Homo sapiens
  CDR3 for beta chain variable domain of TCR clone 292696 (TRBV11-2, TRBJ2-1)
CASSLDSNYNEQVF

SEQ ID NO: 585393 - protein, 14 aa, Homo sapiens
  CDR3 for alpha chain variable domain of TCR clone 292697 (TRAV12-3, TRAJ10)
SHLPLTGGGNKLTF

SEQ ID NO: 585394 - protein, 15 aa, Homo sapiens
  CDR3 for beta chain variable domain of TCR clone 292697 (TRBV11-2, TRBJ2-1)
CASSSPSTRYNEQFF

SEQ ID NO: 585395 - protein, 13 aa, Homo sapiens
  CDR3 for alpha chain variable domain of TCR clone 292698 (TRAV20, TRAJ7)
CAVLQGGNNRLAF

SEQ ID NO: 585396 - protein, 16 aa, Homo sapiens
  CDR3 for beta chain variable domain of TCR clone 292698 (TRBV6-1, TRBJ2-5)
CASSLRTGGVGETQYL

SEQ ID NO: 585397 - protein, 13 aa, Homo sapiens
  CDR3 for alpha chain variable domain of TCR clone 292699 (TRAV29/DV5, TRAJ31)
CAASRNNNARLMF

SEQ ID NO: 585398 - protein, 16 aa, Homo sapiens
  CDR3 for beta chain variable domain of TCR clone 292699 (TRBV10-3, TRBJ2-1)
CAIRGGGRGDYNEQFF

SEQ ID NO: 585399 - protein, 22 aa, Homo sapiens
  CDR3 for alpha chain variable domain of TCR clone 292700 (TRAV8-2, TRAJ45)
HLTKPSAHMNDAAEYSADGLTF

SEQ ID NO: 585400 - protein, 13 aa, Homo sapiens
  CDR3 for beta chain variable domain of TCR clone 292700 (TRBV7-3, TRBJ2-1)
CASSPVAYNEQFF

SEQ ID NO: 585401 - protein, 14 aa, Homo sapiens
  CDR3 for alpha chain variable domain of TCR clone 292701 (TRAV12-2, TRAJ13)
CAVKKTGGDQKATF

SEQ ID NO: 585402 - protein, 15 aa, Homo sapiens
  CDR3 for beta chain variable domain of TCR clone 292701 (TRBV27, TRBJ2-1)
CASSNGGGSSNEQFF

SEQ ID NO: 585403 - protein, 13 aa, Homo sapiens
  CDR3 for alpha chain variable domain of TCR clone 292702 (TRAV27, TRAJ29)
CAGAHSGNTPLVF

SEQ ID NO: 585404 - protein, 13 aa, Homo sapiens
  CDR3 for beta chain variable domain of TCR clone 292702 (TRBV5-1, TRBJ1-1)
CASSLGSDTEAFF

SEQ ID NO: 585405 - protein, 12 aa, Homo sapiens
  CDR3 for alpha chain variable domain of TCR clone 292703 (TRAV16, TRAJ26)
CALRSYGQNFVF

SEQ ID NO: 585406 - protein, 13 aa, Homo sapiens
  CDR3 for beta chain variable domain of TCR clone 292703 (TRBV12-4, TRBJ1-1)
CASSPGTGCEAFF

SEQ ID NO: 585407 - protein, 13 aa, Homo sapiens
  CDR3 for alpha chain variable domain of TCR clone 292704 (TRAV21, TRAJ27)
CAARPGNAGKSTF

SEQ ID NO: 585408 - protein, 17 aa, Homo sapiens
  CDR3 for beta chain variable domain of TCR clone 292704 (TRBV11-2, TRBJ2-5)
CASSVGAGDPVLRARHA

SEQ ID NO: 585409 - protein, 12 aa, Homo sapiens
  CDR3 for alpha chain variable domain of TCR clone 292705 (TRAV12-3, TRAJ17)
CAMTLTGNKLTF

SEQ ID NO: 585410 - protein, 13 aa, Homo sapiens
  CDR3 for beta chain variable domain of TCR clone 292705 (TRBV27, TRBJ2-1)
CASRTLGVGEQFL

SEQ ID NO: 585411 - protein, 14 aa, Homo sapiens
  CDR3 for alpha chain variable domain of TCR clone 292706 (TRAV8-2, TRAJ37)
CVVSLTGNTGKLIF

SEQ ID NO: 585412 - protein, 13 aa, Homo sapiens
  CDR3 for beta chain variable domain of TCR clone 292706 (TRBV7-9, TRBJ1-2)
RASSPKTGYGYTF

SEQ ID NO: 585413 - protein, 12 aa, Homo sapiens
  CDR3 for alpha chain variable domain of TCR clone 292707 (TRAV8-3, TRAJ4)
PAFSGGHNKLIF

SEQ ID NO: 585414 - protein, 13 aa, Homo sapiens
  CDR3 for beta chain variable domain of TCR clone 292707 (TRBV20-1, TRBJ1-3)
CSAGAYSGNTIYF

SEQ ID NO: 585415 - protein, 17 aa, Homo sapiens
  CDR3 for alpha chain variable domain of TCR clone 292708 (TRAV13-1, TRAJ31)
CAPRDRLMFGDGTQVVV

SEQ ID NO: 585416 - protein, 12 aa, Homo sapiens
  CDR3 for beta chain variable domain of TCR clone 292708 (TRBV7-9, TRBJ2-7)
CASSLEGYEQYF

SEQ ID NO: 585417 - protein, 12 aa, Homo sapiens
  CDR3 for alpha chain variable domain of TCR clone 292709 (TRAV21, TRAJ12)
CAVMDSSYKLIF

SEQ ID NO: 585418 - protein, 16 aa, Homo sapiens
  CDR3 for beta chain variable domain of TCR clone 292709 (TRBV7-9, TRBJ2-5)
CASRLEIGTRKESQYF

SEQ ID NO: 585419 - protein, 13 aa, Homo sapiens
  CDR3 for alpha chain variable domain of TCR clone 292710 (TRAV13-1, TRAJ12)
CSKYMGSSYKLIF

SEQ ID NO: 585420 - protein, 15 aa, Homo sapiens
  CDR3 for beta chain variable domain of TCR clone 292710 (TRBV7-9, TRBJ1-5)
CASSQGHQPNQTQHF

SEQ ID NO: 585421 - protein, 17 aa, Homo sapiens
  CDR3 for alpha chain variable domain of TCR clone 292711 (TRAV16, TRAJ37)
CAFWPKNGSSNTGKLIF

SEQ ID NO: 585422 - protein, 17 aa, Homo sapiens
  CDR3 for beta chain variable domain of TCR clone 292711 (TRBV13, TRBJ2-3)
CASSLSRVAGGRNTQYF

SEQ ID NO: 585423 - protein, 11 aa, Homo sapiens
  CDR3 for alpha chain variable domain of TCR clone 292712 (TRAV21, TRAJ11)
CAVNGYSTLTC

SEQ ID NO: 585424 - protein, 11 aa, Homo sapiens
  CDR3 for beta chain variable domain of TCR clone 292712 (TRBV19, TRBJ1-1)
CASSIGSEAFS

SEQ ID NO: 585425 - protein, 11 aa, Homo sapiens
  CDR3 for alpha chain variable domain of TCR clone 292713 (TRAV1-1, TRAJ23)
CAVRQGGKLIF

SEQ ID NO: 585426 - protein, 14 aa, Homo sapiens
  CDR3 for beta chain variable domain of TCR clone 292713 (TRBV19, TRBJ2-1)
CASPTFVLSGDQFF

SEQ ID NO: 585427 - protein, 12 aa, Homo sapiens
  CDR3 for alpha chain variable domain of TCR clone 292714 (TRAV8-3, TRAJ41)
CAVALSGYALNF

SEQ ID NO: 585428 - protein, 18 aa, Homo sapiens
  CDR3 for beta chain variable domain of TCR clone 292714 (TRBV20-1, TRBJ2-6)
SSAETTPTHGSGANVLTF

SEQ ID NO: 585429 - protein, 11 aa, Homo sapiens
  CDR3 for alpha chain variable domain of TCR clone 292715 (TRAV20, TRAJ34)
CKTKGTDKLIF

SEQ ID NO: 585430 - protein, 14 aa, Homo sapiens
  CDR3 for beta chain variable domain of TCR clone 292715 (TRBV9, TRBJ2-1)
CASSVDPRGKEQFF

SEQ ID NO: 585431 - protein, 14 aa, Homo sapiens
  CDR3 for alpha chain variable domain of TCR clone 292716 (TRAV26-1, TRAJ38)
CIADNAGNKRKLIW

SEQ ID NO: 585432 - protein, 12 aa, Homo sapiens
  CDR3 for beta chain variable domain of TCR clone 292716 (TRBV5-1, TRBJ2-7)
CASSFRGYEQYF

SEQ ID NO: 585433 - protein, 13 aa, Homo sapiens
  CDR3 for alpha chain variable domain of TCR clone 292717 (TRAV12-2, TRAJ42)
CAVKRGSQGNLIF

SEQ ID NO: 585434 - protein, 13 aa, Homo sapiens
  CDR3 for beta chain variable domain of TCR clone 292717 (TRBV7-2, TRBJ2-2)
CASSLAVTGELFF

SEQ ID NO: 585435 - protein, 15 aa, Homo sapiens
  CDR3 for alpha chain variable domain of TCR clone 292718 (TRAV8-6, TRAJ37)
CAVIFSSGNTGKLIF

SEQ ID NO: 585436 - protein, 15 aa, Homo sapiens
  CDR3 for beta chain variable domain of TCR clone 292718 (TRBV25-1, TRBJ2-4)
CASSETESAKNIQHF

SEQ ID NO: 585437 - protein, 14 aa, Homo sapiens
  CDR3 for alpha chain variable domain of TCR clone 292719 (TRAV35, TRAJ44)
CAGRPSRTARKLTF

SEQ ID NO: 585438 - protein, 14 aa, Homo sapiens
  CDR3 for beta chain variable domain of TCR clone 292719 (TRBV7-2, TRBJ1-3)
CASSRGGTGNTIYF

SEQ ID NO: 585439 - protein, 13 aa, Homo sapiens
  CDR3 for alpha chain variable domain of TCR clone 292720 (TRAV3, TRAJ21)
CAVREPDFNKFYF

SEQ ID NO: 585440 - protein, 15 aa, Homo sapiens
  CDR3 for beta chain variable domain of TCR clone 292720 (TRBV2, TRBJ2-1)
CAGSELAGGYNEQFF

SEQ ID NO: 585441 - protein, 16 aa, Homo sapiens
  CDR3 for alpha chain variable domain of TCR clone 292721 (TRAV12-3, TRAJ53)
CAMSVGSGGSNYKLTF

SEQ ID NO: 585442 - protein, 13 aa, Homo sapiens
  CDR3 for beta chain variable domain of TCR clone 292721 (TRBV7-6, TRBJ1-2)
CASILVADYGYTF

SEQ ID NO: 585443 - protein, 11 aa, Homo sapiens
  CDR3 for alpha chain variable domain of TCR clone 292722 (TRAV27, TRAJ45)
CAGAQEEALTD

SEQ ID NO: 585444 - protein, 17 aa, Homo sapiens
  CDR3 for beta chain variable domain of TCR clone 292722 (TRBV11-2, TRBJ2-1)
CASSLYPPGVEYNEQFF

SEQ ID NO: 585445 - protein, 12 aa, Homo sapiens
  CDR3 for alpha chain variable domain of TCR clone 292723 (TRAV21, TRAJ39)
CAADNAGNMLTF

SEQ ID NO: 585446 - protein, 12 aa, Homo sapiens
  CDR3 for beta chain variable domain of TCR clone 292723 (TRBV5-4, TRBJ2-7)
CASRWAGQGDNF

SEQ ID NO: 585447 - protein, 18 aa, Homo sapiens
  CDR3 for alpha chain variable domain of TCR clone 292724 (TRAV21, TRAJ53)
CAVKGGENSGVSNYKLTF

SEQ ID NO: 585448 - protein, 13 aa, Homo sapiens
  CDR3 for beta chain variable domain of TCR clone 292724 (TRBV12-4, TRBJ1-1)
CASSPGTGFEAFF

SEQ ID NO: 585449 - protein, 13 aa, Homo sapiens
  CDR3 for alpha chain variable domain of TCR clone 292725 (TRAV29/DV5, TRAJ49)
CAASTNPGNQFYF

SEQ ID NO: 585450 - protein, 13 aa, Homo sapiens
  CDR3 for beta chain variable domain of TCR clone 292725 (TRBV7-2, TRBJ1-4)
CASSLAGLEKLFF

SEQ ID NO: 585451 - protein, 15 aa, Homo sapiens
  CDR3 for alpha chain variable domain of TCR clone 292726 (TRAV26-1, TRAJ15)
CIVRAANQAGTALIF

SEQ ID NO: 585452 - protein, 15 aa, Homo sapiens
  CDR3 for beta chain variable domain of TCR clone 292726 (TRBV20-1, TRBJ1-1)
CSARSAATSNPEAFF

SEQ ID NO: 585453 - protein, 16 aa, Homo sapiens
  CDR3 for alpha chain variable domain of TCR clone 292727 (TRAV26-1, TRAJ37)
CIFRGDGPGNTGKLIF

SEQ ID NO: 585454 - protein, 17 aa, Homo sapiens
  CDR3 for beta chain variable domain of TCR clone 292727 (TRBV4-1, TRBJ2-7)
CASSRDPLGVRGGEQYF

SEQ ID NO: 585455 - protein, 15 aa, Homo sapiens
  CDR3 for alpha chain variable domain of TCR clone 292728 (TRAV3, TRAJ22)
CAVRDRGGSAGQLSF

SEQ ID NO: 585456 - protein, 15 aa, Homo sapiens
  CDR3 for beta chain variable domain of TCR clone 292728 (TRBV19, TRBJ2-5)
CASSIVRASQETQYF

SEQ ID NO: 585457 - protein, 16 aa, Homo sapiens
  CDR3 for alpha chain variable domain of TCR clone 292729 (TRAV30, TRAJ24)
CGTEIVDADSWGKFQF

SEQ ID NO: 585458 - protein, 16 aa, Homo sapiens
  CDR3 for beta chain variable domain of TCR clone 292729 (TRBV5-1, TRBJ2-3)
CASSLEGGSFTDTQYF

SEQ ID NO: 585459 - protein, 11 aa, Homo sapiens
  CDR3 for alpha chain variable domain of TCR clone 292730 (TRAV12-3, TRAJ43)
CSMSVSNDMRF

SEQ ID NO: 585460 - protein, 13 aa, Homo sapiens
  CDR3 for beta chain variable domain of TCR clone 292730 (TRBV20-1, TRBJ1-1)
GSAPLGGGTEAFF

SEQ ID NO: 585461 - protein, 13 aa, Homo sapiens
  CDR3 for alpha chain variable domain of TCR clone 292731 (TRAV35, TRAJ27)
CAGQEGDAGKSTF

SEQ ID NO: 585462 - protein, 16 aa, Homo sapiens
  CDR3 for beta chain variable domain of TCR clone 292731 (TRBV7-2, TRBJ2-5)
CASSDKTGISLETQYF

SEQ ID NO: 585463 - protein, 12 aa, Homo sapiens
  CDR3 for alpha chain variable domain of TCR clone 292732 (TRAV12-3, TRAJ5)
CAMDTGRRALTF

SEQ ID NO: 585464 - protein, 14 aa, Homo sapiens
  CDR3 for beta chain variable domain of TCR clone 292732 (TRBV6-3, TRBJ1-1)
CASRYTGESTEAFF

SEQ ID NO: 585465 - protein, 12 aa, Homo sapiens
  CDR3 for alpha chain variable domain of TCR clone 292733 (TRAV12-3, TRAJ17)
CAMTLTGNKLTF

SEQ ID NO: 585466 - protein, 15 aa, Homo sapiens
  CDR3 for beta chain variable domain of TCR clone 292733 (TRBV11-2, TRBJ2-2)
CASSSDRVSAGELFF

SEQ ID NO: 585467 - protein, 12 aa, Homo sapiens
  CDR3 for alpha chain variable domain of TCR clone 292734 (TRAV17, TRAJ20)
CATQANDYKLSF

SEQ ID NO: 585468 - protein, 14 aa, Homo sapiens
  CDR3 for beta chain variable domain of TCR clone 292734 (TRBV19, TRBJ2-1)
CASSDNQGANEQFF

SEQ ID NO: 585469 - protein, 14 aa, Homo sapiens
  CDR3 for alpha chain variable domain of TCR clone 292735 (TRAV12-3, TRAJ10)
SHLPLTGGGNKLTF

SEQ ID NO: 585470 - protein, 14 aa, Homo sapiens
  CDR3 for beta chain variable domain of TCR clone 292735 (TRBV28, TRBJ2-5)
CQQFTGDPGETQYF

SEQ ID NO: 585471 - protein, 14 aa, Homo sapiens
  CDR3 for alpha chain variable domain of TCR clone 292736 (TRAV17, TRAJ57)
CATDPQGGSEKLVF

SEQ ID NO: 585472 - protein, 15 aa, Homo sapiens
  CDR3 for beta chain variable domain of TCR clone 292736 (TRBV5-5, TRBJ1-5)
CASSLEDRGYQPQHF

SEQ ID NO: 585473 - protein, 10 aa, Homo sapiens
  CDR3 for alpha chain variable domain of TCR clone 292737 (TRAV12-3, TRAJ49)
CAMNDDQFYF

SEQ ID NO: 585474 - protein, 15 aa, Homo sapiens
  CDR3 for beta chain variable domain of TCR clone 292737 (TRBV11-3, TRBJ2-3)
CASLKDGREGDTQYF

SEQ ID NO: 585475 - protein, 17 aa, Homo sapiens
  CDR3 for alpha chain variable domain of TCR clone 292738 (TRAV3, TRAJ6)
CAVRDGPGAGGSYIPTC

SEQ ID NO: 585476 - protein, 14 aa, Homo sapiens
  CDR3 for beta chain variable domain of TCR clone 292738 (TRBV7-2, TRBJ2-7)
CASSPKTSFYEQYF

SEQ ID NO: 585477 - protein, 10 aa, Homo sapiens
  CDR3 for alpha chain variable domain of TCR clone 292739 (TRAV13-1, TRAJ15)
INQAGTALIF

SEQ ID NO: 585478 - protein, 14 aa, Homo sapiens
  CDR3 for beta chain variable domain of TCR clone 292739 (TRBV7-9, TRBJ2-1)
CASSDNSGYNEQLF

SEQ ID NO: 585479 - protein, 13 aa, Homo sapiens
  CDR3 for alpha chain variable domain of TCR clone 292740 (TRAV4, TRAJ34)
CLGGDYNTDKLIF

SEQ ID NO: 585480 - protein, 23 aa, Homo sapiens
  CDR3 for beta chain variable domain of TCR clone 292740 (TRBV4-2, TRBJ2-3)
CASSQDPPRASSISGGRGDTQYF

SEQ ID NO: 585481 - protein, 17 aa, Homo sapiens
  CDR3 for alpha chain variable domain of TCR clone 292741 (TRAV26-1, TRAJ53)
CIVRVDDSGGSNYKLTF

SEQ ID NO: 585482 - protein, 16 aa, Homo sapiens
  CDR3 for beta chain variable domain of TCR clone 292741 (TRBV4-2, TRBJ2-3)
CASSQELAGDTDTQYF

SEQ ID NO: 585483 - protein, 14 aa, Homo sapiens
  CDR3 for alpha chain variable domain of TCR clone 292742 (TRAV26-1, TRAJ38)
CIANNAGNNRKLIW

SEQ ID NO: 585484 - protein, 13 aa, Homo sapiens
  CDR3 for beta chain variable domain of TCR clone 292742 (TRBV20-1, TRBJ1-1)
CSARGGGNTEAFL

SEQ ID NO: 585485 - protein, 14 aa, Homo sapiens
  CDR3 for alpha chain variable domain of TCR clone 292743 (TRAV26-1, TRAJ38)
CIADNAGNSRKLLW

SEQ ID NO: 585486 - protein, 13 aa, Homo sapiens
  CDR3 for beta chain variable domain of TCR clone 292743 (TRBV4-1, TRBJ2-7)
CASSQGQAYEQYF

SEQ ID NO: 585487 - protein, 15 aa, Homo sapiens
  CDR3 for alpha chain variable domain of TCR clone 292744 (TRAV36/DV7, TRAJ53)
CAVEGSGGSNYKLTF

SEQ ID NO: 585488 - protein, 14 aa, Homo sapiens
  CDR3 for beta chain variable domain of TCR clone 292744 (TRBV7-9, TRBJ2-4)
CASSLAMGGNIQYF

SEQ ID NO: 585489 - protein, 11 aa, Homo sapiens
  CDR3 for alpha chain variable domain of TCR clone 292745 (TRAV21, TRAJ41)
CAVRSGYALNF

SEQ ID NO: 585490 - protein, 13 aa, Homo sapiens
  CDR3 for beta chain variable domain of TCR clone 292745 (TRBV7-2, TRBJ2-5)
CASSETSVETQYF

SEQ ID NO: 585491 - protein, 19 aa, Homo sapiens
  CDR3 for alpha chain variable domain of TCR clone 292746 (TRAV26-1, TRAJ52)
CIVRAHSNAGGTSYGKLTF

SEQ ID NO: 585492 - protein, 14 aa, Homo sapiens
  CDR3 for beta chain variable domain of TCR clone 292746 (TRBV4-1, TRBJ2-2)
CASSQAVNTGELFF

SEQ ID NO: 585493 - protein, 10 aa, Homo sapiens
  CDR3 for alpha chain variable domain of TCR clone 292747 (TRAV8-4, TRAJ43)
CAVSADDMRF

SEQ ID NO: 585494 - protein, 15 aa, Homo sapiens
  CDR3 for beta chain variable domain of TCR clone 292747 (TRBV5-1, TRBJ2-3)
CASSVTSWSTDTHYF

SEQ ID NO: 585495 - protein, 13 aa, Homo sapiens
  CDR3 for alpha chain variable domain of TCR clone 292748 (TRAV12-1, TRAJ7)
CVVDMRGNNRLAF

SEQ ID NO: 585496 - protein, 16 aa, Homo sapiens
  CDR3 for beta chain variable domain of TCR clone 292748 (TRBV20-1, TRBJ1-4)
CSAPGQGLLTNEKLFF

SEQ ID NO: 585497 - protein, 16 aa, Homo sapiens
  CDR3 for alpha chain variable domain of TCR clone 292749 (TRAV26-1, TRAJ37)
CIVRGDGSGNPGKLIF

SEQ ID NO: 585498 - protein, 14 aa, Homo sapiens
  CDR3 for beta chain variable domain of TCR clone 292749 (TRBV19, TRBJ2-2)
CASSGQGIAGELFF

SEQ ID NO: 585499 - protein, 15 aa, Homo sapiens
  CDR3 for alpha chain variable domain of TCR clone 292750 (TRAV26-1, TRAJ48)
CIVRVGDFGNEKLTF

SEQ ID NO: 585500 - protein, 20 aa, Homo sapiens
  CDR3 for beta chain variable domain of TCR clone 292750 (TRBV7-8, TRBJ2-1)
CASSLANRLAGVRSYNEQFF

SEQ ID NO: 585501 - protein, 19 aa, Homo sapiens
  CDR3 for alpha chain variable domain of TCR clone 292751 (TRAV38-1, TRAJ53)
CAFMKHGLESGGSNYTLQF

SEQ ID NO: 585502 - protein, 13 aa, Homo sapiens
  CDR3 for beta chain variable domain of TCR clone 292751 (TRBV19, TRBJ2-7)
CASSPRQSYEQYF

SEQ ID NO: 585503 - protein, 16 aa, Homo sapiens
  CDR3 for alpha chain variable domain of TCR clone 292752 (TRAV12-2, TRAJ18)
CAVTTDRGSNLGRLYF

SEQ ID NO: 585504 - protein, 13 aa, Homo sapiens
  CDR3 for beta chain variable domain of TCR clone 292752 (TRBV19, TRBJ2-3)
CATWDKITDTQYF

SEQ ID NO: 585505 - protein, 14 aa, Homo sapiens
  CDR3 for alpha chain variable domain of TCR clone 292753 (TRAV12-2, TRAJ13)
CAVKKNGGYQKVNF

SEQ ID NO: 585506 - protein, 15 aa, Homo sapiens
  CDR3 for beta chain variable domain of TCR clone 292753 (TRBV27, TRBJ2-1)
CASSNGGGSSNEQFF

SEQ ID NO: 585507 - protein, 22 aa, Homo sapiens
  CDR3 for alpha chain variable domain of TCR clone 292754 (TRAV4, )
CLVGPHNYDIQNPDPAVYQLIY

SEQ ID NO: 585508 - protein, 17 aa, Homo sapiens
  CDR3 for beta chain variable domain of TCR clone 292754 (TRBV24-1, TRBJ2-1)
CATSDVSTSGTYNEQFF

SEQ ID NO: 585509 - protein, 11 aa, Homo sapiens
  CDR3 for alpha chain variable domain of TCR clone 292755 (TRAV2, TRAJ3)
CAVRKEQCFQD

SEQ ID NO: 585510 - protein, 15 aa, Homo sapiens
  CDR3 for beta chain variable domain of TCR clone 292755 (TRBV12-4, TRBJ2-5)
CASSPPTGLQETQYF

SEQ ID NO: 585511 - protein, 16 aa, Homo sapiens
  CDR3 for alpha chain variable domain of TCR clone 292756 (TRAV3, TRAJ37)
CDVRGKGSGNTGTLIF

SEQ ID NO: 585512 - protein, 14 aa, Homo sapiens
  CDR3 for beta chain variable domain of TCR clone 292756 (TRBV7-2, TRBJ2-7)
CASSPKTSFYEQYF

SEQ ID NO: 585513 - protein, 14 aa, Homo sapiens
  CDR3 for alpha chain variable domain of TCR clone 292757 (TRAV13-1, TRAJ3)
CAAEGYSSASKIIF

SEQ ID NO: 585514 - protein, 14 aa, Homo sapiens
  CDR3 for beta chain variable domain of TCR clone 292757 (TRBV19, TRBJ2-5)
CASSSSGIQETHYF

SEQ ID NO: 585515 - protein, 12 aa, Homo sapiens
  CDR3 for alpha chain variable domain of TCR clone 292758 (TRAV21, TRAJ30)
CAGMNRDDKIIF

SEQ ID NO: 585516 - protein, 17 aa, Homo sapiens
  CDR3 for beta chain variable domain of TCR clone 292758 (TRBV5-1, TRBJ1-1)
CASRPIRTGGVNTEAFF

SEQ ID NO: 585517 - protein, 12 aa, Homo sapiens
  CDR3 for alpha chain variable domain of TCR clone 292759 (TRAV2, TRAJ15)
CCASQAGTALIF

SEQ ID NO: 585518 - protein, 14 aa, Homo sapiens
  CDR3 for beta chain variable domain of TCR clone 292759 (TRBV18, TRBJ2-5)
CASSPPGQQETQYF

SEQ ID NO: 585519 - protein, 10 aa, Homo sapiens
  CDR3 for alpha chain variable domain of TCR clone 292760 (TRAV1-2, TRAJ20)
CALNDYKLSF

SEQ ID NO: 585520 - protein, 17 aa, Homo sapiens
  CDR3 for beta chain variable domain of TCR clone 292760 (TRBV24-1, TRBJ1-2)
CATSDPRQGVLSGGYTF

SEQ ID NO: 585521 - protein, 14 aa, Homo sapiens
  CDR3 for alpha chain variable domain of TCR clone 292761 (TRAV12-1, TRAJ17)
CVVNYKVEGNKLTF

SEQ ID NO: 585522 - protein, 17 aa, Homo sapiens
  CDR3 for beta chain variable domain of TCR clone 292761 (TRBV20-1, TRBJ2-1)
CSASSSGLAGSYNEQFF

SEQ ID NO: 585523 - protein, 17 aa, Homo sapiens
  CDR3 for alpha chain variable domain of TCR clone 292762 (TRAV3, TRAJ42)
CAVRDRDYGGSQGNLIF

SEQ ID NO: 585524 - protein, 16 aa, Homo sapiens
  CDR3 for beta chain variable domain of TCR clone 292762 (TRBV10-2, TRBJ1-5)
CASSVRDRASNQPQHF

SEQ ID NO: 585525 - protein, 12 aa, Homo sapiens
  CDR3 for alpha chain variable domain of TCR clone 292763 (TRAV13-1, TRAJ53)
AASGGSNYKLTF

SEQ ID NO: 585526 - protein, 14 aa, Homo sapiens
  CDR3 for beta chain variable domain of TCR clone 292763 (TRBV20-1, TRBJ2-5)
CSALVPGYQETQYS

SEQ ID NO: 585527 - protein, 14 aa, Homo sapiens
  CDR3 for alpha chain variable domain of TCR clone 292764 (TRAV12-2, TRAJ13)
CAVKKTGGYQKVTF

SEQ ID NO: 585528 - protein, 14 aa, Homo sapiens
  CDR3 for beta chain variable domain of TCR clone 292764 (TRBV11-2, TRBJ1-2)
CASSLGTANYGYTF

SEQ ID NO: 585529 - protein, 12 aa, Homo sapiens
  CDR3 for alpha chain variable domain of TCR clone 292765 (TRAV3, TRAJ20)
CAVKDGDYKLSF

SEQ ID NO: 585530 - protein, 13 aa, Homo sapiens
  CDR3 for beta chain variable domain of TCR clone 292765 (TRBV9, TRBJ2-1)
CASSVGQGGEQFF

SEQ ID NO: 585531 - protein, 13 aa, Homo sapiens
  CDR3 for alpha chain variable domain of TCR clone 292766 (TRAV17, TRAJ9)
CATDYTGGFKTIF

SEQ ID NO: 585532 - protein, 13 aa, Homo sapiens
  CDR3 for beta chain variable domain of TCR clone 292766 (TRBV27, TRBJ1-6)
CASSLVLVSPLHF

SEQ ID NO: 585533 - protein, 13 aa, Homo sapiens
  CDR3 for alpha chain variable domain of TCR clone 292767 (TRAV8-4, TRAJ36)
WAVSVAGANNLFF

SEQ ID NO: 585534 - protein, 15 aa, Homo sapiens
  CDR3 for beta chain variable domain of TCR clone 292767 (TRBV7-2, TRBJ2-5)
CASSLEGRGVETQYF

SEQ ID NO: 585535 - protein, 14 aa, Homo sapiens
  CDR3 for alpha chain variable domain of TCR clone 292768 (TRAV20, TRAJ20)
CAVRRGYNDYKLSF

SEQ ID NO: 585536 - protein, 16 aa, Homo sapiens
  CDR3 for beta chain variable domain of TCR clone 292768 (TRBV5-5, TRBJ2-5)
CASSPMYGGVGETQYF

SEQ ID NO: 585537 - protein, 13 aa, Homo sapiens
  CDR3 for alpha chain variable domain of TCR clone 292769 (TRAV29/DV5, TRAJ31)
CAASRINNARLMF

SEQ ID NO: 585538 - protein, 12 aa, Homo sapiens
  CDR3 for beta chain variable domain of TCR clone 292769 (TRBV14, TRBJ1-1)
CASSQLKGLAFF

SEQ ID NO: 585539 - protein, 12 aa, Homo sapiens
  CDR3 for alpha chain variable domain of TCR clone 292770 (TRAV20, TRAJ33)
CAVRGSNYPLIR

SEQ ID NO: 585540 - protein, 15 aa, Homo sapiens
  CDR3 for beta chain variable domain of TCR clone 292770 (TRBV11-3, TRBJ2-3)
CASLKDGREGDTQYF

SEQ ID NO: 585541 - protein, 12 aa, Homo sapiens
  CDR3 for alpha chain variable domain of TCR clone 292771 (TRAV13-1, TRAJ21)
CAAFFDFNKFYF

SEQ ID NO: 585542 - protein, 14 aa, Homo sapiens
  CDR3 for beta chain variable domain of TCR clone 292771 (TRBV7-2, TRBJ2-7)
CASRSQGAAYEQYF

SEQ ID NO: 585543 - protein, 14 aa, Homo sapiens
  CDR3 for alpha chain variable domain of TCR clone 292772 (TRAV21, TRAJ35)
CAVMPIGFGNVLHC

SEQ ID NO: 585544 - protein, 12 aa, Homo sapiens
  CDR3 for beta chain variable domain of TCR clone 292772 (TRBV7-9, TRBJ2-7)
RASSIKREEQYF

SEQ ID NO: 585545 - protein, 15 aa, Homo sapiens
  CDR3 for alpha chain variable domain of TCR clone 292773 (TRAV13-2, TRAJ8)
CAPGGRNTGFQKLVF

SEQ ID NO: 585546 - protein, 17 aa, Homo sapiens
  CDR3 for beta chain variable domain of TCR clone 292773 (TRBV4-1, TRBJ2-7)
CASSRDPLGVRGGEQYF

SEQ ID NO: 585547 - protein, 15 aa, Homo sapiens
  CDR3 for alpha chain variable domain of TCR clone 292774 (TRAV17, TRAJ22)
CATVAPSGSARQLTF

SEQ ID NO: 585548 - protein, 16 aa, Homo sapiens
  CDR3 for beta chain variable domain of TCR clone 292774 (TRBV20-1, TRBJ1-4)
CSAPGQGLLTNEKLFF

SEQ ID NO: 585549 - protein, 14 aa, Homo sapiens
  CDR3 for alpha chain variable domain of TCR clone 292775 (TRAV1-2, TRAJ16)
CAVNRFSDGQKLLF

SEQ ID NO: 585550 - protein, 11 aa, Homo sapiens
  CDR3 for beta chain variable domain of TCR clone 292775 (TRBV19, TRBJ2-4)
CASSNKNRQYF

SEQ ID NO: 585551 - protein, 13 aa, Homo sapiens
  CDR3 for alpha chain variable domain of TCR clone 292776 (TRAV3, TRAJ27)
CAVRPLGAGKSTF

SEQ ID NO: 585552 - protein, 16 aa, Homo sapiens
  CDR3 for beta chain variable domain of TCR clone 292776 (TRBV13, TRBJ2-2)
CASSPRTGEHTGELFF

SEQ ID NO: 585553 - protein, 11 aa, Homo sapiens
  CDR3 for alpha chain variable domain of TCR clone 292777 (TRAV21, TRAJ34)
CAHYNTDKLIF

SEQ ID NO: 585554 - protein, 15 aa, Homo sapiens
  CDR3 for beta chain variable domain of TCR clone 292777 (TRBV24-1, TRBJ2-4)
CATSDPRDRANSQYF

SEQ ID NO: 585555 - protein, 15 aa, Homo sapiens
  CDR3 for alpha chain variable domain of TCR clone 292778 (TRAV29/DV5, TRAJ29)
CAASERSSGNTPLVF

SEQ ID NO: 585556 - protein, 16 aa, Homo sapiens
  CDR3 for beta chain variable domain of TCR clone 292778 (TRBV20-1, TRBJ1-4)
CSAPGQGLLTNEKLFF

SEQ ID NO: 585557 - protein, 13 aa, Homo sapiens
  CDR3 for alpha chain variable domain of TCR clone 292779 (TRAV21, TRAJ20)
CAGGLRVDYKLSF

SEQ ID NO: 585558 - protein, 16 aa, Homo sapiens
  CDR3 for beta chain variable domain of TCR clone 292779 (TRBV7-9, TRBJ2-1)
CASSDVAGGSYNEQFF

SEQ ID NO: 585559 - protein, 13 aa, Homo sapiens
  CDR3 for alpha chain variable domain of TCR clone 292780 (TRAV21, TRAJ57)
CAVIEGVSEKLVF

SEQ ID NO: 585560 - protein, 15 aa, Homo sapiens
  CDR3 for beta chain variable domain of TCR clone 292780 (TRBV10-3, TRBJ2-5)
CAISEFGRGQETQYF

SEQ ID NO: 585561 - protein, 13 aa, Homo sapiens
  CDR3 for alpha chain variable domain of TCR clone 292781 (TRAV13-1, TRAJ39)
CAASIWAGNMLTF

SEQ ID NO: 585562 - protein, 15 aa, Homo sapiens
  CDR3 for beta chain variable domain of TCR clone 292781 (TRBV7-9, TRBJ1-1)
CASSLLEQVGTEAFF

SEQ ID NO: 585563 - protein, 12 aa, Homo sapiens
  CDR3 for alpha chain variable domain of TCR clone 292782 (TRAV12-3, TRAJ17)
CAMTLTGNKLTF

SEQ ID NO: 585564 - protein, 15 aa, Homo sapiens
  CDR3 for beta chain variable domain of TCR clone 292782 (TRBV10-2, TRBJ2-6)
CASSEQWTGANVLTF

SEQ ID NO: 585565 - protein, 14 aa, Homo sapiens
  CDR3 for alpha chain variable domain of TCR clone 292783 (TRAV1-2, TRAJ8)
CAVREDTGVQKLVF

SEQ ID NO: 585566 - protein, 15 aa, Homo sapiens
  CDR3 for beta chain variable domain of TCR clone 292783 (TRBV7-3, TRBJ2-2)
CASSETGQGTGELFF

SEQ ID NO: 585567 - protein, 13 aa, Homo sapiens
  CDR3 for alpha chain variable domain of TCR clone 292784 (TRAV8-6, TRAJ54)
CAVSEEGAQKLVF

SEQ ID NO: 585568 - protein, 16 aa, Homo sapiens
  CDR3 for beta chain variable domain of TCR clone 292784 (TRBV28, TRBJ2-7)
CASSLFFETGGPEQYF

SEQ ID NO: 585569 - protein, 15 aa, Homo sapiens
  CDR3 for alpha chain variable domain of TCR clone 292785 (TRAV26-1, TRAJ29)
CIVRVEGSGNTPLVF

SEQ ID NO: 585570 - protein, 18 aa, Homo sapiens
  CDR3 for beta chain variable domain of TCR clone 292785 (TRBV28, TRBJ2-1)
CASSSTSGRANSYNEQFF

SEQ ID NO: 585571 - protein, 15 aa, Homo sapiens
  CDR3 for alpha chain variable domain of TCR clone 292786 (TRAV21, TRAJ53)
CATLNSGGINYKLTF

SEQ ID NO: 585572 - protein, 19 aa, Homo sapiens
  CDR3 for beta chain variable domain of TCR clone 292786 (TRBV7-2, TRBJ2-3)
CASSFLSRNWGGGTDTQYF

SEQ ID NO: 585573 - protein, 14 aa, Homo sapiens
  CDR3 for alpha chain variable domain of TCR clone 292787 (TRAV41, TRAJ48)
CAVRPHFGNGKLTF

SEQ ID NO: 585574 - protein, 15 aa, Homo sapiens
  CDR3 for beta chain variable domain of TCR clone 292787 (TRBV20-1, TRBJ1-6)
CSARAASSYNSPLHF

SEQ ID NO: 585575 - protein, 15 aa, Homo sapiens
  CDR3 for alpha chain variable domain of TCR clone 292788 (TRAV17, TRAJ4)
CATGTWSGGYNKLIF

SEQ ID NO: 585576 - protein, 16 aa, Homo sapiens
  CDR3 for beta chain variable domain of TCR clone 292788 (TRBV4-3, TRBJ2-2)
CASSHLQGSGTGELFF

SEQ ID NO: 585577 - protein, 14 aa, Homo sapiens
  CDR3 for alpha chain variable domain of TCR clone 292789 (TRAV35, TRAJ33)
CAGSSQDCNYQLIW

SEQ ID NO: 585578 - protein, 15 aa, Homo sapiens
  CDR3 for beta chain variable domain of TCR clone 292789 (TRBV20-1, TRBJ2-7)
CSAESGTSGAYEQYF

SEQ ID NO: 585579 - protein, 14 aa, Homo sapiens
  CDR3 for alpha chain variable domain of TCR clone 292790 (TRAV1-2, TRAJ8)
CAVREDTVFQKLVF

SEQ ID NO: 585580 - protein, 15 aa, Homo sapiens
  CDR3 for beta chain variable domain of TCR clone 292790 (TRBV28, TRBJ2-6)
CASSLAGSGANVLTF

SEQ ID NO: 585581 - protein, 14 aa, Homo sapiens
  CDR3 for alpha chain variable domain of TCR clone 292791 (TRAV16, TRAJ17)
CAPRIKAAGNKLTF

SEQ ID NO: 585582 - protein, 17 aa, Homo sapiens
  CDR3 for beta chain variable domain of TCR clone 292791 (TRBV7-2, TRBJ2-3)
CARSSYPGSRRADTQYF

SEQ ID NO: 585583 - protein, 14 aa, Homo sapiens
  CDR3 for alpha chain variable domain of TCR clone 292792 (TRAV38-2/DV8, TRAJ23)
CAYRKPNQGGKLIF

SEQ ID NO: 585584 - protein, 13 aa, Homo sapiens
  CDR3 for beta chain variable domain of TCR clone 292792 (TRBV7-9, TRBJ1-2)
CASSLKQNYGYTF

SEQ ID NO: 585585 - protein, 13 aa, Homo sapiens
  CDR3 for alpha chain variable domain of TCR clone 292793 (TRAV12-2, TRAJ42)
FAVKRGSQGNLIF

SEQ ID NO: 585586 - protein, 13 aa, Homo sapiens
  CDR3 for beta chain variable domain of TCR clone 292793 (TRBV7-9, TRBJ2-3)
CASRPGSTDTQYF

SEQ ID NO: 585587 - protein, 14 aa, Homo sapiens
  CDR3 for alpha chain variable domain of TCR clone 292794 (TRAV39, TRAJ42)
CAVDIARSRGNIIF

SEQ ID NO: 585588 - protein, 15 aa, Homo sapiens
  CDR3 for beta chain variable domain of TCR clone 292794 (TRBV27, TRBJ2-7)
CASSLFGTGLDEQYF

SEQ ID NO: 585589 - protein, 14 aa, Homo sapiens
  CDR3 for alpha chain variable domain of TCR clone 292795 (TRAV8-3, TRAJ6)
CAVGGRGGSYIPTF

SEQ ID NO: 585590 - protein, 15 aa, Homo sapiens
  CDR3 for beta chain variable domain of TCR clone 292795 (TRBV7-9, TRBJ1-4)
CASSRTGGFNEKLFF

SEQ ID NO: 585591 - protein, 14 aa, Homo sapiens
  CDR3 for alpha chain variable domain of TCR clone 292796 (TRAV1-2, TRAJ29)
CAVRELTSATPLVF

SEQ ID NO: 585592 - protein, 14 aa, Homo sapiens
  CDR3 for beta chain variable domain of TCR clone 292796 (TRBV3-1, TRBJ2-5)
CASSQGPDQEIQYF

SEQ ID NO: 585593 - protein, 14 aa, Homo sapiens
  CDR3 for alpha chain variable domain of TCR clone 292797 (TRAV26-1, TRAJ45)
CIEVTGGGADGLTF

SEQ ID NO: 585594 - protein, 15 aa, Homo sapiens
  CDR3 for beta chain variable domain of TCR clone 292797 (TRBV5-1, TRBJ1-1)
CASSSTTGTNTEDFF

SEQ ID NO: 585595 - protein, 16 aa, Homo sapiens
  CDR3 for alpha chain variable domain of TCR clone 292798 (TRAV12-2, TRAJ10)
CAVNRVLTGGGKKLTF

SEQ ID NO: 585596 - protein, 14 aa, Homo sapiens
  CDR3 for beta chain variable domain of TCR clone 292798 (TRBV9, TRBJ2-1)
CASSVALAVNEQFF

SEQ ID NO: 585597 - protein, 15 aa, Homo sapiens
  CDR3 for alpha chain variable domain of TCR clone 292799 (TRAV21, TRAJ53)
CATLNSGGSKYKLTF

SEQ ID NO: 585598 - protein, 13 aa, Homo sapiens
  CDR3 for beta chain variable domain of TCR clone 292799 (TRBV7-8, TRBJ2-7)
RRVRLTEMGEQYF

SEQ ID NO: 585599 - protein, 14 aa, Homo sapiens
  CDR3 for alpha chain variable domain of TCR clone 292800 (TRAV21, TRAJ35)
CAVMPIGFGSVLHC

SEQ ID NO: 585600 - protein, 12 aa, Homo sapiens
  CDR3 for beta chain variable domain of TCR clone 292800 (TRBV7-9, TRBJ2-7)
CASSIKREEQSF

SEQ ID NO: 585601 - protein, 12 aa, Homo sapiens
  CDR3 for alpha chain variable domain of TCR clone 292801 (TRAV12-2, TRAJ9)
CAVNTGGFKTIF

SEQ ID NO: 585602 - protein, 17 aa, Homo sapiens
  CDR3 for beta chain variable domain of TCR clone 292801 (TRBV19, TRBJ2-5)
CASSEVGPGQGLETQYF

SEQ ID NO: 585603 - protein, 13 aa, Homo sapiens
  CDR3 for alpha chain variable domain of TCR clone 292802 (TRAV8-4, TRAJ48)
CAVSLFGNEKVTF

SEQ ID NO: 585604 - protein, 15 aa, Homo sapiens
  CDR3 for beta chain variable domain of TCR clone 292802 (TRBV20-1, TRBJ2-7)
CSARKGLAESYEQYF

SEQ ID NO: 585605 - protein, 12 aa, Homo sapiens
  CDR3 for alpha chain variable domain of TCR clone 292803 (TRAV12-2, TRAJ9)
CAVYNGGFKIIF

SEQ ID NO: 585606 - protein, 13 aa, Homo sapiens
  CDR3 for beta chain variable domain of TCR clone 292803 (TRBV9, TRBJ2-7)
CASSVGSAYEQYF

SEQ ID NO: 585607 - protein, 14 aa, Homo sapiens
  CDR3 for alpha chain variable domain of TCR clone 292804 (TRAV26-1, TRAJ38)
CIADNAGNNRKLIW

SEQ ID NO: 585608 - protein, 17 aa, Homo sapiens
  CDR3 for beta chain variable domain of TCR clone 292804 (TRBV7-9, TRBJ2-1)
CASSLVASYPSYNEQFF

SEQ ID NO: 585609 - protein, 16 aa, Homo sapiens
  CDR3 for alpha chain variable domain of TCR clone 292805 (TRAV8-3, TRAJ48)
CAVGLISNFGNEKLNF

SEQ ID NO: 585610 - protein, 13 aa, Homo sapiens
  CDR3 for beta chain variable domain of TCR clone 292805 (TRBV20-1, TRBJ1-5)
CSASWGRSQPQHF

SEQ ID NO: 585611 - protein, 14 aa, Homo sapiens
  CDR3 for alpha chain variable domain of TCR clone 292806 (TRAV8-3, TRAJ20)
CAVGPRGNDYKLSF

SEQ ID NO: 585612 - protein, 11 aa, Homo sapiens
  CDR3 for beta chain variable domain of TCR clone 292806 (TRBV10-3, TRBJ2-2)
CATKGTGELFF

SEQ ID NO: 585613 - protein, 16 aa, Homo sapiens
  CDR3 for alpha chain variable domain of TCR clone 292807 (TRAV21, TRAJ37)
RAVRTAGFSNTGKLIF

SEQ ID NO: 585614 - protein, 13 aa, Homo sapiens
  CDR3 for beta chain variable domain of TCR clone 292807 (TRBV7-9, TRBJ2-5)
CASLPSGRETQYF

SEQ ID NO: 585615 - protein, 16 aa, Homo sapiens
  CDR3 for alpha chain variable domain of TCR clone 292808 (TRAV30, TRAJ24)
CGTEIVDADSWGKFRF

SEQ ID NO: 585616 - protein, 14 aa, Homo sapiens
  CDR3 for beta chain variable domain of TCR clone 292808 (TRBV7-2, TRBJ1-2)
CASSQTGSTYGYTF

SEQ ID NO: 585617 - protein, 15 aa, Homo sapiens
  CDR3 for alpha chain variable domain of TCR clone 292809 (TRAV12-2, TRAJ9)
CAVNNERTGGFRTIF

SEQ ID NO: 585618 - protein, 14 aa, Homo sapiens
  CDR3 for beta chain variable domain of TCR clone 292809 (TRBV4-1, TRBJ1-4)
CASSQERKNEKLFF

SEQ ID NO: 585619 - protein, 18 aa, Homo sapiens
  CDR3 for alpha chain variable domain of TCR clone 292810 (TRAV20, TRAJ4)
CAVQPYYMFSGGYNKLIF

SEQ ID NO: 585620 - protein, 15 aa, Homo sapiens
  CDR3 for beta chain variable domain of TCR clone 292810 (TRBV7-3, TRBJ2-1)
CASSPTGGGEVEQFF

SEQ ID NO: 585621 - protein, 14 aa, Homo sapiens
  CDR3 for alpha chain variable domain of TCR clone 292811 (TRAV1-2, TRAJ16)
CAVNRFSDGQKLLF

SEQ ID NO: 585622 - protein, 17 aa, Homo sapiens
  CDR3 for beta chain variable domain of TCR clone 292811 (TRBV5-1, TRBJ2-2)
CASSFAGLSGGTGELFF

SEQ ID NO: 585623 - protein, 14 aa, Homo sapiens
  CDR3 for alpha chain variable domain of TCR clone 292812 (TRAV12-3, TRAJ10)
SHLPLTGGGNKLSF

SEQ ID NO: 585624 - protein, 12 aa, Homo sapiens
  CDR3 for beta chain variable domain of TCR clone 292812 (TRBV6-6, TRBJ2-3)
CASSSRGDTQYF

SEQ ID NO: 585625 - protein, 16 aa, Homo sapiens
  CDR3 for alpha chain variable domain of TCR clone 292813 (TRAV38-2/DV8, TRAJ45)
CAYTTTSGGGADGPTF

SEQ ID NO: 585626 - protein, 14 aa, Homo sapiens
  CDR3 for beta chain variable domain of TCR clone 292813 (TRBV7-9, TRBJ2-2)
CASSLGHRTGELFF

SEQ ID NO: 585627 - protein, 16 aa, Homo sapiens
  CDR3 for alpha chain variable domain of TCR clone 292814 (TRAV3, TRAJ10)
CALRDMRAGGGNKLIF

SEQ ID NO: 585628 - protein, 19 aa, Homo sapiens
  CDR3 for beta chain variable domain of TCR clone 292814 (TRBV6-3, TRBJ1-2)
CASSYSKGRTGPPNYGYTF

SEQ ID NO: 585629 - protein, 16 aa, Homo sapiens
  CDR3 for alpha chain variable domain of TCR clone 292815 (TRAV6, TRAJ43)
CARHKPRFGAGTRLTV

SEQ ID NO: 585630 - protein, 15 aa, Homo sapiens
  CDR3 for beta chain variable domain of TCR clone 292815 (TRBV19, TRBJ2-4)
CASRGPRRGENIQYF

SEQ ID NO: 585631 - protein, 15 aa, Homo sapiens
  CDR3 for alpha chain variable domain of TCR clone 292816 (TRAV12-1, TRAJ4)
CVVNPFSGGYNKLIF

SEQ ID NO: 585632 - protein, 13 aa, Homo sapiens
  CDR3 for beta chain variable domain of TCR clone 292816 (TRBV20-1, TRBJ1-2)
CSARGIADYGYTF

SEQ ID NO: 585633 - protein, 12 aa, Homo sapiens
  CDR3 for alpha chain variable domain of TCR clone 292817 (TRAV4, TRAJ26)
CLVGYYGQNFVF

SEQ ID NO: 585634 - protein, 16 aa, Homo sapiens
  CDR3 for beta chain variable domain of TCR clone 292817 (TRBV7-2, TRBJ1-2)
CASSSNQDRRGHGYTF

SEQ ID NO: 585635 - protein, 12 aa, Homo sapiens
  CDR3 for alpha chain variable domain of TCR clone 292818 (TRAV12-1, TRAJ31)
CVSWNNNARLMF

SEQ ID NO: 585636 - protein, 13 aa, Homo sapiens
  CDR3 for beta chain variable domain of TCR clone 292818 (TRBV19, TRBJ2-7)
CASRKASGSEQYF

SEQ ID NO: 585637 - protein, 18 aa, Homo sapiens
  CDR3 for alpha chain variable domain of TCR clone 292819 (TRAV14/DV4, )
CAMRDIQNPDPAVYQLRD

SEQ ID NO: 585638 - protein, 14 aa, Homo sapiens
  CDR3 for beta chain variable domain of TCR clone 292819 (TRBV2, TRBJ2-1)
CASSDRAYYNEQFF

SEQ ID NO: 585639 - protein, 15 aa, Homo sapiens
  CDR3 for alpha chain variable domain of TCR clone 292820 (TRAV16, TRAJ16)
CALQGGGSDGQKLLF

SEQ ID NO: 585640 - protein, 12 aa, Homo sapiens
  CDR3 for beta chain variable domain of TCR clone 292820 (TRBV7-9, TRBJ1-4)
CASSTDREKLFF

SEQ ID NO: 585641 - protein, 13 aa, Homo sapiens
  CDR3 for alpha chain variable domain of TCR clone 292821 (TRAV21, TRAJ27)
CAARPGNAGKSTF

SEQ ID NO: 585642 - protein, 12 aa, Homo sapiens
  CDR3 for beta chain variable domain of TCR clone 292821 (TRBV4-1, TRBJ2-1)
CASSQPGQGQFF

SEQ ID NO: 585643 - protein, 17 aa, Homo sapiens
  CDR3 for alpha chain variable domain of TCR clone 292822 (TRAV23/DV6, TRAJ57)
CAASSTLSQGGSEKLVF

SEQ ID NO: 585644 - protein, 14 aa, Homo sapiens
  CDR3 for beta chain variable domain of TCR clone 292822 (TRBV25-1, TRBJ1-1)
YASTHLEGNTEAFF

SEQ ID NO: 585645 - protein, 14 aa, Homo sapiens
  CDR3 for alpha chain variable domain of TCR clone 292823 (TRAV26-1, TRAJ38)
CIADNAGNNRKLIW

SEQ ID NO: 585646 - protein, 15 aa, Homo sapiens
  CDR3 for beta chain variable domain of TCR clone 292823 (TRBV20-1, TRBJ1-1)
RSASRGVTGNTEAFF

SEQ ID NO: 585647 - protein, 11 aa, Homo sapiens
  CDR3 for alpha chain variable domain of TCR clone 292824 (TRAV12-1, TRAJ20)
CGEPDDYKLSF

SEQ ID NO: 585648 - protein, 15 aa, Homo sapiens
  CDR3 for beta chain variable domain of TCR clone 292824 (TRBV11-3, TRBJ2-2)
CASSLVGTGAGELFF

SEQ ID NO: 585649 - protein, 16 aa, Homo sapiens
  CDR3 for alpha chain variable domain of TCR clone 292825 (TRAV30, TRAJ24)
YGTEIVDDDSWGKFQF

SEQ ID NO: 585650 - protein, 18 aa, Homo sapiens
  CDR3 for beta chain variable domain of TCR clone 292825 (TRBV7-9, TRBJ2-7)
CASSLTTSGSRTWYEQYF

SEQ ID NO: 585651 - protein, 18 aa, Homo sapiens
  CDR3 for alpha chain variable domain of TCR clone 292826 (TRAV12-3, TRAJ52)
CAMSRTNAGGTSYGKLTF

SEQ ID NO: 585652 - protein, 15 aa, Homo sapiens
  CDR3 for beta chain variable domain of TCR clone 292826 (TRBV19, TRBJ1-2)
CASGVGQVLNYGYTF

SEQ ID NO: 585653 - protein, 16 aa, Homo sapiens
  CDR3 for alpha chain variable domain of TCR clone 292827 (TRAV30, TRAJ24)
CGTEIVDADSWGKFQS

SEQ ID NO: 585654 - protein, 14 aa, Homo sapiens
  CDR3 for beta chain variable domain of TCR clone 292827 (TRBV7-8, TRBJ2-3)
CASSLEAGTDTQYF

SEQ ID NO: 585655 - protein, 13 aa, Homo sapiens
  CDR3 for alpha chain variable domain of TCR clone 292828 (TRAV3, TRAJ16)
CAVRVRNGQKLLF

SEQ ID NO: 585656 - protein, 15 aa, Homo sapiens
  CDR3 for beta chain variable domain of TCR clone 292828 (TRBV5-1, TRBJ2-1)
CASSPPRAPYNKQFF

SEQ ID NO: 585657 - protein, 11 aa, Homo sapiens
  CDR3 for alpha chain variable domain of TCR clone 292829 (TRAV13-1, TRAJ49)
CAGVGGNQFYF

SEQ ID NO: 585658 - protein, 16 aa, Homo sapiens
  CDR3 for beta chain variable domain of TCR clone 292829 (TRBV11-2, TRBJ2-2)
CASSLRTGNLIGELFF

SEQ ID NO: 585659 - protein, 15 aa, Homo sapiens
  CDR3 for alpha chain variable domain of TCR clone 292830 (TRAV23/DV6, TRAJ38)
CAASGGAGNHRKLTW

SEQ ID NO: 585660 - protein, 13 aa, Homo sapiens
  CDR3 for beta chain variable domain of TCR clone 292830 (TRBV7-2, TRBJ1-2)
CASSLPGLYGYTF

SEQ ID NO: 585661 - protein, 12 aa, Homo sapiens
  CDR3 for alpha chain variable domain of TCR clone 292831 (TRAV21, TRAJ8)
CALNTGFQKLVF

SEQ ID NO: 585662 - protein, 15 aa, Homo sapiens
  CDR3 for beta chain variable domain of TCR clone 292831 (TRBV7-2, TRBJ2-5)
CASSLRGASGEIQYF

SEQ ID NO: 585663 - protein, 12 aa, Homo sapiens
  CDR3 for alpha chain variable domain of TCR clone 292832 (TRAV27, TRAJ49)
CAGAPTGNQFYF

SEQ ID NO: 585664 - protein, 13 aa, Homo sapiens
  CDR3 for beta chain variable domain of TCR clone 292832 (TRBV7-9, TRBJ1-2)
CASSLKQNYGYTF

SEQ ID NO: 585665 - protein, 17 aa, Homo sapiens
  CDR3 for alpha chain variable domain of TCR clone 292833 (TRAV4, TRAJ13)
CLVGVQGSSGGYQKVPF

SEQ ID NO: 585666 - protein, 16 aa, Homo sapiens
  CDR3 for beta chain variable domain of TCR clone 292833 (TRBV28, TRBJ2-7)
CASSLFFETGGPEQYF

SEQ ID NO: 585667 - protein, 18 aa, Homo sapiens
  CDR3 for alpha chain variable domain of TCR clone 292834 (TRAV26-1, TRAJ23)
CIVRVGLEAWNQGGKLIF

SEQ ID NO: 585668 - protein, 16 aa, Homo sapiens
  CDR3 for beta chain variable domain of TCR clone 292834 (TRBV12-4, TRBJ2-5)
CASSFFVRGRQETQYF

SEQ ID NO: 585669 - protein, 10 aa, Homo sapiens
  CDR3 for alpha chain variable domain of TCR clone 292835 (TRAV13-1, TRAJ41)
CAASGPRRTQ

SEQ ID NO: 585670 - protein, 13 aa, Homo sapiens
  CDR3 for beta chain variable domain of TCR clone 292835 (TRBV10-3, TRBJ2-7)
CASKLAVNYEQYF

SEQ ID NO: 585671 - protein, 14 aa, Homo sapiens
  CDR3 for alpha chain variable domain of TCR clone 292836 (TRAV6, TRAJ8)
CALERGTGFQKLVF

SEQ ID NO: 585672 - protein, 12 aa, Homo sapiens
  CDR3 for beta chain variable domain of TCR clone 292836 (TRBV7-9, TRBJ2-7)
CASSIKREEQYF

SEQ ID NO: 585673 - protein, 14 aa, Homo sapiens
  CDR3 for alpha chain variable domain of TCR clone 292837 (TRAV12-2, TRAJ40)
CAAKIPSGTYKYIF

SEQ ID NO: 585674 - protein, 17 aa, Homo sapiens
  CDR3 for beta chain variable domain of TCR clone 292837 (TRBV28, TRBJ2-5)
CASSRQGGLAGAETQYF

SEQ ID NO: 585675 - protein, 16 aa, Homo sapiens
  CDR3 for alpha chain variable domain of TCR clone 292838 (TRAV13-1, TRAJ48)
CSKYRESNFGNEKLTF

SEQ ID NO: 585676 - protein, 17 aa, Homo sapiens
  CDR3 for beta chain variable domain of TCR clone 292838 (TRBV28, TRBJ2-1)
CPSSSARQALTYNEQFF

SEQ ID NO: 585677 - protein, 13 aa, Homo sapiens
  CDR3 for alpha chain variable domain of TCR clone 292839 (TRAV2, TRAJ40)
CAVATSGTYKYIS

SEQ ID NO: 585678 - protein, 14 aa, Homo sapiens
  CDR3 for beta chain variable domain of TCR clone 292839 (TRBV19, TRBJ2-1)
CASPTFVLSGEQFF

SEQ ID NO: 585679 - protein, 14 aa, Homo sapiens
  CDR3 for alpha chain variable domain of TCR clone 292840 (TRAV8-6, TRAJ12)
CAVKAADSSYKLIF

SEQ ID NO: 585680 - protein, 12 aa, Homo sapiens
  CDR3 for beta chain variable domain of TCR clone 292840 (TRBV14, TRBJ1-1)
CASSQLKGLAFF

SEQ ID NO: 585681 - protein, 15 aa, Homo sapiens
  CDR3 for alpha chain variable domain of TCR clone 292841 (TRAV20, TRAJ6)
CAVRLQSGGSYIPTF

SEQ ID NO: 585682 - protein, 14 aa, Homo sapiens
  CDR3 for beta chain variable domain of TCR clone 292841 (TRBV12-4, TRBJ2-7)
CARSASGGWYEQYF

SEQ ID NO: 585683 - protein, 17 aa, Homo sapiens
  CDR3 for alpha chain variable domain of TCR clone 292842 (TRAV26-1, TRAJ53)
CIVRVDDSGGSNYKLTF

SEQ ID NO: 585684 - protein, 14 aa, Homo sapiens
  CDR3 for beta chain variable domain of TCR clone 292842 (TRBV15, TRBJ2-3)
CATRSGTSTDTQYF

SEQ ID NO: 585685 - protein, 12 aa, Homo sapiens
  CDR3 for alpha chain variable domain of TCR clone 292843 (TRAV13-1, TRAJ53)
AASGGSNYKLKF

SEQ ID NO: 585686 - protein, 15 aa, Homo sapiens
  CDR3 for beta chain variable domain of TCR clone 292843 (TRBV5-1, TRBJ2-1)
FASSPPRAPYNEQFF

SEQ ID NO: 585687 - protein, 11 aa, Homo sapiens
  CDR3 for alpha chain variable domain of TCR clone 292844 (TRAV12-1, TRAJ30)
CVVNGQDKIIF

SEQ ID NO: 585688 - protein, 12 aa, Homo sapiens
  CDR3 for beta chain variable domain of TCR clone 292844 (TRBV27, TRBJ2-2)
CTSKLFTGELFF

SEQ ID NO: 585689 - protein, 16 aa, Homo sapiens
  CDR3 for alpha chain variable domain of TCR clone 292845 (TRAV12-2, TRAJ6)
CAAPLAESGGSYIPTF

SEQ ID NO: 585690 - protein, 13 aa, Homo sapiens
  CDR3 for beta chain variable domain of TCR clone 292845 (TRBV6-9, TRBJ2-5)
CASKGDGRRTQYF

SEQ ID NO: 585691 - protein, 14 aa, Homo sapiens
  CDR3 for alpha chain variable domain of TCR clone 292846 (TRAV26-1, TRAJ38)
CIADNAGNNRKLIW

SEQ ID NO: 585692 - protein, 16 aa, Homo sapiens
  CDR3 for beta chain variable domain of TCR clone 292846 (TRBV7-2, TRBJ1-3)
CASSRLEASSGNTIYF

SEQ ID NO: 585693 - protein, 13 aa, Homo sapiens
  CDR3 for alpha chain variable domain of TCR clone 292847 (TRAV2, TRAJ15)
CALASQAGTALIF

SEQ ID NO: 585694 - protein, 15 aa, Homo sapiens
  CDR3 for beta chain variable domain of TCR clone 292847 (TRBV7-3, TRBJ2-2)
CASSETGQGTGELFF

SEQ ID NO: 585695 - protein, 13 aa, Homo sapiens
  CDR3 for alpha chain variable domain of TCR clone 292848 (TRAV12-1, TRAJ29)
CVVNGPGNTHLVF

SEQ ID NO: 585696 - protein, 13 aa, Homo sapiens
  CDR3 for beta chain variable domain of TCR clone 292848 (TRBV7-2, TRBJ2-5)
CASSRGGLETQYF

SEQ ID NO: 585697 - protein, 13 aa, Homo sapiens
  CDR3 for alpha chain variable domain of TCR clone 292849 (TRAV35, TRAJ22)
CGLRPGSARQLTF

SEQ ID NO: 585698 - protein, 15 aa, Homo sapiens
  CDR3 for beta chain variable domain of TCR clone 292849 (TRBV12-4, TRBJ2-5)
CASSPPTGLQETQYF

SEQ ID NO: 585699 - protein, 16 aa, Homo sapiens
  CDR3 for alpha chain variable domain of TCR clone 292850 (TRAV12-1, TRAJ53)
CVVTSVAGGSNYKLTF

SEQ ID NO: 585700 - protein, 14 aa, Homo sapiens
  CDR3 for beta chain variable domain of TCR clone 292850 (TRBV7-8, TRBJ1-2)
CASSPDSLSYGHTF

SEQ ID NO: 585701 - protein, 15 aa, Homo sapiens
  CDR3 for alpha chain variable domain of TCR clone 292851 (TRAV4, TRAJ10)
CIVGDEEGGGNKLTF

SEQ ID NO: 585702 - protein, 15 aa, Homo sapiens
  CDR3 for beta chain variable domain of TCR clone 292851 (TRBV7-2, TRBJ2-7)
CASSLTGQGTYEQYF

SEQ ID NO: 585703 - protein, 13 aa, Homo sapiens
  CDR3 for alpha chain variable domain of TCR clone 292852 (TRAV17, TRAJ26)
CATVDNYGQNFVF

SEQ ID NO: 585704 - protein, 14 aa, Homo sapiens
  CDR3 for beta chain variable domain of TCR clone 292852 (TRBV7-2, TRBJ1-1)
CAISFLTGTTEAFF

SEQ ID NO: 585705 - protein, 14 aa, Homo sapiens
  CDR3 for alpha chain variable domain of TCR clone 292853 (TRAV13-2, TRAJ44)
CAEWRGGTASKLTC

SEQ ID NO: 585706 - protein, 13 aa, Homo sapiens
  CDR3 for beta chain variable domain of TCR clone 292853 (TRBV29-1, TRBJ2-1)
CSVDGGASDEQFF

SEQ ID NO: 585707 - protein, 14 aa, Homo sapiens
  CDR3 for alpha chain variable domain of TCR clone 292854 (TRAV12-2, TRAJ52)
CAVPGGTSYGKLTL

SEQ ID NO: 585708 - protein, 12 aa, Homo sapiens
  CDR3 for beta chain variable domain of TCR clone 292854 (TRBV18, TRBJ2-1)
CASSPGTSEGFF

SEQ ID NO: 585709 - protein, 14 aa, Homo sapiens
  CDR3 for alpha chain variable domain of TCR clone 292855 (TRAV12-2, TRAJ24)
CAVTPADSWGKLQF

SEQ ID NO: 585710 - protein, 14 aa, Homo sapiens
  CDR3 for beta chain variable domain of TCR clone 292855 (TRBV4-1, TRBJ2-2)
CASSQAVNTGELFF

SEQ ID NO: 585711 - protein, 17 aa, Homo sapiens
  CDR3 for alpha chain variable domain of TCR clone 292856 (TRAV23/DV6, TRAJ28)
CAALLAYSGAGSYKLTF

SEQ ID NO: 585712 - protein, 15 aa, Homo sapiens
  CDR3 for beta chain variable domain of TCR clone 292856 (TRBV7-2, TRBJ2-1)
CASSLVAGRYNEQFF

SEQ ID NO: 585713 - protein, 14 aa, Homo sapiens
  CDR3 for alpha chain variable domain of TCR clone 292857 (TRAV8-2, TRAJ4)
CVVSPSGGYNNLIF

SEQ ID NO: 585714 - protein, 14 aa, Homo sapiens
  CDR3 for beta chain variable domain of TCR clone 292857 (TRBV19, TRBJ2-5)
CASSSSGIQETQYF

SEQ ID NO: 585715 - protein, 13 aa, Homo sapiens
  CDR3 for alpha chain variable domain of TCR clone 292858 (TRAV13-1, TRAJ40)
CAASTSGTYKYIF

SEQ ID NO: 585716 - protein, 16 aa, Homo sapiens
  CDR3 for beta chain variable domain of TCR clone 292858 (TRBV9, TRBJ2-1)
CASSAYVLGGPSEQFF

SEQ ID NO: 585717 - protein, 14 aa, Homo sapiens
  CDR3 for alpha chain variable domain of TCR clone 292859 (TRAV1-2, TRAJ16)
CAVNRFSDGEKLLF

SEQ ID NO: 585718 - protein, 15 aa, Homo sapiens
  CDR3 for beta chain variable domain of TCR clone 292859 (TRBV6-6, TRBJ2-7)
CASSYSYGGSYEQYF

SEQ ID NO: 585719 - protein, 15 aa, Homo sapiens
  CDR3 for alpha chain variable domain of TCR clone 292860 (TRAV3, TRAJ29)
CAVRDLYSGNTPLVF

SEQ ID NO: 585720 - protein, 13 aa, Homo sapiens
  CDR3 for beta chain variable domain of TCR clone 292860 (TRBV7-2, TRBJ2-2)
CASSLAVTGELFF

SEQ ID NO: 585721 - protein, 12 aa, Homo sapiens
  CDR3 for alpha chain variable domain of TCR clone 292861 (TRAV12-3, TRAJ17)
CAMTLTGNKLTF

SEQ ID NO: 585722 - protein, 15 aa, Homo sapiens
  CDR3 for beta chain variable domain of TCR clone 292861 (TRBV20-1, TRBJ2-1)
CSARGIGGTYNDQFF

SEQ ID NO: 585723 - protein, 17 aa, Homo sapiens
  CDR3 for alpha chain variable domain of TCR clone 292862 (TRAV3, TRAJ6)
WAARDGPRAGGSYIPTF

SEQ ID NO: 585724 - protein, 14 aa, Homo sapiens
  CDR3 for beta chain variable domain of TCR clone 292862 (TRBV7-2, TRBJ2-7)
CASSPKTSFYEQYF

SEQ ID NO: 585725 - protein, 14 aa, Homo sapiens
  CDR3 for alpha chain variable domain of TCR clone 292863 (TRAV2, TRAJ9)
CAVEDRRGGFKTIF

SEQ ID NO: 585726 - protein, 17 aa, Homo sapiens
  CDR3 for beta chain variable domain of TCR clone 292863 (TRBV24-1, TRBJ2-1)
CATSDVSTSGTYNEQFF

SEQ ID NO: 585727 - protein, 15 aa, Homo sapiens
  CDR3 for alpha chain variable domain of TCR clone 292864 (TRAV12-3, TRAJ27)
CAMRAYNTNAGKSTF

SEQ ID NO: 585728 - protein, 14 aa, Homo sapiens
  CDR3 for beta chain variable domain of TCR clone 292864 (TRBV4-2, TRBJ2-1)
CASGLDRAYNEQFF

SEQ ID NO: 585729 - protein, 17 aa, Homo sapiens
  CDR3 for alpha chain variable domain of TCR clone 292865 (TRAV26-1, TRAJ46)
IASSESEKKSSGDKLTF

SEQ ID NO: 585730 - protein, 13 aa, Homo sapiens
  CDR3 for beta chain variable domain of TCR clone 292865 (TRBV10-3, TRBJ2-7)
CASKLAVNYEQYF

SEQ ID NO: 585731 - protein, 12 aa, Homo sapiens
  CDR3 for alpha chain variable domain of TCR clone 292866 (TRAV13-1, TRAJ53)
AASGGSNYKLTF

SEQ ID NO: 585732 - protein, 16 aa, Homo sapiens
  CDR3 for beta chain variable domain of TCR clone 292866 (TRBV28, TRBJ2-6)
CASRNRRGSGANVLTF

SEQ ID NO: 585733 - protein, 20 aa, Homo sapiens
  CDR3 for alpha chain variable domain of TCR clone 292867 (TRAV21, TRAJ4)
AASQPGDSATFAGGYNKLIV

SEQ ID NO: 585734 - protein, 19 aa, Homo sapiens
  CDR3 for beta chain variable domain of TCR clone 292867 (TRBV18, TRBJ1-3)
CASSPLSRTGMSSGNTIYF

SEQ ID NO: 585735 - protein, 13 aa, Homo sapiens
  CDR3 for alpha chain variable domain of TCR clone 292868 (TRAV12-2, TRAJ42)
CAVKRGSQGNLIF

SEQ ID NO: 585736 - protein, 17 aa, Homo sapiens
  CDR3 for beta chain variable domain of TCR clone 292868 (TRBV20-1, TRBJ2-1)
CSAPPRLAGTRYNEQFF

SEQ ID NO: 585737 - protein, 12 aa, Homo sapiens
  CDR3 for alpha chain variable domain of TCR clone 292869 (TRAV21, TRAJ49)
CAVNDGGNQSYF

SEQ ID NO: 585738 - protein, 14 aa, Homo sapiens
  CDR3 for beta chain variable domain of TCR clone 292869 (TRBV18, TRBJ2-7)
CASSPRGGSYEQYF

SEQ ID NO: 585739 - protein, 16 aa, Homo sapiens
  CDR3 for alpha chain variable domain of TCR clone 292870 (TRAV8-3, TRAJ22)
CAVDLFGPGSARQLTF

SEQ ID NO: 585740 - protein, 14 aa, Homo sapiens
  CDR3 for beta chain variable domain of TCR clone 292870 (TRBV11-2, TRBJ2-7)
CASSLELEGYEQYF

SEQ ID NO: 585741 - protein, 11 aa, Homo sapiens
  CDR3 for alpha chain variable domain of TCR clone 292871 (TRAV21, TRAJ11)
CAVNGYSTLTF

SEQ ID NO: 585742 - protein, 15 aa, Homo sapiens
  CDR3 for beta chain variable domain of TCR clone 292871 (TRBV20-1, TRBJ2-5)
CSARDPRGSQETQYF

SEQ ID NO: 585743 - protein, 13 aa, Homo sapiens
  CDR3 for alpha chain variable domain of TCR clone 292872 (TRAV8-3, TRAJ43)
CAVGTDNNNDMRF

SEQ ID NO: 585744 - protein, 15 aa, Homo sapiens
  CDR3 for beta chain variable domain of TCR clone 292872 (TRBV11-3, TRBJ2-3)
CASLKDGREGDTQYF

SEQ ID NO: 585745 - protein, 18 aa, Homo sapiens
  CDR3 for alpha chain variable domain of TCR clone 292873 (TRAV21, TRAJ52)
CAVRPSPAGGTNYGKLTF

SEQ ID NO: 585746 - protein, 16 aa, Homo sapiens
  CDR3 for beta chain variable domain of TCR clone 292873 (TRBV7-3, TRBJ2-1)
CASSLEGYRSYNEQFF

SEQ ID NO: 585747 - protein, 16 aa, Homo sapiens
  CDR3 for alpha chain variable domain of TCR clone 292874 (TRAV13-2, TRAJ32)
CAENMNYGGATNKLIF

SEQ ID NO: 585748 - protein, 12 aa, Homo sapiens
  CDR3 for beta chain variable domain of TCR clone 292874 (TRBV7-3, TRBJ2-1)
CASSFINNEQFF

SEQ ID NO: 585749 - protein, 15 aa, Homo sapiens
  CDR3 for alpha chain variable domain of TCR clone 292875 (TRAV27, TRAJ45)
CMSPQSGGGADGLTF

SEQ ID NO: 585750 - protein, 14 aa, Homo sapiens
  CDR3 for beta chain variable domain of TCR clone 292875 (TRBV7-2, TRBJ1-1)
CASSFLTGTTEAFF

SEQ ID NO: 585751 - protein, 13 aa, Homo sapiens
  CDR3 for alpha chain variable domain of TCR clone 292876 (TRAV8-3, TRAJ40)
CAVGAQYLRNLQI

SEQ ID NO: 585752 - protein, 14 aa, Homo sapiens
  CDR3 for beta chain variable domain of TCR clone 292876 (TRBV7-8, TRBJ2-5)
CASSATGGQETQYF

SEQ ID NO: 585753 - protein, 10 aa, Homo sapiens
  CDR3 for alpha chain variable domain of TCR clone 292877 (TRAV12-1, TRAJ37)
ARGNTGKLIF

SEQ ID NO: 585754 - protein, 15 aa, Homo sapiens
  CDR3 for beta chain variable domain of TCR clone 292877 (TRBV7-2, TRBJ2-3)
CASSLEQGGTDTQYY

SEQ ID NO: 585755 - protein, 10 aa, Homo sapiens
  CDR3 for alpha chain variable domain of TCR clone 292878 (TRAV1-2, TRAJ31)
CAFFDARLMF

SEQ ID NO: 585756 - protein, 16 aa, Homo sapiens
  CDR3 for beta chain variable domain of TCR clone 292878 (TRBV4-2, TRBJ2-3)
CASSQELAGDTDTQYF

SEQ ID NO: 585757 - protein, 12 aa, Homo sapiens
  CDR3 for alpha chain variable domain of TCR clone 292879 (TRAV12-3, TRAJ17)
CAMTLTGNKLTF

SEQ ID NO: 585758 - protein, 14 aa, Homo sapiens
  CDR3 for beta chain variable domain of TCR clone 292879 (TRBV18, TRBJ1-2)
CASSPARVVYGYTF

SEQ ID NO: 585759 - protein, 13 aa, Homo sapiens
  CDR3 for alpha chain variable domain of TCR clone 292880 (TRAV17, TRAJ5)
CATVDTGRRALTF

SEQ ID NO: 585760 - protein, 14 aa, Homo sapiens
  CDR3 for beta chain variable domain of TCR clone 292880 (TRBV4-2, TRBJ2-3)
CASSQERGTDTQYF

SEQ ID NO: 585761 - protein, 18 aa, Homo sapiens
  CDR3 for alpha chain variable domain of TCR clone 292881 (TRAV3, TRAJ32)
CAVRDIRGYGGATNKLIY

SEQ ID NO: 585762 - protein, 15 aa, Homo sapiens
  CDR3 for beta chain variable domain of TCR clone 292881 (TRBV12-4, TRBJ2-2)
CASSLGVRHTGELFF

SEQ ID NO: 585763 - protein, 14 aa, Homo sapiens
  CDR3 for alpha chain variable domain of TCR clone 292882 (TRAV17, TRAJ54)
CATDANQGAQKLVF

SEQ ID NO: 585764 - protein, 12 aa, Homo sapiens
  CDR3 for beta chain variable domain of TCR clone 292882 (TRBV6-3, TRBJ2-1)
CASSGSYNEKFF

SEQ ID NO: 585765 - protein, 15 aa, Homo sapiens
  CDR3 for alpha chain variable domain of TCR clone 292883 (TRAV12-2, TRAJ43)
CAFDMRFGAGTRLTV

SEQ ID NO: 585766 - protein, 18 aa, Homo sapiens
  CDR3 for beta chain variable domain of TCR clone 292883 (TRBV20-1, TRBJ2-3)
CTASGLAGGPGTTDTQYF

SEQ ID NO: 585767 - protein, 12 aa, Homo sapiens
  CDR3 for alpha chain variable domain of TCR clone 292884 (TRAV3, TRAJ20)
CAVRDPDYKLSF

SEQ ID NO: 585768 - protein, 15 aa, Homo sapiens
  CDR3 for beta chain variable domain of TCR clone 292884 (TRBV29-1, TRBJ2-1)
CSVGRHALFYNEQFF

SEQ ID NO: 585769 - protein, 15 aa, Homo sapiens
  CDR3 for alpha chain variable domain of TCR clone 292885 (TRAV13-1, TRAJ32)
CAASIYAGATNKLIF

SEQ ID NO: 585770 - protein, 14 aa, Homo sapiens
  CDR3 for beta chain variable domain of TCR clone 292885 (TRBV7-9, TRBJ2-1)
CASSLASGSNEQFF

SEQ ID NO: 585771 - protein, 14 aa, Homo sapiens
  CDR3 for alpha chain variable domain of TCR clone 292886 (TRAV12-2, TRAJ13)
CAVKKTGGYQKVTF

SEQ ID NO: 585772 - protein, 15 aa, Homo sapiens
  CDR3 for beta chain variable domain of TCR clone 292886 (TRBV7-6, TRBJ2-1)
CQQRSGASSYNEQFF

SEQ ID NO: 585773 - protein, 14 aa, Homo sapiens
  CDR3 for alpha chain variable domain of TCR clone 292887 (TRAV12-2, TRAJ4)
CAEDLSGGYNKLLF

SEQ ID NO: 585774 - protein, 13 aa, Homo sapiens
  CDR3 for beta chain variable domain of TCR clone 292887 (TRBV7-9, TRBJ1-2)
CASSLKQNYGYTF

SEQ ID NO: 585775 - protein, 15 aa, Homo sapiens
  CDR3 for alpha chain variable domain of TCR clone 292888 (TRAV3, TRAJ3)
CAVRDMSSSASKIIF

SEQ ID NO: 585776 - protein, 14 aa, Homo sapiens
  CDR3 for beta chain variable domain of TCR clone 292888 (TRBV19, TRBJ2-1)
CACPTFVLSGEQFF

SEQ ID NO: 585777 - protein, 14 aa, Homo sapiens
  CDR3 for alpha chain variable domain of TCR clone 292889 (TRAV1-2, TRAJ27)
CAVRSGTNAGKSTF

SEQ ID NO: 585778 - protein, 15 aa, Homo sapiens
  CDR3 for beta chain variable domain of TCR clone 292889 (TRBV18, TRBJ2-7)
CASSPLQGRTSEQYF

SEQ ID NO: 585779 - protein, 14 aa, Homo sapiens
  CDR3 for alpha chain variable domain of TCR clone 292890 (TRAV8-2, TRAJ13)
CVVTASGGYQKVTF

SEQ ID NO: 585780 - protein, 16 aa, Homo sapiens
  CDR3 for beta chain variable domain of TCR clone 292890 (TRBV12-4, TRBJ1-5)
CASSRPVGGSSQPQNF

SEQ ID NO: 585781 - protein, 14 aa, Homo sapiens
  CDR3 for alpha chain variable domain of TCR clone 292891 (TRAV14/DV4, TRAJ15)
CAMRRDPAGTALIF

SEQ ID NO: 585782 - protein, 16 aa, Homo sapiens
  CDR3 for beta chain variable domain of TCR clone 292891 (TRBV15, TRBJ2-3)
CATSRDLGIVTDTQYF

SEQ ID NO: 585783 - protein, 21 aa, Homo sapiens
  CDR3 for alpha chain variable domain of TCR clone 292892 (TRAV6, TRAJ36)
CARQTTSSLGLERDSPLFPIS

SEQ ID NO: 585784 - protein, 13 aa, Homo sapiens
  CDR3 for beta chain variable domain of TCR clone 292892 (TRBV20-1, TRBJ1-1)
CSAPLGGGTEAFF

SEQ ID NO: 585785 - protein, 20 aa, Homo sapiens
  CDR3 for alpha chain variable domain of TCR clone 292893 (TRAV8-3, TRAJ44)
LSTSVLWVRLYTGTASKLTF

SEQ ID NO: 585786 - protein, 14 aa, Homo sapiens
  CDR3 for beta chain variable domain of TCR clone 292893 (TRBV4-1, TRBJ2-2)
CASSQAVNTGELFF

SEQ ID NO: 585787 - protein, 14 aa, Homo sapiens
  CDR3 for alpha chain variable domain of TCR clone 292894 (TRAV1-1, TRAJ33)
CAVRPEDSNYQVIW

SEQ ID NO: 585788 - protein, 15 aa, Homo sapiens
  CDR3 for beta chain variable domain of TCR clone 292894 (TRBV20-1, TRBJ2-1)
CSARSPGGPGNEQFF

SEQ ID NO: 585789 - protein, 18 aa, Homo sapiens
  CDR3 for alpha chain variable domain of TCR clone 292895 (TRAV3, TRAJ32)
CAVRDIRGYGDATNKRIF

SEQ ID NO: 585790 - protein, 15 aa, Homo sapiens
  CDR3 for beta chain variable domain of TCR clone 292895 (TRBV12-4, TRBJ2-2)
CASSLGVRHTGELFF

SEQ ID NO: 585791 - protein, 14 aa, Homo sapiens
  CDR3 for alpha chain variable domain of TCR clone 292896 (TRAV12-1, TRAJ3)
CVVILYSSASKIIF

SEQ ID NO: 585792 - protein, 17 aa, Homo sapiens
  CDR3 for beta chain variable domain of TCR clone 292896 (TRBV13, TRBJ2-3)
CASSLSRVAGGRNTQYF

SEQ ID NO: 585793 - protein, 14 aa, Homo sapiens
  CDR3 for alpha chain variable domain of TCR clone 292897 (TRAV8-3, TRAJ4)
CAVGASGGYNKLIF

SEQ ID NO: 585794 - protein, 14 aa, Homo sapiens
  CDR3 for beta chain variable domain of TCR clone 292897 (TRBV11-2, TRBJ2-3)
CASSRLARTDTQYF

SEQ ID NO: 585795 - protein, 13 aa, Homo sapiens
  CDR3 for alpha chain variable domain of TCR clone 292898 (TRAV13-1, TRAJ11)
CAASIRGYSTLTF

SEQ ID NO: 585796 - protein, 13 aa, Homo sapiens
  CDR3 for beta chain variable domain of TCR clone 292898 (TRBV4-3, TRBJ1-2)
CASSSRLQGAQLA

SEQ ID NO: 585797 - protein, 15 aa, Homo sapiens
  CDR3 for alpha chain variable domain of TCR clone 292899 (TRAV26-2, TRAJ39)
CSLRGNNNAGKMLTF

SEQ ID NO: 585798 - protein, 15 aa, Homo sapiens
  CDR3 for beta chain variable domain of TCR clone 292899 (TRBV5-4, TRBJ1-1)
CASSSLGWANTEAFF

SEQ ID NO: 585799 - protein, 13 aa, Homo sapiens
  CDR3 for alpha chain variable domain of TCR clone 292900 (TRAV3, TRAJ34)
CAVRDIGSDKLIF

SEQ ID NO: 585800 - protein, 14 aa, Homo sapiens
  CDR3 for beta chain variable domain of TCR clone 292900 (TRBV7-2, TRBJ2-7)
CASSPKTSFYEQYF

SEQ ID NO: 585801 - protein, 16 aa, Homo sapiens
  CDR3 for alpha chain variable domain of TCR clone 292901 (TRAV26-1, TRAJ37)
CIVRGDGSGNTGKLIF

SEQ ID NO: 585802 - protein, 16 aa, Homo sapiens
  CDR3 for beta chain variable domain of TCR clone 292901 (TRBV2, TRBJ2-5)
CASSETQGVGEETQYF

SEQ ID NO: 585803 - protein, 15 aa, Homo sapiens
  CDR3 for alpha chain variable domain of TCR clone 292902 (TRAV17, TRAJ37)
CATDHGSSNTGKLIF

SEQ ID NO: 585804 - protein, 14 aa, Homo sapiens
  CDR3 for beta chain variable domain of TCR clone 292902 (TRBV7-2, TRBJ2-3)
GASSRTSGADTQYF

SEQ ID NO: 585805 - protein, 13 aa, Homo sapiens
  CDR3 for alpha chain variable domain of TCR clone 292903 (TRAV35, TRAJ42)
CAGFPGSQGNLIF

SEQ ID NO: 585806 - protein, 16 aa, Homo sapiens
  CDR3 for beta chain variable domain of TCR clone 292903 (TRBV7-2, TRBJ2-5)
CASSPFPTGGEETQYF

SEQ ID NO: 585807 - protein, 18 aa, Homo sapiens
  CDR3 for alpha chain variable domain of TCR clone 292904 (TRAV13-1, TRAJ52)
CAASKRRAGGTSYGKLTF

SEQ ID NO: 585808 - protein, 13 aa, Homo sapiens
  CDR3 for beta chain variable domain of TCR clone 292904 (TRBV12-4, TRBJ1-2)
CASSLRQGKGDTF

SEQ ID NO: 585809 - protein, 15 aa, Homo sapiens
  CDR3 for alpha chain variable domain of TCR clone 292905 (TRAV12-1, TRAJ9)
CVVSFGDTGGFKTIF

SEQ ID NO: 585810 - protein, 14 aa, Homo sapiens
  CDR3 for beta chain variable domain of TCR clone 292905 (TRBV11-2, TRBJ2-7)
CASSLGAGAYEQYF

SEQ ID NO: 585811 - protein, 18 aa, Homo sapiens
  CDR3 for alpha chain variable domain of TCR clone 292906 (TRAV1-2, TRAJ18)
CAVRDMGDRGSTLGRLYF

SEQ ID NO: 585812 - protein, 12 aa, Homo sapiens
  CDR3 for beta chain variable domain of TCR clone 292906 (TRBV27, TRBJ2-2)
CASKLFTGELFF

SEQ ID NO: 585813 - protein, 14 aa, Homo sapiens
  CDR3 for alpha chain variable domain of TCR clone 292907 (TRAV2, TRAJ41)
CAVGTSNSGYELNF

SEQ ID NO: 585814 - protein, 13 aa, Homo sapiens
  CDR3 for beta chain variable domain of TCR clone 292907 (TRBV4-1, TRBJ2-1)
CASSQEVQYEQFF

SEQ ID NO: 585815 - protein, 15 aa, Homo sapiens
  CDR3 for alpha chain variable domain of TCR clone 292908 (TRAV3, TRAJ21)
CAVREPDFNKFYLDL

SEQ ID NO: 585816 - protein, 12 aa, Homo sapiens
  CDR3 for beta chain variable domain of TCR clone 292908 (TRBV28, TRBJ2-6)
CAIQAGANVLTF

SEQ ID NO: 585817 - protein, 15 aa, Homo sapiens
  CDR3 for alpha chain variable domain of TCR clone 292909 (TRAV17, TRAJ57)
CATGPSQGGSEKLVF

SEQ ID NO: 585818 - protein, 14 aa, Homo sapiens
  CDR3 for beta chain variable domain of TCR clone 292909 (TRBV7-3, TRBJ2-1)
CASSLTGGANEQFF

SEQ ID NO: 585819 - protein, 16 aa, Homo sapiens
  CDR3 for alpha chain variable domain of TCR clone 292910 (TRAV30, TRAJ24)
CGTEIVDADSWGKFQF

SEQ ID NO: 585820 - protein, 10 aa, Homo sapiens
  CDR3 for beta chain variable domain of TCR clone 292910 (TRBV18, TRBJ2-2)
CASSLNQPGQ

SEQ ID NO: 585821 - protein, 14 aa, Homo sapiens
  CDR3 for alpha chain variable domain of TCR clone 292911 (TRAV8-4, TRAJ13)
CAVTLSGGYQKVTF

SEQ ID NO: 585822 - protein, 12 aa, Homo sapiens
  CDR3 for beta chain variable domain of TCR clone 292911 (TRBV14, TRBJ1-1)
CASSQLKGLAFF

SEQ ID NO: 585823 - protein, 12 aa, Homo sapiens
  CDR3 for alpha chain variable domain of TCR clone 292912 (TRAV29/DV5, TRAJ43)
FAAPYNNNDMRF

SEQ ID NO: 585824 - protein, 15 aa, Homo sapiens
  CDR3 for beta chain variable domain of TCR clone 292912 (TRBV18, TRBJ1-6)
CASSRIQGRNSPLHF

SEQ ID NO: 585825 - protein, 15 aa, Homo sapiens
  CDR3 for alpha chain variable domain of TCR clone 292913 (TRAV13-1, TRAJ42)
CAASIAGGSQGNLIF

SEQ ID NO: 585826 - protein, 14 aa, Homo sapiens
  CDR3 for beta chain variable domain of TCR clone 292913 (TRBV7-2, TRBJ1-3)
CASSLGTAGNTIYF

SEQ ID NO: 585827 - protein, 14 aa, Homo sapiens
  CDR3 for alpha chain variable domain of TCR clone 292914 (TRAV23/DV6, TRAJ17)
CAASGRAAGNKLTF

SEQ ID NO: 585828 - protein, 12 aa, Homo sapiens
  CDR3 for beta chain variable domain of TCR clone 292914 (TRBV7-9, TRBJ2-3)
CASRFITDTQYF

SEQ ID NO: 585829 - protein, 13 aa, Homo sapiens
  CDR3 for alpha chain variable domain of TCR clone 292915 (TRAV8-3, TRAJ28)
CAVGAVGSYQLTF

SEQ ID NO: 585830 - protein, 17 aa, Homo sapiens
  CDR3 for beta chain variable domain of TCR clone 292915 (TRBV7-8, TRBJ1-2)
CASSLRPLQGHLYGYTF

SEQ ID NO: 585831 - protein, 14 aa, Homo sapiens
  CDR3 for alpha chain variable domain of TCR clone 292916 (TRAV13-1, TRAJ53)
CAANSGGSNYKLKF

SEQ ID NO: 585832 - protein, 12 aa, Homo sapiens
  CDR3 for beta chain variable domain of TCR clone 292916 (TRBV5-1, TRBJ2-7)
CASRGGGLEQYF

SEQ ID NO: 585833 - protein, 13 aa, Homo sapiens
  CDR3 for alpha chain variable domain of TCR clone 292917 (TRAV21, TRAJ45)
CAVMGGGADGLTF

SEQ ID NO: 585834 - protein, 13 aa, Homo sapiens
  CDR3 for beta chain variable domain of TCR clone 292917 (TRBV5-5, TRBJ1-2)
CASSFWRGEDYTF

SEQ ID NO: 585835 - protein, 13 aa, Homo sapiens
  CDR3 for alpha chain variable domain of TCR clone 292918 (TRAV12-3, TRAJ7)
CAMTPYGNNRLAF

SEQ ID NO: 585836 - protein, 16 aa, Homo sapiens
  CDR3 for beta chain variable domain of TCR clone 292918 (TRBV20-1, TRBJ1-4)
CSARPYGGELDEKLFF

SEQ ID NO: 585837 - protein, 12 aa, Homo sapiens
  CDR3 for alpha chain variable domain of TCR clone 292919 (TRAV26-1, TRAJ26)
CIGFIYGQNFVF

SEQ ID NO: 585838 - protein, 20 aa, Homo sapiens
  CDR3 for beta chain variable domain of TCR clone 292919 (TRBV7-8, TRBJ2-2)
CASSHLFPGPTIHITGELFF

SEQ ID NO: 585839 - protein, 13 aa, Homo sapiens
  CDR3 for alpha chain variable domain of TCR clone 292920 (TRAV29/DV5, TRAJ31)
CAASRNNNARLMF

SEQ ID NO: 585840 - protein, 12 aa, Homo sapiens
  CDR3 for beta chain variable domain of TCR clone 292920 (TRBV7-8, TRBJ2-5)
CASSPGVGTQYF

SEQ ID NO: 585841 - protein, 14 aa, Homo sapiens
  CDR3 for alpha chain variable domain of TCR clone 292921 (TRAV8-1, TRAJ5)
RAVRTDTGRRALTF

SEQ ID NO: 585842 - protein, 15 aa, Homo sapiens
  CDR3 for beta chain variable domain of TCR clone 292921 (TRBV6-3, TRBJ2-7)
CASSSPGTVFYEQYF

SEQ ID NO: 585843 - protein, 12 aa, Homo sapiens
  CDR3 for alpha chain variable domain of TCR clone 292922 (TRAV8-3, TRAJ20)
CAVGANDHKLSF

SEQ ID NO: 585844 - protein, 11 aa, Homo sapiens
  CDR3 for beta chain variable domain of TCR clone 292922 (TRBV19, TRBJ1-1)
CASSIGSEAFF

SEQ ID NO: 585845 - protein, 13 aa, Homo sapiens
  CDR3 for alpha chain variable domain of TCR clone 292923 (TRAV30, TRAJ39)
CGTEKNAGNMLTF

SEQ ID NO: 585846 - protein, 12 aa, Homo sapiens
  CDR3 for beta chain variable domain of TCR clone 292923 (TRBV12-4, TRBJ2-5)
CASSSAQETQCF

SEQ ID NO: 585847 - protein, 14 aa, Homo sapiens
  CDR3 for alpha chain variable domain of TCR clone 292924 (TRAV12-3, TRAJ9)
CAMSPNTGGFKTIF

SEQ ID NO: 585848 - protein, 14 aa, Homo sapiens
  CDR3 for beta chain variable domain of TCR clone 292924 (TRBV5-1, TRBJ2-3)
CASSLFGPTDTQYF

SEQ ID NO: 585849 - protein, 12 aa, Homo sapiens
  CDR3 for alpha chain variable domain of TCR clone 292925 (TRAV8-4, TRAJ31)
CAVSYSNARLMF

SEQ ID NO: 585850 - protein, 14 aa, Homo sapiens
  CDR3 for beta chain variable domain of TCR clone 292925 (TRBV20-1, TRBJ2-7)
CSAKRGRSSYEQYF

SEQ ID NO: 585851 - protein, 16 aa, Homo sapiens
  CDR3 for alpha chain variable domain of TCR clone 292926 (TRAV3, TRAJ37)
CAVRGKGSGNTGKLIF

SEQ ID NO: 585852 - protein, 14 aa, Homo sapiens
  CDR3 for beta chain variable domain of TCR clone 292926 (TRBV19, TRBJ2-1)
GASPTFVLSGEQFF

SEQ ID NO: 585853 - protein, 13 aa, Homo sapiens
  CDR3 for alpha chain variable domain of TCR clone 292927 (TRAV21, TRAJ27)
CAARPGNAGKSTF

SEQ ID NO: 585854 - protein, 15 aa, Homo sapiens
  CDR3 for beta chain variable domain of TCR clone 292927 (TRBV11-2, TRBJ2-1)
CASSKNRGLIYEQFF

SEQ ID NO: 585855 - protein, 14 aa, Homo sapiens
  CDR3 for alpha chain variable domain of TCR clone 292928 (TRAV4, TRAJ26)
CLVGPHSYGQNFVF

SEQ ID NO: 585856 - protein, 17 aa, Homo sapiens
  CDR3 for beta chain variable domain of TCR clone 292928 (TRBV24-1, TRBJ2-1)
CATSDVSTSGTYNEQFF

SEQ ID NO: 585857 - protein, 14 aa, Homo sapiens
  CDR3 for alpha chain variable domain of TCR clone 292929 (TRAV1-2, TRAJ8)
CAVREDTGFQKLVF

SEQ ID NO: 585858 - protein, 15 aa, Homo sapiens
  CDR3 for beta chain variable domain of TCR clone 292929 (TRBV5-6, TRBJ2-3)
CASSPGLAATDTQYF

SEQ ID NO: 585859 - protein, 13 aa, Homo sapiens
  CDR3 for alpha chain variable domain of TCR clone 292930 (TRAV8-6, TRAJ16)
CAVSSPDGQKLLF

SEQ ID NO: 585860 - protein, 16 aa, Homo sapiens
  CDR3 for beta chain variable domain of TCR clone 292930 (TRBV5-6, TRBJ2-3)
CASSCLGGAITDTQYF

SEQ ID NO: 585861 - protein, 12 aa, Homo sapiens
  CDR3 for alpha chain variable domain of TCR clone 292931 (TRAV1-1, TRAJ8)
CAGGTGFQTLVF

SEQ ID NO: 585862 - protein, 15 aa, Homo sapiens
  CDR3 for beta chain variable domain of TCR clone 292931 (TRBV7-9, TRBJ1-4)
CACSRTGGFNEKLFF

SEQ ID NO: 585863 - protein, 16 aa, Homo sapiens
  CDR3 for alpha chain variable domain of TCR clone 292932 (TRAV3, TRAJ37)
YAVRGKGSGNTGKLIF

SEQ ID NO: 585864 - protein, 14 aa, Homo sapiens
  CDR3 for beta chain variable domain of TCR clone 292932 (TRBV19, TRBJ2-3)
CASSAPRGTDTQYF

SEQ ID NO: 585865 - protein, 18 aa, Homo sapiens
  CDR3 for alpha chain variable domain of TCR clone 292933 (TRAV13-1, TRAJ52)
CAAKNPNAGGTSNGKLTF

SEQ ID NO: 585866 - protein, 14 aa, Homo sapiens
  CDR3 for beta chain variable domain of TCR clone 292933 (TRBV6-5, TRBJ1-1)
CASSFGQGLTEAFF

SEQ ID NO: 585867 - protein, 13 aa, Homo sapiens
  CDR3 for alpha chain variable domain of TCR clone 292934 (TRAV12-2, TRAJ6)
CAVNVSRKLHTYI

SEQ ID NO: 585868 - protein, 12 aa, Homo sapiens
  CDR3 for beta chain variable domain of TCR clone 292934 (TRBV5-4, TRBJ2-5)
CASSSTRETQYF

SEQ ID NO: 585869 - protein, 13 aa, Homo sapiens
  CDR3 for alpha chain variable domain of TCR clone 292935 (TRAV30, TRAJ24)
CGTVTDSWGKLQF

SEQ ID NO: 585870 - protein, 17 aa, Homo sapiens
  CDR3 for beta chain variable domain of TCR clone 292935 (TRBV7-9, TRBJ2-6)
CASSFGAGYSGANVLTF

SEQ ID NO: 585871 - protein, 15 aa, Homo sapiens
  CDR3 for alpha chain variable domain of TCR clone 292936 (TRAV21, TRAJ17)
CAVDEQKAAGNKLTF

SEQ ID NO: 585872 - protein, 11 aa, Homo sapiens
  CDR3 for beta chain variable domain of TCR clone 292936 (TRBV12-4, TRBJ2-2)
CASSSAGELFF

SEQ ID NO: 585873 - protein, 15 aa, Homo sapiens
  CDR3 for alpha chain variable domain of TCR clone 292937 (TRAV21, TRAJ53)
CATLNSGGSNYKLTF

SEQ ID NO: 585874 - protein, 13 aa, Homo sapiens
  CDR3 for beta chain variable domain of TCR clone 292937 (TRBV5-7, TRBJ1-2)
CASSLGTGYGYTF

SEQ ID NO: 585875 - protein, 12 aa, Homo sapiens
  CDR3 for alpha chain variable domain of TCR clone 292938 (TRAV23/DV6, TRAJ30)
CAANKGDDKIIF

SEQ ID NO: 585876 - protein, 18 aa, Homo sapiens
  CDR3 for beta chain variable domain of TCR clone 292938 (TRBV10-3, TRBJ2-3)
CAISESRVGPMRGDTQYF

SEQ ID NO: 585877 - protein, 14 aa, Homo sapiens
  CDR3 for alpha chain variable domain of TCR clone 292939 (TRAV17, TRAJ57)
CATEAQGGSEKLVF

SEQ ID NO: 585878 - protein, 14 aa, Homo sapiens
  CDR3 for beta chain variable domain of TCR clone 292939 (TRBV7-9, TRBJ2-7)
CASSPSGGQNEQYF

SEQ ID NO: 585879 - protein, 17 aa, Homo sapiens
  CDR3 for alpha chain variable domain of TCR clone 292940 (TRAV14/DV4, TRAJ4)
CAMREASGRGGDNKLIL

SEQ ID NO: 585880 - protein, 12 aa, Homo sapiens
  CDR3 for beta chain variable domain of TCR clone 292940 (TRBV12-4, TRBJ2-7)
CASSLGGYEQYF

SEQ ID NO: 585881 - protein, 13 aa, Homo sapiens
  CDR3 for alpha chain variable domain of TCR clone 292941 (TRAV12-2, TRAJ20)
CAVYPSNNYKLSF

SEQ ID NO: 585882 - protein, 15 aa, Homo sapiens
  CDR3 for beta chain variable domain of TCR clone 292941 (TRBV18, TRBJ1-2)
CASSPGNGLGYGYTF

SEQ ID NO: 585883 - protein, 16 aa, Homo sapiens
  CDR3 for alpha chain variable domain of TCR clone 292942 (TRAV1-2, TRAJ10)
CAVRGVLTGGGNKLTF

SEQ ID NO: 585884 - protein, 12 aa, Homo sapiens
  CDR3 for beta chain variable domain of TCR clone 292942 (TRBV12-4, TRBJ2-7)
CACSLGGYEQYF

SEQ ID NO: 585885 - protein, 23 aa, Homo sapiens
  CDR3 for alpha chain variable domain of TCR clone 292943 (TRAV41, TRAJ32)
CAVRIMVVLQTSSSLELALCLLA

SEQ ID NO: 585886 - protein, 15 aa, Homo sapiens
  CDR3 for beta chain variable domain of TCR clone 292943 (TRBV11-2, TRBJ2-1)
CASSKNRGLIYEQFF

SEQ ID NO: 585887 - protein, 13 aa, Homo sapiens
  CDR3 for alpha chain variable domain of TCR clone 292944 (TRAV12-2, TRAJ4)
CAVRSGGYNKLIF

SEQ ID NO: 585888 - protein, 15 aa, Homo sapiens
  CDR3 for beta chain variable domain of TCR clone 292944 (TRBV10-3, TRBJ2-1)
CASSDVQDRAYDQFF

SEQ ID NO: 585889 - protein, 18 aa, Homo sapiens
  CDR3 for alpha chain variable domain of TCR clone 292945 (TRAV13-1, TRAJ52)
CAAKNPNAGGTSYGKLKF

SEQ ID NO: 585890 - protein, 15 aa, Homo sapiens
  CDR3 for beta chain variable domain of TCR clone 292945 (TRBV6-1, TRBJ2-3)
CASSERGGITDTRYF

SEQ ID NO: 585891 - protein, 16 aa, Homo sapiens
  CDR3 for alpha chain variable domain of TCR clone 292946 (TRAV3, TRAJ37)
CAVRGKGSGNTGKLIV

SEQ ID NO: 585892 - protein, 16 aa, Homo sapiens
  CDR3 for beta chain variable domain of TCR clone 292946 (TRBV12-5, TRBJ2-5)
CASGRRTSGNQETQYF

SEQ ID NO: 585893 - protein, 13 aa, Homo sapiens
  CDR3 for alpha chain variable domain of TCR clone 292947 (TRAV16, TRAJ54)
CALAKGGAQKLVF

SEQ ID NO: 585894 - protein, 16 aa, Homo sapiens
  CDR3 for beta chain variable domain of TCR clone 292947 (TRBV19, TRBJ2-1)
CASSKAGPSSYNEQFF

SEQ ID NO: 585895 - protein, 12 aa, Homo sapiens
  CDR3 for alpha chain variable domain of TCR clone 292948 (TRAV21, TRAJ13)
PGPSGGYQKVTF

SEQ ID NO: 585896 - protein, 15 aa, Homo sapiens
  CDR3 for beta chain variable domain of TCR clone 292948 (TRBV7-9, TRBJ1-6)
CASSSQGRGNSPLHF

SEQ ID NO: 585897 - protein, 13 aa, Homo sapiens
  CDR3 for alpha chain variable domain of TCR clone 292949 (TRAV17, TRAJ54)
CATDLWGAQKLVF

SEQ ID NO: 585898 - protein, 14 aa, Homo sapiens
  CDR3 for beta chain variable domain of TCR clone 292949 (TRBV7-2, TRBJ2-7)
CASRSQGAAYEQYF

SEQ ID NO: 585899 - protein, 13 aa, Homo sapiens
  CDR3 for alpha chain variable domain of TCR clone 292950 (TRAV8-3, TRAJ36)
CAVGATGANNLFF

SEQ ID NO: 585900 - protein, 17 aa, Homo sapiens
  CDR3 for beta chain variable domain of TCR clone 292950 (TRBV19, TRBJ1-1)
CASSRGGQALLNTEAFF

SEQ ID NO: 585901 - protein, 14 aa, Homo sapiens
  CDR3 for alpha chain variable domain of TCR clone 292951 (TRAV8-2, TRAJ4)
GVVSPSGGYNKLIF

SEQ ID NO: 585902 - protein, 15 aa, Homo sapiens
  CDR3 for beta chain variable domain of TCR clone 292951 (TRBV6-6, TRBJ2-7)
CASSYSYGGSYEQYF

SEQ ID NO: 585903 - protein, 13 aa, Homo sapiens
  CDR3 for alpha chain variable domain of TCR clone 292952 (TRAV24, TRAJ13)
CAFDSGGYLKVTF

SEQ ID NO: 585904 - protein, 14 aa, Homo sapiens
  CDR3 for beta chain variable domain of TCR clone 292952 (TRBV5-4, TRBJ2-1)
CASSLDQGLNEQFF

SEQ ID NO: 585905 - protein, 12 aa, Homo sapiens
  CDR3 for alpha chain variable domain of TCR clone 292953 (TRAV27, TRAJ36)
ASTPAGEKKILF

SEQ ID NO: 585906 - protein, 13 aa, Homo sapiens
  CDR3 for beta chain variable domain of TCR clone 292953 (TRBV7-9, TRBJ2-3)
CASSPGSTDTQYF

SEQ ID NO: 585907 - protein, 11 aa, Homo sapiens
  CDR3 for alpha chain variable domain of TCR clone 292954 (TRAV1-1, TRAJ23)
CAVRQGGKLIF

SEQ ID NO: 585908 - protein, 17 aa, Homo sapiens
  CDR3 for beta chain variable domain of TCR clone 292954 (TRBV13, TRBJ2-3)
CASSLSRVAGGRNTQNF

SEQ ID NO: 585909 - protein, 15 aa, Homo sapiens
  CDR3 for alpha chain variable domain of TCR clone 292955 (TRAV8-3, TRAJ45)
CASSYSGGGADGLTF

SEQ ID NO: 585910 - protein, 14 aa, Homo sapiens
  CDR3 for beta chain variable domain of TCR clone 292955 (TRBV4-1, TRBJ1-1)
CASSPPGVNTEAFF

SEQ ID NO: 585911 - protein, 10 aa, Homo sapiens
  CDR3 for alpha chain variable domain of TCR clone 292956 (TRAV1-2, TRAJ18)
CAVRGEAQPW

SEQ ID NO: 585912 - protein, 11 aa, Homo sapiens
  CDR3 for beta chain variable domain of TCR clone 292956 (TRBV20-1, TRBJ2-1)
CSLSSGSEQFF

SEQ ID NO: 585913 - protein, 15 aa, Homo sapiens
  CDR3 for alpha chain variable domain of TCR clone 292957 (TRAV2, TRAJ24)
CDVVRLKNSWGKLQF

SEQ ID NO: 585914 - protein, 16 aa, Homo sapiens
  CDR3 for beta chain variable domain of TCR clone 292957 (TRBV7-7, TRBJ2-3)
CASSPGTSGSTDTQYF

SEQ ID NO: 585915 - protein, 14 aa, Homo sapiens
  CDR3 for alpha chain variable domain of TCR clone 292958 (TRAV35, TRAJ50)
CAGHRKTSYDKVIF

SEQ ID NO: 585916 - protein, 15 aa, Homo sapiens
  CDR3 for beta chain variable domain of TCR clone 292958 (TRBV28, TRBJ1-3)
CASSMGWASGNTIYF

SEQ ID NO: 585917 - protein, 13 aa, Homo sapiens
  CDR3 for alpha chain variable domain of TCR clone 292959 (TRAV2, TRAJ40)
CAVVTSGTYNYIF

SEQ ID NO: 585918 - protein, 14 aa, Homo sapiens
  CDR3 for beta chain variable domain of TCR clone 292959 (TRBV19, TRBJ2-1)
CPSPTFVLSGEQFF

SEQ ID NO: 585919 - protein, 11 aa, Homo sapiens
  CDR3 for alpha chain variable domain of TCR clone 292960 (TRAV8-3, TRAJ49)
CAVNTGNQFYF

SEQ ID NO: 585920 - protein, 14 aa, Homo sapiens
  CDR3 for beta chain variable domain of TCR clone 292960 (TRBV4-2, TRBJ1-5)
CASSQDSINQPQHF

SEQ ID NO: 585921 - protein, 14 aa, Homo sapiens
  CDR3 for alpha chain variable domain of TCR clone 292961 (TRAV12-2, TRAJ45)
CAVNIGGGSDGLTF

SEQ ID NO: 585922 - protein, 17 aa, Homo sapiens
  CDR3 for beta chain variable domain of TCR clone 292961 (TRBV20-1, TRBJ2-2)
CSASGSGQGGLTGELFF

SEQ ID NO: 585923 - protein, 11 aa, Homo sapiens
  CDR3 for alpha chain variable domain of TCR clone 292962 (TRAV20, TRAJ23)
CACNQGGKLIF

SEQ ID NO: 585924 - protein, 16 aa, Homo sapiens
  CDR3 for beta chain variable domain of TCR clone 292962 (TRBV7-8, TRBJ2-5)
CASSCGGQPAQETQYV

SEQ ID NO: 585925 - protein, 14 aa, Homo sapiens
  CDR3 for alpha chain variable domain of TCR clone 292963 (TRAV12-2, TRAJ13)
CAVKKTGGYQKVTF

SEQ ID NO: 585926 - protein, 14 aa, Homo sapiens
  CDR3 for beta chain variable domain of TCR clone 292963 (TRBV12-5, TRBJ2-5)
CASGSRTHKETQYF

SEQ ID NO: 585927 - protein, 15 aa, Homo sapiens
  CDR3 for alpha chain variable domain of TCR clone 292964 (TRAV25, TRAJ52)
CAGRPGGTSYGRLTF

SEQ ID NO: 585928 - protein, 12 aa, Homo sapiens
  CDR3 for beta chain variable domain of TCR clone 292964 (TRBV28, TRBJ1-2)
CASLTLAEGYTF

SEQ ID NO: 585929 - protein, 23 aa, Homo sapiens
  CDR3 for alpha chain variable domain of TCR clone 292965 (TRAV26-1, TRAJ38)
CIADNAGNNHIQNPDPAVYQLRD

SEQ ID NO: 585930 - protein, 13 aa, Homo sapiens
  CDR3 for beta chain variable domain of TCR clone 292965 (TRBV10-3, TRBJ2-7)
CASKLEVNYEQYF

SEQ ID NO: 585931 - protein, 14 aa, Homo sapiens
  CDR3 for alpha chain variable domain of TCR clone 292966 (TRAV8-4, TRAJ13)
CAVTLSGGYQKVTF

SEQ ID NO: 585932 - protein, 16 aa, Homo sapiens
  CDR3 for beta chain variable domain of TCR clone 292966 (TRBV19, TRBJ2-2)
CASRSPGTGATGELFC

SEQ ID NO: 585933 - protein, 10 aa, Homo sapiens
  CDR3 for alpha chain variable domain of TCR clone 292967 (TRAV36/DV7, TRAJ49)
CALTGNQFYF

SEQ ID NO: 585934 - protein, 14 aa, Homo sapiens
  CDR3 for beta chain variable domain of TCR clone 292967 (TRBV4-2, TRBJ2-5)
CASSQGRGRETQYF

SEQ ID NO: 585935 - protein, 16 aa, Homo sapiens
  CDR3 for alpha chain variable domain of TCR clone 292968 (TRAV3, TRAJ28)
CAVLPRSGAWSYQLTF

SEQ ID NO: 585936 - protein, 18 aa, Homo sapiens
  CDR3 for beta chain variable domain of TCR clone 292968 (TRBV23-1, TRBJ2-7)
CASSQYRRTDSTSSTSGR

SEQ ID NO: 585937 - protein, 13 aa, Homo sapiens
  CDR3 for alpha chain variable domain of TCR clone 292969 (TRAV35, TRAJ33)
CAGQRDSNYQLIW

SEQ ID NO: 585938 - protein, 12 aa, Homo sapiens
  CDR3 for beta chain variable domain of TCR clone 292969 (TRBV11-2, TRBJ2-2)
CASSLGGGELFF

SEQ ID NO: 585939 - protein, 15 aa, Homo sapiens
  CDR3 for alpha chain variable domain of TCR clone 292970 (TRAV8-2, TRAJ40)
CVVLGTTSGTYKYIF

SEQ ID NO: 585940 - protein, 16 aa, Homo sapiens
  CDR3 for beta chain variable domain of TCR clone 292970 (TRBV20-1, TRBJ2-2)
CSASASGIPGAGELFF

SEQ ID NO: 585941 - protein, 11 aa, Homo sapiens
  CDR3 for alpha chain variable domain of TCR clone 292971 (TRAV1-2, TRAJ20)
CAVANDYKLSF

SEQ ID NO: 585942 - protein, 17 aa, Homo sapiens
  CDR3 for beta chain variable domain of TCR clone 292971 (TRBV28, TRBJ1-4)
CASSLGTGTKEKLFLAV

SEQ ID NO: 585943 - protein, 13 aa, Homo sapiens
  CDR3 for alpha chain variable domain of TCR clone 292972 (TRAV27, TRAJ11)
CAGARSGYSTLTF

SEQ ID NO: 585944 - protein, 16 aa, Homo sapiens
  CDR3 for beta chain variable domain of TCR clone 292972 (TRBV10-2, TRBJ2-2)
CASSESRDRGSGELFL

SEQ ID NO: 585945 - protein, 14 aa, Homo sapiens
  CDR3 for alpha chain variable domain of TCR clone 292973 (TRAV8-4, TRAJ27)
RAVSEGTNAGKSTF

SEQ ID NO: 585946 - protein, 16 aa, Homo sapiens
  CDR3 for beta chain variable domain of TCR clone 292973 (TRBV2, TRBJ2-7)
CASSSTRRGSSYEQYF

SEQ ID NO: 585947 - protein, 14 aa, Homo sapiens
  CDR3 for alpha chain variable domain of TCR clone 292974 (TRAV1-1, TRAJ27)
CAVISNTNAGKSTF

SEQ ID NO: 585948 - protein, 15 aa, Homo sapiens
  CDR3 for beta chain variable domain of TCR clone 292974 (TRBV2, TRBJ2-1)
CASSELAGSYNEQFF

SEQ ID NO: 585949 - protein, 10 aa, Homo sapiens
  CDR3 for alpha chain variable domain of TCR clone 292975 (TRAV12-3, TRAJ49)
CAMNDDQFYF

SEQ ID NO: 585950 - protein, 11 aa, Homo sapiens
  CDR3 for beta chain variable domain of TCR clone 292975 (TRBV12-4, TRBJ2-3)
CASTATDTQYF

SEQ ID NO: 585951 - protein, 14 aa, Homo sapiens
  CDR3 for alpha chain variable domain of TCR clone 292976 (TRAV8-4, TRAJ45)
CASGGGGGADGLTL

SEQ ID NO: 585952 - protein, 20 aa, Homo sapiens
  CDR3 for beta chain variable domain of TCR clone 292976 (TRBV4-3, TRBJ2-3)
CASSPRVEMRASGRPDTQYF

SEQ ID NO: 585953 - protein, 10 aa, Homo sapiens
  CDR3 for alpha chain variable domain of TCR clone 292977 (TRAV1-2, TRAJ31)
CVSEDARLMF

SEQ ID NO: 585954 - protein, 14 aa, Homo sapiens
  CDR3 for beta chain variable domain of TCR clone 292977 (TRBV19, TRBJ2-1)
CASPTCVLSGEQFF

SEQ ID NO: 585955 - protein, 14 aa, Homo sapiens
  CDR3 for alpha chain variable domain of TCR clone 292978 (TRAV8-3, TRAJ21)
CAVGLNPLSDKFYF

SEQ ID NO: 585956 - protein, 11 aa, Homo sapiens
  CDR3 for beta chain variable domain of TCR clone 292978 (TRBV6-3, TRBJ2-3)
CATGQADTQYF

SEQ ID NO: 585957 - protein, 11 aa, Homo sapiens
  CDR3 for alpha chain variable domain of TCR clone 292979 (TRAV12-1, TRAJ43)
CVVIRNNDMRL

SEQ ID NO: 585958 - protein, 16 aa, Homo sapiens
  CDR3 for beta chain variable domain of TCR clone 292979 (TRBV14, TRBJ2-1)
CASSPRLAGEGNEQFF

SEQ ID NO: 585959 - protein, 15 aa, Homo sapiens
  CDR3 for alpha chain variable domain of TCR clone 292980 (TRAV26-1, TRAJ40)
CIVRVTTSGTYKYIF

SEQ ID NO: 585960 - protein, 14 aa, Homo sapiens
  CDR3 for beta chain variable domain of TCR clone 292980 (TRBV2, TRBJ2-3)
CASSEGQNTDTQYF

SEQ ID NO: 585961 - protein, 13 aa, Homo sapiens
  CDR3 for alpha chain variable domain of TCR clone 292981 (TRAV1-1, TRAJ23)
CAVVANQGGKLIF

SEQ ID NO: 585962 - protein, 13 aa, Homo sapiens
  CDR3 for beta chain variable domain of TCR clone 292981 (TRBV7-9, TRBJ1-2)
CASSLKQNYGYTF

SEQ ID NO: 585963 - protein, 14 aa, Homo sapiens
  CDR3 for alpha chain variable domain of TCR clone 292982 (TRAV12-2, TRAJ13)
CAVKKTGGYQKVTF

SEQ ID NO: 585964 - protein, 15 aa, Homo sapiens
  CDR3 for beta chain variable domain of TCR clone 292982 (TRBV13, TRBJ2-1)
CQQPPQRGENNEQFF

SEQ ID NO: 585965 - protein, 13 aa, Homo sapiens
  CDR3 for alpha chain variable domain of TCR clone 292983 (TRAV29/DV5, TRAJ31)
CAASRNNNARRMF

SEQ ID NO: 585966 - protein, 16 aa, Homo sapiens
  CDR3 for beta chain variable domain of TCR clone 292983 (TRBV7-2, TRBJ2-6)
CASSERRASGANVLTF

SEQ ID NO: 585967 - protein, 16 aa, Homo sapiens
  CDR3 for alpha chain variable domain of TCR clone 292984 (TRAV14/DV4, TRAJ54)
CAMREGRIQGAKKLVF

SEQ ID NO: 585968 - protein, 15 aa, Homo sapiens
  CDR3 for beta chain variable domain of TCR clone 292984 (TRBV20-1, TRBJ2-7)
CSARDRVSGMDEQYF

SEQ ID NO: 585969 - protein, 15 aa, Homo sapiens
  CDR3 for alpha chain variable domain of TCR clone 292985 (TRAV26-1, TRAJ15)
CIVRAANQAGTALIF

SEQ ID NO: 585970 - protein, 14 aa, Homo sapiens
  CDR3 for beta chain variable domain of TCR clone 292985 (TRBV19, TRBJ2-3)
CASSIDLGGDTQYF

SEQ ID NO: 585971 - protein, 16 aa, Homo sapiens
  CDR3 for alpha chain variable domain of TCR clone 292986 (TRAV21, TRAJ52)
CAVTNAGGTSYGKRTF

SEQ ID NO: 585972 - protein, 11 aa, Homo sapiens
  CDR3 for beta chain variable domain of TCR clone 292986 (TRBV2, TRBJ1-1)
CASREGTEAFF

SEQ ID NO: 585973 - protein, 16 aa, Homo sapiens
  CDR3 for alpha chain variable domain of TCR clone 292987 (TRAV3, TRAJ4)
CAVRPSPSVGYNKLIF

SEQ ID NO: 585974 - protein, 12 aa, Homo sapiens
  CDR3 for beta chain variable domain of TCR clone 292987 (TRBV7-9, TRBJ1-5)
CASSPQGQPQHF

SEQ ID NO: 585975 - protein, 14 aa, Homo sapiens
  CDR3 for alpha chain variable domain of TCR clone 292988 (TRAV2, TRAJ9)
CAVEDRSGGFTTIF

SEQ ID NO: 585976 - protein, 19 aa, Homo sapiens
  CDR3 for beta chain variable domain of TCR clone 292988 (TRBV25-1, TRBJ2-2)
CAILVYRVDRGRKTGELFF

SEQ ID NO: 585977 - protein, 14 aa, Homo sapiens
  CDR3 for alpha chain variable domain of TCR clone 292989 (TRAV1-2, TRAJ16)
CAVNQFSDGQKLLF

SEQ ID NO: 585978 - protein, 12 aa, Homo sapiens
  CDR3 for beta chain variable domain of TCR clone 292989 (TRBV7-6, TRBJ2-7)
CASSLADSEQYF

SEQ ID NO: 585979 - protein, 13 aa, Homo sapiens
  CDR3 for alpha chain variable domain of TCR clone 292990 (TRAV12-2, TRAJ50)
CAVIVTSYDKVIF

SEQ ID NO: 585980 - protein, 16 aa, Homo sapiens
  CDR3 for beta chain variable domain of TCR clone 292990 (TRBV7-3, TRBJ2-2)
CASSLKRGTLSGELFF

SEQ ID NO: 585981 - protein, 19 aa, Homo sapiens
  CDR3 for alpha chain variable domain of TCR clone 292991 (TRAV26-1, TRAJ52)
CIVRAHRNAGGTSYGKMTS

SEQ ID NO: 585982 - protein, 13 aa, Homo sapiens
  CDR3 for beta chain variable domain of TCR clone 292991 (TRBV19, TRBJ2-7)
CASRKAGGSEQYF

SEQ ID NO: 585983 - protein, 12 aa, Homo sapiens
  CDR3 for alpha chain variable domain of TCR clone 292992 (TRAV13-1, TRAJ21)
CAEKEGFNKFYF

SEQ ID NO: 585984 - protein, 15 aa, Homo sapiens
  CDR3 for beta chain variable domain of TCR clone 292992 (TRBV29-1, TRBJ2-7)
CSVEFFDRGSYEQYF

SEQ ID NO: 585985 - protein, 17 aa, Homo sapiens
  CDR3 for alpha chain variable domain of TCR clone 292993 (TRAV27, TRAJ32)
CAGGRGNYGGATNKLIF

SEQ ID NO: 585986 - protein, 15 aa, Homo sapiens
  CDR3 for beta chain variable domain of TCR clone 292993 (TRBV4-3, TRBJ2-7)
CASSQDLGSSYEQYF

SEQ ID NO: 585987 - protein, 12 aa, Homo sapiens
  CDR3 for alpha chain variable domain of TCR clone 292994 (TRAV21, TRAJ3)
CCFYSSASKIIF

SEQ ID NO: 585988 - protein, 16 aa, Homo sapiens
  CDR3 for beta chain variable domain of TCR clone 292994 (TRBV19, TRBJ2-1)
CASSKAGPSSYNDQFF

SEQ ID NO: 585989 - protein, 14 aa, Homo sapiens
  CDR3 for alpha chain variable domain of TCR clone 292995 (TRAV12-1, TRAJ32)
CVVRWKGCYKQAHL

SEQ ID NO: 585990 - protein, 13 aa, Homo sapiens
  CDR3 for beta chain variable domain of TCR clone 292995 (TRBV18, TRBJ2-7)
CASAPGRNYEQYF

SEQ ID NO: 585991 - protein, 16 aa, Homo sapiens
  CDR3 for alpha chain variable domain of TCR clone 292996 (TRAV8-3, TRAJ10)
CAVGPILTGGGNKLTF

SEQ ID NO: 585992 - protein, 16 aa, Homo sapiens
  CDR3 for beta chain variable domain of TCR clone 292996 (TRBV7-2, TRBJ2-5)
CASSSKWLSGQETQCF

SEQ ID NO: 585993 - protein, 10 aa, Homo sapiens
  CDR3 for alpha chain variable domain of TCR clone 292997 (TRAV23/DV6, TRAJ57)
CAARSTLSQG

SEQ ID NO: 585994 - protein, 14 aa, Homo sapiens
  CDR3 for beta chain variable domain of TCR clone 292997 (TRBV19, TRBJ2-1)
CASSKDRGQDEQFF

SEQ ID NO: 585995 - protein, 13 aa, Homo sapiens
  CDR3 for alpha chain variable domain of TCR clone 292998 (TRAV14/DV4, TRAJ16)
CAMREGSGQKLLF

SEQ ID NO: 585996 - protein, 15 aa, Homo sapiens
  CDR3 for beta chain variable domain of TCR clone 292998 (TRBV7-9, TRBJ2-7)
CASSLDLDGGYEQYF

SEQ ID NO: 585997 - protein, 11 aa, Homo sapiens
  CDR3 for alpha chain variable domain of TCR clone 292999 (TRAV29/DV5, TRAJ37)
CATSNPGKLIF

SEQ ID NO: 585998 - protein, 12 aa, Homo sapiens
  CDR3 for beta chain variable domain of TCR clone 292999 (TRBV11-2, TRBJ2-1)
CASSPGNNEQFF

SEQ ID NO: 585999 - protein, 14 aa, Homo sapiens
  CDR3 for alpha chain variable domain of TCR clone 293000 (TRAV16, TRAJ17)
CALSGRAAGNKLTF

SEQ ID NO: 586000 - protein, 15 aa, Homo sapiens
  CDR3 for beta chain variable domain of TCR clone 293000 (TRBV3-1, TRBJ1-2)
CASSRTRLPEGGYTF

SEQ ID NO: 586001 - protein, 14 aa, Homo sapiens
  CDR3 for alpha chain variable domain of TCR clone 293001 (TRAV1-2, TRAJ16)
CSVNRFSDGQKLLF

SEQ ID NO: 586002 - protein, 16 aa, Homo sapiens
  CDR3 for beta chain variable domain of TCR clone 293001 (TRBV19, TRBJ2-1)
CASSEILAGDGNEQFF

SEQ ID NO: 586003 - protein, 15 aa, Homo sapiens
  CDR3 for alpha chain variable domain of TCR clone 293002 (TRAV25, TRAJ52)
CAGTSGGTSYGKLTF

SEQ ID NO: 586004 - protein, 13 aa, Homo sapiens
  CDR3 for beta chain variable domain of TCR clone 293002 (TRBV6-5, TRBJ2-5)
CASSPQGGEDQYF

SEQ ID NO: 586005 - protein, 13 aa, Homo sapiens
  CDR3 for alpha chain variable domain of TCR clone 293003 (TRAV2, TRAJ40)
CAVVTSGTYKYTF

SEQ ID NO: 586006 - protein, 14 aa, Homo sapiens
  CDR3 for beta chain variable domain of TCR clone 293003 (TRBV19, TRBJ2-1)
SASPTFVLSGEQFF

SEQ ID NO: 586007 - protein, 16 aa, Homo sapiens
  CDR3 for alpha chain variable domain of TCR clone 293004 (TRAV1-2, TRAJ10)
CAVRGVLTGGGNKLTF

SEQ ID NO: 586008 - protein, 13 aa, Homo sapiens
  CDR3 for beta chain variable domain of TCR clone 293004 (TRBV11-2, TRBJ2-1)
CASSLDLVNEQFF

SEQ ID NO: 586009 - protein, 15 aa, Homo sapiens
  CDR3 for alpha chain variable domain of TCR clone 293005 (TRAV23/DV6, TRAJ49)
CAATPGQVCRSFQIS

SEQ ID NO: 586010 - protein, 14 aa, Homo sapiens
  CDR3 for beta chain variable domain of TCR clone 293005 (TRBV7-3, TRBJ1-1)
CASSLKGGNTEAFF

SEQ ID NO: 586011 - protein, 17 aa, Homo sapiens
  CDR3 for alpha chain variable domain of TCR clone 293006 (TRAV3, TRAJ42)
CAVRDRDYGGSQGNLIL

SEQ ID NO: 586012 - protein, 14 aa, Homo sapiens
  CDR3 for beta chain variable domain of TCR clone 293006 (TRBV19, TRBJ2-2)
CASSGQGIAGELFF

SEQ ID NO: 586013 - protein, 13 aa, Homo sapiens
  CDR3 for alpha chain variable domain of TCR clone 293007 (TRAV13-1, TRAJ9)
CAASGTGGFKTIF

SEQ ID NO: 586014 - protein, 13 aa, Homo sapiens
  CDR3 for beta chain variable domain of TCR clone 293007 (TRBV12-4, TRBJ2-7)
CASSLDRVREQYF

SEQ ID NO: 586015 - protein, 14 aa, Homo sapiens
  CDR3 for alpha chain variable domain of TCR clone 293008 (TRAV8-6, TRAJ12)
CAVKAADSSHKLIF

SEQ ID NO: 586016 - protein, 15 aa, Homo sapiens
  CDR3 for beta chain variable domain of TCR clone 293008 (TRBV5-1, TRBJ2-5)
CASSLGLAEQETQYF

SEQ ID NO: 586017 - protein, 12 aa, Homo sapiens
  CDR3 for alpha chain variable domain of TCR clone 293009 (TRAV38-2/DV8, TRAJ47)
CVLMEYGNKLGF

SEQ ID NO: 586018 - protein, 14 aa, Homo sapiens
  CDR3 for beta chain variable domain of TCR clone 293009 (TRBV20-1, TRBJ1-5)
CSATDRGSNQPQHF

SEQ ID NO: 586019 - protein, 15 aa, Homo sapiens
  CDR3 for alpha chain variable domain of TCR clone 293010 (TRAV8-3, TRAJ40)
CAAPSLGSGTYKYIF

SEQ ID NO: 586020 - protein, 18 aa, Homo sapiens
  CDR3 for beta chain variable domain of TCR clone 293010 (TRBV7-9, TRBJ2-7)
CASSLTTSGSRTWYEQYF

SEQ ID NO: 586021 - protein, 13 aa, Homo sapiens
  CDR3 for alpha chain variable domain of TCR clone 293011 (TRAV21, TRAJ57)
CAVTQGGSEKLVF

SEQ ID NO: 586022 - protein, 15 aa, Homo sapiens
  CDR3 for beta chain variable domain of TCR clone 293011 (TRBV5-1, TRBJ1-1)
CGSSSTTGTNTEAFF

SEQ ID NO: 586023 - protein, 16 aa, Homo sapiens
  CDR3 for alpha chain variable domain of TCR clone 293012 (TRAV26-1, TRAJ52)
CIVRVSSGTSYGKLTF

SEQ ID NO: 586024 - protein, 16 aa, Homo sapiens
  CDR3 for beta chain variable domain of TCR clone 293012 (TRBV3-1, TRBJ2-3)
CASSQRAGDPTDTQYF

SEQ ID NO: 586025 - protein, 13 aa, Homo sapiens
  CDR3 for alpha chain variable domain of TCR clone 293013 (TRAV4, TRAJ42)
CLVGGVSQGNLIF

SEQ ID NO: 586026 - protein, 13 aa, Homo sapiens
  CDR3 for beta chain variable domain of TCR clone 293013 (TRBV7-2, TRBJ1-1)
CASNLKGAKVAFF

SEQ ID NO: 586027 - protein, 16 aa, Homo sapiens
  CDR3 for alpha chain variable domain of TCR clone 293014 (TRAV38-1, TRAJ32)
CAFMKGGGGATNKLIF

SEQ ID NO: 586028 - protein, 13 aa, Homo sapiens
  CDR3 for beta chain variable domain of TCR clone 293014 (TRBV20-1, TRBJ2-5)
CSAREAFQETQCF

SEQ ID NO: 586029 - protein, 13 aa, Homo sapiens
  CDR3 for alpha chain variable domain of TCR clone 293015 (TRAV3, TRAJ41)
CAVSSNSGYALNF

SEQ ID NO: 586030 - protein, 16 aa, Homo sapiens
  CDR3 for beta chain variable domain of TCR clone 293015 (TRBV5-5, TRBJ1-2)
CASSPTWGRGLYGYTF

SEQ ID NO: 586031 - protein, 14 aa, Homo sapiens
  CDR3 for alpha chain variable domain of TCR clone 293016 (TRAV12-1, TRAJ8)
CVVNSNTGFQKLVF

SEQ ID NO: 586032 - protein, 17 aa, Homo sapiens
  CDR3 for beta chain variable domain of TCR clone 293016 (TRBV7-8, TRBJ2-6)
CASSAGTGGAVANVLTF

SEQ ID NO: 586033 - protein, 14 aa, Homo sapiens
  CDR3 for alpha chain variable domain of TCR clone 293017 (TRAV23/DV6, TRAJ24)
CAASLSDSWGKLQF

SEQ ID NO: 586034 - protein, 15 aa, Homo sapiens
  CDR3 for beta chain variable domain of TCR clone 293017 (TRBV19, TRBJ2-7)
CASGIGGGLVNEQYF

SEQ ID NO: 586035 - protein, 13 aa, Homo sapiens
  CDR3 for alpha chain variable domain of TCR clone 293018 (TRAV23/DV6, TRAJ15)
CEALPAGRNCSDL

SEQ ID NO: 586036 - protein, 14 aa, Homo sapiens
  CDR3 for beta chain variable domain of TCR clone 293018 (TRBV7-9, TRBJ1-2)
CASSRQGANYGYTF

SEQ ID NO: 586037 - protein, 11 aa, Homo sapiens
  CDR3 for alpha chain variable domain of TCR clone 293019 (TRAV21, TRAJ49)
CAVITGNQFYF

SEQ ID NO: 586038 - protein, 15 aa, Homo sapiens
  CDR3 for beta chain variable domain of TCR clone 293019 (TRBV2, TRBJ2-1)
CASSELAGSYNEQFF

SEQ ID NO: 586039 - protein, 13 aa, Homo sapiens
  CDR3 for alpha chain variable domain of TCR clone 293020 (TRAV12-3, TRAJ13)
CAMGTGGYEKVTF

SEQ ID NO: 586040 - protein, 14 aa, Homo sapiens
  CDR3 for beta chain variable domain of TCR clone 293020 (TRBV7-9, TRBJ2-2)
CASSGLADTGELFF

SEQ ID NO: 586041 - protein, 13 aa, Homo sapiens
  CDR3 for alpha chain variable domain of TCR clone 293021 (TRAV3, TRAJ15)
CAVRDQAGTALIF

SEQ ID NO: 586042 - protein, 17 aa, Homo sapiens
  CDR3 for beta chain variable domain of TCR clone 293021 (TRBV28, TRBJ2-5)
CASSTPEGDALKETQYF

SEQ ID NO: 586043 - protein, 12 aa, Homo sapiens
  CDR3 for alpha chain variable domain of TCR clone 293022 (TRAV27, TRAJ21)
CAGVRQLQQLLL

SEQ ID NO: 586044 - protein, 14 aa, Homo sapiens
  CDR3 for beta chain variable domain of TCR clone 293022 (TRBV7-9, TRBJ1-4)
CESSLEGQSEKLFF

SEQ ID NO: 586045 - protein, 16 aa, Homo sapiens
  CDR3 for alpha chain variable domain of TCR clone 293023 (TRAV8-1, TRAJ48)
CAVTLISNFGNEKLTF

SEQ ID NO: 586046 - protein, 16 aa, Homo sapiens
  CDR3 for beta chain variable domain of TCR clone 293023 (TRBV7-3, TRBJ2-2)
CASSLKRGTLSGELFF

SEQ ID NO: 586047 - protein, 13 aa, Homo sapiens
  CDR3 for alpha chain variable domain of TCR clone 293024 (TRAV2, TRAJ40)
CAVVTSGTSKYIF

SEQ ID NO: 586048 - protein, 14 aa, Homo sapiens
  CDR3 for beta chain variable domain of TCR clone 293024 (TRBV19, TRBJ2-1)
CASPTFVLSGEQCF

SEQ ID NO: 586049 - protein, 15 aa, Homo sapiens
  CDR3 for alpha chain variable domain of TCR clone 293025 (TRAV29/DV5, TRAJ29)
CAASERISGNKPLVF

SEQ ID NO: 586050 - protein, 17 aa, Homo sapiens
  CDR3 for beta chain variable domain of TCR clone 293025 (TRBV4-1, TRBJ1-4)
CASSQEGPRGVEEKLFF

SEQ ID NO: 586051 - protein, 14 aa, Homo sapiens
  CDR3 for alpha chain variable domain of TCR clone 293026 (TRAV17, TRAJ32)
CATDPGGATNKLII

SEQ ID NO: 586052 - protein, 14 aa, Homo sapiens
  CDR3 for beta chain variable domain of TCR clone 293026 (TRBV2, TRBJ1-5)
CASSENRGGQPQHF

SEQ ID NO: 586053 - protein, 12 aa, Homo sapiens
  CDR3 for alpha chain variable domain of TCR clone 293027 (TRAV2, TRAJ24)
CAATDSWGKFQF

SEQ ID NO: 586054 - protein, 14 aa, Homo sapiens
  CDR3 for beta chain variable domain of TCR clone 293027 (TRBV18, TRBJ2-7)
CASSPRGGAYEQYF

SEQ ID NO: 586055 - protein, 14 aa, Homo sapiens
  CDR3 for alpha chain variable domain of TCR clone 293028 (TRAV8-3, TRAJ4)
CAAGAAGGYNKLIF

SEQ ID NO: 586056 - protein, 15 aa, Homo sapiens
  CDR3 for beta chain variable domain of TCR clone 293028 (TRBV7-2, TRBJ2-1)
CASTHGTGIYNEQFF

SEQ ID NO: 586057 - protein, 14 aa, Homo sapiens
  CDR3 for alpha chain variable domain of TCR clone 293029 (TRAV17, TRAJ16)
CATADFSDGQKLLF

SEQ ID NO: 586058 - protein, 15 aa, Homo sapiens
  CDR3 for beta chain variable domain of TCR clone 293029 (TRBV25-1, TRBJ1-4)
CASSPGDSTNEKLFF

SEQ ID NO: 586059 - protein, 16 aa, Homo sapiens
  CDR3 for alpha chain variable domain of TCR clone 293030 (TRAV35, TRAJ28)
CAGQKYSGAGSYQLTF

SEQ ID NO: 586060 - protein, 17 aa, Homo sapiens
  CDR3 for beta chain variable domain of TCR clone 293030 (TRBV13, TRBJ2-3)
CASSLSRVAGGRNTQYF

SEQ ID NO: 586061 - protein, 14 aa, Homo sapiens
  CDR3 for alpha chain variable domain of TCR clone 293031 (TRAV8-3, TRAJ15)
CAVGRHQAGTALLF

SEQ ID NO: 586062 - protein, 15 aa, Homo sapiens
  CDR3 for beta chain variable domain of TCR clone 293031 (TRBV27, TRBJ2-1)
CASSNGGGASNEQFF

SEQ ID NO: 586063 - protein, 14 aa, Homo sapiens
  CDR3 for alpha chain variable domain of TCR clone 293032 (TRAV13-1, TRAJ44)
CAAKATGTASKLTF

SEQ ID NO: 586064 - protein, 14 aa, Homo sapiens
  CDR3 for beta chain variable domain of TCR clone 293032 (TRBV19, TRBJ2-2)
CASSTLHRSGELCV

SEQ ID NO: 586065 - protein, 11 aa, Homo sapiens
  CDR3 for alpha chain variable domain of TCR clone 293033 (TRAV2, TRAJ33)
CAVESNYQLIW

SEQ ID NO: 586066 - protein, 15 aa, Homo sapiens
  CDR3 for beta chain variable domain of TCR clone 293033 (TRBV19, TRBJ1-1)
CASTSGQIQNTEAFV

SEQ ID NO: 586067 - protein, 15 aa, Homo sapiens
  CDR3 for alpha chain variable domain of TCR clone 293034 (TRAV25, TRAJ53)
CPTSNSGGSNYKMKF

SEQ ID NO: 586068 - protein, 14 aa, Homo sapiens
  CDR3 for beta chain variable domain of TCR clone 293034 (TRBV11-2, TRBJ2-3)
CASSRLARTDTQYF

SEQ ID NO: 586069 - protein, 10 aa, Homo sapiens
  CDR3 for alpha chain variable domain of TCR clone 293035 (TRAV30, TRAJ32)
CGTEKDMVVL

SEQ ID NO: 586070 - protein, 13 aa, Homo sapiens
  CDR3 for beta chain variable domain of TCR clone 293035 (TRBV10-3, TRBJ2-7)
CASKLAVNYEQYC

SEQ ID NO: 586071 - protein, 10 aa, Homo sapiens
  CDR3 for alpha chain variable domain of TCR clone 293036 (TRAV23/DV6, TRAJ57)
CAASSTLSQG

SEQ ID NO: 586072 - protein, 16 aa, Homo sapiens
  CDR3 for beta chain variable domain of TCR clone 293036 (TRBV19, TRBJ2-2)
CASRSTGTGATGELFF

SEQ ID NO: 586073 - protein, 11 aa, Homo sapiens
  CDR3 for alpha chain variable domain of TCR clone 293037 (TRAV21, TRAJ34)
CAVTNTDKLIF

SEQ ID NO: 586074 - protein, 12 aa, Homo sapiens
  CDR3 for beta chain variable domain of TCR clone 293037 (TRBV27, TRBJ2-2)
CASKLFTGELFF

SEQ ID NO: 586075 - protein, 14 aa, Homo sapiens
  CDR3 for alpha chain variable domain of TCR clone 293038 (TRAV13-1, TRAJ13)
CAASRVGGYQKVTF

SEQ ID NO: 586076 - protein, 17 aa, Homo sapiens
  CDR3 for beta chain variable domain of TCR clone 293038 (TRBV4-1, TRBJ2-7)
CASSQPTSGSRGYEQYF

SEQ ID NO: 586077 - protein, 13 aa, Homo sapiens
  CDR3 for alpha chain variable domain of TCR clone 293039 (TRAV12-3, TRAJ35)
CAMAIGFGNVLHS

SEQ ID NO: 586078 - protein, 15 aa, Homo sapiens
  CDR3 for beta chain variable domain of TCR clone 293039 (TRBV20-1, TRBJ2-1)
CSARGSGTYYNEQFF

SEQ ID NO: 586079 - protein, 11 aa, Homo sapiens
  CDR3 for alpha chain variable domain of TCR clone 293040 (TRAV2, TRAJ13)
CASGGYQKVTF

SEQ ID NO: 586080 - protein, 14 aa, Homo sapiens
  CDR3 for beta chain variable domain of TCR clone 293040 (TRBV12-4, TRBJ1-1)
CASSPFRPGTEAFF

SEQ ID NO: 586081 - protein, 11 aa, Homo sapiens
  CDR3 for alpha chain variable domain of TCR clone 293041 (TRAV35, TRAJ30)
CAGERDGKIIF

SEQ ID NO: 586082 - protein, 14 aa, Homo sapiens
  CDR3 for beta chain variable domain of TCR clone 293041 (TRBV15, TRBJ2-5)
CATSGDRGQETQYF

SEQ ID NO: 586083 - protein, 12 aa, Homo sapiens
  CDR3 for alpha chain variable domain of TCR clone 293042 (TRAV8-3, TRAJ26)
CAGDNYGQNFVF

SEQ ID NO: 586084 - protein, 15 aa, Homo sapiens
  CDR3 for beta chain variable domain of TCR clone 293042 (TRBV9, TRBJ2-1)
CASSLAGSAYDEQFF

SEQ ID NO: 586085 - protein, 16 aa, Homo sapiens
  CDR3 for alpha chain variable domain of TCR clone 293043 (TRAV35, TRAJ28)
CAGRKYSGAGSYQLTF

SEQ ID NO: 586086 - protein, 13 aa, Homo sapiens
  CDR3 for beta chain variable domain of TCR clone 293043 (TRBV19, TRBJ1-2)
CASSQGQVYGYTF

SEQ ID NO: 586087 - protein, 11 aa, Homo sapiens
  CDR3 for alpha chain variable domain of TCR clone 293044 (TRAV16, TRAJ33)
CALHSNYQLIW

SEQ ID NO: 586088 - protein, 19 aa, Homo sapiens
  CDR3 for beta chain variable domain of TCR clone 293044 (TRBV28, TRBJ2-7)
CASSYSGTSRLGWVYEQYF

SEQ ID NO: 586089 - protein, 14 aa, Homo sapiens
  CDR3 for alpha chain variable domain of TCR clone 293045 (TRAV20, TRDJ1)
CAVQAGGSPGKLIF

SEQ ID NO: 586090 - protein, 14 aa, Homo sapiens
  CDR3 for beta chain variable domain of TCR clone 293045 (TRBV28, TRBJ1-2)
CASRIQGANYGYTF

SEQ ID NO: 586091 - protein, 12 aa, Homo sapiens
  CDR3 for alpha chain variable domain of TCR clone 293046 (TRAV13-1, TRAJ48)
CAANFGNAKLTF

SEQ ID NO: 586092 - protein, 13 aa, Homo sapiens
  CDR3 for beta chain variable domain of TCR clone 293046 (TRBV7-3, TRBJ1-1)
CASSQDWGADAVF

SEQ ID NO: 586093 - protein, 14 aa, Homo sapiens
  CDR3 for alpha chain variable domain of TCR clone 293047 (TRAV2, TRAJ4)
CAVEERGGYNKLIF

SEQ ID NO: 586094 - protein, 14 aa, Homo sapiens
  CDR3 for beta chain variable domain of TCR clone 293047 (TRBV7-3, TRBJ2-1)
CASSLAGGTNEQFF

SEQ ID NO: 586095 - protein, 13 aa, Homo sapiens
  CDR3 for alpha chain variable domain of TCR clone 293048 (TRAV30, TRAJ24)
CGTVTDSWGKLQF

SEQ ID NO: 586096 - protein, 14 aa, Homo sapiens
  CDR3 for beta chain variable domain of TCR clone 293048 (TRBV15, TRBJ2-7)
CATSRVARGYEQYF

SEQ ID NO: 586097 - protein, 10 aa, Homo sapiens
  CDR3 for alpha chain variable domain of TCR clone 293049 (TRAV12-2, TRAJ20)
CAVYLYKPSF

SEQ ID NO: 586098 - protein, 14 aa, Homo sapiens
  CDR3 for beta chain variable domain of TCR clone 293049 (TRBV10-3, TRBJ2-2)
CAISEVSHSGELFF

SEQ ID NO: 586099 - protein, 13 aa, Homo sapiens
  CDR3 for alpha chain variable domain of TCR clone 293050 (TRAV13-1, TRAJ5)
CAPEHTGRRALTF

SEQ ID NO: 586100 - protein, 15 aa, Homo sapiens
  CDR3 for beta chain variable domain of TCR clone 293050 (TRBV6-1, TRBJ2-1)
CASSELRGQYNEQFF

SEQ ID NO: 586101 - protein, 16 aa, Homo sapiens
  CDR3 for alpha chain variable domain of TCR clone 293051 (TRAV12-3, TRAJ53)
CAVSPGIGGSNYKLTF

SEQ ID NO: 586102 - protein, 11 aa, Homo sapiens
  CDR3 for beta chain variable domain of TCR clone 293051 (TRBV29-1, TRBJ2-5)
CSEDRTGTQYF

SEQ ID NO: 586103 - protein, 15 aa, Homo sapiens
  CDR3 for alpha chain variable domain of TCR clone 293052 (TRAV29/DV5, TRAJ24)
CAASGATDSWGKFQF

SEQ ID NO: 586104 - protein, 13 aa, Homo sapiens
  CDR3 for beta chain variable domain of TCR clone 293052 (TRBV19, TRBJ1-2)
CASSFPGQDGYTF

SEQ ID NO: 586105 - protein, 12 aa, Homo sapiens
  CDR3 for alpha chain variable domain of TCR clone 293053 (TRAV4, TRAJ6)
FLAPGGSYIPTF

SEQ ID NO: 586106 - protein, 17 aa, Homo sapiens
  CDR3 for beta chain variable domain of TCR clone 293053 (TRBV13, TRBJ2-3)
CASSLSRVAGGRNTQYF

SEQ ID NO: 586107 - protein, 14 aa, Homo sapiens
  CDR3 for alpha chain variable domain of TCR clone 293054 (TRAV12-1, TRAJ30)
CVVNIGGRDGKIIL

SEQ ID NO: 586108 - protein, 14 aa, Homo sapiens
  CDR3 for beta chain variable domain of TCR clone 293054 (TRBV7-6, TRBJ2-3)
CASSLGTVTDTQYF

SEQ ID NO: 586109 - protein, 14 aa, Homo sapiens
  CDR3 for alpha chain variable domain of TCR clone 293055 (TRAV38-1, TRAJ45)
CASHSGGGADGLTF

SEQ ID NO: 586110 - protein, 13 aa, Homo sapiens
  CDR3 for beta chain variable domain of TCR clone 293055 (TRBV10-3, TRBJ1-2)
CAISERDSYGYTC

SEQ ID NO: 586111 - protein, 14 aa, Homo sapiens
  CDR3 for alpha chain variable domain of TCR clone 293056 (TRAV1-2, TRAJ8)
CAVREATGFQKLVF

SEQ ID NO: 586112 - protein, 15 aa, Homo sapiens
  CDR3 for beta chain variable domain of TCR clone 293056 (TRBV4-1, TRBJ2-7)
CASSQNTGRLYEQYF

SEQ ID NO: 586113 - protein, 13 aa, Homo sapiens
  CDR3 for alpha chain variable domain of TCR clone 293057 (TRAV21, TRAJ20)
CAVGLRVDYKLSF

SEQ ID NO: 586114 - protein, 13 aa, Homo sapiens
  CDR3 for beta chain variable domain of TCR clone 293057 (TRBV6-1, TRBJ1-1)
CASCRQGNAEAFF

SEQ ID NO: 586115 - protein, 16 aa, Homo sapiens
  CDR3 for alpha chain variable domain of TCR clone 293058 (TRAV3, TRAJ10)
CAVRDMRAGGGNKLTF

SEQ ID NO: 586116 - protein, 13 aa, Homo sapiens
  CDR3 for beta chain variable domain of TCR clone 293058 (TRBV7-9, TRBJ2-2)
CASSLDPTGELFF

SEQ ID NO: 586117 - protein, 11 aa, Homo sapiens
  CDR3 for alpha chain variable domain of TCR clone 293059 (TRAV20, TRAJ23)
CACNQGGKHIF

SEQ ID NO: 586118 - protein, 16 aa, Homo sapiens
  CDR3 for beta chain variable domain of TCR clone 293059 (TRBV7-8, TRBJ2-5)
CASSFGGQPAQETQYF

SEQ ID NO: 586119 - protein, 12 aa, Homo sapiens
  CDR3 for alpha chain variable domain of TCR clone 293060 (TRAV1-1, TRAJ29)
FASGSGNTPLGF

SEQ ID NO: 586120 - protein, 15 aa, Homo sapiens
  CDR3 for beta chain variable domain of TCR clone 293060 (TRBV27, TRBJ2-1)
CASSNGGGSSNEQFF

SEQ ID NO: 586121 - protein, 13 aa, Homo sapiens
  CDR3 for alpha chain variable domain of TCR clone 293061 (TRAV23/DV6, TRAJ21)
CAASIGNFNKFYF

SEQ ID NO: 586122 - protein, 15 aa, Homo sapiens
  CDR3 for beta chain variable domain of TCR clone 293061 (TRBV4-1, TRBJ1-4)
CASSDTGGTNEILFF

SEQ ID NO: 586123 - protein, 15 aa, Homo sapiens
  CDR3 for alpha chain variable domain of TCR clone 293062 (TRAV3, TRAJ9)
CAVRARNTGGFKTIF

SEQ ID NO: 586124 - protein, 12 aa, Homo sapiens
  CDR3 for beta chain variable domain of TCR clone 293062 (TRBV7-8, TRBJ2-7)
CASSLGDREQYF

SEQ ID NO: 586125 - protein, 13 aa, Homo sapiens
  CDR3 for alpha chain variable domain of TCR clone 293063 (TRAV2, TRAJ40)
CAVVTSGTYKYIF

SEQ ID NO: 586126 - protein, 13 aa, Homo sapiens
  CDR3 for beta chain variable domain of TCR clone 293063 (TRBV19, TRBJ2-1)
CSPTFGLSGEQFF

SEQ ID NO: 586127 - protein, 16 aa, Homo sapiens
  CDR3 for alpha chain variable domain of TCR clone 293064 (TRAV12-3, TRAJ53)
CAMSPGSGGSNYKLTF

SEQ ID NO: 586128 - protein, 13 aa, Homo sapiens
  CDR3 for beta chain variable domain of TCR clone 293064 (TRBV7-9, TRBJ2-5)
CASLPSGRETQYF

SEQ ID NO: 586129 - protein, 16 aa, Homo sapiens
  CDR3 for alpha chain variable domain of TCR clone 293065 (TRAV3, TRAJ27)
CAVRDPYNTNAGKSTF

SEQ ID NO: 586130 - protein, 13 aa, Homo sapiens
  CDR3 for beta chain variable domain of TCR clone 293065 (TRBV4-1, TRBJ2-2)
CASSQENTGELFF

SEQ ID NO: 586131 - protein, 11 aa, Homo sapiens
  CDR3 for alpha chain variable domain of TCR clone 293066 (TRAV21, TRAJ34)
CAHYNTDKLIF

SEQ ID NO: 586132 - protein, 17 aa, Homo sapiens
  CDR3 for beta chain variable domain of TCR clone 293066 (TRBV28, TRBJ2-5)
CASSTPEGDALQETQYF

SEQ ID NO: 586133 - protein, 13 aa, Homo sapiens
  CDR3 for alpha chain variable domain of TCR clone 293067 (TRAV20, TRAJ29)
CAVQAVGNTPLFF

SEQ ID NO: 586134 - protein, 15 aa, Homo sapiens
  CDR3 for beta chain variable domain of TCR clone 293067 (TRBV10-2, TRBJ2-5)
CASRGSGGPQETQYF

SEQ ID NO: 586135 - protein, 16 aa, Homo sapiens
  CDR3 for alpha chain variable domain of TCR clone 293068 (TRAV30, TRAJ26)
CDTESVGDNYGQNFVF

SEQ ID NO: 586136 - protein, 13 aa, Homo sapiens
  CDR3 for beta chain variable domain of TCR clone 293068 (TRBV19, TRBJ1-2)
CASSISEDYGYTF

SEQ ID NO: 586137 - protein, 14 aa, Homo sapiens
  CDR3 for alpha chain variable domain of TCR clone 293069 (TRAV1-2, TRAJ8)
CAVREDTGFQKFVF

SEQ ID NO: 586138 - protein, 16 aa, Homo sapiens
  CDR3 for beta chain variable domain of TCR clone 293069 (TRBV7-3, TRBJ2-2)
CASSLKRGTLSGELFF

SEQ ID NO: 586139 - protein, 16 aa, Homo sapiens
  CDR3 for alpha chain variable domain of TCR clone 293070 (TRAV3, TRAJ37)
CAVRGKGSGNTGKLIF

SEQ ID NO: 586140 - protein, 11 aa, Homo sapiens
  CDR3 for beta chain variable domain of TCR clone 293070 (TRBV24-1, TRBJ2-3)
CATASTDTQYF

SEQ ID NO: 586141 - protein, 14 aa, Homo sapiens
  CDR3 for alpha chain variable domain of TCR clone 293071 (TRAV12-3, TRAJ10)
SHLPLTGGGNKLTF

SEQ ID NO: 586142 - protein, 19 aa, Homo sapiens
  CDR3 for beta chain variable domain of TCR clone 293071 (TRBV5-5, TRBJ2-1)
CASSRGSGTGTNLRNEQFF

SEQ ID NO: 586143 - protein, 13 aa, Homo sapiens
  CDR3 for alpha chain variable domain of TCR clone 293072 (TRAV21, TRAJ36)
CAVIKTGANNLFF

SEQ ID NO: 586144 - protein, 13 aa, Homo sapiens
  CDR3 for beta chain variable domain of TCR clone 293072 (TRBV29-1, TRBJ2-3)
CSTTRGGRDTQYF

SEQ ID NO: 586145 - protein, 15 aa, Homo sapiens
  CDR3 for alpha chain variable domain of TCR clone 293073 (TRAV2, TRAJ9)
CAVEDRGTGGFKTIF

SEQ ID NO: 586146 - protein, 13 aa, Homo sapiens
  CDR3 for beta chain variable domain of TCR clone 293073 (TRBV20-1, TRBJ1-1)
CSARGGGNTEAVS

SEQ ID NO: 586147 - protein, 11 aa, Homo sapiens
  CDR3 for alpha chain variable domain of TCR clone 293074 (TRAV1-1, TRAJ23)
CAVRQGGKLIF

SEQ ID NO: 586148 - protein, 14 aa, Homo sapiens
  CDR3 for beta chain variable domain of TCR clone 293074 (TRBV7-9, TRBJ1-2)
CASSRQGANYGYTF

SEQ ID NO: 586149 - protein, 13 aa, Homo sapiens
  CDR3 for alpha chain variable domain of TCR clone 293075 (TRAV13-1, TRAJ9)
CAASGTGGFKTIS

SEQ ID NO: 586150 - protein, 13 aa, Homo sapiens
  CDR3 for beta chain variable domain of TCR clone 293075 (TRBV12-4, TRBJ2-7)
CASSLERVREQYF

SEQ ID NO: 586151 - protein, 14 aa, Homo sapiens
  CDR3 for alpha chain variable domain of TCR clone 293076 (TRAV17, TRAJ57)
CATVPQGGSEKLVF

SEQ ID NO: 586152 - protein, 18 aa, Homo sapiens
  CDR3 for beta chain variable domain of TCR clone 293076 (TRBV6-6, TRBJ1-3)
CASSYSKWDSISGNTIYF

SEQ ID NO: 586153 - protein, 14 aa, Homo sapiens
  CDR3 for alpha chain variable domain of TCR clone 293077 (TRAV8-4, TRAJ34)
CAVRDPGDTDKLIF

SEQ ID NO: 586154 - protein, 13 aa, Homo sapiens
  CDR3 for beta chain variable domain of TCR clone 293077 (TRBV7-9, TRBJ2-5)
CASLSPGQETQYF

SEQ ID NO: 586155 - protein, 13 aa, Homo sapiens
  CDR3 for alpha chain variable domain of TCR clone 293078 (TRAV8-3, TRAJ28)
CAVGAVGSYQLTF

SEQ ID NO: 586156 - protein, 13 aa, Homo sapiens
  CDR3 for beta chain variable domain of TCR clone 293078 (TRBV11-1, TRBJ1-2)
CASSLKQNYGYTF

SEQ ID NO: 586157 - protein, 10 aa, Homo sapiens
  CDR3 for alpha chain variable domain of TCR clone 293079 (TRAV12-2, TRAJ52)
RSTGYGKLTF

SEQ ID NO: 586158 - protein, 11 aa, Homo sapiens
  CDR3 for beta chain variable domain of TCR clone 293079 (TRBV11-2, TRBJ2-2)
CASSLPGELFF

SEQ ID NO: 586159 - protein, 16 aa, Homo sapiens
  CDR3 for alpha chain variable domain of TCR clone 293080 (TRAV4, TRAJ8)
CLVGDSGNTGFQKLVF

SEQ ID NO: 586160 - protein, 15 aa, Homo sapiens
  CDR3 for beta chain variable domain of TCR clone 293080 (TRBV15, TRBJ1-2)
CATSRVRASGSGYSF

SEQ ID NO: 586161 - protein, 15 aa, Homo sapiens
  CDR3 for alpha chain variable domain of TCR clone 293081 (TRAV3, TRAJ17)
CAVRDGPAAGNKLTF

SEQ ID NO: 586162 - protein, 12 aa, Homo sapiens
  CDR3 for beta chain variable domain of TCR clone 293081 (TRBV12-4, TRBJ2-1)
YASSPGRNEQFF

SEQ ID NO: 586163 - protein, 15 aa, Homo sapiens
  CDR3 for alpha chain variable domain of TCR clone 293082 (TRAV17, TRAJ52)
CATEAGGTSYGKLTF

SEQ ID NO: 586164 - protein, 14 aa, Homo sapiens
  CDR3 for beta chain variable domain of TCR clone 293082 (TRBV28, TRBJ1-5)
CPSSLGVLVKPQHF

SEQ ID NO: 586165 - protein, 15 aa, Homo sapiens
  CDR3 for alpha chain variable domain of TCR clone 293083 (TRAV21, TRAJ38)
CAVRQDAGNNRKMIW

SEQ ID NO: 586166 - protein, 16 aa, Homo sapiens
  CDR3 for beta chain variable domain of TCR clone 293083 (TRBV4-2, TRBJ1-1)
CASRPLDGGGDTEAFF

SEQ ID NO: 586167 - protein, 14 aa, Homo sapiens
  CDR3 for alpha chain variable domain of TCR clone 293084 (TRAV38-1, TRAJ29)
CAFNTPSGNTPLVF

SEQ ID NO: 586168 - protein, 14 aa, Homo sapiens
  CDR3 for beta chain variable domain of TCR clone 293084 (TRBV18, TRBJ2-7)
CASSPRGGAYEQYF

SEQ ID NO: 586169 - protein, 16 aa, Homo sapiens
  CDR3 for alpha chain variable domain of TCR clone 293085 (TRAV21, TRAJ17)
CAVRPREEAAGNKLTF

SEQ ID NO: 586170 - protein, 16 aa, Homo sapiens
  CDR3 for beta chain variable domain of TCR clone 293085 (TRBV2, TRBJ2-7)
CASSEPWTGPSYEQYF

SEQ ID NO: 586171 - protein, 12 aa, Homo sapiens
  CDR3 for alpha chain variable domain of TCR clone 293086 (TRAV13-2, TRAJ23)
CAERHRGGRLIF

SEQ ID NO: 586172 - protein, 16 aa, Homo sapiens
  CDR3 for beta chain variable domain of TCR clone 293086 (TRBV7-2, TRBJ2-6)
CAILSGVSSGANVLTF

SEQ ID NO: 586173 - protein, 13 aa, Homo sapiens
  CDR3 for alpha chain variable domain of TCR clone 293087 (TRAV1-2, TRAJ12)
CAVSIDSSYKLIF

SEQ ID NO: 586174 - protein, 15 aa, Homo sapiens
  CDR3 for beta chain variable domain of TCR clone 293087 (TRBV7-3, TRBJ2-2)
CASSETGQGTGELFF

SEQ ID NO: 586175 - protein, 14 aa, Homo sapiens
  CDR3 for alpha chain variable domain of TCR clone 293088 (TRAV10, TRAJ29)
CVVSANSGNKPLVF

SEQ ID NO: 586176 - protein, 16 aa, Homo sapiens
  CDR3 for beta chain variable domain of TCR clone 293088 (TRBV29-1, TRBJ2-7)
CSVEDAEDGTAYEQYF

SEQ ID NO: 586177 - protein, 13 aa, Homo sapiens
  CDR3 for alpha chain variable domain of TCR clone 293089 (TRAV20, TRAJ37)
CAGCSSNTGKLIF

SEQ ID NO: 586178 - protein, 16 aa, Homo sapiens
  CDR3 for beta chain variable domain of TCR clone 293089 (TRBV12-4, TRBJ2-5)
CASSPTSGRAEGTQYF

SEQ ID NO: 586179 - protein, 16 aa, Homo sapiens
  CDR3 for alpha chain variable domain of TCR clone 293090 (TRAV3, TRAJ21)
CAVRDIERGNFNKFYF

SEQ ID NO: 586180 - protein, 13 aa, Homo sapiens
  CDR3 for beta chain variable domain of TCR clone 293090 (TRBV24-1, TRBJ2-3)
CATSTGGTDTQYF

SEQ ID NO: 586181 - protein, 18 aa, Homo sapiens
  CDR3 for alpha chain variable domain of TCR clone 293091 (TRAV16, TRAJ4)
CITVLSRMFSGGYNKLIF

SEQ ID NO: 586182 - protein, 16 aa, Homo sapiens
  CDR3 for beta chain variable domain of TCR clone 293091 (TRBV12-4, TRBJ1-5)
CASSRPVGGSNKPQHF

SEQ ID NO: 586183 - protein, 15 aa, Homo sapiens
  CDR3 for alpha chain variable domain of TCR clone 293092 (TRAV21, TRAJ53)
CATLNSGGSNYKLTF

SEQ ID NO: 586184 - protein, 14 aa, Homo sapiens
  CDR3 for beta chain variable domain of TCR clone 293092 (TRBV2, TRBJ1-5)
CASSGTVSNQPQHF

SEQ ID NO: 586185 - protein, 16 aa, Homo sapiens
  CDR3 for alpha chain variable domain of TCR clone 293093 (TRAV30, TRAJ24)
CGTEMVDADSWGKFQF

SEQ ID NO: 586186 - protein, 17 aa, Homo sapiens
  CDR3 for beta chain variable domain of TCR clone 293093 (TRBV20-1, TRBJ2-2)
CSASGSGQGGLTGELFF

SEQ ID NO: 586187 - protein, 16 aa, Homo sapiens
  CDR3 for alpha chain variable domain of TCR clone 293094 (TRAV19, TRAJ20)
CALSGWRGPNDYKLSF

SEQ ID NO: 586188 - protein, 14 aa, Homo sapiens
  CDR3 for beta chain variable domain of TCR clone 293094 (TRBV6-3, TRBJ1-1)
CASSYGGQHTEAFF

SEQ ID NO: 586189 - protein, 13 aa, Homo sapiens
  CDR3 for alpha chain variable domain of TCR clone 293095 (TRAV12-1, TRAJ34)
CVVTGYNTDKLIF

SEQ ID NO: 586190 - protein, 13 aa, Homo sapiens
  CDR3 for beta chain variable domain of TCR clone 293095 (TRBV28, TRBJ2-7)
CASKAGGVYEQYF

SEQ ID NO: 586191 - protein, 15 aa, Homo sapiens
  CDR3 for alpha chain variable domain of TCR clone 293096 (TRAV3, TRAJ42)
CAVRGGTGSQGNLIF

SEQ ID NO: 586192 - protein, 16 aa, Homo sapiens
  CDR3 for beta chain variable domain of TCR clone 293096 (TRBV7-9, TRBJ1-2)
CASSLGFSSGEDGYTF

SEQ ID NO: 586193 - protein, 11 aa, Homo sapiens
  CDR3 for alpha chain variable domain of TCR clone 293097 (TRAV26-1, TRAJ27)
CIDPNAGQSTF

SEQ ID NO: 586194 - protein, 18 aa, Homo sapiens
  CDR3 for beta chain variable domain of TCR clone 293097 (TRBV7-9, TRBJ2-6)
CASSFPGAGISGANVLTF

SEQ ID NO: 586195 - protein, 13 aa, Homo sapiens
  CDR3 for alpha chain variable domain of TCR clone 293098 (TRAV13-1, TRAJ6)
CAARRGGSYIPKF

SEQ ID NO: 586196 - protein, 13 aa, Homo sapiens
  CDR3 for beta chain variable domain of TCR clone 293098 (TRBV5-8, TRBJ1-2)
CASSLGGNYGYTF

SEQ ID NO: 586197 - protein, 16 aa, Homo sapiens
  CDR3 for alpha chain variable domain of TCR clone 293099 (TRAV3, TRAJ23)
YAVKIGIYNQGGKVIF

SEQ ID NO: 586198 - protein, 17 aa, Homo sapiens
  CDR3 for beta chain variable domain of TCR clone 293099 (TRBV10-3, TRBJ2-6)
CAISESTAPSGANVLTF

SEQ ID NO: 586199 - protein, 12 aa, Homo sapiens
  CDR3 for alpha chain variable domain of TCR clone 293100 (TRAV13-1, TRAJ49)
CAASIWGNQFYF

SEQ ID NO: 586200 - protein, 12 aa, Homo sapiens
  CDR3 for beta chain variable domain of TCR clone 293100 (TRBV7-9, TRBJ2-7)
CASSIKREEQYF

SEQ ID NO: 586201 - protein, 14 aa, Homo sapiens
  CDR3 for alpha chain variable domain of TCR clone 293101 (TRAV26-1, TRAJ26)
CIVRATFLGQNFVF

SEQ ID NO: 586202 - protein, 16 aa, Homo sapiens
  CDR3 for beta chain variable domain of TCR clone 293101 (TRBV12-4, TRBJ2-7)
CASRSTGTGPSYKQYF

SEQ ID NO: 586203 - protein, 13 aa, Homo sapiens
  CDR3 for alpha chain variable domain of TCR clone 293102 (TRAV20, TRAJ31)
CAVQAWNNARLMF

SEQ ID NO: 586204 - protein, 13 aa, Homo sapiens
  CDR3 for beta chain variable domain of TCR clone 293102 (TRBV12-4, TRBJ1-2)
CAISLRQGKGYTF

SEQ ID NO: 586205 - protein, 14 aa, Homo sapiens
  CDR3 for alpha chain variable domain of TCR clone 293103 (TRAV12-2, TRAJ40)
CAAKIPSGTYKYIF

SEQ ID NO: 586206 - protein, 20 aa, Homo sapiens
  CDR3 for beta chain variable domain of TCR clone 293103 (TRBV28, TRBJ2-1)
CASTPIGRSPGLAGGNEQFF

SEQ ID NO: 586207 - protein, 11 aa, Homo sapiens
  CDR3 for alpha chain variable domain of TCR clone 293104 (TRAV8-6, TRAJ34)
CAVWNTDKLIF

SEQ ID NO: 586208 - protein, 14 aa, Homo sapiens
  CDR3 for beta chain variable domain of TCR clone 293104 (TRBV7-3, TRBJ2-1)
CASSLAGGTNEQFF

SEQ ID NO: 586209 - protein, 14 aa, Homo sapiens
  CDR3 for alpha chain variable domain of TCR clone 293105 (TRAV12-3, TRAJ10)
SHLPLTGGGNKLTF

SEQ ID NO: 586210 - protein, 13 aa, Homo sapiens
  CDR3 for beta chain variable domain of TCR clone 293105 (TRBV29-1, TRBJ2-3)
CSACRQRTDTQYF

SEQ ID NO: 586211 - protein, 13 aa, Homo sapiens
  CDR3 for alpha chain variable domain of TCR clone 293106 (TRAV8-3, TRAJ44)
CAVVPGTASKLTF

SEQ ID NO: 586212 - protein, 17 aa, Homo sapiens
  CDR3 for beta chain variable domain of TCR clone 293106 (TRBV7-2, TRBJ2-7)
CASSLGTGTSGRYEQYF

SEQ ID NO: 586213 - protein, 14 aa, Homo sapiens
  CDR3 for alpha chain variable domain of TCR clone 293107 (TRAV27, TRAJ23)
CAGLSYNQGGKLIC

SEQ ID NO: 586214 - protein, 15 aa, Homo sapiens
  CDR3 for beta chain variable domain of TCR clone 293107 (TRBV19, TRBJ2-2)
CASSLNRGVTGELFF

SEQ ID NO: 586215 - protein, 13 aa, Homo sapiens
  CDR3 for alpha chain variable domain of TCR clone 293108 (TRAV35, TRAJ45)
CAGREGGADGLTF

SEQ ID NO: 586216 - protein, 13 aa, Homo sapiens
  CDR3 for beta chain variable domain of TCR clone 293108 (TRBV7-9, TRBJ1-2)
CASSLKQNYGYTF

SEQ ID NO: 586217 - protein, 14 aa, Homo sapiens
  CDR3 for alpha chain variable domain of TCR clone 293109 (TRAV35, TRAJ56)
CAGPLTGANSKLTF

SEQ ID NO: 586218 - protein, 12 aa, Homo sapiens
  CDR3 for beta chain variable domain of TCR clone 293109 (TRBV11-2, TRBJ2-2)
CASSLGGGELFF

SEQ ID NO: 586219 - protein, 13 aa, Homo sapiens
  CDR3 for alpha chain variable domain of TCR clone 293110 (TRAV13-1, TRAJ10)
CAAPTGGGNKLTF

SEQ ID NO: 586220 - protein, 15 aa, Homo sapiens
  CDR3 for beta chain variable domain of TCR clone 293110 (TRBV19, TRBJ1-4)
CASSPGTATNENLFF

SEQ ID NO: 586221 - protein, 14 aa, Homo sapiens
  CDR3 for alpha chain variable domain of TCR clone 293111 (TRAV17, TRAJ57)
CATDPQGGSEKLVF

SEQ ID NO: 586222 - protein, 13 aa, Homo sapiens
  CDR3 for beta chain variable domain of TCR clone 293111 (TRBV2, TRBJ1-5)
CATAGPGNQPQHF

SEQ ID NO: 586223 - protein, 13 aa, Homo sapiens
  CDR3 for alpha chain variable domain of TCR clone 293112 (TRAV12-2, TRAJ13)
CLKKTGGYQKVTF

SEQ ID NO: 586224 - protein, 16 aa, Homo sapiens
  CDR3 for beta chain variable domain of TCR clone 293112 (TRBV20-1, TRBJ1-4)
CSAPGQGLLTNEKLFF

SEQ ID NO: 586225 - protein, 14 aa, Homo sapiens
  CDR3 for alpha chain variable domain of TCR clone 293113 (TRAV35, TRAJ53)
CAGNSGGSNYKLTF

SEQ ID NO: 586226 - protein, 14 aa, Homo sapiens
  CDR3 for beta chain variable domain of TCR clone 293113 (TRBV7-3, TRBJ2-1)
CASSLGTSANEQFF

SEQ ID NO: 586227 - protein, 15 aa, Homo sapiens
  CDR3 for alpha chain variable domain of TCR clone 293114 (TRAV34, TRAJ38)
CGADYTPGNNRKLIW

SEQ ID NO: 586228 - protein, 14 aa, Homo sapiens
  CDR3 for beta chain variable domain of TCR clone 293114 (TRBV11-2, TRBJ2-3)
CASSLGGGANTQYF

SEQ ID NO: 586229 - protein, 15 aa, Homo sapiens
  CDR3 for alpha chain variable domain of TCR clone 293115 (TRAV3, TRAJ32)
CAVSSDGGATNKLIF

SEQ ID NO: 586230 - protein, 13 aa, Homo sapiens
  CDR3 for beta chain variable domain of TCR clone 293115 (TRBV20-1, TRBJ2-7)
CSARPSTNYEQYF

SEQ ID NO: 586231 - protein, 12 aa, Homo sapiens
  CDR3 for alpha chain variable domain of TCR clone 293116 (TRAV22, TRAJ22)
CAPGGSARQMPF

SEQ ID NO: 586232 - protein, 13 aa, Homo sapiens
  CDR3 for beta chain variable domain of TCR clone 293116 (TRBV15, TRBJ1-6)
CATSGGLNSPLHF

SEQ ID NO: 586233 - protein, 14 aa, Homo sapiens
  CDR3 for alpha chain variable domain of TCR clone 293117 (TRAV23/DV6, TRAJ37)
CAASTSSNTGKLLF

SEQ ID NO: 586234 - protein, 14 aa, Homo sapiens
  CDR3 for beta chain variable domain of TCR clone 293117 (TRBV15, TRBJ2-3)
CATRSGTSTDTQYF

SEQ ID NO: 586235 - protein, 11 aa, Homo sapiens
  CDR3 for alpha chain variable domain of TCR clone 293118 (TRAV3, TRAJ21)
CAVGNFNKFYF

SEQ ID NO: 586236 - protein, 17 aa, Homo sapiens
  CDR3 for beta chain variable domain of TCR clone 293118 (TRBV20-1, TRBJ1-6)
CSARGGYTFSYNSPLHF

SEQ ID NO: 586237 - protein, 13 aa, Homo sapiens
  CDR3 for alpha chain variable domain of TCR clone 293119 (TRAV21, TRAJ27)
CAALTPMQANQPL

SEQ ID NO: 586238 - protein, 13 aa, Homo sapiens
  CDR3 for beta chain variable domain of TCR clone 293119 (TRBV14, TRBJ2-7)
CASSQDRRYEQYF

SEQ ID NO: 586239 - protein, 14 aa, Homo sapiens
  CDR3 for alpha chain variable domain of TCR clone 293120 (TRAV12-2, TRAJ33)
CAVKRARSNYQLIW

SEQ ID NO: 586240 - protein, 12 aa, Homo sapiens
  CDR3 for beta chain variable domain of TCR clone 293120 (TRBV6-3, TRBJ2-7)
CASSLTPYEQYF

SEQ ID NO: 586241 - protein, 16 aa, Homo sapiens
  CDR3 for alpha chain variable domain of TCR clone 293121 (TRAV3, TRAJ10)
CAVRDMRAGGVNKLTF

SEQ ID NO: 586242 - protein, 15 aa, Homo sapiens
  CDR3 for beta chain variable domain of TCR clone 293121 (TRBV7-2, TRBJ1-2)
CASSPRAGWNYGYTF

SEQ ID NO: 586243 - protein, 12 aa, Homo sapiens
  CDR3 for alpha chain variable domain of TCR clone 293122 (TRAV4, TRAJ21)
CLVGDNFNKFYF

SEQ ID NO: 586244 - protein, 15 aa, Homo sapiens
  CDR3 for beta chain variable domain of TCR clone 293122 (TRBV20-1, TRBJ2-7)
CSARTPGTITYGQYF

SEQ ID NO: 586245 - protein, 12 aa, Homo sapiens
  CDR3 for alpha chain variable domain of TCR clone 293123 (TRAV1-1, TRAJ8)
CAGGTGFQKLVF

SEQ ID NO: 586246 - protein, 13 aa, Homo sapiens
  CDR3 for beta chain variable domain of TCR clone 293123 (TRBV19, TRBJ1-2)
CGSSQGQVYGYTF

SEQ ID NO: 586247 - protein, 13 aa, Homo sapiens
  CDR3 for alpha chain variable domain of TCR clone 293124 (TRAV3, TRAJ33)
CAVRDRSHYQLIW

SEQ ID NO: 586248 - protein, 16 aa, Homo sapiens
  CDR3 for beta chain variable domain of TCR clone 293124 (TRBV4-2, TRBJ2-7)
CASSQDRGTSSYEQYF

SEQ ID NO: 586249 - protein, 14 aa, Homo sapiens
  CDR3 for alpha chain variable domain of TCR clone 293125 (TRAV8-4, TRAJ23)
CAVSAPGSGGKLIS

SEQ ID NO: 586250 - protein, 17 aa, Homo sapiens
  CDR3 for beta chain variable domain of TCR clone 293125 (TRBV4-3, TRBJ2-3)
CASSQDPLAGAVDTQYF

SEQ ID NO: 586251 - protein, 13 aa, Homo sapiens
  CDR3 for alpha chain variable domain of TCR clone 293126 (TRAV35, TRAJ57)
CWSPQGGSEKLVF

SEQ ID NO: 586252 - protein, 18 aa, Homo sapiens
  CDR3 for beta chain variable domain of TCR clone 293126 (TRBV6-6, TRBJ1-3)
CASSYSKWDSISGDTIYF

SEQ ID NO: 586253 - protein, 11 aa, Homo sapiens
  CDR3 for alpha chain variable domain of TCR clone 293127 (TRAV3, TRAJ21)
CAVGNSNKFYF

SEQ ID NO: 586254 - protein, 16 aa, Homo sapiens
  CDR3 for beta chain variable domain of TCR clone 293127 (TRBV19, TRBJ2-1)
CASSKAGPTSYNEQFF

SEQ ID NO: 586255 - protein, 11 aa, Homo sapiens
  CDR3 for alpha chain variable domain of TCR clone 293128 (TRAV12-3, TRAJ27)
CAMSNAGKSTF

SEQ ID NO: 586256 - protein, 12 aa, Homo sapiens
  CDR3 for beta chain variable domain of TCR clone 293128 (TRBV12-4, TRBJ2-7)
CASSLGGYEQYF

SEQ ID NO: 586257 - protein, 11 aa, Homo sapiens
  CDR3 for alpha chain variable domain of TCR clone 293129 (TRAV13-1, TRAJ40)
CAVSGTYKYLF

SEQ ID NO: 586258 - protein, 16 aa, Homo sapiens
  CDR3 for beta chain variable domain of TCR clone 293129 (TRBV10-3, TRBJ2-3)
CAISVSRLALTDTQYF

SEQ ID NO: 586259 - protein, 15 aa, Homo sapiens
  CDR3 for alpha chain variable domain of TCR clone 293130 (TRAV17, TRAJ13)
CATDAGSGGYQKVTF

SEQ ID NO: 586260 - protein, 15 aa, Homo sapiens
  CDR3 for beta chain variable domain of TCR clone 293130 (TRBV7-9, TRBJ1-4)
CASSARTGGNEKLFF

SEQ ID NO: 586261 - protein, 14 aa, Homo sapiens
  CDR3 for alpha chain variable domain of TCR clone 293131 (TRAV12-2, TRAJ9)
CAVNRYTGGFKTIF

SEQ ID NO: 586262 - protein, 15 aa, Homo sapiens
  CDR3 for beta chain variable domain of TCR clone 293131 (TRBV7-2, TRBJ2-1)
CASSSGLAGGNEQFF

SEQ ID NO: 586263 - protein, 13 aa, Homo sapiens
  CDR3 for alpha chain variable domain of TCR clone 293132 (TRAV27, TRAJ41)
CAGEGNAGYALNF

SEQ ID NO: 586264 - protein, 14 aa, Homo sapiens
  CDR3 for beta chain variable domain of TCR clone 293132 (TRBV7-2, TRBJ1-1)
CASSILTGTTEAFF

SEQ ID NO: 586265 - protein, 19 aa, Homo sapiens
  CDR3 for alpha chain variable domain of TCR clone 293133 (TRAV2, TRAJ20)
ILQVREADAAVYRDCKLSF

SEQ ID NO: 586266 - protein, 16 aa, Homo sapiens
  CDR3 for beta chain variable domain of TCR clone 293133 (TRBV20-1, TRBJ1-2)
CSASMGQGVANYGYTF

SEQ ID NO: 586267 - protein, 14 aa, Homo sapiens
  CDR3 for alpha chain variable domain of TCR clone 293134 (TRAV1-2, TRAJ16)
CAVNRFSSGQKLLF

SEQ ID NO: 586268 - protein, 15 aa, Homo sapiens
  CDR3 for beta chain variable domain of TCR clone 293134 (TRBV9, TRBJ1-6)
CASSVAGTGDSPLHF

SEQ ID NO: 586269 - protein, 12 aa, Homo sapiens
  CDR3 for alpha chain variable domain of TCR clone 293135 (TRAV12-3, TRAJ20)
CAMVRGDYKLSF

SEQ ID NO: 586270 - protein, 15 aa, Homo sapiens
  CDR3 for beta chain variable domain of TCR clone 293135 (TRBV11-3, TRBJ2-7)
CASSPGPASSYEQYF

SEQ ID NO: 586271 - protein, 11 aa, Homo sapiens
  CDR3 for alpha chain variable domain of TCR clone 293136 (TRAV4, TRAJ31)
CLVGDNARLMF

SEQ ID NO: 586272 - protein, 18 aa, Homo sapiens
  CDR3 for beta chain variable domain of TCR clone 293136 (TRBV6-6, TRBJ1-3)
CASSYSKWDSISGNTIYF

SEQ ID NO: 586273 - protein, 13 aa, Homo sapiens
  CDR3 for alpha chain variable domain of TCR clone 293137 (TRAV12-3, TRAJ43)
CAMRPYNNNDMRF

SEQ ID NO: 586274 - protein, 15 aa, Homo sapiens
  CDR3 for beta chain variable domain of TCR clone 293137 (TRBV10-1, TRBJ2-3)
CASSATSGGFDTQYF

SEQ ID NO: 586275 - protein, 10 aa, Homo sapiens
  CDR3 for alpha chain variable domain of TCR clone 293138 (TRAV1-2, TRAJ26)
CAVNGQNLVF

SEQ ID NO: 586276 - protein, 15 aa, Homo sapiens
  CDR3 for beta chain variable domain of TCR clone 293138 (TRBV9, TRBJ1-6)
CASSVAGTGDSPLHF

SEQ ID NO: 586277 - protein, 15 aa, Homo sapiens
  CDR3 for alpha chain variable domain of TCR clone 293139 (TRAV1-2, TRAJ12)
CAVIPEVDSSYKLIF

SEQ ID NO: 586278 - protein, 15 aa, Homo sapiens
  CDR3 for beta chain variable domain of TCR clone 293139 (TRBV7-9, TRBJ1-6)
CASSSPGRGNSPLHF

SEQ ID NO: 586279 - protein, 17 aa, Homo sapiens
  CDR3 for alpha chain variable domain of TCR clone 293140 (TRAV3, TRAJ6)
CAVRDGPRAGGSYIPTF

SEQ ID NO: 586280 - protein, 14 aa, Homo sapiens
  CDR3 for beta chain variable domain of TCR clone 293140 (TRBV28, TRBJ2-2)
CASTRRSGDGELFF

SEQ ID NO: 586281 - protein, 14 aa, Homo sapiens
  CDR3 for alpha chain variable domain of TCR clone 293141 (TRAV12-2, TRAJ17)
CAVLFKAAGNKLTF

SEQ ID NO: 586282 - protein, 13 aa, Homo sapiens
  CDR3 for beta chain variable domain of TCR clone 293141 (TRBV7-3, TRBJ2-7)
CASSKRRGGEQYF

SEQ ID NO: 586283 - protein, 14 aa, Homo sapiens
  CDR3 for alpha chain variable domain of TCR clone 293142 (TRAV8-2, TRAJ23)
CVVSDDNQGGKLIF

SEQ ID NO: 586284 - protein, 12 aa, Homo sapiens
  CDR3 for beta chain variable domain of TCR clone 293142 (TRBV6-1, TRBJ2-7)
CASSDYSYEQYF

SEQ ID NO: 586285 - protein, 21 aa, Homo sapiens
  CDR3 for alpha chain variable domain of TCR clone 293143 (TRAV1-1, TRAJ6)
CLLLLRCERLERTGGSYIPTF

SEQ ID NO: 586286 - protein, 13 aa, Homo sapiens
  CDR3 for beta chain variable domain of TCR clone 293143 (TRBV10-2, TRBJ2-7)
CASGASGGYELYF

SEQ ID NO: 586287 - protein, 14 aa, Homo sapiens
  CDR3 for alpha chain variable domain of TCR clone 293144 (TRAV8-3, TRAJ13)
CAVGGTFGHQKVTF

SEQ ID NO: 586288 - protein, 17 aa, Homo sapiens
  CDR3 for beta chain variable domain of TCR clone 293144 (TRBV7-9, TRBJ2-1)
CASNAGTLGRSYNEQFF

SEQ ID NO: 586289 - protein, 16 aa, Homo sapiens
  CDR3 for alpha chain variable domain of TCR clone 293145 (TRAV12-2, TRAJ40)
CAVIRGGTSGTYKYIF

SEQ ID NO: 586290 - protein, 11 aa, Homo sapiens
  CDR3 for beta chain variable domain of TCR clone 293145 (TRBV11-2, TRBJ2-2)
CASSLPGELFF

SEQ ID NO: 586291 - protein, 15 aa, Homo sapiens
  CDR3 for alpha chain variable domain of TCR clone 293146 (TRAV17, TRAJ48)
CATDETNFGNEKLTF

SEQ ID NO: 586292 - protein, 14 aa, Homo sapiens
  CDR3 for beta chain variable domain of TCR clone 293146 (TRBV10-3, TRBJ1-3)
CATRGQRAGNTIYF

SEQ ID NO: 586293 - protein, 15 aa, Homo sapiens
  CDR3 for alpha chain variable domain of TCR clone 293147 (TRAV14/DV4, TRAJ10)
CAMRELTGGGNKLSF

SEQ ID NO: 586294 - protein, 18 aa, Homo sapiens
  CDR3 for beta chain variable domain of TCR clone 293147 (TRBV7-9, TRBJ2-7)
CASSLTTSGSRTWYEQYF

SEQ ID NO: 586295 - protein, 13 aa, Homo sapiens
  CDR3 for alpha chain variable domain of TCR clone 293148 (TRAV12-2, TRAJ10)
CAVPTGGGNKLTF

SEQ ID NO: 586296 - protein, 20 aa, Homo sapiens
  CDR3 for beta chain variable domain of TCR clone 293148 (TRBV19, TRBJ2-1)
CASSISRTVTSTRLNNEQFF

SEQ ID NO: 586297 - protein, 12 aa, Homo sapiens
  CDR3 for alpha chain variable domain of TCR clone 293149 (TRAV27, TRAJ13)
CAGAGGYQKVTF

SEQ ID NO: 586298 - protein, 15 aa, Homo sapiens
  CDR3 for beta chain variable domain of TCR clone 293149 (TRBV20-1, TRBJ2-6)
CSARDRGPGANVLPF

SEQ ID NO: 586299 - protein, 15 aa, Homo sapiens
  CDR3 for alpha chain variable domain of TCR clone 293150 (TRAV3, TRAJ5)
CAARDPDTGRRALTF

SEQ ID NO: 586300 - protein, 13 aa, Homo sapiens
  CDR3 for beta chain variable domain of TCR clone 293150 (TRBV12-4, TRBJ2-7)
CASSPTETYEQYF

SEQ ID NO: 586301 - protein, 13 aa, Homo sapiens
  CDR3 for alpha chain variable domain of TCR clone 293151 (TRAV3, TRAJ28)
CAVGAVGCYQLTF

SEQ ID NO: 586302 - protein, 15 aa, Homo sapiens
  CDR3 for beta chain variable domain of TCR clone 293151 (TRBV7-9, TRBJ1-5)
CASSQGHQPNQPQHF

SEQ ID NO: 586303 - protein, 12 aa, Homo sapiens
  CDR3 for alpha chain variable domain of TCR clone 293152 (TRAV3, TRAJ34)
CAVLGNTDKLIF

SEQ ID NO: 586304 - protein, 13 aa, Homo sapiens
  CDR3 for beta chain variable domain of TCR clone 293152 (TRBV19, TRBJ2-1)
CASSTGTGNEQFF

SEQ ID NO: 586305 - protein, 13 aa, Homo sapiens
  CDR3 for alpha chain variable domain of TCR clone 293153 (TRAV8-3, TRAJ36)
CAVGATGANNLFF

SEQ ID NO: 586306 - protein, 15 aa, Homo sapiens
  CDR3 for beta chain variable domain of TCR clone 293153 (TRBV7-2, TRBJ2-1)
CASSFQADEYNEQFF

SEQ ID NO: 586307 - protein, 13 aa, Homo sapiens
  CDR3 for alpha chain variable domain of TCR clone 293154 (TRAV35, TRAJ57)
CAGTQGGSEKLVF

SEQ ID NO: 586308 - protein, 13 aa, Homo sapiens
  CDR3 for beta chain variable domain of TCR clone 293154 (TRBV30, TRBJ1-1)
CAWSVTGVTEAFF

SEQ ID NO: 586309 - protein, 13 aa, Homo sapiens
  CDR3 for alpha chain variable domain of TCR clone 293155 (TRAV12-2, TRAJ20)
CAVYPSNDYKLSF

SEQ ID NO: 586310 - protein, 15 aa, Homo sapiens
  CDR3 for beta chain variable domain of TCR clone 293155 (TRBV11-2, TRBJ2-1)
CASSRNRGLMYEQFF

SEQ ID NO: 586311 - protein, 16 aa, Homo sapiens
  CDR3 for alpha chain variable domain of TCR clone 293156 (TRAV39, TRAJ43)
CADDDMRFGAGTRLTV

SEQ ID NO: 586312 - protein, 13 aa, Homo sapiens
  CDR3 for beta chain variable domain of TCR clone 293156 (TRBV10-3, TRBJ2-7)
CASKLAVNYEQYF

SEQ ID NO: 586313 - protein, 14 aa, Homo sapiens
  CDR3 for alpha chain variable domain of TCR clone 293157 (TRAV35, TRAJ33)
CAGSCQDSNYPLIW

SEQ ID NO: 586314 - protein, 15 aa, Homo sapiens
  CDR3 for beta chain variable domain of TCR clone 293157 (TRBV20-1, TRBJ2-7)
CSAESGTSGAYEQYF

SEQ ID NO: 586315 - protein, 18 aa, Homo sapiens
  CDR3 for alpha chain variable domain of TCR clone 293158 (TRAV21, TRAJ52)
CAVRPSPAGGTSYGKLKF

SEQ ID NO: 586316 - protein, 17 aa, Homo sapiens
  CDR3 for beta chain variable domain of TCR clone 293158 (TRBV13, TRBJ2-3)
CASSLSRVAGGEEYAVF

SEQ ID NO: 586317 - protein, 13 aa, Homo sapiens
  CDR3 for alpha chain variable domain of TCR clone 293159 (TRAV17, TRAJ13)
CATDSGGYQKVHF

SEQ ID NO: 586318 - protein, 14 aa, Homo sapiens
  CDR3 for beta chain variable domain of TCR clone 293159 (TRBV6-1, TRBJ1-1)
CASTPLQMNTEAFF

SEQ ID NO: 586319 - protein, 10 aa, Homo sapiens
  CDR3 for alpha chain variable domain of TCR clone 293160 (TRAV36/DV7, TRAJ48)
CAVGNEKLTF

SEQ ID NO: 586320 - protein, 13 aa, Homo sapiens
  CDR3 for beta chain variable domain of TCR clone 293160 (TRBV7-2, TRBJ2-2)
CASSSRPTGELFF

SEQ ID NO: 586321 - protein, 12 aa, Homo sapiens
  CDR3 for alpha chain variable domain of TCR clone 293161 (TRAV13-2, TRAJ23)
CAERHRGGKLIF

SEQ ID NO: 586322 - protein, 17 aa, Homo sapiens
  CDR3 for beta chain variable domain of TCR clone 293161 (TRBV11-2, TRBJ2-3)
CQQLRGGLAGAPNTQYF

SEQ ID NO: 586323 - protein, 15 aa, Homo sapiens
  CDR3 for alpha chain variable domain of TCR clone 293162 (TRAV17, TRAJ54)
CATTRSEQGAQKLVF

SEQ ID NO: 586324 - protein, 16 aa, Homo sapiens
  CDR3 for beta chain variable domain of TCR clone 293162 (TRBV12-4, TRBJ2-3)
CASGLRLAETTDTQYF

SEQ ID NO: 586325 - protein, 14 aa, Homo sapiens
  CDR3 for alpha chain variable domain of TCR clone 293163 (TRAV3, TRAJ9)
CSVRGNTGGFTTIV

SEQ ID NO: 586326 - protein, 14 aa, Homo sapiens
  CDR3 for beta chain variable domain of TCR clone 293163 (TRBV15, TRBJ2-1)
CATSGVEDYNEQFF

SEQ ID NO: 586327 - protein, 13 aa, Homo sapiens
  CDR3 for alpha chain variable domain of TCR clone 293164 (TRAV25, TRAJ29)
CAGRFVGNTPLVF

SEQ ID NO: 586328 - protein, 15 aa, Homo sapiens
  CDR3 for beta chain variable domain of TCR clone 293164 (TRBV29-1, TRBJ2-1)
CSVRTSLSSYNEKFF

SEQ ID NO: 586329 - protein, 10 aa, Homo sapiens
  CDR3 for alpha chain variable domain of TCR clone 293165 (TRAV30, TRAJ48)
CGIGNDKLTF

SEQ ID NO: 586330 - protein, 14 aa, Homo sapiens
  CDR3 for beta chain variable domain of TCR clone 293165 (TRBV7-6, TRBJ2-3)
CASSVAGGTDTQYF

SEQ ID NO: 586331 - protein, 11 aa, Homo sapiens
  CDR3 for alpha chain variable domain of TCR clone 293166 (TRAV23/DV6, TRAJ56)
CAAPANSKLTL

SEQ ID NO: 586332 - protein, 14 aa, Homo sapiens
  CDR3 for beta chain variable domain of TCR clone 293166 (TRBV27, TRBJ2-1)
CASSFGREANEQFF

SEQ ID NO: 586333 - protein, 13 aa, Homo sapiens
  CDR3 for alpha chain variable domain of TCR clone 293167 (TRAV35, TRAJ32)
CAGVGCATNKLIF

SEQ ID NO: 586334 - protein, 17 aa, Homo sapiens
  CDR3 for beta chain variable domain of TCR clone 293167 (TRBV4-3, TRBJ2-1)
CASSQFSSGRASGEQFF

SEQ ID NO: 586335 - protein, 15 aa, Homo sapiens
  CDR3 for alpha chain variable domain of TCR clone 293168 (TRAV17, TRAJ56)
CATDANTGANSQLTF

SEQ ID NO: 586336 - protein, 14 aa, Homo sapiens
  CDR3 for beta chain variable domain of TCR clone 293168 (TRBV19, TRBJ1-5)
CASSLGTGGQPQHF

SEQ ID NO: 586337 - protein, 14 aa, Homo sapiens
  CDR3 for alpha chain variable domain of TCR clone 293169 (TRAV26-1, TRAJ16)
CIVRVPSDGQKLLF

SEQ ID NO: 586338 - protein, 15 aa, Homo sapiens
  CDR3 for beta chain variable domain of TCR clone 293169 (TRBV11-2, TRBJ1-6)
CASSLDPWAVSPLHF

SEQ ID NO: 586339 - protein, 16 aa, Homo sapiens
  CDR3 for alpha chain variable domain of TCR clone 293170 (TRAV17, TRAJ22)
RATDAISSGSARQLTF

SEQ ID NO: 586340 - protein, 15 aa, Homo sapiens
  CDR3 for beta chain variable domain of TCR clone 293170 (TRBV5-1, TRBJ2-1)
CASSPPRAPYNEQFF

SEQ ID NO: 586341 - protein, 21 aa, Homo sapiens
  CDR3 for alpha chain variable domain of TCR clone 293171 (TRAV26-1, TRAJ38)
CIADNAGNNHIQNPDPAVYQL

SEQ ID NO: 586342 - protein, 13 aa, Homo sapiens
  CDR3 for beta chain variable domain of TCR clone 293171 (TRBV20-1, TRBJ1-1)
CSARGGGNTGAFF

SEQ ID NO: 586343 - protein, 12 aa, Homo sapiens
  CDR3 for alpha chain variable domain of TCR clone 293172 (TRAV8-3, TRAJ26)
CAGDNYGQNFVF

SEQ ID NO: 586344 - protein, 15 aa, Homo sapiens
  CDR3 for beta chain variable domain of TCR clone 293172 (TRBV7-2, TRBJ2-1)
CTSSSGLAGGNEQFF

SEQ ID NO: 586345 - protein, 14 aa, Homo sapiens
  CDR3 for alpha chain variable domain of TCR clone 293173 (TRAV12-2, TRAJ40)
CAVQIPSGTYKYIF

SEQ ID NO: 586346 - protein, 14 aa, Homo sapiens
  CDR3 for beta chain variable domain of TCR clone 293173 (TRBV7-9, TRBJ1-2)
CASSRQGANYGYTF

SEQ ID NO: 586347 - protein, 12 aa, Homo sapiens
  CDR3 for alpha chain variable domain of TCR clone 293174 (TRAV13-1, TRAJ27)
FAAHTNAGKSTF

SEQ ID NO: 586348 - protein, 13 aa, Homo sapiens
  CDR3 for beta chain variable domain of TCR clone 293174 (TRBV20-1, TRBJ1-1)
CSARGGGNTEAFF

SEQ ID NO: 586349 - protein, 16 aa, Homo sapiens
  CDR3 for alpha chain variable domain of TCR clone 293175 (TRAV27, TRAJ52)
CAGAPAGGTSYGKLTF

SEQ ID NO: 586350 - protein, 16 aa, Homo sapiens
  CDR3 for beta chain variable domain of TCR clone 293175 (TRBV13, TRBJ2-2)
CASSPRTGEHTGELFF

SEQ ID NO: 586351 - protein, 14 aa, Homo sapiens
  CDR3 for alpha chain variable domain of TCR clone 293176 (TRAV35, TRAJ22)
CAGLRPGSARQLTF

SEQ ID NO: 586352 - protein, 15 aa, Homo sapiens
  CDR3 for beta chain variable domain of TCR clone 293176 (TRBV20-1, TRBJ1-4)
CSARGQLASNEKLFF

SEQ ID NO: 586353 - protein, 12 aa, Homo sapiens
  CDR3 for alpha chain variable domain of TCR clone 293177 (TRAV38-1, TRAJ43)
CAFMTRLADMRF

SEQ ID NO: 586354 - protein, 15 aa, Homo sapiens
  CDR3 for beta chain variable domain of TCR clone 293177 (TRBV6-3, TRBJ2-7)
CASSSPGTVFYEQYF

SEQ ID NO: 586355 - protein, 17 aa, Homo sapiens
  CDR3 for alpha chain variable domain of TCR clone 293178 (TRAV40, TRAJ42)
CLLGDLGYGGSQGNLIF

SEQ ID NO: 586356 - protein, 13 aa, Homo sapiens
  CDR3 for beta chain variable domain of TCR clone 293178 (TRBV7-3, TRBJ1-1)
CASSQDWGAEALF

SEQ ID NO: 586357 - protein, 14 aa, Homo sapiens
  CDR3 for alpha chain variable domain of TCR clone 293179 (TRAV1-2, TRAJ16)
CAFPRFSDGQTLLF

SEQ ID NO: 586358 - protein, 15 aa, Homo sapiens
  CDR3 for beta chain variable domain of TCR clone 293179 (TRBV29-1, TRBJ2-7)
CSVEFFDRGSYEQYF

SEQ ID NO: 586359 - protein, 13 aa, Homo sapiens
  CDR3 for alpha chain variable domain of TCR clone 293180 (TRAV27, TRAJ17)
CAGAATAGNKLTF

SEQ ID NO: 586360 - protein, 14 aa, Homo sapiens
  CDR3 for beta chain variable domain of TCR clone 293180 (TRBV7-9, TRBJ2-7)
CASNSRLVLHEQYF

SEQ ID NO: 586361 - protein, 11 aa, Homo sapiens
  CDR3 for alpha chain variable domain of TCR clone 293181 (TRAV21, TRAJ11)
CAVNGYSTLTF

SEQ ID NO: 586362 - protein, 16 aa, Homo sapiens
  CDR3 for beta chain variable domain of TCR clone 293181 (TRBV19, TRBJ2-1)
CASSKAGPSSYNEQSF

SEQ ID NO: 586363 - protein, 15 aa, Homo sapiens
  CDR3 for alpha chain variable domain of TCR clone 293182 (TRAV8-3, TRAJ40)
CAAPSLGSGTYKYIF

SEQ ID NO: 586364 - protein, 15 aa, Homo sapiens
  CDR3 for beta chain variable domain of TCR clone 293182 (TRBV6-1, TRBJ2-1)
CASSEAAYSYNEQFF

SEQ ID NO: 586365 - protein, 18 aa, Homo sapiens
  CDR3 for alpha chain variable domain of TCR clone 293183 (TRAV13-1, TRAJ52)
CAASKRRAGGTSYGKLTF

SEQ ID NO: 586366 - protein, 13 aa, Homo sapiens
  CDR3 for beta chain variable domain of TCR clone 293183 (TRBV12-4, TRBJ1-2)
CASSLRQGKGYSF

SEQ ID NO: 586367 - protein, 12 aa, Homo sapiens
  CDR3 for alpha chain variable domain of TCR clone 293184 (TRAV21, TRAJ20)
CAVRGNDYKLSF

SEQ ID NO: 586368 - protein, 14 aa, Homo sapiens
  CDR3 for beta chain variable domain of TCR clone 293184 (TRBV7-8, TRBJ2-7)
CASSQTQGADEPYF

SEQ ID NO: 586369 - protein, 17 aa, Homo sapiens
  CDR3 for alpha chain variable domain of TCR clone 293185 (TRAV12-3, TRAJ6)
CAMSARGGAGGSSIPTF

SEQ ID NO: 586370 - protein, 15 aa, Homo sapiens
  CDR3 for beta chain variable domain of TCR clone 293185 (TRBV9, TRBJ1-6)
CASSVAGTGDSPLHF

SEQ ID NO: 586371 - protein, 12 aa, Homo sapiens
  CDR3 for alpha chain variable domain of TCR clone 293186 (TRAV13-1, TRAJ21)
CAAKEGFNKFYF

SEQ ID NO: 586372 - protein, 13 aa, Homo sapiens
  CDR3 for beta chain variable domain of TCR clone 293186 (TRBV7-9, TRBJ2-7)
CASSLGLVGEQYF

SEQ ID NO: 586373 - protein, 14 aa, Homo sapiens
  CDR3 for alpha chain variable domain of TCR clone 293187 (TRAV12-3, TRAJ10)
SHLPLTGGGNKLTF

SEQ ID NO: 586374 - protein, 13 aa, Homo sapiens
  CDR3 for beta chain variable domain of TCR clone 293187 (TRBV2, TRBJ1-6)
CASGRGGISTLHF

SEQ ID NO: 586375 - protein, 12 aa, Homo sapiens
  CDR3 for alpha chain variable domain of TCR clone 293188 (TRAV1-2, TRAJ29)
CAVPSGNTTLAF

SEQ ID NO: 586376 - protein, 13 aa, Homo sapiens
  CDR3 for beta chain variable domain of TCR clone 293188 (TRBV5-4, TRBJ1-1)
CASSVDLGTEAFF

SEQ ID NO: 586377 - protein, 14 aa, Homo sapiens
  CDR3 for alpha chain variable domain of TCR clone 293189 (TRAV4, TRAJ9)
CLVGSGTGGFKTIF

SEQ ID NO: 586378 - protein, 13 aa, Homo sapiens
  CDR3 for beta chain variable domain of TCR clone 293189 (TRBV2, TRBJ1-4)
CASSERAGEKLFF

SEQ ID NO: 586379 - protein, 14 aa, Homo sapiens
  CDR3 for alpha chain variable domain of TCR clone 293190 (TRAV13-1, TRAJ20)
CAARPGSNDYKLRF

SEQ ID NO: 586380 - protein, 12 aa, Homo sapiens
  CDR3 for beta chain variable domain of TCR clone 293190 (TRBV7-8, TRBJ2-7)
CASGLGDREQYF

SEQ ID NO: 586381 - protein, 16 aa, Homo sapiens
  CDR3 for alpha chain variable domain of TCR clone 293191 (TRAV17, TRAJ52)
CATGIIGVTSYGKLTF

SEQ ID NO: 586382 - protein, 14 aa, Homo sapiens
  CDR3 for beta chain variable domain of TCR clone 293191 (TRBV7-3, TRBJ2-2)
CASSSGGYTGELFF

SEQ ID NO: 586383 - protein, 15 aa, Homo sapiens
  CDR3 for alpha chain variable domain of TCR clone 293192 (TRAV23/DV6, TRAJ13)
CAAWPGGGGDQQVTF

SEQ ID NO: 586384 - protein, 17 aa, Homo sapiens
  CDR3 for beta chain variable domain of TCR clone 293192 (TRBV19, TRBJ2-7)
CASSISFYDSYPYEQYF

SEQ ID NO: 586385 - protein, 12 aa, Homo sapiens
  CDR3 for alpha chain variable domain of TCR clone 293193 (TRAV12-3, TRAJ3)
CAIDSSASKIIF

SEQ ID NO: 586386 - protein, 20 aa, Homo sapiens
  CDR3 for beta chain variable domain of TCR clone 293193 (TRBV7-8, TRBJ2-2)
CASSHLFPGPTIHITGELFF

SEQ ID NO: 586387 - protein, 12 aa, Homo sapiens
  CDR3 for alpha chain variable domain of TCR clone 293194 (TRAV29/DV5, TRAJ43)
CAAPYNNNDMRY

SEQ ID NO: 586388 - protein, 17 aa, Homo sapiens
  CDR3 for beta chain variable domain of TCR clone 293194 (TRBV19, TRBJ2-6)
CASSTGQVFSGANVLTF

SEQ ID NO: 586389 - protein, 16 aa, Homo sapiens
  CDR3 for alpha chain variable domain of TCR clone 293195 (TRAV26-1, TRAJ53)
CIVRAAMGGSNYKLTF

SEQ ID NO: 586390 - protein, 12 aa, Homo sapiens
  CDR3 for beta chain variable domain of TCR clone 293195 (TRBV7-9, TRBJ1-5)
CACSPQGQPQHF

SEQ ID NO: 586391 - protein, 14 aa, Homo sapiens
  CDR3 for alpha chain variable domain of TCR clone 293196 (TRAV12-3, TRAJ15)
CAMIPPKAGTALIF

SEQ ID NO: 586392 - protein, 12 aa, Homo sapiens
  CDR3 for beta chain variable domain of TCR clone 293196 (TRBV11-2, TRBJ2-2)
CASSFGGGELFF

SEQ ID NO: 586393 - protein, 15 aa, Homo sapiens
  CDR3 for alpha chain variable domain of TCR clone 293197 (TRAV8-3, TRAJ11)
CAVGLLNSGYSTLTF

SEQ ID NO: 586394 - protein, 16 aa, Homo sapiens
  CDR3 for beta chain variable domain of TCR clone 293197 (TRBV7-9, TRBJ1-2)
CASSLVFSSGEDGYAF

SEQ ID NO: 586395 - protein, 14 aa, Homo sapiens
  CDR3 for alpha chain variable domain of TCR clone 293198 (TRAV13-2, TRAJ32)
CAESLGGATNKLIF

SEQ ID NO: 586396 - protein, 15 aa, Homo sapiens
  CDR3 for beta chain variable domain of TCR clone 293198 (TRBV19, TRBJ2-1)
CASSSPGVPLDEQFF

SEQ ID NO: 586397 - protein, 14 aa, Homo sapiens
  CDR3 for alpha chain variable domain of TCR clone 293199 (TRAV16, TRAJ15)
CALSFNHAGTALIF

SEQ ID NO: 586398 - protein, 16 aa, Homo sapiens
  CDR3 for beta chain variable domain of TCR clone 293199 (TRBV9, TRBJ2-7)
CASSAGPDRSPYEQYF

SEQ ID NO: 586399 - protein, 15 aa, Homo sapiens
  CDR3 for alpha chain variable domain of TCR clone 293200 (TRAV17, TRAJ56)
CATDANTGANSKLTF

SEQ ID NO: 586400 - protein, 16 aa, Homo sapiens
  CDR3 for beta chain variable domain of TCR clone 293200 (TRBV7-3, TRBJ2-2)
CASSLKRGTLSGELVF

SEQ ID NO: 586401 - protein, 18 aa, Homo sapiens
  CDR3 for alpha chain variable domain of TCR clone 293201 (TRAV26-1, TRAJ52)
CIVRVEGAGGTSYGKLTF

SEQ ID NO: 586402 - protein, 14 aa, Homo sapiens
  CDR3 for beta chain variable domain of TCR clone 293201 (TRBV15, TRBJ2-1)
CATSGVEDYNEQFC

SEQ ID NO: 586403 - protein, 13 aa, Homo sapiens
  CDR3 for alpha chain variable domain of TCR clone 293202 (TRAV22, TRAJ58)
CAVTETSGSRLTF

SEQ ID NO: 586404 - protein, 17 aa, Homo sapiens
  CDR3 for beta chain variable domain of TCR clone 293202 (TRBV11-2, TRBJ2-1)
FASSLYPPGVEYNEQFF

SEQ ID NO: 586405 - protein, 10 aa, Homo sapiens
  CDR3 for alpha chain variable domain of TCR clone 293203 (TRAV23/DV6, TRAJ4)
CAARDFCSRD

SEQ ID NO: 586406 - protein, 13 aa, Homo sapiens
  CDR3 for beta chain variable domain of TCR clone 293203 (TRBV7-2, TRBJ1-1)
CASSRNTNTEAFF

SEQ ID NO: 586407 - protein, 10 aa, Homo sapiens
  CDR3 for alpha chain variable domain of TCR clone 293204 (TRAV1-2, TRAJ31)
CVSEDARLMF

SEQ ID NO: 586408 - protein, 15 aa, Homo sapiens
  CDR3 for beta chain variable domain of TCR clone 293204 (TRBV7-3, TRBJ2-1)
CASSLSSGSFDEQFF

SEQ ID NO: 586409 - protein, 14 aa, Homo sapiens
  CDR3 for alpha chain variable domain of TCR clone 293205 (TRAV12-3, TRAJ10)
SHLPLTGGGTKLTF

SEQ ID NO: 586410 - protein, 13 aa, Homo sapiens
  CDR3 for beta chain variable domain of TCR clone 293205 (TRBV20-1, TRBJ2-2)
CSASAAGTGELFF

SEQ ID NO: 586411 - protein, 15 aa, Homo sapiens
  CDR3 for alpha chain variable domain of TCR clone 293206 (TRAV16, TRAJ16)
CALQGGGSDGQKLRF

SEQ ID NO: 586412 - protein, 15 aa, Homo sapiens
  CDR3 for beta chain variable domain of TCR clone 293206 (TRBV20-1, TRBJ2-7)
CSARDRVSGMDEQYF

SEQ ID NO: 586413 - protein, 14 aa, Homo sapiens
  CDR3 for alpha chain variable domain of TCR clone 293207 (TRAV8-2, TRAJ45)
CIVSAGGGADGLTF

SEQ ID NO: 586414 - protein, 12 aa, Homo sapiens
  CDR3 for beta chain variable domain of TCR clone 293207 (TRBV12-4, TRBJ2-1)
CASSLVRVEQFF

SEQ ID NO: 586415 - protein, 13 aa, Homo sapiens
  CDR3 for alpha chain variable domain of TCR clone 293208 (TRAV27, TRAJ45)
CRSSGGGADGLTF

SEQ ID NO: 586416 - protein, 15 aa, Homo sapiens
  CDR3 for beta chain variable domain of TCR clone 293208 (TRBV20-1, TRBJ1-1)
CSASRGVTGNTEAFF

SEQ ID NO: 586417 - protein, 16 aa, Homo sapiens
  CDR3 for alpha chain variable domain of TCR clone 293209 (TRAV30, TRAJ24)
CGTEIVDADSGGKFQF

SEQ ID NO: 586418 - protein, 17 aa, Homo sapiens
  CDR3 for beta chain variable domain of TCR clone 293209 (TRBV7-3, TRBJ2-3)
CASSLMKRMRGADTQYF

SEQ ID NO: 586419 - protein, 20 aa, Homo sapiens
  CDR3 for alpha chain variable domain of TCR clone 293210 (TRAV12-2, TRAJ52)
SPVIQPPTSFRSSSYGKLTF

SEQ ID NO: 586420 - protein, 16 aa, Homo sapiens
  CDR3 for beta chain variable domain of TCR clone 293210 (TRBV24-1, TRBJ2-3)
CATSDPGTGATDTQYF

SEQ ID NO: 586421 - protein, 15 aa, Homo sapiens
  CDR3 for alpha chain variable domain of TCR clone 293211 (TRAV3, TRAJ5)
CAVRDLDTGRRALTF

SEQ ID NO: 586422 - protein, 15 aa, Homo sapiens
  CDR3 for beta chain variable domain of TCR clone 293211 (TRBV4-1, TRBJ1-4)
CASSDTGGTNEKRFY

SEQ ID NO: 586423 - protein, 14 aa, Homo sapiens
  CDR3 for alpha chain variable domain of TCR clone 293212 (TRAV17, TRAJ39)
CATDPARAGNMLTF

SEQ ID NO: 586424 - protein, 15 aa, Homo sapiens
  CDR3 for beta chain variable domain of TCR clone 293212 (TRBV13, TRBJ1-5)
CDSSFGQGGVQPQHF

SEQ ID NO: 586425 - protein, 13 aa, Homo sapiens
  CDR3 for alpha chain variable domain of TCR clone 293213 (TRAV12-2, TRAJ20)
CAVNRFDDYKLSF

SEQ ID NO: 586426 - protein, 18 aa, Homo sapiens
  CDR3 for beta chain variable domain of TCR clone 293213 (TRBV4-1, TRBJ1-5)
CASSQDPRGQGLNQPQHF

SEQ ID NO: 586427 - protein, 15 aa, Homo sapiens
  CDR3 for alpha chain variable domain of TCR clone 293214 (TRAV8-3, TRAJ45)
CASSYSGGGADGLTF

SEQ ID NO: 586428 - protein, 17 aa, Homo sapiens
  CDR3 for beta chain variable domain of TCR clone 293214 (TRBV7-8, TRBJ1-2)
CASSLRPLQGHSYGDTF

SEQ ID NO: 586429 - protein, 11 aa, Homo sapiens
  CDR3 for alpha chain variable domain of TCR clone 293215 (TRAV3, TRAJ21)
CAVGNFNKFYF

SEQ ID NO: 586430 - protein, 16 aa, Homo sapiens
  CDR3 for beta chain variable domain of TCR clone 293215 (TRBV19, TRBJ2-1)
CASSKAGPGSYNEQFS

SEQ ID NO: 586431 - protein, 16 aa, Homo sapiens
  CDR3 for alpha chain variable domain of TCR clone 293216 (TRAV26-1, TRAJ9)
PHATLRFQTGGFKTIF

SEQ ID NO: 586432 - protein, 15 aa, Homo sapiens
  CDR3 for beta chain variable domain of TCR clone 293216 (TRBV27, TRBJ2-5)
CASSLYPRGGETQYF

SEQ ID NO: 586433 - protein, 13 aa, Homo sapiens
  CDR3 for alpha chain variable domain of TCR clone 293217 (TRAV12-2, TRAJ13)
CAVTAGGFQKVTF

SEQ ID NO: 586434 - protein, 15 aa, Homo sapiens
  CDR3 for beta chain variable domain of TCR clone 293217 (TRBV5-1, TRBJ1-1)
CASSLNDFKNTEAFF

SEQ ID NO: 586435 - protein, 14 aa, Homo sapiens
  CDR3 for alpha chain variable domain of TCR clone 293218 (TRAV13-1, TRAJ35)
CAASKGCFGNVLHC

SEQ ID NO: 586436 - protein, 13 aa, Homo sapiens
  CDR3 for beta chain variable domain of TCR clone 293218 (TRBV7-3, TRBJ1-1)
CASSQDWGAEDSF

SEQ ID NO: 586437 - protein, 14 aa, Homo sapiens
  CDR3 for alpha chain variable domain of TCR clone 293219 (TRAV12-2, TRAJ9)
CAVSFGTGGFKTIF

SEQ ID NO: 586438 - protein, 18 aa, Homo sapiens
  CDR3 for beta chain variable domain of TCR clone 293219 (TRBV3-1, TRBJ2-7)
CASSRISAGGRSSYEHYF

SEQ ID NO: 586439 - protein, 13 aa, Homo sapiens
  CDR3 for alpha chain variable domain of TCR clone 293220 (TRAV8-4, TRAJ48)
CAVSLFGNEKLTF

SEQ ID NO: 586440 - protein, 15 aa, Homo sapiens
  CDR3 for beta chain variable domain of TCR clone 293220 (TRBV7-6, TRBJ2-1)
CASSPGQGPYNEQFF

SEQ ID NO: 586441 - protein, 23 aa, Homo sapiens
  CDR3 for alpha chain variable domain of TCR clone 293221 (TRAV26-1, TRAJ38)
CIADNAGNNHIQNPDPAGYQLRD

SEQ ID NO: 586442 - protein, 13 aa, Homo sapiens
  CDR3 for beta chain variable domain of TCR clone 293221 (TRBV20-1, TRBJ1-1)
CSARSGGNTEAFF

SEQ ID NO: 586443 - protein, 14 aa, Homo sapiens
  CDR3 for alpha chain variable domain of TCR clone 293222 (TRAV8-6, TRAJ9)
CAVTPATGGFKTIF

SEQ ID NO: 586444 - protein, 15 aa, Homo sapiens
  CDR3 for beta chain variable domain of TCR clone 293222 (TRBV19, TRBJ1-1)
CASTSGQIQNTEAFF

SEQ ID NO: 586445 - protein, 13 aa, Homo sapiens
  CDR3 for alpha chain variable domain of TCR clone 293223 (TRAV23/DV6, TRAJ5)
CSARAAGRRALTF

SEQ ID NO: 586446 - protein, 15 aa, Homo sapiens
  CDR3 for beta chain variable domain of TCR clone 293223 (TRBV27, TRBJ2-1)
CASSNGGGSSNEQLF

SEQ ID NO: 586447 - protein, 14 aa, Homo sapiens
  CDR3 for alpha chain variable domain of TCR clone 293224 (TRAV21, TRAJ48)
CAVRQGFGNEKLTF

SEQ ID NO: 586448 - protein, 17 aa, Homo sapiens
  CDR3 for beta chain variable domain of TCR clone 293224 (TRBV28, TRBJ2-5)
CASSRQGGLAGAETQYF

SEQ ID NO: 586449 - protein, 12 aa, Homo sapiens
  CDR3 for alpha chain variable domain of TCR clone 293225 (TRAV2, TRAJ33)
CAFMDSNYQLIW

SEQ ID NO: 586450 - protein, 16 aa, Homo sapiens
  CDR3 for beta chain variable domain of TCR clone 293225 (TRBV19, TRBJ2-2)
CASRSPGTGATGELFF

SEQ ID NO: 586451 - protein, 13 aa, Homo sapiens
  CDR3 for alpha chain variable domain of TCR clone 293226 (TRAV20, TRAJ49)
CAVQARTGNQFYF

SEQ ID NO: 586452 - protein, 14 aa, Homo sapiens
  CDR3 for beta chain variable domain of TCR clone 293226 (TRBV5-1, TRBJ1-1)
CASSLQGAGSGAFF

SEQ ID NO: 586453 - protein, 14 aa, Homo sapiens
  CDR3 for alpha chain variable domain of TCR clone 293227 (TRAV13-1, TRAJ44)
CAAKATGTASKLTF

SEQ ID NO: 586454 - protein, 15 aa, Homo sapiens
  CDR3 for beta chain variable domain of TCR clone 293227 (TRBV7-2, TRBJ2-3)
CASTPTSGETDTQYF

SEQ ID NO: 586455 - protein, 16 aa, Homo sapiens
  CDR3 for alpha chain variable domain of TCR clone 293228 (TRAV21, TRAJ45)
CAASWGSGGGADGLTF

SEQ ID NO: 586456 - protein, 14 aa, Homo sapiens
  CDR3 for beta chain variable domain of TCR clone 293228 (TRBV4-2, TRBJ1-2)
CASSPGGSNYGYTF

SEQ ID NO: 586457 - protein, 15 aa, Homo sapiens
  CDR3 for alpha chain variable domain of TCR clone 293229 (TRAV9-2, TRAJ8)
CALRGLNTGFQKLLF

SEQ ID NO: 586458 - protein, 12 aa, Homo sapiens
  CDR3 for beta chain variable domain of TCR clone 293229 (TRBV12-5, TRBJ2-5)
CASGQGVETQYF

SEQ ID NO: 586459 - protein, 16 aa, Homo sapiens
  CDR3 for alpha chain variable domain of TCR clone 293230 (TRAV3, TRAJ10)
CAVRDMNAGGGNKLTL

SEQ ID NO: 586460 - protein, 16 aa, Homo sapiens
  CDR3 for beta chain variable domain of TCR clone 293230 (TRBV12-4, TRBJ2-2)
CASSFWIVGNTGELFF

SEQ ID NO: 586461 - protein, 18 aa, Homo sapiens
  CDR3 for alpha chain variable domain of TCR clone 293231 (TRAV13-1, TRAJ52)
CAASKRSAGGTRYGKLPF

SEQ ID NO: 586462 - protein, 13 aa, Homo sapiens
  CDR3 for beta chain variable domain of TCR clone 293231 (TRBV12-4, TRBJ1-2)
CASSLRQGKGYAF

SEQ ID NO: 586463 - protein, 13 aa, Homo sapiens
  CDR3 for alpha chain variable domain of TCR clone 293232 (TRAV2, TRAJ40)
CAVVTSGTYKYIF

SEQ ID NO: 586464 - protein, 17 aa, Homo sapiens
  CDR3 for beta chain variable domain of TCR clone 293232 (TRBV11-3, TRBJ2-1)
CASSLYPPGVEYNEQFF

SEQ ID NO: 586465 - protein, 14 aa, Homo sapiens
  CDR3 for alpha chain variable domain of TCR clone 293233 (TRAV12-2, TRAJ40)
CAVKIPSGTYTYIF

SEQ ID NO: 586466 - protein, 14 aa, Homo sapiens
  CDR3 for beta chain variable domain of TCR clone 293233 (TRBV20-1, TRBJ1-1)
CSAQTRIGGTEAVF

SEQ ID NO: 586467 - protein, 14 aa, Homo sapiens
  CDR3 for alpha chain variable domain of TCR clone 293234 (TRAV8-3, TRAJ36)
CAVGPITGANNLFF

SEQ ID NO: 586468 - protein, 15 aa, Homo sapiens
  CDR3 for beta chain variable domain of TCR clone 293234 (TRBV4-1, TRBJ2-1)
CASSPDPGNYNEQFF

SEQ ID NO: 586469 - protein, 14 aa, Homo sapiens
  CDR3 for alpha chain variable domain of TCR clone 293235 (TRAV12-3, TRAJ10)
SHLPLTGGGNKLTF

SEQ ID NO: 586470 - protein, 15 aa, Homo sapiens
  CDR3 for beta chain variable domain of TCR clone 293235 (TRBV28, TRBJ1-2)
CASSLWQPTNYGYTF

SEQ ID NO: 586471 - protein, 14 aa, Homo sapiens
  CDR3 for alpha chain variable domain of TCR clone 293236 (TRAV3, TRAJ21)
CAVESQANCNKFYF

SEQ ID NO: 586472 - protein, 18 aa, Homo sapiens
  CDR3 for beta chain variable domain of TCR clone 293236 (TRBV7-9, TRBJ2-1)
CASSLAVSGTSGRNEQFF

SEQ ID NO: 586473 - protein, 13 aa, Homo sapiens
  CDR3 for alpha chain variable domain of TCR clone 293237 (TRAV29/DV5, TRAJ47)
CAASAKYGNKLVF

SEQ ID NO: 586474 - protein, 15 aa, Homo sapiens
  CDR3 for beta chain variable domain of TCR clone 293237 (TRBV7-9, TRBJ1-4)
CASSARTGGNEKLFF

SEQ ID NO: 586475 - protein, 14 aa, Homo sapiens
  CDR3 for alpha chain variable domain of TCR clone 293238 (TRAV14/DV4, TRAJ22)
CAMSPTGSARQLTF

SEQ ID NO: 586476 - protein, 15 aa, Homo sapiens
  CDR3 for beta chain variable domain of TCR clone 293238 (TRBV2, TRBJ2-3)
CASSERSGHTDTQYF

SEQ ID NO: 586477 - protein, 14 aa, Homo sapiens
  CDR3 for alpha chain variable domain of TCR clone 293239 (TRAV12-3, TRAJ57)
CAMSAWGGSEKLVF

SEQ ID NO: 586478 - protein, 15 aa, Homo sapiens
  CDR3 for beta chain variable domain of TCR clone 293239 (TRBV7-2, TRBJ1-2)
CASSPRAGWNYGYTF

SEQ ID NO: 586479 - protein, 11 aa, Homo sapiens
  CDR3 for alpha chain variable domain of TCR clone 293240 (TRAV3, TRAJ21)
CAVGNFNKFYF

SEQ ID NO: 586480 - protein, 16 aa, Homo sapiens
  CDR3 for beta chain variable domain of TCR clone 293240 (TRBV4-3, TRBJ2-3)
CASSLGLAGGGDTQYF

SEQ ID NO: 586481 - protein, 16 aa, Homo sapiens
  CDR3 for alpha chain variable domain of TCR clone 293241 (TRAV21, TRAJ17)
CAVRLGEEAAGNKLTF

SEQ ID NO: 586482 - protein, 16 aa, Homo sapiens
  CDR3 for beta chain variable domain of TCR clone 293241 (TRBV2, TRBJ2-7)
CASSEPWTGPSYEQYF

SEQ ID NO: 586483 - protein, 22 aa, Homo sapiens
  CDR3 for alpha chain variable domain of TCR clone 293242 (TRAV4, )
CLVGPHNYDIQNPDPAVYQLRD

SEQ ID NO: 586484 - protein, 17 aa, Homo sapiens
  CDR3 for beta chain variable domain of TCR clone 293242 (TRBV24-1, TRBJ2-1)
CATSDVWTSGTYNEQFF

SEQ ID NO: 586485 - protein, 13 aa, Homo sapiens
  CDR3 for alpha chain variable domain of TCR clone 293243 (TRAV35, TRAJ57)
FAGSQGGSEKLFF

SEQ ID NO: 586486 - protein, 14 aa, Homo sapiens
  CDR3 for beta chain variable domain of TCR clone 293243 (TRBV25-1, TRBJ1-1)
CASTHLGGNTEAFF

SEQ ID NO: 586487 - protein, 12 aa, Homo sapiens
  CDR3 for alpha chain variable domain of TCR clone 293244 (TRAV8-2, TRAJ45)
CVQGGGADGLTF

SEQ ID NO: 586488 - protein, 15 aa, Homo sapiens
  CDR3 for beta chain variable domain of TCR clone 293244 (TRBV19, TRBJ1-1)
CASSIGRQMNTEAFF

SEQ ID NO: 586489 - protein, 10 aa, Homo sapiens
  CDR3 for alpha chain variable domain of TCR clone 293245 (TRAV17, TRAJ52)
SATSYGKLTF

SEQ ID NO: 586490 - protein, 14 aa, Homo sapiens
  CDR3 for beta chain variable domain of TCR clone 293245 (TRBV7-2, TRBJ2-5)
CASSPRGSSETQYF

SEQ ID NO: 586491 - protein, 13 aa, Homo sapiens
  CDR3 for alpha chain variable domain of TCR clone 293246 (TRAV27, TRAJ41)
CAGEGNSGYALNF

SEQ ID NO: 586492 - protein, 20 aa, Homo sapiens
  CDR3 for beta chain variable domain of TCR clone 293246 (TRBV27, TRBJ2-4)
CASRYRDRAPSTKTFSTSAP

SEQ ID NO: 586493 - protein, 11 aa, Homo sapiens
  CDR3 for alpha chain variable domain of TCR clone 293247 (TRAV12-1, TRAJ30)
CVVNGQDKIIF

SEQ ID NO: 586494 - protein, 12 aa, Homo sapiens
  CDR3 for beta chain variable domain of TCR clone 293247 (TRBV27, TRBJ2-2)
CASKLFTGELFI

SEQ ID NO: 586495 - protein, 15 aa, Homo sapiens
  CDR3 for alpha chain variable domain of TCR clone 293248 (TRAV8-4, TRAJ16)
CAVTDRFSDGQKLLF

SEQ ID NO: 586496 - protein, 13 aa, Homo sapiens
  CDR3 for beta chain variable domain of TCR clone 293248 (TRBV4-2, TRBJ1-1)
CASSQAGNTEAFF

SEQ ID NO: 586497 - protein, 18 aa, Homo sapiens
  CDR3 for alpha chain variable domain of TCR clone 293249 (TRAV21, TRAJ53)
CAVKGGENSGGSNYNLTF

SEQ ID NO: 586498 - protein, 14 aa, Homo sapiens
  CDR3 for beta chain variable domain of TCR clone 293249 (TRBV19, TRBJ2-1)
CASPTFVLSGEQFF

SEQ ID NO: 586499 - protein, 23 aa, Homo sapiens
  CDR3 for alpha chain variable domain of TCR clone 293250 (TRAV26-1, TRAJ38)
CIADNAGNNHIQNPDPAGYQLRN

SEQ ID NO: 586500 - protein, 13 aa, Homo sapiens
  CDR3 for beta chain variable domain of TCR clone 293250 (TRBV20-1, TRBJ1-1)
CSARGGGNTEAFF

SEQ ID NO: 586501 - protein, 13 aa, Homo sapiens
  CDR3 for alpha chain variable domain of TCR clone 293251 (TRAV26-2, TRAJ54)
CIPRVGGAQKLVF

SEQ ID NO: 586502 - protein, 16 aa, Homo sapiens
  CDR3 for beta chain variable domain of TCR clone 293251 (TRBV4-1, TRBJ1-1)
CSSSSMSERPNTEAFF

SEQ ID NO: 586503 - protein, 15 aa, Homo sapiens
  CDR3 for alpha chain variable domain of TCR clone 293252 (TRAV2, TRAJ11)
CAVGGRNSGYSTLTF

SEQ ID NO: 586504 - protein, 15 aa, Homo sapiens
  CDR3 for beta chain variable domain of TCR clone 293252 (TRBV10-2, TRBJ2-6)
CASSEQGTGANVLTF

SEQ ID NO: 586505 - protein, 12 aa, Homo sapiens
  CDR3 for alpha chain variable domain of TCR clone 293253 (TRAV13-1, TRAJ21)
CAAKEGFNKFYL

SEQ ID NO: 586506 - protein, 15 aa, Homo sapiens
  CDR3 for beta chain variable domain of TCR clone 293253 (TRBV15, TRBJ1-5)
CATSRDPVSNQPQHF

SEQ ID NO: 586507 - protein, 15 aa, Homo sapiens
  CDR3 for alpha chain variable domain of TCR clone 293254 (TRAV26-1, TRAJ29)
CIVRVEGSGNTPLVF

SEQ ID NO: 586508 - protein, 14 aa, Homo sapiens
  CDR3 for beta chain variable domain of TCR clone 293254 (TRBV18, TRBJ2-7)
CASSPGVSQETPYF

SEQ ID NO: 586509 - protein, 14 aa, Homo sapiens
  CDR3 for alpha chain variable domain of TCR clone 293255 (TRAV8-4, TRAJ54)
CAVSEVLGAQKLVF

SEQ ID NO: 586510 - protein, 13 aa, Homo sapiens
  CDR3 for beta chain variable domain of TCR clone 293255 (TRBV27, TRBJ2-7)
CASSFLSSYEQYF

SEQ ID NO: 586511 - protein, 11 aa, Homo sapiens
  CDR3 for alpha chain variable domain of TCR clone 293256 (TRAV1-1, TRAJ20)
CAVSGDYKLGF

SEQ ID NO: 586512 - protein, 14 aa, Homo sapiens
  CDR3 for beta chain variable domain of TCR clone 293256 (TRBV25-1, TRBJ1-1)
CASAHLGGNTEAFF

SEQ ID NO: 586513 - protein, 16 aa, Homo sapiens
  CDR3 for alpha chain variable domain of TCR clone 293257 (TRAV3, TRAJ37)
CAVRGKGSGNTGKLIF

SEQ ID NO: 586514 - protein, 13 aa, Homo sapiens
  CDR3 for beta chain variable domain of TCR clone 293257 (TRBV7-9, TRBJ2-3)
CASSPGSTDTQYF

SEQ ID NO: 586515 - protein, 15 aa, Homo sapiens
  CDR3 for alpha chain variable domain of TCR clone 293258 (TRAV3, TRAJ29)
CAVRDRSSGNTPLVF

SEQ ID NO: 586516 - protein, 13 aa, Homo sapiens
  CDR3 for beta chain variable domain of TCR clone 293258 (TRBV4-2, TRBJ1-1)
CASSQAGNTEAFF

SEQ ID NO: 586517 - protein, 15 aa, Homo sapiens
  CDR3 for alpha chain variable domain of TCR clone 293259 (TRAV38-2/DV8, TRAJ31)
CAYRSPRTNNARLMF

SEQ ID NO: 586518 - protein, 13 aa, Homo sapiens
  CDR3 for beta chain variable domain of TCR clone 293259 (TRBV27, TRBJ2-7)
CASSPSRDYEQYF

SEQ ID NO: 586519 - protein, 15 aa, Homo sapiens
  CDR3 for alpha chain variable domain of TCR clone 293260 (TRAV8-2, TRAJ16)
CVVSDGFSDGQKLSF

SEQ ID NO: 586520 - protein, 14 aa, Homo sapiens
  CDR3 for beta chain variable domain of TCR clone 293260 (TRBV7-3, TRBJ1-1)
CASSLGTGYTEAFF

SEQ ID NO: 586521 - protein, 13 aa, Homo sapiens
  CDR3 for alpha chain variable domain of TCR clone 293261 (TRAV21, TRAJ27)
CAARPGNAGKSNF

SEQ ID NO: 586522 - protein, 16 aa, Homo sapiens
  CDR3 for beta chain variable domain of TCR clone 293261 (TRBV7-7, TRBJ2-3)
CASSPGTSGSTDTQYF

SEQ ID NO: 586523 - protein, 23 aa, Homo sapiens
  CDR3 for alpha chain variable domain of TCR clone 293262 (TRAV6, TRAJ34)
ISQPPSLQTQLPTSVPYTDKLIF

SEQ ID NO: 586524 - protein, 14 aa, Homo sapiens
  CDR3 for beta chain variable domain of TCR clone 293262 (TRBV6-1, TRBJ1-3)
CASVQGGGGNTIYF

SEQ ID NO: 586525 - protein, 10 aa, Homo sapiens
  CDR3 for alpha chain variable domain of TCR clone 293263 (TRAV23/DV6, TRAJ57)
CAASSTLSQG

SEQ ID NO: 586526 - protein, 16 aa, Homo sapiens
  CDR3 for beta chain variable domain of TCR clone 293263 (TRBV12-4, TRBJ2-5)
CASSFFVRGRQETQYF

SEQ ID NO: 586527 - protein, 14 aa, Homo sapiens
  CDR3 for alpha chain variable domain of TCR clone 293264 (TRAV14/DV4, TRAJ26)
CAMREGTYGQNFVF

SEQ ID NO: 586528 - protein, 12 aa, Homo sapiens
  CDR3 for beta chain variable domain of TCR clone 293264 (TRBV11-2, TRBJ2-2)
CASSLGGGELFF

SEQ ID NO: 586529 - protein, 13 aa, Homo sapiens
  CDR3 for alpha chain variable domain of TCR clone 293265 (TRAV2, TRAJ15)
CAVASQAGTALIF

SEQ ID NO: 586530 - protein, 16 aa, Homo sapiens
  CDR3 for beta chain variable domain of TCR clone 293265 (TRBV20-1, TRBJ1-4)
CSAPGQGLLTNEKPFF

SEQ ID NO: 586531 - protein, 14 aa, Homo sapiens
  CDR3 for alpha chain variable domain of TCR clone 293266 (TRAV26-1, TRAJ38)
CIADNAGDNRKLIW

SEQ ID NO: 586532 - protein, 13 aa, Homo sapiens
  CDR3 for beta chain variable domain of TCR clone 293266 (TRBV20-1, TRBJ1-1)
CSARGGGNTEAFF

SEQ ID NO: 586533 - protein, 14 aa, Homo sapiens
  CDR3 for alpha chain variable domain of TCR clone 293267 (TRAV1-2, TRAJ8)
CAVREDTGFQKLVF

SEQ ID NO: 586534 - protein, 13 aa, Homo sapiens
  CDR3 for beta chain variable domain of TCR clone 293267 (TRBV5-1, TRBJ1-2)
CASSIDRPERYTF

SEQ ID NO: 586535 - protein, 18 aa, Homo sapiens
  CDR3 for alpha chain variable domain of TCR clone 293268 (TRAV26-2, TRAJ45)
CILRVDKYSGGGADGLTF

SEQ ID NO: 586536 - protein, 16 aa, Homo sapiens
  CDR3 for beta chain variable domain of TCR clone 293268 (TRBV2, TRBJ1-4)
CASNLLQGATNEKMFF

SEQ ID NO: 586537 - protein, 11 aa, Homo sapiens
  CDR3 for alpha chain variable domain of TCR clone 293269 (TRAV35, TRAJ30)
CARGGDDKIIF

SEQ ID NO: 586538 - protein, 15 aa, Homo sapiens
  CDR3 for beta chain variable domain of TCR clone 293269 (TRBV11-3, TRBJ2-3)
CASLKDGREGDTQYF

SEQ ID NO: 586539 - protein, 13 aa, Homo sapiens
  CDR3 for alpha chain variable domain of TCR clone 293270 (TRAV12-1, TRAJ21)
CVVIPYNFNKFYF

SEQ ID NO: 586540 - protein, 16 aa, Homo sapiens
  CDR3 for beta chain variable domain of TCR clone 293270 (TRBV12-4, TRBJ1-2)
CASSVEPGTGTGGYTF

SEQ ID NO: 586541 - protein, 16 aa, Homo sapiens
  CDR3 for alpha chain variable domain of TCR clone 293271 (TRAV30, TRAJ24)
CGTEIADADSWGKLQF

SEQ ID NO: 586542 - protein, 18 aa, Homo sapiens
  CDR3 for beta chain variable domain of TCR clone 293271 (TRBV20-1, TRBJ2-3)
CSASGLAGGPGTTDTQYF

SEQ ID NO: 586543 - protein, 10 aa, Homo sapiens
  CDR3 for alpha chain variable domain of TCR clone 293272 (TRAV30, TRAJ48)
CGIGNEKLTF

SEQ ID NO: 586544 - protein, 17 aa, Homo sapiens
  CDR3 for beta chain variable domain of TCR clone 293272 (TRBV11-2, TRBJ2-6)
CASSQRDIFSGANVLTF

SEQ ID NO: 586545 - protein, 16 aa, Homo sapiens
  CDR3 for alpha chain variable domain of TCR clone 293273 (TRAV12-2, TRAJ45)
CAVIFLSGGGADGLPF

SEQ ID NO: 586546 - protein, 19 aa, Homo sapiens
  CDR3 for beta chain variable domain of TCR clone 293273 (TRBV28, TRBJ2-4)
CASSFQPGGPAHSKNIQYF

SEQ ID NO: 586547 - protein, 15 aa, Homo sapiens
  CDR3 for alpha chain variable domain of TCR clone 293274 (TRAV3, TRAJ20)
CAVRDSRSNDYKLSF

SEQ ID NO: 586548 - protein, 13 aa, Homo sapiens
  CDR3 for beta chain variable domain of TCR clone 293274 (TRBV12-4, TRBJ1-1)
CASSPGTGFEAFF

SEQ ID NO: 586549 - protein, 14 aa, Homo sapiens
  CDR3 for alpha chain variable domain of TCR clone 293275 (TRAV9-2, TRAJ39)
CALYIYNAGNMLTF

SEQ ID NO: 586550 - protein, 15 aa, Homo sapiens
  CDR3 for beta chain variable domain of TCR clone 293275 (TRBV6-1, TRBJ2-2)
CASSAGQGYTGELFF

SEQ ID NO: 586551 - protein, 16 aa, Homo sapiens
  CDR3 for alpha chain variable domain of TCR clone 293276 (TRAV3, TRAJ37)
CAVRGKGSGNTGKLIF

SEQ ID NO: 586552 - protein, 12 aa, Homo sapiens
  CDR3 for beta chain variable domain of TCR clone 293276 (TRBV11-3, TRBJ1-1)
CASSHRQGEAFF

SEQ ID NO: 586553 - protein, 15 aa, Homo sapiens
  CDR3 for alpha chain variable domain of TCR clone 293277 (TRAV3, TRAJ21)
CAVRDRRYNFNKFYF

SEQ ID NO: 586554 - protein, 15 aa, Homo sapiens
  CDR3 for beta chain variable domain of TCR clone 293277 (TRBV18, TRBJ2-6)
CASSAPVSGANVLTF

SEQ ID NO: 586555 - protein, 14 aa, Homo sapiens
  CDR3 for alpha chain variable domain of TCR clone 293278 (TRAV12-2, TRAJ40)
CAVKIPSGTYKYIF

SEQ ID NO: 586556 - protein, 18 aa, Homo sapiens
  CDR3 for beta chain variable domain of TCR clone 293278 (TRBV6-6, TRBJ2-3)
CASSYSVADRGPTDTQYF

SEQ ID NO: 586557 - protein, 13 aa, Homo sapiens
  CDR3 for alpha chain variable domain of TCR clone 293279 (TRAV21, TRAJ57)
CAVTQGGPETLVF

SEQ ID NO: 586558 - protein, 16 aa, Homo sapiens
  CDR3 for beta chain variable domain of TCR clone 293279 (TRBV29-1, TRBJ2-7)
CSVEDAEDGTAYEQYF

SEQ ID NO: 586559 - protein, 14 aa, Homo sapiens
  CDR3 for alpha chain variable domain of TCR clone 293280 (TRAV1-2, TRAJ16)
CAVNRFSDGQKLLF

SEQ ID NO: 586560 - protein, 14 aa, Homo sapiens
  CDR3 for beta chain variable domain of TCR clone 293280 (TRBV9, TRBJ1-6)
CSSVAGTGDSPLHF

SEQ ID NO: 586561 - protein, 12 aa, Homo sapiens
  CDR3 for alpha chain variable domain of TCR clone 293281 (TRAV12-1, TRAJ40)
CVFYSGTYKHIF

SEQ ID NO: 586562 - protein, 12 aa, Homo sapiens
  CDR3 for beta chain variable domain of TCR clone 293281 (TRBV7-3, TRBJ2-1)
CASSFINNEQFF

SEQ ID NO: 586563 - protein, 16 aa, Homo sapiens
  CDR3 for alpha chain variable domain of TCR clone 293282 (TRAV12-2, TRAJ43)
CAGDDMRFGAGTRLTV

SEQ ID NO: 586564 - protein, 16 aa, Homo sapiens
  CDR3 for beta chain variable domain of TCR clone 293282 (TRBV2, TRBJ2-4)
CASSEAPGGEQNIQYY

SEQ ID NO: 586565 - protein, 16 aa, Homo sapiens
  CDR3 for alpha chain variable domain of TCR clone 293283 (TRAV13-1, TRAJ48)
CAASIFGNFGNDKLTF

SEQ ID NO: 586566 - protein, 12 aa, Homo sapiens
  CDR3 for beta chain variable domain of TCR clone 293283 (TRBV14, TRBJ2-4)
CASSNLKSIQYF

SEQ ID NO: 586567 - protein, 18 aa, Homo sapiens
  CDR3 for alpha chain variable domain of TCR clone 293284 (TRAV17, TRAJ10)
CFLLLFYILTGGGNKLTF

SEQ ID NO: 586568 - protein, 12 aa, Homo sapiens
  CDR3 for beta chain variable domain of TCR clone 293284 (TRBV6-3, TRBJ2-7)
CASSLTPYEQYF

SEQ ID NO: 586569 - protein, 15 aa, Homo sapiens
  CDR3 for alpha chain variable domain of TCR clone 293285 (TRAV21, TRAJ53)
CATLNSGGINYELTF

SEQ ID NO: 586570 - protein, 16 aa, Homo sapiens
  CDR3 for beta chain variable domain of TCR clone 293285 (TRBV20-1, TRBJ1-2)
CSASMGQGVANYGYTF

SEQ ID NO: 586571 - protein, 15 aa, Homo sapiens
  CDR3 for alpha chain variable domain of TCR clone 293286 (TRAV8-3, TRAJ45)
CASSYSGGGTDGLTF

SEQ ID NO: 586572 - protein, 17 aa, Homo sapiens
  CDR3 for beta chain variable domain of TCR clone 293286 (TRBV7-8, TRBJ1-2)
CASSLRPLQGHLYGYTF

SEQ ID NO: 586573 - protein, 14 aa, Homo sapiens
  CDR3 for alpha chain variable domain of TCR clone 293287 (TRAV13-1, TRAJ35)
CAASKGGFGNVLHC

SEQ ID NO: 586574 - protein, 13 aa, Homo sapiens
  CDR3 for beta chain variable domain of TCR clone 293287 (TRBV7-8, TRBJ2-7)
CASSFAGLYEQYF

SEQ ID NO: 586575 - protein, 17 aa, Homo sapiens
  CDR3 for alpha chain variable domain of TCR clone 293288 (TRAV3, TRAJ6)
CSVRDGPRAGGSYIPTF

SEQ ID NO: 586576 - protein, 14 aa, Homo sapiens
  CDR3 for beta chain variable domain of TCR clone 293288 (TRBV7-2, TRBJ2-7)
CASGPKTSFYEQYF

SEQ ID NO: 586577 - protein, 13 aa, Homo sapiens
  CDR3 for alpha chain variable domain of TCR clone 293289 (TRAV13-1, TRAJ21)
CAASKGNFNKFYF

SEQ ID NO: 586578 - protein, 16 aa, Homo sapiens
  CDR3 for beta chain variable domain of TCR clone 293289 (TRBV5-4, TRBJ2-3)
CASSWGSSGGTDTQYF

SEQ ID NO: 586579 - protein, 14 aa, Homo sapiens
  CDR3 for alpha chain variable domain of TCR clone 293290 (TRAV13-1, TRAJ20)
CAARPGSNDYKLSF

SEQ ID NO: 586580 - protein, 17 aa, Homo sapiens
  CDR3 for beta chain variable domain of TCR clone 293290 (TRBV6-5, TRBJ2-3)
CASSYGTSLYKSDTQYF

SEQ ID NO: 586581 - protein, 15 aa, Homo sapiens
  CDR3 for alpha chain variable domain of TCR clone 293291 (TRAV22, TRAJ45)
CAAKYSGGGADGLTF

SEQ ID NO: 586582 - protein, 14 aa, Homo sapiens
  CDR3 for beta chain variable domain of TCR clone 293291 (TRBV2, TRBJ2-7)
CASSLTSGGYEQYF

SEQ ID NO: 586583 - protein, 11 aa, Homo sapiens
  CDR3 for alpha chain variable domain of TCR clone 293292 (TRAV36/DV7, TRAJ20)
CAANTDYKLSF

SEQ ID NO: 586584 - protein, 13 aa, Homo sapiens
  CDR3 for beta chain variable domain of TCR clone 293292 (TRBV6-1, TRBJ2-7)
CASRASGGYEQYF

SEQ ID NO: 586585 - protein, 10 aa, Homo sapiens
  CDR3 for alpha chain variable domain of TCR clone 293293 (TRAV36/DV7, TRAJ48)
CAVGNEKLTF

SEQ ID NO: 586586 - protein, 17 aa, Homo sapiens
  CDR3 for beta chain variable domain of TCR clone 293293 (TRBV11-2, TRBJ2-1)
CASSLYPPGVEYNEQFF

SEQ ID NO: 586587 - protein, 14 aa, Homo sapiens
  CDR3 for alpha chain variable domain of TCR clone 293294 (TRAV35, TRAJ42)
YAGRYGGSLGNLIF

SEQ ID NO: 586588 - protein, 15 aa, Homo sapiens
  CDR3 for beta chain variable domain of TCR clone 293294 (TRBV7-9, TRBJ2-1)
CASSLGWGRANEQFF

SEQ ID NO: 586589 - protein, 16 aa, Homo sapiens
  CDR3 for alpha chain variable domain of TCR clone 293295 (TRAV30, TRAJ24)
CGTAIVDADSGGKFQV

SEQ ID NO: 586590 - protein, 14 aa, Homo sapiens
  CDR3 for beta chain variable domain of TCR clone 293295 (TRBV12-5, TRBJ2-5)
CASGSRTHQETQYF

SEQ ID NO: 586591 - protein, 16 aa, Homo sapiens
  CDR3 for alpha chain variable domain of TCR clone 293296 (TRAV1-1, TRAJ29)
CAVRSTRNSGNTPLVF

SEQ ID NO: 586592 - protein, 16 aa, Homo sapiens
  CDR3 for beta chain variable domain of TCR clone 293296 (TRBV27, TRBJ1-1)
CASSSGGRTGYTEAFF

SEQ ID NO: 586593 - protein, 15 aa, Homo sapiens
  CDR3 for alpha chain variable domain of TCR clone 293297 (TRAV17, TRAJ57)
CATGPSQGGSEKLVF

SEQ ID NO: 586594 - protein, 10 aa, Homo sapiens
  CDR3 for beta chain variable domain of TCR clone 293297 (TRBV23-1, TRBJ2-6)
CAGLQAGQGK

SEQ ID NO: 586595 - protein, 12 aa, Homo sapiens
  CDR3 for alpha chain variable domain of TCR clone 293298 (TRAV30, TRAJ43)
CGTEERGNDMRF

SEQ ID NO: 586596 - protein, 13 aa, Homo sapiens
  CDR3 for beta chain variable domain of TCR clone 293298 (TRBV4-1, TRBJ1-1)
CASSRKMNTEAFF

SEQ ID NO: 586597 - protein, 14 aa, Homo sapiens
  CDR3 for alpha chain variable domain of TCR clone 293299 (TRAV13-1, TRAJ44)
CAAKATGTASKLTF

SEQ ID NO: 586598 - protein, 16 aa, Homo sapiens
  CDR3 for beta chain variable domain of TCR clone 293299 (TRBV7-8, TRBJ2-6)
CQQRRDRGRWANVLTF

SEQ ID NO: 586599 - protein, 11 aa, Homo sapiens
  CDR3 for alpha chain variable domain of TCR clone 293300 (TRAV39, TRAJ49)
CAVDISTQFYF

SEQ ID NO: 586600 - protein, 14 aa, Homo sapiens
  CDR3 for beta chain variable domain of TCR clone 293300 (TRBV7-2, TRBJ1-1)
CASSFLTGTTEAFF

SEQ ID NO: 586601 - protein, 14 aa, Homo sapiens
  CDR3 for alpha chain variable domain of TCR clone 293301 (TRAV1-2, TRAJ16)
CAVNRFSDGQKMLF

SEQ ID NO: 586602 - protein, 12 aa, Homo sapiens
  CDR3 for beta chain variable domain of TCR clone 293301 (TRBV7-9, TRBJ1-1)
CASSLVRGEAFF

SEQ ID NO: 586603 - protein, 16 aa, Homo sapiens
  CDR3 for alpha chain variable domain of TCR clone 293302 (TRAV12-3, TRAJ53)
CAMSPGSGGSNYKQTF

SEQ ID NO: 586604 - protein, 14 aa, Homo sapiens
  CDR3 for beta chain variable domain of TCR clone 293302 (TRBV11-2, TRBJ2-5)
CASRPLAGRETQYF

SEQ ID NO: 586605 - protein, 11 aa, Homo sapiens
  CDR3 for alpha chain variable domain of TCR clone 293303 (TRAV21, TRAJ34)
CAHYNTDKLIF

SEQ ID NO: 586606 - protein, 15 aa, Homo sapiens
  CDR3 for beta chain variable domain of TCR clone 293303 (TRBV4-1, TRBJ1-2)
CASSQGQGAAYGYTF

SEQ ID NO: 586607 - protein, 14 aa, Homo sapiens
  CDR3 for alpha chain variable domain of TCR clone 293304 (TRAV1-2, TRAJ16)
CAVNRVSDGQKLLF

SEQ ID NO: 586608 - protein, 12 aa, Homo sapiens
  CDR3 for beta chain variable domain of TCR clone 293304 (TRBV11-2, TRBJ2-2)
CASSLGGGELIF

SEQ ID NO: 586609 - protein, 11 aa, Homo sapiens
  CDR3 for alpha chain variable domain of TCR clone 293305 (TRAV1-2, TRAJ11)
CAVRGYSTLTF

SEQ ID NO: 586610 - protein, 13 aa, Homo sapiens
  CDR3 for beta chain variable domain of TCR clone 293305 (TRBV5-5, TRBJ1-2)
CASSFWRGEDYTF

SEQ ID NO: 586611 - protein, 13 aa, Homo sapiens
  CDR3 for alpha chain variable domain of TCR clone 293306 (TRAV1-2, TRAJ11)
CAVRDSGYSTLTF

SEQ ID NO: 586612 - protein, 13 aa, Homo sapiens
  CDR3 for beta chain variable domain of TCR clone 293306 (TRBV7-2, TRBJ2-5)
CASSQTSVETQYF

SEQ ID NO: 586613 - protein, 13 aa, Homo sapiens
  CDR3 for alpha chain variable domain of TCR clone 293307 (TRAV20, TRAJ48)
CAVHLFGNEILTF

SEQ ID NO: 586614 - protein, 15 aa, Homo sapiens
  CDR3 for beta chain variable domain of TCR clone 293307 (TRBV6-5, TRBJ2-6)
CASSQWEAGANVLTF

SEQ ID NO: 586615 - protein, 15 aa, Homo sapiens
  CDR3 for alpha chain variable domain of TCR clone 293308 (TRAV26-1, TRAJ40)
CIVRVTTSGTYKCIF

SEQ ID NO: 586616 - protein, 12 aa, Homo sapiens
  CDR3 for beta chain variable domain of TCR clone 293308 (TRBV7-9, TRBJ1-4)
CASSTDREKLFF

SEQ ID NO: 586617 - protein, 16 aa, Homo sapiens
  CDR3 for alpha chain variable domain of TCR clone 293309 (TRAV27, TRAJ53)
CAAPEGSGGSNYKLTC

SEQ ID NO: 586618 - protein, 14 aa, Homo sapiens
  CDR3 for beta chain variable domain of TCR clone 293309 (TRBV4-3, TRBJ1-5)
CASSQGGQGWPQHF

SEQ ID NO: 586619 - protein, 10 aa, Homo sapiens
  CDR3 for alpha chain variable domain of TCR clone 293310 (TRAV13-1, TRAJ43)
CAASKNDMRF

SEQ ID NO: 586620 - protein, 13 aa, Homo sapiens
  CDR3 for beta chain variable domain of TCR clone 293310 (TRBV20-1, TRBJ1-5)
SSARTGVNQPQHF

SEQ ID NO: 586621 - protein, 14 aa, Homo sapiens
  CDR3 for alpha chain variable domain of TCR clone 293311 (TRAV26-1, TRAJ34)
CIVRDSYNTDKLIF

SEQ ID NO: 586622 - protein, 16 aa, Homo sapiens
  CDR3 for beta chain variable domain of TCR clone 293311 (TRBV10-3, TRBJ2-1)
CAISGVGDGGGGEQFF

SEQ ID NO: 586623 - protein, 13 aa, Homo sapiens
  CDR3 for alpha chain variable domain of TCR clone 293312 (TRAV21, TRAJ36)
CAVIKTGANNLFF

SEQ ID NO: 586624 - protein, 15 aa, Homo sapiens
  CDR3 for beta chain variable domain of TCR clone 293312 (TRBV2, TRBJ2-7)
CASSEGLARSYEQYF

SEQ ID NO: 586625 - protein, 12 aa, Homo sapiens
  CDR3 for alpha chain variable domain of TCR clone 293313 (TRAV12-1, TRAJ40)
CVFYSGTYKYIF

SEQ ID NO: 586626 - protein, 18 aa, Homo sapiens
  CDR3 for beta chain variable domain of TCR clone 293313 (TRBV12-4, TRBJ2-2)
CASSWVAGARGRTGELFF

SEQ ID NO: 586627 - protein, 14 aa, Homo sapiens
  CDR3 for alpha chain variable domain of TCR clone 293314 (TRAV12-1, TRAJ23)
CVVIVYNQGGKLIF

SEQ ID NO: 586628 - protein, 14 aa, Homo sapiens
  CDR3 for beta chain variable domain of TCR clone 293314 (TRBV2, TRBJ1-5)
CASSENRGGQPQHF

SEQ ID NO: 586629 - protein, 11 aa, Homo sapiens
  CDR3 for alpha chain variable domain of TCR clone 293315 (TRAV12-3, TRAJ43)
CAMSVSNDMRF

SEQ ID NO: 586630 - protein, 14 aa, Homo sapiens
  CDR3 for beta chain variable domain of TCR clone 293315 (TRBV7-8, TRBJ2-3)
CASSLEVGTDTQYF

SEQ ID NO: 586631 - protein, 16 aa, Homo sapiens
  CDR3 for alpha chain variable domain of TCR clone 293316 (TRAV12-2, TRAJ40)
CSVIRGGTSGTNKYIF

SEQ ID NO: 586632 - protein, 14 aa, Homo sapiens
  CDR3 for beta chain variable domain of TCR clone 293316 (TRBV20-1, TRBJ2-5)
CSARDGRAGETQYF

SEQ ID NO: 586633 - protein, 11 aa, Homo sapiens
  CDR3 for alpha chain variable domain of TCR clone 293317 (TRAV21, TRAJ34)
CAHYNTDKLIF

SEQ ID NO: 586634 - protein, 15 aa, Homo sapiens
  CDR3 for beta chain variable domain of TCR clone 293317 (TRBV5-4, TRBJ2-1)
CASSREGLPYNEQFF

SEQ ID NO: 586635 - protein, 13 aa, Homo sapiens
  CDR3 for alpha chain variable domain of TCR clone 293318 (TRAV13-1, TRAJ11)
CAAVLAGYSTLTF

SEQ ID NO: 586636 - protein, 13 aa, Homo sapiens
  CDR3 for beta chain variable domain of TCR clone 293318 (TRBV7-2, TRBJ2-7)
CASSSPSGSEQYF

SEQ ID NO: 586637 - protein, 14 aa, Homo sapiens
  CDR3 for alpha chain variable domain of TCR clone 293319 (TRAV16, TRAJ34)
CALPYDYNTDKLIF

SEQ ID NO: 586638 - protein, 15 aa, Homo sapiens
  CDR3 for beta chain variable domain of TCR clone 293319 (TRBV7-2, TRBJ2-1)
CASTHGTGIYNEQFF

SEQ ID NO: 586639 - protein, 14 aa, Homo sapiens
  CDR3 for alpha chain variable domain of TCR clone 293320 (TRAV12-1, TRAJ17)
CVVNPKAAGNKLTF

SEQ ID NO: 586640 - protein, 14 aa, Homo sapiens
  CDR3 for beta chain variable domain of TCR clone 293320 (TRBV4-1, TRBJ2-2)
CASSQAVNTGELFF

SEQ ID NO: 586641 - protein, 13 aa, Homo sapiens
  CDR3 for alpha chain variable domain of TCR clone 293321 (TRAV21, TRAJ27)
CAGRPGNAGKSTL

SEQ ID NO: 586642 - protein, 14 aa, Homo sapiens
  CDR3 for beta chain variable domain of TCR clone 293321 (TRBV7-6, TRBJ2-3)
CASSLGTVTDTQYF

SEQ ID NO: 586643 - protein, 15 aa, Homo sapiens
  CDR3 for alpha chain variable domain of TCR clone 293322 (TRAV8-3, TRAJ45)
CASSYSGGGADGLTF

SEQ ID NO: 586644 - protein, 14 aa, Homo sapiens
  CDR3 for beta chain variable domain of TCR clone 293322 (TRBV20-1, TRBJ2-4)
CSASGRVGENIQYF

SEQ ID NO: 586645 - protein, 15 aa, Homo sapiens
  CDR3 for alpha chain variable domain of TCR clone 293323 (TRAV3, TRAJ13)
CAVRVYSGGYQKVTF

SEQ ID NO: 586646 - protein, 15 aa, Homo sapiens
  CDR3 for beta chain variable domain of TCR clone 293323 (TRBV5-7, TRBJ1-2)
CASSLGVAANYGYAL

SEQ ID NO: 586647 - protein, 13 aa, Homo sapiens
  CDR3 for alpha chain variable domain of TCR clone 293324 (TRAV12-1, TRAJ3)
CVVNPRCASKIIF

SEQ ID NO: 586648 - protein, 13 aa, Homo sapiens
  CDR3 for beta chain variable domain of TCR clone 293324 (TRBV28, TRBJ1-5)
CASSDRGNQPQHF

SEQ ID NO: 586649 - protein, 15 aa, Homo sapiens
  CDR3 for alpha chain variable domain of TCR clone 293325 (TRAV23/DV6, TRAJ44)
CAARTLTGTASKLTF

SEQ ID NO: 586650 - protein, 17 aa, Homo sapiens
  CDR3 for beta chain variable domain of TCR clone 293325 (TRBV24-1, TRBJ2-1)
CVTSDVSTSGTYNEQFF

SEQ ID NO: 586651 - protein, 13 aa, Homo sapiens
  CDR3 for alpha chain variable domain of TCR clone 293326 (TRAV29/DV5, TRAJ31)
CAASRNNNASLMF

SEQ ID NO: 586652 - protein, 12 aa, Homo sapiens
  CDR3 for beta chain variable domain of TCR clone 293326 (TRBV14, TRBJ1-1)
CASSRLKGLAFF

SEQ ID NO: 586653 - protein, 16 aa, Homo sapiens
  CDR3 for alpha chain variable domain of TCR clone 293327 (TRAV20, TRAJ28)
CAVRGPAGAGSYQLTF

SEQ ID NO: 586654 - protein, 15 aa, Homo sapiens
  CDR3 for beta chain variable domain of TCR clone 293327 (TRBV7-3, TRBJ2-1)
CASSLAGAGADEQFF

SEQ ID NO: 586655 - protein, 18 aa, Homo sapiens
  CDR3 for alpha chain variable domain of TCR clone 293328 (TRAV21, TRAJ52)
CAVRPSPAGGTSYGKLTF

SEQ ID NO: 586656 - protein, 14 aa, Homo sapiens
  CDR3 for beta chain variable domain of TCR clone 293328 (TRBV20-1, TRBJ1-3)
CSASPTGAGNTIYF

SEQ ID NO: 586657 - protein, 13 aa, Homo sapiens
  CDR3 for alpha chain variable domain of TCR clone 293329 (TRAV27, TRAJ45)
CRSSGGGADGLTF

SEQ ID NO: 586658 - protein, 13 aa, Homo sapiens
  CDR3 for beta chain variable domain of TCR clone 293329 (TRBV7-9, TRBJ2-7)
CASSFAGAYEQYF

SEQ ID NO: 586659 - protein, 14 aa, Homo sapiens
  CDR3 for alpha chain variable domain of TCR clone 293330 (TRAV35, TRAJ41)
CAGQASVRRNALNF

SEQ ID NO: 586660 - protein, 14 aa, Homo sapiens
  CDR3 for beta chain variable domain of TCR clone 293330 (TRBV20-1, TRBJ1-2)
CSASAQGAVYGYTF

SEQ ID NO: 586661 - protein, 16 aa, Homo sapiens
  CDR3 for alpha chain variable domain of TCR clone 293331 (TRAV8-4, TRAJ18)
CAVSSDRGSTLGRLYF

SEQ ID NO: 586662 - protein, 14 aa, Homo sapiens
  CDR3 for beta chain variable domain of TCR clone 293331 (TRBV25-1, TRBJ1-1)
CASTHLGGNTEAFF

SEQ ID NO: 586663 - protein, 11 aa, Homo sapiens
  CDR3 for alpha chain variable domain of TCR clone 293332 (TRAV3, TRAJ21)
CALGNFNKFYF

SEQ ID NO: 586664 - protein, 16 aa, Homo sapiens
  CDR3 for beta chain variable domain of TCR clone 293332 (TRBV19, TRBJ2-1)
CACSKAGPSSYNEQFF

SEQ ID NO: 586665 - protein, 14 aa, Homo sapiens
  CDR3 for alpha chain variable domain of TCR clone 293333 (TRAV13-1, TRAJ5)
CAASPDTGRRALTF

SEQ ID NO: 586666 - protein, 15 aa, Homo sapiens
  CDR3 for beta chain variable domain of TCR clone 293333 (TRBV7-2, TRBJ2-7)
CASSLTGQGTYELYF

SEQ ID NO: 586667 - protein, 14 aa, Homo sapiens
  CDR3 for alpha chain variable domain of TCR clone 293334 (TRAV17, TRAJ31)
CATVPLSGNARLMF

SEQ ID NO: 586668 - protein, 15 aa, Homo sapiens
  CDR3 for beta chain variable domain of TCR clone 293334 (TRBV15, TRBJ2-2)
CATGGTGGRVGELFF

SEQ ID NO: 586669 - protein, 12 aa, Homo sapiens
  CDR3 for alpha chain variable domain of TCR clone 293335 (TRAV13-1, TRAJ48)
CAANFGNEKLTF

SEQ ID NO: 586670 - protein, 15 aa, Homo sapiens
  CDR3 for beta chain variable domain of TCR clone 293335 (TRBV11-2, TRBJ1-2)
CASSLEGVQRNGYTF

SEQ ID NO: 586671 - protein, 11 aa, Homo sapiens
  CDR3 for alpha chain variable domain of TCR clone 293336 (TRAV21, TRAJ34)
CAVTNTDKLIF

SEQ ID NO: 586672 - protein, 14 aa, Homo sapiens
  CDR3 for beta chain variable domain of TCR clone 293336 (TRBV7-9, TRBJ2-5)
CASSLVGGEETQYF

SEQ ID NO: 586673 - protein, 15 aa, Homo sapiens
  CDR3 for alpha chain variable domain of TCR clone 293337 (TRAV12-3, TRAJ6)
CAMSATTGGSYIPTF

SEQ ID NO: 586674 - protein, 12 aa, Homo sapiens
  CDR3 for beta chain variable domain of TCR clone 293337 (TRBV7-9, TRBJ1-5)
CASSPQGQPQHF

SEQ ID NO: 586675 - protein, 17 aa, Homo sapiens
  CDR3 for alpha chain variable domain of TCR clone 293338 (TRAV8-6, TRAJ58)
CAVSSWVGETSGSRLTF

SEQ ID NO: 586676 - protein, 12 aa, Homo sapiens
  CDR3 for beta chain variable domain of TCR clone 293338 (TRBV6-1, TRBJ2-7)
CASSDYSYEQYF

SEQ ID NO: 586677 - protein, 13 aa, Homo sapiens
  CDR3 for alpha chain variable domain of TCR clone 293339 (TRAV14/DV4, TRAJ23)
CAMREVKGGKPIF

SEQ ID NO: 586678 - protein, 13 aa, Homo sapiens
  CDR3 for beta chain variable domain of TCR clone 293339 (TRBV4-2, TRBJ2-3)
CASSQDWQHTQYF

SEQ ID NO: 586679 - protein, 15 aa, Homo sapiens
  CDR3 for alpha chain variable domain of TCR clone 293340 (TRAV23/DV6, TRAJ37)
CAAGEGSGNTGKLIF

SEQ ID NO: 586680 - protein, 17 aa, Homo sapiens
  CDR3 for beta chain variable domain of TCR clone 293340 (TRBV20-1, TRBJ2-7)
CSVTRAGGVAGVEEQYF

SEQ ID NO: 586681 - protein, 10 aa, Homo sapiens
  CDR3 for alpha chain variable domain of TCR clone 293341 (TRAV26-1, TRAJ22)
CIVSLNFFWF

SEQ ID NO: 586682 - protein, 15 aa, Homo sapiens
  CDR3 for beta chain variable domain of TCR clone 293341 (TRBV4-2, TRBJ1-2)
RASSQRTGGRDGYTL

SEQ ID NO: 586683 - protein, 15 aa, Homo sapiens
  CDR3 for alpha chain variable domain of TCR clone 293342 (TRAV17, TRAJ22)
CATVAPSGSARQPTF

SEQ ID NO: 586684 - protein, 16 aa, Homo sapiens
  CDR3 for beta chain variable domain of TCR clone 293342 (TRBV10-3, TRBJ2-7)
CAISADFAERPYEQYF

SEQ ID NO: 586685 - protein, 17 aa, Homo sapiens
  CDR3 for alpha chain variable domain of TCR clone 293343 (TRAV8-4, TRAJ53)
CAVSGPRSEGSKYKLTF

SEQ ID NO: 586686 - protein, 14 aa, Homo sapiens
  CDR3 for beta chain variable domain of TCR clone 293343 (TRBV7-3, TRBJ2-1)
CASSALAGGPEQFF

SEQ ID NO: 586687 - protein, 15 aa, Homo sapiens
  CDR3 for alpha chain variable domain of TCR clone 293344 (TRAV12-1, TRAJ44)
CVVDEYTGTASKLTF

SEQ ID NO: 586688 - protein, 15 aa, Homo sapiens
  CDR3 for beta chain variable domain of TCR clone 293344 (TRBV19, TRBJ1-1)
CASTSGQIQNTEAFF

SEQ ID NO: 586689 - protein, 13 aa, Homo sapiens
  CDR3 for alpha chain variable domain of TCR clone 293345 (TRAV25, TRAJ23)
CAGVNNQGGKLIF

SEQ ID NO: 586690 - protein, 12 aa, Homo sapiens
  CDR3 for beta chain variable domain of TCR clone 293345 (TRBV6-1, TRBJ2-1)
CASRGPGDEQFF

SEQ ID NO: 586691 - protein, 14 aa, Homo sapiens
  CDR3 for alpha chain variable domain of TCR clone 293346 (TRAV12-2, TRAJ13)
CAVKKNGGYQKVTF

SEQ ID NO: 586692 - protein, 14 aa, Homo sapiens
  CDR3 for beta chain variable domain of TCR clone 293346 (TRBV12-5, TRBJ2-5)
CASGSRTHQETQYF

SEQ ID NO: 586693 - protein, 14 aa, Homo sapiens
  CDR3 for alpha chain variable domain of TCR clone 293347 (TRAV8-3, TRAJ44)
CAVGAGGTASKLTF

SEQ ID NO: 586694 - protein, 13 aa, Homo sapiens
  CDR3 for beta chain variable domain of TCR clone 293347 (TRBV15, TRBJ2-7)
CATSTTGHYEQYF

SEQ ID NO: 586695 - protein, 12 aa, Homo sapiens
  CDR3 for alpha chain variable domain of TCR clone 293348 (TRAV13-1, TRAJ49)
CAASPMGNQFYF

SEQ ID NO: 586696 - protein, 13 aa, Homo sapiens
  CDR3 for beta chain variable domain of TCR clone 293348 (TRBV19, TRBJ1-2)
CASSVPGQDGYTF

SEQ ID NO: 586697 - protein, 13 aa, Homo sapiens
  CDR3 for alpha chain variable domain of TCR clone 293349 (TRAV1-2, TRAJ9)
CAALNTGGFKTIF

SEQ ID NO: 586698 - protein, 13 aa, Homo sapiens
  CDR3 for beta chain variable domain of TCR clone 293349 (TRBV19, TRBJ1-2)
CASSVPVQDCYTF

SEQ ID NO: 586699 - protein, 15 aa, Homo sapiens
  CDR3 for alpha chain variable domain of TCR clone 293350 (TRAV21, TRAJ45)
CAVSYSGGGADGLTF

SEQ ID NO: 586700 - protein, 14 aa, Homo sapiens
  CDR3 for beta chain variable domain of TCR clone 293350 (TRBV25-1, TRBJ1-1)
CASTHLGGNTEAFF

SEQ ID NO: 586701 - protein, 13 aa, Homo sapiens
  CDR3 for alpha chain variable domain of TCR clone 293351 (TRAV12-2, TRAJ53)
CAGVGGSNYKLTF

SEQ ID NO: 586702 - protein, 13 aa, Homo sapiens
  CDR3 for beta chain variable domain of TCR clone 293351 (TRBV10-3, TRBJ2-7)
CASKLAVNYEQYF

SEQ ID NO: 586703 - protein, 15 aa, Homo sapiens
  CDR3 for alpha chain variable domain of TCR clone 293352 (TRAV3, TRAJ22)
CAVRDRGGSARQLTF

SEQ ID NO: 586704 - protein, 13 aa, Homo sapiens
  CDR3 for beta chain variable domain of TCR clone 293352 (TRBV7-9, TRBJ1-2)
CASSLADNFGYTF

SEQ ID NO: 586705 - protein, 13 aa, Homo sapiens
  CDR3 for alpha chain variable domain of TCR clone 293353 (TRAV27, TRAJ54)
CAGAVQGAQKLVF

SEQ ID NO: 586706 - protein, 15 aa, Homo sapiens
  CDR3 for beta chain variable domain of TCR clone 293353 (TRBV18, TRBJ2-6)
CASSPSYAGANVLTF

SEQ ID NO: 586707 - protein, 14 aa, Homo sapiens
  CDR3 for alpha chain variable domain of TCR clone 293354 (TRAV13-1, TRAJ44)
CAAKATGTASKLTF

SEQ ID NO: 586708 - protein, 12 aa, Homo sapiens
  CDR3 for beta chain variable domain of TCR clone 293354 (TRBV19, TRBJ1-5)
CASSIAQQPQHF

SEQ ID NO: 586709 - protein, 11 aa, Homo sapiens
  CDR3 for alpha chain variable domain of TCR clone 293355 (TRAV3, TRAJ21)
CAVGNFNKFYF

SEQ ID NO: 586710 - protein, 15 aa, Homo sapiens
  CDR3 for beta chain variable domain of TCR clone 293355 (TRBV7-9, TRBJ1-2)
CASSLDREPNYGYTF

SEQ ID NO: 586711 - protein, 16 aa, Homo sapiens
  CDR3 for alpha chain variable domain of TCR clone 293356 (TRAV8-3, TRAJ44)
CVVGASNTGTASKLTL

SEQ ID NO: 586712 - protein, 15 aa, Homo sapiens
  CDR3 for beta chain variable domain of TCR clone 293356 (TRBV27, TRBJ1-5)
CASTFNRGSNQPQHF

SEQ ID NO: 586713 - protein, 17 aa, Homo sapiens
  CDR3 for alpha chain variable domain of TCR clone 293357 (TRAV4, TRAJ18)
CLAGERSVGSTLGRLYF

SEQ ID NO: 586714 - protein, 16 aa, Homo sapiens
  CDR3 for beta chain variable domain of TCR clone 293357 (TRBV19, TRBJ2-1)
CASSKAGPSSYDEQFF

SEQ ID NO: 586715 - protein, 14 aa, Homo sapiens
  CDR3 for alpha chain variable domain of TCR clone 293358 (TRAV12-3, TRAJ33)
CAMSVPGSNYQLIW

SEQ ID NO: 586716 - protein, 16 aa, Homo sapiens
  CDR3 for beta chain variable domain of TCR clone 293358 (TRBV13, TRBJ2-2)
CASSEVFGANTGELFF

SEQ ID NO: 586717 - protein, 14 aa, Homo sapiens
  CDR3 for alpha chain variable domain of TCR clone 293359 (TRAV12-3, TRAJ10)
SHLPLTGGRNKLTF

SEQ ID NO: 586718 - protein, 15 aa, Homo sapiens
  CDR3 for beta chain variable domain of TCR clone 293359 (TRBV11-2, TRBJ1-3)
CASSLDGTVGNTIYF

SEQ ID NO: 586719 - protein, 17 aa, Homo sapiens
  CDR3 for alpha chain variable domain of TCR clone 293360 (TRAV12-2, TRAJ48)
CASNEKLTFGTGTRLTI

SEQ ID NO: 586720 - protein, 15 aa, Homo sapiens
  CDR3 for beta chain variable domain of TCR clone 293360 (TRBV20-1, TRBJ2-7)
CGAGDRVSGMDEQYF

SEQ ID NO: 586721 - protein, 15 aa, Homo sapiens
  CDR3 for alpha chain variable domain of TCR clone 293361 (TRAV39, TRAJ32)
CAVDLEGGATNKLIF

SEQ ID NO: 586722 - protein, 17 aa, Homo sapiens
  CDR3 for beta chain variable domain of TCR clone 293361 (TRBV7-2, TRBJ1-4)
CASSFKAGPTTNEKLFF

SEQ ID NO: 586723 - protein, 14 aa, Homo sapiens
  CDR3 for alpha chain variable domain of TCR clone 293362 (TRAV1-2, TRAJ6)
CAVSLSGGSYIPTF

SEQ ID NO: 586724 - protein, 16 aa, Homo sapiens
  CDR3 for beta chain variable domain of TCR clone 293362 (TRBV12-5, TRBJ2-5)
CASGPRTSGNQETQYF

SEQ ID NO: 586725 - protein, 12 aa, Homo sapiens
  CDR3 for alpha chain variable domain of TCR clone 293363 (TRAV22, TRAJ22)
CAPGGSARQLTF

SEQ ID NO: 586726 - protein, 14 aa, Homo sapiens
  CDR3 for beta chain variable domain of TCR clone 293363 (TRBV5-1, TRBJ2-7)
CASSRGESLYEQYF

SEQ ID NO: 586727 - protein, 12 aa, Homo sapiens
  CDR3 for alpha chain variable domain of TCR clone 293364 (TRAV27, TRAJ13)
CAGAGGYQKVTF

SEQ ID NO: 586728 - protein, 15 aa, Homo sapiens
  CDR3 for beta chain variable domain of TCR clone 293364 (TRBV20-1, TRBJ2-6)
CSTRDRGPGANVLTF

SEQ ID NO: 586729 - protein, 13 aa, Homo sapiens
  CDR3 for alpha chain variable domain of TCR clone 293365 (TRAV21, TRAJ27)
CAARPGNAGKSTF

SEQ ID NO: 586730 - protein, 12 aa, Homo sapiens
  CDR3 for beta chain variable domain of TCR clone 293365 (TRBV5-1, TRBJ2-3)
RASSLRGVTQYF

SEQ ID NO: 586731 - protein, 14 aa, Homo sapiens
  CDR3 for alpha chain variable domain of TCR clone 293366 (TRAV12-1, TRAJ9)
CVVTGYTGGFKTIF

SEQ ID NO: 586732 - protein, 13 aa, Homo sapiens
  CDR3 for beta chain variable domain of TCR clone 293366 (TRBV20-1, TRBJ1-1)
CSARAGGNTEAFS

SEQ ID NO: 586733 - protein, 14 aa, Homo sapiens
  CDR3 for alpha chain variable domain of TCR clone 293367 (TRAV13-1, TRAJ8)
CAAYANTGFQKLVF

SEQ ID NO: 586734 - protein, 11 aa, Homo sapiens
  CDR3 for beta chain variable domain of TCR clone 293367 (TRBV18, TRBJ2-5)
CASSLQETQYF

SEQ ID NO: 586735 - protein, 14 aa, Homo sapiens
  CDR3 for alpha chain variable domain of TCR clone 293368 (TRAV1-2, TRAJ16)
CAVNRFSDGQKLLS

SEQ ID NO: 586736 - protein, 17 aa, Homo sapiens
  CDR3 for beta chain variable domain of TCR clone 293368 (TRBV13, TRBJ2-3)
CASSLSRVAGGRNTQYF

SEQ ID NO: 586737 - protein, 13 aa, Homo sapiens
  CDR3 for alpha chain variable domain of TCR clone 293369 (TRAV3, TRAJ21)
CAVREPDFNKFYF

SEQ ID NO: 586738 - protein, 15 aa, Homo sapiens
  CDR3 for beta chain variable domain of TCR clone 293369 (TRBV7-2, TRBJ2-3)
CASSLAGAFIDTQYF

SEQ ID NO: 586739 - protein, 17 aa, Homo sapiens
  CDR3 for alpha chain variable domain of TCR clone 293370 (TRAV26-2, TRAJ52)
CILSSSSGGTSYVKLTF

SEQ ID NO: 586740 - protein, 11 aa, Homo sapiens
  CDR3 for beta chain variable domain of TCR clone 293370 (TRBV19, TRBJ1-1)
CATLRNTEAFF

SEQ ID NO: 586741 - protein, 12 aa, Homo sapiens
  CDR3 for alpha chain variable domain of TCR clone 293371 (TRAV12-3, TRAJ20)
CAMVRGDYKLSF

SEQ ID NO: 586742 - protein, 13 aa, Homo sapiens
  CDR3 for beta chain variable domain of TCR clone 293371 (TRBV23-1, TRBJ1-4)
CASRGKLNEKLFF

SEQ ID NO: 586743 - protein, 19 aa, Homo sapiens
  CDR3 for alpha chain variable domain of TCR clone 293372 (TRAV2, TRAJ20)
ILKVREADAAVYRDCKLSF

SEQ ID NO: 586744 - protein, 14 aa, Homo sapiens
  CDR3 for beta chain variable domain of TCR clone 293372 (TRBV6-1, TRBJ1-3)
CASVQGGGGNTIYF

SEQ ID NO: 586745 - protein, 16 aa, Homo sapiens
  CDR3 for alpha chain variable domain of TCR clone 293373 (TRAV1-2, TRAJ16)
CAVNRFQMARSCSLQG

SEQ ID NO: 586746 - protein, 13 aa, Homo sapiens
  CDR3 for beta chain variable domain of TCR clone 293373 (TRBV29-1, TRBJ1-1)
CSVGDSRNTEAFF

SEQ ID NO: 586747 - protein, 14 aa, Homo sapiens
  CDR3 for alpha chain variable domain of TCR clone 293374 (TRAV34, TRAJ44)
CGADGTGTASKLTF

SEQ ID NO: 586748 - protein, 15 aa, Homo sapiens
  CDR3 for beta chain variable domain of TCR clone 293374 (TRBV5-1, TRBJ2-1)
CASSPTRAPYNEQFF

SEQ ID NO: 586749 - protein, 17 aa, Homo sapiens
  CDR3 for alpha chain variable domain of TCR clone 293375 (TRAV9-2, TRAJ45)
CALSGYYSGGGADGLTF

SEQ ID NO: 586750 - protein, 15 aa, Homo sapiens
  CDR3 for beta chain variable domain of TCR clone 293375 (TRBV7-2, TRBJ2-3)
CASSSTGLETDTQYF

SEQ ID NO: 586751 - protein, 15 aa, Homo sapiens
  CDR3 for alpha chain variable domain of TCR clone 293376 (TRAV12-2, TRAJ53)
CAVNGGGGSNYKLTF

SEQ ID NO: 586752 - protein, 13 aa, Homo sapiens
  CDR3 for beta chain variable domain of TCR clone 293376 (TRBV15, TRBJ2-5)
CATSQIGEETQYF

SEQ ID NO: 586753 - protein, 14 aa, Homo sapiens
  CDR3 for alpha chain variable domain of TCR clone 293377 (TRAV4, TRAJ20)
CLVGDFINDYKLSF

SEQ ID NO: 586754 - protein, 12 aa, Homo sapiens
  CDR3 for beta chain variable domain of TCR clone 293377 (TRBV7-8, TRBJ2-7)
CASSLGDREQYF

SEQ ID NO: 586755 - protein, 16 aa, Homo sapiens
  CDR3 for alpha chain variable domain of TCR clone 293378 (TRAV12-2, TRAJ28)
CAVITDSGAGSYQLTF

SEQ ID NO: 586756 - protein, 17 aa, Homo sapiens
  CDR3 for beta chain variable domain of TCR clone 293378 (TRBV7-8, TRBJ2-6)
CASSAGTGGAGANVLTF

SEQ ID NO: 586757 - protein, 11 aa, Homo sapiens
  CDR3 for alpha chain variable domain of TCR clone 293379 (TRAV12-3, TRAJ43)
CAMSVSNDMRF

SEQ ID NO: 586758 - protein, 13 aa, Homo sapiens
  CDR3 for beta chain variable domain of TCR clone 293379 (TRBV13, TRBJ2-5)
CASSPEVGETQYF

SEQ ID NO: 586759 - protein, 14 aa, Homo sapiens
  CDR3 for alpha chain variable domain of TCR clone 293380 (TRAV12-2, TRAJ5)
CAVNRSTGRRALTF

SEQ ID NO: 586760 - protein, 14 aa, Homo sapiens
  CDR3 for beta chain variable domain of TCR clone 293380 (TRBV19, TRBJ2-1)
CASPTFVLSGERFF

SEQ ID NO: 586761 - protein, 17 aa, Homo sapiens
  CDR3 for alpha chain variable domain of TCR clone 293381 (TRAV3, TRAJ6)
CAVRDGPGAGGSYIPTF

SEQ ID NO: 586762 - protein, 18 aa, Homo sapiens
  CDR3 for beta chain variable domain of TCR clone 293381 (TRBV25-1, TRBJ1-2)
CASSGLQNGQGLIFGYTF

SEQ ID NO: 586763 - protein, 11 aa, Homo sapiens
  CDR3 for alpha chain variable domain of TCR clone 293382 (TRAV12-3, TRAJ16)
LTGGDGPKLLF

SEQ ID NO: 586764 - protein, 13 aa, Homo sapiens
  CDR3 for beta chain variable domain of TCR clone 293382 (TRBV12-4, TRBJ1-4)
CASAMGHNEKLFF

SEQ ID NO: 586765 - protein, 19 aa, Homo sapiens
  CDR3 for alpha chain variable domain of TCR clone 293383 (TRAV1-2, TRAJ18)
CLLPLCCEMRGSTLGRLYF

SEQ ID NO: 586766 - protein, 14 aa, Homo sapiens
  CDR3 for beta chain variable domain of TCR clone 293383 (TRBV7-2, TRBJ2-7)
CASSFKGQDHEQYF

SEQ ID NO: 586767 - protein, 14 aa, Homo sapiens
  CDR3 for alpha chain variable domain of TCR clone 293384 (TRAV3, TRAJ33)
CAVRDMGSNYQLIG

SEQ ID NO: 586768 - protein, 17 aa, Homo sapiens
  CDR3 for beta chain variable domain of TCR clone 293384 (TRBV19, TRBJ2-1)
CASSIWSAQHTHNEQFF

SEQ ID NO: 586769 - protein, 16 aa, Homo sapiens
  CDR3 for alpha chain variable domain of TCR clone 293385 (TRAV3, TRAJ37)
CAVRVRGSGNTGKIIF

SEQ ID NO: 586770 - protein, 13 aa, Homo sapiens
  CDR3 for beta chain variable domain of TCR clone 293385 (TRBV14, TRBJ2-1)
CASSQDRRNEQFF

SEQ ID NO: 586771 - protein, 14 aa, Homo sapiens
  CDR3 for alpha chain variable domain of TCR clone 293386 (TRAV26-1, TRAJ16)
CIAVPFQMARSCSF

SEQ ID NO: 586772 - protein, 12 aa, Homo sapiens
  CDR3 for beta chain variable domain of TCR clone 293386 (TRBV4-2, TRBJ2-1)
CARSAQKNEQFF

SEQ ID NO: 586773 - protein, 17 aa, Homo sapiens
  CDR3 for alpha chain variable domain of TCR clone 293387 (TRAV27, TRAJ18)
CAGLHRGRGSTLGRLYC

SEQ ID NO: 586774 - protein, 14 aa, Homo sapiens
  CDR3 for beta chain variable domain of TCR clone 293387 (TRBV20-1, TRBJ1-5)
CSARGRGSNQPQHF

SEQ ID NO: 586775 - protein, 12 aa, Homo sapiens
  CDR3 for alpha chain variable domain of TCR clone 293388 (TRAV30, TRAJ43)
CGTEERGNDMRF

SEQ ID NO: 586776 - protein, 11 aa, Homo sapiens
  CDR3 for beta chain variable domain of TCR clone 293388 (TRBV29-1, TRBJ2-5)
CSEDRTGTQYV

SEQ ID NO: 586777 - protein, 13 aa, Homo sapiens
  CDR3 for alpha chain variable domain of TCR clone 293389 (TRAV1-2, TRAJ12)
CAVSMDSSSKLIF

SEQ ID NO: 586778 - protein, 17 aa, Homo sapiens
  CDR3 for beta chain variable domain of TCR clone 293389 (TRBV11-2, TRBJ2-1)
CASSLYPPGVEYNEQFF

SEQ ID NO: 586779 - protein, 14 aa, Homo sapiens
  CDR3 for alpha chain variable domain of TCR clone 293390 (TRAV17, TRAJ39)
CATDPVRAGNMLTF

SEQ ID NO: 586780 - protein, 15 aa, Homo sapiens
  CDR3 for beta chain variable domain of TCR clone 293390 (TRBV13, TRBJ1-5)
CTSSFGQGGVQPQHF

SEQ ID NO: 586781 - protein, 14 aa, Homo sapiens
  CDR3 for alpha chain variable domain of TCR clone 293391 (TRAV13-2, TRAJ9)
CAENSFTGGFKTIF

SEQ ID NO: 586782 - protein, 13 aa, Homo sapiens
  CDR3 for beta chain variable domain of TCR clone 293391 (TRBV19, TRBJ2-7)
CASSIDRTDEQYF

SEQ ID NO: 586783 - protein, 15 aa, Homo sapiens
  CDR3 for alpha chain variable domain of TCR clone 293392 (TRAV35, TRAJ58)
CAGRRQETSGSRLTF

SEQ ID NO: 586784 - protein, 15 aa, Homo sapiens
  CDR3 for beta chain variable domain of TCR clone 293392 (TRBV7-3, TRBJ2-1)
CASSLGQGPFGEQFF

SEQ ID NO: 586785 - protein, 15 aa, Homo sapiens
  CDR3 for alpha chain variable domain of TCR clone 293393 (TRAV12-1, TRAJ44)
CVVFVNTGTARKLTF

SEQ ID NO: 586786 - protein, 16 aa, Homo sapiens
  CDR3 for beta chain variable domain of TCR clone 293393 (TRBV20-1, TRBJ2-5)
CSPGGTSGGYMETQYF

SEQ ID NO: 586787 - protein, 16 aa, Homo sapiens
  CDR3 for alpha chain variable domain of TCR clone 293394 (TRAV12-3, TRAJ10)
CAMKKGITGGGNELTF

SEQ ID NO: 586788 - protein, 12 aa, Homo sapiens
  CDR3 for beta chain variable domain of TCR clone 293394 (TRBV20-1, TRBJ2-7)
CSAITPTKEQYF

SEQ ID NO: 586789 - protein, 13 aa, Homo sapiens
  CDR3 for alpha chain variable domain of TCR clone 293395 (TRAV12-1, TRAJ26)
SATYLYYGQNFVF

SEQ ID NO: 586790 - protein, 13 aa, Homo sapiens
  CDR3 for beta chain variable domain of TCR clone 293395 (TRBV13, TRBJ2-1)
CASTPGSYNEQFF

SEQ ID NO: 586791 - protein, 18 aa, Homo sapiens
  CDR3 for alpha chain variable domain of TCR clone 293396 (TRAV26-2, TRAJ54)
CILRDVEVGIQGAQKLVF

SEQ ID NO: 586792 - protein, 15 aa, Homo sapiens
  CDR3 for beta chain variable domain of TCR clone 293396 (TRBV7-3, TRBJ2-1)
CASSPTGGGEVEQFF

SEQ ID NO: 586793 - protein, 14 aa, Homo sapiens
  CDR3 for alpha chain variable domain of TCR clone 293397 (TRAV12-1, TRAJ13)
CVVIDSGGYQKVTF

SEQ ID NO: 586794 - protein, 14 aa, Homo sapiens
  CDR3 for beta chain variable domain of TCR clone 293397 (TRBV25-1, TRBJ1-1)
CASTHLGGNTEAFF

SEQ ID NO: 586795 - protein, 15 aa, Homo sapiens
  CDR3 for alpha chain variable domain of TCR clone 293398 (TRAV38-2/DV8, TRAJ58)
CAYRSAETSGSRLTF

SEQ ID NO: 586796 - protein, 14 aa, Homo sapiens
  CDR3 for beta chain variable domain of TCR clone 293398 (TRBV7-8, TRBJ1-5)
CASSTGTVGGPQHF

SEQ ID NO: 586797 - protein, 14 aa, Homo sapiens
  CDR3 for alpha chain variable domain of TCR clone 293399 (TRAV9-2, TRAJ39)
CALYIYNAGNMLTS

SEQ ID NO: 586798 - protein, 11 aa, Homo sapiens
  CDR3 for beta chain variable domain of TCR clone 293399 (TRBV29-1, TRBJ2-5)
CSVASGETQYF

SEQ ID NO: 586799 - protein, 12 aa, Homo sapiens
  CDR3 for alpha chain variable domain of TCR clone 293400 (TRAV12-1, TRAJ40)
CVVYSGTYKYIF

SEQ ID NO: 586800 - protein, 13 aa, Homo sapiens
  CDR3 for beta chain variable domain of TCR clone 293400 (TRBV10-2, TRBJ2-5)
CASGRLARETQYF

SEQ ID NO: 586801 - protein, 13 aa, Homo sapiens
  CDR3 for alpha chain variable domain of TCR clone 293401 (TRAV27, TRAJ41)
CAGEGNSGYALNF

SEQ ID NO: 586802 - protein, 19 aa, Homo sapiens
  CDR3 for beta chain variable domain of TCR clone 293401 (TRBV28, TRBJ2-1)
CASSFSIRGSGRTRYEQFF

SEQ ID NO: 586803 - protein, 14 aa, Homo sapiens
  CDR3 for alpha chain variable domain of TCR clone 293402 (TRAV34, TRAJ44)
CGADGTGTASKLTF

SEQ ID NO: 586804 - protein, 15 aa, Homo sapiens
  CDR3 for beta chain variable domain of TCR clone 293402 (TRBV5-1, TRBJ2-1)
CASSPPRARYNEQFF

SEQ ID NO: 586805 - protein, 17 aa, Homo sapiens
  CDR3 for alpha chain variable domain of TCR clone 293403 (TRAV17, TRAJ52)
CATERPSGGTSYGKLKF

SEQ ID NO: 586806 - protein, 13 aa, Homo sapiens
  CDR3 for beta chain variable domain of TCR clone 293403 (TRBV7-9, TRBJ1-2)
CASSLKQNYGYTF

SEQ ID NO: 586807 - protein, 14 aa, Homo sapiens
  CDR3 for alpha chain variable domain of TCR clone 293404 (TRAV8-1, TRAJ5)
CAVRTDTGRRALTF

SEQ ID NO: 586808 - protein, 12 aa, Homo sapiens
  CDR3 for beta chain variable domain of TCR clone 293404 (TRBV11-2, TRBJ2-2)
CASSIGGGELFF

SEQ ID NO: 586809 - protein, 14 aa, Homo sapiens
  CDR3 for alpha chain variable domain of TCR clone 293405 (TRAV16, TRAJ33)
CALSVMDSNYQLIW

SEQ ID NO: 586810 - protein, 16 aa, Homo sapiens
  CDR3 for beta chain variable domain of TCR clone 293405 (TRBV12-4, TRBJ2-3)
CASSFPSNTNTDTQCF

SEQ ID NO: 586811 - protein, 14 aa, Homo sapiens
  CDR3 for alpha chain variable domain of TCR clone 293406 (TRAV10, TRAJ47)
CVVSLMEYGHKLVF

SEQ ID NO: 586812 - protein, 16 aa, Homo sapiens
  CDR3 for beta chain variable domain of TCR clone 293406 (TRBV28, TRBJ2-3)
CASSLFTGVSTDTQYF

SEQ ID NO: 586813 - protein, 16 aa, Homo sapiens
  CDR3 for alpha chain variable domain of TCR clone 293407 (TRAV3, TRAJ37)
CAVRPHGSGNTGKLIF

SEQ ID NO: 586814 - protein, 12 aa, Homo sapiens
  CDR3 for beta chain variable domain of TCR clone 293407 (TRBV2, TRBJ1-5)
CQRTGGYQPQHF

SEQ ID NO: 586815 - protein, 12 aa, Homo sapiens
  CDR3 for alpha chain variable domain of TCR clone 293408 (TRAV10, TRAJ6)
CVVSEGSYIPTF

SEQ ID NO: 586816 - protein, 16 aa, Homo sapiens
  CDR3 for beta chain variable domain of TCR clone 293408 (TRBV7-3, TRBJ2-1)
CASSLEGYRSYNEQFF

SEQ ID NO: 586817 - protein, 14 aa, Homo sapiens
  CDR3 for alpha chain variable domain of TCR clone 293409 (TRAV17, TRAJ54)
SATDANQGAQKLVF

SEQ ID NO: 586818 - protein, 12 aa, Homo sapiens
  CDR3 for beta chain variable domain of TCR clone 293409 (TRBV6-3, TRBJ2-1)
CASSGSYNEQFF

SEQ ID NO: 586819 - protein, 12 aa, Homo sapiens
  CDR3 for alpha chain variable domain of TCR clone 293410 (TRAV23/DV6, TRAJ49)
CAATYTGNQFYF

SEQ ID NO: 586820 - protein, 13 aa, Homo sapiens
  CDR3 for beta chain variable domain of TCR clone 293410 (TRBV7-9, TRBJ1-2)
CASSLKQNYGYTF

SEQ ID NO: 586821 - protein, 22 aa, Homo sapiens
  CDR3 for alpha chain variable domain of TCR clone 293411 (TRAV3, TRAJ38)
CAVRDCLNAGNNHIQNPDPAVY

SEQ ID NO: 586822 - protein, 19 aa, Homo sapiens
  CDR3 for beta chain variable domain of TCR clone 293411 (TRBV7-2, TRBJ2-3)
CASSFLSRKWGGGTDTQYF

SEQ ID NO: 586823 - protein, 11 aa, Homo sapiens
  CDR3 for alpha chain variable domain of TCR clone 293412 (TRAV2, TRAJ13)
CASGGYQKVTC

SEQ ID NO: 586824 - protein, 14 aa, Homo sapiens
  CDR3 for beta chain variable domain of TCR clone 293412 (TRBV12-5, TRBJ2-5)
CASGSRTHQETQYF

SEQ ID NO: 586825 - protein, 14 aa, Homo sapiens
  CDR3 for alpha chain variable domain of TCR clone 293413 (TRAV8-4, TRAJ43)
WAVSDPRNNNDMRF

SEQ ID NO: 586826 - protein, 15 aa, Homo sapiens
  CDR3 for beta chain variable domain of TCR clone 293413 (TRBV4-2, TRBJ1-2)
CASSQRTGGRDGYTF

SEQ ID NO: 586827 - protein, 15 aa, Homo sapiens
  CDR3 for alpha chain variable domain of TCR clone 293414 (TRAV2, TRAJ15)
CAVEDRNQAVTALIF

SEQ ID NO: 586828 - protein, 13 aa, Homo sapiens
  CDR3 for beta chain variable domain of TCR clone 293414 (TRBV10-2, TRBJ2-1)
CASGASGDAKQFF

SEQ ID NO: 586829 - protein, 14 aa, Homo sapiens
  CDR3 for alpha chain variable domain of TCR clone 293415 (TRAV13-1, TRAJ44)
CAAKASGTASKLTF

SEQ ID NO: 586830 - protein, 14 aa, Homo sapiens
  CDR3 for beta chain variable domain of TCR clone 293415 (TRBV19, TRBJ2-2)
CASSTLHRSGELFF

SEQ ID NO: 586831 - protein, 19 aa, Homo sapiens
  CDR3 for alpha chain variable domain of TCR clone 293416 (TRAV1-2, TRAJ26)
CLLPLCCERPDNYGKNFVF

SEQ ID NO: 586832 - protein, 12 aa, Homo sapiens
  CDR3 for beta chain variable domain of TCR clone 293416 (TRBV7-9, TRBJ2-7)
CATRTDAYEQYF

SEQ ID NO: 586833 - protein, 15 aa, Homo sapiens
  CDR3 for alpha chain variable domain of TCR clone 293417 (TRAV21, TRAJ53)
CATLNSGGSNYKLTF

SEQ ID NO: 586834 - protein, 20 aa, Homo sapiens
  CDR3 for beta chain variable domain of TCR clone 293417 (TRBV19, TRBJ2-1)
CASSISRTVTSTRLNNEQFF

SEQ ID NO: 586835 - protein, 17 aa, Homo sapiens
  CDR3 for alpha chain variable domain of TCR clone 293418 (TRAV3, TRAJ6)
CAVRDGPRAGGNYIPTF

SEQ ID NO: 586836 - protein, 14 aa, Homo sapiens
  CDR3 for beta chain variable domain of TCR clone 293418 (TRBV7-2, TRBJ2-7)
CASSPKTGFYEQYF

SEQ ID NO: 586837 - protein, 11 aa, Homo sapiens
  CDR3 for alpha chain variable domain of TCR clone 293419 (TRAV8-3, TRAJ15)
CSVGPGTALIF

SEQ ID NO: 586838 - protein, 18 aa, Homo sapiens
  CDR3 for beta chain variable domain of TCR clone 293419 (TRBV18, TRBJ2-3)
CASSYTSGAAGGTDTQYF

SEQ ID NO: 586839 - protein, 17 aa, Homo sapiens
  CDR3 for alpha chain variable domain of TCR clone 293420 (TRAV3, TRAJ12)
CAVRDGGRMDSSYILIF

SEQ ID NO: 586840 - protein, 13 aa, Homo sapiens
  CDR3 for beta chain variable domain of TCR clone 293420 (TRBV15, TRBJ1-6)
CATSGGLNSPLHF

SEQ ID NO: 586841 - protein, 11 aa, Homo sapiens
  CDR3 for alpha chain variable domain of TCR clone 293421 (TRAV3, TRAJ49)
CAPITGNQFYF

SEQ ID NO: 586842 - protein, 16 aa, Homo sapiens
  CDR3 for beta chain variable domain of TCR clone 293421 (TRBV5-1, TRBJ2-3)
CASSVFPMSSTGTQYF

SEQ ID NO: 586843 - protein, 14 aa, Homo sapiens
  CDR3 for alpha chain variable domain of TCR clone 293422 (TRAV12-3, TRAJ42)
CAMNYGGNQGNLIF

SEQ ID NO: 586844 - protein, 15 aa, Homo sapiens
  CDR3 for beta chain variable domain of TCR clone 293422 (TRBV5-7, TRBJ1-5)
CASSYGKLWDQPQHF

SEQ ID NO: 586845 - protein, 12 aa, Homo sapiens
  CDR3 for alpha chain variable domain of TCR clone 293423 (TRAV12-3, TRAJ17)
CAMTLTGNKLTF

SEQ ID NO: 586846 - protein, 17 aa, Homo sapiens
  CDR3 for beta chain variable domain of TCR clone 293423 (TRBV20-1, TRBJ2-1)
CSAPPRLAGTRDNEQFF

SEQ ID NO: 586847 - protein, 14 aa, Homo sapiens
  CDR3 for alpha chain variable domain of TCR clone 293424 (TRAV9-2, TRAJ39)
CALSIYNAGNMLTF

SEQ ID NO: 586848 - protein, 13 aa, Homo sapiens
  CDR3 for beta chain variable domain of TCR clone 293424 (TRBV7-9, TRBJ1-2)
CASSLKQNYGYTF

SEQ ID NO: 586849 - protein, 13 aa, Homo sapiens
  CDR3 for alpha chain variable domain of TCR clone 293425 (TRAV2, TRAJ15)
CAVASQAGTALIF

SEQ ID NO: 586850 - protein, 15 aa, Homo sapiens
  CDR3 for beta chain variable domain of TCR clone 293425 (TRBV7-2, TRBJ2-1)
CASSLVAGGHNEQVF

SEQ ID NO: 586851 - protein, 13 aa, Homo sapiens
  CDR3 for alpha chain variable domain of TCR clone 293426 (TRAV13-1, TRAJ40)
CAARTSGTYKYIF

SEQ ID NO: 586852 - protein, 14 aa, Homo sapiens
  CDR3 for beta chain variable domain of TCR clone 293426 (TRBV12-5, TRBJ2-5)
CASGSRTHQETQYF

SEQ ID NO: 586853 - protein, 15 aa, Homo sapiens
  CDR3 for alpha chain variable domain of TCR clone 293427 (TRAV8-6, TRAJ37)
CVVIFSSGNTGKLIF

SEQ ID NO: 586854 - protein, 15 aa, Homo sapiens
  CDR3 for beta chain variable domain of TCR clone 293427 (TRBV25-1, TRBJ2-4)
CASSETESAKNIQYF

SEQ ID NO: 586855 - protein, 11 aa, Homo sapiens
  CDR3 for alpha chain variable domain of TCR clone 293428 (TRAV12-3, TRAJ43)
CAMSVSNDMRF

SEQ ID NO: 586856 - protein, 16 aa, Homo sapiens
  CDR3 for beta chain variable domain of TCR clone 293428 (TRBV7-2, TRBJ1-4)
CASSLAPGRRDEKLFF

SEQ ID NO: 586857 - protein, 14 aa, Homo sapiens
  CDR3 for alpha chain variable domain of TCR clone 293429 (TRAV35, TRAJ33)
CWPRGRDSNYQLIW

SEQ ID NO: 586858 - protein, 11 aa, Homo sapiens
  CDR3 for beta chain variable domain of TCR clone 293429 (TRBV10-3, TRBJ2-7)
CASSEGLEQYF

SEQ ID NO: 586859 - protein, 12 aa, Homo sapiens
  CDR3 for alpha chain variable domain of TCR clone 293430 (TRAV29/DV5, TRAJ34)
CAASGNTDKLIL

SEQ ID NO: 586860 - protein, 15 aa, Homo sapiens
  CDR3 for beta chain variable domain of TCR clone 293430 (TRBV6-1, TRBJ2-5)
CASSEGWGIQETQYF

SEQ ID NO: 586861 - protein, 14 aa, Homo sapiens
  CDR3 for alpha chain variable domain of TCR clone 293431 (TRAV20, TRAJ47)
CAVTVGEYGNKLVF

SEQ ID NO: 586862 - protein, 15 aa, Homo sapiens
  CDR3 for beta chain variable domain of TCR clone 293431 (TRBV11-2, TRBJ2-1)
CASSLGTSGLNEQFF

SEQ ID NO: 586863 - protein, 17 aa, Homo sapiens
  CDR3 for alpha chain variable domain of TCR clone 293432 (TRAV3, TRAJ6)
YTVRDGPRAGGSYIPTF

SEQ ID NO: 586864 - protein, 14 aa, Homo sapiens
  CDR3 for beta chain variable domain of TCR clone 293432 (TRBV7-2, TRBJ2-7)
CASSPKTSFYEQYF

SEQ ID NO: 586865 - protein, 14 aa, Homo sapiens
  CDR3 for alpha chain variable domain of TCR clone 293433 (TRAV13-2, TRAJ43)
CAEIPTYNNNHMRF

SEQ ID NO: 586866 - protein, 15 aa, Homo sapiens
  CDR3 for beta chain variable domain of TCR clone 293433 (TRBV7-9, TRBJ2-2)
CASGPLDTFPGELFF

SEQ ID NO: 586867 - protein, 14 aa, Homo sapiens
  CDR3 for alpha chain variable domain of TCR clone 293434 (TRAV25, TRAJ21)
CADYTTSKNFTLDL

SEQ ID NO: 586868 - protein, 13 aa, Homo sapiens
  CDR3 for beta chain variable domain of TCR clone 293434 (TRBV27, TRBJ1-1)
CASSLSIGAEAFF

SEQ ID NO: 586869 - protein, 13 aa, Homo sapiens
  CDR3 for alpha chain variable domain of TCR clone 293435 (TRAV17, TRAJ33)
CATDADSNYQLIW

SEQ ID NO: 586870 - protein, 17 aa, Homo sapiens
  CDR3 for beta chain variable domain of TCR clone 293435 (TRBV20-1, TRBJ2-3)
CSAVSPGLAGGQATQYF

SEQ ID NO: 586871 - protein, 14 aa, Homo sapiens
  CDR3 for alpha chain variable domain of TCR clone 293436 (TRAV12-1, TRAJ42)
CVVIYGGSQENLIF

SEQ ID NO: 586872 - protein, 13 aa, Homo sapiens
  CDR3 for beta chain variable domain of TCR clone 293436 (TRBV18, TRBJ2-5)
CASSPPGKETQYF

SEQ ID NO: 586873 - protein, 14 aa, Homo sapiens
  CDR3 for alpha chain variable domain of TCR clone 293437 (TRAV35, TRAJ33)
CAGSSQDSNYQLFW

SEQ ID NO: 586874 - protein, 15 aa, Homo sapiens
  CDR3 for beta chain variable domain of TCR clone 293437 (TRBV20-1, TRBJ2-7)
GSAESGTSGAYEQYF

SEQ ID NO: 586875 - protein, 13 aa, Homo sapiens
  CDR3 for alpha chain variable domain of TCR clone 293438 (TRAV8-3, TRAJ48)
CALVPFRNEKLTF

SEQ ID NO: 586876 - protein, 15 aa, Homo sapiens
  CDR3 for beta chain variable domain of TCR clone 293438 (TRBV11-2, TRBJ2-1)
CASSSPSTRYNEQFF

SEQ ID NO: 586877 - protein, 16 aa, Homo sapiens
  CDR3 for alpha chain variable domain of TCR clone 293439 (TRAV12-2, TRAJ36)
CGTNNLFFGTGTRLTV

SEQ ID NO: 586878 - protein, 14 aa, Homo sapiens
  CDR3 for beta chain variable domain of TCR clone 293439 (TRBV25-1, TRBJ1-1)
CASTHLGGNTEAFF

SEQ ID NO: 586879 - protein, 13 aa, Homo sapiens
  CDR3 for alpha chain variable domain of TCR clone 293440 (TRAV21, TRAJ40)
CAVRPSRAYKYIF

SEQ ID NO: 586880 - protein, 12 aa, Homo sapiens
  CDR3 for beta chain variable domain of TCR clone 293440 (TRBV14, TRBJ2-5)
CASSQLKEIQYF

SEQ ID NO: 586881 - protein, 14 aa, Homo sapiens
  CDR3 for alpha chain variable domain of TCR clone 293441 (TRAV22, TRAJ6)
CAGVGPGGSYIPTF

SEQ ID NO: 586882 - protein, 15 aa, Homo sapiens
  CDR3 for beta chain variable domain of TCR clone 293441 (TRBV28, TRBJ2-5)
CASSPPWSYQETQYF

SEQ ID NO: 586883 - protein, 12 aa, Homo sapiens
  CDR3 for alpha chain variable domain of TCR clone 293442 (TRAV8-3, TRAJ26)
CAGDNYGQNFVF

SEQ ID NO: 586884 - protein, 13 aa, Homo sapiens
  CDR3 for beta chain variable domain of TCR clone 293442 (TRBV11-2, TRBJ2-5)
CASSFSSQETQYF

SEQ ID NO: 586885 - protein, 13 aa, Homo sapiens
  CDR3 for alpha chain variable domain of TCR clone 293443 (TRAV14/DV4, TRAJ22)
CAMRDPSARQLTF

SEQ ID NO: 586886 - protein, 18 aa, Homo sapiens
  CDR3 for beta chain variable domain of TCR clone 293443 (TRBV19, TRBJ1-5)
CASSKGQVSIHSNQPQHF

SEQ ID NO: 586887 - protein, 11 aa, Homo sapiens
  CDR3 for alpha chain variable domain of TCR clone 293444 (TRAV21, TRAJ39)
LLVNAGNMLTF

SEQ ID NO: 586888 - protein, 12 aa, Homo sapiens
  CDR3 for beta chain variable domain of TCR clone 293444 (TRBV3-1, TRBJ2-1)
CASSQGSSEQFF

SEQ ID NO: 586889 - protein, 15 aa, Homo sapiens
  CDR3 for alpha chain variable domain of TCR clone 293445 (TRAV23/DV6, TRAJ18)
CAASFRGSNLGRLYF

SEQ ID NO: 586890 - protein, 13 aa, Homo sapiens
  CDR3 for beta chain variable domain of TCR clone 293445 (TRBV28, TRBJ2-7)
CAILDRAGGEQYF

SEQ ID NO: 586891 - protein, 14 aa, Homo sapiens
  CDR3 for alpha chain variable domain of TCR clone 293446 (TRAV27, TRAJ22)
CAGVSVLGKRQLTF

SEQ ID NO: 586892 - protein, 15 aa, Homo sapiens
  CDR3 for beta chain variable domain of TCR clone 293446 (TRBV3-1, TRBJ2-1)
CASSQDYTPRGEQFF

SEQ ID NO: 586893 - protein, 16 aa, Homo sapiens
  CDR3 for alpha chain variable domain of TCR clone 293447 (TRAV16, TRAJ4)
CALSRMFSGGYNKLIF

SEQ ID NO: 586894 - protein, 14 aa, Homo sapiens
  CDR3 for beta chain variable domain of TCR clone 293447 (TRBV11-2, TRBJ2-5)
CASSRTGGIETQYF

SEQ ID NO: 586895 - protein, 12 aa, Homo sapiens
  CDR3 for alpha chain variable domain of TCR clone 293448 (TRAV21, TRAJ42)
RAVGGSQGNLIF

SEQ ID NO: 586896 - protein, 14 aa, Homo sapiens
  CDR3 for beta chain variable domain of TCR clone 293448 (TRBV12-4, TRBJ1-1)
CASSLGTGGTEAFF

SEQ ID NO: 586897 - protein, 16 aa, Homo sapiens
  CDR3 for alpha chain variable domain of TCR clone 293449 (TRAV13-2, TRAJ53)
CAENANSGGSNYKLTF

SEQ ID NO: 586898 - protein, 19 aa, Homo sapiens
  CDR3 for beta chain variable domain of TCR clone 293449 (TRBV28, TRBJ2-7)
WASSYSGTSRLGWVYEQYF

SEQ ID NO: 586899 - protein, 15 aa, Homo sapiens
  CDR3 for alpha chain variable domain of TCR clone 293450 (TRAV3, TRAJ32)
CAVSSYGGATNKLIF

SEQ ID NO: 586900 - protein, 16 aa, Homo sapiens
  CDR3 for beta chain variable domain of TCR clone 293450 (TRBV5-1, TRBJ2-5)
CANSVSLAGAQETQYF

SEQ ID NO: 586901 - protein, 10 aa, Homo sapiens
  CDR3 for alpha chain variable domain of TCR clone 293451 (TRAV36/DV7, TRAJ48)
CAVGNEKLTF

SEQ ID NO: 586902 - protein, 13 aa, Homo sapiens
  CDR3 for beta chain variable domain of TCR clone 293451 (TRBV7-2, TRBJ2-7)
CASSSPSGSEQYF

SEQ ID NO: 586903 - protein, 14 aa, Homo sapiens
  CDR3 for alpha chain variable domain of TCR clone 293452 (TRAV2, TRAJ9)
CAVPLNTGGFKTIF

SEQ ID NO: 586904 - protein, 13 aa, Homo sapiens
  CDR3 for beta chain variable domain of TCR clone 293452 (TRBV7-9, TRBJ1-2)
CASGLKQNYGYTF

SEQ ID NO: 586905 - protein, 15 aa, Homo sapiens
  CDR3 for alpha chain variable domain of TCR clone 293453 (TRAV4, TRAJ39)
CLVGPNNNAGNMLTF

SEQ ID NO: 586906 - protein, 13 aa, Homo sapiens
  CDR3 for beta chain variable domain of TCR clone 293453 (TRBV11-2, TRBJ2-5)
CASSSIGEETQYC

SEQ ID NO: 586907 - protein, 14 aa, Homo sapiens
  CDR3 for alpha chain variable domain of TCR clone 293454 (TRAV14/DV4, TRAJ11)
CAMRETSGYSTLTF

SEQ ID NO: 586908 - protein, 14 aa, Homo sapiens
  CDR3 for beta chain variable domain of TCR clone 293454 (TRBV11-2, TRBJ2-5)
CASRPLAGRETQYF

SEQ ID NO: 586909 - protein, 16 aa, Homo sapiens
  CDR3 for alpha chain variable domain of TCR clone 293455 (TRAV26-2, TRAJ48)
CILRSPCNFGNEKLTF

SEQ ID NO: 586910 - protein, 15 aa, Homo sapiens
  CDR3 for beta chain variable domain of TCR clone 293455 (TRBV20-1, TRBJ2-3)
CSARVEGTYTDTQYF

SEQ ID NO: 586911 - protein, 17 aa, Homo sapiens
  CDR3 for alpha chain variable domain of TCR clone 293456 (TRAV3, TRAJ6)
CAVRDGPWAGGSYIPTF

SEQ ID NO: 586912 - protein, 14 aa, Homo sapiens
  CDR3 for beta chain variable domain of TCR clone 293456 (TRBV7-9, TRBJ2-7)
CASSLSQGSYEQYF

SEQ ID NO: 586913 - protein, 13 aa, Homo sapiens
  CDR3 for alpha chain variable domain of TCR clone 293457 (TRAV13-1, TRAJ6)
CAASKGGSYIPTF

SEQ ID NO: 586914 - protein, 13 aa, Homo sapiens
  CDR3 for beta chain variable domain of TCR clone 293457 (TRBV7-2, TRBJ2-1)
CQQLGVGYNEQFF

SEQ ID NO: 586915 - protein, 14 aa, Homo sapiens
  CDR3 for alpha chain variable domain of TCR clone 293458 (TRAV39, TRAJ33)
CAVDIKNSNYQLIW

SEQ ID NO: 586916 - protein, 13 aa, Homo sapiens
  CDR3 for beta chain variable domain of TCR clone 293458 (TRBV4-2, TRBJ2-1)
CASSPGTYNQQFF

SEQ ID NO: 586917 - protein, 13 aa, Homo sapiens
  CDR3 for alpha chain variable domain of TCR clone 293459 (TRAV8-6, TRAJ20)
CAVRTADDYKLSF

SEQ ID NO: 586918 - protein, 12 aa, Homo sapiens
  CDR3 for beta chain variable domain of TCR clone 293459 (TRBV20-1, TRBJ2-1)
CSAQYTYNEQFF

SEQ ID NO: 586919 - protein, 11 aa, Homo sapiens
  CDR3 for alpha chain variable domain of TCR clone 293460 (TRAV12-1, TRAJ20)
CVVNRDYKLSF

SEQ ID NO: 586920 - protein, 15 aa, Homo sapiens
  CDR3 for beta chain variable domain of TCR clone 293460 (TRBV5-1, TRBJ2-1)
CASSPPRAPYNEQFF

SEQ ID NO: 586921 - protein, 22 aa, Homo sapiens
  CDR3 for alpha chain variable domain of TCR clone 293461 (TRAV12-1, )
CVVLRGIPDIQNPYLAVYQLRD

SEQ ID NO: 586922 - protein, 15 aa, Homo sapiens
  CDR3 for beta chain variable domain of TCR clone 293461 (TRBV2, TRBJ2-1)
CASSEARSAYNEQFF

SEQ ID NO: 586923 - protein, 12 aa, Homo sapiens
  CDR3 for alpha chain variable domain of TCR clone 293462 (TRAV36/DV7, TRAJ54)
CAVVRGAQKLVL

SEQ ID NO: 586924 - protein, 16 aa, Homo sapiens
  CDR3 for beta chain variable domain of TCR clone 293462 (TRBV15, TRBJ2-3)
CATSRDLGIVTDTQYF

SEQ ID NO: 586925 - protein, 13 aa, Homo sapiens
  CDR3 for alpha chain variable domain of TCR clone 293463 (TRAV13-1, TRAJ39)
CSKYCNAGNMLTF

SEQ ID NO: 586926 - protein, 16 aa, Homo sapiens
  CDR3 for beta chain variable domain of TCR clone 293463 (TRBV20-1, TRBJ1-4)
CSAPGQGLLTNEKLFF

SEQ ID NO: 586927 - protein, 12 aa, Homo sapiens
  CDR3 for alpha chain variable domain of TCR clone 293464 (TRAV3, TRAJ31)
CAAQRANARLMF

SEQ ID NO: 586928 - protein, 16 aa, Homo sapiens
  CDR3 for beta chain variable domain of TCR clone 293464 (TRBV7-3, TRBJ2-3)
CASSLSGYRPEDTQYF

SEQ ID NO: 586929 - protein, 14 aa, Homo sapiens
  CDR3 for alpha chain variable domain of TCR clone 293465 (TRAV13-1, TRAJ4)
CAATLPSCYNKLIF

SEQ ID NO: 586930 - protein, 14 aa, Homo sapiens
  CDR3 for beta chain variable domain of TCR clone 293465 (TRBV19, TRBJ2-1)
CASPTFVLSGEQFF

SEQ ID NO: 586931 - protein, 14 aa, Homo sapiens
  CDR3 for alpha chain variable domain of TCR clone 293466 (TRAV1-2, TRAJ29)
CAVRELTSATPLVF

SEQ ID NO: 586932 - protein, 16 aa, Homo sapiens
  CDR3 for beta chain variable domain of TCR clone 293466 (TRBV7-9, TRBJ1-2)
CASSLGFSSGEDGYTF

SEQ ID NO: 586933 - protein, 12 aa, Homo sapiens
  CDR3 for alpha chain variable domain of TCR clone 293467 (TRAV21, TRAJ39)
CAADNAGNMLTF

SEQ ID NO: 586934 - protein, 16 aa, Homo sapiens
  CDR3 for beta chain variable domain of TCR clone 293467 (TRBV19, TRBJ2-1)
CASSKAGPSSYNEQFF

SEQ ID NO: 586935 - protein, 12 aa, Homo sapiens
  CDR3 for alpha chain variable domain of TCR clone 293468 (TRAV12-1, TRAJ40)
CVVYSGTYKCIF

SEQ ID NO: 586936 - protein, 17 aa, Homo sapiens
  CDR3 for beta chain variable domain of TCR clone 293468 (TRBV11-3, TRBJ1-5)
CASSPLTGLRGNQPQHF

SEQ ID NO: 586937 - protein, 15 aa, Homo sapiens
  CDR3 for alpha chain variable domain of TCR clone 293469 (TRAV8-3, TRAJ7)
CAVGSISYGNNRLAF

SEQ ID NO: 586938 - protein, 14 aa, Homo sapiens
  CDR3 for beta chain variable domain of TCR clone 293469 (TRBV19, TRBJ2-1)
CASPTFVLSGEQFF

SEQ ID NO: 586939 - protein, 14 aa, Homo sapiens
  CDR3 for alpha chain variable domain of TCR clone 293470 (TRAV20, TRAJ56)
CAVQFGGANSKLTF

SEQ ID NO: 586940 - protein, 11 aa, Homo sapiens
  CDR3 for beta chain variable domain of TCR clone 293470 (TRBV7-2, TRBJ2-7)
CASSLGWEQYF

SEQ ID NO: 586941 - protein, 13 aa, Homo sapiens
  CDR3 for alpha chain variable domain of TCR clone 293471 (TRAV8-3, TRAJ20)
CAVGRPNDYKLSF

SEQ ID NO: 586942 - protein, 14 aa, Homo sapiens
  CDR3 for beta chain variable domain of TCR clone 293471 (TRBV7-8, TRBJ2-3)
CASSFPDGQDTQYF

SEQ ID NO: 586943 - protein, 18 aa, Homo sapiens
  CDR3 for alpha chain variable domain of TCR clone 293472 (TRAV29/DV5, TRAJ26)
CSVLLCSKRKPAGQNFVF

SEQ ID NO: 586944 - protein, 17 aa, Homo sapiens
  CDR3 for beta chain variable domain of TCR clone 293472 (TRBV20-1, TRBJ2-2)
CSASGSGQGGLTGELFF

SEQ ID NO: 586945 - protein, 16 aa, Homo sapiens
  CDR3 for alpha chain variable domain of TCR clone 293473 (TRAV8-3, TRAJ44)
CAVGASNTGTSSRLTF

SEQ ID NO: 586946 - protein, 15 aa, Homo sapiens
  CDR3 for beta chain variable domain of TCR clone 293473 (TRBV27, TRBJ1-5)
CASTFNRGSNQPQHF

SEQ ID NO: 586947 - protein, 16 aa, Homo sapiens
  CDR3 for alpha chain variable domain of TCR clone 293474 (TRAV8-2, TRAJ7)
CVVSEGPYYGNNRLAF

SEQ ID NO: 586948 - protein, 15 aa, Homo sapiens
  CDR3 for beta chain variable domain of TCR clone 293474 (TRBV27, TRBJ2-3)
CASSLGLAATDTQYS

SEQ ID NO: 586949 - protein, 15 aa, Homo sapiens
  CDR3 for alpha chain variable domain of TCR clone 293475 (TRAV8-1, TRAJ6)
CAVNAGAGGSYIPTF

SEQ ID NO: 586950 - protein, 14 aa, Homo sapiens
  CDR3 for beta chain variable domain of TCR clone 293475 (TRBV25-1, TRBJ1-6)
CASSLSADISPRHF

SEQ ID NO: 586951 - protein, 12 aa, Homo sapiens
  CDR3 for alpha chain variable domain of TCR clone 293476 (TRAV13-1, TRAJ21)
CAAKEGFNKFYF

SEQ ID NO: 586952 - protein, 14 aa, Homo sapiens
  CDR3 for beta chain variable domain of TCR clone 293476 (TRBV11-2, TRBJ1-5)
CASSSRTGNQRQHF

SEQ ID NO: 586953 - protein, 14 aa, Homo sapiens
  CDR3 for alpha chain variable domain of TCR clone 293477 (TRAV12-2, TRAJ24)
CAVTPADSWGKLQF

SEQ ID NO: 586954 - protein, 15 aa, Homo sapiens
  CDR3 for beta chain variable domain of TCR clone 293477 (TRBV2, TRBJ2-1)
CASSELAGSYNEQFF

SEQ ID NO: 586955 - protein, 20 aa, Homo sapiens
  CDR3 for alpha chain variable domain of TCR clone 293478 (TRAV26-1, TRAJ42)
CCVLLHRQTYYGGSQGNLIF

SEQ ID NO: 586956 - protein, 16 aa, Homo sapiens
  CDR3 for beta chain variable domain of TCR clone 293478 (TRBV7-3, TRBJ2-2)
CASRLKRGALSGELFF

SEQ ID NO: 586957 - protein, 12 aa, Homo sapiens
  CDR3 for alpha chain variable domain of TCR clone 293479 (TRAV13-1, TRAJ21)
CAAKEGFNKFYF

SEQ ID NO: 586958 - protein, 15 aa, Homo sapiens
  CDR3 for beta chain variable domain of TCR clone 293479 (TRBV12-4, TRBJ2-5)
CAGSPPTGLQETQYF

SEQ ID NO: 586959 - protein, 13 aa, Homo sapiens
  CDR3 for alpha chain variable domain of TCR clone 293480 (TRAV8-3, TRAJ28)
CAVGAVGSYQLTF

SEQ ID NO: 586960 - protein, 15 aa, Homo sapiens
  CDR3 for beta chain variable domain of TCR clone 293480 (TRBV7-9, TRBJ2-7)
CSSSLALAEAYEQYF

SEQ ID NO: 586961 - protein, 12 aa, Homo sapiens
  CDR3 for alpha chain variable domain of TCR clone 293481 (TRAV21, TRAJ39)
CAADNAGNMLTF

SEQ ID NO: 586962 - protein, 12 aa, Homo sapiens
  CDR3 for beta chain variable domain of TCR clone 293481 (TRBV11-2, TRBJ2-2)
CASSLPTGELFF

SEQ ID NO: 586963 - protein, 14 aa, Homo sapiens
  CDR3 for alpha chain variable domain of TCR clone 293482 (TRAV1-2, TRAJ15)
CAVRDRQAGTALIF

SEQ ID NO: 586964 - protein, 14 aa, Homo sapiens
  CDR3 for beta chain variable domain of TCR clone 293482 (TRBV4-1, TRBJ2-2)
CASSHAVNTGELFF

SEQ ID NO: 586965 - protein, 16 aa, Homo sapiens
  CDR3 for alpha chain variable domain of TCR clone 293483 (TRAV30, TRAJ24)
CGTEIVDADSWGKFPF

SEQ ID NO: 586966 - protein, 13 aa, Homo sapiens
  CDR3 for beta chain variable domain of TCR clone 293483 (TRBV7-3, TRBJ1-1)
CASSQDWGAEAFF

SEQ ID NO: 586967 - protein, 13 aa, Homo sapiens
  CDR3 for alpha chain variable domain of TCR clone 293484 (TRAV27, TRAJ48)
CAETNFGNEKLTF

SEQ ID NO: 586968 - protein, 13 aa, Homo sapiens
  CDR3 for beta chain variable domain of TCR clone 293484 (TRBV12-4, TRBJ2-5)
CASRKRGKETQYF

SEQ ID NO: 586969 - protein, 13 aa, Homo sapiens
  CDR3 for alpha chain variable domain of TCR clone 293485 (TRAV8-4, TRAJ22)
CAVSENSARQLTF

SEQ ID NO: 586970 - protein, 11 aa, Homo sapiens
  CDR3 for beta chain variable domain of TCR clone 293485 (TRBV27, TRBJ2-3)
CASSLGDTQYF

SEQ ID NO: 586971 - protein, 12 aa, Homo sapiens
  CDR3 for alpha chain variable domain of TCR clone 293486 (TRAV36/DV7, TRAJ54)
CAVVRGAQKLVF

SEQ ID NO: 586972 - protein, 14 aa, Homo sapiens
  CDR3 for beta chain variable domain of TCR clone 293486 (TRBV19, TRBJ2-7)
CASSIQEWSYEQYF

SEQ ID NO: 586973 - protein, 14 aa, Homo sapiens
  CDR3 for alpha chain variable domain of TCR clone 293487 (TRAV16, TRAJ31)
CALSGRNNNARVMF

SEQ ID NO: 586974 - protein, 12 aa, Homo sapiens
  CDR3 for beta chain variable domain of TCR clone 293487 (TRBV11-2, TRBJ1-2)
CASSREGDGYTF

SEQ ID NO: 586975 - protein, 11 aa, Homo sapiens
  CDR3 for alpha chain variable domain of TCR clone 293488 (TRAV13-1, TRAJ39)
CASHAGNMLTF

SEQ ID NO: 586976 - protein, 16 aa, Homo sapiens
  CDR3 for beta chain variable domain of TCR clone 293488 (TRBV28, TRBJ2-1)
CASSSPEYPRDNEQFF

SEQ ID NO: 586977 - protein, 14 aa, Homo sapiens
  CDR3 for alpha chain variable domain of TCR clone 293489 (TRAV1-2, TRAJ16)
CAVNRFSDVQKLLF

SEQ ID NO: 586978 - protein, 15 aa, Homo sapiens
  CDR3 for beta chain variable domain of TCR clone 293489 (TRBV9, TRBJ1-6)
CASSLAGTGDSPLHF

SEQ ID NO: 586979 - protein, 15 aa, Homo sapiens
  CDR3 for alpha chain variable domain of TCR clone 293490 (TRAV2, TRAJ11)
CAVGGRNSGYSTLTF

SEQ ID NO: 586980 - protein, 14 aa, Homo sapiens
  CDR3 for beta chain variable domain of TCR clone 293490 (TRBV19, TRBJ2-1)
CASPTFVLSGEQFF

SEQ ID NO: 586981 - protein, 15 aa, Homo sapiens
  CDR3 for alpha chain variable domain of TCR clone 293491 (TRAV26-1, TRAJ15)
CIVRMANQAGTALIF

SEQ ID NO: 586982 - protein, 15 aa, Homo sapiens
  CDR3 for beta chain variable domain of TCR clone 293491 (TRBV5-5, TRBJ1-5)
CASSLKGGGEQPQHF

SEQ ID NO: 586983 - protein, 23 aa, Homo sapiens
  CDR3 for alpha chain variable domain of TCR clone 293492 (TRAV8-6, TRAJ38)
CAVRNAGNNHIQNPNPAVYQLRD

SEQ ID NO: 586984 - protein, 15 aa, Homo sapiens
  CDR3 for beta chain variable domain of TCR clone 293492 (TRBV4-1, TRBJ2-2)
CASSEGQGITGELFF

SEQ ID NO: 586985 - protein, 14 aa, Homo sapiens
  CDR3 for alpha chain variable domain of TCR clone 293493 (TRAV17, TRAJ49)
CVTDARDTGNKFYF

SEQ ID NO: 586986 - protein, 14 aa, Homo sapiens
  CDR3 for beta chain variable domain of TCR clone 293493 (TRBV5-5, TRBJ1-2)
CASSFGQINYGYTF

SEQ ID NO: 586987 - protein, 14 aa, Homo sapiens
  CDR3 for alpha chain variable domain of TCR clone 293494 (TRAV13-1, TRAJ3)
CAADGYSSASKIIF

SEQ ID NO: 586988 - protein, 14 aa, Homo sapiens
  CDR3 for beta chain variable domain of TCR clone 293494 (TRBV19, TRBJ2-5)
CASSSSGIQETQYF

SEQ ID NO: 586989 - protein, 14 aa, Homo sapiens
  CDR3 for alpha chain variable domain of TCR clone 293495 (TRAV12-2, TRAJ17)
CAVNIKAAGNKLTF

SEQ ID NO: 586990 - protein, 16 aa, Homo sapiens
  CDR3 for beta chain variable domain of TCR clone 293495 (TRBV20-1, TRBJ2-6)
CSASSQGYDGANVLPF

SEQ ID NO: 586991 - protein, 13 aa, Homo sapiens
  CDR3 for alpha chain variable domain of TCR clone 293496 (TRAV21, TRAJ27)
CAARPGNAGKSTF

SEQ ID NO: 586992 - protein, 15 aa, Homo sapiens
  CDR3 for beta chain variable domain of TCR clone 293496 (TRBV2, TRBJ2-3)
CASSDAGGPTDTQYF

SEQ ID NO: 586993 - protein, 18 aa, Homo sapiens
  CDR3 for alpha chain variable domain of TCR clone 293497 (TRAV21, TRAJ52)
CAVRPSPAGGTSYGKLTF

SEQ ID NO: 586994 - protein, 11 aa, Homo sapiens
  CDR3 for beta chain variable domain of TCR clone 293497 (TRBV18, TRBJ1-2)
CASSPLNGYTF

SEQ ID NO: 586995 - protein, 17 aa, Homo sapiens
  CDR3 for alpha chain variable domain of TCR clone 293498 (TRAV3, TRAJ6)
CAVRDGPRAGGSYIPTF

SEQ ID NO: 586996 - protein, 10 aa, Homo sapiens
  CDR3 for beta chain variable domain of TCR clone 293498 (TRBV20-1, TRBJ2-5)
CSARFETQYF

SEQ ID NO: 586997 - protein, 14 aa, Homo sapiens
  CDR3 for alpha chain variable domain of TCR clone 293499 (TRAV1-2, TRAJ8)
CAVREDTGFRKLVF

SEQ ID NO: 586998 - protein, 16 aa, Homo sapiens
  CDR3 for beta chain variable domain of TCR clone 293499 (TRBV19, TRBJ2-1)
CASSKAGPSSYNEQFF

SEQ ID NO: 586999 - protein, 14 aa, Homo sapiens
  CDR3 for alpha chain variable domain of TCR clone 293500 (TRAV12-2, TRAJ15)
CAPHTGQAGTALIF

SEQ ID NO: 587000 - protein, 15 aa, Homo sapiens
  CDR3 for beta chain variable domain of TCR clone 293500 (TRBV7-9, TRBJ1-4)
CASSRTGGFNEKLFF

SEQ ID NO: 587001 - protein, 13 aa, Homo sapiens
  CDR3 for alpha chain variable domain of TCR clone 293501 (TRAV1-1, TRAJ38)
CASNAGNNRKLIW

SEQ ID NO: 587002 - protein, 14 aa, Homo sapiens
  CDR3 for beta chain variable domain of TCR clone 293501 (TRBV15, TRBJ2-1)
CATSGAEDYNEQFF

SEQ ID NO: 587003 - protein, 15 aa, Homo sapiens
  CDR3 for alpha chain variable domain of TCR clone 293502 (TRAV1-2, TRAJ12)
CAVIPEVDSSYKLIF

SEQ ID NO: 587004 - protein, 18 aa, Homo sapiens
  CDR3 for beta chain variable domain of TCR clone 293502 (TRBV7-9, TRBJ2-7)
CASSLTTSGSRTWYEQYF

SEQ ID NO: 587005 - protein, 14 aa, Homo sapiens
  CDR3 for alpha chain variable domain of TCR clone 293503 (TRAV21, TRAJ38)
CAVMGAGNNRQLIW

SEQ ID NO: 587006 - protein, 13 aa, Homo sapiens
  CDR3 for beta chain variable domain of TCR clone 293503 (TRBV7-3, TRBJ2-5)
CASSIGFFETQYF

SEQ ID NO: 587007 - protein, 12 aa, Homo sapiens
  CDR3 for alpha chain variable domain of TCR clone 293504 (TRAV12-1, TRAJ20)
CVVNPDYYKLSF

SEQ ID NO: 587008 - protein, 15 aa, Homo sapiens
  CDR3 for beta chain variable domain of TCR clone 293504 (TRBV11-3, TRBJ2-2)
CASSLVGTGAGELFF

SEQ ID NO: 587009 - protein, 15 aa, Homo sapiens
  CDR3 for alpha chain variable domain of TCR clone 293505 (TRAV12-3, TRAJ49)
CAMAVTPSTGNQFYF

SEQ ID NO: 587010 - protein, 18 aa, Homo sapiens
  CDR3 for beta chain variable domain of TCR clone 293505 (TRBV4-1, TRBJ1-5)
CASSHGPRGQGLNQPQHF

SEQ ID NO: 587011 - protein, 13 aa, Homo sapiens
  CDR3 for alpha chain variable domain of TCR clone 293506 (TRAV25, TRAJ40)
CAGSASGTYKYIF

SEQ ID NO: 587012 - protein, 13 aa, Homo sapiens
  CDR3 for beta chain variable domain of TCR clone 293506 (TRBV25-1, TRBJ2-7)
CASSEDGDYEQYF

SEQ ID NO: 587013 - protein, 16 aa, Homo sapiens
  CDR3 for alpha chain variable domain of TCR clone 293507 (TRAV21, TRAJ45)
FAVSWGSGGGSDGLTF

SEQ ID NO: 587014 - protein, 14 aa, Homo sapiens
  CDR3 for beta chain variable domain of TCR clone 293507 (TRBV4-2, TRBJ1-2)
CASSPGGSNYGYTF

SEQ ID NO: 587015 - protein, 19 aa, Homo sapiens
  CDR3 for alpha chain variable domain of TCR clone 293508 (TRAV2, TRAJ20)
ILQVRGADAAVYRDCKLSF

SEQ ID NO: 587016 - protein, 12 aa, Homo sapiens
  CDR3 for beta chain variable domain of TCR clone 293508 (TRBV11-2, TRBJ2-2)
CASSLGGGELFF

SEQ ID NO: 587017 - protein, 14 aa, Homo sapiens
  CDR3 for alpha chain variable domain of TCR clone 293509 (TRAV40, TRAJ33)
CLLVGMDSNYQLIW

SEQ ID NO: 587018 - protein, 13 aa, Homo sapiens
  CDR3 for beta chain variable domain of TCR clone 293509 (TRBV27, TRBJ1-4)
CASSLMGDEKLFF

SEQ ID NO: 587019 - protein, 11 aa, Homo sapiens
  CDR3 for alpha chain variable domain of TCR clone 293510 (TRAV27, TRAJ20)
CAGADDYKLSF

SEQ ID NO: 587020 - protein, 12 aa, Homo sapiens
  CDR3 for beta chain variable domain of TCR clone 293510 (TRBV2, TRBJ1-1)
CATPARGTEAFF

SEQ ID NO: 587021 - protein, 12 aa, Homo sapiens
  CDR3 for alpha chain variable domain of TCR clone 293511 (TRAV16, TRAJ9)
CALSSGGFKTIF

SEQ ID NO: 587022 - protein, 14 aa, Homo sapiens
  CDR3 for beta chain variable domain of TCR clone 293511 (TRBV19, TRBJ2-1)
CASPTFVLSGEQFF

SEQ ID NO: 587023 - protein, 16 aa, Homo sapiens
  CDR3 for alpha chain variable domain of TCR clone 293512 (TRAV1-2, TRAJ10)
CAVRGVLTGGGNKLTF

SEQ ID NO: 587024 - protein, 13 aa, Homo sapiens
  CDR3 for beta chain variable domain of TCR clone 293512 (TRBV28, TRBJ2-5)
CASSFAGGETQYF

SEQ ID NO: 587025 - protein, 16 aa, Homo sapiens
  CDR3 for alpha chain variable domain of TCR clone 293513 (TRAV29/DV5, TRAJ30)
QCTSVQQANRADKIIF

SEQ ID NO: 587026 - protein, 13 aa, Homo sapiens
  CDR3 for beta chain variable domain of TCR clone 293513 (TRBV12-5, TRBJ2-3)
CASQNRGIDTQYF

SEQ ID NO: 587027 - protein, 14 aa, Homo sapiens
  CDR3 for alpha chain variable domain of TCR clone 293514 (TRAV13-1, TRAJ44)
CAAKATGTASKLTF

SEQ ID NO: 587028 - protein, 14 aa, Homo sapiens
  CDR3 for beta chain variable domain of TCR clone 293514 (TRBV19, TRBJ2-7)
CASNFRDTFTGMYF

SEQ ID NO: 587029 - protein, 15 aa, Homo sapiens
  CDR3 for alpha chain variable domain of TCR clone 293515 (TRAV27, TRAJ38)
CAARRNAGNKRKLIW

SEQ ID NO: 587030 - protein, 13 aa, Homo sapiens
  CDR3 for beta chain variable domain of TCR clone 293515 (TRBV12-5, TRBJ2-3)
CASGERQSDTQYF

SEQ ID NO: 587031 - protein, 16 aa, Homo sapiens
  CDR3 for alpha chain variable domain of TCR clone 293516 (TRAV16, TRAJ4)
CARSPMFSGGYNKLIF

SEQ ID NO: 587032 - protein, 16 aa, Homo sapiens
  CDR3 for beta chain variable domain of TCR clone 293516 (TRBV24-1, TRBJ2-3)
CATRDPGTGATDTQYF

SEQ ID NO: 587033 - protein, 10 aa, Homo sapiens
  CDR3 for alpha chain variable domain of TCR clone 293517 (TRAV26-1, TRAJ22)
CIVSLNVFWF

SEQ ID NO: 587034 - protein, 15 aa, Homo sapiens
  CDR3 for beta chain variable domain of TCR clone 293517 (TRBV4-2, TRBJ1-2)
CASSQRTGGRDGYTF

SEQ ID NO: 587035 - protein, 14 aa, Homo sapiens
  CDR3 for alpha chain variable domain of TCR clone 293518 (TRAV1-2, TRAJ16)
CAVNRFSDGQKLLL

SEQ ID NO: 587036 - protein, 13 aa, Homo sapiens
  CDR3 for beta chain variable domain of TCR clone 293518 (TRBV7-9, TRBJ1-2)
CASSLKQNYGYTF

SEQ ID NO: 587037 - protein, 11 aa, Homo sapiens
  CDR3 for alpha chain variable domain of TCR clone 293519 (TRAV3, TRAJ43)
CAVRDRNDMRF

SEQ ID NO: 587038 - protein, 15 aa, Homo sapiens
  CDR3 for beta chain variable domain of TCR clone 293519 (TRBV24-1, TRBJ2-5)
CATSDLTSGGETQYF

SEQ ID NO: 587039 - protein, 16 aa, Homo sapiens
  CDR3 for alpha chain variable domain of TCR clone 293520 (TRAV12-3, TRAJ53)
CAMSPGSGGTNYKLTF

SEQ ID NO: 587040 - protein, 13 aa, Homo sapiens
  CDR3 for beta chain variable domain of TCR clone 293520 (TRBV19, TRBJ1-2)
CASSVPGQDGYTF

SEQ ID NO: 587041 - protein, 13 aa, Homo sapiens
  CDR3 for alpha chain variable domain of TCR clone 293521 (TRAV3, TRAJ20)
CAVRDTGDYKLSV

SEQ ID NO: 587042 - protein, 12 aa, Homo sapiens
  CDR3 for beta chain variable domain of TCR clone 293521 (TRBV29-1, TRBJ2-3)
CSVTGGADTQYF

SEQ ID NO: 587043 - protein, 13 aa, Homo sapiens
  CDR3 for alpha chain variable domain of TCR clone 293522 (TRAV29/DV5, TRAJ49)
CAESTNTGNQFYF

SEQ ID NO: 587044 - protein, 13 aa, Homo sapiens
  CDR3 for beta chain variable domain of TCR clone 293522 (TRBV7-2, TRBJ1-4)
CASSLAGLEKLFF

SEQ ID NO: 587045 - protein, 23 aa, Homo sapiens
  CDR3 for alpha chain variable domain of TCR clone 293523 (TRAV21, )
CAVMGAGNNHIQNPDPAVYQLRD

SEQ ID NO: 587046 - protein, 14 aa, Homo sapiens
  CDR3 for beta chain variable domain of TCR clone 293523 (TRBV20-1, TRBJ1-1)
CSAQTRIGGTEAFF

SEQ ID NO: 587047 - protein, 19 aa, Homo sapiens
  CDR3 for alpha chain variable domain of TCR clone 293524 (TRAV38-1, TRAJ53)
CAFMNHGLESGGSNYKLTF

SEQ ID NO: 587048 - protein, 13 aa, Homo sapiens
  CDR3 for beta chain variable domain of TCR clone 293524 (TRBV19, TRBJ2-7)
CASSPRQSYEQYF

SEQ ID NO: 587049 - protein, 14 aa, Homo sapiens
  CDR3 for alpha chain variable domain of TCR clone 293525 (TRAV14/DV4, TRAJ13)
CAMIHSGGYQKVTF

SEQ ID NO: 587050 - protein, 16 aa, Homo sapiens
  CDR3 for beta chain variable domain of TCR clone 293525 (TRBV9, TRBJ2-2)
CASSAMGKGNTGELFF

SEQ ID NO: 587051 - protein, 16 aa, Homo sapiens
  CDR3 for alpha chain variable domain of TCR clone 293526 (TRAV1-2, TRAJ10)
CAVRGVLTGGGNKLTF

SEQ ID NO: 587052 - protein, 17 aa, Homo sapiens
  CDR3 for beta chain variable domain of TCR clone 293526 (TRBV6-3, TRBJ2-2)
CASSYAGQGINTGELFF

SEQ ID NO: 587053 - protein, 12 aa, Homo sapiens
  CDR3 for alpha chain variable domain of TCR clone 293527 (TRAV12-2, TRAJ44)
CADTGTASKLTF

SEQ ID NO: 587054 - protein, 17 aa, Homo sapiens
  CDR3 for beta chain variable domain of TCR clone 293527 (TRBV20-1, TRBJ1-1)
CRARGTGGSYGNTGAFF

SEQ ID NO: 587055 - protein, 15 aa, Homo sapiens
  CDR3 for alpha chain variable domain of TCR clone 293528 (TRAV17, TRAJ35)
CATAFVIGFGNVLHC

SEQ ID NO: 587056 - protein, 15 aa, Homo sapiens
  CDR3 for beta chain variable domain of TCR clone 293528 (TRBV7-9, TRBJ2-7)
CASSLARAEAYEQYF

SEQ ID NO: 587057 - protein, 12 aa, Homo sapiens
  CDR3 for alpha chain variable domain of TCR clone 293529 (TRAV13-2, TRAJ23)
CAERHRGGKLIF

SEQ ID NO: 587058 - protein, 17 aa, Homo sapiens
  CDR3 for beta chain variable domain of TCR clone 293529 (TRBV7-2, TRBJ2-2)
CASSPRGAGEGTGELFF

SEQ ID NO: 587059 - protein, 15 aa, Homo sapiens
  CDR3 for alpha chain variable domain of TCR clone 293530 (TRAV23/DV6, TRAJ30)
CAASSQESRDDKIIF

SEQ ID NO: 587060 - protein, 17 aa, Homo sapiens
  CDR3 for beta chain variable domain of TCR clone 293530 (TRBV4-3, TRBJ2-1)
CASSHCSSGRASGEQFF

SEQ ID NO: 587061 - protein, 14 aa, Homo sapiens
  CDR3 for alpha chain variable domain of TCR clone 293531 (TRAV8-1, TRAJ9)
CAVNAWTGGFKTIF

SEQ ID NO: 587062 - protein, 17 aa, Homo sapiens
  CDR3 for beta chain variable domain of TCR clone 293531 (TRBV7-8, TRBJ2-6)
CASSAGTGGAGANVLTF

SEQ ID NO: 587063 - protein, 17 aa, Homo sapiens
  CDR3 for alpha chain variable domain of TCR clone 293532 (TRAV3, TRAJ42)
CAVRDRDYEGSQGNLIF

SEQ ID NO: 587064 - protein, 15 aa, Homo sapiens
  CDR3 for beta chain variable domain of TCR clone 293532 (TRBV7-2, TRBJ2-1)
CASTHGTGIYNEQFF

SEQ ID NO: 587065 - protein, 13 aa, Homo sapiens
  CDR3 for alpha chain variable domain of TCR clone 293533 (TRAV38-2/DV8, TRAJ56)
CAYQSRANSKLTF

SEQ ID NO: 587066 - protein, 16 aa, Homo sapiens
  CDR3 for beta chain variable domain of TCR clone 293533 (TRBV28, TRBJ1-1)
CASSSGGQPVDTEAFF

SEQ ID NO: 587067 - protein, 14 aa, Homo sapiens
  CDR3 for alpha chain variable domain of TCR clone 293534 (TRAV12-2, TRAJ13)
CAVKKTGGYQKVTF

SEQ ID NO: 587068 - protein, 14 aa, Homo sapiens
  CDR3 for beta chain variable domain of TCR clone 293534 (TRBV12-5, TRBJ2-5)
CASGSRTHQETHYF

SEQ ID NO: 587069 - protein, 15 aa, Homo sapiens
  CDR3 for alpha chain variable domain of TCR clone 293535 (TRAV12-1, TRAJ8)
CVVNVANTGFQKLVF

SEQ ID NO: 587070 - protein, 15 aa, Homo sapiens
  CDR3 for beta chain variable domain of TCR clone 293535 (TRBV12-4, TRBJ1-6)
CASSLGQGFRSPLHF

SEQ ID NO: 587071 - protein, 12 aa, Homo sapiens
  CDR3 for alpha chain variable domain of TCR clone 293536 (TRAV12-2, TRAJ52)
IGGGTSYGELTF

SEQ ID NO: 587072 - protein, 13 aa, Homo sapiens
  CDR3 for beta chain variable domain of TCR clone 293536 (TRBV15, TRBJ2-7)
CATSTTGHYEQYF

SEQ ID NO: 587073 - protein, 14 aa, Homo sapiens
  CDR3 for alpha chain variable domain of TCR clone 293537 (TRAV13-1, TRAJ35)
SAASKGVFGNVLHC

SEQ ID NO: 587074 - protein, 13 aa, Homo sapiens
  CDR3 for beta chain variable domain of TCR clone 293537 (TRBV7-3, TRBJ1-1)
CASSQDWGAEAFF

SEQ ID NO: 587075 - protein, 13 aa, Homo sapiens
  CDR3 for alpha chain variable domain of TCR clone 293538 (TRAV20, TRAJ54)
CALTFEGAQKLVF

SEQ ID NO: 587076 - protein, 18 aa, Homo sapiens
  CDR3 for beta chain variable domain of TCR clone 293538 (TRBV7-9, TRBJ2-7)
CASSLTTSGSRTWYEQYF

SEQ ID NO: 587077 - protein, 16 aa, Homo sapiens
  CDR3 for alpha chain variable domain of TCR clone 293539 (TRAV3, TRAJ37)
CAVRGKGSGNTGKLIF

SEQ ID NO: 587078 - protein, 15 aa, Homo sapiens
  CDR3 for beta chain variable domain of TCR clone 293539 (TRBV7-9, TRBJ1-6)
CASSSPGCGNSPLHF

SEQ ID NO: 587079 - protein, 14 aa, Homo sapiens
  CDR3 for alpha chain variable domain of TCR clone 293540 (TRAV17, TRAJ31)
CATVLRNNNARLMF

SEQ ID NO: 587080 - protein, 14 aa, Homo sapiens
  CDR3 for beta chain variable domain of TCR clone 293540 (TRBV12-4, TRBJ2-5)
CASSLWQKQETHYF

SEQ ID NO: 587081 - protein, 15 aa, Homo sapiens
  CDR3 for alpha chain variable domain of TCR clone 293541 (TRAV17, TRAJ9)
CFLLLRIYWRLKTIF

SEQ ID NO: 587082 - protein, 18 aa, Homo sapiens
  CDR3 for beta chain variable domain of TCR clone 293541 (TRBV12-4, TRBJ2-2)
CASSLVAGTRGRTGELFF

SEQ ID NO: 587083 - protein, 17 aa, Homo sapiens
  CDR3 for alpha chain variable domain of TCR clone 293542 (TRAV1-1, TRAJ28)
CAVDPAYSGAGRYQLTF

SEQ ID NO: 587084 - protein, 14 aa, Homo sapiens
  CDR3 for beta chain variable domain of TCR clone 293542 (TRBV19, TRBJ2-1)
CASPTFVLSGKQFF

SEQ ID NO: 587085 - protein, 13 aa, Homo sapiens
  CDR3 for alpha chain variable domain of TCR clone 293543 (TRAV2, TRAJ40)
CAVVTSGTYKYIF

SEQ ID NO: 587086 - protein, 15 aa, Homo sapiens
  CDR3 for beta chain variable domain of TCR clone 293543 (TRBV4-2, TRBJ2-1)
CASSQDVGLAGEQFF

SEQ ID NO: 587087 - protein, 19 aa, Homo sapiens
  CDR3 for alpha chain variable domain of TCR clone 293544 (TRAV1-2, TRAJ26)
CLLPLCCERPDNYGQNFVF

SEQ ID NO: 587088 - protein, 15 aa, Homo sapiens
  CDR3 for beta chain variable domain of TCR clone 293544 (TRBV9, TRBJ1-6)
CASSVAGTGDSPIHF

SEQ ID NO: 587089 - protein, 11 aa, Homo sapiens
  CDR3 for alpha chain variable domain of TCR clone 293545 (TRAV3, TRAJ21)
CTVGNFNKFYF

SEQ ID NO: 587090 - protein, 15 aa, Homo sapiens
  CDR3 for beta chain variable domain of TCR clone 293545 (TRBV5-1, TRBJ2-1)
CASSLVANSYNEQFF

SEQ ID NO: 587091 - protein, 22 aa, Homo sapiens
  CDR3 for alpha chain variable domain of TCR clone 293546 (TRAV26-1, TRAJ38)
CIASSNAGNNHIQNPDPAAYQL

SEQ ID NO: 587092 - protein, 12 aa, Homo sapiens
  CDR3 for beta chain variable domain of TCR clone 293546 (TRBV5-8, TRBJ1-2)
CASSFGVYGYTF

SEQ ID NO: 587093 - protein, 14 aa, Homo sapiens
  CDR3 for alpha chain variable domain of TCR clone 293547 (TRAV12-3, TRAJ5)
CAMTLDTGRRELTF

SEQ ID NO: 587094 - protein, 14 aa, Homo sapiens
  CDR3 for beta chain variable domain of TCR clone 293547 (TRBV10-2, TRBJ1-5)
CASSSTGRNQPQHF

SEQ ID NO: 587095 - protein, 16 aa, Homo sapiens
  CDR3 for alpha chain variable domain of TCR clone 293548 (TRAV13-1, TRAJ45)
SAAIFYSGGGADGLTF

SEQ ID NO: 587096 - protein, 14 aa, Homo sapiens
  CDR3 for beta chain variable domain of TCR clone 293548 (TRBV7-2, TRBJ2-2)
CASRGQGAAGELFF

SEQ ID NO: 587097 - protein, 16 aa, Homo sapiens
  CDR3 for alpha chain variable domain of TCR clone 293549 (TRAV21, TRAJ37)
CAVRTAGSSNTGKLIF

SEQ ID NO: 587098 - protein, 16 aa, Homo sapiens
  CDR3 for beta chain variable domain of TCR clone 293549 (TRBV13, TRBJ2-2)
CASSPRTGEHTGELFF

SEQ ID NO: 587099 - protein, 12 aa, Homo sapiens
  CDR3 for alpha chain variable domain of TCR clone 293550 (TRAV12-1, TRAJ40)
CVVYSVTYKYIF

SEQ ID NO: 587100 - protein, 13 aa, Homo sapiens
  CDR3 for beta chain variable domain of TCR clone 293550 (TRBV10-2, TRBJ2-7)
CASGASGGYEQYF

SEQ ID NO: 587101 - protein, 12 aa, Homo sapiens
  CDR3 for alpha chain variable domain of TCR clone 293551 (TRAV29/DV5, TRAJ49)
CAATDTGNQFYF

SEQ ID NO: 587102 - protein, 18 aa, Homo sapiens
  CDR3 for beta chain variable domain of TCR clone 293551 (TRBV7-9, TRBJ2-7)
CASSLTTSGSRTWYEQYF

SEQ ID NO: 587103 - protein, 16 aa, Homo sapiens
  CDR3 for alpha chain variable domain of TCR clone 293552 (TRAV16, TRAJ4)
CITVLPFSGGYNKLIF

SEQ ID NO: 587104 - protein, 14 aa, Homo sapiens
  CDR3 for beta chain variable domain of TCR clone 293552 (TRBV19, TRBJ2-7)
CASSMGQGANEQYF

SEQ ID NO: 587105 - protein, 12 aa, Homo sapiens
  CDR3 for alpha chain variable domain of TCR clone 293553 (TRAV12-1, TRAJ20)
CLAHFNDYKLSF

SEQ ID NO: 587106 - protein, 14 aa, Homo sapiens
  CDR3 for beta chain variable domain of TCR clone 293553 (TRBV3-1, TRBJ2-2)
CASSLPDNTGELFF

SEQ ID NO: 587107 - protein, 17 aa, Homo sapiens
  CDR3 for alpha chain variable domain of TCR clone 293554 (TRAV3, TRAJ28)
CAVREAYSGAGRYQLTF

SEQ ID NO: 587108 - protein, 12 aa, Homo sapiens
  CDR3 for beta chain variable domain of TCR clone 293554 (TRBV7-9, TRBJ1-1)
CASSLVRGEAFF

SEQ ID NO: 587109 - protein, 16 aa, Homo sapiens
  CDR3 for alpha chain variable domain of TCR clone 293555 (TRAV13-2, TRAJ54)
CAESGSGSPEAGICQR

SEQ ID NO: 587110 - protein, 15 aa, Homo sapiens
  CDR3 for beta chain variable domain of TCR clone 293555 (TRBV20-1, TRBJ2-7)
CSAESGTSGAYEQYF

SEQ ID NO: 587111 - protein, 17 aa, Homo sapiens
  CDR3 for alpha chain variable domain of TCR clone 293556 (TRAV3, TRAJ38)
CAVRDCLNAGNNRKLIW

SEQ ID NO: 587112 - protein, 13 aa, Homo sapiens
  CDR3 for beta chain variable domain of TCR clone 293556 (TRBV10-2, TRBJ2-7)
CASGASGGYEQYF

SEQ ID NO: 587113 - protein, 15 aa, Homo sapiens
  CDR3 for alpha chain variable domain of TCR clone 293557 (TRAV21, TRAJ53)
CATLNSGGSNYKLTF

SEQ ID NO: 587114 - protein, 15 aa, Homo sapiens
  CDR3 for beta chain variable domain of TCR clone 293557 (TRBV7-6, TRBJ1-2)
CASSSGGRGGYGYTF

SEQ ID NO: 587115 - protein, 12 aa, Homo sapiens
  CDR3 for alpha chain variable domain of TCR clone 293558 (TRAV8-1, TRAJ6)
CASSGGSYIPTF

SEQ ID NO: 587116 - protein, 12 aa, Homo sapiens
  CDR3 for beta chain variable domain of TCR clone 293558 (TRBV19, TRBJ1-1)
CASINRYTEAFF

SEQ ID NO: 587117 - protein, 12 aa, Homo sapiens
  CDR3 for alpha chain variable domain of TCR clone 293559 (TRAV27, TRAJ35)
CAGADFGNVLHC

SEQ ID NO: 587118 - protein, 13 aa, Homo sapiens
  CDR3 for beta chain variable domain of TCR clone 293559 (TRBV6-5, TRBJ2-5)
CASSSPGGETQYF

SEQ ID NO: 587119 - protein, 12 aa, Homo sapiens
  CDR3 for alpha chain variable domain of TCR clone 293560 (TRAV21, TRAJ39)
CAADNAGNMLTF

SEQ ID NO: 587120 - protein, 12 aa, Homo sapiens
  CDR3 for beta chain variable domain of TCR clone 293560 (TRBV12-4, TRBJ1-1)
CQQSGTGFEAVF

SEQ ID NO: 587121 - protein, 11 aa, Homo sapiens
  CDR3 for alpha chain variable domain of TCR clone 293561 (TRAV1-2, TRAJ40)
CAVPGTYKYIF

SEQ ID NO: 587122 - protein, 16 aa, Homo sapiens
  CDR3 for beta chain variable domain of TCR clone 293561 (TRBV10-3, TRBJ2-7)
CAISADFADRPYEQYF

SEQ ID NO: 587123 - protein, 16 aa, Homo sapiens
  CDR3 for alpha chain variable domain of TCR clone 293562 (TRAV1-2, TRAJ10)
CAVRGVLTGGGNKLTF

SEQ ID NO: 587124 - protein, 16 aa, Homo sapiens
  CDR3 for beta chain variable domain of TCR clone 293562 (TRBV18, TRBJ1-1)
ISVPAPLQGENTEAFF

SEQ ID NO: 587125 - protein, 14 aa, Homo sapiens
  CDR3 for alpha chain variable domain of TCR clone 293563 (TRAV13-1, TRAJ44)
CAAKATGTASTLTF

SEQ ID NO: 587126 - protein, 17 aa, Homo sapiens
  CDR3 for beta chain variable domain of TCR clone 293563 (TRBV11-2, TRBJ2-1)
CASSLYPPGVEYNEQFF

SEQ ID NO: 587127 - protein, 16 aa, Homo sapiens
  CDR3 for alpha chain variable domain of TCR clone 293564 (TRAV8-4, TRAJ5)
CAVCPLTDTGRRALTF

SEQ ID NO: 587128 - protein, 14 aa, Homo sapiens
  CDR3 for beta chain variable domain of TCR clone 293564 (TRBV19, TRBJ1-6)
CASSTDGWNSPLHF

SEQ ID NO: 587129 - protein, 13 aa, Homo sapiens
  CDR3 for alpha chain variable domain of TCR clone 293565 (TRAV8-1, TRAJ39)
CAGLNNAGNMLTF

SEQ ID NO: 587130 - protein, 17 aa, Homo sapiens
  CDR3 for beta chain variable domain of TCR clone 293565 (TRBV19, TRBJ2-3)
CASRIDPAGGGTDTQYF

SEQ ID NO: 587131 - protein, 16 aa, Homo sapiens
  CDR3 for alpha chain variable domain of TCR clone 293566 (TRAV12-2, TRAJ32)
CAVNLGQGGATNKLIF

SEQ ID NO: 587132 - protein, 16 aa, Homo sapiens
  CDR3 for beta chain variable domain of TCR clone 293566 (TRBV19, TRBJ2-1)
CASSQAEPSSYNEQFF

SEQ ID NO: 587133 - protein, 16 aa, Homo sapiens
  CDR3 for alpha chain variable domain of TCR clone 293567 (TRAV14/DV4, TRAJ53)
CAMREGGGGSNDKLTF

SEQ ID NO: 587134 - protein, 14 aa, Homo sapiens
  CDR3 for beta chain variable domain of TCR clone 293567 (TRBV20-1, TRBJ2-7)
CSAKTGTGGYEQYF

SEQ ID NO: 587135 - protein, 14 aa, Homo sapiens
  CDR3 for alpha chain variable domain of TCR clone 293568 (TRAV12-2, TRAJ40)
CAVKIPSGTYKYIF

SEQ ID NO: 587136 - protein, 14 aa, Homo sapiens
  CDR3 for beta chain variable domain of TCR clone 293568 (TRBV7-9, TRBJ1-2)
CASRRQGANYGYTF

SEQ ID NO: 587137 - protein, 16 aa, Homo sapiens
  CDR3 for alpha chain variable domain of TCR clone 293569 (TRAV3, TRAJ27)
CAVRDPQGTNAGKSTF

SEQ ID NO: 587138 - protein, 17 aa, Homo sapiens
  CDR3 for beta chain variable domain of TCR clone 293569 (TRBV20-1, TRBJ2-1)
CSASSSGLAGSYNEQFF

SEQ ID NO: 587139 - protein, 14 aa, Homo sapiens
  CDR3 for alpha chain variable domain of TCR clone 293570 (TRAV12-3, TRAJ10)
SHLPLTGGGNKLTF

SEQ ID NO: 587140 - protein, 13 aa, Homo sapiens
  CDR3 for beta chain variable domain of TCR clone 293570 (TRBV20-1, TRBJ2-5)
QCPVPGYQETQYF

SEQ ID NO: 587141 - protein, 12 aa, Homo sapiens
  CDR3 for alpha chain variable domain of TCR clone 293571 (TRAV21, TRAJ29)
CAVTSGNTPLVF

SEQ ID NO: 587142 - protein, 16 aa, Homo sapiens
  CDR3 for beta chain variable domain of TCR clone 293571 (TRBV19, TRBJ2-1)
CASSMGGGSSYNEQFF

SEQ ID NO: 587143 - protein, 15 aa, Homo sapiens
  CDR3 for alpha chain variable domain of TCR clone 293572 (TRAV12-1, TRAJ22)
CVVRISSGSARQLTF

SEQ ID NO: 587144 - protein, 22 aa, Homo sapiens
  CDR3 for beta chain variable domain of TCR clone 293572 (TRBV5-7, TRBJ2-7)
CASSQRGGREGILRAVLRAGHQ

SEQ ID NO: 587145 - protein, 17 aa, Homo sapiens
  CDR3 for alpha chain variable domain of TCR clone 293573 (TRAV3, TRAJ6)
CAVRDGPRAGGSYIPTF

SEQ ID NO: 587146 - protein, 13 aa, Homo sapiens
  CDR3 for beta chain variable domain of TCR clone 293573 (TRBV27, TRBJ2-1)
CASRTLGVGERFF

SEQ ID NO: 587147 - protein, 17 aa, Homo sapiens
  CDR3 for alpha chain variable domain of TCR clone 293574 (TRAV3, TRAJ6)
CAVRDGPRPGGSYIPTF

SEQ ID NO: 587148 - protein, 18 aa, Homo sapiens
  CDR3 for beta chain variable domain of TCR clone 293574 (TRBV7-9, TRBJ2-7)
CASSLTTSGSRTWYEQYF

SEQ ID NO: 587149 - protein, 16 aa, Homo sapiens
  CDR3 for alpha chain variable domain of TCR clone 293575 (TRAV3, TRAJ37)
CAVRPHGSGDTGKLIF

SEQ ID NO: 587150 - protein, 13 aa, Homo sapiens
  CDR3 for beta chain variable domain of TCR clone 293575 (TRBV2, TRBJ1-5)
CASGTGGYQPQHF

SEQ ID NO: 587151 - protein, 14 aa, Homo sapiens
  CDR3 for alpha chain variable domain of TCR clone 293576 (TRAV12-2, TRAJ44)
CAVNPGGTASKLTF

SEQ ID NO: 587152 - protein, 13 aa, Homo sapiens
  CDR3 for beta chain variable domain of TCR clone 293576 (TRBV20-1, TRBJ1-6)
CSAPLGVGSHLHF

SEQ ID NO: 587153 - protein, 14 aa, Homo sapiens
  CDR3 for alpha chain variable domain of TCR clone 293577 (TRAV23/DV6, TRAJ3)
CAASMASSASKINF

SEQ ID NO: 587154 - protein, 13 aa, Homo sapiens
  CDR3 for beta chain variable domain of TCR clone 293577 (TRBV27, TRBJ2-5)
CASFSRGLETQYF

SEQ ID NO: 587155 - protein, 13 aa, Homo sapiens
  CDR3 for alpha chain variable domain of TCR clone 293578 (TRAV12-1, TRAJ11)
CVVNRAGYSTLTF

SEQ ID NO: 587156 - protein, 15 aa, Homo sapiens
  CDR3 for beta chain variable domain of TCR clone 293578 (TRBV4-1, TRBJ2-5)
CASSQSRGDQETQYF

SEQ ID NO: 587157 - protein, 15 aa, Homo sapiens
  CDR3 for alpha chain variable domain of TCR clone 293579 (TRAV19, TRAJ9)
CALSEARTGGFKTIF

SEQ ID NO: 587158 - protein, 17 aa, Homo sapiens
  CDR3 for beta chain variable domain of TCR clone 293579 (TRBV28, TRBJ2-5)
CASNTPEGDALQETQYF

SEQ ID NO: 587159 - protein, 14 aa, Homo sapiens
  CDR3 for alpha chain variable domain of TCR clone 293580 (TRAV17, TRAJ57)
CATDPQGGSEKLVF

SEQ ID NO: 587160 - protein, 15 aa, Homo sapiens
  CDR3 for beta chain variable domain of TCR clone 293580 (TRBV20-1, TRBJ2-7)
CSAESGTSGAYEQYF

SEQ ID NO: 587161 - protein, 14 aa, Homo sapiens
  CDR3 for alpha chain variable domain of TCR clone 293581 (TRAV1-2, TRAJ16)
CAVNRFSDGQKLPF

SEQ ID NO: 587162 - protein, 15 aa, Homo sapiens
  CDR3 for beta chain variable domain of TCR clone 293581 (TRBV27, TRBJ2-3)
CASRSPAGVIDTQYF

SEQ ID NO: 587163 - protein, 13 aa, Homo sapiens
  CDR3 for alpha chain variable domain of TCR clone 293582 (TRAV35, TRAJ44)
CAGLSGTASKLSF

SEQ ID NO: 587164 - protein, 17 aa, Homo sapiens
  CDR3 for beta chain variable domain of TCR clone 293582 (TRBV7-8, TRBJ1-2)
CASSLRPLQGHLYGYTF

SEQ ID NO: 587165 - protein, 18 aa, Homo sapiens
  CDR3 for alpha chain variable domain of TCR clone 293583 (TRAV21, TRAJ52)
CAVRPSPAGGTSYGKLTF

SEQ ID NO: 587166 - protein, 15 aa, Homo sapiens
  CDR3 for beta chain variable domain of TCR clone 293583 (TRBV4-1, TRBJ2-1)
CASSQAQREIYEQFF

SEQ ID NO: 587167 - protein, 14 aa, Homo sapiens
  CDR3 for alpha chain variable domain of TCR clone 293584 (TRAV17, TRAJ57)
CATGPQGGSEKLVF

SEQ ID NO: 587168 - protein, 20 aa, Homo sapiens
  CDR3 for beta chain variable domain of TCR clone 293584 (TRBV7-8, TRBJ2-2)
CACSHLFPGPTIHITGELFF

SEQ ID NO: 587169 - protein, 13 aa, Homo sapiens
  CDR3 for alpha chain variable domain of TCR clone 293585 (TRAV21, TRAJ15)
CAVANQAGTALIF

SEQ ID NO: 587170 - protein, 14 aa, Homo sapiens
  CDR3 for beta chain variable domain of TCR clone 293585 (TRBV27, TRBJ2-2)
CATSLGAATGELFF

SEQ ID NO: 587171 - protein, 12 aa, Homo sapiens
  CDR3 for alpha chain variable domain of TCR clone 293586 (TRAV4, TRAJ26)
CLVGDYGQNFVF

SEQ ID NO: 587172 - protein, 15 aa, Homo sapiens
  CDR3 for beta chain variable domain of TCR clone 293586 (TRBV20-1, TRBJ2-7)
CSAESGTSGAYEQYF

SEQ ID NO: 587173 - protein, 14 aa, Homo sapiens
  CDR3 for alpha chain variable domain of TCR clone 293587 (TRAV13-1, TRAJ44)
CAAKATGTASKPTF

SEQ ID NO: 587174 - protein, 16 aa, Homo sapiens
  CDR3 for beta chain variable domain of TCR clone 293587 (TRBV15, TRBJ1-2)
CATSRGPRTGGGCYTF

SEQ ID NO: 587175 - protein, 14 aa, Homo sapiens
  CDR3 for alpha chain variable domain of TCR clone 293588 (TRAV12-2, TRAJ15)
CATHTGQAGTALIF

SEQ ID NO: 587176 - protein, 14 aa, Homo sapiens
  CDR3 for beta chain variable domain of TCR clone 293588 (TRBV7-2, TRBJ2-7)
CASSPKTSFYEQYF

SEQ ID NO: 587177 - protein, 14 aa, Homo sapiens
  CDR3 for alpha chain variable domain of TCR clone 293589 (TRAV38-1, TRAJ40)
CALRPTSGTYKYIF

SEQ ID NO: 587178 - protein, 13 aa, Homo sapiens
  CDR3 for beta chain variable domain of TCR clone 293589 (TRBV12-4, TRBJ1-2)
CASSLRQGKGYTF

SEQ ID NO: 587179 - protein, 13 aa, Homo sapiens
  CDR3 for alpha chain variable domain of TCR clone 293590 (TRAV12-3, TRAJ7)
CAMSASGNNRLAF

SEQ ID NO: 587180 - protein, 14 aa, Homo sapiens
  CDR3 for beta chain variable domain of TCR clone 293590 (TRBV13, TRBJ2-5)
CASSLGPRGETQHF

SEQ ID NO: 587181 - protein, 12 aa, Homo sapiens
  CDR3 for alpha chain variable domain of TCR clone 293591 (TRAV35, TRAJ52)
NAGGTSYGKLTF

SEQ ID NO: 587182 - protein, 15 aa, Homo sapiens
  CDR3 for beta chain variable domain of TCR clone 293591 (TRBV7-2, TRBJ2-1)
CASSLVGSSYNEQFF

SEQ ID NO: 587183 - protein, 14 aa, Homo sapiens
  CDR3 for alpha chain variable domain of TCR clone 293592 (TRAV1-2, TRAJ8)
CAVREDTGFQKLVF

SEQ ID NO: 587184 - protein, 16 aa, Homo sapiens
  CDR3 for beta chain variable domain of TCR clone 293592 (TRBV7-2, TRBJ2-5)
CASSPFPAGGEETQYF

SEQ ID NO: 587185 - protein, 13 aa, Homo sapiens
  CDR3 for alpha chain variable domain of TCR clone 293593 (TRAV12-2, TRAJ10)
CAVPTGGGNNLTF

SEQ ID NO: 587186 - protein, 11 aa, Homo sapiens
  CDR3 for beta chain variable domain of TCR clone 293593 (TRBV12-4, TRBJ2-2)
CASSSAGELFF

SEQ ID NO: 587187 - protein, 14 aa, Homo sapiens
  CDR3 for alpha chain variable domain of TCR clone 293594 (TRAV12-1, TRAJ17)
CVVNYKAAGNQLTF

SEQ ID NO: 587188 - protein, 14 aa, Homo sapiens
  CDR3 for beta chain variable domain of TCR clone 293594 (TRBV28, TRBJ2-1)
CASSPSTGYNEQFF

SEQ ID NO: 587189 - protein, 14 aa, Homo sapiens
  CDR3 for alpha chain variable domain of TCR clone 293595 (TRAV12-1, TRAJ3)
CGAARYSSASKIIF

SEQ ID NO: 587190 - protein, 17 aa, Homo sapiens
  CDR3 for beta chain variable domain of TCR clone 293595 (TRBV7-8, TRBJ2-6)
CASSAGTGGAGANVLTF

SEQ ID NO: 587191 - protein, 13 aa, Homo sapiens
  CDR3 for alpha chain variable domain of TCR clone 293596 (TRAV12-3, TRAJ5)
CAMIYTGRRALTF

SEQ ID NO: 587192 - protein, 16 aa, Homo sapiens
  CDR3 for beta chain variable domain of TCR clone 293596 (TRBV7-6, TRBJ2-1)
CASSAPGPSSYNEQFF

SEQ ID NO: 587193 - protein, 14 aa, Homo sapiens
  CDR3 for alpha chain variable domain of TCR clone 293597 (TRAV13-1, TRAJ40)
CAARSTSGTYKYIF

SEQ ID NO: 587194 - protein, 15 aa, Homo sapiens
  CDR3 for beta chain variable domain of TCR clone 293597 (TRBV18, TRBJ1-5)
CASSESGGNNQPQHF

SEQ ID NO: 587195 - protein, 15 aa, Homo sapiens
  CDR3 for alpha chain variable domain of TCR clone 293598 (TRAV8-3, TRAJ32)
CAVDLYGGATNKLIF

SEQ ID NO: 587196 - protein, 19 aa, Homo sapiens
  CDR3 for beta chain variable domain of TCR clone 293598 (TRBV19, TRBJ2-5)
CASSIGQVTDFFLGETQYF

SEQ ID NO: 587197 - protein, 11 aa, Homo sapiens
  CDR3 for alpha chain variable domain of TCR clone 293599 (TRAV2, TRAJ13)
CASGGYQKVTF

SEQ ID NO: 587198 - protein, 18 aa, Homo sapiens
  CDR3 for beta chain variable domain of TCR clone 293599 (TRBV19, TRBJ2-6)
CASIGLTSGGSGANVLTF

SEQ ID NO: 587199 - protein, 15 aa, Homo sapiens
  CDR3 for alpha chain variable domain of TCR clone 293600 (TRAV27, TRAJ28)
CAGHGSGAGSYQLTF

SEQ ID NO: 587200 - protein, 16 aa, Homo sapiens
  CDR3 for beta chain variable domain of TCR clone 293600 (TRBV4-1, TRBJ2-3)
CASSQRAGGLTDTQYF

SEQ ID NO: 587201 - protein, 13 aa, Homo sapiens
  CDR3 for alpha chain variable domain of TCR clone 293601 (TRAV4, TRAJ42)
CLVGGGSQGNLIL

SEQ ID NO: 587202 - protein, 16 aa, Homo sapiens
  CDR3 for beta chain variable domain of TCR clone 293601 (TRBV5-1, TRBJ2-3)
CASSLQGRVGADTQYF

SEQ ID NO: 587203 - protein, 16 aa, Homo sapiens
  CDR3 for alpha chain variable domain of TCR clone 293602 (TRAV21, TRAJ52)
CAVTNAGGTSYGKLTF

SEQ ID NO: 587204 - protein, 17 aa, Homo sapiens
  CDR3 for beta chain variable domain of TCR clone 293602 (TRBV28, TRBJ2-5)
CASSRQAGLAGAETQYF

SEQ ID NO: 587205 - protein, 14 aa, Homo sapiens
  CDR3 for alpha chain variable domain of TCR clone 293603 (TRAV9-2, TRAJ39)
CALYIYNAGNMLTL

SEQ ID NO: 587206 - protein, 13 aa, Homo sapiens
  CDR3 for beta chain variable domain of TCR clone 293603 (TRBV4-1, TRBJ2-2)
CASSQENTGELFF

SEQ ID NO: 587207 - protein, 16 aa, Homo sapiens
  CDR3 for alpha chain variable domain of TCR clone 293604 (TRAV3, TRAJ10)
CAVRDMRAGGGNKLTF

SEQ ID NO: 587208 - protein, 17 aa, Homo sapiens
  CDR3 for beta chain variable domain of TCR clone 293604 (TRBV28, TRBJ2-5)
CASSTPEGDALKETQYF

SEQ ID NO: 587209 - protein, 15 aa, Homo sapiens
  CDR3 for alpha chain variable domain of TCR clone 293605 (TRAV12-2, TRAJ42)
CAVNSHGGSQGNLIF

SEQ ID NO: 587210 - protein, 13 aa, Homo sapiens
  CDR3 for beta chain variable domain of TCR clone 293605 (TRBV27, TRBJ1-1)
CASRVSANTEAFF

SEQ ID NO: 587211 - protein, 18 aa, Homo sapiens
  CDR3 for alpha chain variable domain of TCR clone 293606 (TRAV13-1, TRAJ52)
CAAKNPNAGGTSYGKLTF

SEQ ID NO: 587212 - protein, 15 aa, Homo sapiens
  CDR3 for beta chain variable domain of TCR clone 293606 (TRBV12-4, TRBJ2-1)
CASSLRDAAYNEQFF

SEQ ID NO: 587213 - protein, 16 aa, Homo sapiens
  CDR3 for alpha chain variable domain of TCR clone 293607 (TRAV12-3, TRAJ18)
CAMRGSRGSPLGRLYF

SEQ ID NO: 587214 - protein, 19 aa, Homo sapiens
  CDR3 for beta chain variable domain of TCR clone 293607 (TRBV6-3, TRBJ2-7)
CASSYRTGLAGGVSGEQYF

SEQ ID NO: 587215 - protein, 14 aa, Homo sapiens
  CDR3 for alpha chain variable domain of TCR clone 293608 (TRAV35, TRAJ33)
CAGSSQDSNYQLIW

SEQ ID NO: 587216 - protein, 16 aa, Homo sapiens
  CDR3 for beta chain variable domain of TCR clone 293608 (TRBV4-1, TRBJ2-1)
CASSQEAGQGSDEQFF

SEQ ID NO: 587217 - protein, 16 aa, Homo sapiens
  CDR3 for alpha chain variable domain of TCR clone 293609 (TRAV3, TRAJ5)
CAVRNLMDTGRRALTF

SEQ ID NO: 587218 - protein, 16 aa, Homo sapiens
  CDR3 for beta chain variable domain of TCR clone 293609 (TRBV4-2, TRBJ2-7)
CASSQEGLANSCEQYF

SEQ ID NO: 587219 - protein, 13 aa, Homo sapiens
  CDR3 for alpha chain variable domain of TCR clone 293610 (TRAV2, TRAJ29)
CAAGNSGNTPLVS

SEQ ID NO: 587220 - protein, 16 aa, Homo sapiens
  CDR3 for beta chain variable domain of TCR clone 293610 (TRBV7-9, TRBJ1-2)
CASSPGGGAINYGYTF

SEQ ID NO: 587221 - protein, 14 aa, Homo sapiens
  CDR3 for alpha chain variable domain of TCR clone 293611 (TRAV12-2, TRAJ53)
CAVKGGGSNYKLTF

SEQ ID NO: 587222 - protein, 15 aa, Homo sapiens
  CDR3 for beta chain variable domain of TCR clone 293611 (TRBV11-3, TRBJ1-1)
CASSLGGPGDTEAFF

SEQ ID NO: 587223 - protein, 11 aa, Homo sapiens
  CDR3 for alpha chain variable domain of TCR clone 293612 (TRAV2, TRAJ13)
CASGGYQKATF

SEQ ID NO: 587224 - protein, 18 aa, Homo sapiens
  CDR3 for beta chain variable domain of TCR clone 293612 (TRBV11-2, TRBJ2-3)
CASSLGGASRGAPNTQYF

SEQ ID NO: 587225 - protein, 19 aa, Homo sapiens
  CDR3 for alpha chain variable domain of TCR clone 293613 (TRAV40, )
CLPIPDIQNPDPAVHQLRD

SEQ ID NO: 587226 - protein, 15 aa, Homo sapiens
  CDR3 for beta chain variable domain of TCR clone 293613 (TRBV2, TRBJ1-2)
CASSEIGGANYGYTF

SEQ ID NO: 587227 - protein, 14 aa, Homo sapiens
  CDR3 for alpha chain variable domain of TCR clone 293614 (TRAV23/DV6, TRAJ8)
CAASKATGFQKLAF

SEQ ID NO: 587228 - protein, 14 aa, Homo sapiens
  CDR3 for beta chain variable domain of TCR clone 293614 (TRBV13, TRBJ2-5)
CASYRRLAEETQYF

SEQ ID NO: 587229 - protein, 13 aa, Homo sapiens
  CDR3 for alpha chain variable domain of TCR clone 293615 (TRAV16, TRAJ58)
CALSIPSGSRLTF

SEQ ID NO: 587230 - protein, 15 aa, Homo sapiens
  CDR3 for beta chain variable domain of TCR clone 293615 (TRBV27, TRBJ2-1)
CASSNGGGSSNEQFF

SEQ ID NO: 587231 - protein, 15 aa, Homo sapiens
  CDR3 for alpha chain variable domain of TCR clone 293616 (TRAV3, TRAJ22)
CAVRDRSGSARQLTF

SEQ ID NO: 587232 - protein, 17 aa, Homo sapiens
  CDR3 for beta chain variable domain of TCR clone 293616 (TRBV5-4, TRBJ2-1)
CASSSAGGRGPYNEQFF

SEQ ID NO: 587233 - protein, 11 aa, Homo sapiens
  CDR3 for alpha chain variable domain of TCR clone 293617 (TRAV20, TRAJ26)
WWDNYGQNFFF

SEQ ID NO: 587234 - protein, 14 aa, Homo sapiens
  CDR3 for beta chain variable domain of TCR clone 293617 (TRBV6-1, TRBJ1-3)
CASVQGGGGNTIYF

SEQ ID NO: 587235 - protein, 12 aa, Homo sapiens
  CDR3 for alpha chain variable domain of TCR clone 293618 (TRAV8-3, TRAJ26)
CAGDNYGQNFVF

SEQ ID NO: 587236 - protein, 12 aa, Homo sapiens
  CDR3 for beta chain variable domain of TCR clone 293618 (TRBV12-4, TRBJ2-1)
CASTYVLNEQFF

SEQ ID NO: 587237 - protein, 15 aa, Homo sapiens
  CDR3 for alpha chain variable domain of TCR clone 293619 (TRAV21, TRAJ32)
CAAAPYGGATNKLIF

SEQ ID NO: 587238 - protein, 17 aa, Homo sapiens
  CDR3 for beta chain variable domain of TCR clone 293619 (TRBV18, TRBJ2-3)
CAGSPFGDGGFTDTQYF

SEQ ID NO: 587239 - protein, 14 aa, Homo sapiens
  CDR3 for alpha chain variable domain of TCR clone 293620 (TRAV12-2, TRAJ17)
CAVLFKAAGNKLTF

SEQ ID NO: 587240 - protein, 17 aa, Homo sapiens
  CDR3 for beta chain variable domain of TCR clone 293620 (TRBV20-1, TRBJ2-2)
CSASGSGQGVLTGEMFF

SEQ ID NO: 587241 - protein, 21 aa, Homo sapiens
  CDR3 for alpha chain variable domain of TCR clone 293621 (TRAV1-2, TRAJ8)
CAVREDTGFSETCIWNWHPTS

SEQ ID NO: 587242 - protein, 15 aa, Homo sapiens
  CDR3 for beta chain variable domain of TCR clone 293621 (TRBV6-3, TRBJ2-7)
CASSSPGTVFYEQYF

SEQ ID NO: 587243 - protein, 18 aa, Homo sapiens
  CDR3 for alpha chain variable domain of TCR clone 293622 (TRAV12-3, TRAJ52)
CAMSVGGAGGTSYGNLTL

SEQ ID NO: 587244 - protein, 15 aa, Homo sapiens
  CDR3 for beta chain variable domain of TCR clone 293622 (TRBV27, TRBJ1-6)
CASSFDRGLGSPLHF

SEQ ID NO: 587245 - protein, 11 aa, Homo sapiens
  CDR3 for alpha chain variable domain of TCR clone 293623 (TRAV17, TRAJ43)
RATPRSNDMRF

SEQ ID NO: 587246 - protein, 14 aa, Homo sapiens
  CDR3 for beta chain variable domain of TCR clone 293623 (TRBV7-2, TRBJ2-7)
CASRSQGAAYEQYF

SEQ ID NO: 587247 - protein, 14 aa, Homo sapiens
  CDR3 for alpha chain variable domain of TCR clone 293624 (TRAV12-2, TRAJ17)
CAVLFKAAGNKLTF

SEQ ID NO: 587248 - protein, 15 aa, Homo sapiens
  CDR3 for beta chain variable domain of TCR clone 293624 (TRBV28, TRBJ2-1)
CASSIIAGGGSEQFF

SEQ ID NO: 587249 - protein, 20 aa, Homo sapiens
  CDR3 for alpha chain variable domain of TCR clone 293625 (TRAV1-2, TRAJ8)
CAVRGDTGFQKLVLELAPDF

SEQ ID NO: 587250 - protein, 16 aa, Homo sapiens
  CDR3 for beta chain variable domain of TCR clone 293625 (TRBV28, TRBJ1-4)
CASSPPYRGRSEKLFF

SEQ ID NO: 587251 - protein, 12 aa, Homo sapiens
  CDR3 for alpha chain variable domain of TCR clone 293626 (TRAV25, TRAJ38)
CAGTGNNRKLIW

SEQ ID NO: 587252 - protein, 14 aa, Homo sapiens
  CDR3 for beta chain variable domain of TCR clone 293626 (TRBV19, TRBJ2-1)
CASPTFVLSGEQFF

SEQ ID NO: 587253 - protein, 16 aa, Homo sapiens
  CDR3 for alpha chain variable domain of TCR clone 293627 (TRAV38-1, TRAJ32)
CAFMPFLGGATNKLIS

SEQ ID NO: 587254 - protein, 13 aa, Homo sapiens
  CDR3 for beta chain variable domain of TCR clone 293627 (TRBV7-9, TRBJ2-7)
CASSFAGAYEQYF

SEQ ID NO: 587255 - protein, 12 aa, Homo sapiens
  CDR3 for alpha chain variable domain of TCR clone 293628 (TRAV21, TRAJ8)
CAVNTGFEKLVF

SEQ ID NO: 587256 - protein, 13 aa, Homo sapiens
  CDR3 for beta chain variable domain of TCR clone 293628 (TRBV6-3, TRBJ2-1)
CASSYDNYNEQFF

SEQ ID NO: 587257 - protein, 16 aa, Homo sapiens
  CDR3 for alpha chain variable domain of TCR clone 293629 (TRAV12-3, TRAJ53)
CAMSPGSGGSNYKLTF

SEQ ID NO: 587258 - protein, 14 aa, Homo sapiens
  CDR3 for beta chain variable domain of TCR clone 293629 (TRBV28, TRBJ1-1)
CASSESGRGTEAFF

SEQ ID NO: 587259 - protein, 13 aa, Homo sapiens
  CDR3 for alpha chain variable domain of TCR clone 293630 (TRAV35, TRAJ42)
CAGFPGSQANLIF

SEQ ID NO: 587260 - protein, 13 aa, Homo sapiens
  CDR3 for beta chain variable domain of TCR clone 293630 (TRBV29-1, TRBJ2-1)
CSVEGGRVNEQFF

SEQ ID NO: 587261 - protein, 14 aa, Homo sapiens
  CDR3 for alpha chain variable domain of TCR clone 293631 (TRAV12-2, TRAJ13)
CAVKKTGGYQKVNF

SEQ ID NO: 587262 - protein, 15 aa, Homo sapiens
  CDR3 for beta chain variable domain of TCR clone 293631 (TRBV27, TRBJ2-1)
RASSNGGGSSNEQFF

SEQ ID NO: 587263 - protein, 13 aa, Homo sapiens
  CDR3 for alpha chain variable domain of TCR clone 293632 (TRAV4, TRAJ33)
CLVGDMDNYQLIW

SEQ ID NO: 587264 - protein, 14 aa, Homo sapiens
  CDR3 for beta chain variable domain of TCR clone 293632 (TRBV7-9, TRBJ1-1)
CASSLGGANTEAFF

SEQ ID NO: 587265 - protein, 14 aa, Homo sapiens
  CDR3 for alpha chain variable domain of TCR clone 293633 (TRAV3, TRAJ9)
CAVRLNTGGSKTIF

SEQ ID NO: 587266 - protein, 16 aa, Homo sapiens
  CDR3 for beta chain variable domain of TCR clone 293633 (TRBV19, TRBJ2-2)
CASRSPGTGATGELFF

SEQ ID NO: 587267 - protein, 11 aa, Homo sapiens
  CDR3 for alpha chain variable domain of TCR clone 293634 (TRAV3, TRAJ21)
CAVGTFNKFYF

SEQ ID NO: 587268 - protein, 16 aa, Homo sapiens
  CDR3 for beta chain variable domain of TCR clone 293634 (TRBV19, TRBJ2-1)
WASSKAGPSSYNEQFF

SEQ ID NO: 587269 - protein, 20 aa, Homo sapiens
  CDR3 for alpha chain variable domain of TCR clone 293635 (TRAV1-2, TRAJ27)
CLLPLCCERNPNTNVGKSTF

SEQ ID NO: 587270 - protein, 13 aa, Homo sapiens
  CDR3 for beta chain variable domain of TCR clone 293635 (TRBV6-1, TRBJ1-2)
CASSAREGYGYTF

SEQ ID NO: 587271 - protein, 16 aa, Homo sapiens
  CDR3 for alpha chain variable domain of TCR clone 293636 (TRAV3, TRAJ37)
CAVRPHGSGNTGKLIF

SEQ ID NO: 587272 - protein, 13 aa, Homo sapiens
  CDR3 for beta chain variable domain of TCR clone 293636 (TRBV19, TRBJ2-7)
CASSKQGGYEQYF

SEQ ID NO: 587273 - protein, 12 aa, Homo sapiens
  CDR3 for alpha chain variable domain of TCR clone 293637 (TRAV3, TRAJ43)
CAVRDPNNVLRF

SEQ ID NO: 587274 - protein, 15 aa, Homo sapiens
  CDR3 for beta chain variable domain of TCR clone 293637 (TRBV27, TRBJ1-5)
CASSLGTGFDQPQHF

SEQ ID NO: 587275 - protein, 13 aa, Homo sapiens
  CDR3 for alpha chain variable domain of TCR clone 293638 (TRAV20, TRAJ34)
CAVSPYNTDKLIF

SEQ ID NO: 587276 - protein, 13 aa, Homo sapiens
  CDR3 for beta chain variable domain of TCR clone 293638 (TRBV7-9, TRBJ1-2)
CASSLRQNYGYTF

SEQ ID NO: 587277 - protein, 15 aa, Homo sapiens
  CDR3 for alpha chain variable domain of TCR clone 293639 (TRAV38-2/DV8, TRAJ58)
CAYRSGRTSGSRLTF

SEQ ID NO: 587278 - protein, 12 aa, Homo sapiens
  CDR3 for beta chain variable domain of TCR clone 293639 (TRBV7-8, TRBJ2-7)
CASSLGDREQYF

SEQ ID NO: 587279 - protein, 13 aa, Homo sapiens
  CDR3 for alpha chain variable domain of TCR clone 293640 (TRAV12-1, TRAJ12)
CVVNIESSYKLIF

SEQ ID NO: 587280 - protein, 18 aa, Homo sapiens
  CDR3 for beta chain variable domain of TCR clone 293640 (TRBV5-1, TRBJ2-2)
CACSLVALGGRDTGELFF

SEQ ID NO: 587281 - protein, 14 aa, Homo sapiens
  CDR3 for alpha chain variable domain of TCR clone 293641 (TRAV26-1, TRAJ26)
CIVRATFLGQNFVF

SEQ ID NO: 587282 - protein, 16 aa, Homo sapiens
  CDR3 for beta chain variable domain of TCR clone 293641 (TRBV12-4, TRBJ2-7)
CASRTTGTGPSYEQYF

SEQ ID NO: 587283 - protein, 13 aa, Homo sapiens
  CDR3 for alpha chain variable domain of TCR clone 293642 (TRAV21, TRAJ20)
GAVGLRVDYKLSF

SEQ ID NO: 587284 - protein, 13 aa, Homo sapiens
  CDR3 for beta chain variable domain of TCR clone 293642 (TRBV6-1, TRBJ1-1)
CASSRQGNTEAFF

SEQ ID NO: 587285 - protein, 14 aa, Homo sapiens
  CDR3 for alpha chain variable domain of TCR clone 293643 (TRAV13-1, TRAJ44)
CAAKATGTASKLAF

SEQ ID NO: 587286 - protein, 13 aa, Homo sapiens
  CDR3 for beta chain variable domain of TCR clone 293643 (TRBV5-5, TRBJ1-2)
CASSFWRGEDYTS

SEQ ID NO: 587287 - protein, 10 aa, Homo sapiens
  CDR3 for alpha chain variable domain of TCR clone 293644 (TRAV12-2, TRAJ43)
CAVKVLRMRF

SEQ ID NO: 587288 - protein, 14 aa, Homo sapiens
  CDR3 for beta chain variable domain of TCR clone 293644 (TRBV11-2, TRBJ2-7)
CASSLGNSLYEQYF

SEQ ID NO: 587289 - protein, 13 aa, Homo sapiens
  CDR3 for alpha chain variable domain of TCR clone 293645 (TRAV35, TRAJ39)
CAGQLGKGNMLTF

SEQ ID NO: 587290 - protein, 14 aa, Homo sapiens
  CDR3 for beta chain variable domain of TCR clone 293645 (TRBV7-2, TRBJ2-7)
CASSPKTSFYEQYF

SEQ ID NO: 587291 - protein, 16 aa, Homo sapiens
  CDR3 for alpha chain variable domain of TCR clone 293646 (TRAV26-1, TRAJ37)
CIVRGDGSGNTGKLIF

SEQ ID NO: 587292 - protein, 14 aa, Homo sapiens
  CDR3 for beta chain variable domain of TCR clone 293646 (TRBV7-6, TRBJ2-3)
CASSVAGGTDTQYF

SEQ ID NO: 587293 - protein, 13 aa, Homo sapiens
  CDR3 for alpha chain variable domain of TCR clone 293647 (TRAV25, TRAJ40)
CAGSAAGTYKYIF

SEQ ID NO: 587294 - protein, 14 aa, Homo sapiens
  CDR3 for beta chain variable domain of TCR clone 293647 (TRBV7-2, TRBJ2-7)
CASRSQGAAYEPYF

SEQ ID NO: 587295 - protein, 11 aa, Homo sapiens
  CDR3 for alpha chain variable domain of TCR clone 293648 (TRAV2, TRAJ13)
CASGGYQKVTF

SEQ ID NO: 587296 - protein, 12 aa, Homo sapiens
  CDR3 for beta chain variable domain of TCR clone 293648 (TRBV7-8, TRBJ2-7)
CASSLGDREQYY

SEQ ID NO: 587297 - protein, 15 aa, Homo sapiens
  CDR3 for alpha chain variable domain of TCR clone 293649 (TRAV26-1, TRAJ16)
CIVSFRFSDGQKLLF

SEQ ID NO: 587298 - protein, 13 aa, Homo sapiens
  CDR3 for beta chain variable domain of TCR clone 293649 (TRBV10-2, TRBJ2-7)
CASGASGGYEQYF

SEQ ID NO: 587299 - protein, 16 aa, Homo sapiens
  CDR3 for alpha chain variable domain of TCR clone 293650 (TRAV30, TRAJ24)
CGTEIVDADSWGKFQF

SEQ ID NO: 587300 - protein, 14 aa, Homo sapiens
  CDR3 for beta chain variable domain of TCR clone 293650 (TRBV9, TRBJ2-7)
CASSVGVGSYEQYC

SEQ ID NO: 587301 - protein, 14 aa, Homo sapiens
  CDR3 for alpha chain variable domain of TCR clone 293651 (TRAV6, TRAJ37)
CALGSQGNTGKLIF

SEQ ID NO: 587302 - protein, 15 aa, Homo sapiens
  CDR3 for beta chain variable domain of TCR clone 293651 (TRBV2, TRBJ2-1)
FASSEEREGDNEQFF

SEQ ID NO: 587303 - protein, 18 aa, Homo sapiens
  CDR3 for alpha chain variable domain of TCR clone 293652 (TRAV26-2, TRAJ45)
CILSVDKYSGGGADGLTF

SEQ ID NO: 587304 - protein, 16 aa, Homo sapiens
  CDR3 for beta chain variable domain of TCR clone 293652 (TRBV2, TRBJ1-4)
CASNLLQGATNEKPFF

SEQ ID NO: 587305 - protein, 23 aa, Homo sapiens
  CDR3 for alpha chain variable domain of TCR clone 293653 (TRAV26-1, TRAJ38)
CIANNAGNNHIQNPDPAVYQLRD

SEQ ID NO: 587306 - protein, 12 aa, Homo sapiens
  CDR3 for beta chain variable domain of TCR clone 293653 (TRBV11-2, TRBJ2-2)
CASSLGGGELFF

SEQ ID NO: 587307 - protein, 19 aa, Homo sapiens
  CDR3 for alpha chain variable domain of TCR clone 293654 (TRAV16, )
CALSGDIQNPDPAVSQLRD

SEQ ID NO: 587308 - protein, 16 aa, Homo sapiens
  CDR3 for beta chain variable domain of TCR clone 293654 (TRBV12-5, TRBJ2-5)
CASGPRTSGNQETQYF

SEQ ID NO: 587309 - protein, 16 aa, Homo sapiens
  CDR3 for alpha chain variable domain of TCR clone 293655 (TRAV3, TRAJ21)
CAVRDIERGNFNKFYF

SEQ ID NO: 587310 - protein, 14 aa, Homo sapiens
  CDR3 for beta chain variable domain of TCR clone 293655 (TRBV7-2, TRBJ2-2)
CASRGQGAAGELFF

SEQ ID NO: 587311 - protein, 14 aa, Homo sapiens
  CDR3 for alpha chain variable domain of TCR clone 293656 (TRAV4, TRAJ17)
CLVGDMAAGNKLTF

SEQ ID NO: 587312 - protein, 15 aa, Homo sapiens
  CDR3 for beta chain variable domain of TCR clone 293656 (TRBV11-3, TRBJ2-3)
CASLKDGREGDTQYF

SEQ ID NO: 587313 - protein, 16 aa, Homo sapiens
  CDR3 for alpha chain variable domain of TCR clone 293657 (TRAV30, TRAJ24)
CGTEIVDADSWGKFQF

SEQ ID NO: 587314 - protein, 13 aa, Homo sapiens
  CDR3 for beta chain variable domain of TCR clone 293657 (TRBV10-3, TRBJ2-7)
CASKLAVNYEQDF

SEQ ID NO: 587315 - protein, 15 aa, Homo sapiens
  CDR3 for alpha chain variable domain of TCR clone 293658 (TRAV26-1, TRAJ29)
CIVRVEGPGNTPLVF

SEQ ID NO: 587316 - protein, 14 aa, Homo sapiens
  CDR3 for beta chain variable domain of TCR clone 293658 (TRBV18, TRBJ2-5)
CASSPGVSQETQYC

SEQ ID NO: 587317 - protein, 14 aa, Homo sapiens
  CDR3 for alpha chain variable domain of TCR clone 293659 (TRAV26-1, TRAJ21)
CITHTTSTNFTLDL

SEQ ID NO: 587318 - protein, 15 aa, Homo sapiens
  CDR3 for beta chain variable domain of TCR clone 293659 (TRBV20-1, TRBJ2-7)
CSARDRVSGMDEQYF

SEQ ID NO: 587319 - protein, 18 aa, Homo sapiens
  CDR3 for alpha chain variable domain of TCR clone 293660 (TRAV21, TRAJ53)
CAVKGGENSGGSNYKLTF

SEQ ID NO: 587320 - protein, 15 aa, Homo sapiens
  CDR3 for beta chain variable domain of TCR clone 293660 (TRBV9, TRBJ1-6)
CASSVAGTGDSPLHF

SEQ ID NO: 587321 - protein, 12 aa, Homo sapiens
  CDR3 for alpha chain variable domain of TCR clone 293661 (TRAV26-1, TRAJ13)
CIVSRCYQKVTF

SEQ ID NO: 587322 - protein, 14 aa, Homo sapiens
  CDR3 for beta chain variable domain of TCR clone 293661 (TRBV7-2, TRBJ2-7)
CASSPKTSFYEQYF

SEQ ID NO: 587323 - protein, 12 aa, Homo sapiens
  CDR3 for alpha chain variable domain of TCR clone 293662 (TRAV21, TRAJ11)
CAATSGYSTLTF

SEQ ID NO: 587324 - protein, 16 aa, Homo sapiens
  CDR3 for beta chain variable domain of TCR clone 293662 (TRBV28, TRBJ2-2)
CASSLEGGSNTGELFV

SEQ ID NO: 587325 - protein, 15 aa, Homo sapiens
  CDR3 for alpha chain variable domain of TCR clone 293663 (TRAV27, TRAJ53)
CRAINSGGSNYNLTF

SEQ ID NO: 587326 - protein, 14 aa, Homo sapiens
  CDR3 for beta chain variable domain of TCR clone 293663 (TRBV7-3, TRBJ2-1)
CASSLAGGTNEQFF

SEQ ID NO: 587327 - protein, 12 aa, Homo sapiens
  CDR3 for alpha chain variable domain of TCR clone 293664 (TRAV12-3, TRAJ17)
CAMTLTGNKLTF

SEQ ID NO: 587328 - protein, 20 aa, Homo sapiens
  CDR3 for beta chain variable domain of TCR clone 293664 (TRBV7-8, TRBJ2-2)
CGSSHLFPGPTIHITGELFF

SEQ ID NO: 587329 - protein, 16 aa, Homo sapiens
  CDR3 for alpha chain variable domain of TCR clone 293665 (TRAV3, TRAJ32)
CAVRENYGVATNKLIF

SEQ ID NO: 587330 - protein, 12 aa, Homo sapiens
  CDR3 for beta chain variable domain of TCR clone 293665 (TRBV20-1, TRBJ1-2)
CSVTPEGYGYTF

SEQ ID NO: 587331 - protein, 13 aa, Homo sapiens
  CDR3 for alpha chain variable domain of TCR clone 293666 (TRAV12-3, TRAJ39)
CAMIDNAGNMLTF

SEQ ID NO: 587332 - protein, 18 aa, Homo sapiens
  CDR3 for beta chain variable domain of TCR clone 293666 (TRBV5-5, TRBJ1-5)
CASSLRQVKGSSNQPQHF

SEQ ID NO: 587333 - protein, 14 aa, Homo sapiens
  CDR3 for alpha chain variable domain of TCR clone 293667 (TRAV8-3, TRAJ40)
CAVVFTSGTYKYIF

SEQ ID NO: 587334 - protein, 14 aa, Homo sapiens
  CDR3 for beta chain variable domain of TCR clone 293667 (TRBV6-1, TRBJ1-3)
CASVQGGGGNTIYF

SEQ ID NO: 587335 - protein, 15 aa, Homo sapiens
  CDR3 for alpha chain variable domain of TCR clone 293668 (TRAV14/DV4, TRAJ26)
CAMREGQNYGQNFVF

SEQ ID NO: 587336 - protein, 14 aa, Homo sapiens
  CDR3 for beta chain variable domain of TCR clone 293668 (TRBV11-2, TRBJ2-1)
CASSLSGPYNEQFF

SEQ ID NO: 587337 - protein, 10 aa, Homo sapiens
  CDR3 for alpha chain variable domain of TCR clone 293669 (TRAV13-2, TRAJ43)
CAETSGDMRF

SEQ ID NO: 587338 - protein, 13 aa, Homo sapiens
  CDR3 for beta chain variable domain of TCR clone 293669 (TRBV24-1, TRBJ2-1)
CATRQGAGNEQCF

SEQ ID NO: 587339 - protein, 13 aa, Homo sapiens
  CDR3 for alpha chain variable domain of TCR clone 293670 (TRAV1-2, TRAJ11)
CAVRREGYSTLTF

SEQ ID NO: 587340 - protein, 13 aa, Homo sapiens
  CDR3 for beta chain variable domain of TCR clone 293670 (TRBV6-5, TRBJ2-2)
CASSLPGVGELFF

SEQ ID NO: 587341 - protein, 14 aa, Homo sapiens
  CDR3 for alpha chain variable domain of TCR clone 293671 (TRAV8-1, TRAJ5)
CAVRTDTGRRALTF

SEQ ID NO: 587342 - protein, 14 aa, Homo sapiens
  CDR3 for beta chain variable domain of TCR clone 293671 (TRBV4-1, TRBJ2-2)
CASSQAVNTGELFF

SEQ ID NO: 587343 - protein, 14 aa, Homo sapiens
  CDR3 for alpha chain variable domain of TCR clone 293672 (TRAV13-1, TRAJ8)
CAASMSTGFQKLVF

SEQ ID NO: 587344 - protein, 14 aa, Homo sapiens
  CDR3 for beta chain variable domain of TCR clone 293672 (TRBV7-2, TRBJ2-7)
CASRSQGAAYEQYF

SEQ ID NO: 587345 - protein, 14 aa, Homo sapiens
  CDR3 for alpha chain variable domain of TCR clone 293673 (TRAV12-3, TRAJ22)
CAMSLFDSARQLTF

SEQ ID NO: 587346 - protein, 14 aa, Homo sapiens
  CDR3 for beta chain variable domain of TCR clone 293673 (TRBV7-2, TRBJ2-7)
CASSPKTSFYEQYF

SEQ ID NO: 587347 - protein, 17 aa, Homo sapiens
  CDR3 for alpha chain variable domain of TCR clone 293674 (TRAV13-2, TRAJ43)
CAENEDMRFGAGTRLTV

SEQ ID NO: 587348 - protein, 14 aa, Homo sapiens
  CDR3 for beta chain variable domain of TCR clone 293674 (TRBV5-1, TRBJ2-3)
CASSVGTGTDTQYF

SEQ ID NO: 587349 - protein, 13 aa, Homo sapiens
  CDR3 for alpha chain variable domain of TCR clone 293675 (TRAV3, TRAJ21)
CAVREPDFNKFYF

SEQ ID NO: 587350 - protein, 17 aa, Homo sapiens
  CDR3 for beta chain variable domain of TCR clone 293675 (TRBV7-8, TRBJ2-6)
CASSAGTGGTGANVLTF

SEQ ID NO: 587351 - protein, 14 aa, Homo sapiens
  CDR3 for alpha chain variable domain of TCR clone 293676 (TRAV12-2, TRAJ40)
CAVKIPSGTYKYIF

SEQ ID NO: 587352 - protein, 12 aa, Homo sapiens
  CDR3 for beta chain variable domain of TCR clone 293676 (TRBV7-8, TRBJ2-7)
CASSLAGYEQYF

SEQ ID NO: 587353 - protein, 16 aa, Homo sapiens
  CDR3 for alpha chain variable domain of TCR clone 293677 (TRAV3, TRAJ21)
CAVRDIERGNLHKFYF

SEQ ID NO: 587354 - protein, 14 aa, Homo sapiens
  CDR3 for beta chain variable domain of TCR clone 293677 (TRBV12-4, TRBJ2-5)
CASSLSSGRETQYF

SEQ ID NO: 587355 - protein, 11 aa, Homo sapiens
  CDR3 for alpha chain variable domain of TCR clone 293678 (TRAV36/DV7, TRAJ45)
SGGGGADGLTF

SEQ ID NO: 587356 - protein, 13 aa, Homo sapiens
  CDR3 for beta chain variable domain of TCR clone 293678 (TRBV28, TRBJ2-7)
CASNPSGTYEQYF

SEQ ID NO: 587357 - protein, 17 aa, Homo sapiens
  CDR3 for alpha chain variable domain of TCR clone 293679 (TRAV38-2/DV8, TRAJ28)
CAFLTLYSGAGSYQLTF

SEQ ID NO: 587358 - protein, 14 aa, Homo sapiens
  CDR3 for beta chain variable domain of TCR clone 293679 (TRBV7-2, TRBJ2-5)
CASSLAGRGETQYF

SEQ ID NO: 587359 - protein, 14 aa, Homo sapiens
  CDR3 for alpha chain variable domain of TCR clone 293680 (TRAV12-3, TRAJ42)
CEMNYGGSQGNLIF

SEQ ID NO: 587360 - protein, 16 aa, Homo sapiens
  CDR3 for beta chain variable domain of TCR clone 293680 (TRBV12-4, TRBJ1-5)
CASSSGPRGSNQPQHF

SEQ ID NO: 587361 - protein, 15 aa, Homo sapiens
  CDR3 for alpha chain variable domain of TCR clone 293681 (TRAV23/DV6, TRAJ13)
CAAWPGGGGYQKVTF

SEQ ID NO: 587362 - protein, 14 aa, Homo sapiens
  CDR3 for beta chain variable domain of TCR clone 293681 (TRBV19, TRBJ2-1)
CASPTFVLSGGQFF

SEQ ID NO: 587363 - protein, 15 aa, Homo sapiens
  CDR3 for alpha chain variable domain of TCR clone 293682 (TRAV16, TRAJ53)
CALLNSGGSNYKLTF

SEQ ID NO: 587364 - protein, 15 aa, Homo sapiens
  CDR3 for beta chain variable domain of TCR clone 293682 (TRBV20-1, TRBJ2-7)
CSARDRVSGMDEQYF

SEQ ID NO: 587365 - protein, 12 aa, Homo sapiens
  CDR3 for alpha chain variable domain of TCR clone 293683 (TRAV2, TRAJ32)
CAVGGATNKPIF

SEQ ID NO: 587366 - protein, 14 aa, Homo sapiens
  CDR3 for beta chain variable domain of TCR clone 293683 (TRBV19, TRBJ2-1)
CASPTFVLSGEQFF

SEQ ID NO: 587367 - protein, 12 aa, Homo sapiens
  CDR3 for alpha chain variable domain of TCR clone 293684 (TRAV12-2, TRAJ8)
CAVNTGFQKLVF

SEQ ID NO: 587368 - protein, 17 aa, Homo sapiens
  CDR3 for beta chain variable domain of TCR clone 293684 (TRBV7-3, TRBJ2-3)
CASSLMKRMRGADTQYF

SEQ ID NO: 587369 - protein, 13 aa, Homo sapiens
  CDR3 for alpha chain variable domain of TCR clone 293685 (TRAV36/DV7, TRAJ49)
CAGDSNTGNQFYF

SEQ ID NO: 587370 - protein, 15 aa, Homo sapiens
  CDR3 for beta chain variable domain of TCR clone 293685 (TRBV28, TRBJ2-1)
CASSIIAGGRSEQFF

SEQ ID NO: 587371 - protein, 14 aa, Homo sapiens
  CDR3 for alpha chain variable domain of TCR clone 293686 (TRAV1-2, TRAJ16)
CSVNRFSDGQKLLF

SEQ ID NO: 587372 - protein, 14 aa, Homo sapiens
  CDR3 for beta chain variable domain of TCR clone 293686 (TRBV7-3, TRBJ2-1)
CASSLAGGTNEQFF

SEQ ID NO: 587373 - protein, 13 aa, Homo sapiens
  CDR3 for alpha chain variable domain of TCR clone 293687 (TRAV3, TRAJ27)
CAGRALGAGKSTF

SEQ ID NO: 587374 - protein, 13 aa, Homo sapiens
  CDR3 for beta chain variable domain of TCR clone 293687 (TRBV7-9, TRBJ2-3)
CASSHGSTDTQYF

SEQ ID NO: 587375 - protein, 16 aa, Homo sapiens
  CDR3 for alpha chain variable domain of TCR clone 293688 (TRAV3, TRAJ37)
YAVRGKGSGTTGKLIF

SEQ ID NO: 587376 - protein, 16 aa, Homo sapiens
  CDR3 for beta chain variable domain of TCR clone 293688 (TRBV12-5, TRBJ2-5)
CASGPRTSGNQETQYF

SEQ ID NO: 587377 - protein, 14 aa, Homo sapiens
  CDR3 for alpha chain variable domain of TCR clone 293689 (TRAV25, TRAJ22)
CAGRSSGSARQLTF

SEQ ID NO: 587378 - protein, 16 aa, Homo sapiens
  CDR3 for beta chain variable domain of TCR clone 293689 (TRBV4-2, TRBJ1-1)
CASSASPGRAAPEAFF

SEQ ID NO: 587379 - protein, 14 aa, Homo sapiens
  CDR3 for alpha chain variable domain of TCR clone 293690 (TRAV12-1, TRAJ6)
CVVARIRRKLHTYI

SEQ ID NO: 587380 - protein, 15 aa, Homo sapiens
  CDR3 for beta chain variable domain of TCR clone 293690 (TRBV7-3, TRBJ2-1)
CAISLKASEYNERFF

SEQ ID NO: 587381 - protein, 11 aa, Homo sapiens
  CDR3 for alpha chain variable domain of TCR clone 293691 (TRAV21, TRAJ34)
CAHYNTDKLIF

SEQ ID NO: 587382 - protein, 17 aa, Homo sapiens
  CDR3 for beta chain variable domain of TCR clone 293691 (TRBV4-2, TRBJ2-1)
CASSQEGGQGRGNEQFF

SEQ ID NO: 587383 - protein, 11 aa, Homo sapiens
  CDR3 for alpha chain variable domain of TCR clone 293692 (TRAV13-1, TRAJ49)
CACVGGNEFYF

SEQ ID NO: 587384 - protein, 16 aa, Homo sapiens
  CDR3 for beta chain variable domain of TCR clone 293692 (TRBV11-2, TRBJ2-2)
CASSLRTGNLIGELFF

SEQ ID NO: 587385 - protein, 17 aa, Homo sapiens
  CDR3 for alpha chain variable domain of TCR clone 293693 (TRAV3, TRAJ6)
CSVRDGPMAGGSYIPTF

SEQ ID NO: 587386 - protein, 14 aa, Homo sapiens
  CDR3 for beta chain variable domain of TCR clone 293693 (TRBV7-2, TRBJ2-7)
CASSPKTSFYEQYF

SEQ ID NO: 587387 - protein, 13 aa, Homo sapiens
  CDR3 for alpha chain variable domain of TCR clone 293694 (TRAV2, TRAJ40)
YAVVTSGTYKYIF

SEQ ID NO: 587388 - protein, 16 aa, Homo sapiens
  CDR3 for beta chain variable domain of TCR clone 293694 (TRBV7-6, TRBJ2-1)
CASSLNEGPSYNEQFF

SEQ ID NO: 587389 - protein, 14 aa, Homo sapiens
  CDR3 for alpha chain variable domain of TCR clone 293695 (TRAV12-1, TRAJ4)
CVVPLKSGHNKLIF

SEQ ID NO: 587390 - protein, 13 aa, Homo sapiens
  CDR3 for beta chain variable domain of TCR clone 293695 (TRBV27, TRBJ2-7)
CASGRGGAYEQYF

SEQ ID NO: 587391 - protein, 14 aa, Homo sapiens
  CDR3 for alpha chain variable domain of TCR clone 293696 (TRAV1-2, TRAJ16)
CAVNRFSDGQKLLF

SEQ ID NO: 587392 - protein, 15 aa, Homo sapiens
  CDR3 for beta chain variable domain of TCR clone 293696 (TRBV7-2, TRBJ2-3)
CASSLASARTDTQYF

SEQ ID NO: 587393 - protein, 13 aa, Homo sapiens
  CDR3 for alpha chain variable domain of TCR clone 293697 (TRAV20, TRAJ54)
CAVQAGGAQKLVF

SEQ ID NO: 587394 - protein, 15 aa, Homo sapiens
  CDR3 for beta chain variable domain of TCR clone 293697 (TRBV27, TRBJ2-1)
CASSNGGGSSNEQFF

SEQ ID NO: 587395 - protein, 12 aa, Homo sapiens
  CDR3 for alpha chain variable domain of TCR clone 293698 (TRAV13-1, TRAJ20)
CTARQNDYKLSF

SEQ ID NO: 587396 - protein, 14 aa, Homo sapiens
  CDR3 for beta chain variable domain of TCR clone 293698 (TRBV5-1, TRBJ2-7)
CASSFASGVNEQYF

SEQ ID NO: 587397 - protein, 14 aa, Homo sapiens
  CDR3 for alpha chain variable domain of TCR clone 293699 (TRAV1-1, TRAJ34)
CAVSPSYNTDKLIF

SEQ ID NO: 587398 - protein, 16 aa, Homo sapiens
  CDR3 for beta chain variable domain of TCR clone 293699 (TRBV19, TRBJ2-1)
CASSSKGTRAYNEQFF

SEQ ID NO: 587399 - protein, 14 aa, Homo sapiens
  CDR3 for alpha chain variable domain of TCR clone 293700 (TRAV17, TRAJ57)
CATDPQGGSEKLVF

SEQ ID NO: 587400 - protein, 20 aa, Homo sapiens
  CDR3 for beta chain variable domain of TCR clone 293700 (TRBV20-1, TRBJ1-4)
AASTSGVLRQGLLANEKLFF

SEQ ID NO: 587401 - protein, 14 aa, Homo sapiens
  CDR3 for alpha chain variable domain of TCR clone 293701 (TRAV13-2, TRAJ20)
CAESPAKDDYKLSF

SEQ ID NO: 587402 - protein, 14 aa, Homo sapiens
  CDR3 for beta chain variable domain of TCR clone 293701 (TRBV25-1, TRBJ1-1)
CASTHLGGNTEAFF

SEQ ID NO: 587403 - protein, 17 aa, Homo sapiens
  CDR3 for alpha chain variable domain of TCR clone 293702 (TRAV3, TRAJ6)
CAVRDGPRAGGSYIPTF

SEQ ID NO: 587404 - protein, 14 aa, Homo sapiens
  CDR3 for beta chain variable domain of TCR clone 293702 (TRBV7-2, TRBJ2-7)
CASSPETSFYEQYL

SEQ ID NO: 587405 - protein, 12 aa, Homo sapiens
  CDR3 for alpha chain variable domain of TCR clone 293703 (TRAV29/DV5, TRAJ43)
CAAPYNNNDMRF

SEQ ID NO: 587406 - protein, 17 aa, Homo sapiens
  CDR3 for beta chain variable domain of TCR clone 293703 (TRBV6-5, TRBJ2-1)
CASRKTPGREATMSGSS

SEQ ID NO: 587407 - protein, 23 aa, Homo sapiens
  CDR3 for alpha chain variable domain of TCR clone 293704 (TRAV8-6, TRAJ32)
CAVSALWWCYKQAHLWNWHSAFF

SEQ ID NO: 587408 - protein, 13 aa, Homo sapiens
  CDR3 for beta chain variable domain of TCR clone 293704 (TRBV11-2, TRBJ2-5)
CASGHGAKETQYF

SEQ ID NO: 587409 - protein, 13 aa, Homo sapiens
  CDR3 for alpha chain variable domain of TCR clone 293705 (TRAV8-1, TRAJ13)
CAVSKGGYQKVTF

SEQ ID NO: 587410 - protein, 18 aa, Homo sapiens
  CDR3 for beta chain variable domain of TCR clone 293705 (TRBV11-2, TRBJ2-7)
CASSWRTVRTGQSYEQYF

SEQ ID NO: 587411 - protein, 15 aa, Homo sapiens
  CDR3 for alpha chain variable domain of TCR clone 293706 (TRAV16, TRAJ10)
CALRELTGGGNKRTF

SEQ ID NO: 587412 - protein, 14 aa, Homo sapiens
  CDR3 for beta chain variable domain of TCR clone 293706 (TRBV5-5, TRBJ2-7)
CASSLGQGTYEQYF

SEQ ID NO: 587413 - protein, 14 aa, Homo sapiens
  CDR3 for alpha chain variable domain of TCR clone 293707 (TRAV2, TRAJ15)
CCGGLGPGRNSLIF

SEQ ID NO: 587414 - protein, 13 aa, Homo sapiens
  CDR3 for beta chain variable domain of TCR clone 293707 (TRBV10-2, TRBJ2-7)
RASGASGGYEQYF

SEQ ID NO: 587415 - protein, 18 aa, Homo sapiens
  CDR3 for alpha chain variable domain of TCR clone 293708 (TRAV12-3, TRAJ52)
CAMSVGGAGGTSYGKLTF

SEQ ID NO: 587416 - protein, 14 aa, Homo sapiens
  CDR3 for beta chain variable domain of TCR clone 293708 (TRBV7-8, TRBJ2-7)
CASSPGLADYEQYF

SEQ ID NO: 587417 - protein, 17 aa, Homo sapiens
  CDR3 for alpha chain variable domain of TCR clone 293709 (TRAV26-1, TRAJ53)
CIVRVDDSGGSNYKLTF

SEQ ID NO: 587418 - protein, 13 aa, Homo sapiens
  CDR3 for beta chain variable domain of TCR clone 293709 (TRBV12-4, TRBJ1-2)
CASSLRQGKGYTF

SEQ ID NO: 587419 - protein, 14 aa, Homo sapiens
  CDR3 for alpha chain variable domain of TCR clone 293710 (TRAV8-6, TRAJ36)
CAVSGKTGANNTFF

SEQ ID NO: 587420 - protein, 15 aa, Homo sapiens
  CDR3 for beta chain variable domain of TCR clone 293710 (TRBV6-6, TRBJ2-7)
CASSYSYGGSYEQYF

SEQ ID NO: 587421 - protein, 13 aa, Homo sapiens
  CDR3 for alpha chain variable domain of TCR clone 293711 (TRAV13-2, TRAJ13)
CAERPGGYQKVTF

SEQ ID NO: 587422 - protein, 16 aa, Homo sapiens
  CDR3 for beta chain variable domain of TCR clone 293711 (TRBV11-1, TRBJ2-1)
CASSDVAGGSYNEQFF

SEQ ID NO: 587423 - protein, 14 aa, Homo sapiens
  CDR3 for alpha chain variable domain of TCR clone 293712 (TRAV12-3, TRAJ10)
SHLPLTGGGNKLTF

SEQ ID NO: 587424 - protein, 17 aa, Homo sapiens
  CDR3 for beta chain variable domain of TCR clone 293712 (TRBV13, TRBJ2-3)
WASSLSRVAGGRNTQYF

SEQ ID NO: 587425 - protein, 14 aa, Homo sapiens
  CDR3 for alpha chain variable domain of TCR clone 293713 (TRAV13-1, TRAJ40)
CAASMTSGTYKYIS

SEQ ID NO: 587426 - protein, 15 aa, Homo sapiens
  CDR3 for beta chain variable domain of TCR clone 293713 (TRBV7-3, TRBJ2-1)
CASSPTGGGEVEQFF

SEQ ID NO: 587427 - protein, 16 aa, Homo sapiens
  CDR3 for alpha chain variable domain of TCR clone 293714 (TRAV30, TRAJ24)
CGTEIADADSWGKFKF

SEQ ID NO: 587428 - protein, 16 aa, Homo sapiens
  CDR3 for beta chain variable domain of TCR clone 293714 (TRBV7-2, TRBJ2-1)
CASSLRWGRENNEQFF

SEQ ID NO: 587429 - protein, 13 aa, Homo sapiens
  CDR3 for alpha chain variable domain of TCR clone 293715 (TRAV27, TRAJ41)
CAGEGNSGYALSF

SEQ ID NO: 587430 - protein, 15 aa, Homo sapiens
  CDR3 for beta chain variable domain of TCR clone 293715 (TRBV6-3, TRBJ2-7)
CASSSPGTVFCEQYF

SEQ ID NO: 587431 - protein, 16 aa, Homo sapiens
  CDR3 for alpha chain variable domain of TCR clone 293716 (TRAV3, TRAJ37)
CAVRGKGSGNTGKIIF

SEQ ID NO: 587432 - protein, 12 aa, Homo sapiens
  CDR3 for beta chain variable domain of TCR clone 293716 (TRBV12-4, TRBJ2-3)
CASSTLPDTQYF

SEQ ID NO: 587433 - protein, 14 aa, Homo sapiens
  CDR3 for alpha chain variable domain of TCR clone 293717 (TRAV12-2, TRAJ40)
CAVKIPSVTYNYIF

SEQ ID NO: 587434 - protein, 12 aa, Homo sapiens
  CDR3 for beta chain variable domain of TCR clone 293717 (TRBV11-2, TRBJ2-2)
CASSLGGGELFF

SEQ ID NO: 587435 - protein, 14 aa, Homo sapiens
  CDR3 for alpha chain variable domain of TCR clone 293718 (TRAV8-2, TRAJ37)
CVLSISGNTGKLIF

SEQ ID NO: 587436 - protein, 13 aa, Homo sapiens
  CDR3 for beta chain variable domain of TCR clone 293718 (TRBV7-8, TRBJ2-7)
RRVRLTEMGEQYF

SEQ ID NO: 587437 - protein, 14 aa, Homo sapiens
  CDR3 for alpha chain variable domain of TCR clone 293719 (TRAV1-2, TRAJ16)
CAVNRFSDGQKLLF

SEQ ID NO: 587438 - protein, 16 aa, Homo sapiens
  CDR3 for beta chain variable domain of TCR clone 293719 (TRBV27, TRBJ2-5)
CASSSQTSGFQETQYF

SEQ ID NO: 587439 - protein, 14 aa, Homo sapiens
  CDR3 for alpha chain variable domain of TCR clone 293720 (TRAV13-1, TRAJ35)
CSASKGGFGNVLHC

SEQ ID NO: 587440 - protein, 13 aa, Homo sapiens
  CDR3 for beta chain variable domain of TCR clone 293720 (TRBV7-3, TRBJ1-1)
CSSSQDWGAEAFF

SEQ ID NO: 587441 - protein, 14 aa, Homo sapiens
  CDR3 for alpha chain variable domain of TCR clone 293721 (TRAV1-1, TRAJ9)
CAVRGGNGDFKTIF

SEQ ID NO: 587442 - protein, 16 aa, Homo sapiens
  CDR3 for beta chain variable domain of TCR clone 293721 (TRBV4-3, TRBJ2-2)
CASSQDLSGGYGELFF

SEQ ID NO: 587443 - protein, 14 aa, Homo sapiens
  CDR3 for alpha chain variable domain of TCR clone 293722 (TRAV24, TRAJ13)
CASSKAGGLPESYL

SEQ ID NO: 587444 - protein, 18 aa, Homo sapiens
  CDR3 for beta chain variable domain of TCR clone 293722 (TRBV6-6, TRBJ2-3)
CASSYSVADRGPTDTQYF

SEQ ID NO: 587445 - protein, 13 aa, Homo sapiens
  CDR3 for alpha chain variable domain of TCR clone 293723 (TRAV27, TRAJ17)
CAGAATAGNKLTF

SEQ ID NO: 587446 - protein, 15 aa, Homo sapiens
  CDR3 for beta chain variable domain of TCR clone 293723 (TRBV28, TRBJ1-4)
CASSVSGSGLEKLFF

SEQ ID NO: 587447 - protein, 19 aa, Homo sapiens
  CDR3 for alpha chain variable domain of TCR clone 293724 (TRAV2, TRAJ20)
ILQVREADAAVYRDCKLSF

SEQ ID NO: 587448 - protein, 14 aa, Homo sapiens
  CDR3 for beta chain variable domain of TCR clone 293724 (TRBV20-1, TRBJ1-3)
CSASPTGAGNTIYF

SEQ ID NO: 587449 - protein, 16 aa, Homo sapiens
  CDR3 for alpha chain variable domain of TCR clone 293725 (TRAV12-3, TRAJ10)
CAMKKGITGGGNKLTF

SEQ ID NO: 587450 - protein, 12 aa, Homo sapiens
  CDR3 for beta chain variable domain of TCR clone 293725 (TRBV20-1, TRBJ2-7)
CSAITPTKEQYF

SEQ ID NO: 587451 - protein, 14 aa, Homo sapiens
  CDR3 for alpha chain variable domain of TCR clone 293726 (TRAV2, TRAJ37)
CAVDFTNNTGKLIF

SEQ ID NO: 587452 - protein, 15 aa, Homo sapiens
  CDR3 for beta chain variable domain of TCR clone 293726 (TRBV20-1, TRBJ1-1)
CSASRGVTGITEAFF

SEQ ID NO: 587453 - protein, 13 aa, Homo sapiens
  CDR3 for alpha chain variable domain of TCR clone 293727 (TRAV21, TRAJ27)
CAARPSNAGKSTL

SEQ ID NO: 587454 - protein, 20 aa, Homo sapiens
  CDR3 for beta chain variable domain of TCR clone 293727 (TRBV7-8, TRBJ2-2)
CASSHLFPGPTIHITGELFF

SEQ ID NO: 587455 - protein, 14 aa, Homo sapiens
  CDR3 for alpha chain variable domain of TCR clone 293728 (TRAV3, TRAJ21)
CAVRDAYNFNKFYF

SEQ ID NO: 587456 - protein, 15 aa, Homo sapiens
  CDR3 for beta chain variable domain of TCR clone 293728 (TRBV6-5, TRBJ1-5)
CASSYSWYSNQPQHF

SEQ ID NO: 587457 - protein, 12 aa, Homo sapiens
  CDR3 for alpha chain variable domain of TCR clone 293729 (TRAV36/DV7, TRAJ40)
CAVGTGTYKYIF

SEQ ID NO: 587458 - protein, 14 aa, Homo sapiens
  CDR3 for beta chain variable domain of TCR clone 293729 (TRBV7-6, TRBJ2-3)
CASSVAGGTDTQYF

SEQ ID NO: 587459 - protein, 16 aa, Homo sapiens
  CDR3 for alpha chain variable domain of TCR clone 293730 (TRAV27, TRAJ13)
CAGAKSESGGYQKVTF

SEQ ID NO: 587460 - protein, 15 aa, Homo sapiens
  CDR3 for beta chain variable domain of TCR clone 293730 (TRBV29-1, TRBJ2-1)
CSVGRHALFYNEQLF

SEQ ID NO: 587461 - protein, 13 aa, Homo sapiens
  CDR3 for alpha chain variable domain of TCR clone 293731 (TRAV3, TRAJ36)
CAVSLGGANNLFF

SEQ ID NO: 587462 - protein, 15 aa, Homo sapiens
  CDR3 for beta chain variable domain of TCR clone 293731 (TRBV5-1, TRBJ2-7)
CASSLGDFTTYEQYF

SEQ ID NO: 587463 - protein, 12 aa, Homo sapiens
  CDR3 for alpha chain variable domain of TCR clone 293732 (TRAV17, TRAJ20)
CATYSNDYKLSF

SEQ ID NO: 587464 - protein, 15 aa, Homo sapiens
  CDR3 for beta chain variable domain of TCR clone 293732 (TRBV2, TRBJ2-4)
CASSGTNLAKNIQYF

SEQ ID NO: 587465 - protein, 14 aa, Homo sapiens
  CDR3 for alpha chain variable domain of TCR clone 293733 (TRAV1-1, TRAJ28)
CAAPSGAGSYQLTF

SEQ ID NO: 587466 - protein, 12 aa, Homo sapiens
  CDR3 for beta chain variable domain of TCR clone 293733 (TRBV7-3, TRBJ2-1)
CASSFINDEQFF

SEQ ID NO: 587467 - protein, 12 aa, Homo sapiens
  CDR3 for alpha chain variable domain of TCR clone 293734 (TRAV13-2, TRAJ23)
CAERHRGGKLIF

SEQ ID NO: 587468 - protein, 13 aa, Homo sapiens
  CDR3 for beta chain variable domain of TCR clone 293734 (TRBV2, TRBJ1-6)
YADSGSYNSPLHF

SEQ ID NO: 587469 - protein, 14 aa, Homo sapiens
  CDR3 for alpha chain variable domain of TCR clone 293735 (TRAV9-2, TRAJ39)
CALYIYNAGNMRTF

SEQ ID NO: 587470 - protein, 14 aa, Homo sapiens
  CDR3 for beta chain variable domain of TCR clone 293735 (TRBV19, TRBJ2-1)
CASPTFVLSGEQFF

SEQ ID NO: 587471 - protein, 13 aa, Homo sapiens
  CDR3 for alpha chain variable domain of TCR clone 293736 (TRAV16, TRAJ9)
CALSNTGGFKTIF

SEQ ID NO: 587472 - protein, 15 aa, Homo sapiens
  CDR3 for beta chain variable domain of TCR clone 293736 (TRBV28, TRBJ2-4)
CAAGSGTLLMGMQYF

SEQ ID NO: 587473 - protein, 13 aa, Homo sapiens
  CDR3 for alpha chain variable domain of TCR clone 293737 (TRAV8-2, TRAJ13)
CVVSDLRYQKVTF

SEQ ID NO: 587474 - protein, 14 aa, Homo sapiens
  CDR3 for beta chain variable domain of TCR clone 293737 (TRBV25-1, TRBJ1-1)
CASTHLGGNTEACF

SEQ ID NO: 587475 - protein, 14 aa, Homo sapiens
  CDR3 for alpha chain variable domain of TCR clone 293738 (TRAV23/DV6, TRAJ8)
CAASKATGFQNLVF

SEQ ID NO: 587476 - protein, 15 aa, Homo sapiens
  CDR3 for beta chain variable domain of TCR clone 293738 (TRBV28, TRBJ2-3)
CASSPDRQGANTQYF

SEQ ID NO: 587477 - protein, 15 aa, Homo sapiens
  CDR3 for alpha chain variable domain of TCR clone 293739 (TRAV26-1, TRAJ40)
CIDRYATSGTYKYIF

SEQ ID NO: 587478 - protein, 11 aa, Homo sapiens
  CDR3 for beta chain variable domain of TCR clone 293739 (TRBV7-9, TRBJ2-1)
CASSSQNEQFY

SEQ ID NO: 587479 - protein, 16 aa, Homo sapiens
  CDR3 for alpha chain variable domain of TCR clone 293740 (TRAV8-4, TRAJ32)
CAAYMVVLQTSASLEL

SEQ ID NO: 587480 - protein, 14 aa, Homo sapiens
  CDR3 for beta chain variable domain of TCR clone 293740 (TRBV6-3, TRBJ1-1)
CASSYGGQHTEAFF

SEQ ID NO: 587481 - protein, 12 aa, Homo sapiens
  CDR3 for alpha chain variable domain of TCR clone 293741 (TRAV2, TRAJ31)
CAVEDNNARLMF

SEQ ID NO: 587482 - protein, 16 aa, Homo sapiens
  CDR3 for beta chain variable domain of TCR clone 293741 (TRBV10-3, TRBJ2-1)
CALSGVGDGGGGEQFF

SEQ ID NO: 587483 - protein, 13 aa, Homo sapiens
  CDR3 for alpha chain variable domain of TCR clone 293742 (TRAV2, TRAJ35)
CAPRVGFGNVLHC

SEQ ID NO: 587484 - protein, 15 aa, Homo sapiens
  CDR3 for beta chain variable domain of TCR clone 293742 (TRBV6-3, TRBJ2-7)
CASSSPGTVFYEQYL

SEQ ID NO: 587485 - protein, 12 aa, Homo sapiens
  CDR3 for alpha chain variable domain of TCR clone 293743 (TRAV12-1, TRAJ40)
CVVYSGTYKYIF

SEQ ID NO: 587486 - protein, 18 aa, Homo sapiens
  CDR3 for beta chain variable domain of TCR clone 293743 (TRBV11-2, TRBJ2-3)
CSSSLGGAARGAPNTQYF

SEQ ID NO: 587487 - protein, 18 aa, Homo sapiens
  CDR3 for alpha chain variable domain of TCR clone 293744 (TRAV13-1, TRAJ52)
CAASRRSAGGTSYGKLTF

SEQ ID NO: 587488 - protein, 14 aa, Homo sapiens
  CDR3 for beta chain variable domain of TCR clone 293744 (TRBV7-2, TRBJ2-5)
CASSTGGELKTQYF

SEQ ID NO: 587489 - protein, 14 aa, Homo sapiens
  CDR3 for alpha chain variable domain of TCR clone 293745 (TRAV26-1, TRAJ38)
CIADSAGNNRKLLW

SEQ ID NO: 587490 - protein, 13 aa, Homo sapiens
  CDR3 for beta chain variable domain of TCR clone 293745 (TRBV20-1, TRBJ1-1)
CSARGGGNTEAVF

SEQ ID NO: 587491 - protein, 16 aa, Homo sapiens
  CDR3 for alpha chain variable domain of TCR clone 293746 (TRAV12-2, TRAJ40)
CAVIRGGTSGTYKYIF

SEQ ID NO: 587492 - protein, 14 aa, Homo sapiens
  CDR3 for beta chain variable domain of TCR clone 293746 (TRBV20-1, TRBJ2-5)
CIARDGRAGETQYF

SEQ ID NO: 587493 - protein, 14 aa, Homo sapiens
  CDR3 for alpha chain variable domain of TCR clone 293747 (TRAV13-1, TRAJ40)
YAARSTSGTYKYIF

SEQ ID NO: 587494 - protein, 15 aa, Homo sapiens
  CDR3 for beta chain variable domain of TCR clone 293747 (TRBV18, TRBJ1-5)
CASSETGGNNQPQHF

SEQ ID NO: 587495 - protein, 14 aa, Homo sapiens
  CDR3 for alpha chain variable domain of TCR clone 293748 (TRAV2, TRAJ9)
CAVEDRSGGVKTIF

SEQ ID NO: 587496 - protein, 15 aa, Homo sapiens
  CDR3 for beta chain variable domain of TCR clone 293748 (TRBV7-9, TRBJ1-6)
CASSSPGRGNSPLHF

SEQ ID NO: 587497 - protein, 15 aa, Homo sapiens
  CDR3 for alpha chain variable domain of TCR clone 293749 (TRAV34, TRAJ38)
CGGDFTPGNNRKLIW

SEQ ID NO: 587498 - protein, 14 aa, Homo sapiens
  CDR3 for beta chain variable domain of TCR clone 293749 (TRBV11-2, TRBJ2-3)
CASSLGGGANTQYF

SEQ ID NO: 587499 - protein, 13 aa, Homo sapiens
  CDR3 for alpha chain variable domain of TCR clone 293750 (TRAV13-2, TRAJ48)
CAEMDVGNEKLTF

SEQ ID NO: 587500 - protein, 18 aa, Homo sapiens
  CDR3 for beta chain variable domain of TCR clone 293750 (TRBV20-1, TRBJ2-6)
CSAETTPTHGSGANVLTF

SEQ ID NO: 587501 - protein, 13 aa, Homo sapiens
  CDR3 for alpha chain variable domain of TCR clone 293751 (TRAV30, TRAJ31)
CGTETRNNARLMF

SEQ ID NO: 587502 - protein, 16 aa, Homo sapiens
  CDR3 for beta chain variable domain of TCR clone 293751 (TRBV19, TRBJ2-3)
CASSPGAASRTDTQYF

SEQ ID NO: 587503 - protein, 14 aa, Homo sapiens
  CDR3 for alpha chain variable domain of TCR clone 293752 (TRAV1-2, TRAJ16)
CAANRFSDVQKLLF

SEQ ID NO: 587504 - protein, 11 aa, Homo sapiens
  CDR3 for beta chain variable domain of TCR clone 293752 (TRBV4-1, TRBJ2-2)
CASEHTGELFF

SEQ ID NO: 587505 - protein, 20 aa, Homo sapiens
  CDR3 for alpha chain variable domain of TCR clone 293753 (TRAV26-1, TRAJ42)
CCVLLHRQTYYGGSQGNLIF

SEQ ID NO: 587506 - protein, 15 aa, Homo sapiens
  CDR3 for beta chain variable domain of TCR clone 293753 (TRBV11-2, TRBJ1-6)
CASTLRGTGNSPLHF

SEQ ID NO: 587507 - protein, 14 aa, Homo sapiens
  CDR3 for alpha chain variable domain of TCR clone 293754 (TRAV29/DV5, TRAJ4)
CAATVLGGYNKLIF

SEQ ID NO: 587508 - protein, 15 aa, Homo sapiens
  CDR3 for beta chain variable domain of TCR clone 293754 (TRBV4-1, TRBJ1-4)
CASSDTGGTNEKLFF

SEQ ID NO: 587509 - protein, 14 aa, Homo sapiens
  CDR3 for alpha chain variable domain of TCR clone 293755 (TRAV23/DV6, TRAJ6)
FAASRSGGSYIPTF

SEQ ID NO: 587510 - protein, 17 aa, Homo sapiens
  CDR3 for beta chain variable domain of TCR clone 293755 (TRBV20-1, TRBJ2-1)
CSASASGLAGSYNEQFF

SEQ ID NO: 587511 - protein, 11 aa, Homo sapiens
  CDR3 for alpha chain variable domain of TCR clone 293756 (TRAV1-1, TRAJ20)
CAVFNDYKLSF

SEQ ID NO: 587512 - protein, 15 aa, Homo sapiens
  CDR3 for beta chain variable domain of TCR clone 293756 (TRBV20-1, TRBJ2-7)
CSARDRVSGMDEQYF

SEQ ID NO: 587513 - protein, 16 aa, Homo sapiens
  CDR3 for alpha chain variable domain of TCR clone 293757 (TRAV38-1, TRAJ37)
CAFKGDGSSNTGKLSF

SEQ ID NO: 587514 - protein, 13 aa, Homo sapiens
  CDR3 for beta chain variable domain of TCR clone 293757 (TRBV12-4, TRBJ2-5)
CASSLFRRETQYF

SEQ ID NO: 587515 - protein, 15 aa, Homo sapiens
  CDR3 for alpha chain variable domain of TCR clone 293758 (TRAV27, TRAJ38)
FAARRITGNNRKLIW

SEQ ID NO: 587516 - protein, 13 aa, Homo sapiens
  CDR3 for beta chain variable domain of TCR clone 293758 (TRBV12-5, TRBJ2-3)
CASGDRQSDTQYF

SEQ ID NO: 587517 - protein, 14 aa, Homo sapiens
  CDR3 for alpha chain variable domain of TCR clone 293759 (TRAV3, TRAJ33)
CAVRDMGSNYPLIW

SEQ ID NO: 587518 - protein, 17 aa, Homo sapiens
  CDR3 for beta chain variable domain of TCR clone 293759 (TRBV19, TRBJ2-1)
CASSIWSAQPTHNEQFF

SEQ ID NO: 587519 - protein, 14 aa, Homo sapiens
  CDR3 for alpha chain variable domain of TCR clone 293760 (TRAV8-6, TRAJ12)
CSVKAADSSYKLIF

SEQ ID NO: 587520 - protein, 15 aa, Homo sapiens
  CDR3 for beta chain variable domain of TCR clone 293760 (TRBV5-1, TRBJ2-5)
CASSLGLAEQETQYF

SEQ ID NO: 587521 - protein, 16 aa, Homo sapiens
  CDR3 for alpha chain variable domain of TCR clone 293761 (TRAV12-1, TRAJ42)
CVVTPYYGGSQGNLIF

SEQ ID NO: 587522 - protein, 16 aa, Homo sapiens
  CDR3 for beta chain variable domain of TCR clone 293761 (TRBV7-8, TRBJ2-5)
CASSPAGGRNQETQYF

SEQ ID NO: 587523 - protein, 12 aa, Homo sapiens
  CDR3 for alpha chain variable domain of TCR clone 293762 (TRAV13-1, TRAJ49)
CAASPMGNQFYF

SEQ ID NO: 587524 - protein, 13 aa, Homo sapiens
  CDR3 for beta chain variable domain of TCR clone 293762 (TRBV20-1, TRBJ2-2)
CSASAAGTGELCF

SEQ ID NO: 587525 - protein, 14 aa, Homo sapiens
  CDR3 for alpha chain variable domain of TCR clone 293763 (TRAV2, TRAJ9)
CAVDLNTGGFKTIF

SEQ ID NO: 587526 - protein, 14 aa, Homo sapiens
  CDR3 for beta chain variable domain of TCR clone 293763 (TRBV27, TRBJ1-1)
CASSPQGKRAEAFF

SEQ ID NO: 587527 - protein, 11 aa, Homo sapiens
  CDR3 for alpha chain variable domain of TCR clone 293764 (TRAV1-2, TRAJ20)
CAVSNDYKLSF

SEQ ID NO: 587528 - protein, 10 aa, Homo sapiens
  CDR3 for beta chain variable domain of TCR clone 293764 (TRBV5-1, TRBJ2-2)
CASSSQGGTP

SEQ ID NO: 587529 - protein, 14 aa, Homo sapiens
  CDR3 for alpha chain variable domain of TCR clone 293765 (TRAV1-2, TRAJ8)
CAVREGTGFQKLVF

SEQ ID NO: 587530 - protein, 12 aa, Homo sapiens
  CDR3 for beta chain variable domain of TCR clone 293765 (TRBV11-2, TRBJ2-2)
CASSLGGGELFF

SEQ ID NO: 587531 - protein, 16 aa, Homo sapiens
  CDR3 for alpha chain variable domain of TCR clone 293766 (TRAV30, TRAJ24)
CGTEIVDADSWGKFQF

SEQ ID NO: 587532 - protein, 14 aa, Homo sapiens
  CDR3 for beta chain variable domain of TCR clone 293766 (TRBV12-5, TRBJ2-5)
CASGTRTHQGTQYF

SEQ ID NO: 587533 - protein, 18 aa, Homo sapiens
  CDR3 for alpha chain variable domain of TCR clone 293767 (TRAV17, TRAJ45)
LLLCYGRSAGGGADGLTF

SEQ ID NO: 587534 - protein, 15 aa, Homo sapiens
  CDR3 for beta chain variable domain of TCR clone 293767 (TRBV27, TRBJ2-1)
CASSNGGGSSNEQFF

SEQ ID NO: 587535 - protein, 17 aa, Homo sapiens
  CDR3 for alpha chain variable domain of TCR clone 293768 (TRAV3, TRAJ6)
CAVRDGPRAGGSYIPTF

SEQ ID NO: 587536 - protein, 15 aa, Homo sapiens
  CDR3 for beta chain variable domain of TCR clone 293768 (TRBV7-2, TRBJ2-7)
CASSLVSGRASEQYF

SEQ ID NO: 587537 - protein, 14 aa, Homo sapiens
  CDR3 for alpha chain variable domain of TCR clone 293769 (TRAV26-1, TRAJ38)
CIADNAGNNRKLIW

SEQ ID NO: 587538 - protein, 15 aa, Homo sapiens
  CDR3 for beta chain variable domain of TCR clone 293769 (TRBV9, TRBJ1-6)
CASSIAGTGDSPLHF

SEQ ID NO: 587539 - protein, 15 aa, Homo sapiens
  CDR3 for alpha chain variable domain of TCR clone 293770 (TRAV35, TRAJ40)
CAGQLGTSGTYKYIF

SEQ ID NO: 587540 - protein, 14 aa, Homo sapiens
  CDR3 for beta chain variable domain of TCR clone 293770 (TRBV7-3, TRBJ2-1)
CASSLVGGTNEQFF

SEQ ID NO: 587541 - protein, 12 aa, Homo sapiens
  CDR3 for alpha chain variable domain of TCR clone 293771 (TRAV13-1, TRAJ48)
CAANFGNEKLTF

SEQ ID NO: 587542 - protein, 16 aa, Homo sapiens
  CDR3 for beta chain variable domain of TCR clone 293771 (TRBV7-2, TRBJ1-4)
CASSPVGRFDREKLFF

SEQ ID NO: 587543 - protein, 13 aa, Homo sapiens
  CDR3 for alpha chain variable domain of TCR clone 293772 (TRAV17, TRAJ9)
CATDGTGGFKTIF

SEQ ID NO: 587544 - protein, 13 aa, Homo sapiens
  CDR3 for beta chain variable domain of TCR clone 293772 (TRBV5-1, TRBJ1-5)
CASSLAQDQPQHF

SEQ ID NO: 587545 - protein, 11 aa, Homo sapiens
  CDR3 for alpha chain variable domain of TCR clone 293773 (TRAV1-2, TRAJ31)
CAVNNNARLMF

SEQ ID NO: 587546 - protein, 16 aa, Homo sapiens
  CDR3 for beta chain variable domain of TCR clone 293773 (TRBV11-3, TRBJ2-1)
CASSPRLAGVYNEQFF

SEQ ID NO: 587547 - protein, 11 aa, Homo sapiens
  CDR3 for alpha chain variable domain of TCR clone 293774 (TRAV21, TRAJ11)
CAVNAYSTLTF

SEQ ID NO: 587548 - protein, 11 aa, Homo sapiens
  CDR3 for beta chain variable domain of TCR clone 293774 (TRBV19, TRBJ1-1)
CASSIGSEAFF

SEQ ID NO: 587549 - protein, 14 aa, Homo sapiens
  CDR3 for alpha chain variable domain of TCR clone 293775 (TRAV4, TRAJ9)
CLLGSGTGGFKTIF

SEQ ID NO: 587550 - protein, 14 aa, Homo sapiens
  CDR3 for beta chain variable domain of TCR clone 293775 (TRBV7-9, TRBJ2-4)
CASSLAMGGNIQYF

SEQ ID NO: 587551 - protein, 15 aa, Homo sapiens
  CDR3 for alpha chain variable domain of TCR clone 293776 (TRAV13-1, TRAJ5)
CAASKADTGRRTLTF

SEQ ID NO: 587552 - protein, 15 aa, Homo sapiens
  CDR3 for beta chain variable domain of TCR clone 293776 (TRBV19, TRBJ2-1)
CASSMGWNSNNEQFF

SEQ ID NO: 587553 - protein, 23 aa, Homo sapiens
  CDR3 for alpha chain variable domain of TCR clone 293777 (TRAV26-1, TRAJ38)
CIADNAGNNHIQNPDPAVYQLRD

SEQ ID NO: 587554 - protein, 13 aa, Homo sapiens
  CDR3 for beta chain variable domain of TCR clone 293777 (TRBV20-1, TRBJ1-1)
CSARGGWNTEAFF

SEQ ID NO: 587555 - protein, 15 aa, Homo sapiens
  CDR3 for alpha chain variable domain of TCR clone 293778 (TRAV8-2, TRAJ15)
CVVSDRYQAGTALLF

SEQ ID NO: 587556 - protein, 13 aa, Homo sapiens
  CDR3 for beta chain variable domain of TCR clone 293778 (TRBV20-1, TRBJ1-1)
CSAPDRRNTEAFF

SEQ ID NO: 587557 - protein, 20 aa, Homo sapiens
  CDR3 for alpha chain variable domain of TCR clone 293779 (TRAV14/DV4, TRAJ53)
CAMREGYWGSSGGSNYKLTF

SEQ ID NO: 587558 - protein, 11 aa, Homo sapiens
  CDR3 for beta chain variable domain of TCR clone 293779 (TRBV7-9, TRBJ2-3)
CASSGPDTQYF

SEQ ID NO: 587559 - protein, 14 aa, Homo sapiens
  CDR3 for alpha chain variable domain of TCR clone 293780 (TRAV29/DV5, TRAJ45)
CAASEGGGADGLPF

SEQ ID NO: 587560 - protein, 15 aa, Homo sapiens
  CDR3 for beta chain variable domain of TCR clone 293780 (TRBV12-4, TRBJ1-5)
CASTQGTGPLQPQHF

SEQ ID NO: 587561 - protein, 11 aa, Homo sapiens
  CDR3 for alpha chain variable domain of TCR clone 293781 (TRAV39, TRAJ33)
CAVDPWKATIS

SEQ ID NO: 587562 - protein, 16 aa, Homo sapiens
  CDR3 for beta chain variable domain of TCR clone 293781 (TRBV18, TRBJ1-4)
CASSPLVGDRAEKLFF

SEQ ID NO: 587563 - protein, 13 aa, Homo sapiens
  CDR3 for alpha chain variable domain of TCR clone 293782 (TRAV27, TRAJ39)
CAGAQGAGNMLTF

SEQ ID NO: 587564 - protein, 12 aa, Homo sapiens
  CDR3 for beta chain variable domain of TCR clone 293782 (TRBV10-3, TRBJ2-7)
CARDGRLYEQYF

SEQ ID NO: 587565 - protein, 14 aa, Homo sapiens
  CDR3 for alpha chain variable domain of TCR clone 293783 (TRAV20, TRAJ22)
CAVQVSGSAGQLTF

SEQ ID NO: 587566 - protein, 13 aa, Homo sapiens
  CDR3 for beta chain variable domain of TCR clone 293783 (TRBV20-1, TRBJ2-5)
CSAREGGKETQYF

SEQ ID NO: 587567 - protein, 15 aa, Homo sapiens
  CDR3 for alpha chain variable domain of TCR clone 293784 (TRAV16, TRAJ12)
CSKWPLRDSSYKLIF

SEQ ID NO: 587568 - protein, 13 aa, Homo sapiens
  CDR3 for beta chain variable domain of TCR clone 293784 (TRBV11-2, TRBJ2-1)
CASSLDLVNEQFF

SEQ ID NO: 587569 - protein, 17 aa, Homo sapiens
  CDR3 for alpha chain variable domain of TCR clone 293785 (TRAV12-2, TRAJ52)
CAVNPYAGGTSYGKLTF

SEQ ID NO: 587570 - protein, 15 aa, Homo sapiens
  CDR3 for beta chain variable domain of TCR clone 293785 (TRBV11-2, TRBJ2-2)
CASSSDRVNAGELFF

SEQ ID NO: 587571 - protein, 14 aa, Homo sapiens
  CDR3 for alpha chain variable domain of TCR clone 293786 (TRAV17, TRAJ4)
CATAPLGGYHKLIF

SEQ ID NO: 587572 - protein, 13 aa, Homo sapiens
  CDR3 for beta chain variable domain of TCR clone 293786 (TRBV12-4, TRBJ1-3)
CASSLASGNTIYF

SEQ ID NO: 587573 - protein, 15 aa, Homo sapiens
  CDR3 for alpha chain variable domain of TCR clone 293787 (TRAV30, TRAJ32)
CGTEILGGATNRLIF

SEQ ID NO: 587574 - protein, 17 aa, Homo sapiens
  CDR3 for beta chain variable domain of TCR clone 293787 (TRBV5-4, TRBJ2-1)
CASSSAGGRGPYNEQFF

SEQ ID NO: 587575 - protein, 13 aa, Homo sapiens
  CDR3 for alpha chain variable domain of TCR clone 293788 (TRAV12-1, TRAJ22)
CVVYSGSARQLTF

SEQ ID NO: 587576 - protein, 13 aa, Homo sapiens
  CDR3 for beta chain variable domain of TCR clone 293788 (TRBV7-9, TRBJ2-2)
CASSLDPTGELFF

SEQ ID NO: 587577 - protein, 18 aa, Homo sapiens
  CDR3 for alpha chain variable domain of TCR clone 293789 (TRAV29/DV5, TRAJ53)
CSVLLCSKRGGSNYKLTF

SEQ ID NO: 587578 - protein, 17 aa, Homo sapiens
  CDR3 for beta chain variable domain of TCR clone 293789 (TRBV7-8, TRBJ2-6)
CASSAGTRGAGANVLTF

SEQ ID NO: 587579 - protein, 12 aa, Homo sapiens
  CDR3 for alpha chain variable domain of TCR clone 293790 (TRAV12-3, TRAJ10)
CAPAGGGNKLTF

SEQ ID NO: 587580 - protein, 13 aa, Homo sapiens
  CDR3 for beta chain variable domain of TCR clone 293790 (TRBV18, TRBJ2-5)
CASSPGDQETQYF

SEQ ID NO: 587581 - protein, 13 aa, Homo sapiens
  CDR3 for alpha chain variable domain of TCR clone 293791 (TRAV27, TRAJ45)
CRSSGGGADGLTF

SEQ ID NO: 587582 - protein, 14 aa, Homo sapiens
  CDR3 for beta chain variable domain of TCR clone 293791 (TRBV4-1, TRBJ2-2)
CASSQAVNAGELFF

SEQ ID NO: 587583 - protein, 15 aa, Homo sapiens
  CDR3 for alpha chain variable domain of TCR clone 293792 (TRAV3, TRAJ3)
CAVRDRDSSASKIIF

SEQ ID NO: 587584 - protein, 12 aa, Homo sapiens
  CDR3 for beta chain variable domain of TCR clone 293792 (TRBV29-1, TRBJ2-3)
CSVTVGADTQYF

SEQ ID NO: 587585 - protein, 12 aa, Homo sapiens
  CDR3 for alpha chain variable domain of TCR clone 293793 (TRAV12-1, TRAJ15)
CVVNQAGTALIL

SEQ ID NO: 587586 - protein, 14 aa, Homo sapiens
  CDR3 for beta chain variable domain of TCR clone 293793 (TRBV11-3, TRBJ2-1)
CASSLAVSYNEQFF

SEQ ID NO: 587587 - protein, 15 aa, Homo sapiens
  CDR3 for alpha chain variable domain of TCR clone 293794 (TRAV17, TRAJ57)
CATGPSQGGSEKLVF

SEQ ID NO: 587588 - protein, 15 aa, Homo sapiens
  CDR3 for beta chain variable domain of TCR clone 293794 (TRBV6-3, TRBJ2-7)
CASSSPGRVFYEQYF

SEQ ID NO: 587589 - protein, 16 aa, Homo sapiens
  CDR3 for alpha chain variable domain of TCR clone 293795 (TRAV30, TRAJ24)
CGTEIVDSDSWGKFQF

SEQ ID NO: 587590 - protein, 12 aa, Homo sapiens
  CDR3 for beta chain variable domain of TCR clone 293795 (TRBV27, TRBJ2-1)
CASRGFYNEQFF

SEQ ID NO: 587591 - protein, 13 aa, Homo sapiens
  CDR3 for alpha chain variable domain of TCR clone 293796 (TRAV25, TRAJ30)
CAGRLDRDDKIIF

SEQ ID NO: 587592 - protein, 17 aa, Homo sapiens
  CDR3 for beta chain variable domain of TCR clone 293796 (TRBV7-9, TRBJ2-6)
CASSFGAGYSGANVLTF

SEQ ID NO: 587593 - protein, 15 aa, Homo sapiens
  CDR3 for alpha chain variable domain of TCR clone 293797 (TRAV8-2, TRAJ13)
CVVTPPSGGYQKVTF

SEQ ID NO: 587594 - protein, 16 aa, Homo sapiens
  CDR3 for beta chain variable domain of TCR clone 293797 (TRBV7-9, TRBJ2-3)
CASRPVRISSTDTQYF

SEQ ID NO: 587595 - protein, 14 aa, Homo sapiens
  CDR3 for alpha chain variable domain of TCR clone 293798 (TRAV8-3, TRAJ4)
CAVGAAGGYSKLIF

SEQ ID NO: 587596 - protein, 15 aa, Homo sapiens
  CDR3 for beta chain variable domain of TCR clone 293798 (TRBV11-3, TRBJ2-3)
CASLKDGREGDTQYF

SEQ ID NO: 587597 - protein, 14 aa, Homo sapiens
  CDR3 for alpha chain variable domain of TCR clone 293799 (TRAV12-3, TRAJ10)
SHLPLTGGGNKLSF

SEQ ID NO: 587598 - protein, 17 aa, Homo sapiens
  CDR3 for beta chain variable domain of TCR clone 293799 (TRBV28, TRBJ2-3)
CASSPTPAGGRVDTQYF

SEQ ID NO: 587599 - protein, 13 aa, Homo sapiens
  CDR3 for alpha chain variable domain of TCR clone 293800 (TRAV21, TRAJ27)
CAARPGNAGKSTF

SEQ ID NO: 587600 - protein, 15 aa, Homo sapiens
  CDR3 for beta chain variable domain of TCR clone 293800 (TRBV11-3, TRBJ2-7)
CASIPGPASSYEQYF

SEQ ID NO: 587601 - protein, 14 aa, Homo sapiens
  CDR3 for alpha chain variable domain of TCR clone 293801 (TRAV23/DV6, TRAJ22)
CAGSVSGSARQLTF

SEQ ID NO: 587602 - protein, 16 aa, Homo sapiens
  CDR3 for beta chain variable domain of TCR clone 293801 (TRBV19, TRBJ2-2)
CASSFPGQGLAGELFF

SEQ ID NO: 587603 - protein, 10 aa, Homo sapiens
  CDR3 for alpha chain variable domain of TCR clone 293802 (TRAV12-2, TRAJ22)
CAVNETQLTF

SEQ ID NO: 587604 - protein, 15 aa, Homo sapiens
  CDR3 for beta chain variable domain of TCR clone 293802 (TRBV20-1, TRBJ1-1)
CSASRGVTGNTEAFF

SEQ ID NO: 587605 - protein, 11 aa, Homo sapiens
  CDR3 for alpha chain variable domain of TCR clone 293803 (TRAV12-2, TRAJ49)
CALQGGNQFYF

SEQ ID NO: 587606 - protein, 13 aa, Homo sapiens
  CDR3 for beta chain variable domain of TCR clone 293803 (TRBV4-1, TRBJ1-1)
CASSQVGTGEAVF

SEQ ID NO: 587607 - protein, 14 aa, Homo sapiens
  CDR3 for alpha chain variable domain of TCR clone 293804 (TRAV12-3, TRAJ10)
SHLPLTGGGNKLTF

SEQ ID NO: 587608 - protein, 16 aa, Homo sapiens
  CDR3 for beta chain variable domain of TCR clone 293804 (TRBV24-1, TRBJ2-2)
CATSDTGQGGTGELFF

SEQ ID NO: 587609 - protein, 13 aa, Homo sapiens
  CDR3 for alpha chain variable domain of TCR clone 293805 (TRAV17, TRAJ5)
CAPMDTGRRALTF

SEQ ID NO: 587610 - protein, 14 aa, Homo sapiens
  CDR3 for beta chain variable domain of TCR clone 293805 (TRBV7-3, TRBJ2-1)
CASSLAGGTNELFF

SEQ ID NO: 587611 - protein, 14 aa, Homo sapiens
  CDR3 for alpha chain variable domain of TCR clone 293806 (TRAV12-2, TRAJ5)
CAVNRSTGRRALTF

SEQ ID NO: 587612 - protein, 11 aa, Homo sapiens
  CDR3 for beta chain variable domain of TCR clone 293806 (TRBV29-1, TRBJ2-5)
CSEDRTGNQYF

SEQ ID NO: 587613 - protein, 13 aa, Homo sapiens
  CDR3 for alpha chain variable domain of TCR clone 293807 (TRAV35, TRAJ22)
CWAKPGSARQLTF

SEQ ID NO: 587614 - protein, 15 aa, Homo sapiens
  CDR3 for beta chain variable domain of TCR clone 293807 (TRBV12-4, TRBJ2-5)
CASSPPTGLQETQYF

SEQ ID NO: 587615 - protein, 13 aa, Homo sapiens
  CDR3 for alpha chain variable domain of TCR clone 293808 (TRAV8-3, TRAJ28)
CAVGAVGSYQLTF

SEQ ID NO: 587616 - protein, 15 aa, Homo sapiens
  CDR3 for beta chain variable domain of TCR clone 293808 (TRBV5-1, TRBJ2-2)
CASSSQGGNTGELFF

SEQ ID NO: 587617 - protein, 15 aa, Homo sapiens
  CDR3 for alpha chain variable domain of TCR clone 293809 (TRAV12-2, TRAJ53)
CAVNGGGGNNYKLTF

SEQ ID NO: 587618 - protein, 12 aa, Homo sapiens
  CDR3 for beta chain variable domain of TCR clone 293809 (TRBV7-6, TRBJ2-5)
CASSLSQETQYF

SEQ ID NO: 587619 - protein, 10 aa, Homo sapiens
  CDR3 for alpha chain variable domain of TCR clone 293810 (TRAV12-2, TRAJ43)
CAAIVLSMRF

SEQ ID NO: 587620 - protein, 14 aa, Homo sapiens
  CDR3 for beta chain variable domain of TCR clone 293810 (TRBV11-2, TRBJ2-7)
SASSLGNSLYEQYF

SEQ ID NO: 587621 - protein, 12 aa, Homo sapiens
  CDR3 for alpha chain variable domain of TCR clone 293811 (TRAV12-3, TRAJ40)
CAMSSGTYKYIF

SEQ ID NO: 587622 - protein, 15 aa, Homo sapiens
  CDR3 for beta chain variable domain of TCR clone 293811 (TRBV7-9, TRBJ1-1)
CASSLLEQGGTEAFF

SEQ ID NO: 587623 - protein, 13 aa, Homo sapiens
  CDR3 for alpha chain variable domain of TCR clone 293812 (TRAV27, TRAJ53)
CAGQGGSNYKLTF

SEQ ID NO: 587624 - protein, 14 aa, Homo sapiens
  CDR3 for beta chain variable domain of TCR clone 293812 (TRBV20-1, TRBJ2-5)
CSALVPGYQETQYF

SEQ ID NO: 587625 - protein, 13 aa, Homo sapiens
  CDR3 for alpha chain variable domain of TCR clone 293813 (TRAV8-1, TRAJ28)
CAVSGAGSYQLTF

SEQ ID NO: 587626 - protein, 22 aa, Homo sapiens
  CDR3 for beta chain variable domain of TCR clone 293813 (TRBV7-2, TRBJ2-2)
RRTRPCISVPAEDRGRLGSCFF

SEQ ID NO: 587627 - protein, 13 aa, Homo sapiens
  CDR3 for alpha chain variable domain of TCR clone 293814 (TRAV12-1, TRAJ29)
CVVDTSGNTRLVF

SEQ ID NO: 587628 - protein, 14 aa, Homo sapiens
  CDR3 for beta chain variable domain of TCR clone 293814 (TRBV12-5, TRBJ2-5)
CASGSRTHQETQYL

SEQ ID NO: 587629 - protein, 14 aa, Homo sapiens
  CDR3 for alpha chain variable domain of TCR clone 293815 (TRAV12-2, TRAJ9)
CAVNALEGGFKTIF

SEQ ID NO: 587630 - protein, 16 aa, Homo sapiens
  CDR3 for beta chain variable domain of TCR clone 293815 (TRBV19, TRBJ1-6)
CASSVAPVAGNSPLPF

SEQ ID NO: 587631 - protein, 14 aa, Homo sapiens
  CDR3 for alpha chain variable domain of TCR clone 293816 (TRAV1-2, TRAJ16)
CAVNRFSDGQTLLF

SEQ ID NO: 587632 - protein, 17 aa, Homo sapiens
  CDR3 for beta chain variable domain of TCR clone 293816 (TRBV7-9, TRBJ2-1)
CASSLVASYPSYNEQFF

SEQ ID NO: 587633 - protein, 14 aa, Homo sapiens
  CDR3 for alpha chain variable domain of TCR clone 293817 (TRAV1-2, TRAJ16)
CTVNRFSDGQKLLF

SEQ ID NO: 587634 - protein, 14 aa, Homo sapiens
  CDR3 for beta chain variable domain of TCR clone 293817 (TRBV7-9, TRBJ1-1)
CASSLVHQNTEAFF

SEQ ID NO: 587635 - protein, 13 aa, Homo sapiens
  CDR3 for alpha chain variable domain of TCR clone 293818 (TRAV25, TRAJ30)
CAGRVDRDDKIIF

SEQ ID NO: 587636 - protein, 17 aa, Homo sapiens
  CDR3 for beta chain variable domain of TCR clone 293818 (TRBV7-9, TRBJ2-6)
CASSFGAGYSGSNVLTF

SEQ ID NO: 587637 - protein, 13 aa, Homo sapiens
  CDR3 for alpha chain variable domain of TCR clone 293819 (TRAV17, TRAJ9)
CATAITGGFKTIF

SEQ ID NO: 587638 - protein, 16 aa, Homo sapiens
  CDR3 for beta chain variable domain of TCR clone 293819 (TRBV15, TRBJ2-1)
CPTSRNLAGGYNEQFF

SEQ ID NO: 587639 - protein, 14 aa, Homo sapiens
  CDR3 for alpha chain variable domain of TCR clone 293820 (TRAV16, TRAJ15)
CALSFNQAGTALIF

SEQ ID NO: 587640 - protein, 14 aa, Homo sapiens
  CDR3 for beta chain variable domain of TCR clone 293820 (TRBV5-1, TRBJ2-7)
CASSRGESLYEQYF

SEQ ID NO: 587641 - protein, 14 aa, Homo sapiens
  CDR3 for alpha chain variable domain of TCR clone 293821 (TRAV27, TRAJ12)
CAGARMDSSYKLIF

SEQ ID NO: 587642 - protein, 11 aa, Homo sapiens
  CDR3 for beta chain variable domain of TCR clone 293821 (TRBV10-3, TRBJ2-2)
CATKGTGELFF

SEQ ID NO: 587643 - protein, 14 aa, Homo sapiens
  CDR3 for alpha chain variable domain of TCR clone 293822 (TRAV21, TRAJ15)
CAWSLNQAGTALIF

SEQ ID NO: 587644 - protein, 11 aa, Homo sapiens
  CDR3 for beta chain variable domain of TCR clone 293822 (TRBV20-1, TRBJ2-7)
CSARTSYEQYF

SEQ ID NO: 587645 - protein, 17 aa, Homo sapiens
  CDR3 for alpha chain variable domain of TCR clone 293823 (TRAV3, TRAJ12)
CAVRDGGRMDSSYNLIF

SEQ ID NO: 587646 - protein, 13 aa, Homo sapiens
  CDR3 for beta chain variable domain of TCR clone 293823 (TRBV15, TRBJ1-6)
CATSGGLNSPLHF

SEQ ID NO: 587647 - protein, 11 aa, Homo sapiens
  CDR3 for alpha chain variable domain of TCR clone 293824 (TRAV12-2, TRAJ49)
CAVDTGNQFYF

SEQ ID NO: 587648 - protein, 15 aa, Homo sapiens
  CDR3 for beta chain variable domain of TCR clone 293824 (TRBV20-1, TRBJ1-1)
CSARSAATSNTEAFF

SEQ ID NO: 587649 - protein, 13 aa, Homo sapiens
  CDR3 for alpha chain variable domain of TCR clone 293825 (TRAV3, TRAJ13)
CAVRDGGYQKVTF

SEQ ID NO: 587650 - protein, 15 aa, Homo sapiens
  CDR3 for beta chain variable domain of TCR clone 293825 (TRBV7-9, TRBJ2-2)
CASRPEGTSTGELFF

SEQ ID NO: 587651 - protein, 14 aa, Homo sapiens
  CDR3 for alpha chain variable domain of TCR clone 293826 (TRAV1-2, TRAJ16)
CAVNRFSDGQKLLF

SEQ ID NO: 587652 - protein, 15 aa, Homo sapiens
  CDR3 for beta chain variable domain of TCR clone 293826 (TRBV5-4, TRBJ2-1)
CASSPTSGGDVGQFF

SEQ ID NO: 587653 - protein, 15 aa, Homo sapiens
  CDR3 for alpha chain variable domain of TCR clone 293827 (TRAV25, TRAJ41)
CAGPWNSNSGYTLNF

SEQ ID NO: 587654 - protein, 13 aa, Homo sapiens
  CDR3 for beta chain variable domain of TCR clone 293827 (TRBV15, TRBJ1-1)
CATSRGIQARAFF

SEQ ID NO: 587655 - protein, 17 aa, Homo sapiens
  CDR3 for alpha chain variable domain of TCR clone 293828 (TRAV4, )
CLVDIQNPDPAVYQLRD

SEQ ID NO: 587656 - protein, 14 aa, Homo sapiens
  CDR3 for beta chain variable domain of TCR clone 293828 (TRBV4-2, TRBJ2-1)
CASGLDRAYNEQFF

SEQ ID NO: 587657 - protein, 12 aa, Homo sapiens
  CDR3 for alpha chain variable domain of TCR clone 293829 (TRAV23/DV6, TRAJ24)
CAANESWGKLQF

SEQ ID NO: 587658 - protein, 16 aa, Homo sapiens
  CDR3 for beta chain variable domain of TCR clone 293829 (TRBV12-4, TRBJ2-5)
CASSLSTSGGKETQYF

SEQ ID NO: 587659 - protein, 11 aa, Homo sapiens
  CDR3 for alpha chain variable domain of TCR clone 293830 (TRAV2, TRAJ21)
CAVFNFNKFYF

SEQ ID NO: 587660 - protein, 11 aa, Homo sapiens
  CDR3 for beta chain variable domain of TCR clone 293830 (TRBV7-9, TRBJ2-3)
CASSGPDTQYF

SEQ ID NO: 587661 - protein, 11 aa, Homo sapiens
  CDR3 for alpha chain variable domain of TCR clone 293831 (TRAV17, TRAJ43)
CATPRSNDMRF

SEQ ID NO: 587662 - protein, 17 aa, Homo sapiens
  CDR3 for beta chain variable domain of TCR clone 293831 (TRBV11-2, TRBJ2-1)
CASSLYPPGVEYNEQFF

SEQ ID NO: 587663 - protein, 15 aa, Homo sapiens
  CDR3 for alpha chain variable domain of TCR clone 293832 (TRAV17, TRAJ16)
CATALRFSDGQKLLF

SEQ ID NO: 587664 - protein, 14 aa, Homo sapiens
  CDR3 for beta chain variable domain of TCR clone 293832 (TRBV7-2, TRBJ2-7)
CASSPKTSFYEQYF

SEQ ID NO: 587665 - protein, 14 aa, Homo sapiens
  CDR3 for alpha chain variable domain of TCR clone 293833 (TRAV23/DV6, TRAJ5)
CAAKRPAGRRALTF

SEQ ID NO: 587666 - protein, 14 aa, Homo sapiens
  CDR3 for beta chain variable domain of TCR clone 293833 (TRBV7-2, TRBJ2-2)
CASRGQGAAGELFF

SEQ ID NO: 587667 - protein, 15 aa, Homo sapiens
  CDR3 for alpha chain variable domain of TCR clone 293834 (TRAV13-2, TRAJ5)
CAENPHWTGWRALTF

SEQ ID NO: 587668 - protein, 14 aa, Homo sapiens
  CDR3 for beta chain variable domain of TCR clone 293834 (TRBV5-7, TRBJ2-7)
CASSFKGATGEQYF

SEQ ID NO: 587669 - protein, 14 aa, Homo sapiens
  CDR3 for alpha chain variable domain of TCR clone 293835 (TRAV2, TRAJ9)
CAVEDRGGGCKTIF

SEQ ID NO: 587670 - protein, 12 aa, Homo sapiens
  CDR3 for beta chain variable domain of TCR clone 293835 (TRBV11-2, TRBJ2-1)
CASSPGNNEQFF

SEQ ID NO: 587671 - protein, 13 aa, Homo sapiens
  CDR3 for alpha chain variable domain of TCR clone 293836 (TRAV2, TRAJ24)
CAVTTDSWGKLQF

SEQ ID NO: 587672 - protein, 15 aa, Homo sapiens
  CDR3 for beta chain variable domain of TCR clone 293836 (TRBV4-1, TRBJ2-5)
CASSQSRGDQETQYF

SEQ ID NO: 587673 - protein, 16 aa, Homo sapiens
  CDR3 for alpha chain variable domain of TCR clone 293837 (TRAV13-1, TRAJ17)
CAASKGVKAAGNKLTF

SEQ ID NO: 587674 - protein, 15 aa, Homo sapiens
  CDR3 for beta chain variable domain of TCR clone 293837 (TRBV20-1, TRBJ1-5)
CSAREGGYSTQPQHF

SEQ ID NO: 587675 - protein, 14 aa, Homo sapiens
  CDR3 for alpha chain variable domain of TCR clone 293838 (TRAV12-2, TRAJ53)
CAMKGGGSNYKLTF

SEQ ID NO: 587676 - protein, 15 aa, Homo sapiens
  CDR3 for beta chain variable domain of TCR clone 293838 (TRBV11-2, TRBJ2-2)
CARSSDRVNAGELFF

SEQ ID NO: 587677 - protein, 12 aa, Homo sapiens
  CDR3 for alpha chain variable domain of TCR clone 293839 (TRAV12-1, TRAJ5)
CVADTRRRALTF

SEQ ID NO: 587678 - protein, 14 aa, Homo sapiens
  CDR3 for beta chain variable domain of TCR clone 293839 (TRBV2, TRBJ1-1)
CASSEQWGDTEAFF

SEQ ID NO: 587679 - protein, 17 aa, Homo sapiens
  CDR3 for alpha chain variable domain of TCR clone 293840 (TRAV38-1, TRAJ45)
CAFMRSHSGGGADGLTF

SEQ ID NO: 587680 - protein, 14 aa, Homo sapiens
  CDR3 for beta chain variable domain of TCR clone 293840 (TRBV28, TRBJ2-7)
CASSLLRISYEQYF

SEQ ID NO: 587681 - protein, 15 aa, Homo sapiens
  CDR3 for alpha chain variable domain of TCR clone 293841 (TRAV34, TRAJ38)
CGADFTPGNNRKLIW

SEQ ID NO: 587682 - protein, 16 aa, Homo sapiens
  CDR3 for beta chain variable domain of TCR clone 293841 (TRBV6-1, TRBJ2-3)
CASSEVIGQGTDQQYF

SEQ ID NO: 587683 - protein, 17 aa, Homo sapiens
  CDR3 for alpha chain variable domain of TCR clone 293842 (TRAV3, TRAJ6)
CAVRDGPRAGGSYIPTF

SEQ ID NO: 587684 - protein, 13 aa, Homo sapiens
  CDR3 for beta chain variable domain of TCR clone 293842 (TRBV19, TRBJ1-1)
CASSITVESEAFF

SEQ ID NO: 587685 - protein, 17 aa, Homo sapiens
  CDR3 for alpha chain variable domain of TCR clone 293843 (TRAV3, TRAJ12)
CAVRDGGRMDSSYKLIF

SEQ ID NO: 587686 - protein, 10 aa, Homo sapiens
  CDR3 for beta chain variable domain of TCR clone 293843 (TRBV28, TRBJ1-2)
CASSSDRAVF

SEQ ID NO: 587687 - protein, 15 aa, Homo sapiens
  CDR3 for alpha chain variable domain of TCR clone 293844 (TRAV26-1, TRAJ29)
CIVRVEGSGNTPLVF

SEQ ID NO: 587688 - protein, 15 aa, Homo sapiens
  CDR3 for beta chain variable domain of TCR clone 293844 (TRBV7-9, TRBJ1-5)
CARSQGHQPNQPQHF

SEQ ID NO: 587689 - protein, 14 aa, Homo sapiens
  CDR3 for alpha chain variable domain of TCR clone 293845 (TRAV8-1, TRAJ22)
CAAPSSGSARQLPF

SEQ ID NO: 587690 - protein, 14 aa, Homo sapiens
  CDR3 for beta chain variable domain of TCR clone 293845 (TRBV9, TRBJ2-2)
CASSVGQGAGELFF

SEQ ID NO: 587691 - protein, 16 aa, Homo sapiens
  CDR3 for alpha chain variable domain of TCR clone 293846 (TRAV12-3, TRAJ58)
CAMTDTEETSGSRLTF

SEQ ID NO: 587692 - protein, 22 aa, Homo sapiens
  CDR3 for beta chain variable domain of TCR clone 293846 (TRBV23-1, TRBJ2-7)
CASSRRLDSGRGYVGGGYEQYF

SEQ ID NO: 587693 - protein, 14 aa, Homo sapiens
  CDR3 for alpha chain variable domain of TCR clone 293847 (TRAV17, TRAJ37)
CATVPSSNTGKLIF

SEQ ID NO: 587694 - protein, 12 aa, Homo sapiens
  CDR3 for beta chain variable domain of TCR clone 293847 (TRBV7-2, TRBJ2-5)
CASSLYQETQYF

SEQ ID NO: 587695 - protein, 14 aa, Homo sapiens
  CDR3 for alpha chain variable domain of TCR clone 293848 (TRAV23/DV6, TRAJ8)
FAASKNTGFQKLVF

SEQ ID NO: 587696 - protein, 16 aa, Homo sapiens
  CDR3 for beta chain variable domain of TCR clone 293848 (TRBV4-1, TRBJ2-6)
CASSQVGDPGANVLTF

SEQ ID NO: 587697 - protein, 15 aa, Homo sapiens
  CDR3 for alpha chain variable domain of TCR clone 293849 (TRAV25, TRAJ52)
CAGRPGGTSYGKLTF

SEQ ID NO: 587698 - protein, 17 aa, Homo sapiens
  CDR3 for beta chain variable domain of TCR clone 293849 (TRBV7-8, TRBJ2-6)
CASSAGTGGAGVNVPTF

SEQ ID NO: 587699 - protein, 17 aa, Homo sapiens
  CDR3 for alpha chain variable domain of TCR clone 293850 (TRAV26-1, TRAJ53)
CIVRVDDSGGSNYKLTF

SEQ ID NO: 587700 - protein, 16 aa, Homo sapiens
  CDR3 for beta chain variable domain of TCR clone 293850 (TRBV12-4, TRBJ1-5)
CASSRPVGGSNQPQHF

SEQ ID NO: 587701 - protein, 11 aa, Homo sapiens
  CDR3 for alpha chain variable domain of TCR clone 293851 (TRAV12-3, TRAJ6)
CAMSGSYTPTF

SEQ ID NO: 587702 - protein, 14 aa, Homo sapiens
  CDR3 for beta chain variable domain of TCR clone 293851 (TRBV7-2, TRBJ2-3)
CASSSGISTDTQYF

SEQ ID NO: 587703 - protein, 14 aa, Homo sapiens
  CDR3 for alpha chain variable domain of TCR clone 293852 (TRAV12-3, TRAJ58)
CAMSTETSGSRLTF

SEQ ID NO: 587704 - protein, 18 aa, Homo sapiens
  CDR3 for beta chain variable domain of TCR clone 293852 (TRBV28, TRBJ2-6)
CASSLAGRAVSGANVLTF

SEQ ID NO: 587705 - protein, 12 aa, Homo sapiens
  CDR3 for alpha chain variable domain of TCR clone 293853 (TRAV8-3, TRAJ40)
CAVTSGTYKYIF

SEQ ID NO: 587706 - protein, 14 aa, Homo sapiens
  CDR3 for beta chain variable domain of TCR clone 293853 (TRBV7-2, TRBJ1-2)
CASSSTRTGKGYTF

SEQ ID NO: 587707 - protein, 15 aa, Homo sapiens
  CDR3 for alpha chain variable domain of TCR clone 293854 (TRAV22, TRAJ24)
CAVPLSTDSWGKLPF

SEQ ID NO: 587708 - protein, 16 aa, Homo sapiens
  CDR3 for beta chain variable domain of TCR clone 293854 (TRBV28, TRBJ2-7)
CASSFPDRRLTYEQYF

SEQ ID NO: 587709 - protein, 15 aa, Homo sapiens
  CDR3 for alpha chain variable domain of TCR clone 293855 (TRAV17, TRAJ57)
CATGPSQGGSEKLVF

SEQ ID NO: 587710 - protein, 13 aa, Homo sapiens
  CDR3 for beta chain variable domain of TCR clone 293855 (TRBV11-2, TRBJ2-5)
CASGSTGEETQYF

SEQ ID NO: 587711 - protein, 14 aa, Homo sapiens
  CDR3 for alpha chain variable domain of TCR clone 293856 (TRAV2, TRAJ9)
CAVEDRSGGFKTIF

SEQ ID NO: 587712 - protein, 13 aa, Homo sapiens
  CDR3 for beta chain variable domain of TCR clone 293856 (TRBV7-9, TRBJ2-7)
CASSFAGAYEQYF

SEQ ID NO: 587713 - protein, 14 aa, Homo sapiens
  CDR3 for alpha chain variable domain of TCR clone 293857 (TRAV8-3, TRAJ18)
CALTEAQPWGGYTL

SEQ ID NO: 587714 - protein, 20 aa, Homo sapiens
  CDR3 for beta chain variable domain of TCR clone 293857 (TRBV28, TRBJ2-1)
CASTPIGRSPGLAGGNEQFF

SEQ ID NO: 587715 - protein, 17 aa, Homo sapiens
  CDR3 for alpha chain variable domain of TCR clone 293858 (TRAV3, TRAJ38)
CAVRDCLNAGNNRRLIW

SEQ ID NO: 587716 - protein, 14 aa, Homo sapiens
  CDR3 for beta chain variable domain of TCR clone 293858 (TRBV5-5, TRBJ1-5)
CASSGQGVDQPQHF

SEQ ID NO: 587717 - protein, 15 aa, Homo sapiens
  CDR3 for alpha chain variable domain of TCR clone 293859 (TRAV13-1, TRAJ27)
CAARELNTNAGKSTF

SEQ ID NO: 587718 - protein, 16 aa, Homo sapiens
  CDR3 for beta chain variable domain of TCR clone 293859 (TRBV20-1, TRBJ1-2)
CSASMGQGVANYGYTF

SEQ ID NO: 587719 - protein, 17 aa, Homo sapiens
  CDR3 for alpha chain variable domain of TCR clone 293860 (TRAV8-6, TRAJ58)
CAVSSWVGETSGPRLTF

SEQ ID NO: 587720 - protein, 16 aa, Homo sapiens
  CDR3 for beta chain variable domain of TCR clone 293860 (TRBV20-1, TRBJ1-4)
CSAPGQGLLTNEKLFF

SEQ ID NO: 587721 - protein, 23 aa, Homo sapiens
  CDR3 for alpha chain variable domain of TCR clone 293861 (TRAV26-1, TRAJ38)
CIADNAGNNHIQNPDPAVYHLRD

SEQ ID NO: 587722 - protein, 16 aa, Homo sapiens
  CDR3 for beta chain variable domain of TCR clone 293861 (TRBV7-9, TRBJ1-2)
CASSLGFSSGEDGYTF

SEQ ID NO: 587723 - protein, 12 aa, Homo sapiens
  CDR3 for alpha chain variable domain of TCR clone 293862 (TRAV12-1, TRAJ40)
CVVYSGTYRYIF

SEQ ID NO: 587724 - protein, 18 aa, Homo sapiens
  CDR3 for beta chain variable domain of TCR clone 293862 (TRBV11-2, TRBJ2-3)
CASSLGGASRGAHNTQYF

SEQ ID NO: 587725 - protein, 13 aa, Homo sapiens
  CDR3 for alpha chain variable domain of TCR clone 293863 (TRAV12-1, TRAJ35)
CVVRGGVGNVLHC

SEQ ID NO: 587726 - protein, 13 aa, Homo sapiens
  CDR3 for beta chain variable domain of TCR clone 293863 (TRBV19, TRBJ2-1)
CASTNSDVGEQFF

SEQ ID NO: 587727 - protein, 14 aa, Homo sapiens
  CDR3 for alpha chain variable domain of TCR clone 293864 (TRAV1-2, TRAJ6)
CAVRSSGGSYIPTF

SEQ ID NO: 587728 - protein, 15 aa, Homo sapiens
  CDR3 for beta chain variable domain of TCR clone 293864 (TRBV27, TRBJ2-1)
CTSSNGGGSSKEQFF

SEQ ID NO: 587729 - protein, 13 aa, Homo sapiens
  CDR3 for alpha chain variable domain of TCR clone 293865 (TRAV1-1, TRAJ9)
CAAKNTRGFKTIF

SEQ ID NO: 587730 - protein, 14 aa, Homo sapiens
  CDR3 for beta chain variable domain of TCR clone 293865 (TRBV20-1, TRBJ2-1)
CSAQMGGSANEQFF

SEQ ID NO: 587731 - protein, 15 aa, Homo sapiens
  CDR3 for alpha chain variable domain of TCR clone 293866 (TRAV26-1, TRAJ21)
CIVRVPNYNFNKFYF

SEQ ID NO: 587732 - protein, 16 aa, Homo sapiens
  CDR3 for beta chain variable domain of TCR clone 293866 (TRBV7-9, TRBJ2-3)
CDSSLQGNPGTDTQYF

SEQ ID NO: 587733 - protein, 14 aa, Homo sapiens
  CDR3 for alpha chain variable domain of TCR clone 293867 (TRAV2, TRAJ9)
CAVENRSGGFKTIF

SEQ ID NO: 587734 - protein, 14 aa, Homo sapiens
  CDR3 for beta chain variable domain of TCR clone 293867 (TRBV18, TRBJ1-5)
CASSRQQRNQPQHF

SEQ ID NO: 587735 - protein, 12 aa, Homo sapiens
  CDR3 for alpha chain variable domain of TCR clone 293868 (TRAV12-3, TRAJ17)
CAMTLTGKKLTF

SEQ ID NO: 587736 - protein, 13 aa, Homo sapiens
  CDR3 for beta chain variable domain of TCR clone 293868 (TRBV13, TRBJ2-1)
CASILGGRGEQFF

SEQ ID NO: 587737 - protein, 10 aa, Homo sapiens
  CDR3 for alpha chain variable domain of TCR clone 293869 (TRAV8-4, TRAJ43)
CAASADDMRF

SEQ ID NO: 587738 - protein, 15 aa, Homo sapiens
  CDR3 for beta chain variable domain of TCR clone 293869 (TRBV28, TRBJ2-7)
CASSQLGAGGHEQYF

SEQ ID NO: 587739 - protein, 17 aa, Homo sapiens
  CDR3 for alpha chain variable domain of TCR clone 293870 (TRAV8-6, TRAJ58)
CAVSSWVGETSGSRLTL

SEQ ID NO: 587740 - protein, 14 aa, Homo sapiens
  CDR3 for beta chain variable domain of TCR clone 293870 (TRBV4-2, TRBJ2-1)
CASGLGRAYNEQFF

SEQ ID NO: 587741 - protein, 14 aa, Homo sapiens
  CDR3 for alpha chain variable domain of TCR clone 293871 (TRAV26-1, TRAJ26)
CIVRATFLGQNFVF

SEQ ID NO: 587742 - protein, 16 aa, Homo sapiens
  CDR3 for beta chain variable domain of TCR clone 293871 (TRBV12-4, TRBJ2-7)
CARRSTGTGPSYEQYF

SEQ ID NO: 587743 - protein, 13 aa, Homo sapiens
  CDR3 for alpha chain variable domain of TCR clone 293872 (TRAV2, TRAJ40)
CAVVTSGTYKYIF

SEQ ID NO: 587744 - protein, 16 aa, Homo sapiens
  CDR3 for beta chain variable domain of TCR clone 293872 (TRBV29-1, TRBJ2-6)
CSVEDITYSGANLLTF

SEQ ID NO: 587745 - protein, 16 aa, Homo sapiens
  CDR3 for alpha chain variable domain of TCR clone 293873 (TRAV12-2, TRAJ45)
CAVKRNPGGGADGLTF

SEQ ID NO: 587746 - protein, 15 aa, Homo sapiens
  CDR3 for beta chain variable domain of TCR clone 293873 (TRBV13, TRBJ1-5)
CASSRTGRGHQPQHF

SEQ ID NO: 587747 - protein, 14 aa, Homo sapiens
  CDR3 for alpha chain variable domain of TCR clone 293874 (TRAV35, TRAJ22)
CAGLRPGSARQLSF

SEQ ID NO: 587748 - protein, 14 aa, Homo sapiens
  CDR3 for beta chain variable domain of TCR clone 293874 (TRBV11-3, TRBJ2-3)
CASSSGQGPDTQYF

SEQ ID NO: 587749 - protein, 12 aa, Homo sapiens
  CDR3 for alpha chain variable domain of TCR clone 293875 (TRAV13-1, TRAJ20)
CAAASNDYKLSF

SEQ ID NO: 587750 - protein, 14 aa, Homo sapiens
  CDR3 for beta chain variable domain of TCR clone 293875 (TRBV12-4, TRBJ2-1)
WASSPPGGGNQQFF

SEQ ID NO: 587751 - protein, 14 aa, Homo sapiens
  CDR3 for alpha chain variable domain of TCR clone 293876 (TRAV12-3, TRAJ9)
CAMSPNTGGFKTIF

SEQ ID NO: 587752 - protein, 14 aa, Homo sapiens
  CDR3 for beta chain variable domain of TCR clone 293876 (TRBV18, TRBJ2-7)
CASSPRGGAYEQYF

SEQ ID NO: 587753 - protein, 17 aa, Homo sapiens
  CDR3 for alpha chain variable domain of TCR clone 293877 (TRAV3, TRAJ6)
CAVRDGPRAGGGYIPTF

SEQ ID NO: 587754 - protein, 18 aa, Homo sapiens
  CDR3 for beta chain variable domain of TCR clone 293877 (TRBV7-9, TRBJ2-7)
CASSLTTSGSRTWYEQYF

SEQ ID NO: 587755 - protein, 18 aa, Homo sapiens
  CDR3 for alpha chain variable domain of TCR clone 293878 (TRAV17, TRAJ28)
CATDPPRGSGAGSYQLPS

SEQ ID NO: 587756 - protein, 14 aa, Homo sapiens
  CDR3 for beta chain variable domain of TCR clone 293878 (TRBV13, TRBJ2-5)
CASSLDYPQETQYF

SEQ ID NO: 587757 - protein, 13 aa, Homo sapiens
  CDR3 for alpha chain variable domain of TCR clone 293879 (TRAV21, TRAJ27)
CAARPGNAGKSTL

SEQ ID NO: 587758 - protein, 14 aa, Homo sapiens
  CDR3 for beta chain variable domain of TCR clone 293879 (TRBV7-6, TRBJ2-3)
CASSLGTVTGTQYF

SEQ ID NO: 587759 - protein, 14 aa, Homo sapiens
  CDR3 for alpha chain variable domain of TCR clone 293880 (TRAV1-2, TRAJ16)
CAVNRFSDGQKLLF

SEQ ID NO: 587760 - protein, 14 aa, Homo sapiens
  CDR3 for beta chain variable domain of TCR clone 293880 (TRBV7-3, TRBJ1-1)
CASSLKGGNTEGFF

SEQ ID NO: 587761 - protein, 13 aa, Homo sapiens
  CDR3 for alpha chain variable domain of TCR clone 293881 (TRAV8-6, TRAJ5)
CAVLDTGRSALTF

SEQ ID NO: 587762 - protein, 14 aa, Homo sapiens
  CDR3 for beta chain variable domain of TCR clone 293881 (TRBV7-2, TRBJ2-7)
CASSPKTSFYEQYF

SEQ ID NO: 587763 - protein, 14 aa, Homo sapiens
  CDR3 for alpha chain variable domain of TCR clone 293882 (TRAV13-1, TRAJ6)
CAASITGGSYIPTF

SEQ ID NO: 587764 - protein, 15 aa, Homo sapiens
  CDR3 for beta chain variable domain of TCR clone 293882 (TRBV4-1, TRBJ2-7)
CASSQQGQGFDEQYF

SEQ ID NO: 587765 - protein, 15 aa, Homo sapiens
  CDR3 for alpha chain variable domain of TCR clone 293883 (TRAV9-2, TRAJ9)
CALSLTNTGGFKTIF

SEQ ID NO: 587766 - protein, 18 aa, Homo sapiens
  CDR3 for beta chain variable domain of TCR clone 293883 (TRBV7-3, TRBJ2-5)
CASSCRGGGDPVLRARHA

SEQ ID NO: 587767 - protein, 15 aa, Homo sapiens
  CDR3 for alpha chain variable domain of TCR clone 293884 (TRAV13-1, TRAJ52)
CAASAGGTSYGKLTF

SEQ ID NO: 587768 - protein, 11 aa, Homo sapiens
  CDR3 for beta chain variable domain of TCR clone 293884 (TRBV12-4, TRBJ2-1)
CASYSFNEQFF

SEQ ID NO: 587769 - protein, 12 aa, Homo sapiens
  CDR3 for alpha chain variable domain of TCR clone 293885 (TRAV12-3, TRAJ17)
CAMTLTGNKLTF

SEQ ID NO: 587770 - protein, 15 aa, Homo sapiens
  CDR3 for beta chain variable domain of TCR clone 293885 (TRBV12-4, TRBJ2-5)
CASSTPTGLQETQYF

SEQ ID NO: 587771 - protein, 11 aa, Homo sapiens
  CDR3 for alpha chain variable domain of TCR clone 293886 (TRAV1-2, TRAJ20)
CAVANDYTLSF

SEQ ID NO: 587772 - protein, 18 aa, Homo sapiens
  CDR3 for beta chain variable domain of TCR clone 293886 (TRBV20-1, TRBJ2-6)
CSAETTATSGAGANVLTF

SEQ ID NO: 587773 - protein, 15 aa, Homo sapiens
  CDR3 for alpha chain variable domain of TCR clone 293887 (TRAV8-6, TRAJ6)
RAVRDASGGSYIPTF

SEQ ID NO: 587774 - protein, 13 aa, Homo sapiens
  CDR3 for beta chain variable domain of TCR clone 293887 (TRBV2, TRBJ2-2)
CASRAWRTGELFF

SEQ ID NO: 587775 - protein, 12 aa, Homo sapiens
  CDR3 for alpha chain variable domain of TCR clone 293888 (TRAV23/DV6, TRAJ17)
CALGSCRQQANF

SEQ ID NO: 587776 - protein, 14 aa, Homo sapiens
  CDR3 for beta chain variable domain of TCR clone 293888 (TRBV7-2, TRBJ1-2)
CASSQTGSTYGYTF

SEQ ID NO: 587777 - protein, 17 aa, Homo sapiens
  CDR3 for alpha chain variable domain of TCR clone 293889 (TRAV3, TRAJ42)
CAVRDRDYGGSQGNLIF

SEQ ID NO: 587778 - protein, 14 aa, Homo sapiens
  CDR3 for beta chain variable domain of TCR clone 293889 (TRBV19, TRBJ2-5)
CASSMTGQQDTQYF

SEQ ID NO: 587779 - protein, 15 aa, Homo sapiens
  CDR3 for alpha chain variable domain of TCR clone 293890 (TRAV12-2, TRAJ53)
CAVNGGGGSTYKLTF

SEQ ID NO: 587780 - protein, 15 aa, Homo sapiens
  CDR3 for beta chain variable domain of TCR clone 293890 (TRBV7-2, TRBJ2-1)
CASSFSGGIYNEQFF

SEQ ID NO: 587781 - protein, 13 aa, Homo sapiens
  CDR3 for alpha chain variable domain of TCR clone 293891 (TRAV35, TRAJ42)
CAGFPGSQGNLIF

SEQ ID NO: 587782 - protein, 12 aa, Homo sapiens
  CDR3 for beta chain variable domain of TCR clone 293891 (TRBV2, TRBJ1-5)
CAFGEYDQPQHF

SEQ ID NO: 587783 - protein, 12 aa, Homo sapiens
  CDR3 for alpha chain variable domain of TCR clone 293892 (TRAV1-2, TRAJ33)
CAALDSNYQLIW

SEQ ID NO: 587784 - protein, 16 aa, Homo sapiens
  CDR3 for beta chain variable domain of TCR clone 293892 (TRBV6-4, TRBJ1-2)
CASSEAVADPNYGYTF

SEQ ID NO: 587785 - protein, 14 aa, Homo sapiens
  CDR3 for alpha chain variable domain of TCR clone 293893 (TRAV26-1, TRAJ34)
CIVRVAYNTDKLIF

SEQ ID NO: 587786 - protein, 13 aa, Homo sapiens
  CDR3 for beta chain variable domain of TCR clone 293893 (TRBV14, TRBJ1-1)
CASIQEAGTEAFF

SEQ ID NO: 587787 - protein, 19 aa, Homo sapiens
  CDR3 for alpha chain variable domain of TCR clone 293894 (TRAV23/DV6, TRAJ49)
CAATPGQVGRSFQISRTLT

SEQ ID NO: 587788 - protein, 14 aa, Homo sapiens
  CDR3 for beta chain variable domain of TCR clone 293894 (TRBV7-3, TRBJ1-1)
CASSLKGGNTEAFF

SEQ ID NO: 587789 - protein, 11 aa, Homo sapiens
  CDR3 for alpha chain variable domain of TCR clone 293895 (TRAV12-3, TRAJ16)
LTGGDGQKLLF

SEQ ID NO: 587790 - protein, 13 aa, Homo sapiens
  CDR3 for beta chain variable domain of TCR clone 293895 (TRBV12-4, TRBJ1-4)
CASAMGHNERLFF

SEQ ID NO: 587791 - protein, 13 aa, Homo sapiens
  CDR3 for alpha chain variable domain of TCR clone 293896 (TRAV13-1, TRAJ27)
CAASTHQCRQINL

SEQ ID NO: 587792 - protein, 15 aa, Homo sapiens
  CDR3 for beta chain variable domain of TCR clone 293896 (TRBV7-9, TRBJ1-5)
CASSQGHQPNQPQHF

SEQ ID NO: 587793 - protein, 14 aa, Homo sapiens
  CDR3 for alpha chain variable domain of TCR clone 293897 (TRAV13-1, TRAJ13)
GAASRVGGYQKVTF

SEQ ID NO: 587794 - protein, 17 aa, Homo sapiens
  CDR3 for beta chain variable domain of TCR clone 293897 (TRBV15, TRBJ1-5)
CATSRAPPGTRNQPQHF

SEQ ID NO: 587795 - protein, 18 aa, Homo sapiens
  CDR3 for alpha chain variable domain of TCR clone 293898 (TRAV21, TRAJ52)
CAVRPSPAGGTSYGKLTF

SEQ ID NO: 587796 - protein, 17 aa, Homo sapiens
  CDR3 for beta chain variable domain of TCR clone 293898 (TRBV18, TRBJ2-2)
CASSQRSSGQGPGELFF

SEQ ID NO: 587797 - protein, 17 aa, Homo sapiens
  CDR3 for alpha chain variable domain of TCR clone 293899 (TRAV35, TRAJ38)
CAEQLQRNAGNNRKLIW

SEQ ID NO: 587798 - protein, 15 aa, Homo sapiens
  CDR3 for beta chain variable domain of TCR clone 293899 (TRBV27, TRBJ2-1)
CASSNGGGYSNEQFF

SEQ ID NO: 587799 - protein, 14 aa, Homo sapiens
  CDR3 for alpha chain variable domain of TCR clone 293900 (TRAV9-2, TRAJ39)
CALYIYNAGNMLTF

SEQ ID NO: 587800 - protein, 14 aa, Homo sapiens
  CDR3 for beta chain variable domain of TCR clone 293900 (TRBV19, TRBJ2-1)
CASPTFVLSGEQSF

SEQ ID NO: 587801 - protein, 15 aa, Homo sapiens
  CDR3 for alpha chain variable domain of TCR clone 293901 (TRAV26-1, TRAJ29)
CIVRVEGAGNTPLVF

SEQ ID NO: 587802 - protein, 15 aa, Homo sapiens
  CDR3 for beta chain variable domain of TCR clone 293901 (TRBV7-9, TRBJ1-5)
CASSQGHQPNQTQHF

SEQ ID NO: 587803 - protein, 16 aa, Homo sapiens
  CDR3 for alpha chain variable domain of TCR clone 293902 (TRAV20, TRAJ52)
CAVLPDGGTSYGKLTF

SEQ ID NO: 587804 - protein, 14 aa, Homo sapiens
  CDR3 for beta chain variable domain of TCR clone 293902 (TRBV6-3, TRBJ2-1)
CASLHSAYYNEQFF

SEQ ID NO: 587805 - protein, 15 aa, Homo sapiens
  CDR3 for alpha chain variable domain of TCR clone 293903 (TRAV13-1, TRAJ9)
CAASTLNTGGFRTIF

SEQ ID NO: 587806 - protein, 15 aa, Homo sapiens
  CDR3 for beta chain variable domain of TCR clone 293903 (TRBV9, TRBJ1-6)
CASSVAGTGDSPLHF

SEQ ID NO: 587807 - protein, 12 aa, Homo sapiens
  CDR3 for alpha chain variable domain of TCR clone 293904 (TRAV21, TRAJ37)
CAVRGNTGKLIF

SEQ ID NO: 587808 - protein, 14 aa, Homo sapiens
  CDR3 for beta chain variable domain of TCR clone 293904 (TRBV19, TRBJ2-1)
RASEVTGARNEQFF

SEQ ID NO: 587809 - protein, 14 aa, Homo sapiens
  CDR3 for alpha chain variable domain of TCR clone 293905 (TRAV8-2, TRAJ4)
CVVSPSGCYNRLIF

SEQ ID NO: 587810 - protein, 15 aa, Homo sapiens
  CDR3 for beta chain variable domain of TCR clone 293905 (TRBV4-1, TRBJ1-4)
CASSDTGGTNEKLFF

SEQ ID NO: 587811 - protein, 16 aa, Homo sapiens
  CDR3 for alpha chain variable domain of TCR clone 293906 (TRAV2, TRAJ13)
CAARILGVTRKLPLEL

SEQ ID NO: 587812 - protein, 15 aa, Homo sapiens
  CDR3 for beta chain variable domain of TCR clone 293906 (TRBV6-1, TRBJ1-5)
CASSELREGNQPQHF

SEQ ID NO: 587813 - protein, 12 aa, Homo sapiens
  CDR3 for alpha chain variable domain of TCR clone 293907 (TRAV12-3, TRAJ20)
RAMVRGDYKLSF

SEQ ID NO: 587814 - protein, 14 aa, Homo sapiens
  CDR3 for beta chain variable domain of TCR clone 293907 (TRBV5-5, TRBJ1-5)
CASSGQGVDQPQHF

SEQ ID NO: 587815 - protein, 14 aa, Homo sapiens
  CDR3 for alpha chain variable domain of TCR clone 293908 (TRAV35, TRAJ33)
CAGSSQDSNYQLIW

SEQ ID NO: 587816 - protein, 14 aa, Homo sapiens
  CDR3 for beta chain variable domain of TCR clone 293908 (TRBV20-1, TRBJ2-1)
CSAQRGGSANEQFF

SEQ ID NO: 587817 - protein, 12 aa, Homo sapiens
  CDR3 for alpha chain variable domain of TCR clone 293909 (TRAV21, TRAJ31)
CAVSPARVRLMF

SEQ ID NO: 587818 - protein, 14 aa, Homo sapiens
  CDR3 for beta chain variable domain of TCR clone 293909 (TRBV28, TRBJ2-7)
CASSLLRISYEQYF

SEQ ID NO: 587819 - protein, 18 aa, Homo sapiens
  CDR3 for alpha chain variable domain of TCR clone 293910 (TRAV13-1, TRAJ52)
LAASKRSAGGTSYGKLTF

SEQ ID NO: 587820 - protein, 13 aa, Homo sapiens
  CDR3 for beta chain variable domain of TCR clone 293910 (TRBV12-4, TRBJ1-2)
CASSLRQGKGYTF

SEQ ID NO: 587821 - protein, 12 aa, Homo sapiens
  CDR3 for alpha chain variable domain of TCR clone 293911 (TRAV23/DV6, TRAJ16)
CAARGRGQELLF

SEQ ID NO: 587822 - protein, 14 aa, Homo sapiens
  CDR3 for beta chain variable domain of TCR clone 293911 (TRBV4-1, TRBJ1-1)
CASSRSGQSFEAFF

SEQ ID NO: 587823 - protein, 15 aa, Homo sapiens
  CDR3 for alpha chain variable domain of TCR clone 293912 (TRAV21, TRAJ53)
CATLNSGGSNYKLTF

SEQ ID NO: 587824 - protein, 13 aa, Homo sapiens
  CDR3 for beta chain variable domain of TCR clone 293912 (TRBV11-2, TRBJ2-1)
CASSLGLAGGRFF

SEQ ID NO: 587825 - protein, 16 aa, Homo sapiens
  CDR3 for alpha chain variable domain of TCR clone 293913 (TRAV30, TRAJ24)
CGTEIVDADSWGKFQF

SEQ ID NO: 587826 - protein, 16 aa, Homo sapiens
  CDR3 for beta chain variable domain of TCR clone 293913 (TRBV19, TRBJ2-7)
CASSLAPSSTSSTSGR

SEQ ID NO: 587827 - protein, 15 aa, Homo sapiens
  CDR3 for alpha chain variable domain of TCR clone 293914 (TRAV12-1, TRAJ10)
CVVNELTGGRNKLTF

SEQ ID NO: 587828 - protein, 16 aa, Homo sapiens
  CDR3 for beta chain variable domain of TCR clone 293914 (TRBV12-5, TRBJ2-5)
CASGPRTSGNQETQYF

SEQ ID NO: 587829 - protein, 18 aa, Homo sapiens
  CDR3 for alpha chain variable domain of TCR clone 293915 (TRAV26-2, )
CSLLDIQNPDPAVYQLRD

SEQ ID NO: 587830 - protein, 13 aa, Homo sapiens
  CDR3 for beta chain variable domain of TCR clone 293915 (TRBV20-1, TRBJ2-7)
CSADPGATYEQYF

SEQ ID NO: 587831 - protein, 16 aa, Homo sapiens
  CDR3 for alpha chain variable domain of TCR clone 293916 (TRAV21, TRAJ17)
CAVRPGEETAGNKLTV

SEQ ID NO: 587832 - protein, 16 aa, Homo sapiens
  CDR3 for beta chain variable domain of TCR clone 293916 (TRBV2, TRBJ2-7)
CASSDPWTGPSYEQYF

SEQ ID NO: 587833 - protein, 12 aa, Homo sapiens
  CDR3 for alpha chain variable domain of TCR clone 293917 (TRAV1-2, TRAJ33)
CAALDSNYQLIW

SEQ ID NO: 587834 - protein, 15 aa, Homo sapiens
  CDR3 for beta chain variable domain of TCR clone 293917 (TRBV11-2, TRBJ2-1)
CASSLGTSGLNEQFF

SEQ ID NO: 587835 - protein, 16 aa, Homo sapiens
  CDR3 for alpha chain variable domain of TCR clone 293918 (TRAV12-3, TRAJ53)
CAMSPGSGGSNYKLTF

SEQ ID NO: 587836 - protein, 15 aa, Homo sapiens
  CDR3 for beta chain variable domain of TCR clone 293918 (TRBV18, TRBJ2-7)
CASSPSSTGNCEQYF

SEQ ID NO: 587837 - protein, 14 aa, Homo sapiens
  CDR3 for alpha chain variable domain of TCR clone 293919 (TRAV13-1, TRAJ35)
CAASKGGFGNVLHC

SEQ ID NO: 587838 - protein, 13 aa, Homo sapiens
  CDR3 for beta chain variable domain of TCR clone 293919 (TRBV7-3, TRBJ1-1)
CASSQDWGDEDFF

SEQ ID NO: 587839 - protein, 12 aa, Homo sapiens
  CDR3 for alpha chain variable domain of TCR clone 293920 (TRAV2, TRAJ31)
CAVEDNNARLMF

SEQ ID NO: 587840 - protein, 12 aa, Homo sapiens
  CDR3 for beta chain variable domain of TCR clone 293920 (TRBV19, TRBJ2-7)
CASTDRDYEQYF

SEQ ID NO: 587841 - protein, 17 aa, Homo sapiens
  CDR3 for alpha chain variable domain of TCR clone 293921 (TRAV3, TRAJ42)
CAVRARDYGGSQGNLIF

SEQ ID NO: 587842 - protein, 15 aa, Homo sapiens
  CDR3 for beta chain variable domain of TCR clone 293921 (TRBV27, TRBJ2-1)
CASSNGGGSSNEQFF

SEQ ID NO: 587843 - protein, 15 aa, Homo sapiens
  CDR3 for alpha chain variable domain of TCR clone 293922 (TRAV12-3, TRAJ49)
CAMAVTPNTGNQFDF

SEQ ID NO: 587844 - protein, 14 aa, Homo sapiens
  CDR3 for beta chain variable domain of TCR clone 293922 (TRBV7-8, TRBJ2-3)
CASSLEAGTDTQYF

SEQ ID NO: 587845 - protein, 14 aa, Homo sapiens
  CDR3 for alpha chain variable domain of TCR clone 293923 (TRAV12-2, TRAJ13)
RAVKKTGGYQKVTF

SEQ ID NO: 587846 - protein, 17 aa, Homo sapiens
  CDR3 for beta chain variable domain of TCR clone 293923 (TRBV7-2, TRBJ2-3)
CASSLEARGTSTDTQYF

SEQ ID NO: 587847 - protein, 14 aa, Homo sapiens
  CDR3 for alpha chain variable domain of TCR clone 293924 (TRAV2, TRAJ9)
CAVEDRSGGFKTIF

SEQ ID NO: 587848 - protein, 16 aa, Homo sapiens
  CDR3 for beta chain variable domain of TCR clone 293924 (TRBV15, TRBJ2-7)
CATSRDGGIPYYEQYF

SEQ ID NO: 587849 - protein, 14 aa, Homo sapiens
  CDR3 for alpha chain variable domain of TCR clone 293925 (TRAV16, TRAJ33)
SALSAMDSNYQLIW

SEQ ID NO: 587850 - protein, 12 aa, Homo sapiens
  CDR3 for beta chain variable domain of TCR clone 293925 (TRBV5-1, TRBJ1-2)
CASSQDTYGDTF

SEQ ID NO: 587851 - protein, 13 aa, Homo sapiens
  CDR3 for alpha chain variable domain of TCR clone 293926 (TRAV2, TRAJ12)
CAVGADSSHKLIF

SEQ ID NO: 587852 - protein, 13 aa, Homo sapiens
  CDR3 for beta chain variable domain of TCR clone 293926 (TRBV20-1, TRBJ2-1)
CSARSSPRDEQFF

SEQ ID NO: 587853 - protein, 15 aa, Homo sapiens
  CDR3 for alpha chain variable domain of TCR clone 293927 (TRAV13-1, TRAJ50)
CAAKGPETSYDKVIF

SEQ ID NO: 587854 - protein, 18 aa, Homo sapiens
  CDR3 for beta chain variable domain of TCR clone 293927 (TRBV10-3, TRBJ2-1)
CTSVPSVSLRGGVDEQFF

SEQ ID NO: 587855 - protein, 11 aa, Homo sapiens
  CDR3 for alpha chain variable domain of TCR clone 293928 (TRAV23/DV6, TRAJ20)
CAAKDDYKLSF

SEQ ID NO: 587856 - protein, 14 aa, Homo sapiens
  CDR3 for beta chain variable domain of TCR clone 293928 (TRBV19, TRBJ2-1)
CASPTFVLSGEQFF

SEQ ID NO: 587857 - protein, 14 aa, Homo sapiens
  CDR3 for alpha chain variable domain of TCR clone 293929 (TRAV9-2, TRAJ39)
CALYIYNAGNMLTF

SEQ ID NO: 587858 - protein, 14 aa, Homo sapiens
  CDR3 for beta chain variable domain of TCR clone 293929 (TRBV19, TRBJ2-1)
CASSSGRDYNEQFF

SEQ ID NO: 587859 - protein, 12 aa, Homo sapiens
  CDR3 for alpha chain variable domain of TCR clone 293930 (TRAV12-2, TRAJ27)
CAANTNAGKSTF

SEQ ID NO: 587860 - protein, 15 aa, Homo sapiens
  CDR3 for beta chain variable domain of TCR clone 293930 (TRBV20-1, TRBJ2-4)
CSARDLTGGPNIQYF

SEQ ID NO: 587861 - protein, 16 aa, Homo sapiens
  CDR3 for alpha chain variable domain of TCR clone 293931 (TRAV1-2, TRAJ10)
CAVRGVLTGGGNKLTF

SEQ ID NO: 587862 - protein, 14 aa, Homo sapiens
  CDR3 for beta chain variable domain of TCR clone 293931 (TRBV7-8, TRBJ2-7)
CASSLETGSSTSGR

SEQ ID NO: 587863 - protein, 15 aa, Homo sapiens
  CDR3 for alpha chain variable domain of TCR clone 293932 (TRAV8-3, TRAJ11)
CAVGLLNSGYSTLTF

SEQ ID NO: 587864 - protein, 16 aa, Homo sapiens
  CDR3 for beta chain variable domain of TCR clone 293932 (TRBV7-9, TRBJ1-2)
RASSLGFSAGEDGYTF

SEQ ID NO: 587865 - protein, 16 aa, Homo sapiens
  CDR3 for alpha chain variable domain of TCR clone 293933 (TRAV30, TRAJ24)
CGTEIVDADSWGKFQF

SEQ ID NO: 587866 - protein, 18 aa, Homo sapiens
  CDR3 for beta chain variable domain of TCR clone 293933 (TRBV12-5, TRBJ2-5)
CASGSRTPRDPVLQARHA

SEQ ID NO: 587867 - protein, 14 aa, Homo sapiens
  CDR3 for alpha chain variable domain of TCR clone 293934 (TRAV17, TRAJ6)
CATNPAGGSYIPTF

SEQ ID NO: 587868 - protein, 15 aa, Homo sapiens
  CDR3 for beta chain variable domain of TCR clone 293934 (TRBV11-2, TRBJ2-1)
CASSLGTSGLNEQFF

SEQ ID NO: 587869 - protein, 16 aa, Homo sapiens
  CDR3 for alpha chain variable domain of TCR clone 293935 (TRAV2, TRAJ26)
TTVLGPPGDYGKNFVF

SEQ ID NO: 587870 - protein, 13 aa, Homo sapiens
  CDR3 for beta chain variable domain of TCR clone 293935 (TRBV7-9, TRBJ1-2)
CASSLKQNYDYIF

SEQ ID NO: 587871 - protein, 16 aa, Homo sapiens
  CDR3 for alpha chain variable domain of TCR clone 293936 (TRAV26-1, TRAJ52)
CIVSNAGGTSYGKLTF

SEQ ID NO: 587872 - protein, 16 aa, Homo sapiens
  CDR3 for beta chain variable domain of TCR clone 293936 (TRBV5-1, TRBJ2-1)
CASSVEGRGLYNEQFF

SEQ ID NO: 587873 - protein, 13 aa, Homo sapiens
  CDR3 for alpha chain variable domain of TCR clone 293937 (TRAV1-2, TRAJ31)
CAVRGYNNARLMF

SEQ ID NO: 587874 - protein, 14 aa, Homo sapiens
  CDR3 for beta chain variable domain of TCR clone 293937 (TRBV7-9, TRBJ2-1)
CASSPRDSLYEQFF

SEQ ID NO: 587875 - protein, 12 aa, Homo sapiens
  CDR3 for alpha chain variable domain of TCR clone 293938 (TRAV13-1, TRAJ21)
CAAKEGFNKSYF

SEQ ID NO: 587876 - protein, 16 aa, Homo sapiens
  CDR3 for beta chain variable domain of TCR clone 293938 (TRBV18, TRBJ2-3)
CASSPGGLASTDTQYF

SEQ ID NO: 587877 - protein, 14 aa, Homo sapiens
  CDR3 for alpha chain variable domain of TCR clone 293939 (TRAV23/DV6, TRAJ6)
CAASRSGGSYIPTL

SEQ ID NO: 587878 - protein, 15 aa, Homo sapiens
  CDR3 for beta chain variable domain of TCR clone 293939 (TRBV29-1, TRBJ2-1)
CSGRDRKSSYNEQFF

SEQ ID NO: 587879 - protein, 13 aa, Homo sapiens
  CDR3 for alpha chain variable domain of TCR clone 293940 (TRAV3, TRAJ20)
CAVRSLNDYKLSF

SEQ ID NO: 587880 - protein, 11 aa, Homo sapiens
  CDR3 for beta chain variable domain of TCR clone 293940 (TRBV11-3, TRBJ2-1)
CASSLGNEQFF

SEQ ID NO: 587881 - protein, 12 aa, Homo sapiens
  CDR3 for alpha chain variable domain of TCR clone 293941 (TRAV12-1, TRAJ40)
GVLYSGTYKYIF

SEQ ID NO: 587882 - protein, 12 aa, Homo sapiens
  CDR3 for beta chain variable domain of TCR clone 293941 (TRBV7-3, TRBJ2-1)
CASSFINNEQFF

SEQ ID NO: 587883 - protein, 11 aa, Homo sapiens
  CDR3 for alpha chain variable domain of TCR clone 293942 (TRAV2, TRAJ33)
CAVESNYQLIW

SEQ ID NO: 587884 - protein, 13 aa, Homo sapiens
  CDR3 for beta chain variable domain of TCR clone 293942 (TRBV25-1, TRBJ2-6)
CASRGPGANVLTF

SEQ ID NO: 587885 - protein, 11 aa, Homo sapiens
  CDR3 for alpha chain variable domain of TCR clone 293943 (TRAV27, TRAJ47)
SIVEYGNKLVF

SEQ ID NO: 587886 - protein, 18 aa, Homo sapiens
  CDR3 for beta chain variable domain of TCR clone 293943 (TRBV2, TRBJ2-1)
CASTGLAGGPRTYNEQFF

SEQ ID NO: 587887 - protein, 14 aa, Homo sapiens
  CDR3 for alpha chain variable domain of TCR clone 293944 (TRAV14/DV4, TRAJ34)
CAMREVRPHRQAHL

SEQ ID NO: 587888 - protein, 14 aa, Homo sapiens
  CDR3 for beta chain variable domain of TCR clone 293944 (TRBV19, TRBJ2-1)
CASPTFVLSGEQFF

SEQ ID NO: 587889 - protein, 13 aa, Homo sapiens
  CDR3 for alpha chain variable domain of TCR clone 293945 (TRAV22, TRAJ49)
CAVGMYTGNQFYF

SEQ ID NO: 587890 - protein, 19 aa, Homo sapiens
  CDR3 for beta chain variable domain of TCR clone 293945 (TRBV25-1, TRBJ2-2)
CAILVYRVDRGRKTGELFF

SEQ ID NO: 587891 - protein, 13 aa, Homo sapiens
  CDR3 for alpha chain variable domain of TCR clone 293946 (TRAV21, TRAJ27)
CAALNTNAGKSTF

SEQ ID NO: 587892 - protein, 15 aa, Homo sapiens
  CDR3 for beta chain variable domain of TCR clone 293946 (TRBV20-1, TRBJ2-7)
CNARKGLAESYEQYF

SEQ ID NO: 587893 - protein, 14 aa, Homo sapiens
  CDR3 for alpha chain variable domain of TCR clone 293947 (TRAV2, TRAJ9)
CAVEDRSGCFKTNF

SEQ ID NO: 587894 - protein, 13 aa, Homo sapiens
  CDR3 for beta chain variable domain of TCR clone 293947 (TRBV12-4, TRBJ1-5)
CASSPDRAQPQHF

SEQ ID NO: 587895 - protein, 14 aa, Homo sapiens
  CDR3 for alpha chain variable domain of TCR clone 293948 (TRAV20, TRAJ22)
CAVALGGSARQLPF

SEQ ID NO: 587896 - protein, 15 aa, Homo sapiens
  CDR3 for beta chain variable domain of TCR clone 293948 (TRBV7-2, TRBJ1-1)
CASSFAGDRDTEAFF

SEQ ID NO: 587897 - protein, 14 aa, Homo sapiens
  CDR3 for alpha chain variable domain of TCR clone 293949 (TRAV17, TRAJ57)
CATDPQGGSEELVF

SEQ ID NO: 587898 - protein, 14 aa, Homo sapiens
  CDR3 for beta chain variable domain of TCR clone 293949 (TRBV19, TRBJ2-1)
CASPTFVLSGEQFV

SEQ ID NO: 587899 - protein, 12 aa, Homo sapiens
  CDR3 for alpha chain variable domain of TCR clone 293950 (TRAV12-3, TRAJ17)
CAMTLTGNKLTF

SEQ ID NO: 587900 - protein, 18 aa, Homo sapiens
  CDR3 for beta chain variable domain of TCR clone 293950 (TRBV12-4, TRBJ2-2)
CASSLVAGTRGRTGEQFF

SEQ ID NO: 587901 - protein, 15 aa, Homo sapiens
  CDR3 for alpha chain variable domain of TCR clone 293951 (TRAV17, TRAJ22)
CATVAPSGSARQLTF

SEQ ID NO: 587902 - protein, 14 aa, Homo sapiens
  CDR3 for beta chain variable domain of TCR clone 293951 (TRBV4-1, TRBJ2-2)
CASSQAVKTGELFF

SEQ ID NO: 587903 - protein, 17 aa, Homo sapiens
  CDR3 for alpha chain variable domain of TCR clone 293952 (TRAV3, TRAJ28)
CAVREACSGAGSYQLTF

SEQ ID NO: 587904 - protein, 17 aa, Homo sapiens
  CDR3 for beta chain variable domain of TCR clone 293952 (TRBV20-1, TRBJ2-1)
CSASSSGLAGSYNEQFF

SEQ ID NO: 587905 - protein, 12 aa, Homo sapiens
  CDR3 for alpha chain variable domain of TCR clone 293953 (TRAV12-3, TRAJ20)
CAMVRGDYKLSF

SEQ ID NO: 587906 - protein, 14 aa, Homo sapiens
  CDR3 for beta chain variable domain of TCR clone 293953 (TRBV20-1, TRBJ2-7)
CCAISREASYEQYF

SEQ ID NO: 587907 - protein, 15 aa, Homo sapiens
  CDR3 for alpha chain variable domain of TCR clone 293954 (TRAV2, TRAJ9)
CAVAALNTGGFKTIF

SEQ ID NO: 587908 - protein, 15 aa, Homo sapiens
  CDR3 for beta chain variable domain of TCR clone 293954 (TRBV6-6, TRBJ2-7)
CASSYSYGGSYEQYF

SEQ ID NO: 587909 - protein, 14 aa, Homo sapiens
  CDR3 for alpha chain variable domain of TCR clone 293955 (TRAV12-2, TRAJ13)
CTVKKTGGYQKVTF

SEQ ID NO: 587910 - protein, 14 aa, Homo sapiens
  CDR3 for beta chain variable domain of TCR clone 293955 (TRBV5-5, TRBJ2-7)
CASSLGQGTYEQYF

SEQ ID NO: 587911 - protein, 13 aa, Homo sapiens
  CDR3 for alpha chain variable domain of TCR clone 293956 (TRAV12-1, TRAJ9)
CVVLNTGGFKTIF

SEQ ID NO: 587912 - protein, 14 aa, Homo sapiens
  CDR3 for beta chain variable domain of TCR clone 293956 (TRBV20-1, TRBJ1-1)
CSAQTRIGGTEAFF

SEQ ID NO: 587913 - protein, 15 aa, Homo sapiens
  CDR3 for alpha chain variable domain of TCR clone 293957 (TRAV20, TRAJ6)
CAVRLQSGGSYIPTF

SEQ ID NO: 587914 - protein, 14 aa, Homo sapiens
  CDR3 for beta chain variable domain of TCR clone 293957 (TRBV12-4, TRBJ2-7)
CASSASVGWYEQYF

SEQ ID NO: 587915 - protein, 15 aa, Homo sapiens
  CDR3 for alpha chain variable domain of TCR clone 293958 (TRAV27, TRAJ38)
FAARRNAGNNRKLIW

SEQ ID NO: 587916 - protein, 13 aa, Homo sapiens
  CDR3 for beta chain variable domain of TCR clone 293958 (TRBV7-3, TRBJ2-1)
CASSLDSYNEQFF

SEQ ID NO: 587917 - protein, 13 aa, Homo sapiens
  CDR3 for alpha chain variable domain of TCR clone 293959 (TRAV27, TRAJ41)
CAGEGNSGYALNF

SEQ ID NO: 587918 - protein, 15 aa, Homo sapiens
  CDR3 for beta chain variable domain of TCR clone 293959 (TRBV2, TRBJ2-2)
CASSRETVGTGELFF

SEQ ID NO: 587919 - protein, 13 aa, Homo sapiens
  CDR3 for alpha chain variable domain of TCR clone 293960 (TRAV1-1, TRAJ9)
CAAKNTGGFKTIF

SEQ ID NO: 587920 - protein, 15 aa, Homo sapiens
  CDR3 for beta chain variable domain of TCR clone 293960 (TRBV11-2, TRBJ2-2)
CASSSDRVNAGELFF

SEQ ID NO: 587921 - protein, 15 aa, Homo sapiens
  CDR3 for alpha chain variable domain of TCR clone 293961 (TRAV12-3, TRAJ13)
CAMSSGGYQKVTLEL

SEQ ID NO: 587922 - protein, 14 aa, Homo sapiens
  CDR3 for beta chain variable domain of TCR clone 293961 (TRBV2, TRBJ2-1)
CASRTGSSYNEQFF

SEQ ID NO: 587923 - protein, 13 aa, Homo sapiens
  CDR3 for alpha chain variable domain of TCR clone 293962 (TRAV21, TRAJ20)
CAVGVFADYKLSF

SEQ ID NO: 587924 - protein, 14 aa, Homo sapiens
  CDR3 for beta chain variable domain of TCR clone 293962 (TRBV6-3, TRBJ1-1)
CASSYQRRDTEAFF

SEQ ID NO: 587925 - protein, 17 aa, Homo sapiens
  CDR3 for alpha chain variable domain of TCR clone 293963 (TRAV17, TRAJ28)
CATDPRLGGAGSYQLTF

SEQ ID NO: 587926 - protein, 16 aa, Homo sapiens
  CDR3 for beta chain variable domain of TCR clone 293963 (TRBV25-1, TRBJ1-1)
CASSGDRDRGRIEAFF

SEQ ID NO: 587927 - protein, 15 aa, Homo sapiens
  CDR3 for alpha chain variable domain of TCR clone 293964 (TRAV17, TRAJ16)
CATALRFSDGQKLLF

SEQ ID NO: 587928 - protein, 15 aa, Homo sapiens
  CDR3 for beta chain variable domain of TCR clone 293964 (TRBV9, TRBJ2-5)
CASSARLGSGETQYF

SEQ ID NO: 587929 - protein, 16 aa, Homo sapiens
  CDR3 for alpha chain variable domain of TCR clone 293965 (TRAV14/DV4, TRAJ53)
CAMREGGGGSNYKLTF

SEQ ID NO: 587930 - protein, 14 aa, Homo sapiens
  CDR3 for beta chain variable domain of TCR clone 293965 (TRBV19, TRBJ2-1)
CASKDPSSYNEQFF

SEQ ID NO: 587931 - protein, 16 aa, Homo sapiens
  CDR3 for alpha chain variable domain of TCR clone 293966 (TRAV4, TRAJ5)
CLVGPDHGHWQESTYF

SEQ ID NO: 587932 - protein, 17 aa, Homo sapiens
  CDR3 for beta chain variable domain of TCR clone 293966 (TRBV11-2, TRBJ2-1)
CASSLYPPGVEYNEQFF

SEQ ID NO: 587933 - protein, 13 aa, Homo sapiens
  CDR3 for alpha chain variable domain of TCR clone 293967 (TRAV2, TRAJ40)
CTVVTSGTYKYIF

SEQ ID NO: 587934 - protein, 14 aa, Homo sapiens
  CDR3 for beta chain variable domain of TCR clone 293967 (TRBV19, TRBJ2-1)
CASPTFALSGEQFF

SEQ ID NO: 587935 - protein, 16 aa, Homo sapiens
  CDR3 for alpha chain variable domain of TCR clone 293968 (TRAV16, TRAJ4)
CALSRMVSGGYNKLTV

SEQ ID NO: 587936 - protein, 16 aa, Homo sapiens
  CDR3 for beta chain variable domain of TCR clone 293968 (TRBV24-1, TRBJ2-3)
CATRDPGTGATDTQYF

SEQ ID NO: 587937 - protein, 19 aa, Homo sapiens
  CDR3 for alpha chain variable domain of TCR clone 293969 (TRAV12-3, TRAJ41)
LVIRDSQPSDSATPEALNF

SEQ ID NO: 587938 - protein, 15 aa, Homo sapiens
  CDR3 for beta chain variable domain of TCR clone 293969 (TRBV5-1, TRBJ2-7)
CASSLDLTSSYEQYF

SEQ ID NO: 587939 - protein, 12 aa, Homo sapiens
  CDR3 for alpha chain variable domain of TCR clone 293970 (TRAV9-2, TRAJ33)
CALADSNYQLIW

SEQ ID NO: 587940 - protein, 13 aa, Homo sapiens
  CDR3 for beta chain variable domain of TCR clone 293970 (TRBV10-2, TRBJ2-3)
CASSESGDHTQYF

SEQ ID NO: 587941 - protein, 13 aa, Homo sapiens
  CDR3 for alpha chain variable domain of TCR clone 293971 (TRAV16, TRAJ6)
CALSIPSGSRLTF

SEQ ID NO: 587942 - protein, 13 aa, Homo sapiens
  CDR3 for beta chain variable domain of TCR clone 293971 (TRBV5-4, TRBJ2-5)
CASSPVSQETQYF

SEQ ID NO: 587943 - protein, 13 aa, Homo sapiens
  CDR3 for alpha chain variable domain of TCR clone 293972 (TRAV4, TRAJ22)
CLGGSVSARQLTF

SEQ ID NO: 587944 - protein, 15 aa, Homo sapiens
  CDR3 for beta chain variable domain of TCR clone 293972 (TRBV7-9, TRBJ1-6)
CASSSPGRGNSPLHF

SEQ ID NO: 587945 - protein, 14 aa, Homo sapiens
  CDR3 for alpha chain variable domain of TCR clone 293973 (TRAV21, TRAJ37)
CAVKGSSNTGKLIF

SEQ ID NO: 587946 - protein, 12 aa, Homo sapiens
  CDR3 for beta chain variable domain of TCR clone 293973 (TRBV7-2, TRBJ2-5)
CSSQTSVETQYV

SEQ ID NO: 587947 - protein, 14 aa, Homo sapiens
  CDR3 for alpha chain variable domain of TCR clone 293974 (TRAV12-3, TRAJ10)
SHLPMTGGGNKLTF

SEQ ID NO: 587948 - protein, 15 aa, Homo sapiens
  CDR3 for beta chain variable domain of TCR clone 293974 (TRBV20-1, TRBJ2-7)
CSARDRVSGMDEQYF

SEQ ID NO: 587949 - protein, 13 aa, Homo sapiens
  CDR3 for alpha chain variable domain of TCR clone 293975 (TRAV21, TRAJ27)
CAARPGNAGKSTF

SEQ ID NO: 587950 - protein, 15 aa, Homo sapiens
  CDR3 for beta chain variable domain of TCR clone 293975 (TRBV2, TRBJ2-3)
SASSDAGGPPDTQYF

SEQ ID NO: 587951 - protein, 22 aa, Homo sapiens
  CDR3 for alpha chain variable domain of TCR clone 293976 (TRAV8-2, TRAJ45)
HLTKPSAHRSDAAEYSADGLTF

SEQ ID NO: 587952 - protein, 13 aa, Homo sapiens
  CDR3 for beta chain variable domain of TCR clone 293976 (TRBV7-3, TRBJ2-1)
CASSPVAYNEQFF

SEQ ID NO: 587953 - protein, 14 aa, Homo sapiens
  CDR3 for alpha chain variable domain of TCR clone 293977 (TRAV16, TRAJ54)
CALSGVQGAQKLVF

SEQ ID NO: 587954 - protein, 15 aa, Homo sapiens
  CDR3 for beta chain variable domain of TCR clone 293977 (TRBV18, TRBJ2-2)
CAGSTSGLHTGELFF

SEQ ID NO: 587955 - protein, 14 aa, Homo sapiens
  CDR3 for alpha chain variable domain of TCR clone 293978 (TRAV1-2, TRAJ16)
SAVNRFSDGQKLLF

SEQ ID NO: 587956 - protein, 15 aa, Homo sapiens
  CDR3 for beta chain variable domain of TCR clone 293978 (TRBV27, TRBJ1-1)
CASSPYADPYTEAFF

SEQ ID NO: 587957 - protein, 16 aa, Homo sapiens
  CDR3 for alpha chain variable domain of TCR clone 293979 (TRAV30, TRAJ24)
CGTEIVDADSWGKFQF

SEQ ID NO: 587958 - protein, 16 aa, Homo sapiens
  CDR3 for beta chain variable domain of TCR clone 293979 (TRBV18, TRBJ2-7)
CASSPLQSGTHYEQYF

SEQ ID NO: 587959 - protein, 18 aa, Homo sapiens
  CDR3 for alpha chain variable domain of TCR clone 293980 (TRAV12-3, TRAJ52)
CAMSVGGAGGTSYGELTF

SEQ ID NO: 587960 - protein, 18 aa, Homo sapiens
  CDR3 for beta chain variable domain of TCR clone 293980 (TRBV11-2, TRBJ2-3)
CASSLGGASRGAPNTQYF

SEQ ID NO: 587961 - protein, 16 aa, Homo sapiens
  CDR3 for alpha chain variable domain of TCR clone 293981 (TRAV30, TRAJ24)
CGTEIVDADSGGKFQF

SEQ ID NO: 587962 - protein, 13 aa, Homo sapiens
  CDR3 for beta chain variable domain of TCR clone 293981 (TRBV10-3, TRBJ1-2)
CAISERDSYGYTF

SEQ ID NO: 587963 - protein, 20 aa, Homo sapiens
  CDR3 for alpha chain variable domain of TCR clone 293982 (TRAV27, TRAJ38)
CAARRNAGNNHIQNPDPAVY

SEQ ID NO: 587964 - protein, 13 aa, Homo sapiens
  CDR3 for beta chain variable domain of TCR clone 293982 (TRBV12-5, TRBJ2-3)
CASGDRQSDTQYF

SEQ ID NO: 587965 - protein, 14 aa, Homo sapiens
  CDR3 for alpha chain variable domain of TCR clone 293983 (TRAV20, TRAJ32)
CCGRYGGATNKLIF

SEQ ID NO: 587966 - protein, 16 aa, Homo sapiens
  CDR3 for beta chain variable domain of TCR clone 293983 (TRBV19, TRBJ2-2)
CASRCPGTGATGELFF

SEQ ID NO: 587967 - protein, 18 aa, Homo sapiens
  CDR3 for alpha chain variable domain of TCR clone 293984 (TRAV26-1, TRAJ23)
CIVRVGLEVWNEGGKLIF

SEQ ID NO: 587968 - protein, 16 aa, Homo sapiens
  CDR3 for beta chain variable domain of TCR clone 293984 (TRBV12-4, TRBJ2-5)
CASSFFVRGRQETQYF

SEQ ID NO: 587969 - protein, 12 aa, Homo sapiens
  CDR3 for alpha chain variable domain of TCR clone 293985 (TRAV23/DV6, TRAJ58)
CAARLLRGETRA

SEQ ID NO: 587970 - protein, 14 aa, Homo sapiens
  CDR3 for beta chain variable domain of TCR clone 293985 (TRBV2, TRBJ2-7)
CASSLTSGGYEQYF

SEQ ID NO: 587971 - protein, 16 aa, Homo sapiens
  CDR3 for alpha chain variable domain of TCR clone 293986 (TRAV12-3, TRAJ53)
CGMSPGSGGCNYKPTF

SEQ ID NO: 587972 - protein, 11 aa, Homo sapiens
  CDR3 for beta chain variable domain of TCR clone 293986 (TRBV29-1, TRBJ2-5)
CSEDRTGTQYF

SEQ ID NO: 587973 - protein, 15 aa, Homo sapiens
  CDR3 for alpha chain variable domain of TCR clone 293987 (TRAV3, TRAJ3)
CAVRDWHSSASKIIF

SEQ ID NO: 587974 - protein, 14 aa, Homo sapiens
  CDR3 for beta chain variable domain of TCR clone 293987 (TRBV28, TRBJ1-4)
CASSFGTFDEKLFF

SEQ ID NO: 587975 - protein, 14 aa, Homo sapiens
  CDR3 for alpha chain variable domain of TCR clone 293988 (TRAV1-2, TRAJ16)
CAVNRFSAGQKLLF

SEQ ID NO: 587976 - protein, 16 aa, Homo sapiens
  CDR3 for beta chain variable domain of TCR clone 293988 (TRBV7-2, TRBJ1-2)
CASSSNQDRRGHGYTF

SEQ ID NO: 587977 - protein, 15 aa, Homo sapiens
  CDR3 for alpha chain variable domain of TCR clone 293989 (TRAV3, TRAJ5)
CAVRDRKTGRRALTF

SEQ ID NO: 587978 - protein, 16 aa, Homo sapiens
  CDR3 for beta chain variable domain of TCR clone 293989 (TRBV7-9, TRBJ1-2)
CASSLGFSSGEDGYTF

SEQ ID NO: 587979 - protein, 14 aa, Homo sapiens
  CDR3 for alpha chain variable domain of TCR clone 293990 (TRAV23/DV6, TRAJ13)
CAAMYSGGYQQVTF

SEQ ID NO: 587980 - protein, 16 aa, Homo sapiens
  CDR3 for beta chain variable domain of TCR clone 293990 (TRBV9, TRBJ2-1)
CASSALGGIGNNEQFF

SEQ ID NO: 587981 - protein, 14 aa, Homo sapiens
  CDR3 for alpha chain variable domain of TCR clone 293991 (TRAV8-4, TRAJ43)
CAVSDPRNNNDMRF

SEQ ID NO: 587982 - protein, 20 aa, Homo sapiens
  CDR3 for beta chain variable domain of TCR clone 293991 (TRBV7-8, TRBJ2-2)
CASSHLFPGPTIYITGELFF

SEQ ID NO: 587983 - protein, 16 aa, Homo sapiens
  CDR3 for alpha chain variable domain of TCR clone 293992 (TRAV3, TRAJ10)
CAVRDMRAGGGKKLTF

SEQ ID NO: 587984 - protein, 16 aa, Homo sapiens
  CDR3 for beta chain variable domain of TCR clone 293992 (TRBV4-3, TRBJ2-1)
CASSPALDRGVNEQFF

SEQ ID NO: 587985 - protein, 14 aa, Homo sapiens
  CDR3 for alpha chain variable domain of TCR clone 293993 (TRAV12-1, TRAJ37)
CVVTGSSNTGKLIF

SEQ ID NO: 587986 - protein, 16 aa, Homo sapiens
  CDR3 for beta chain variable domain of TCR clone 293993 (TRBV13, TRBJ2-2)
CASSPRTGEHTGELFF

SEQ ID NO: 587987 - protein, 16 aa, Homo sapiens
  CDR3 for alpha chain variable domain of TCR clone 293994 (TRAV27, TRAJ53)
CAAPEGSGGSNYKLAF

SEQ ID NO: 587988 - protein, 15 aa, Homo sapiens
  CDR3 for beta chain variable domain of TCR clone 293994 (TRBV20-1, TRBJ1-1)
CSASRGVTGNTEAFF

SEQ ID NO: 587989 - protein, 14 aa, Homo sapiens
  CDR3 for alpha chain variable domain of TCR clone 293995 (TRAV1-2, TRAJ16)
CSVNRFSDGQNLLF

SEQ ID NO: 587990 - protein, 15 aa, Homo sapiens
  CDR3 for beta chain variable domain of TCR clone 293995 (TRBV9, TRBJ1-6)
CASSVAGTGDSPLHF

SEQ ID NO: 587991 - protein, 13 aa, Homo sapiens
  CDR3 for alpha chain variable domain of TCR clone 293996 (TRAV3, TRAJ21)
CAVREPDFNKFYF

SEQ ID NO: 587992 - protein, 13 aa, Homo sapiens
  CDR3 for beta chain variable domain of TCR clone 293996 (TRBV12-4, TRBJ1-2)
CASSYRVNYGYTC

SEQ ID NO: 587993 - protein, 11 aa, Homo sapiens
  CDR3 for alpha chain variable domain of TCR clone 293997 (TRAV1-2, TRAJ20)
CAVANDYKLSF

SEQ ID NO: 587994 - protein, 14 aa, Homo sapiens
  CDR3 for beta chain variable domain of TCR clone 293997 (TRBV7-9, TRBJ1-1)
CASTPLQSYTGAFF

SEQ ID NO: 587995 - protein, 17 aa, Homo sapiens
  CDR3 for alpha chain variable domain of TCR clone 293998 (TRAV26-1, TRAJ37)
CIVRVITVSSNTGQLIF

SEQ ID NO: 587996 - protein, 13 aa, Homo sapiens
  CDR3 for beta chain variable domain of TCR clone 293998 (TRBV2, TRBJ2-7)
CASSVGGSGEQYF

SEQ ID NO: 587997 - protein, 15 aa, Homo sapiens
  CDR3 for alpha chain variable domain of TCR clone 293999 (TRAV21, TRAJ37)
CAVRPTLSNTGKLIF

SEQ ID NO: 587998 - protein, 13 aa, Homo sapiens
  CDR3 for beta chain variable domain of TCR clone 293999 (TRBV12-5, TRBJ2-3)
CASGERQSDTQYF

SEQ ID NO: 587999 - protein, 14 aa, Homo sapiens
  CDR3 for alpha chain variable domain of TCR clone 294000 (TRAV14/DV4, TRAJ32)
SNVLPLTPTNKLIF

SEQ ID NO: 588000 - protein, 14 aa, Homo sapiens
  CDR3 for beta chain variable domain of TCR clone 294000 (TRBV18, TRBJ2-7)
CASSPRGGSYEQYF

SEQ ID NO: 588001 - protein, 14 aa, Homo sapiens
  CDR3 for alpha chain variable domain of TCR clone 294001 (TRAV17, TRAJ57)
CATDPQGGSEKLVF

SEQ ID NO: 588002 - protein, 18 aa, Homo sapiens
  CDR3 for beta chain variable domain of TCR clone 294001 (TRBV6-6, TRBJ1-3)
CASSYSKWDSISGKTIYF

SEQ ID NO: 588003 - protein, 13 aa, Homo sapiens
  CDR3 for alpha chain variable domain of TCR clone 294002 (TRAV9-2, TRAJ39)
CALYIYNAATCSP

SEQ ID NO: 588004 - protein, 14 aa, Homo sapiens
  CDR3 for beta chain variable domain of TCR clone 294002 (TRBV6-1, TRBJ1-3)
CASVQGGGGNTIYF

SEQ ID NO: 588005 - protein, 12 aa, Homo sapiens
  CDR3 for alpha chain variable domain of TCR clone 294003 (TRAV12-3, TRAJ34)
CAMGYNTDKLIF

SEQ ID NO: 588006 - protein, 14 aa, Homo sapiens
  CDR3 for beta chain variable domain of TCR clone 294003 (TRBV4-1, TRBJ2-2)
CARSQAVNTGELFF

SEQ ID NO: 588007 - protein, 16 aa, Homo sapiens
  CDR3 for alpha chain variable domain of TCR clone 294004 (TRAV35, TRAJ28)
CAGQRYSGAGSYQLTF

SEQ ID NO: 588008 - protein, 13 aa, Homo sapiens
  CDR3 for beta chain variable domain of TCR clone 294004 (TRBV19, TRBJ1-2)
CASCQGQVYGYTF

SEQ ID NO: 588009 - protein, 13 aa, Homo sapiens
  CDR3 for alpha chain variable domain of TCR clone 294005 (TRAV2, TRAJ40)
CAVVTSGTYKYIF

SEQ ID NO: 588010 - protein, 16 aa, Homo sapiens
  CDR3 for beta chain variable domain of TCR clone 294005 (TRBV7-3, TRBJ2-2)
CTSSLKRGTLSGELFF

SEQ ID NO: 588011 - protein, 15 aa, Homo sapiens
  CDR3 for alpha chain variable domain of TCR clone 294006 (TRAV26-1, TRAJ44)
CIARVPFGTASKLTF

SEQ ID NO: 588012 - protein, 15 aa, Homo sapiens
  CDR3 for beta chain variable domain of TCR clone 294006 (TRBV20-1, TRBJ2-7)
CSARDRVSGMDEQYF

SEQ ID NO: 588013 - protein, 11 aa, Homo sapiens
  CDR3 for alpha chain variable domain of TCR clone 294007 (TRAV2, TRAJ33)
CAVDSNYQLIW

SEQ ID NO: 588014 - protein, 13 aa, Homo sapiens
  CDR3 for beta chain variable domain of TCR clone 294007 (TRBV18, TRBJ1-1)
CASSGGRNTEAFF

SEQ ID NO: 588015 - protein, 12 aa, Homo sapiens
  CDR3 for alpha chain variable domain of TCR clone 294008 (TRAV14/DV4, TRAJ9)
CAMNPGGFKTIF

SEQ ID NO: 588016 - protein, 16 aa, Homo sapiens
  CDR3 for beta chain variable domain of TCR clone 294008 (TRBV28, TRBJ2-5)
CASSFPPAGGWETQYF

SEQ ID NO: 588017 - protein, 13 aa, Homo sapiens
  CDR3 for alpha chain variable domain of TCR clone 294009 (TRAV23/DV6, TRAJ47)
GAASIRNGIWEQT

SEQ ID NO: 588018 - protein, 13 aa, Homo sapiens
  CDR3 for beta chain variable domain of TCR clone 294009 (TRBV19, TRBJ1-2)
CASSQGQVYGYTF

SEQ ID NO: 588019 - protein, 14 aa, Homo sapiens
  CDR3 for alpha chain variable domain of TCR clone 294010 (TRAV12-2, TRAJ40)
CAVKIPSGTYKSIF

SEQ ID NO: 588020 - protein, 14 aa, Homo sapiens
  CDR3 for beta chain variable domain of TCR clone 294010 (TRBV20-1, TRBJ1-1)
CSAQIRIGGTEAFF

SEQ ID NO: 588021 - protein, 13 aa, Homo sapiens
  CDR3 for alpha chain variable domain of TCR clone 294011 (TRAV21, TRAJ57)
CAVTQGGSEKLVF

SEQ ID NO: 588022 - protein, 12 aa, Homo sapiens
  CDR3 for beta chain variable domain of TCR clone 294011 (TRBV12-4, TRBJ2-5)
CASSSAQETQYF

SEQ ID NO: 588023 - protein, 16 aa, Homo sapiens
  CDR3 for alpha chain variable domain of TCR clone 294012 (TRAV23/DV6, TRAJ9)
CAASIGGNTGGFKTII

SEQ ID NO: 588024 - protein, 13 aa, Homo sapiens
  CDR3 for beta chain variable domain of TCR clone 294012 (TRBV7-9, TRBJ1-2)
CASSLKQNYGYTF

SEQ ID NO: 588025 - protein, 12 aa, Homo sapiens
  CDR3 for alpha chain variable domain of TCR clone 294013 (TRAV12-1, )
CVVNSWISRALT

SEQ ID NO: 588026 - protein, 15 aa, Homo sapiens
  CDR3 for beta chain variable domain of TCR clone 294013 (TRBV9, TRBJ1-6)
CASSVAGTGDSPLHF

SEQ ID NO: 588027 - protein, 12 aa, Homo sapiens
  CDR3 for alpha chain variable domain of TCR clone 294014 (TRAV12-1, TRAJ34)
CVVAGATDKLIF

SEQ ID NO: 588028 - protein, 15 aa, Homo sapiens
  CDR3 for beta chain variable domain of TCR clone 294014 (TRBV2, TRBJ2-3)
CASSDFEKATDTQYF

SEQ ID NO: 588029 - protein, 14 aa, Homo sapiens
  CDR3 for alpha chain variable domain of TCR clone 294015 (TRAV2, TRAJ9)
CAVDQNTGGFKTIF

SEQ ID NO: 588030 - protein, 14 aa, Homo sapiens
  CDR3 for beta chain variable domain of TCR clone 294015 (TRBV7-2, TRBJ2-7)
CASRPKTSFYEQYF

SEQ ID NO: 588031 - protein, 15 aa, Homo sapiens
  CDR3 for alpha chain variable domain of TCR clone 294016 (TRAV21, TRAJ24)
CAARSSTDSWGKLQF

SEQ ID NO: 588032 - protein, 13 aa, Homo sapiens
  CDR3 for beta chain variable domain of TCR clone 294016 (TRBV11-3, TRBJ2-5)
CASSSKGEETQYF

SEQ ID NO: 588033 - protein, 11 aa, Homo sapiens
  CDR3 for alpha chain variable domain of TCR clone 294017 (TRAV12-3, TRAJ27)
CAMANAGKSTL

SEQ ID NO: 588034 - protein, 16 aa, Homo sapiens
  CDR3 for beta chain variable domain of TCR clone 294017 (TRBV13, TRBJ2-2)
CASSPRTGEHTGELFF

SEQ ID NO: 588035 - protein, 15 aa, Homo sapiens
  CDR3 for alpha chain variable domain of TCR clone 294018 (TRAV26-1, TRAJ29)
CIVRVEGSGNTPLVF

SEQ ID NO: 588036 - protein, 15 aa, Homo sapiens
  CDR3 for beta chain variable domain of TCR clone 294018 (TRBV28, TRBJ1-2)
CANSSHSIANYGYTF

SEQ ID NO: 588037 - protein, 14 aa, Homo sapiens
  CDR3 for alpha chain variable domain of TCR clone 294019 (TRAV1-2, TRAJ16)
CAVNRFSDGQKLRF

SEQ ID NO: 588038 - protein, 18 aa, Homo sapiens
  CDR3 for beta chain variable domain of TCR clone 294019 (TRBV20-1, TRBJ2-3)
CSASGLAGGPGTTDTQYF

SEQ ID NO: 588039 - protein, 14 aa, Homo sapiens
  CDR3 for alpha chain variable domain of TCR clone 294020 (TRAV1-2, TRAJ16)
CAVNRFSDGQKLLF

SEQ ID NO: 588040 - protein, 12 aa, Homo sapiens
  CDR3 for beta chain variable domain of TCR clone 294020 (TRBV29-1, TRBJ2-3)
CSVTGGADTHYF

SEQ ID NO: 588041 - protein, 21 aa, Homo sapiens
  CDR3 for alpha chain variable domain of TCR clone 294021 (TRAV26-1, TRAJ38)
CIADNAGNNHIQKPDPAVYQL

SEQ ID NO: 588042 - protein, 12 aa, Homo sapiens
  CDR3 for beta chain variable domain of TCR clone 294021 (TRBV11-2, TRBJ2-2)
CASSLGGGELFF

SEQ ID NO: 588043 - protein, 15 aa, Homo sapiens
  CDR3 for alpha chain variable domain of TCR clone 294022 (TRAV12-1, TRAJ9)
FVGSFGDTGGFKTIF

SEQ ID NO: 588044 - protein, 13 aa, Homo sapiens
  CDR3 for beta chain variable domain of TCR clone 294022 (TRBV2, TRBJ1-4)
CASSERAGEKLFF

SEQ ID NO: 588045 - protein, 13 aa, Homo sapiens
  CDR3 for alpha chain variable domain of TCR clone 294023 (TRAV8-3, TRAJ36)
CAVGATGANNLFF

SEQ ID NO: 588046 - protein, 18 aa, Homo sapiens
  CDR3 for beta chain variable domain of TCR clone 294023 (TRBV7-9, TRBJ2-7)
CASSLTTSGSRTWYEQYF

SEQ ID NO: 588047 - protein, 16 aa, Homo sapiens
  CDR3 for alpha chain variable domain of TCR clone 294024 (TRAV38-1, TRAJ37)
CAFKGDGSSNTGKLIF

SEQ ID NO: 588048 - protein, 19 aa, Homo sapiens
  CDR3 for beta chain variable domain of TCR clone 294024 (TRBV25-1, TRBJ2-2)
CAILVYRVDRGRKTGELFF

SEQ ID NO: 588049 - protein, 15 aa, Homo sapiens
  CDR3 for alpha chain variable domain of TCR clone 294025 (TRAV27, TRAJ38)
CAGRFNAGNNRKLIW

SEQ ID NO: 588050 - protein, 13 aa, Homo sapiens
  CDR3 for beta chain variable domain of TCR clone 294025 (TRBV12-5, TRBJ2-3)
CASQNRGTDTQYS

SEQ ID NO: 588051 - protein, 13 aa, Homo sapiens
  CDR3 for alpha chain variable domain of TCR clone 294026 (TRAV12-2, TRAJ7)
CAGLIYGNNRLVF

SEQ ID NO: 588052 - protein, 14 aa, Homo sapiens
  CDR3 for beta chain variable domain of TCR clone 294026 (TRBV6-1, TRBJ2-1)
CATFTSGQNNEQFF

SEQ ID NO: 588053 - protein, 13 aa, Homo sapiens
  CDR3 for alpha chain variable domain of TCR clone 294027 (TRAV12-2, TRAJ50)
CAVIETSYDKVIF

SEQ ID NO: 588054 - protein, 14 aa, Homo sapiens
  CDR3 for beta chain variable domain of TCR clone 294027 (TRBV9, TRBJ2-1)
CASSVDPRGKEQFF

SEQ ID NO: 588055 - protein, 13 aa, Homo sapiens
  CDR3 for alpha chain variable domain of TCR clone 294028 (TRAV27, TRAJ41)
CAGEGNSGYALNF

SEQ ID NO: 588056 - protein, 14 aa, Homo sapiens
  CDR3 for beta chain variable domain of TCR clone 294028 (TRBV7-2, TRBJ1-1)
CASSFLTGTAEAFV

SEQ ID NO: 588057 - protein, 15 aa, Homo sapiens
  CDR3 for alpha chain variable domain of TCR clone 294029 (TRAV26-1, TRAJ22)
CIVRVSFWFCKATDL

SEQ ID NO: 588058 - protein, 15 aa, Homo sapiens
  CDR3 for beta chain variable domain of TCR clone 294029 (TRBV5-4, TRBJ2-7)
CASSRFGTGSYEQYF

SEQ ID NO: 588059 - protein, 12 aa, Homo sapiens
  CDR3 for alpha chain variable domain of TCR clone 294030 (TRAV12-3, TRAJ29)
CAAREGNTPLVF

SEQ ID NO: 588060 - protein, 17 aa, Homo sapiens
  CDR3 for beta chain variable domain of TCR clone 294030 (TRBV18, TRBJ2-1)
CASSPVAAGAGDNEQFF

SEQ ID NO: 588061 - protein, 13 aa, Homo sapiens
  CDR3 for alpha chain variable domain of TCR clone 294031 (TRAV1-1, TRAJ13)
CAVNSGGYQKVTF

SEQ ID NO: 588062 - protein, 20 aa, Homo sapiens
  CDR3 for beta chain variable domain of TCR clone 294031 (TRBV7-8, TRBJ2-2)
CASSHLFPGPTIHITGELFF

SEQ ID NO: 588063 - protein, 14 aa, Homo sapiens
  CDR3 for alpha chain variable domain of TCR clone 294032 (TRAV12-1, TRAJ17)
CVGNYKAAGNKLTF

SEQ ID NO: 588064 - protein, 11 aa, Homo sapiens
  CDR3 for beta chain variable domain of TCR clone 294032 (TRBV12-4, TRBJ2-3)
CASTATDTQYF

SEQ ID NO: 588065 - protein, 13 aa, Homo sapiens
  CDR3 for alpha chain variable domain of TCR clone 294033 (TRAV8-3, TRAJ36)
CAVGATGANNLFL

SEQ ID NO: 588066 - protein, 14 aa, Homo sapiens
  CDR3 for beta chain variable domain of TCR clone 294033 (TRBV7-2, TRBJ2-7)
CASRSQGAAYEQYF

SEQ ID NO: 588067 - protein, 14 aa, Homo sapiens
  CDR3 for alpha chain variable domain of TCR clone 294034 (TRAV12-2, TRAJ29)
CAVRRNSGNTPLVF

SEQ ID NO: 588068 - protein, 13 aa, Homo sapiens
  CDR3 for beta chain variable domain of TCR clone 294034 (TRBV12-4, TRBJ2-1)
CASSHYTYNEQFF

SEQ ID NO: 588069 - protein, 15 aa, Homo sapiens
  CDR3 for alpha chain variable domain of TCR clone 294035 (TRAV27, TRAJ17)
CRSTMIKAAGNKLTF

SEQ ID NO: 588070 - protein, 15 aa, Homo sapiens
  CDR3 for beta chain variable domain of TCR clone 294035 (TRBV7-3, TRBJ2-2)
CASSETGQGTGELFF

SEQ ID NO: 588071 - protein, 16 aa, Homo sapiens
  CDR3 for alpha chain variable domain of TCR clone 294036 (TRAV20, TRAJ10)
CALLRGLTGGGNKLTF

SEQ ID NO: 588072 - protein, 14 aa, Homo sapiens
  CDR3 for beta chain variable domain of TCR clone 294036 (TRBV19, TRBJ1-5)
CASRAPDSFLSQHF

SEQ ID NO: 588073 - protein, 11 aa, Homo sapiens
  CDR3 for alpha chain variable domain of TCR clone 294037 (TRAV8-3, TRAJ15)
CAVCPGTALLF

SEQ ID NO: 588074 - protein, 15 aa, Homo sapiens
  CDR3 for beta chain variable domain of TCR clone 294037 (TRBV7-9, TRBJ2-7)
CASSLALAEAYEQYF

SEQ ID NO: 588075 - protein, 14 aa, Homo sapiens
  CDR3 for alpha chain variable domain of TCR clone 294038 (TRAV35, TRAJ13)
CAGSPSGGYQKVTF

SEQ ID NO: 588076 - protein, 17 aa, Homo sapiens
  CDR3 for beta chain variable domain of TCR clone 294038 (TRBV7-6, TRBJ2-5)
CASSPGLADPWGKTQYF

SEQ ID NO: 588077 - protein, 12 aa, Homo sapiens
  CDR3 for alpha chain variable domain of TCR clone 294039 (TRAV16, TRAJ9)
CALSSGGFKTIF

SEQ ID NO: 588078 - protein, 14 aa, Homo sapiens
  CDR3 for beta chain variable domain of TCR clone 294039 (TRBV7-9, TRBJ2-1)
CASSVAGPYNEQFF

SEQ ID NO: 588079 - protein, 13 aa, Homo sapiens
  CDR3 for alpha chain variable domain of TCR clone 294040 (TRAV12-3, TRAJ47)
CAMKKEYGKKLVF

SEQ ID NO: 588080 - protein, 16 aa, Homo sapiens
  CDR3 for beta chain variable domain of TCR clone 294040 (TRBV5-4, TRBJ2-3)
CASSFGAGEGTDTQYF

SEQ ID NO: 588081 - protein, 13 aa, Homo sapiens
  CDR3 for alpha chain variable domain of TCR clone 294041 (TRAV29/DV5, TRAJ31)
CAASRNNNARLMF

SEQ ID NO: 588082 - protein, 14 aa, Homo sapiens
  CDR3 for beta chain variable domain of TCR clone 294041 (TRBV18, TRBJ2-7)
CASSPRGGAYEQYF

SEQ ID NO: 588083 - protein, 14 aa, Homo sapiens
  CDR3 for alpha chain variable domain of TCR clone 294042 (TRAV17, TRAJ16)
CAMADFSDGQKLLF

SEQ ID NO: 588084 - protein, 12 aa, Homo sapiens
  CDR3 for beta chain variable domain of TCR clone 294042 (TRBV24-1, TRBJ1-1)
CATLYPDTEAFF

SEQ ID NO: 588085 - protein, 14 aa, Homo sapiens
  CDR3 for alpha chain variable domain of TCR clone 294043 (TRAV17, TRAJ22)
CAASPSGSARQLTF

SEQ ID NO: 588086 - protein, 14 aa, Homo sapiens
  CDR3 for beta chain variable domain of TCR clone 294043 (TRBV19, TRBJ2-1)
CASPTFVLSGEQFF

SEQ ID NO: 588087 - protein, 16 aa, Homo sapiens
  CDR3 for alpha chain variable domain of TCR clone 294044 (TRAV3, TRAJ37)
CAVRPHGSGNTGKRIF

SEQ ID NO: 588088 - protein, 14 aa, Homo sapiens
  CDR3 for beta chain variable domain of TCR clone 294044 (TRBV25-1, TRBJ1-1)
CASTHLGGNTEAFF

SEQ ID NO: 588089 - protein, 14 aa, Homo sapiens
  CDR3 for alpha chain variable domain of TCR clone 294045 (TRAV9-2, TRAJ39)
CALYIYNAGNMLTF

SEQ ID NO: 588090 - protein, 19 aa, Homo sapiens
  CDR3 for beta chain variable domain of TCR clone 294045 (TRBV7-9, TRBJ2-6)
CASSLESATVLPGANVLTF

SEQ ID NO: 588091 - protein, 14 aa, Homo sapiens
  CDR3 for alpha chain variable domain of TCR clone 294046 (TRAV12-3, TRAJ9)
CAMSPNTGGFKTIF

SEQ ID NO: 588092 - protein, 13 aa, Homo sapiens
  CDR3 for beta chain variable domain of TCR clone 294046 (TRBV12-4, TRBJ1-1)
CASSPGTGFKAFF

SEQ ID NO: 588093 - protein, 10 aa, Homo sapiens
  CDR3 for alpha chain variable domain of TCR clone 294047 (TRAV1-2, TRAJ18)
CAVRGEAQPW

SEQ ID NO: 588094 - protein, 19 aa, Homo sapiens
  CDR3 for beta chain variable domain of TCR clone 294047 (TRBV6-3, TRBJ1-2)
FAISYSKGRTGPPNYGYTF

SEQ ID NO: 588095 - protein, 13 aa, Homo sapiens
  CDR3 for alpha chain variable domain of TCR clone 294048 (TRAV12-1, TRAJ9)
CVVLNTGGFTTIF

SEQ ID NO: 588096 - protein, 15 aa, Homo sapiens
  CDR3 for beta chain variable domain of TCR clone 294048 (TRBV12-4, TRBJ2-5)
CASSPPTGLQETQYF

SEQ ID NO: 588097 - protein, 13 aa, Homo sapiens
  CDR3 for alpha chain variable domain of TCR clone 294049 (TRAV26-1, TRAJ34)
IASSEANTDKLIF

SEQ ID NO: 588098 - protein, 15 aa, Homo sapiens
  CDR3 for beta chain variable domain of TCR clone 294049 (TRBV4-1, TRBJ2-7)
CASSQEWGPSYEQYF

SEQ ID NO: 588099 - protein, 11 aa, Homo sapiens
  CDR3 for alpha chain variable domain of TCR clone 294050 (TRAV12-2, TRAJ26)
CAVNNGQNFVF

SEQ ID NO: 588100 - protein, 15 aa, Homo sapiens
  CDR3 for beta chain variable domain of TCR clone 294050 (TRBV6-1, TRBJ2-3)
CASSERGGITDTQYF

SEQ ID NO: 588101 - protein, 14 aa, Homo sapiens
  CDR3 for alpha chain variable domain of TCR clone 294051 (TRAV13-1, TRAJ3)
CAASKSGSASKIIF

SEQ ID NO: 588102 - protein, 16 aa, Homo sapiens
  CDR3 for beta chain variable domain of TCR clone 294051 (TRBV15, TRBJ2-3)
CATSRDLGIVTDTQYF

SEQ ID NO: 588103 - protein, 13 aa, Homo sapiens
  CDR3 for alpha chain variable domain of TCR clone 294052 (TRAV17, TRAJ9)
CATDYTGGFKTIF

SEQ ID NO: 588104 - protein, 12 aa, Homo sapiens
  CDR3 for beta chain variable domain of TCR clone 294052 (TRBV28, TRBJ2-7)
CASSFSSYEQYF

SEQ ID NO: 588105 - protein, 12 aa, Homo sapiens
  CDR3 for alpha chain variable domain of TCR clone 294053 (TRAV1-1, TRAJ24)
CAATDSWGKLQF

SEQ ID NO: 588106 - protein, 16 aa, Homo sapiens
  CDR3 for beta chain variable domain of TCR clone 294053 (TRBV20-1, TRBJ2-1)
CSALTWTSGSYNEQFF

SEQ ID NO: 588107 - protein, 14 aa, Homo sapiens
  CDR3 for alpha chain variable domain of TCR clone 294054 (TRAV2, TRAJ9)
CAVEDRSGGLKTIF

SEQ ID NO: 588108 - protein, 14 aa, Homo sapiens
  CDR3 for beta chain variable domain of TCR clone 294054 (TRBV20-1, TRBJ2-1)
CSAQIGGSANEQFF

SEQ ID NO: 588109 - protein, 15 aa, Homo sapiens
  CDR3 for alpha chain variable domain of TCR clone 294055 (TRAV16, TRAJ16)
CAFQGGGADGQKLLF

SEQ ID NO: 588110 - protein, 15 aa, Homo sapiens
  CDR3 for beta chain variable domain of TCR clone 294055 (TRBV20-1, TRBJ2-7)
CSARDRVSGMDEQYV

SEQ ID NO: 588111 - protein, 15 aa, Homo sapiens
  CDR3 for alpha chain variable domain of TCR clone 294056 (TRAV17, TRAJ57)
CATGPSPGGSEKLVF

SEQ ID NO: 588112 - protein, 17 aa, Homo sapiens
  CDR3 for beta chain variable domain of TCR clone 294056 (TRBV20-1, TRBJ2-1)
CSASSSGLAGSYNEQFF

SEQ ID NO: 588113 - protein, 13 aa, Homo sapiens
  CDR3 for alpha chain variable domain of TCR clone 294057 (TRAV3, TRAJ30)
CAVRDRGDDKIIF

SEQ ID NO: 588114 - protein, 15 aa, Homo sapiens
  CDR3 for beta chain variable domain of TCR clone 294057 (TRBV29-1, TRBJ2-7)
CSVEFFDRGSYEQYF

SEQ ID NO: 588115 - protein, 14 aa, Homo sapiens
  CDR3 for alpha chain variable domain of TCR clone 294058 (TRAV8-6, TRAJ12)
CAVKAADSSYKLIF

SEQ ID NO: 588116 - protein, 15 aa, Homo sapiens
  CDR3 for beta chain variable domain of TCR clone 294058 (TRBV5-1, TRBJ2-5)
CASSLGLAEQETQYI

SEQ ID NO: 588117 - protein, 15 aa, Homo sapiens
  CDR3 for alpha chain variable domain of TCR clone 294059 (TRAV23/DV6, TRAJ37)
CAASRGSSNTGKLIL

SEQ ID NO: 588118 - protein, 15 aa, Homo sapiens
  CDR3 for beta chain variable domain of TCR clone 294059 (TRBV6-5, TRBJ2-7)
CASSARRGSDNEQYF

SEQ ID NO: 588119 - protein, 12 aa, Homo sapiens
  CDR3 for alpha chain variable domain of TCR clone 294060 (TRAV13-2, TRAJ8)
CAPWLGFQKLVF

SEQ ID NO: 588120 - protein, 16 aa, Homo sapiens
  CDR3 for beta chain variable domain of TCR clone 294060 (TRBV10-3, TRBJ2-1)
CAISGVGDGGGGEQFF

SEQ ID NO: 588121 - protein, 16 aa, Homo sapiens
  CDR3 for alpha chain variable domain of TCR clone 294061 (TRAV14/DV4, TRAJ54)
CAVREGRIQGAQKLVF

SEQ ID NO: 588122 - protein, 15 aa, Homo sapiens
  CDR3 for beta chain variable domain of TCR clone 294061 (TRBV20-1, TRBJ2-7)
CSARDRVSGMDEQYF

SEQ ID NO: 588123 - protein, 12 aa, Homo sapiens
  CDR3 for alpha chain variable domain of TCR clone 294062 (TRAV8-3, TRAJ26)
CAGDNYGQHFVF

SEQ ID NO: 588124 - protein, 15 aa, Homo sapiens
  CDR3 for beta chain variable domain of TCR clone 294062 (TRBV9, TRBJ1-6)
CASSVAGTGDSPLHF

SEQ ID NO: 588125 - protein, 13 aa, Homo sapiens
  CDR3 for alpha chain variable domain of TCR clone 294063 (TRAV1-2, TRAJ9)
CAALNTGGFKTIF

SEQ ID NO: 588126 - protein, 13 aa, Homo sapiens
  CDR3 for beta chain variable domain of TCR clone 294063 (TRBV19, TRBJ1-2)
SASSVPGQDGYTI

SEQ ID NO: 588127 - protein, 14 aa, Homo sapiens
  CDR3 for alpha chain variable domain of TCR clone 294064 (TRAV8-1, TRAJ5)
CAVRTDTGRRALTL

SEQ ID NO: 588128 - protein, 12 aa, Homo sapiens
  CDR3 for beta chain variable domain of TCR clone 294064 (TRBV11-2, TRBJ2-1)
CASSPGNNEQFF

SEQ ID NO: 588129 - protein, 14 aa, Homo sapiens
  CDR3 for alpha chain variable domain of TCR clone 294065 (TRAV1-1, TRAJ23)
CAVSIYNQGGKLIF

SEQ ID NO: 588130 - protein, 15 aa, Homo sapiens
  CDR3 for beta chain variable domain of TCR clone 294065 (TRBV6-3, TRBJ2-7)
CASSSPGTVFYEQYF

SEQ ID NO: 588131 - protein, 18 aa, Homo sapiens
  CDR3 for alpha chain variable domain of TCR clone 294066 (TRAV3, TRAJ17)
CAVRDGPPKAAAGNKLTF

SEQ ID NO: 588132 - protein, 13 aa, Homo sapiens
  CDR3 for beta chain variable domain of TCR clone 294066 (TRBV10-3, TRBJ2-7)
CASKLAVNYEQYF

SEQ ID NO: 588133 - protein, 21 aa, Homo sapiens
  CDR3 for alpha chain variable domain of TCR clone 294067 (TRAV4, TRAJ30)
PRVSLSDTAVYYCLRDDKIIF

SEQ ID NO: 588134 - protein, 13 aa, Homo sapiens
  CDR3 for beta chain variable domain of TCR clone 294067 (TRBV20-1, TRBJ1-1)
CSARVGGNTEAFF

SEQ ID NO: 588135 - protein, 16 aa, Homo sapiens
  CDR3 for alpha chain variable domain of TCR clone 294068 (TRAV12-2, TRAJ45)
CAVIFLSGGGADGLTF

SEQ ID NO: 588136 - protein, 19 aa, Homo sapiens
  CDR3 for beta chain variable domain of TCR clone 294068 (TRBV28, TRBJ2-4)
CASSFQPGGPAHCKNIQYF

SEQ ID NO: 588137 - protein, 12 aa, Homo sapiens
  CDR3 for alpha chain variable domain of TCR clone 294069 (TRAV13-2, TRAJ8)
CAPWLVFQKLVF

SEQ ID NO: 588138 - protein, 14 aa, Homo sapiens
  CDR3 for beta chain variable domain of TCR clone 294069 (TRBV18, TRBJ2-7)
CASSPRGGAYEQYF

SEQ ID NO: 588139 - protein, 15 aa, Homo sapiens
  CDR3 for alpha chain variable domain of TCR clone 294070 (TRAV8-2, TRAJ40)
CVVLGTTSGTYKYIF

SEQ ID NO: 588140 - protein, 14 aa, Homo sapiens
  CDR3 for beta chain variable domain of TCR clone 294070 (TRBV4-1, TRBJ2-5)
CPSSRSGSGETQYF

SEQ ID NO: 588141 - protein, 17 aa, Homo sapiens
  CDR3 for alpha chain variable domain of TCR clone 294071 (TRAV3, TRAJ7)
CAVRDMSPLEGTTDSLL

SEQ ID NO: 588142 - protein, 17 aa, Homo sapiens
  CDR3 for beta chain variable domain of TCR clone 294071 (TRBV15, TRBJ1-2)
RATSGREIDVVNYGYTF

SEQ ID NO: 588143 - protein, 16 aa, Homo sapiens
  CDR3 for alpha chain variable domain of TCR clone 294072 (TRAV23/DV6, TRAJ48)
CAARGVVNFGNEKLTF

SEQ ID NO: 588144 - protein, 15 aa, Homo sapiens
  CDR3 for beta chain variable domain of TCR clone 294072 (TRBV20-1, TRBJ2-5)
CSAGLAGVSQETQYF

SEQ ID NO: 588145 - protein, 15 aa, Homo sapiens
  CDR3 for alpha chain variable domain of TCR clone 294073 (TRAV17, TRAJ16)
CATALRCSDGQKLLF

SEQ ID NO: 588146 - protein, 15 aa, Homo sapiens
  CDR3 for beta chain variable domain of TCR clone 294073 (TRBV20-1, TRBJ1-1)
CSASRGVTGNTEAFF

SEQ ID NO: 588147 - protein, 15 aa, Homo sapiens
  CDR3 for alpha chain variable domain of TCR clone 294074 (TRAV4, TRAJ42)
CLVGGEGGSQGNLIF

SEQ ID NO: 588148 - protein, 16 aa, Homo sapiens
  CDR3 for beta chain variable domain of TCR clone 294074 (TRBV27, TRBJ1-1)
CASSTRTGGVGTEAFF

SEQ ID NO: 588149 - protein, 17 aa, Homo sapiens
  CDR3 for alpha chain variable domain of TCR clone 294075 (TRAV13-1, TRAJ52)
CAAGRNAGGTSYGKLSF

SEQ ID NO: 588150 - protein, 13 aa, Homo sapiens
  CDR3 for beta chain variable domain of TCR clone 294075 (TRBV7-2, TRBJ1-1)
CASNLKGAKVAFF

SEQ ID NO: 588151 - protein, 12 aa, Homo sapiens
  CDR3 for alpha chain variable domain of TCR clone 294076 (TRAV25, TRAJ5)
CAGGGGRSALTF

SEQ ID NO: 588152 - protein, 15 aa, Homo sapiens
  CDR3 for beta chain variable domain of TCR clone 294076 (TRBV20-1, TRBJ2-7)
CSARDRVSGMDEQYF

SEQ ID NO: 588153 - protein, 14 aa, Homo sapiens
  CDR3 for alpha chain variable domain of TCR clone 294077 (TRAV25, TRAJ45)
CRAGSGGGADGLTF

SEQ ID NO: 588154 - protein, 18 aa, Homo sapiens
  CDR3 for beta chain variable domain of TCR clone 294077 (TRBV11-2, TRBJ2-3)
CASSLGGASRGAPNTQYF

SEQ ID NO: 588155 - protein, 14 aa, Homo sapiens
  CDR3 for alpha chain variable domain of TCR clone 294078 (TRAV1-2, TRAJ16)
CAVNRFSDCQKLLF

SEQ ID NO: 588156 - protein, 14 aa, Homo sapiens
  CDR3 for beta chain variable domain of TCR clone 294078 (TRBV19, TRBJ2-7)
CASSMGQGAIEQYF

SEQ ID NO: 588157 - protein, 15 aa, Homo sapiens
  CDR3 for alpha chain variable domain of TCR clone 294079 (TRAV12-3, TRAJ49)
CAMAVTPNTGNQFYF

SEQ ID NO: 588158 - protein, 18 aa, Homo sapiens
  CDR3 for beta chain variable domain of TCR clone 294079 (TRBV4-1, TRBJ1-5)
CASSQDPRGQGFNQPQHF

SEQ ID NO: 588159 - protein, 16 aa, Homo sapiens
  CDR3 for alpha chain variable domain of TCR clone 294080 (TRAV30, TRAJ24)
CGTEIMDADSWGNSSL

SEQ ID NO: 588160 - protein, 16 aa, Homo sapiens
  CDR3 for beta chain variable domain of TCR clone 294080 (TRBV12-5, TRBJ2-5)
CASGPRTSGNQETQYF

SEQ ID NO: 588161 - protein, 13 aa, Homo sapiens
  CDR3 for alpha chain variable domain of TCR clone 294081 (TRAV29/DV5, TRAJ41)
CAASGNSGYALNF

SEQ ID NO: 588162 - protein, 12 aa, Homo sapiens
  CDR3 for beta chain variable domain of TCR clone 294081 (TRBV7-8, TRBJ2-7)
CASSLGDREQYF

SEQ ID NO: 588163 - protein, 20 aa, Homo sapiens
  CDR3 for alpha chain variable domain of TCR clone 294082 (TRAV12-1, TRAJ42)
SSVIQPPTSVKGGSQGNLIF

SEQ ID NO: 588164 - protein, 13 aa, Homo sapiens
  CDR3 for beta chain variable domain of TCR clone 294082 (TRBV11-2, TRBJ2-7)
CASSLGGAYEQYF

SEQ ID NO: 588165 - protein, 16 aa, Homo sapiens
  CDR3 for alpha chain variable domain of TCR clone 294083 (TRAV3, TRAJ37)
CAVRGKGSGNTGKPIF

SEQ ID NO: 588166 - protein, 14 aa, Homo sapiens
  CDR3 for beta chain variable domain of TCR clone 294083 (TRBV20-1, TRBJ2-7)
CSAWTALSSYEQYS

SEQ ID NO: 588167 - protein, 14 aa, Homo sapiens
  CDR3 for alpha chain variable domain of TCR clone 294084 (TRAV17, TRAJ49)
CATDARDTGNQFYF

SEQ ID NO: 588168 - protein, 14 aa, Homo sapiens
  CDR3 for beta chain variable domain of TCR clone 294084 (TRBV5-5, TRBJ1-2)
CASIFGQINYGYTF

SEQ ID NO: 588169 - protein, 14 aa, Homo sapiens
  CDR3 for alpha chain variable domain of TCR clone 294085 (TRAV8-4, TRAJ17)
CAVSDQAAGNKITF

SEQ ID NO: 588170 - protein, 15 aa, Homo sapiens
  CDR3 for beta chain variable domain of TCR clone 294085 (TRBV7-2, TRBJ1-2)
CASSLAPDRGLGYTF

SEQ ID NO: 588171 - protein, 15 aa, Homo sapiens
  CDR3 for alpha chain variable domain of TCR clone 294086 (TRAV22, TRAJ24)
CSVPLSTGSWGKLQL

SEQ ID NO: 588172 - protein, 16 aa, Homo sapiens
  CDR3 for beta chain variable domain of TCR clone 294086 (TRBV28, TRBJ2-7)
CASSFPDRRLTYEQYF

SEQ ID NO: 588173 - protein, 12 aa, Homo sapiens
  CDR3 for alpha chain variable domain of TCR clone 294087 (TRAV12-1, TRAJ40)
CVVYSGTYKYIF

SEQ ID NO: 588174 - protein, 12 aa, Homo sapiens
  CDR3 for beta chain variable domain of TCR clone 294087 (TRBV11-2, TRBJ2-3)
GASRGAPNAQYF

SEQ ID NO: 588175 - protein, 18 aa, Homo sapiens
  CDR3 for alpha chain variable domain of TCR clone 294088 (TRAV3, TRAJ32)
CAVRDISGYGGATNKLIF

SEQ ID NO: 588176 - protein, 15 aa, Homo sapiens
  CDR3 for beta chain variable domain of TCR clone 294088 (TRBV12-4, TRBJ2-2)
CASSLGVRHTGELFF

SEQ ID NO: 588177 - protein, 14 aa, Homo sapiens
  CDR3 for alpha chain variable domain of TCR clone 294089 (TRAV1-2, TRAJ16)
CAVNRFSDGQTLLF

SEQ ID NO: 588178 - protein, 13 aa, Homo sapiens
  CDR3 for beta chain variable domain of TCR clone 294089 (TRBV11-2, TRBJ2-5)
CASSFSSQETQYF

SEQ ID NO: 588179 - protein, 14 aa, Homo sapiens
  CDR3 for alpha chain variable domain of TCR clone 294090 (TRAV12-2, TRAJ40)
CAVKTPSGTYKYIF

SEQ ID NO: 588180 - protein, 14 aa, Homo sapiens
  CDR3 for beta chain variable domain of TCR clone 294090 (TRBV20-1, TRBJ1-1)
CSAQTRIGGTEALF

SEQ ID NO: 588181 - protein, 12 aa, Homo sapiens
  CDR3 for alpha chain variable domain of TCR clone 294091 (TRAV23/DV6, TRAJ33)
CAAEDSNYQLIW

SEQ ID NO: 588182 - protein, 12 aa, Homo sapiens
  CDR3 for beta chain variable domain of TCR clone 294091 (TRBV28, TRBJ2-3)
CASSLYRDTQYF

SEQ ID NO: 588183 - protein, 23 aa, Homo sapiens
  CDR3 for alpha chain variable domain of TCR clone 294092 (TRAV26-1, TRAJ38)
CIADNAGNNHIQNPDPAGYQLQD

SEQ ID NO: 588184 - protein, 13 aa, Homo sapiens
  CDR3 for beta chain variable domain of TCR clone 294092 (TRBV10-3, TRBJ2-7)
CASKLAVNYEQYF

SEQ ID NO: 588185 - protein, 20 aa, Homo sapiens
  CDR3 for alpha chain variable domain of TCR clone 294093 (TRAV4, TRAJ29)
CCVLLPRGCVPFSGNTPLVF

SEQ ID NO: 588186 - protein, 14 aa, Homo sapiens
  CDR3 for beta chain variable domain of TCR clone 294093 (TRBV7-2, TRBJ2-7)
CASSPKTSFYKQYF

SEQ ID NO: 588187 - protein, 12 aa, Homo sapiens
  CDR3 for alpha chain variable domain of TCR clone 294094 (TRAV1-2, TRAJ24)
CAVGGSWGKFQF

SEQ ID NO: 588188 - protein, 15 aa, Homo sapiens
  CDR3 for beta chain variable domain of TCR clone 294094 (TRBV7-2, TRBJ1-2)
CASSPRAGWNYGYTF

SEQ ID NO: 588189 - protein, 14 aa, Homo sapiens
  CDR3 for alpha chain variable domain of TCR clone 294095 (TRAV12-3, TRAJ47)
CAMSGREYGNKLIF

SEQ ID NO: 588190 - protein, 15 aa, Homo sapiens
  CDR3 for beta chain variable domain of TCR clone 294095 (TRBV20-1, TRBJ2-2)
CSARDTRLNTGELFF

SEQ ID NO: 588191 - protein, 11 aa, Homo sapiens
  CDR3 for alpha chain variable domain of TCR clone 294096 (TRAV5, TRAJ31)
CAESNNDRLMF

SEQ ID NO: 588192 - protein, 15 aa, Homo sapiens
  CDR3 for beta chain variable domain of TCR clone 294096 (TRBV2, TRBJ2-1)
CASSEGREGDNEQFF

SEQ ID NO: 588193 - protein, 15 aa, Homo sapiens
  CDR3 for alpha chain variable domain of TCR clone 294097 (TRAV20, TRAJ4)
CAVQVFSGGYNKLIF

SEQ ID NO: 588194 - protein, 14 aa, Homo sapiens
  CDR3 for beta chain variable domain of TCR clone 294097 (TRBV7-6, TRBJ2-3)
CASNSGGDANAQYF

SEQ ID NO: 588195 - protein, 17 aa, Homo sapiens
  CDR3 for alpha chain variable domain of TCR clone 294098 (TRAV3, TRAJ38)
CAVRDCLNAGNNRKLIW

SEQ ID NO: 588196 - protein, 16 aa, Homo sapiens
  CDR3 for beta chain variable domain of TCR clone 294098 (TRBV20-1, TRBJ1-4)
CSARPYAGELNEKLFF

SEQ ID NO: 588197 - protein, 16 aa, Homo sapiens
  CDR3 for alpha chain variable domain of TCR clone 294099 (TRAV3, TRAJ37)
CAVRGKGSGNTAKLIF

SEQ ID NO: 588198 - protein, 13 aa, Homo sapiens
  CDR3 for beta chain variable domain of TCR clone 294099 (TRBV19, TRBJ1-2)
CASSVPGQDGYTF

SEQ ID NO: 588199 - protein, 17 aa, Homo sapiens
  CDR3 for alpha chain variable domain of TCR clone 294100 (TRAV3, TRAJ42)
CAVRDRDYVGSQGNLIF

SEQ ID NO: 588200 - protein, 13 aa, Homo sapiens
  CDR3 for beta chain variable domain of TCR clone 294100 (TRBV20-1, TRBJ2-5)
CSARRGTGATQYF

SEQ ID NO: 588201 - protein, 17 aa, Homo sapiens
  CDR3 for alpha chain variable domain of TCR clone 294101 (TRAV3, TRAJ42)
CAVRDRVYGGSQGNLIF

SEQ ID NO: 588202 - protein, 14 aa, Homo sapiens
  CDR3 for beta chain variable domain of TCR clone 294101 (TRBV25-1, TRBJ1-1)
CASTHLGGNTEAFF

SEQ ID NO: 588203 - protein, 12 aa, Homo sapiens
  CDR3 for alpha chain variable domain of TCR clone 294102 (TRAV12-3, TRAJ17)
CAMTLTGNKPTF

SEQ ID NO: 588204 - protein, 15 aa, Homo sapiens
  CDR3 for beta chain variable domain of TCR clone 294102 (TRBV20-1, TRBJ2-7)
CSARDRVSGMDEQCF

SEQ ID NO: 588205 - protein, 13 aa, Homo sapiens
  CDR3 for alpha chain variable domain of TCR clone 294103 (TRAV12-2, TRAJ24)
CAGLTDSWGKLQV

SEQ ID NO: 588206 - protein, 15 aa, Homo sapiens
  CDR3 for beta chain variable domain of TCR clone 294103 (TRBV7-2, TRBJ2-2)
CASSPTGANTGELFF

SEQ ID NO: 588207 - protein, 16 aa, Homo sapiens
  CDR3 for alpha chain variable domain of TCR clone 294104 (TRAV38-2/DV8, TRAJ42)
CAYRAFYGGSQGNLIF

SEQ ID NO: 588208 - protein, 10 aa, Homo sapiens
  CDR3 for beta chain variable domain of TCR clone 294104 (TRBV7-9, TRBJ1-1)
CASSFTEAFF

SEQ ID NO: 588209 - protein, 12 aa, Homo sapiens
  CDR3 for alpha chain variable domain of TCR clone 294105 (TRAV27, TRAJ47)
CAGEVRGNKLVF

SEQ ID NO: 588210 - protein, 15 aa, Homo sapiens
  CDR3 for beta chain variable domain of TCR clone 294105 (TRBV5-6, TRBJ1-6)
CASSWELGPNSPLHF

SEQ ID NO: 588211 - protein, 14 aa, Homo sapiens
  CDR3 for alpha chain variable domain of TCR clone 294106 (TRAV13-1, TRAJ9)
CASSALTGGFKTIF

SEQ ID NO: 588212 - protein, 13 aa, Homo sapiens
  CDR3 for beta chain variable domain of TCR clone 294106 (TRBV20-1, TRBJ1-1)
CSAGTVGNTEAFF

SEQ ID NO: 588213 - protein, 14 aa, Homo sapiens
  CDR3 for alpha chain variable domain of TCR clone 294107 (TRAV21, TRAJ21)
CAVKGFGNCNKFYF

SEQ ID NO: 588214 - protein, 13 aa, Homo sapiens
  CDR3 for beta chain variable domain of TCR clone 294107 (TRBV18, TRBJ1-1)
CASSPETKPEAFF

SEQ ID NO: 588215 - protein, 14 aa, Homo sapiens
  CDR3 for alpha chain variable domain of TCR clone 294108 (TRAV8-6, TRAJ9)
CAVSSYAGGFKTNF

SEQ ID NO: 588216 - protein, 15 aa, Homo sapiens
  CDR3 for beta chain variable domain of TCR clone 294108 (TRBV2, TRBJ1-2)
CASSESRTVNYGYTF

SEQ ID NO: 588217 - protein, 13 aa, Homo sapiens
  CDR3 for alpha chain variable domain of TCR clone 294109 (TRAV2, TRAJ40)
CAVVTSGTYKYIF

SEQ ID NO: 588218 - protein, 13 aa, Homo sapiens
  CDR3 for beta chain variable domain of TCR clone 294109 (TRBV10-2, TRBJ1-1)
CASNDQMNTEAFF

SEQ ID NO: 588219 - protein, 14 aa, Homo sapiens
  CDR3 for alpha chain variable domain of TCR clone 294110 (TRAV26-1, TRAJ38)
CIADNAGNNRKLNW

SEQ ID NO: 588220 - protein, 17 aa, Homo sapiens
  CDR3 for beta chain variable domain of TCR clone 294110 (TRBV7-9, TRBJ2-3)
CASSPTVAGDLTDTQYF

SEQ ID NO: 588221 - protein, 13 aa, Homo sapiens
  CDR3 for alpha chain variable domain of TCR clone 294111 (TRAV23/DV6, TRAJ44)
CAVVPGTASKLTF

SEQ ID NO: 588222 - protein, 14 aa, Homo sapiens
  CDR3 for beta chain variable domain of TCR clone 294111 (TRBV11-2, TRBJ2-3)
CASSRLARTDTQHF

SEQ ID NO: 588223 - protein, 13 aa, Homo sapiens
  CDR3 for alpha chain variable domain of TCR clone 294112 (TRAV12-2, TRAJ42)
CAVKRGSQGNLIF

SEQ ID NO: 588224 - protein, 16 aa, Homo sapiens
  CDR3 for beta chain variable domain of TCR clone 294112 (TRBV9, TRBJ2-2)
CASSAMGRGNTGELFF

SEQ ID NO: 588225 - protein, 15 aa, Homo sapiens
  CDR3 for alpha chain variable domain of TCR clone 294113 (TRAV21, TRAJ24)
CAARSSTDSWGKLQF

SEQ ID NO: 588226 - protein, 13 aa, Homo sapiens
  CDR3 for beta chain variable domain of TCR clone 294113 (TRBV11-2, TRBJ2-5)
CANSSTGEETQYF

SEQ ID NO: 588227 - protein, 16 aa, Homo sapiens
  CDR3 for alpha chain variable domain of TCR clone 294114 (TRAV30, TRAJ24)
CGTEIVYADSWGKFQF

SEQ ID NO: 588228 - protein, 14 aa, Homo sapiens
  CDR3 for beta chain variable domain of TCR clone 294114 (TRBV12-5, TRBJ2-5)
CASGSRTHQETRYF

SEQ ID NO: 588229 - protein, 14 aa, Homo sapiens
  CDR3 for alpha chain variable domain of TCR clone 294115 (TRAV8-6, TRAJ12)
CAVKAADSSDKLIF

SEQ ID NO: 588230 - protein, 15 aa, Homo sapiens
  CDR3 for beta chain variable domain of TCR clone 294115 (TRBV5-1, TRBJ2-5)
RASSLGLAEQETQYF

SEQ ID NO: 588231 - protein, 12 aa, Homo sapiens
  CDR3 for alpha chain variable domain of TCR clone 294116 (TRAV13-1, TRAJ48)
CAANFGNEKLTF

SEQ ID NO: 588232 - protein, 15 aa, Homo sapiens
  CDR3 for beta chain variable domain of TCR clone 294116 (TRBV4-1, TRBJ2-7)
CASSQEWGPSYEQYF

SEQ ID NO: 588233 - protein, 13 aa, Homo sapiens
  CDR3 for alpha chain variable domain of TCR clone 294117 (TRAV8-2, TRAJ29)
CALPGAGNTPLGF

SEQ ID NO: 588234 - protein, 15 aa, Homo sapiens
  CDR3 for beta chain variable domain of TCR clone 294117 (TRBV15, TRBJ2-2)
CATTKLAGGTGELFF

SEQ ID NO: 588235 - protein, 15 aa, Homo sapiens
  CDR3 for alpha chain variable domain of TCR clone 294118 (TRAV23/DV6, TRAJ45)
CAAKNGGGGADGLTF

SEQ ID NO: 588236 - protein, 13 aa, Homo sapiens
  CDR3 for beta chain variable domain of TCR clone 294118 (TRBV20-1, TRBJ1-1)
CSARGGGNTEAFS

SEQ ID NO: 588237 - protein, 14 aa, Homo sapiens
  CDR3 for alpha chain variable domain of TCR clone 294119 (TRAV29/DV5, TRAJ42)
CAAKGGGRQGNLIF

SEQ ID NO: 588238 - protein, 14 aa, Homo sapiens
  CDR3 for beta chain variable domain of TCR clone 294119 (TRBV2, TRBJ1-5)
CASSEAAGGQPQHF

SEQ ID NO: 588239 - protein, 13 aa, Homo sapiens
  CDR3 for alpha chain variable domain of TCR clone 294120 (TRAV36/DV7, TRAJ33)
CAVDMDSNYQLIW

SEQ ID NO: 588240 - protein, 16 aa, Homo sapiens
  CDR3 for beta chain variable domain of TCR clone 294120 (TRBV15, TRBJ2-3)
CATRLSGGGAPDTQYF

SEQ ID NO: 588241 - protein, 13 aa, Homo sapiens
  CDR3 for alpha chain variable domain of TCR clone 294121 (TRAV21, TRAJ57)
CAVTQGGSEKLVF

SEQ ID NO: 588242 - protein, 15 aa, Homo sapiens
  CDR3 for beta chain variable domain of TCR clone 294121 (TRBV4-3, TRBJ1-5)
CASSQEAVGGQPQHF

SEQ ID NO: 588243 - protein, 15 aa, Homo sapiens
  CDR3 for alpha chain variable domain of TCR clone 294122 (TRAV26-1, TRAJ44)
CIVRANTVTASKLTF

SEQ ID NO: 588244 - protein, 16 aa, Homo sapiens
  CDR3 for beta chain variable domain of TCR clone 294122 (TRBV7-7, TRBJ2-1)
CASSLASGSSYNEQFF

SEQ ID NO: 588245 - protein, 10 aa, Homo sapiens
  CDR3 for alpha chain variable domain of TCR clone 294123 (TRAV3, TRAJ30)
CAVREIEIIF

SEQ ID NO: 588246 - protein, 14 aa, Homo sapiens
  CDR3 for beta chain variable domain of TCR clone 294123 (TRBV15, TRBJ2-3)
CSTRSGTSTDTQYF

SEQ ID NO: 588247 - protein, 14 aa, Homo sapiens
  CDR3 for alpha chain variable domain of TCR clone 294124 (TRAV29/DV5, TRAJ29)
CAASLDSGNTPLVF

SEQ ID NO: 588248 - protein, 16 aa, Homo sapiens
  CDR3 for beta chain variable domain of TCR clone 294124 (TRBV12-4, TRBJ1-5)
CASSRPVGESNQPQHF

SEQ ID NO: 588249 - protein, 14 aa, Homo sapiens
  CDR3 for alpha chain variable domain of TCR clone 294125 (TRAV1-2, TRAJ8)
CAVREDTDFQKLVF

SEQ ID NO: 588250 - protein, 13 aa, Homo sapiens
  CDR3 for beta chain variable domain of TCR clone 294125 (TRBV27, TRBJ1-4)
CASSLMGDEKLFF

SEQ ID NO: 588251 - protein, 10 aa, Homo sapiens
  CDR3 for alpha chain variable domain of TCR clone 294126 (TRAV8-4, TRAJ12)
WRDSSYKLIF

SEQ ID NO: 588252 - protein, 12 aa, Homo sapiens
  CDR3 for beta chain variable domain of TCR clone 294126 (TRBV13, TRBJ2-7)
CASSLQAYEQYF

SEQ ID NO: 588253 - protein, 14 aa, Homo sapiens
  CDR3 for alpha chain variable domain of TCR clone 294127 (TRAV12-3, TRAJ10)
SHLPLTGGGNKLTF

SEQ ID NO: 588254 - protein, 14 aa, Homo sapiens
  CDR3 for beta chain variable domain of TCR clone 294127 (TRBV11-2, TRBJ2-3)
CASSLGGGANTQYF

SEQ ID NO: 588255 - protein, 13 aa, Homo sapiens
  CDR3 for alpha chain variable domain of TCR clone 294128 (TRAV27, TRAJ17)
CAGAATAGNKLTF

SEQ ID NO: 588256 - protein, 15 aa, Homo sapiens
  CDR3 for beta chain variable domain of TCR clone 294128 (TRBV5-1, TRBJ2-3)
CASRTQAGSTDTQYF

SEQ ID NO: 588257 - protein, 17 aa, Homo sapiens
  CDR3 for alpha chain variable domain of TCR clone 294129 (TRAV17, TRAJ52)
CATERSSGGTSYGKLTF

SEQ ID NO: 588258 - protein, 15 aa, Homo sapiens
  CDR3 for beta chain variable domain of TCR clone 294129 (TRBV5-1, TRBJ2-1)
CASSLVANSYNEQFF

SEQ ID NO: 588259 - protein, 14 aa, Homo sapiens
  CDR3 for alpha chain variable domain of TCR clone 294130 (TRAV16, TRAJ39)
CVLSKNNAGNMLTF

SEQ ID NO: 588260 - protein, 15 aa, Homo sapiens
  CDR3 for beta chain variable domain of TCR clone 294130 (TRBV23-1, TRBJ1-2)
CASSNTGGGLLWLHL

SEQ ID NO: 588261 - protein, 16 aa, Homo sapiens
  CDR3 for alpha chain variable domain of TCR clone 294131 (TRAV17, TRAJ28)
CATASVSGAGSYQLTF

SEQ ID NO: 588262 - protein, 11 aa, Homo sapiens
  CDR3 for beta chain variable domain of TCR clone 294131 (TRBV29-1, TRBJ2-5)
CSEDRTGTQYF

SEQ ID NO: 588263 - protein, 15 aa, Homo sapiens
  CDR3 for alpha chain variable domain of TCR clone 294132 (TRAV17, TRAJ37)
CATDHGSSNTGKLIF

SEQ ID NO: 588264 - protein, 14 aa, Homo sapiens
  CDR3 for beta chain variable domain of TCR clone 294132 (TRBV7-2, TRBJ2-3)
CANSRTSGADTQYF

SEQ ID NO: 588265 - protein, 13 aa, Homo sapiens
  CDR3 for alpha chain variable domain of TCR clone 294133 (TRAV12-3, TRAJ4)
CAMAERGYNKLIF

SEQ ID NO: 588266 - protein, 17 aa, Homo sapiens
  CDR3 for beta chain variable domain of TCR clone 294133 (TRBV28, TRBJ2-3)
CASSLQVGPSSTDTQYF

SEQ ID NO: 588267 - protein, 16 aa, Homo sapiens
  CDR3 for alpha chain variable domain of TCR clone 294134 (TRAV30, TRAJ24)
CDTEIVDADSWGKFQS

SEQ ID NO: 588268 - protein, 14 aa, Homo sapiens
  CDR3 for beta chain variable domain of TCR clone 294134 (TRBV12-5, TRBJ2-5)
CASGSRTHQETQYF

SEQ ID NO: 588269 - protein, 15 aa, Homo sapiens
  CDR3 for alpha chain variable domain of TCR clone 294135 (TRAV34, TRAJ38)
CGADFTPGNNRKLIW

SEQ ID NO: 588270 - protein, 13 aa, Homo sapiens
  CDR3 for beta chain variable domain of TCR clone 294135 (TRBV11-2, TRBJ1-3)
CASSPTGGNTIYF

SEQ ID NO: 588271 - protein, 10 aa, Homo sapiens
  CDR3 for alpha chain variable domain of TCR clone 294136 (TRAV23/DV6, TRAJ57)
CAASSTLSQG

SEQ ID NO: 588272 - protein, 15 aa, Homo sapiens
  CDR3 for beta chain variable domain of TCR clone 294136 (TRBV28, TRBJ2-5)
CASSFRQGALETQYF

SEQ ID NO: 588273 - protein, 14 aa, Homo sapiens
  CDR3 for alpha chain variable domain of TCR clone 294137 (TRAV9-2, TRAJ39)
CALYIYNAGNMLTF

SEQ ID NO: 588274 - protein, 15 aa, Homo sapiens
  CDR3 for beta chain variable domain of TCR clone 294137 (TRBV6-4, TRBJ2-1)
CASSSGTSGYNEQFF

SEQ ID NO: 588275 - protein, 12 aa, Homo sapiens
  CDR3 for alpha chain variable domain of TCR clone 294138 (TRAV16, TRAJ27)
CALNHQCRQINL

SEQ ID NO: 588276 - protein, 13 aa, Homo sapiens
  CDR3 for beta chain variable domain of TCR clone 294138 (TRBV7-7, TRBJ2-3)
CASSLSRADTQYF

SEQ ID NO: 588277 - protein, 13 aa, Homo sapiens
  CDR3 for alpha chain variable domain of TCR clone 294139 (TRAV3, TRAJ21)
CAVREPDFNKFYF

SEQ ID NO: 588278 - protein, 15 aa, Homo sapiens
  CDR3 for beta chain variable domain of TCR clone 294139 (TRBV7-3, TRBJ2-1)
CASSPTGGGEVEQFC

SEQ ID NO: 588279 - protein, 14 aa, Homo sapiens
  CDR3 for alpha chain variable domain of TCR clone 294140 (TRAV12-1, TRAJ12)
CLVNGRDSSYKLIF

SEQ ID NO: 588280 - protein, 13 aa, Homo sapiens
  CDR3 for beta chain variable domain of TCR clone 294140 (TRBV28, TRBJ2-2)
CASIRESTGELFF

SEQ ID NO: 588281 - protein, 18 aa, Homo sapiens
  CDR3 for alpha chain variable domain of TCR clone 294141 (TRAV26-1, TRAJ23)
CIVRVGLEVWNQGGKLIF

SEQ ID NO: 588282 - protein, 13 aa, Homo sapiens
  CDR3 for beta chain variable domain of TCR clone 294141 (TRBV4-2, TRBJ1-1)
CASSQAGNTEAFF

SEQ ID NO: 588283 - protein, 14 aa, Homo sapiens
  CDR3 for alpha chain variable domain of TCR clone 294142 (TRAV17, TRAJ56)
CATVPAGANSKLTF

SEQ ID NO: 588284 - protein, 15 aa, Homo sapiens
  CDR3 for beta chain variable domain of TCR clone 294142 (TRBV19, TRBJ1-2)
CASSVGQVLNYGYTF

SEQ ID NO: 588285 - protein, 15 aa, Homo sapiens
  CDR3 for alpha chain variable domain of TCR clone 294143 (TRAV23/DV6, TRAJ12)
CAAIDLGAMDSTYKL

SEQ ID NO: 588286 - protein, 15 aa, Homo sapiens
  CDR3 for beta chain variable domain of TCR clone 294143 (TRBV12-4, TRBJ2-5)
CASTLNSGRGETQYF

SEQ ID NO: 588287 - protein, 16 aa, Homo sapiens
  CDR3 for alpha chain variable domain of TCR clone 294144 (TRAV12-2, TRAJ40)
CAVIRGGTSGTYKYIF

SEQ ID NO: 588288 - protein, 15 aa, Homo sapiens
  CDR3 for beta chain variable domain of TCR clone 294144 (TRBV7-9, TRBJ1-2)
CASSLKQKLWLHLRF

SEQ ID NO: 588289 - protein, 11 aa, Homo sapiens
  CDR3 for alpha chain variable domain of TCR clone 294145 (TRAV2, TRAJ33)
CAVESNYQLIW

SEQ ID NO: 588290 - protein, 15 aa, Homo sapiens
  CDR3 for beta chain variable domain of TCR clone 294145 (TRBV11-1, TRBJ2-7)
CASSLNYGASYEQYF

SEQ ID NO: 588291 - protein, 13 aa, Homo sapiens
  CDR3 for alpha chain variable domain of TCR clone 294146 (TRAV27, TRAJ56)
CAGKPGANSKLTF

SEQ ID NO: 588292 - protein, 15 aa, Homo sapiens
  CDR3 for beta chain variable domain of TCR clone 294146 (TRBV6-1, TRBJ2-3)
CASSERWDSADTQYF

SEQ ID NO: 588293 - protein, 14 aa, Homo sapiens
  CDR3 for alpha chain variable domain of TCR clone 294147 (TRAV27, TRAJ37)
CAGERSSTTGKLIF

SEQ ID NO: 588294 - protein, 15 aa, Homo sapiens
  CDR3 for beta chain variable domain of TCR clone 294147 (TRBV11-3, TRBJ1-6)
CASSLDWGASSPLHL

SEQ ID NO: 588295 - protein, 16 aa, Homo sapiens
  CDR3 for alpha chain variable domain of TCR clone 294148 (TRAV8-2, TRAJ48)
CVVSDVSNFGNEKLTF

SEQ ID NO: 588296 - protein, 14 aa, Homo sapiens
  CDR3 for beta chain variable domain of TCR clone 294148 (TRBV19, TRBJ2-7)
CASSIRLGDHEQYF

SEQ ID NO: 588297 - protein, 12 aa, Homo sapiens
  CDR3 for alpha chain variable domain of TCR clone 294149 (TRAV21, TRAJ27)
CAPPGNAGKSTY

SEQ ID NO: 588298 - protein, 13 aa, Homo sapiens
  CDR3 for beta chain variable domain of TCR clone 294149 (TRBV2, TRBJ1-1)
CARNPTGGFHAFF

SEQ ID NO: 588299 - protein, 14 aa, Homo sapiens
  CDR3 for alpha chain variable domain of TCR clone 294150 (TRAV1-2, TRAJ16)
CAVNRFSDGQKLLF

SEQ ID NO: 588300 - protein, 16 aa, Homo sapiens
  CDR3 for beta chain variable domain of TCR clone 294150 (TRBV18, TRBJ2-7)
CASSPSTSGRNHEQYF

SEQ ID NO: 588301 - protein, 14 aa, Homo sapiens
  CDR3 for alpha chain variable domain of TCR clone 294151 (TRAV12-1, TRAJ17)
CVVNYKAAGNKLTF

SEQ ID NO: 588302 - protein, 10 aa, Homo sapiens
  CDR3 for beta chain variable domain of TCR clone 294151 (TRBV28, TRBJ1-2)
CASSSDRAVF

SEQ ID NO: 588303 - protein, 22 aa, Homo sapiens
  CDR3 for alpha chain variable domain of TCR clone 294152 (TRAV12-1, )
CVVNAPRRIPDIQNPDPAVYQL

SEQ ID NO: 588304 - protein, 19 aa, Homo sapiens
  CDR3 for beta chain variable domain of TCR clone 294152 (TRBV7-2, TRBJ2-3)
CASSFLSRNWGGGTDTQYF

SEQ ID NO: 588305 - protein, 12 aa, Homo sapiens
  CDR3 for alpha chain variable domain of TCR clone 294153 (TRAV1-1, TRAJ43)
CAPRVSSNDMRF

SEQ ID NO: 588306 - protein, 16 aa, Homo sapiens
  CDR3 for beta chain variable domain of TCR clone 294153 (TRBV5-1, TRBJ1-1)
CASSSGGNSLNTEAFF

SEQ ID NO: 588307 - protein, 18 aa, Homo sapiens
  CDR3 for alpha chain variable domain of TCR clone 294154 (TRAV26-1, TRAJ23)
CIVRVGLEVWNQGGKLIF

SEQ ID NO: 588308 - protein, 16 aa, Homo sapiens
  CDR3 for beta chain variable domain of TCR clone 294154 (TRBV20-1, TRBJ2-1)
CSALTWTSGSYNEQFF

SEQ ID NO: 588309 - protein, 19 aa, Homo sapiens
  CDR3 for alpha chain variable domain of TCR clone 294155 (TRAV25, TRAJ20)
TATQTTDVGILPHDYKLSF

SEQ ID NO: 588310 - protein, 13 aa, Homo sapiens
  CDR3 for beta chain variable domain of TCR clone 294155 (TRBV14, TRBJ2-7)
CASSQDRRYEQYF

SEQ ID NO: 588311 - protein, 13 aa, Homo sapiens
  CDR3 for alpha chain variable domain of TCR clone 294156 (TRAV8-2, TRAJ45)
CVVSLVQEEVLTD

SEQ ID NO: 588312 - protein, 14 aa, Homo sapiens
  CDR3 for beta chain variable domain of TCR clone 294156 (TRBV7-6, TRBJ2-3)
CASSLGTVTDTQYF

SEQ ID NO: 588313 - protein, 15 aa, Homo sapiens
  CDR3 for alpha chain variable domain of TCR clone 294157 (TRAV3, TRAJ9)
CAVRDSNTGGFKTIV

SEQ ID NO: 588314 - protein, 16 aa, Homo sapiens
  CDR3 for beta chain variable domain of TCR clone 294157 (TRBV15, TRBJ2-5)
CATSPTTGQGMETQYF

SEQ ID NO: 588315 - protein, 11 aa, Homo sapiens
  CDR3 for alpha chain variable domain of TCR clone 294158 (TRAV3, TRAJ21)
CAVGNFNKFYF

SEQ ID NO: 588316 - protein, 16 aa, Homo sapiens
  CDR3 for beta chain variable domain of TCR clone 294158 (TRBV19, TRBJ2-1)
CASSKAGPSSYKSSSS

SEQ ID NO: 588317 - protein, 14 aa, Homo sapiens
  CDR3 for alpha chain variable domain of TCR clone 294159 (TRAV20, TRAJ17)
CAVQARAAGNKLTF

SEQ ID NO: 588318 - protein, 13 aa, Homo sapiens
  CDR3 for beta chain variable domain of TCR clone 294159 (TRBV19, TRBJ1-2)
CASSPALNYGYTF

SEQ ID NO: 588319 - protein, 15 aa, Homo sapiens
  CDR3 for alpha chain variable domain of TCR clone 294160 (TRAV12-1, TRAJ44)
CVVDEYTGTASKLTF

SEQ ID NO: 588320 - protein, 13 aa, Homo sapiens
  CDR3 for beta chain variable domain of TCR clone 294160 (TRBV12-4, TRBJ2-7)
CASSPTETDEQYF

SEQ ID NO: 588321 - protein, 13 aa, Homo sapiens
  CDR3 for alpha chain variable domain of TCR clone 294161 (TRAV20, TRAJ56)
CAVQAGANSKLTF

SEQ ID NO: 588322 - protein, 14 aa, Homo sapiens
  CDR3 for beta chain variable domain of TCR clone 294161 (TRBV28, TRBJ1-1)
CASSPRTRLAEAFF

SEQ ID NO: 588323 - protein, 12 aa, Homo sapiens
  CDR3 for alpha chain variable domain of TCR clone 294162 (TRAV3, TRAJ20)
CAVRDGDYKLSF

SEQ ID NO: 588324 - protein, 15 aa, Homo sapiens
  CDR3 for beta chain variable domain of TCR clone 294162 (TRBV7-2, TRBJ2-7)
CASSLSSGRTYEQYF

SEQ ID NO: 588325 - protein, 13 aa, Homo sapiens
  CDR3 for alpha chain variable domain of TCR clone 294163 (TRAV3, TRAJ21)
GAVREPEFNKFYF

SEQ ID NO: 588326 - protein, 13 aa, Homo sapiens
  CDR3 for beta chain variable domain of TCR clone 294163 (TRBV9, TRBJ2-1)
CASSPSGGNEQFF

SEQ ID NO: 588327 - protein, 18 aa, Homo sapiens
  CDR3 for alpha chain variable domain of TCR clone 294164 (TRAV26-2, TRAJ45)
SILRFWGYSGGGADVLTF

SEQ ID NO: 588328 - protein, 17 aa, Homo sapiens
  CDR3 for beta chain variable domain of TCR clone 294164 (TRBV28, TRBJ2-3)
CASSPTPAGGRVDTQYF

SEQ ID NO: 588329 - protein, 13 aa, Homo sapiens
  CDR3 for alpha chain variable domain of TCR clone 294165 (TRAV16, TRAJ11)
FALMNSGYSTLTF

SEQ ID NO: 588330 - protein, 15 aa, Homo sapiens
  CDR3 for beta chain variable domain of TCR clone 294165 (TRBV7-3, TRBJ2-1)
CASSYFRGTYNEQFF

SEQ ID NO: 588331 - protein, 11 aa, Homo sapiens
  CDR3 for alpha chain variable domain of TCR clone 294166 (TRAV4, TRAJ28)
CLVGDNRAETL

SEQ ID NO: 588332 - protein, 13 aa, Homo sapiens
  CDR3 for beta chain variable domain of TCR clone 294166 (TRBV7-9, TRBJ1-2)
CASSLKQNYGYTF

SEQ ID NO: 588333 - protein, 17 aa, Homo sapiens
  CDR3 for alpha chain variable domain of TCR clone 294167 (TRAV38-1, TRAJ45)
CAFMKHYMGGGADGLTL

SEQ ID NO: 588334 - protein, 19 aa, Homo sapiens
  CDR3 for beta chain variable domain of TCR clone 294167 (TRBV6-1, TRBJ2-5)
CASSEQGLAGGLYQETQYF

SEQ ID NO: 588335 - protein, 12 aa, Homo sapiens
  CDR3 for alpha chain variable domain of TCR clone 294168 (TRAV4, TRAJ26)
CLVGDYGQNFVF

SEQ ID NO: 588336 - protein, 14 aa, Homo sapiens
  CDR3 for beta chain variable domain of TCR clone 294168 (TRBV25-1, TRBJ1-1)
CASTHLGGNTEAFF

SEQ ID NO: 588337 - protein, 13 aa, Homo sapiens
  CDR3 for alpha chain variable domain of TCR clone 294169 (TRAV27, TRAJ8)
GAGGPTGFQKLVF

SEQ ID NO: 588338 - protein, 15 aa, Homo sapiens
  CDR3 for beta chain variable domain of TCR clone 294169 (TRBV6-1, TRBJ2-7)
CASSESMGDFYEQYF

SEQ ID NO: 588339 - protein, 12 aa, Homo sapiens
  CDR3 for alpha chain variable domain of TCR clone 294170 (TRAV13-1, TRAJ21)
CAAKEGFNKLYF

SEQ ID NO: 588340 - protein, 16 aa, Homo sapiens
  CDR3 for beta chain variable domain of TCR clone 294170 (TRBV20-1, TRBJ1-4)
CSAPGQGLLTNEKLFF

SEQ ID NO: 588341 - protein, 13 aa, Homo sapiens
  CDR3 for alpha chain variable domain of TCR clone 294171 (TRAV8-1, TRAJ28)
CAVSGAGSYQLTF

SEQ ID NO: 588342 - protein, 14 aa, Homo sapiens
  CDR3 for beta chain variable domain of TCR clone 294171 (TRBV7-2, TRBJ2-2)
CASRGQGAAGKLFF

SEQ ID NO: 588343 - protein, 12 aa, Homo sapiens
  CDR3 for alpha chain variable domain of TCR clone 294172 (TRAV23/DV6, TRAJ30)
CAASKGDDKILF

SEQ ID NO: 588344 - protein, 15 aa, Homo sapiens
  CDR3 for beta chain variable domain of TCR clone 294172 (TRBV20-1, TRBJ2-7)
CSARDRVSGMDEQYF

SEQ ID NO: 588345 - protein, 16 aa, Homo sapiens
  CDR3 for alpha chain variable domain of TCR clone 294173 (TRAV4, TRAJ22)
CLVGDLYSGSARQLTF

SEQ ID NO: 588346 - protein, 15 aa, Homo sapiens
  CDR3 for beta chain variable domain of TCR clone 294173 (TRBV11-2, TRBJ1-2)
CASSLEGVQRNGYTF

SEQ ID NO: 588347 - protein, 17 aa, Homo sapiens
  CDR3 for alpha chain variable domain of TCR clone 294174 (TRAV27, TRAJ42)
CAERVIYYGGSHGDLIF

SEQ ID NO: 588348 - protein, 14 aa, Homo sapiens
  CDR3 for beta chain variable domain of TCR clone 294174 (TRBV6-6, TRBJ2-3)
CASRLQREADTQYF

SEQ ID NO: 588349 - protein, 15 aa, Homo sapiens
  CDR3 for alpha chain variable domain of TCR clone 294175 (TRAV26-1, TRAJ29)
CIVRVTNSGNTPLVF

SEQ ID NO: 588350 - protein, 12 aa, Homo sapiens
  CDR3 for beta chain variable domain of TCR clone 294175 (TRBV20-1, TRBJ1-2)
CSAGWQGYGYTF

SEQ ID NO: 588351 - protein, 15 aa, Homo sapiens
  CDR3 for alpha chain variable domain of TCR clone 294176 (TRAV26-1, TRAJ29)
CIVRVEGSGNTPIVF

SEQ ID NO: 588352 - protein, 15 aa, Homo sapiens
  CDR3 for beta chain variable domain of TCR clone 294176 (TRBV7-9, TRBJ1-5)
CASSQGHQTNQPQHF

SEQ ID NO: 588353 - protein, 17 aa, Homo sapiens
  CDR3 for alpha chain variable domain of TCR clone 294177 (TRAV3, TRAJ7)
CAVRDMSPLEGTTDSPL

SEQ ID NO: 588354 - protein, 17 aa, Homo sapiens
  CDR3 for beta chain variable domain of TCR clone 294177 (TRBV15, TRBJ1-2)
CATSGREIDVVNYGYTF

SEQ ID NO: 588355 - protein, 14 aa, Homo sapiens
  CDR3 for alpha chain variable domain of TCR clone 294178 (TRAV12-2, TRAJ5)
CAVNRSTGRRALTF

SEQ ID NO: 588356 - protein, 15 aa, Homo sapiens
  CDR3 for beta chain variable domain of TCR clone 294178 (TRBV27, TRBJ2-3)
CASSSLAGVIDTQYF

SEQ ID NO: 588357 - protein, 12 aa, Homo sapiens
  CDR3 for alpha chain variable domain of TCR clone 294179 (TRAV17, TRAJ4)
CATRGGYNKLIF

SEQ ID NO: 588358 - protein, 15 aa, Homo sapiens
  CDR3 for beta chain variable domain of TCR clone 294179 (TRBV28, TRBJ1-5)
CASSDQVYSNQPQHF

SEQ ID NO: 588359 - protein, 11 aa, Homo sapiens
  CDR3 for alpha chain variable domain of TCR clone 294180 (TRAV12-1, TRAJ30)
CVVNGQDKIIF

SEQ ID NO: 588360 - protein, 14 aa, Homo sapiens
  CDR3 for beta chain variable domain of TCR clone 294180 (TRBV7-8, TRBJ2-7)
CASSPRDRVYEQYF

SEQ ID NO: 588361 - protein, 15 aa, Homo sapiens
  CDR3 for alpha chain variable domain of TCR clone 294181 (TRAV30, TRAJ49)
CGTEGWAEHRSPVLF

SEQ ID NO: 588362 - protein, 15 aa, Homo sapiens
  CDR3 for beta chain variable domain of TCR clone 294181 (TRBV7-2, TRBJ2-1)
CASSSGLAGGNEQFF

SEQ ID NO: 588363 - protein, 14 aa, Homo sapiens
  CDR3 for alpha chain variable domain of TCR clone 294182 (TRAV26-1, TRAJ22)
CIVRVYGSARQLTF

SEQ ID NO: 588364 - protein, 17 aa, Homo sapiens
  CDR3 for beta chain variable domain of TCR clone 294182 (TRBV7-3, TRBJ2-3)
CASSPGGLAGFGDTRYF

SEQ ID NO: 588365 - protein, 14 aa, Homo sapiens
  CDR3 for alpha chain variable domain of TCR clone 294183 (TRAV16, TRAJ54)
CALSGFQGAQKLVF

SEQ ID NO: 588366 - protein, 15 aa, Homo sapiens
  CDR3 for beta chain variable domain of TCR clone 294183 (TRBV18, TRBJ2-2)
CASSTSGLHTGELFF

SEQ ID NO: 588367 - protein, 13 aa, Homo sapiens
  CDR3 for alpha chain variable domain of TCR clone 294184 (TRAV39, TRAJ48)
CAAGNFGNEKLTF

SEQ ID NO: 588368 - protein, 14 aa, Homo sapiens
  CDR3 for beta chain variable domain of TCR clone 294184 (TRBV2, TRBJ2-1)
CASRTGSSYNEQFF

SEQ ID NO: 588369 - protein, 21 aa, Homo sapiens
  CDR3 for alpha chain variable domain of TCR clone 294185 (TRAV2, TRAJ27)
ILQVRKADAAVYSANAGKSTF

SEQ ID NO: 588370 - protein, 15 aa, Homo sapiens
  CDR3 for beta chain variable domain of TCR clone 294185 (TRBV7-7, TRBJ1-3)
CASSRGEHSGNTIYF

SEQ ID NO: 588371 - protein, 14 aa, Homo sapiens
  CDR3 for alpha chain variable domain of TCR clone 294186 (TRAV2, TRAJ37)
CAVDGSSNTGKLIF

SEQ ID NO: 588372 - protein, 15 aa, Homo sapiens
  CDR3 for beta chain variable domain of TCR clone 294186 (TRBV24-1, TRBJ2-4)
CATSDPRDRANIQYF

SEQ ID NO: 588373 - protein, 13 aa, Homo sapiens
  CDR3 for alpha chain variable domain of TCR clone 294187 (TRAV17, TRAJ5)
CALRGTGRRALTF

SEQ ID NO: 588374 - protein, 16 aa, Homo sapiens
  CDR3 for beta chain variable domain of TCR clone 294187 (TRBV5-1, TRBJ2-1)
CASSLTLAGGRNEQFF

SEQ ID NO: 588375 - protein, 14 aa, Homo sapiens
  CDR3 for alpha chain variable domain of TCR clone 294188 (TRAV38-1, TRAJ54)
CAFLRIQGAQKLVF

SEQ ID NO: 588376 - protein, 15 aa, Homo sapiens
  CDR3 for beta chain variable domain of TCR clone 294188 (TRBV7-7, TRBJ2-2)
CATSKLAKNTGELFF

SEQ ID NO: 588377 - protein, 13 aa, Homo sapiens
  CDR3 for alpha chain variable domain of TCR clone 294189 (TRAV8-6, TRAJ49)
CAVITNTVNRFYF

SEQ ID NO: 588378 - protein, 15 aa, Homo sapiens
  CDR3 for beta chain variable domain of TCR clone 294189 (TRBV9, TRBJ1-6)
CASSVAGTGDSPLHF

SEQ ID NO: 588379 - protein, 14 aa, Homo sapiens
  CDR3 for alpha chain variable domain of TCR clone 294190 (TRAV16, TRAJ54)
CALSGGQGAQKLVF

SEQ ID NO: 588380 - protein, 15 aa, Homo sapiens
  CDR3 for beta chain variable domain of TCR clone 294190 (TRBV18, TRBJ2-2)
CASSTSGLHTGELFF

SEQ ID NO: 588381 - protein, 12 aa, Homo sapiens
  CDR3 for alpha chain variable domain of TCR clone 294191 (TRAV27, TRAJ35)
CAGADFGNVLHY

SEQ ID NO: 588382 - protein, 15 aa, Homo sapiens
  CDR3 for beta chain variable domain of TCR clone 294191 (TRBV4-1, TRBJ1-2)
CASSLNTGQGYGYTF

SEQ ID NO: 588383 - protein, 13 aa, Homo sapiens
  CDR3 for alpha chain variable domain of TCR clone 294192 (TRAV27, TRAJ29)
CAGAHSGKTPLVF

SEQ ID NO: 588384 - protein, 18 aa, Homo sapiens
  CDR3 for beta chain variable domain of TCR clone 294192 (TRBV6-4, TRBJ2-1)
CASSPDRMGSGSINEQFF

SEQ ID NO: 588385 - protein, 15 aa, Homo sapiens
  CDR3 for alpha chain variable domain of TCR clone 294193 (TRAV26-2, TRAJ54)
CILRDVGQGAEKLVF

SEQ ID NO: 588386 - protein, 13 aa, Homo sapiens
  CDR3 for beta chain variable domain of TCR clone 294193 (TRBV7-9, TRBJ1-1)
CASSLAGVTEAFF

SEQ ID NO: 588387 - protein, 10 aa, Homo sapiens
  CDR3 for alpha chain variable domain of TCR clone 294194 (TRAV20, TRAJ22)
CAAPARQLTF

SEQ ID NO: 588388 - protein, 19 aa, Homo sapiens
  CDR3 for beta chain variable domain of TCR clone 294194 (TRBV14, TRBJ2-1)
CASSQDQLWEAPEYNEQFF

SEQ ID NO: 588389 - protein, 14 aa, Homo sapiens
  CDR3 for alpha chain variable domain of TCR clone 294195 (TRAV12-2, TRAJ17)
CAVPFKAAGNKLTF

SEQ ID NO: 588390 - protein, 17 aa, Homo sapiens
  CDR3 for beta chain variable domain of TCR clone 294195 (TRBV20-1, TRBJ2-2)
CSASGSGHGGLTGELFC

SEQ ID NO: 588391 - protein, 16 aa, Homo sapiens
  CDR3 for alpha chain variable domain of TCR clone 294196 (TRAV3, TRAJ10)
CAVRDRLTGGGNKLTF

SEQ ID NO: 588392 - protein, 16 aa, Homo sapiens
  CDR3 for beta chain variable domain of TCR clone 294196 (TRBV12-5, TRBJ2-5)
CASGPRTSGNQETQYF

SEQ ID NO: 588393 - protein, 14 aa, Homo sapiens
  CDR3 for alpha chain variable domain of TCR clone 294197 (TRAV12-2, TRAJ45)
CAVNIGGGAAGLTF

SEQ ID NO: 588394 - protein, 17 aa, Homo sapiens
  CDR3 for beta chain variable domain of TCR clone 294197 (TRBV20-1, TRBJ2-2)
CSASGSGQGGLTGELFF

SEQ ID NO: 588395 - protein, 13 aa, Homo sapiens
  CDR3 for alpha chain variable domain of TCR clone 294198 (TRAV20, TRAJ31)
CAVQAIGGARLMF

SEQ ID NO: 588396 - protein, 15 aa, Homo sapiens
  CDR3 for beta chain variable domain of TCR clone 294198 (TRBV10-3, TRBJ2-3)
CAISLTSGGTDTQYF

SEQ ID NO: 588397 - protein, 11 aa, Homo sapiens
  CDR3 for alpha chain variable domain of TCR clone 294199 (TRAV12-3, TRAJ43)
CAMSVSNDMRF

SEQ ID NO: 588398 - protein, 19 aa, Homo sapiens
  CDR3 for beta chain variable domain of TCR clone 294199 (TRBV28, TRBJ2-7)
CASSYSGTSRPGWVYEQYF

SEQ ID NO: 588399 - protein, 14 aa, Homo sapiens
  CDR3 for alpha chain variable domain of TCR clone 294200 (TRAV3, TRAJ9)
CTVSLNTGGFKTIF

SEQ ID NO: 588400 - protein, 15 aa, Homo sapiens
  CDR3 for beta chain variable domain of TCR clone 294200 (TRBV7-2, TRBJ2-1)
CASSLASGRVNEQFF

SEQ ID NO: 588401 - protein, 15 aa, Homo sapiens
  CDR3 for alpha chain variable domain of TCR clone 294201 (TRAV25, TRAJ53)
CAATGGVGSNYKLTF

SEQ ID NO: 588402 - protein, 19 aa, Homo sapiens
  CDR3 for beta chain variable domain of TCR clone 294201 (TRBV7-8, TRBJ2-3)
CASSFLSRNWGGGTDTQYF

SEQ ID NO: 588403 - protein, 16 aa, Homo sapiens
  CDR3 for alpha chain variable domain of TCR clone 294202 (TRAV26-1, TRAJ53)
CIVRVAMGGSNYKLTF

SEQ ID NO: 588404 - protein, 13 aa, Homo sapiens
  CDR3 for beta chain variable domain of TCR clone 294202 (TRBV12-4, TRBJ1-2)
CASSLRQGKGYTF

SEQ ID NO: 588405 - protein, 14 aa, Homo sapiens
  CDR3 for alpha chain variable domain of TCR clone 294203 (TRAV13-2, TRAJ43)
CAEIPTYNNNDMRF

SEQ ID NO: 588406 - protein, 16 aa, Homo sapiens
  CDR3 for beta chain variable domain of TCR clone 294203 (TRBV7-3, TRBJ2-1)
CASSKPLAGGYNEQFF

SEQ ID NO: 588407 - protein, 15 aa, Homo sapiens
  CDR3 for alpha chain variable domain of TCR clone 294204 (TRAV25, TRAJ52)
CAGTSGGTSYGKLTF

SEQ ID NO: 588408 - protein, 13 aa, Homo sapiens
  CDR3 for beta chain variable domain of TCR clone 294204 (TRBV7-9, TRBJ2-7)
CASSFAGAYEQYF

SEQ ID NO: 588409 - protein, 14 aa, Homo sapiens
  CDR3 for alpha chain variable domain of TCR clone 294205 (TRAV14/DV4, TRAJ41)
CAKGGPDSGYALNF

SEQ ID NO: 588410 - protein, 15 aa, Homo sapiens
  CDR3 for beta chain variable domain of TCR clone 294205 (TRBV19, TRBJ2-1)
CASSIQATSYNEQFF

SEQ ID NO: 588411 - protein, 14 aa, Homo sapiens
  CDR3 for alpha chain variable domain of TCR clone 294206 (TRAV12-2, TRAJ13)
CAVKKTGGYQKVTF

SEQ ID NO: 588412 - protein, 18 aa, Homo sapiens
  CDR3 for beta chain variable domain of TCR clone 294206 (TRBV28, TRBJ2-1)
CASSSPSGLAGAIYEQFF

SEQ ID NO: 588413 - protein, 15 aa, Homo sapiens
  CDR3 for alpha chain variable domain of TCR clone 294207 (TRAV3, TRAJ20)
CAARDIKLSDYKLSF

SEQ ID NO: 588414 - protein, 18 aa, Homo sapiens
  CDR3 for beta chain variable domain of TCR clone 294207 (TRBV20-1, TRBJ2-5)
CSQTGDSGRLGGKETQYF

SEQ ID NO: 588415 - protein, 12 aa, Homo sapiens
  CDR3 for alpha chain variable domain of TCR clone 294208 (TRAV13-1, TRAJ11)
CAGPSGYSTLTF

SEQ ID NO: 588416 - protein, 13 aa, Homo sapiens
  CDR3 for beta chain variable domain of TCR clone 294208 (TRBV12-4, TRBJ2-1)
CASRLSPSNEQFF

SEQ ID NO: 588417 - protein, 14 aa, Homo sapiens
  CDR3 for alpha chain variable domain of TCR clone 294209 (TRAV1-1, TRAJ27)
CAVIYNTNAGKSTF

SEQ ID NO: 588418 - protein, 12 aa, Homo sapiens
  CDR3 for beta chain variable domain of TCR clone 294209 (TRBV18, TRBJ2-1)
CASSSDEDEQFF

SEQ ID NO: 588419 - protein, 13 aa, Homo sapiens
  CDR3 for alpha chain variable domain of TCR clone 294210 (TRAV17, TRAJ26)
CATVDNYGQNFVF

SEQ ID NO: 588420 - protein, 14 aa, Homo sapiens
  CDR3 for beta chain variable domain of TCR clone 294210 (TRBV7-2, TRBJ2-7)
CASRAQGAAYEQYF

SEQ ID NO: 588421 - protein, 15 aa, Homo sapiens
  CDR3 for alpha chain variable domain of TCR clone 294211 (TRAV3, TRAJ22)
CAVRDRGGSARQLTF

SEQ ID NO: 588422 - protein, 17 aa, Homo sapiens
  CDR3 for beta chain variable domain of TCR clone 294211 (TRBV13, TRBJ2-3)
CASSLSRVAGWRNTQYF

SEQ ID NO: 588423 - protein, 17 aa, Homo sapiens
  CDR3 for alpha chain variable domain of TCR clone 294212 (TRAV38-1, TRAJ28)
CAFMKPTSGAGSYQLTF

SEQ ID NO: 588424 - protein, 12 aa, Homo sapiens
  CDR3 for beta chain variable domain of TCR clone 294212 (TRBV7-9, TRBJ1-4)
CASSTDREKLFF

SEQ ID NO: 588425 - protein, 13 aa, Homo sapiens
  CDR3 for alpha chain variable domain of TCR clone 294213 (TRAV2, TRAJ40)
CAVVTSGTHKYIF

SEQ ID NO: 588426 - protein, 15 aa, Homo sapiens
  CDR3 for beta chain variable domain of TCR clone 294213 (TRBV27, TRBJ2-1)
CASSNGGGSSNEQFF

SEQ ID NO: 588427 - protein, 13 aa, Homo sapiens
  CDR3 for alpha chain variable domain of TCR clone 294214 (TRAV27, TRAJ29)
CAGAHSGNTPLVF

SEQ ID NO: 588428 - protein, 14 aa, Homo sapiens
  CDR3 for beta chain variable domain of TCR clone 294214 (TRBV7-6, TRBJ2-3)
CASSLGTVTDTQYF

SEQ ID NO: 588429 - protein, 14 aa, Homo sapiens
  CDR3 for alpha chain variable domain of TCR clone 294215 (TRAV12-3, TRAJ13)
CAMRNSGCYQKVTF

SEQ ID NO: 588430 - protein, 14 aa, Homo sapiens
  CDR3 for beta chain variable domain of TCR clone 294215 (TRBV4-1, TRBJ1-6)
CASSPGSDSSPLHF

SEQ ID NO: 588431 - protein, 17 aa, Homo sapiens
  CDR3 for alpha chain variable domain of TCR clone 294216 (TRAV3, TRAJ7)
CAVRDMSPLEGTTDSLL

SEQ ID NO: 588432 - protein, 17 aa, Homo sapiens
  CDR3 for beta chain variable domain of TCR clone 294216 (TRBV15, TRBJ1-2)
CATAGREIDVVNYGYTF

SEQ ID NO: 588433 - protein, 16 aa, Homo sapiens
  CDR3 for alpha chain variable domain of TCR clone 294217 (TRAV21, TRAJ37)
CAVRPRGSSNTSKLIF

SEQ ID NO: 588434 - protein, 13 aa, Homo sapiens
  CDR3 for beta chain variable domain of TCR clone 294217 (TRBV10-3, TRBJ2-7)
CASKLAVNYEQYF

SEQ ID NO: 588435 - protein, 14 aa, Homo sapiens
  CDR3 for alpha chain variable domain of TCR clone 294218 (TRAV4, TRAJ23)
CLVGARNQGGKLIF

SEQ ID NO: 588436 - protein, 14 aa, Homo sapiens
  CDR3 for beta chain variable domain of TCR clone 294218 (TRBV7-3, TRBJ2-1)
CASSLAGGTNEQFF

SEQ ID NO: 588437 - protein, 16 aa, Homo sapiens
  CDR3 for alpha chain variable domain of TCR clone 294219 (TRAV26-1, TRAJ53)
CIVRVAMGGSHYQLTF

SEQ ID NO: 588438 - protein, 12 aa, Homo sapiens
  CDR3 for beta chain variable domain of TCR clone 294219 (TRBV7-9, TRBJ1-5)
CASSPQGQPQHF

SEQ ID NO: 588439 - protein, 10 aa, Homo sapiens
  CDR3 for alpha chain variable domain of TCR clone 294220 (TRAV1-2, TRAJ23)
CAGQGGKLIF

SEQ ID NO: 588440 - protein, 14 aa, Homo sapiens
  CDR3 for beta chain variable domain of TCR clone 294220 (TRBV19, TRBJ2-1)
CASKDPSSYNEQFF

SEQ ID NO: 588441 - protein, 12 aa, Homo sapiens
  CDR3 for alpha chain variable domain of TCR clone 294221 (TRAV26-1, TRAJ54)
CIGGCGAQKLVF

SEQ ID NO: 588442 - protein, 14 aa, Homo sapiens
  CDR3 for beta chain variable domain of TCR clone 294221 (TRBV11-2, TRBJ1-2)
CASSSGQAGDGYTF

SEQ ID NO: 588443 - protein, 14 aa, Homo sapiens
  CDR3 for alpha chain variable domain of TCR clone 294222 (TRAV1-2, TRAJ8)
CAVRGDTGFQKLVF

SEQ ID NO: 588444 - protein, 15 aa, Homo sapiens
  CDR3 for beta chain variable domain of TCR clone 294222 (TRBV7-9, TRBJ1-1)
CASSHRGTVNTEAFF

SEQ ID NO: 588445 - protein, 17 aa, Homo sapiens
  CDR3 for alpha chain variable domain of TCR clone 294223 (TRAV13-1, TRAJ23)
CAASKRFHRLRKAYLRT

SEQ ID NO: 588446 - protein, 13 aa, Homo sapiens
  CDR3 for beta chain variable domain of TCR clone 294223 (TRBV4-1, TRBJ2-2)
CASSQENTGELFF

SEQ ID NO: 588447 - protein, 16 aa, Homo sapiens
  CDR3 for alpha chain variable domain of TCR clone 294224 (TRAV30, TRAJ24)
CVTEIVDADSWGKFQC

SEQ ID NO: 588448 - protein, 16 aa, Homo sapiens
  CDR3 for beta chain variable domain of TCR clone 294224 (TRBV7-3, TRBJ2-2)
CASSLKRGTLSGELFF

SEQ ID NO: 588449 - protein, 12 aa, Homo sapiens
  CDR3 for alpha chain variable domain of TCR clone 294225 (TRAV12-1, TRAJ40)
CVVYSGTYKYIV

SEQ ID NO: 588450 - protein, 17 aa, Homo sapiens
  CDR3 for beta chain variable domain of TCR clone 294225 (TRBV11-3, TRBJ1-5)
CASSPLTGLRGNQPQHF

SEQ ID NO: 588451 - protein, 16 aa, Homo sapiens
  CDR3 for alpha chain variable domain of TCR clone 294226 (TRAV1-2, TRAJ10)
CAVGGVLTGGGNKLTF

SEQ ID NO: 588452 - protein, 12 aa, Homo sapiens
  CDR3 for beta chain variable domain of TCR clone 294226 (TRBV7-8, TRBJ2-7)
CASSLGDRERYF

SEQ ID NO: 588453 - protein, 14 aa, Homo sapiens
  CDR3 for alpha chain variable domain of TCR clone 294227 (TRAV21, TRAJ35)
CAVMPIGFGNVRPC

SEQ ID NO: 588454 - protein, 12 aa, Homo sapiens
  CDR3 for beta chain variable domain of TCR clone 294227 (TRBV7-9, TRBJ2-7)
CASSIKREEQYF

SEQ ID NO: 588455 - protein, 15 aa, Homo sapiens
  CDR3 for alpha chain variable domain of TCR clone 294228 (TRAV26-1, TRAJ56)
CIVRVDNGANSKLTF

SEQ ID NO: 588456 - protein, 14 aa, Homo sapiens
  CDR3 for beta chain variable domain of TCR clone 294228 (TRBV5-1, TRBJ2-7)
CASIRGESLYEQYF

SEQ ID NO: 588457 - protein, 14 aa, Homo sapiens
  CDR3 for alpha chain variable domain of TCR clone 294229 (TRAV17, TRAJ54)
CATDANQGAQKLVF

SEQ ID NO: 588458 - protein, 12 aa, Homo sapiens
  CDR3 for beta chain variable domain of TCR clone 294229 (TRBV6-3, TRBJ2-1)
CASSGSYNEQCF

SEQ ID NO: 588459 - protein, 15 aa, Homo sapiens
  CDR3 for alpha chain variable domain of TCR clone 294230 (TRAV8-3, TRAJ45)
CASSYSGGGADGRTF

SEQ ID NO: 588460 - protein, 13 aa, Homo sapiens
  CDR3 for beta chain variable domain of TCR clone 294230 (TRBV10-3, TRBJ2-7)
CASKLEVNYEQYF

SEQ ID NO: 588461 - protein, 11 aa, Homo sapiens
  CDR3 for alpha chain variable domain of TCR clone 294231 (TRAV1-2, TRAJ31)
CAVNNNAKPMF

SEQ ID NO: 588462 - protein, 15 aa, Homo sapiens
  CDR3 for beta chain variable domain of TCR clone 294231 (TRBV28, TRBJ2-1)
CASSIIAGGRSEQFF

SEQ ID NO: 588463 - protein, 11 aa, Homo sapiens
  CDR3 for alpha chain variable domain of TCR clone 294232 (TRAV35, TRAJ30)
CAGERDDKIIF

SEQ ID NO: 588464 - protein, 14 aa, Homo sapiens
  CDR3 for beta chain variable domain of TCR clone 294232 (TRBV15, TRBJ2-5)
GATSGDRGQETQYF

SEQ ID NO: 588465 - protein, 13 aa, Homo sapiens
  CDR3 for alpha chain variable domain of TCR clone 294233 (TRAV8-2, TRAJ49)
CVVTPNTGNQFYF

SEQ ID NO: 588466 - protein, 11 aa, Homo sapiens
  CDR3 for beta chain variable domain of TCR clone 294233 (TRBV7-2, TRBJ2-7)
CASSLTYEQYF

SEQ ID NO: 588467 - protein, 11 aa, Homo sapiens
  CDR3 for alpha chain variable domain of TCR clone 294234 (TRAV2, TRAJ13)
CASGGYQKVTF

SEQ ID NO: 588468 - protein, 13 aa, Homo sapiens
  CDR3 for beta chain variable domain of TCR clone 294234 (TRBV6-1, TRBJ2-5)
CASGYQAVETQYF

SEQ ID NO: 588469 - protein, 17 aa, Homo sapiens
  CDR3 for alpha chain variable domain of TCR clone 294235 (TRAV2, TRAJ10)
CAVEDQRSREEETNSTL

SEQ ID NO: 588470 - protein, 16 aa, Homo sapiens
  CDR3 for beta chain variable domain of TCR clone 294235 (TRBV18, TRBJ1-5)
CASSPSTGNSNQPQHF

SEQ ID NO: 588471 - protein, 11 aa, Homo sapiens
  CDR3 for alpha chain variable domain of TCR clone 294236 (TRAV17, TRAJ9)
CATTGGFKTIF

SEQ ID NO: 588472 - protein, 14 aa, Homo sapiens
  CDR3 for beta chain variable domain of TCR clone 294236 (TRBV7-9, TRBJ2-5)
CASSLVGGEETQYF

SEQ ID NO: 588473 - protein, 11 aa, Homo sapiens
  CDR3 for alpha chain variable domain of TCR clone 294237 (TRAV1-2, TRAJ20)
CAVANDYKLSF

SEQ ID NO: 588474 - protein, 15 aa, Homo sapiens
  CDR3 for beta chain variable domain of TCR clone 294237 (TRBV12-4, TRBJ1-5)
CASTRQGSGNQPQHF

SEQ ID NO: 588475 - protein, 14 aa, Homo sapiens
  CDR3 for alpha chain variable domain of TCR clone 294238 (TRAV26-1, TRAJ31)
CIVRGGDNNARLMF

SEQ ID NO: 588476 - protein, 14 aa, Homo sapiens
  CDR3 for beta chain variable domain of TCR clone 294238 (TRBV7-2, TRBJ2-5)
CASSPARGTEAQYF

SEQ ID NO: 588477 - protein, 12 aa, Homo sapiens
  CDR3 for alpha chain variable domain of TCR clone 294239 (TRAV27, TRAJ40)
CRPPSGTYKYIF

SEQ ID NO: 588478 - protein, 13 aa, Homo sapiens
  CDR3 for beta chain variable domain of TCR clone 294239 (TRBV28, TRBJ1-2)
CAGRDRGNYGYTF

SEQ ID NO: 588479 - protein, 11 aa, Homo sapiens
  CDR3 for alpha chain variable domain of TCR clone 294240 (TRAV12-3, TRAJ43)
CAMSVSNDMRF

SEQ ID NO: 588480 - protein, 14 aa, Homo sapiens
  CDR3 for beta chain variable domain of TCR clone 294240 (TRBV7-8, TRBJ2-7)
CASSLWQSSYEQYF

SEQ ID NO: 588481 - protein, 13 aa, Homo sapiens
  CDR3 for alpha chain variable domain of TCR clone 294241 (TRAV23/DV6, TRAJ16)
CAASISDGQKLLF

SEQ ID NO: 588482 - protein, 15 aa, Homo sapiens
  CDR3 for beta chain variable domain of TCR clone 294241 (TRBV10-2, TRBJ2-6)
CASSEQGTGANVLTF

SEQ ID NO: 588483 - protein, 13 aa, Homo sapiens
  CDR3 for alpha chain variable domain of TCR clone 294242 (TRAV36/DV7, TRAJ49)
CAGDSNTGNQFYF

SEQ ID NO: 588484 - protein, 15 aa, Homo sapiens
  CDR3 for beta chain variable domain of TCR clone 294242 (TRBV7-2, TRBJ1-6)
CASSSPGQDNSPLHF

SEQ ID NO: 588485 - protein, 13 aa, Homo sapiens
  CDR3 for alpha chain variable domain of TCR clone 294243 (TRAV17, TRAJ40)
CAGALGGTYKYIF

SEQ ID NO: 588486 - protein, 17 aa, Homo sapiens
  CDR3 for beta chain variable domain of TCR clone 294243 (TRBV7-8, TRBJ2-6)
CASSAGTGGAGANVLTF

SEQ ID NO: 588487 - protein, 13 aa, Homo sapiens
  CDR3 for alpha chain variable domain of TCR clone 294244 (TRAV13-1, TRAJ12)
CSKYMGSSYELIF

SEQ ID NO: 588488 - protein, 14 aa, Homo sapiens
  CDR3 for beta chain variable domain of TCR clone 294244 (TRBV29-1, TRBJ2-3)
CSARAGAGTDTQYF

SEQ ID NO: 588489 - protein, 13 aa, Homo sapiens
  CDR3 for alpha chain variable domain of TCR clone 294245 (TRAV39, TRAJ58)
CAGEETSGSRLTF

SEQ ID NO: 588490 - protein, 13 aa, Homo sapiens
  CDR3 for beta chain variable domain of TCR clone 294245 (TRBV7-9, TRBJ2-3)
CASSPGSTDTQYF

SEQ ID NO: 588491 - protein, 13 aa, Homo sapiens
  CDR3 for alpha chain variable domain of TCR clone 294246 (TRAV35, TRAJ57)
CWSPHGGSEKLVF

SEQ ID NO: 588492 - protein, 18 aa, Homo sapiens
  CDR3 for beta chain variable domain of TCR clone 294246 (TRBV6-6, TRBJ1-3)
CASSYSKWDSISGNTIYF

SEQ ID NO: 588493 - protein, 15 aa, Homo sapiens
  CDR3 for alpha chain variable domain of TCR clone 294247 (TRAV3, TRAJ17)
CAVSPKEAACNKLTF

SEQ ID NO: 588494 - protein, 14 aa, Homo sapiens
  CDR3 for beta chain variable domain of TCR clone 294247 (TRBV5-1, TRBJ2-3)
CASSLFGPTDTQYF

SEQ ID NO: 588495 - protein, 15 aa, Homo sapiens
  CDR3 for alpha chain variable domain of TCR clone 294248 (TRAV12-3, TRAJ11)
CAMSEENSGYSTITF

SEQ ID NO: 588496 - protein, 17 aa, Homo sapiens
  CDR3 for beta chain variable domain of TCR clone 294248 (TRBV20-1, TRBJ2-1)
CSASSSGLAGSYNEQFF

SEQ ID NO: 588497 - protein, 13 aa, Homo sapiens
  CDR3 for alpha chain variable domain of TCR clone 294249 (TRAV13-2, TRAJ15)
GAGRPQAGTALIF

SEQ ID NO: 588498 - protein, 15 aa, Homo sapiens
  CDR3 for beta chain variable domain of TCR clone 294249 (TRBV11-2, TRBJ2-7)
CASRFPGTGGYEQYF

SEQ ID NO: 588499 - protein, 12 aa, Homo sapiens
  CDR3 for alpha chain variable domain of TCR clone 294250 (TRAV27, TRAJ37)
CADSGNTGKLIF

SEQ ID NO: 588500 - protein, 14 aa, Homo sapiens
  CDR3 for beta chain variable domain of TCR clone 294250 (TRBV4-1, TRBJ2-2)
CASSQAVNTGELFF

SEQ ID NO: 588501 - protein, 15 aa, Homo sapiens
  CDR3 for alpha chain variable domain of TCR clone 294251 (TRAV3, TRAJ3)
FAVRDGHSSASKKIF

SEQ ID NO: 588502 - protein, 14 aa, Homo sapiens
  CDR3 for beta chain variable domain of TCR clone 294251 (TRBV28, TRBJ1-4)
CASSFGTFDEKLFF

SEQ ID NO: 588503 - protein, 14 aa, Homo sapiens
  CDR3 for alpha chain variable domain of TCR clone 294252 (TRAV4, TRAJ36)
CLVGEGTGANNLFF

SEQ ID NO: 588504 - protein, 15 aa, Homo sapiens
  CDR3 for beta chain variable domain of TCR clone 294252 (TRBV7-3, TRBJ2-1)
CASSPTGGGEVEQFF

SEQ ID NO: 588505 - protein, 11 aa, Homo sapiens
  CDR3 for alpha chain variable domain of TCR clone 294253 (TRAV1-1, TRAJ23)
CAVRQGGKLFF

SEQ ID NO: 588506 - protein, 13 aa, Homo sapiens
  CDR3 for beta chain variable domain of TCR clone 294253 (TRBV7-3, TRBJ1-1)
CASSQDWGAEAFF

SEQ ID NO: 588507 - protein, 14 aa, Homo sapiens
  CDR3 for alpha chain variable domain of TCR clone 294254 (TRAV20, TRAJ42)
CAVQAGGSQGNLIF

SEQ ID NO: 588508 - protein, 14 aa, Homo sapiens
  CDR3 for beta chain variable domain of TCR clone 294254 (TRBV28, TRBJ1-2)
CASTIQGANYGYTF

SEQ ID NO: 588509 - protein, 17 aa, Homo sapiens
  CDR3 for alpha chain variable domain of TCR clone 294255 (TRAV4, )
CLVDIQNPDPAVYQLRE

SEQ ID NO: 588510 - protein, 12 aa, Homo sapiens
  CDR3 for beta chain variable domain of TCR clone 294255 (TRBV6-1, TRBJ2-7)
CASSDYSYEQYF

SEQ ID NO: 588511 - protein, 13 aa, Homo sapiens
  CDR3 for alpha chain variable domain of TCR clone 294256 (TRAV9-2, TRAJ53)
CALSGGSNYKLTF

SEQ ID NO: 588512 - protein, 17 aa, Homo sapiens
  CDR3 for beta chain variable domain of TCR clone 294256 (TRBV11-2, TRBJ2-1)
GASSLYPPGVEYNEQFF

SEQ ID NO: 588513 - protein, 15 aa, Homo sapiens
  CDR3 for alpha chain variable domain of TCR clone 294257 (TRAV5, TRAJ33)
CAEAPAMDSNYQLIW

SEQ ID NO: 588514 - protein, 13 aa, Homo sapiens
  CDR3 for beta chain variable domain of TCR clone 294257 (TRBV19, TRBJ1-5)
CASSIGGNQPQHF

SEQ ID NO: 588515 - protein, 13 aa, Homo sapiens
  CDR3 for alpha chain variable domain of TCR clone 294258 (TRAV8-6, TRAJ49)
CSVITNTGNQFYF

SEQ ID NO: 588516 - protein, 13 aa, Homo sapiens
  CDR3 for beta chain variable domain of TCR clone 294258 (TRBV7-9, TRBJ2-7)
CASSFAGAYEQYF

SEQ ID NO: 588517 - protein, 11 aa, Homo sapiens
  CDR3 for alpha chain variable domain of TCR clone 294259 (TRAV2, TRAJ13)
CASGGYQKVTF

SEQ ID NO: 588518 - protein, 15 aa, Homo sapiens
  CDR3 for beta chain variable domain of TCR clone 294259 (TRBV28, TRBJ2-6)
CASSHRGFGANVLTF

SEQ ID NO: 588519 - protein, 17 aa, Homo sapiens
  CDR3 for alpha chain variable domain of TCR clone 294260 (TRAV3, TRAJ6)
FAVRDGPRAGGSYIPPF

SEQ ID NO: 588520 - protein, 14 aa, Homo sapiens
  CDR3 for beta chain variable domain of TCR clone 294260 (TRBV7-2, TRBJ2-7)
CASSPKTSFYEQYF

SEQ ID NO: 588521 - protein, 13 aa, Homo sapiens
  CDR3 for alpha chain variable domain of TCR clone 294261 (TRAV1-2, TRAJ9)
CAALNTGGFKTIF

SEQ ID NO: 588522 - protein, 12 aa, Homo sapiens
  CDR3 for beta chain variable domain of TCR clone 294261 (TRBV6-5, TRBJ1-6)
CASSSHNSPLHF

SEQ ID NO: 588523 - protein, 12 aa, Homo sapiens
  CDR3 for alpha chain variable domain of TCR clone 294262 (TRAV8-3, TRAJ6)
CALAGGRYIPTF

SEQ ID NO: 588524 - protein, 15 aa, Homo sapiens
  CDR3 for beta chain variable domain of TCR clone 294262 (TRBV9, TRBJ1-6)
CASSVAGTGDSPLHF

SEQ ID NO: 588525 - protein, 15 aa, Homo sapiens
  CDR3 for alpha chain variable domain of TCR clone 294263 (TRAV20, TRAJ40)
CAVQRGTSGTYKYIF

SEQ ID NO: 588526 - protein, 15 aa, Homo sapiens
  CDR3 for beta chain variable domain of TCR clone 294263 (TRBV25-1, TRBJ1-4)
CASSPGDSTNENLFF

SEQ ID NO: 588527 - protein, 19 aa, Homo sapiens
  CDR3 for alpha chain variable domain of TCR clone 294264 (TRAV2, TRAJ20)
ILQVREADAAVYRDCKLSF

SEQ ID NO: 588528 - protein, 15 aa, Homo sapiens
  CDR3 for beta chain variable domain of TCR clone 294264 (TRBV20-1, TRBJ2-5)
CSAGGTGGRQETQYF

SEQ ID NO: 588529 - protein, 13 aa, Homo sapiens
  CDR3 for alpha chain variable domain of TCR clone 294265 (TRAV21, TRAJ45)
CAVMGGGADGLTF

SEQ ID NO: 588530 - protein, 15 aa, Homo sapiens
  CDR3 for beta chain variable domain of TCR clone 294265 (TRBV19, TRBJ2-7)
CASSSAGAGDYEQYF

SEQ ID NO: 588531 - protein, 13 aa, Homo sapiens
  CDR3 for alpha chain variable domain of TCR clone 294266 (TRAV16, TRAJ9)
FALRATGGFKTIF

SEQ ID NO: 588532 - protein, 16 aa, Homo sapiens
  CDR3 for beta chain variable domain of TCR clone 294266 (TRBV5-1, TRBJ1-3)
CASSRSGEDSGNTIYF

SEQ ID NO: 588533 - protein, 16 aa, Homo sapiens
  CDR3 for alpha chain variable domain of TCR clone 294267 (TRAV12-2, TRAJ6)
CAAPLAGSGGSYIPTF

SEQ ID NO: 588534 - protein, 10 aa, Homo sapiens
  CDR3 for beta chain variable domain of TCR clone 294267 (TRBV28, TRBJ1-2)
CANSSDRTVF

SEQ ID NO: 588535 - protein, 13 aa, Homo sapiens
  CDR3 for alpha chain variable domain of TCR clone 294268 (TRAV12-2, TRAJ47)
CAVFMEYGNKLVF

SEQ ID NO: 588536 - protein, 14 aa, Homo sapiens
  CDR3 for beta chain variable domain of TCR clone 294268 (TRBV4-1, TRBJ1-5)
CASSRGPTNQPQHF

SEQ ID NO: 588537 - protein, 14 aa, Homo sapiens
  CDR3 for alpha chain variable domain of TCR clone 294269 (TRAV25, TRAJ44)
CAVFPTGTASKLTF

SEQ ID NO: 588538 - protein, 14 aa, Homo sapiens
  CDR3 for beta chain variable domain of TCR clone 294269 (TRBV19, TRBJ1-1)
CGSTGHRLNTEAFF

SEQ ID NO: 588539 - protein, 12 aa, Homo sapiens
  CDR3 for alpha chain variable domain of TCR clone 294270 (TRAV8-4, TRAJ43)
CAVSVNNNDMRF

SEQ ID NO: 588540 - protein, 15 aa, Homo sapiens
  CDR3 for beta chain variable domain of TCR clone 294270 (TRBV7-3, TRBJ2-2)
CASKANGANTGELFF

SEQ ID NO: 588541 - protein, 12 aa, Homo sapiens
  CDR3 for alpha chain variable domain of TCR clone 294271 (TRAV21, TRAJ13)
PGPSGGYQTVTF

SEQ ID NO: 588542 - protein, 14 aa, Homo sapiens
  CDR3 for beta chain variable domain of TCR clone 294271 (TRBV20-1, TRBJ2-7)
CSAKDRKGAYEQYF

SEQ ID NO: 588543 - protein, 14 aa, Homo sapiens
  CDR3 for alpha chain variable domain of TCR clone 294272 (TRAV1-2, TRAJ16)
CVVNRFSDGQKPLF

SEQ ID NO: 588544 - protein, 15 aa, Homo sapiens
  CDR3 for beta chain variable domain of TCR clone 294272 (TRBV9, TRBJ1-6)
CASSVAGTGDSPLHF

SEQ ID NO: 588545 - protein, 15 aa, Homo sapiens
  CDR3 for alpha chain variable domain of TCR clone 294273 (TRAV12-2, TRAJ50)
CAVNGLETSYDKVIF

SEQ ID NO: 588546 - protein, 12 aa, Homo sapiens
  CDR3 for beta chain variable domain of TCR clone 294273 (TRBV5-1, TRBJ1-2)
CASSQDTYGYTF

SEQ ID NO: 588547 - protein, 13 aa, Homo sapiens
  CDR3 for alpha chain variable domain of TCR clone 294274 (TRAV8-3, TRAJ48)
CAVVPVGNEKLTF

SEQ ID NO: 588548 - protein, 15 aa, Homo sapiens
  CDR3 for beta chain variable domain of TCR clone 294274 (TRBV7-9, TRBJ2-7)
CASSPGGGLTYEQYF

SEQ ID NO: 588549 - protein, 12 aa, Homo sapiens
  CDR3 for alpha chain variable domain of TCR clone 294275 (TRAV1-1, TRAJ39)
CAVPVVGNMLTF

SEQ ID NO: 588550 - protein, 14 aa, Homo sapiens
  CDR3 for beta chain variable domain of TCR clone 294275 (TRBV5-5, TRBJ1-5)
CASSGQGVDQPQHF

SEQ ID NO: 588551 - protein, 11 aa, Homo sapiens
  CDR3 for alpha chain variable domain of TCR clone 294276 (TRAV13-1, TRAJ34)
CAASPTDKLIF

SEQ ID NO: 588552 - protein, 16 aa, Homo sapiens
  CDR3 for beta chain variable domain of TCR clone 294276 (TRBV4-3, TRBJ2-3)
CASSQGGLAGTDTQYF

SEQ ID NO: 588553 - protein, 12 aa, Homo sapiens
  CDR3 for alpha chain variable domain of TCR clone 294277 (TRAV13-1, TRAJ21)
CAAKEGFNKFYF

SEQ ID NO: 588554 - protein, 13 aa, Homo sapiens
  CDR3 for beta chain variable domain of TCR clone 294277 (TRBV7-2, TRBJ2-2)
CASSSVRAGELFF

SEQ ID NO: 588555 - protein, 15 aa, Homo sapiens
  CDR3 for alpha chain variable domain of TCR clone 294278 (TRAV26-1, TRAJ15)
CIVRMANQAGTALIF

SEQ ID NO: 588556 - protein, 11 aa, Homo sapiens
  CDR3 for beta chain variable domain of TCR clone 294278 (TRBV11-2, TRBJ1-1)
CASSINTEAFF

SEQ ID NO: 588557 - protein, 15 aa, Homo sapiens
  CDR3 for alpha chain variable domain of TCR clone 294279 (TRAV22, TRAJ18)
CAASARGSTLGRLYF

SEQ ID NO: 588558 - protein, 15 aa, Homo sapiens
  CDR3 for beta chain variable domain of TCR clone 294279 (TRBV3-1, TRBJ2-3)
CASSHSGGAGDTQYF

SEQ ID NO: 588559 - protein, 22 aa, Homo sapiens
  CDR3 for alpha chain variable domain of TCR clone 294280 (TRAV39, TRAJ43)
SQLPCMTSLPPTSVPWANDMRF

SEQ ID NO: 588560 - protein, 15 aa, Homo sapiens
  CDR3 for beta chain variable domain of TCR clone 294280 (TRBV12-4, TRBJ2-5)
CASSPPTGLQETQYF

SEQ ID NO: 588561 - protein, 13 aa, Homo sapiens
  CDR3 for alpha chain variable domain of TCR clone 294281 (TRAV22, TRAJ29)
CAVGGSGNTPLVF

SEQ ID NO: 588562 - protein, 13 aa, Homo sapiens
  CDR3 for beta chain variable domain of TCR clone 294281 (TRBV24-1, TRBJ2-2)
CATSDWSTGELFF

SEQ ID NO: 588563 - protein, 14 aa, Homo sapiens
  CDR3 for alpha chain variable domain of TCR clone 294282 (TRAV1-2, TRAJ17)
CALRRGAAGNKQTF

SEQ ID NO: 588564 - protein, 15 aa, Homo sapiens
  CDR3 for beta chain variable domain of TCR clone 294282 (TRBV12-5, TRBJ2-2)
CASGRLGGNTGELFF

SEQ ID NO: 588565 - protein, 15 aa, Homo sapiens
  CDR3 for alpha chain variable domain of TCR clone 294283 (TRAV13-1, TRAJ44)
CAASRGGGTASKFTS

SEQ ID NO: 588566 - protein, 14 aa, Homo sapiens
  CDR3 for beta chain variable domain of TCR clone 294283 (TRBV7-2, TRBJ2-5)
CASSPRGSSETQYF

SEQ ID NO: 588567 - protein, 10 aa, Homo sapiens
  CDR3 for alpha chain variable domain of TCR clone 294284 (TRAV17, TRAJ52)
SATSYGKLTF

SEQ ID NO: 588568 - protein, 13 aa, Homo sapiens
  CDR3 for beta chain variable domain of TCR clone 294284 (TRBV19, TRBJ2-1)
CATSRGVYNEQFF

SEQ ID NO: 588569 - protein, 14 aa, Homo sapiens
  CDR3 for alpha chain variable domain of TCR clone 294285 (TRAV12-1, TRAJ43)
CVVNGRSNNNDIRF

SEQ ID NO: 588570 - protein, 13 aa, Homo sapiens
  CDR3 for beta chain variable domain of TCR clone 294285 (TRBV10-3, TRBJ2-7)
CASKLAVNYEQYF

SEQ ID NO: 588571 - protein, 15 aa, Homo sapiens
  CDR3 for alpha chain variable domain of TCR clone 294286 (TRAV3, TRAJ4)
CAVRDWTGGYSKLIF

SEQ ID NO: 588572 - protein, 16 aa, Homo sapiens
  CDR3 for beta chain variable domain of TCR clone 294286 (TRBV27, TRBJ2-2)
CASSSSGVSNTGELFF

SEQ ID NO: 588573 - protein, 15 aa, Homo sapiens
  CDR3 for alpha chain variable domain of TCR clone 294287 (TRAV3, TRAJ22)
CAVRDRGGSGRQLTF

SEQ ID NO: 588574 - protein, 15 aa, Homo sapiens
  CDR3 for beta chain variable domain of TCR clone 294287 (TRBV10-3, TRBJ2-3)
CAISLTSGGTDTQYF

SEQ ID NO: 588575 - protein, 15 aa, Homo sapiens
  CDR3 for alpha chain variable domain of TCR clone 294288 (TRAV26-1, TRAJ42)
CIVSVRGGSQGNLIF

SEQ ID NO: 588576 - protein, 14 aa, Homo sapiens
  CDR3 for beta chain variable domain of TCR clone 294288 (TRBV19, TRBJ2-2)
CATTGHANTGELFF

SEQ ID NO: 588577 - protein, 14 aa, Homo sapiens
  CDR3 for alpha chain variable domain of TCR clone 294289 (TRAV1-2, TRAJ16)
CAVNRLSDGQKLLF

SEQ ID NO: 588578 - protein, 17 aa, Homo sapiens
  CDR3 for beta chain variable domain of TCR clone 294289 (TRBV11-2, TRBJ2-1)
CASSLYPPGVEYNEQFF

SEQ ID NO: 588579 - protein, 14 aa, Homo sapiens
  CDR3 for alpha chain variable domain of TCR clone 294290 (TRAV1-2, TRAJ16)
CAVNRFSDGQKLLF

SEQ ID NO: 588580 - protein, 13 aa, Homo sapiens
  CDR3 for beta chain variable domain of TCR clone 294290 (TRBV20-1, TRBJ2-7)
CSARAGSPYEQYF

SEQ ID NO: 588581 - protein, 15 aa, Homo sapiens
  CDR3 for alpha chain variable domain of TCR clone 294291 (TRAV3, TRAJ3)
CAVRDGHSSASKIIF

SEQ ID NO: 588582 - protein, 14 aa, Homo sapiens
  CDR3 for beta chain variable domain of TCR clone 294291 (TRBV7-2, TRBJ2-7)
CASSPKTSFYEQYF

SEQ ID NO: 588583 - protein, 16 aa, Homo sapiens
  CDR3 for alpha chain variable domain of TCR clone 294292 (TRAV26-1, TRAJ52)
CIVSNAGGTSYGKLTF

SEQ ID NO: 588584 - protein, 16 aa, Homo sapiens
  CDR3 for beta chain variable domain of TCR clone 294292 (TRBV5-1, TRBJ2-1)
CASSLEWRGLYNEQFF

SEQ ID NO: 588585 - protein, 12 aa, Homo sapiens
  CDR3 for alpha chain variable domain of TCR clone 294293 (TRAV16, TRAJ9)
CALWAGGFKTIF

SEQ ID NO: 588586 - protein, 13 aa, Homo sapiens
  CDR3 for beta chain variable domain of TCR clone 294293 (TRBV4-3, TRBJ1-1)
RASSRVEGSMAFF

SEQ ID NO: 588587 - protein, 14 aa, Homo sapiens
  CDR3 for alpha chain variable domain of TCR clone 294294 (TRAV20, TRAJ56)
CAVQFGGANSKLTF

SEQ ID NO: 588588 - protein, 14 aa, Homo sapiens
  CDR3 for beta chain variable domain of TCR clone 294294 (TRBV20-1, TRBJ2-7)
CSAQRGRSSYEQYF

SEQ ID NO: 588589 - protein, 13 aa, Homo sapiens
  CDR3 for alpha chain variable domain of TCR clone 294295 (TRAV13-1, TRAJ6)
CAARRGGSYIPTF

SEQ ID NO: 588590 - protein, 12 aa, Homo sapiens
  CDR3 for beta chain variable domain of TCR clone 294295 (TRBV24-1, TRBJ1-4)
CATSDPNEKLFF

SEQ ID NO: 588591 - protein, 17 aa, Homo sapiens
  CDR3 for alpha chain variable domain of TCR clone 294296 (TRAV3, TRAJ42)
CAVRDRDYGGSQGNLIF

SEQ ID NO: 588592 - protein, 15 aa, Homo sapiens
  CDR3 for beta chain variable domain of TCR clone 294296 (TRBV7-2, TRBJ1-5)
CASSQGHQPNQPQHF

SEQ ID NO: 588593 - protein, 14 aa, Homo sapiens
  CDR3 for alpha chain variable domain of TCR clone 294297 (TRAV12-2, TRAJ9)
CAVNMGGGGFKTIF

SEQ ID NO: 588594 - protein, 14 aa, Homo sapiens
  CDR3 for beta chain variable domain of TCR clone 294297 (TRBV2, TRBJ2-5)
CASSEVLAQETQYF

SEQ ID NO: 588595 - protein, 17 aa, Homo sapiens
  CDR3 for alpha chain variable domain of TCR clone 294298 (TRAV3, TRAJ6)
CAVRDGTRAGGSYIPTF

SEQ ID NO: 588596 - protein, 14 aa, Homo sapiens
  CDR3 for beta chain variable domain of TCR clone 294298 (TRBV7-2, TRBJ2-7)
CASSPKTSFYEQFF

SEQ ID NO: 588597 - protein, 14 aa, Homo sapiens
  CDR3 for alpha chain variable domain of TCR clone 294299 (TRAV26-1, TRAJ39)
CIARGLRAGNMLTF

SEQ ID NO: 588598 - protein, 15 aa, Homo sapiens
  CDR3 for beta chain variable domain of TCR clone 294299 (TRBV7-9, TRBJ1-5)
CASSQGHQPNQPQHF

SEQ ID NO: 588599 - protein, 11 aa, Homo sapiens
  CDR3 for alpha chain variable domain of TCR clone 294300 (TRAV12-3, TRAJ26)
CAMSHGQNFVF

SEQ ID NO: 588600 - protein, 16 aa, Homo sapiens
  CDR3 for beta chain variable domain of TCR clone 294300 (TRBV28, TRBJ2-6)
CASSNRRGSGANVLTF

SEQ ID NO: 588601 - protein, 11 aa, Homo sapiens
  CDR3 for alpha chain variable domain of TCR clone 294301 (TRAV12-3, TRAJ26)
CAMSHGQNFVF

SEQ ID NO: 588602 - protein, 13 aa, Homo sapiens
  CDR3 for beta chain variable domain of TCR clone 294301 (TRBV10-2, TRBJ2-3)
CASSESGDHTQYF

SEQ ID NO: 588603 - protein, 15 aa, Homo sapiens
  CDR3 for alpha chain variable domain of TCR clone 294302 (TRAV26-1, TRAJ44)
CIVRIGTGTDSKLTF

SEQ ID NO: 588604 - protein, 15 aa, Homo sapiens
  CDR3 for beta chain variable domain of TCR clone 294302 (TRBV7-6, TRBJ2-1)
CASSSLAGEGNEQFF

SEQ ID NO: 588605 - protein, 13 aa, Homo sapiens
  CDR3 for alpha chain variable domain of TCR clone 294303 (TRAV12-1, TRAJ38)
CVVPAGNNRKLSW

SEQ ID NO: 588606 - protein, 17 aa, Homo sapiens
  CDR3 for beta chain variable domain of TCR clone 294303 (TRBV4-1, TRBJ2-3)
CASSQSATGGPVDTQYF

SEQ ID NO: 588607 - protein, 15 aa, Homo sapiens
  CDR3 for alpha chain variable domain of TCR clone 294304 (TRAV8-3, TRAJ34)
DAAEYFCAIPGKLIF

SEQ ID NO: 588608 - protein, 12 aa, Homo sapiens
  CDR3 for beta chain variable domain of TCR clone 294304 (TRBV11-2, TRBJ2-1)
CASSPGNNEQFF

SEQ ID NO: 588609 - protein, 18 aa, Homo sapiens
  CDR3 for alpha chain variable domain of TCR clone 294305 (TRAV21, TRAJ52)
CAVRPSPAGGTSYGKLTF

SEQ ID NO: 588610 - protein, 14 aa, Homo sapiens
  CDR3 for beta chain variable domain of TCR clone 294305 (TRBV4-1, TRBJ2-2)
CASSQAVNTVELFF

SEQ ID NO: 588611 - protein, 11 aa, Homo sapiens
  CDR3 for alpha chain variable domain of TCR clone 294306 (TRAV21, TRAJ34)
CAVYNTDKLIF

SEQ ID NO: 588612 - protein, 10 aa, Homo sapiens
  CDR3 for beta chain variable domain of TCR clone 294306 (TRBV4-3, TRBJ2-1)
GLSVYNEQFF

SEQ ID NO: 588613 - protein, 15 aa, Homo sapiens
  CDR3 for alpha chain variable domain of TCR clone 294307 (TRAV3, TRAJ22)
CAVRDRGGSARQLTF

SEQ ID NO: 588614 - protein, 14 aa, Homo sapiens
  CDR3 for beta chain variable domain of TCR clone 294307 (TRBV20-1, TRBJ2-5)
CSALVPGYQATQYF

SEQ ID NO: 588615 - protein, 14 aa, Homo sapiens
  CDR3 for alpha chain variable domain of TCR clone 294308 (TRAV17, TRAJ53)
CATDAGGSNYKLTF

SEQ ID NO: 588616 - protein, 12 aa, Homo sapiens
  CDR3 for beta chain variable domain of TCR clone 294308 (TRBV29-1, TRBJ2-3)
CSGAPPADTQYF

SEQ ID NO: 588617 - protein, 16 aa, Homo sapiens
  CDR3 for alpha chain variable domain of TCR clone 294309 (TRAV23/DV6, TRAJ9)
CAASIGGNTGGFKTIF

SEQ ID NO: 588618 - protein, 14 aa, Homo sapiens
  CDR3 for beta chain variable domain of TCR clone 294309 (TRBV20-1, TRBJ2-5)
CSAHRQGLWETQYF

SEQ ID NO: 588619 - protein, 12 aa, Homo sapiens
  CDR3 for alpha chain variable domain of TCR clone 294310 (TRAV13-1, TRAJ53)
AASGGSNYKLTF

SEQ ID NO: 588620 - protein, 13 aa, Homo sapiens
  CDR3 for beta chain variable domain of TCR clone 294310 (TRBV12-4, TRBJ1-5)
CASRATGNQPQHF

SEQ ID NO: 588621 - protein, 14 aa, Homo sapiens
  CDR3 for alpha chain variable domain of TCR clone 294311 (TRAV1-1, TRAJ23)
CAVSIYNQGGKLIF

SEQ ID NO: 588622 - protein, 14 aa, Homo sapiens
  CDR3 for beta chain variable domain of TCR clone 294311 (TRBV12-4, TRBJ1-1)
CASSLGTGGTEAFF

SEQ ID NO: 588623 - protein, 13 aa, Homo sapiens
  CDR3 for alpha chain variable domain of TCR clone 294312 (TRAV26-1, TRAJ33)
CIVSVEGNYQLIW

SEQ ID NO: 588624 - protein, 16 aa, Homo sapiens
  CDR3 for beta chain variable domain of TCR clone 294312 (TRBV15, TRBJ2-7)
CATSRDRGRRRGEQYF

SEQ ID NO: 588625 - protein, 14 aa, Homo sapiens
  CDR3 for alpha chain variable domain of TCR clone 294313 (TRAV1-2, TRAJ16)
CAVNRFSDGQKLLF

SEQ ID NO: 588626 - protein, 11 aa, Homo sapiens
  CDR3 for beta chain variable domain of TCR clone 294313 (TRBV7-8, TRBJ2-7)
CASSFSLEQYF

SEQ ID NO: 588627 - protein, 13 aa, Homo sapiens
  CDR3 for alpha chain variable domain of TCR clone 294314 (TRAV21, TRAJ27)
CAALNTNAGKSTF

SEQ ID NO: 588628 - protein, 15 aa, Homo sapiens
  CDR3 for beta chain variable domain of TCR clone 294314 (TRBV6-1, TRBJ2-3)
CASSERGGITDTQYF

SEQ ID NO: 588629 - protein, 14 aa, Homo sapiens
  CDR3 for alpha chain variable domain of TCR clone 294315 (TRAV1-2, TRAJ8)
CAVREDTSFQKLVF

SEQ ID NO: 588630 - protein, 14 aa, Homo sapiens
  CDR3 for beta chain variable domain of TCR clone 294315 (TRBV12-5, TRBJ2-5)
CASGSRTHQETQYF

SEQ ID NO: 588631 - protein, 16 aa, Homo sapiens
  CDR3 for alpha chain variable domain of TCR clone 294316 (TRAV12-3, TRAJ45)
CAMGWGSGGGADGLPF

SEQ ID NO: 588632 - protein, 15 aa, Homo sapiens
  CDR3 for beta chain variable domain of TCR clone 294316 (TRBV3-1, TRBJ1-2)
CASSHPGTPGYGYTF

SEQ ID NO: 588633 - protein, 14 aa, Homo sapiens
  CDR3 for alpha chain variable domain of TCR clone 294317 (TRAV12-1, TRAJ30)
CVVNIGGRDGKNIF

SEQ ID NO: 588634 - protein, 14 aa, Homo sapiens
  CDR3 for beta chain variable domain of TCR clone 294317 (TRBV7-6, TRBJ2-3)
CVSSLGTVTDTQYF

SEQ ID NO: 588635 - protein, 13 aa, Homo sapiens
  CDR3 for alpha chain variable domain of TCR clone 294318 (TRAV12-1, TRAJ16)
CVVNTRNGQTLLF

SEQ ID NO: 588636 - protein, 19 aa, Homo sapiens
  CDR3 for beta chain variable domain of TCR clone 294318 (TRBV6-1, TRBJ2-5)
CASSRFGAGGPGLEETQYF

SEQ ID NO: 588637 - protein, 14 aa, Homo sapiens
  CDR3 for alpha chain variable domain of TCR clone 294319 (TRAV23/DV6, TRAJ40)
CAASLPSGTSKYIF

SEQ ID NO: 588638 - protein, 14 aa, Homo sapiens
  CDR3 for beta chain variable domain of TCR clone 294319 (TRBV7-6, TRBJ2-3)
CASSLGTVTDTQYF

SEQ ID NO: 588639 - protein, 12 aa, Homo sapiens
  CDR3 for alpha chain variable domain of TCR clone 294320 (TRAV13-1, TRAJ49)
CAASPMGNQFYF

SEQ ID NO: 588640 - protein, 16 aa, Homo sapiens
  CDR3 for beta chain variable domain of TCR clone 294320 (TRBV20-1, TRBJ2-3)
CSGEAGLAGGQDTQYF

SEQ ID NO: 588641 - protein, 17 aa, Homo sapiens
  CDR3 for alpha chain variable domain of TCR clone 294321 (TRAV23/DV6, TRAJ58)
CAARLLRGETSGPRLTF

SEQ ID NO: 588642 - protein, 14 aa, Homo sapiens
  CDR3 for beta chain variable domain of TCR clone 294321 (TRBV7-3, TRBJ2-1)
CASSLAGGTNEQFF

SEQ ID NO: 588643 - protein, 13 aa, Homo sapiens
  CDR3 for alpha chain variable domain of TCR clone 294322 (TRAV13-2, TRAJ15)
CAEKNKAGTALIF

SEQ ID NO: 588644 - protein, 15 aa, Homo sapiens
  CDR3 for beta chain variable domain of TCR clone 294322 (TRBV29-1, TRBJ2-5)
CSVAPGQGARETQYF

SEQ ID NO: 588645 - protein, 12 aa, Homo sapiens
  CDR3 for alpha chain variable domain of TCR clone 294323 (TRAV21, TRAJ39)
CAADNAGNMLTF

SEQ ID NO: 588646 - protein, 15 aa, Homo sapiens
  CDR3 for beta chain variable domain of TCR clone 294323 (TRBV27, TRBJ2-1)
CASSNGGGSPNEQFF

SEQ ID NO: 588647 - protein, 13 aa, Homo sapiens
  CDR3 for alpha chain variable domain of TCR clone 294324 (TRAV8-6, TRAJ21)
WAVSPSSLNKFYF

SEQ ID NO: 588648 - protein, 14 aa, Homo sapiens
  CDR3 for beta chain variable domain of TCR clone 294324 (TRBV7-9, TRBJ2-5)
CSSSLDTAQETQYF

SEQ ID NO: 588649 - protein, 15 aa, Homo sapiens
  CDR3 for alpha chain variable domain of TCR clone 294325 (TRAV12-1, TRAJ44)
CVVFVNTGTASKLTF

SEQ ID NO: 588650 - protein, 17 aa, Homo sapiens
  CDR3 for beta chain variable domain of TCR clone 294325 (TRBV7-8, TRBJ2-6)
CASSAGTGGAVANVLTF

SEQ ID NO: 588651 - protein, 14 aa, Homo sapiens
  CDR3 for alpha chain variable domain of TCR clone 294326 (TRAV12-3, TRAJ10)
SHLPLTGGGNKLTF

SEQ ID NO: 588652 - protein, 12 aa, Homo sapiens
  CDR3 for beta chain variable domain of TCR clone 294326 (TRBV27, TRBJ2-5)
CASSPTGETQYF

SEQ ID NO: 588653 - protein, 20 aa, Homo sapiens
  CDR3 for alpha chain variable domain of TCR clone 294327 (TRAV26-1, TRAJ42)
CCVLLHRQTYYGGSQGNLTF

SEQ ID NO: 588654 - protein, 16 aa, Homo sapiens
  CDR3 for beta chain variable domain of TCR clone 294327 (TRBV12-5, TRBJ2-5)
CASGPRTSGNQETQYF

SEQ ID NO: 588655 - protein, 13 aa, Homo sapiens
  CDR3 for alpha chain variable domain of TCR clone 294328 (TRAV17, TRAJ5)
CALRGTGRRALTF

SEQ ID NO: 588656 - protein, 15 aa, Homo sapiens
  CDR3 for beta chain variable domain of TCR clone 294328 (TRBV18, TRBJ2-1)
CASSPPSASYNEQFF

SEQ ID NO: 588657 - protein, 15 aa, Homo sapiens
  CDR3 for alpha chain variable domain of TCR clone 294329 (TRAV3, TRAJ5)
CAVSDLDTGRRALTF

SEQ ID NO: 588658 - protein, 13 aa, Homo sapiens
  CDR3 for beta chain variable domain of TCR clone 294329 (TRBV12-4, TRBJ2-7)
CASSPTETCEQYF

SEQ ID NO: 588659 - protein, 14 aa, Homo sapiens
  CDR3 for alpha chain variable domain of TCR clone 294330 (TRAV8-3, TRAJ39)
CAVGANNAGNMFTF

SEQ ID NO: 588660 - protein, 12 aa, Homo sapiens
  CDR3 for beta chain variable domain of TCR clone 294330 (TRBV28, TRBJ1-3)
CASVSSGNTIYF

SEQ ID NO: 588661 - protein, 15 aa, Homo sapiens
  CDR3 for alpha chain variable domain of TCR clone 294331 (TRAV27, TRAJ37)
CAGIHGSTNTGKLIF

SEQ ID NO: 588662 - protein, 13 aa, Homo sapiens
  CDR3 for beta chain variable domain of TCR clone 294331 (TRBV19, TRBJ2-1)
CASSIRSSWEQFF

SEQ ID NO: 588663 - protein, 14 aa, Homo sapiens
  CDR3 for alpha chain variable domain of TCR clone 294332 (TRAV2, TRAJ29)
CAVTPPSGNTPLVF

SEQ ID NO: 588664 - protein, 14 aa, Homo sapiens
  CDR3 for beta chain variable domain of TCR clone 294332 (TRBV10-3, TRBJ1-1)
CAISDTDRGVEAFF

SEQ ID NO: 588665 - protein, 10 aa, Homo sapiens
  CDR3 for alpha chain variable domain of TCR clone 294333 (TRAV39, TRAJ49)
CAVAGNQSYF

SEQ ID NO: 588666 - protein, 14 aa, Homo sapiens
  CDR3 for beta chain variable domain of TCR clone 294333 (TRBV7-8, TRBJ2-7)
CASSPRDRVYEQYF

SEQ ID NO: 588667 - protein, 14 aa, Homo sapiens
  CDR3 for alpha chain variable domain of TCR clone 294334 (TRAV13-2, TRAJ11)
CAETGNSGYSILTF

SEQ ID NO: 588668 - protein, 11 aa, Homo sapiens
  CDR3 for beta chain variable domain of TCR clone 294334 (TRBV10-3, TRBJ2-7)
CAISEGLEQYF

SEQ ID NO: 588669 - protein, 15 aa, Homo sapiens
  CDR3 for alpha chain variable domain of TCR clone 294335 (TRAV12-3, TRAJ13)
CAMSARSGGYQKVTF

SEQ ID NO: 588670 - protein, 15 aa, Homo sapiens
  CDR3 for beta chain variable domain of TCR clone 294335 (TRBV7-9, TRBJ1-5)
CASSQGHQPNQPQHF

SEQ ID NO: 588671 - protein, 14 aa, Homo sapiens
  CDR3 for alpha chain variable domain of TCR clone 294336 (TRAV1-2, TRAJ16)
CAVNRFSDGQQLLF

SEQ ID NO: 588672 - protein, 13 aa, Homo sapiens
  CDR3 for beta chain variable domain of TCR clone 294336 (TRBV10-2, TRBJ2-7)
CASSESGVYEQYF

SEQ ID NO: 588673 - protein, 16 aa, Homo sapiens
  CDR3 for alpha chain variable domain of TCR clone 294337 (TRAV1-2, TRAJ10)
CAVRGVLTGGGNKLSF

SEQ ID NO: 588674 - protein, 15 aa, Homo sapiens
  CDR3 for beta chain variable domain of TCR clone 294337 (TRBV7-9, TRBJ1-6)
CASSSPGRGNSPFHF

SEQ ID NO: 588675 - protein, 10 aa, Homo sapiens
  CDR3 for alpha chain variable domain of TCR clone 294338 (TRAV30, TRAJ48)
CGIGNEKLTF

SEQ ID NO: 588676 - protein, 14 aa, Homo sapiens
  CDR3 for beta chain variable domain of TCR clone 294338 (TRBV4-1, TRBJ2-2)
CASSQAVNTGELFF

SEQ ID NO: 588677 - protein, 20 aa, Homo sapiens
  CDR3 for alpha chain variable domain of TCR clone 294339 (TRAV25, TRAJ33)
TATQTTDVGTSRGSNYQLIW

SEQ ID NO: 588678 - protein, 14 aa, Homo sapiens
  CDR3 for beta chain variable domain of TCR clone 294339 (TRBV5-4, TRBJ1-1)
CASSLDSRRDEAFF

SEQ ID NO: 588679 - protein, 15 aa, Homo sapiens
  CDR3 for alpha chain variable domain of TCR clone 294340 (TRAV14/DV4, TRAJ26)
CSMIEGQNYVQNFVF

SEQ ID NO: 588680 - protein, 13 aa, Homo sapiens
  CDR3 for beta chain variable domain of TCR clone 294340 (TRBV24-1, TRBJ2-2)
CATSDWSTGELFF

SEQ ID NO: 588681 - protein, 16 aa, Homo sapiens
  CDR3 for alpha chain variable domain of TCR clone 294341 (TRAV14/DV4, TRAJ53)
CAMREGGGGSNYKLTF

SEQ ID NO: 588682 - protein, 13 aa, Homo sapiens
  CDR3 for beta chain variable domain of TCR clone 294341 (TRBV10-2, TRBJ2-7)
RASGASGGYEQYF

SEQ ID NO: 588683 - protein, 11 aa, Homo sapiens
  CDR3 for alpha chain variable domain of TCR clone 294342 (TRAV2, TRAJ37)
CAVDNTGKLIF

SEQ ID NO: 588684 - protein, 14 aa, Homo sapiens
  CDR3 for beta chain variable domain of TCR clone 294342 (TRBV20-1, TRBJ2-1)
CSATLAGGLGEQFF

SEQ ID NO: 588685 - protein, 14 aa, Homo sapiens
  CDR3 for alpha chain variable domain of TCR clone 294343 (TRAV12-2, TRAJ40)
CAVKIPPGTYKYIF

SEQ ID NO: 588686 - protein, 16 aa, Homo sapiens
  CDR3 for beta chain variable domain of TCR clone 294343 (TRBV28, TRBJ2-5)
CASSFSPAGGWETQYF

SEQ ID NO: 588687 - protein, 12 aa, Homo sapiens
  CDR3 for alpha chain variable domain of TCR clone 294344 (TRAV12-3, TRAJ17)
RAMTLTGNKLTF

SEQ ID NO: 588688 - protein, 15 aa, Homo sapiens
  CDR3 for beta chain variable domain of TCR clone 294344 (TRBV20-1, TRBJ2-7)
CSARGRVSGMDEQYF

SEQ ID NO: 588689 - protein, 13 aa, Homo sapiens
  CDR3 for alpha chain variable domain of TCR clone 294345 (TRAV13-1, TRAJ49)
CSAMLYTGNQFYF

SEQ ID NO: 588690 - protein, 15 aa, Homo sapiens
  CDR3 for beta chain variable domain of TCR clone 294345 (TRBV12-4, TRBJ1-5)
CANTRGSGFGQPQHF

SEQ ID NO: 588691 - protein, 13 aa, Homo sapiens
  CDR3 for alpha chain variable domain of TCR clone 294346 (TRAV29/DV5, TRAJ29)
CAASAAGNTPLGF

SEQ ID NO: 588692 - protein, 14 aa, Homo sapiens
  CDR3 for beta chain variable domain of TCR clone 294346 (TRBV19, TRBJ2-3)
CASSAPRGTDTQYF

SEQ ID NO: 588693 - protein, 18 aa, Homo sapiens
  CDR3 for alpha chain variable domain of TCR clone 294347 (TRAV21, TRAJ52)
CAVRPSPAGGTSYGKLTF

SEQ ID NO: 588694 - protein, 14 aa, Homo sapiens
  CDR3 for beta chain variable domain of TCR clone 294347 (TRBV10-3, TRBJ2-7)
CAISEKQGIGEQYF

SEQ ID NO: 588695 - protein, 19 aa, Homo sapiens
  CDR3 for alpha chain variable domain of TCR clone 294348 (TRAV9-2, TRAJ52)
CALRFSLLSGGTSYGKLPF

SEQ ID NO: 588696 - protein, 14 aa, Homo sapiens
  CDR3 for beta chain variable domain of TCR clone 294348 (TRBV7-6, TRBJ2-7)
CASSLFQDSYEQYF

SEQ ID NO: 588697 - protein, 14 aa, Homo sapiens
  CDR3 for alpha chain variable domain of TCR clone 294349 (TRAV36/DV7, TRAJ54)
WRPVWVQGAQKLVF

SEQ ID NO: 588698 - protein, 14 aa, Homo sapiens
  CDR3 for beta chain variable domain of TCR clone 294349 (TRBV7-8, TRBJ2-3)
CASSLEAGTDTQYF

SEQ ID NO: 588699 - protein, 11 aa, Homo sapiens
  CDR3 for alpha chain variable domain of TCR clone 294350 (TRAV2, TRAJ24)
TTVPRWGKLQF

SEQ ID NO: 588700 - protein, 15 aa, Homo sapiens
  CDR3 for beta chain variable domain of TCR clone 294350 (TRBV20-1, TRBJ2-7)
CSARDRVSGMDEQYF

SEQ ID NO: 588701 - protein, 12 aa, Homo sapiens
  CDR3 for alpha chain variable domain of TCR clone 294351 (TRAV3, TRAJ31)
CAAQRANARLMF

SEQ ID NO: 588702 - protein, 13 aa, Homo sapiens
  CDR3 for beta chain variable domain of TCR clone 294351 (TRBV4-1, TRBJ2-5)
CAISLTRGETQYF

SEQ ID NO: 588703 - protein, 13 aa, Homo sapiens
  CDR3 for alpha chain variable domain of TCR clone 294352 (TRAV8-6, TRAJ24)
CAVSSDSWGKLQF

SEQ ID NO: 588704 - protein, 12 aa, Homo sapiens
  CDR3 for beta chain variable domain of TCR clone 294352 (TRBV6-5, TRBJ2-3)
CASSDTTDTQYF

SEQ ID NO: 588705 - protein, 15 aa, Homo sapiens
  CDR3 for alpha chain variable domain of TCR clone 294353 (TRAV26-1, TRAJ39)
CIVRVASNAGNMLTC

SEQ ID NO: 588706 - protein, 14 aa, Homo sapiens
  CDR3 for beta chain variable domain of TCR clone 294353 (TRBV7-6, TRBJ2-3)
CASSVAGGTDTQYF

SEQ ID NO: 588707 - protein, 12 aa, Homo sapiens
  CDR3 for alpha chain variable domain of TCR clone 294354 (TRAV12-1, TRAJ34)
RVVAGATDKLIF

SEQ ID NO: 588708 - protein, 12 aa, Homo sapiens
  CDR3 for beta chain variable domain of TCR clone 294354 (TRBV7-9, TRBJ1-1)
CASSLVRGEAFF

SEQ ID NO: 588709 - protein, 11 aa, Homo sapiens
  CDR3 for alpha chain variable domain of TCR clone 294355 (TRAV21, TRAJ39)
LLVNAGNMLTF

SEQ ID NO: 588710 - protein, 13 aa, Homo sapiens
  CDR3 for beta chain variable domain of TCR clone 294355 (TRBV6-1, TRBJ1-1)
CASSRQGNTEAFF

SEQ ID NO: 588711 - protein, 18 aa, Homo sapiens
  CDR3 for alpha chain variable domain of TCR clone 294356 (TRAV12-2, )
CAVEDIQKPDPAVYHLRD

SEQ ID NO: 588712 - protein, 16 aa, Homo sapiens
  CDR3 for beta chain variable domain of TCR clone 294356 (TRBV6-1, TRBJ1-2)
CASSGAWQGRSHGYTF

SEQ ID NO: 588713 - protein, 12 aa, Homo sapiens
  CDR3 for alpha chain variable domain of TCR clone 294357 (TRAV12-3, TRAJ17)
CAMTLTGNKLTF

SEQ ID NO: 588714 - protein, 15 aa, Homo sapiens
  CDR3 for beta chain variable domain of TCR clone 294357 (TRBV19, TRBJ1-2)
CASSVGQVLNYGETF

SEQ ID NO: 588715 - protein, 15 aa, Homo sapiens
  CDR3 for alpha chain variable domain of TCR clone 294358 (TRAV12-2, TRAJ53)
CAVNGGGGSNYKLTF

SEQ ID NO: 588716 - protein, 15 aa, Homo sapiens
  CDR3 for beta chain variable domain of TCR clone 294358 (TRBV25-1, TRBJ1-4)
CASSPGDSTNERLFF

SEQ ID NO: 588717 - protein, 12 aa, Homo sapiens
  CDR3 for alpha chain variable domain of TCR clone 294359 (TRAV35, TRAJ39)
LAPNNAGNMLTF

SEQ ID NO: 588718 - protein, 15 aa, Homo sapiens
  CDR3 for beta chain variable domain of TCR clone 294359 (TRBV9, TRBJ1-6)
CASSVAGTGDSPLHF

SEQ ID NO: 588719 - protein, 11 aa, Homo sapiens
  CDR3 for alpha chain variable domain of TCR clone 294360 (TRAV12-2, TRAJ49)
CAVKTGNQFYF

SEQ ID NO: 588720 - protein, 12 aa, Homo sapiens
  CDR3 for beta chain variable domain of TCR clone 294360 (TRBV2, TRBJ2-3)
CASSGRFDTQYF

SEQ ID NO: 588721 - protein, 14 aa, Homo sapiens
  CDR3 for alpha chain variable domain of TCR clone 294361 (TRAV13-1, TRAJ44)
CAAKATGTARKLTL

SEQ ID NO: 588722 - protein, 15 aa, Homo sapiens
  CDR3 for beta chain variable domain of TCR clone 294361 (TRBV4-3, TRBJ1-1)
CASSQELGRGTEAFF

SEQ ID NO: 588723 - protein, 12 aa, Homo sapiens
  CDR3 for alpha chain variable domain of TCR clone 294362 (TRAV8-3, TRAJ26)
CAGDNYGHNFVF

SEQ ID NO: 588724 - protein, 15 aa, Homo sapiens
  CDR3 for beta chain variable domain of TCR clone 294362 (TRBV5-1, TRBJ2-3)
CASSVTSGSTDTQYF

SEQ ID NO: 588725 - protein, 17 aa, Homo sapiens
  CDR3 for alpha chain variable domain of TCR clone 294363 (TRAV2, TRAJ22)
ILQVREAGAAEQRQLTF

SEQ ID NO: 588726 - protein, 16 aa, Homo sapiens
  CDR3 for beta chain variable domain of TCR clone 294363 (TRBV2, TRBJ2-5)
CASSETQGVGEETQYF

SEQ ID NO: 588727 - protein, 13 aa, Homo sapiens
  CDR3 for alpha chain variable domain of TCR clone 294364 (TRAV16, TRAJ39)
CALKDNAGNMLTF

SEQ ID NO: 588728 - protein, 15 aa, Homo sapiens
  CDR3 for beta chain variable domain of TCR clone 294364 (TRBV9, TRBJ1-6)
CASSVAGTGDSPLHF

SEQ ID NO: 588729 - protein, 13 aa, Homo sapiens
  CDR3 for alpha chain variable domain of TCR clone 294365 (TRAV27, TRAJ56)
CAGKPGANSKLTF

SEQ ID NO: 588730 - protein, 18 aa, Homo sapiens
  CDR3 for beta chain variable domain of TCR clone 294365 (TRBV11-2, TRBJ2-3)
CAGSLGGASRGAPNTQYF

SEQ ID NO: 588731 - protein, 14 aa, Homo sapiens
  CDR3 for alpha chain variable domain of TCR clone 294366 (TRAV1-2, TRAJ8)
CAVREETGFQKLVF

SEQ ID NO: 588732 - protein, 15 aa, Homo sapiens
  CDR3 for beta chain variable domain of TCR clone 294366 (TRBV20-1, TRBJ2-7)
CSARDRVSGMDEQYF

SEQ ID NO: 588733 - protein, 15 aa, Homo sapiens
  CDR3 for alpha chain variable domain of TCR clone 294367 (TRAV16, TRAJ4)
CALEDPSGGYNKLIF

SEQ ID NO: 588734 - protein, 14 aa, Homo sapiens
  CDR3 for beta chain variable domain of TCR clone 294367 (TRBV5-4, TRBJ2-3)
CASSLGQGADTPYF

SEQ ID NO: 588735 - protein, 17 aa, Homo sapiens
  CDR3 for alpha chain variable domain of TCR clone 294368 (TRAV21, TRAJ52)
CAVGTNAGGTSYGKLTF

SEQ ID NO: 588736 - protein, 13 aa, Homo sapiens
  CDR3 for beta chain variable domain of TCR clone 294368 (TRBV7-3, TRBJ1-1)
CASSQDWGAEAFF

SEQ ID NO: 588737 - protein, 14 aa, Homo sapiens
  CDR3 for alpha chain variable domain of TCR clone 294369 (TRAV8-3, TRAJ23)
CAVGLYNQGGKLIF

SEQ ID NO: 588738 - protein, 13 aa, Homo sapiens
  CDR3 for beta chain variable domain of TCR clone 294369 (TRBV7-3, TRBJ1-1)
CASTQDWGAEAFF

SEQ ID NO: 588739 - protein, 17 aa, Homo sapiens
  CDR3 for alpha chain variable domain of TCR clone 294370 (TRAV8-4, TRAJ45)
CAGSEGGSGGGADGLTF

SEQ ID NO: 588740 - protein, 13 aa, Homo sapiens
  CDR3 for beta chain variable domain of TCR clone 294370 (TRBV20-1, TRBJ1-1)
CSASKRGLTEAFF

SEQ ID NO: 588741 - protein, 13 aa, Homo sapiens
  CDR3 for alpha chain variable domain of TCR clone 294371 (TRAV13-2, TRAJ22)
CLGWISSARQLTF

SEQ ID NO: 588742 - protein, 15 aa, Homo sapiens
  CDR3 for beta chain variable domain of TCR clone 294371 (TRBV18, TRBJ2-5)
CASSPDPGLQETQYF

SEQ ID NO: 588743 - protein, 13 aa, Homo sapiens
  CDR3 for alpha chain variable domain of TCR clone 294372 (TRAV17, TRAJ5)
CAPMDTGRRALTF

SEQ ID NO: 588744 - protein, 16 aa, Homo sapiens
  CDR3 for beta chain variable domain of TCR clone 294372 (TRBV12-4, TRBJ2-5)
CASSFFVRGRQETQYF

SEQ ID NO: 588745 - protein, 13 aa, Homo sapiens
  CDR3 for alpha chain variable domain of TCR clone 294373 (TRAV8-3, TRAJ5)
CAVGPRGRRALTF

SEQ ID NO: 588746 - protein, 12 aa, Homo sapiens
  CDR3 for beta chain variable domain of TCR clone 294373 (TRBV14, TRBJ1-1)
CASSQLKGLAFF

SEQ ID NO: 588747 - protein, 17 aa, Homo sapiens
  CDR3 for alpha chain variable domain of TCR clone 294374 (TRAV39, TRAJ32)
CAVDIKWVGGATNKLIF

SEQ ID NO: 588748 - protein, 11 aa, Homo sapiens
  CDR3 for beta chain variable domain of TCR clone 294374 (TRBV10-3, TRBJ2-7)
CAISEGLEQYF

SEQ ID NO: 588749 - protein, 15 aa, Homo sapiens
  CDR3 for alpha chain variable domain of TCR clone 294375 (TRAV12-3, TRAJ6)
CAMSAASGGSYIPTF

SEQ ID NO: 588750 - protein, 16 aa, Homo sapiens
  CDR3 for beta chain variable domain of TCR clone 294375 (TRBV6-1, TRBJ2-5)
CASSETLDRGAETQYF

SEQ ID NO: 588751 - protein, 16 aa, Homo sapiens
  CDR3 for alpha chain variable domain of TCR clone 294376 (TRAV16, TRAJ52)
CALSGVGGTSYGKLTF

SEQ ID NO: 588752 - protein, 15 aa, Homo sapiens
  CDR3 for beta chain variable domain of TCR clone 294376 (TRBV7-2, TRBJ2-3)
CASSLVVRGPDTQYF

SEQ ID NO: 588753 - protein, 14 aa, Homo sapiens
  CDR3 for alpha chain variable domain of TCR clone 294377 (TRAV12-3, TRAJ10)
SHLPLTGGGNKLTF

SEQ ID NO: 588754 - protein, 13 aa, Homo sapiens
  CDR3 for beta chain variable domain of TCR clone 294377 (TRBV7-6, TRBJ2-3)
CASSVAVGDTQYF

SEQ ID NO: 588755 - protein, 14 aa, Homo sapiens
  CDR3 for alpha chain variable domain of TCR clone 294378 (TRAV1-2, TRAJ8)
CAVREDTGFQKLVF

SEQ ID NO: 588756 - protein, 16 aa, Homo sapiens
  CDR3 for beta chain variable domain of TCR clone 294378 (TRBV7-6, TRBJ2-6)
CASSLPGLSGVNVLTF

SEQ ID NO: 588757 - protein, 14 aa, Homo sapiens
  CDR3 for alpha chain variable domain of TCR clone 294379 (TRAV26-1, TRAJ38)
CIADNAGNNRKLIW

SEQ ID NO: 588758 - protein, 15 aa, Homo sapiens
  CDR3 for beta chain variable domain of TCR clone 294379 (TRBV27, TRBJ2-7)
CASSTAGTGSDEQYF

SEQ ID NO: 588759 - protein, 14 aa, Homo sapiens
  CDR3 for alpha chain variable domain of TCR clone 294380 (TRAV12-2, TRAJ45)
CAVYSGGGADGLTF

SEQ ID NO: 588760 - protein, 14 aa, Homo sapiens
  CDR3 for beta chain variable domain of TCR clone 294380 (TRBV7-2, TRBJ2-7)
CASSLYPGRYEQYF

SEQ ID NO: 588761 - protein, 16 aa, Homo sapiens
  CDR3 for alpha chain variable domain of TCR clone 294381 (TRAV17, TRAJ4)
CATAAHSSGGYNKLIF

SEQ ID NO: 588762 - protein, 16 aa, Homo sapiens
  CDR3 for beta chain variable domain of TCR clone 294381 (TRBV7-9, TRBJ1-2)
CASSLGFSSGEDGYTF

SEQ ID NO: 588763 - protein, 10 aa, Homo sapiens
  CDR3 for alpha chain variable domain of TCR clone 294382 (TRAV3, TRAJ20)
CAVRHPSLQA

SEQ ID NO: 588764 - protein, 16 aa, Homo sapiens
  CDR3 for beta chain variable domain of TCR clone 294382 (TRBV20-1, TRBJ2-7)
CSARATGLALSYEQYF

SEQ ID NO: 588765 - protein, 16 aa, Homo sapiens
  CDR3 for alpha chain variable domain of TCR clone 294383 (TRAV3, TRAJ10)
CAVRDMRAGGGNKLTF

SEQ ID NO: 588766 - protein, 12 aa, Homo sapiens
  CDR3 for beta chain variable domain of TCR clone 294383 (TRBV20-1, TRBJ2-7)
CSAGLNMGEQYF

SEQ ID NO: 588767 - protein, 13 aa, Homo sapiens
  CDR3 for alpha chain variable domain of TCR clone 294384 (TRAV12-3, TRAJ13)
CAMSSGGYQKVTF

SEQ ID NO: 588768 - protein, 14 aa, Homo sapiens
  CDR3 for beta chain variable domain of TCR clone 294384 (TRBV7-3, TRBJ2-1)
CASSLAGGTNGQFF

SEQ ID NO: 588769 - protein, 15 aa, Homo sapiens
  CDR3 for alpha chain variable domain of TCR clone 294385 (TRAV8-6, TRAJ48)
CCEPRFSFGNEKLTF

SEQ ID NO: 588770 - protein, 15 aa, Homo sapiens
  CDR3 for beta chain variable domain of TCR clone 294385 (TRBV12-4, TRBJ2-2)
CASSPQPGSTGELFF

SEQ ID NO: 588771 - protein, 16 aa, Homo sapiens
  CDR3 for alpha chain variable domain of TCR clone 294386 (TRAV8-3, TRAJ44)
CAVGASNTGTASKLTF

SEQ ID NO: 588772 - protein, 15 aa, Homo sapiens
  CDR3 for beta chain variable domain of TCR clone 294386 (TRBV27, TRBJ1-5)
CSSTFNRGSNQPQHF

SEQ ID NO: 588773 - protein, 17 aa, Homo sapiens
  CDR3 for alpha chain variable domain of TCR clone 294387 (TRAV26-1, TRAJ46)
IASSESEKKSSGDKLTF

SEQ ID NO: 588774 - protein, 14 aa, Homo sapiens
  CDR3 for beta chain variable domain of TCR clone 294387 (TRBV7-8, TRBJ2-3)
CASSLEAGTDTQYF

SEQ ID NO: 588775 - protein, 15 aa, Homo sapiens
  CDR3 for alpha chain variable domain of TCR clone 294388 (TRAV27, TRAJ38)
GAARRNAGNNRKLIW

SEQ ID NO: 588776 - protein, 13 aa, Homo sapiens
  CDR3 for beta chain variable domain of TCR clone 294388 (TRBV12-5, TRBJ2-3)
CASGDRQSDTQYL

SEQ ID NO: 588777 - protein, 11 aa, Homo sapiens
  CDR3 for alpha chain variable domain of TCR clone 294389 (TRAV1-2, TRAJ40)
CAVPGTYKYIF

SEQ ID NO: 588778 - protein, 14 aa, Homo sapiens
  CDR3 for beta chain variable domain of TCR clone 294389 (TRBV7-2, TRBJ2-1)
CASSLVAGRNEQFF

SEQ ID NO: 588779 - protein, 15 aa, Homo sapiens
  CDR3 for alpha chain variable domain of TCR clone 294390 (TRAV8-6, TRAJ38)
CAVSSNAGNIRKLIW

SEQ ID NO: 588780 - protein, 13 aa, Homo sapiens
  CDR3 for beta chain variable domain of TCR clone 294390 (TRBV29-1, TRBJ2-2)
CSTTGVNTGELFF

SEQ ID NO: 588781 - protein, 15 aa, Homo sapiens
  CDR3 for alpha chain variable domain of TCR clone 294391 (TRAV30, TRAJ57)
FGTAIPQGGSEKLVF

SEQ ID NO: 588782 - protein, 13 aa, Homo sapiens
  CDR3 for beta chain variable domain of TCR clone 294391 (TRBV7-9, TRBJ1-2)
CASSPSNFWGYTF

SEQ ID NO: 588783 - protein, 12 aa, Homo sapiens
  CDR3 for alpha chain variable domain of TCR clone 294392 (TRAV20, TRAJ34)
CAVKDNTDKLIF

SEQ ID NO: 588784 - protein, 14 aa, Homo sapiens
  CDR3 for beta chain variable domain of TCR clone 294392 (TRBV7-9, TRBJ2-7)
CASSRPEGPYEQYF

SEQ ID NO: 588785 - protein, 13 aa, Homo sapiens
  CDR3 for alpha chain variable domain of TCR clone 294393 (TRAV17, TRAJ54)
CATSWGGAQKLVF

SEQ ID NO: 588786 - protein, 15 aa, Homo sapiens
  CDR3 for beta chain variable domain of TCR clone 294393 (TRBV4-3, TRBJ2-3)
CASSRSLLSTDTQYF

SEQ ID NO: 588787 - protein, 14 aa, Homo sapiens
  CDR3 for alpha chain variable domain of TCR clone 294394 (TRAV12-2, TRAJ24)
CAVTPGDSWGKLQF

SEQ ID NO: 588788 - protein, 12 aa, Homo sapiens
  CDR3 for beta chain variable domain of TCR clone 294394 (TRBV3-1, TRBJ2-1)
CASSQGSSGQFF

SEQ ID NO: 588789 - protein, 14 aa, Homo sapiens
  CDR3 for alpha chain variable domain of TCR clone 294395 (TRAV2, TRAJ9)
CAVEDRSGGFKTIF

SEQ ID NO: 588790 - protein, 13 aa, Homo sapiens
  CDR3 for beta chain variable domain of TCR clone 294395 (TRBV19, TRBJ1-2)
CASSVPGQDGYTV

SEQ ID NO: 588791 - protein, 14 aa, Homo sapiens
  CDR3 for alpha chain variable domain of TCR clone 294396 (TRAV13-1, TRAJ35)
CAASKGGGGNVLHC

SEQ ID NO: 588792 - protein, 13 aa, Homo sapiens
  CDR3 for beta chain variable domain of TCR clone 294396 (TRBV7-3, TRBJ1-1)
CASSQDWGAEAFF

SEQ ID NO: 588793 - protein, 15 aa, Homo sapiens
  CDR3 for alpha chain variable domain of TCR clone 294397 (TRAV4, TRAJ10)
CLVGDGSGGGNKLTF

SEQ ID NO: 588794 - protein, 16 aa, Homo sapiens
  CDR3 for beta chain variable domain of TCR clone 294397 (TRBV20-1, TRBJ1-2)
CSASMGQGVANYGYTF

SEQ ID NO: 588795 - protein, 11 aa, Homo sapiens
  CDR3 for alpha chain variable domain of TCR clone 294398 (TRAV27, TRAJ47)
SIVEYGNKLVF

SEQ ID NO: 588796 - protein, 17 aa, Homo sapiens
  CDR3 for beta chain variable domain of TCR clone 294398 (TRBV13, TRBJ2-3)
CASSLSRVAGGRNTQYF

SEQ ID NO: 588797 - protein, 14 aa, Homo sapiens
  CDR3 for alpha chain variable domain of TCR clone 294399 (TRAV1-2, TRAJ8)
CAVREDTGFQKLVF

SEQ ID NO: 588798 - protein, 16 aa, Homo sapiens
  CDR3 for beta chain variable domain of TCR clone 294399 (TRBV19, TRBJ2-3)
CASGTCPNDGTDTQYF

SEQ ID NO: 588799 - protein, 14 aa, Homo sapiens
  CDR3 for alpha chain variable domain of TCR clone 294400 (TRAV17, TRAJ15)
CATAPNQSGTALIF

SEQ ID NO: 588800 - protein, 14 aa, Homo sapiens
  CDR3 for beta chain variable domain of TCR clone 294400 (TRBV19, TRBJ2-7)
CASSMGQGAIEQYF

SEQ ID NO: 588801 - protein, 13 aa, Homo sapiens
  CDR3 for alpha chain variable domain of TCR clone 294401 (TRAV12-2, TRAJ20)
CAVYPSNDYKHSF

SEQ ID NO: 588802 - protein, 15 aa, Homo sapiens
  CDR3 for beta chain variable domain of TCR clone 294401 (TRBV18, TRBJ1-2)
CASSPGNGLGYGYTF

SEQ ID NO: 588803 - protein, 18 aa, Homo sapiens
  CDR3 for alpha chain variable domain of TCR clone 294402 (TRAV21, TRAJ52)
CAVRPSPAGGTSYGKLTF

SEQ ID NO: 588804 - protein, 17 aa, Homo sapiens
  CDR3 for beta chain variable domain of TCR clone 294402 (TRBV27, TRBJ2-5)
CASSFSLLGNYQETQYF

SEQ ID NO: 588805 - protein, 12 aa, Homo sapiens
  CDR3 for alpha chain variable domain of TCR clone 294403 (TRAV26-1, TRAJ17)
CIVRSAGNKLTF

SEQ ID NO: 588806 - protein, 12 aa, Homo sapiens
  CDR3 for beta chain variable domain of TCR clone 294403 (TRBV7-6, TRBJ1-2)
CASSSGGRGAMA

SEQ ID NO: 588807 - protein, 18 aa, Homo sapiens
  CDR3 for alpha chain variable domain of TCR clone 294404 (TRAV26-1, TRAJ22)
CIVRVALISSGSARQLTF

SEQ ID NO: 588808 - protein, 13 aa, Homo sapiens
  CDR3 for beta chain variable domain of TCR clone 294404 (TRBV13, TRBJ2-5)
CASSPEGGETQYF

SEQ ID NO: 588809 - protein, 14 aa, Homo sapiens
  CDR3 for alpha chain variable domain of TCR clone 294405 (TRAV1-2, TRAJ8)
CAAREDTGFQKLVF

SEQ ID NO: 588810 - protein, 17 aa, Homo sapiens
  CDR3 for beta chain variable domain of TCR clone 294405 (TRBV13, TRBJ2-3)
CASSSLGTSGLTDTQYF

SEQ ID NO: 588811 - protein, 18 aa, Homo sapiens
  CDR3 for alpha chain variable domain of TCR clone 294406 (TRAV21, TRAJ52)
CAVRPSPAGGTSYGKLTF

SEQ ID NO: 588812 - protein, 16 aa, Homo sapiens
  CDR3 for beta chain variable domain of TCR clone 294406 (TRBV7-7, TRBJ2-1)
CASSLASGTSYNEQFF

SEQ ID NO: 588813 - protein, 17 aa, Homo sapiens
  CDR3 for alpha chain variable domain of TCR clone 294407 (TRAV3, TRAJ28)
CAVREAYSGAGSYQLTF

SEQ ID NO: 588814 - protein, 14 aa, Homo sapiens
  CDR3 for beta chain variable domain of TCR clone 294407 (TRBV12-5, TRBJ2-5)
CASGPRTHQETQYF

SEQ ID NO: 588815 - protein, 10 aa, Homo sapiens
  CDR3 for alpha chain variable domain of TCR clone 294408 (TRAV38-1, TRAJ34)
CAFMDDKLIF

SEQ ID NO: 588816 - protein, 17 aa, Homo sapiens
  CDR3 for beta chain variable domain of TCR clone 294408 (TRBV4-1, TRBJ2-7)
CASSRDPLGVRGGEQYF

SEQ ID NO: 588817 - protein, 14 aa, Homo sapiens
  CDR3 for alpha chain variable domain of TCR clone 294409 (TRAV8-4, TRAJ5)
CAVSTDTGRRALTF

SEQ ID NO: 588818 - protein, 13 aa, Homo sapiens
  CDR3 for beta chain variable domain of TCR clone 294409 (TRBV11-2, TRBJ1-6)
CASSLAGTSPLHF

SEQ ID NO: 588819 - protein, 14 aa, Homo sapiens
  CDR3 for alpha chain variable domain of TCR clone 294410 (TRAV38-1, TRAJ45)
CAYYSGGGADGMTF

SEQ ID NO: 588820 - protein, 20 aa, Homo sapiens
  CDR3 for beta chain variable domain of TCR clone 294410 (TRBV28, TRBJ2-1)
CASTPIGRSPGLAGGNEQFF

SEQ ID NO: 588821 - protein, 13 aa, Homo sapiens
  CDR3 for alpha chain variable domain of TCR clone 294411 (TRAV1-2, TRAJ9)
CAALNTGGFKTIF

SEQ ID NO: 588822 - protein, 13 aa, Homo sapiens
  CDR3 for beta chain variable domain of TCR clone 294411 (TRBV7-9, TRBJ1-2)
CASSLKQNYGFTF

SEQ ID NO: 588823 - protein, 15 aa, Homo sapiens
  CDR3 for alpha chain variable domain of TCR clone 294412 (TRAV4, TRAJ10)
CLVGDEEGGGNKLTF

SEQ ID NO: 588824 - protein, 15 aa, Homo sapiens
  CDR3 for beta chain variable domain of TCR clone 294412 (TRBV7-2, TRBJ2-7)
CASSLTGQGMYEQYF

SEQ ID NO: 588825 - protein, 18 aa, Homo sapiens
  CDR3 for alpha chain variable domain of TCR clone 294413 (TRAV12-2, )
CAVEAIQNPDPAVYQLRD

SEQ ID NO: 588826 - protein, 15 aa, Homo sapiens
  CDR3 for beta chain variable domain of TCR clone 294413 (TRBV11-1, TRBJ2-7)
CASSLNYGASYEQYF

SEQ ID NO: 588827 - protein, 13 aa, Homo sapiens
  CDR3 for alpha chain variable domain of TCR clone 294414 (TRAV26-2, TRAJ43)
CILRAVNNNDMRF

SEQ ID NO: 588828 - protein, 17 aa, Homo sapiens
  CDR3 for beta chain variable domain of TCR clone 294414 (TRBV7-2, TRBJ2-1)
CASSLYPPGVEYNEQFF

SEQ ID NO: 588829 - protein, 13 aa, Homo sapiens
  CDR3 for alpha chain variable domain of TCR clone 294415 (TRAV8-3, TRAJ28)
CAVGAVGSYQLTF

SEQ ID NO: 588830 - protein, 15 aa, Homo sapiens
  CDR3 for beta chain variable domain of TCR clone 294415 (TRBV5-7, TRBJ2-1)
CASSFLAGVGNEQFF

SEQ ID NO: 588831 - protein, 16 aa, Homo sapiens
  CDR3 for alpha chain variable domain of TCR clone 294416 (TRAV30, TRAJ24)
GGTEIVDADSWGKFQF

SEQ ID NO: 588832 - protein, 14 aa, Homo sapiens
  CDR3 for beta chain variable domain of TCR clone 294416 (TRBV12-5, TRBJ2-5)
CASGSRTHQETQYF

SEQ ID NO: 588833 - protein, 17 aa, Homo sapiens
  CDR3 for alpha chain variable domain of TCR clone 294417 (TRAV26-1, TRAJ37)
CIVRVITFSSNTGKLIF

SEQ ID NO: 588834 - protein, 16 aa, Homo sapiens
  CDR3 for beta chain variable domain of TCR clone 294417 (TRBV27, TRBJ2-2)
CASSFRGLVRTGELFF

SEQ ID NO: 588835 - protein, 17 aa, Homo sapiens
  CDR3 for alpha chain variable domain of TCR clone 294418 (TRAV38-1, TRAJ45)
CAFMKHYMGGCADGLTF

SEQ ID NO: 588836 - protein, 19 aa, Homo sapiens
  CDR3 for beta chain variable domain of TCR clone 294418 (TRBV6-1, TRBJ2-5)
CASSEQGLAGGLYQETQYF

SEQ ID NO: 588837 - protein, 18 aa, Homo sapiens
  CDR3 for alpha chain variable domain of TCR clone 294419 (TRAV26-2, TRAJ54)
CILRDVEVGIQGAQKLVF

SEQ ID NO: 588838 - protein, 18 aa, Homo sapiens
  CDR3 for beta chain variable domain of TCR clone 294419 (TRBV18, TRBJ1-3)
CASSPRGGAGPSGNTIYF

SEQ ID NO: 588839 - protein, 16 aa, Homo sapiens
  CDR3 for alpha chain variable domain of TCR clone 294420 (TRAV16, TRAJ57)
CAPNLITQGGPEKLVF

SEQ ID NO: 588840 - protein, 17 aa, Homo sapiens
  CDR3 for beta chain variable domain of TCR clone 294420 (TRBV24-1, TRBJ2-4)
CATSDAEARGVRNIQYF

SEQ ID NO: 588841 - protein, 12 aa, Homo sapiens
  CDR3 for alpha chain variable domain of TCR clone 294421 (TRAV38-2/DV8, TRAJ48)
CALLSGNEKLTF

SEQ ID NO: 588842 - protein, 15 aa, Homo sapiens
  CDR3 for beta chain variable domain of TCR clone 294421 (TRBV7-9, TRBJ1-6)
CASSSPGRGNSPLHF

SEQ ID NO: 588843 - protein, 12 aa, Homo sapiens
  CDR3 for alpha chain variable domain of TCR clone 294422 (TRAV13-2, TRAJ8)
CAERTGFQKLVF

SEQ ID NO: 588844 - protein, 15 aa, Homo sapiens
  CDR3 for beta chain variable domain of TCR clone 294422 (TRBV19, TRBJ1-5)
CASSDSGPRNQPQHF

SEQ ID NO: 588845 - protein, 17 aa, Homo sapiens
  CDR3 for alpha chain variable domain of TCR clone 294423 (TRAV9-2, TRAJ52)
CSEGPCPGGTSYGKLTF

SEQ ID NO: 588846 - protein, 15 aa, Homo sapiens
  CDR3 for beta chain variable domain of TCR clone 294423 (TRBV6-3, TRBJ2-7)
CASSSPGTVFYEQYF

SEQ ID NO: 588847 - protein, 11 aa, Homo sapiens
  CDR3 for alpha chain variable domain of TCR clone 294424 (TRAV12-1, TRAJ30)
CVVNGQDKIIF

SEQ ID NO: 588848 - protein, 12 aa, Homo sapiens
  CDR3 for beta chain variable domain of TCR clone 294424 (TRBV12-4, TRBJ2-1)
CASSLVRVEQFF

SEQ ID NO: 588849 - protein, 17 aa, Homo sapiens
  CDR3 for alpha chain variable domain of TCR clone 294425 (TRAV8-6, TRAJ58)
CAVSSWVGETSGSRFTF

SEQ ID NO: 588850 - protein, 13 aa, Homo sapiens
  CDR3 for beta chain variable domain of TCR clone 294425 (TRBV4-2, TRBJ1-1)
CASSQAGNTEAFF

SEQ ID NO: 588851 - protein, 18 aa, Homo sapiens
  CDR3 for alpha chain variable domain of TCR clone 294426 (TRAV13-1, TRAJ52)
CAAKNPNAGGTSYGKLTF

SEQ ID NO: 588852 - protein, 19 aa, Homo sapiens
  CDR3 for beta chain variable domain of TCR clone 294426 (TRBV2, TRBJ2-7)
CASSDDETSGRANDYEQYF

SEQ ID NO: 588853 - protein, 12 aa, Homo sapiens
  CDR3 for alpha chain variable domain of TCR clone 294427 (TRAV21, TRAJ39)
CAADNAGNMLTF

SEQ ID NO: 588854 - protein, 14 aa, Homo sapiens
  CDR3 for beta chain variable domain of TCR clone 294427 (TRBV7-9, TRBJ2-1)
CASSPRDSLYEQFF

SEQ ID NO: 588855 - protein, 16 aa, Homo sapiens
  CDR3 for alpha chain variable domain of TCR clone 294428 (TRAV12-2, TRAJ18)
CAVTTDRGSTLGRLYF

SEQ ID NO: 588856 - protein, 16 aa, Homo sapiens
  CDR3 for beta chain variable domain of TCR clone 294428 (TRBV7-8, TRBJ2-6)
CASRVGDSSGANVLTF

SEQ ID NO: 588857 - protein, 12 aa, Homo sapiens
  CDR3 for alpha chain variable domain of TCR clone 294429 (TRAV26-1, TRAJ43)
CIVRPRGDDMRF

SEQ ID NO: 588858 - protein, 15 aa, Homo sapiens
  CDR3 for beta chain variable domain of TCR clone 294429 (TRBV6-4, TRBJ2-1)
CASIDSTGGYNEQFF

SEQ ID NO: 588859 - protein, 14 aa, Homo sapiens
  CDR3 for alpha chain variable domain of TCR clone 294430 (TRAV2, TRAJ9)
CAVDPNTGGFKTIF

SEQ ID NO: 588860 - protein, 15 aa, Homo sapiens
  CDR3 for beta chain variable domain of TCR clone 294430 (TRBV18, TRBJ2-7)
CASSPSSTGNYEQYF

SEQ ID NO: 588861 - protein, 13 aa, Homo sapiens
  CDR3 for alpha chain variable domain of TCR clone 294431 (TRAV12-3, TRAJ6)
CANTSGGSYIPTF

SEQ ID NO: 588862 - protein, 14 aa, Homo sapiens
  CDR3 for beta chain variable domain of TCR clone 294431 (TRBV19, TRBJ1-1)
CASSRDRDATEAFF

SEQ ID NO: 588863 - protein, 22 aa, Homo sapiens
  CDR3 for alpha chain variable domain of TCR clone 294432 (TRAV12-3, TRAJ26)
CSSETHSPVIQPPTSPNQNFVF

SEQ ID NO: 588864 - protein, 17 aa, Homo sapiens
  CDR3 for beta chain variable domain of TCR clone 294432 (TRBV7-3, TRBJ2-3)
CASSLMKRMRGADTQYF

SEQ ID NO: 588865 - protein, 17 aa, Homo sapiens
  CDR3 for alpha chain variable domain of TCR clone 294433 (TRAV3, TRAJ6)
CAVRDGPRAGGSYIPTF

SEQ ID NO: 588866 - protein, 14 aa, Homo sapiens
  CDR3 for beta chain variable domain of TCR clone 294433 (TRBV7-2, TRBJ2-7)
CTSSPKTSFYEQCF

SEQ ID NO: 588867 - protein, 15 aa, Homo sapiens
  CDR3 for alpha chain variable domain of TCR clone 294434 (TRAV17, TRAJ57)
CATGPSQGGSEKLVF

SEQ ID NO: 588868 - protein, 12 aa, Homo sapiens
  CDR3 for beta chain variable domain of TCR clone 294434 (TRBV7-8, TRBJ2-7)
CASSLGDREQYF

SEQ ID NO: 588869 - protein, 18 aa, Homo sapiens
  CDR3 for alpha chain variable domain of TCR clone 294435 (TRAV26-2, TRAJ54)
CILRDVEVGIQGAQKLVF

SEQ ID NO: 588870 - protein, 12 aa, Homo sapiens
  CDR3 for beta chain variable domain of TCR clone 294435 (TRBV7-9, TRBJ1-5)
CASSPQGQPQHF

SEQ ID NO: 588871 - protein, 16 aa, Homo sapiens
  CDR3 for alpha chain variable domain of TCR clone 294436 (TRAV23/DV6, TRAJ9)
CAASIGGNTGGFKTIF

SEQ ID NO: 588872 - protein, 14 aa, Homo sapiens
  CDR3 for beta chain variable domain of TCR clone 294436 (TRBV7-9, TRBJ2-1)
CASSPRDSLYEQFF

SEQ ID NO: 588873 - protein, 12 aa, Homo sapiens
  CDR3 for alpha chain variable domain of TCR clone 294437 (TRAV21, TRAJ6)
CAVKGGSYIPTF

SEQ ID NO: 588874 - protein, 14 aa, Homo sapiens
  CDR3 for beta chain variable domain of TCR clone 294437 (TRBV2, TRBJ1-2)
CASNEGTGPYGYTF

SEQ ID NO: 588875 - protein, 14 aa, Homo sapiens
  CDR3 for alpha chain variable domain of TCR clone 294438 (TRAV1-2, TRAJ8)
CAVREDTGFQKLVF

SEQ ID NO: 588876 - protein, 12 aa, Homo sapiens
  CDR3 for beta chain variable domain of TCR clone 294438 (TRBV4-2, TRBJ2-5)
CASGGAQETQYF

SEQ ID NO: 588877 - protein, 15 aa, Homo sapiens
  CDR3 for alpha chain variable domain of TCR clone 294439 (TRAV4, TRAJ10)
CLVGDGEGGGNKLTF

SEQ ID NO: 588878 - protein, 13 aa, Homo sapiens
  CDR3 for beta chain variable domain of TCR clone 294439 (TRBV7-2, TRBJ2-7)
CASSSPSGSEQYF

SEQ ID NO: 588879 - protein, 14 aa, Homo sapiens
  CDR3 for alpha chain variable domain of TCR clone 294440 (TRAV12-1, TRAJ17)
CVVNYKAAGNKRTF

SEQ ID NO: 588880 - protein, 15 aa, Homo sapiens
  CDR3 for beta chain variable domain of TCR clone 294440 (TRBV7-3, TRBJ2-2)
CQQLKAGDLVRELFF

SEQ ID NO: 588881 - protein, 13 aa, Homo sapiens
  CDR3 for alpha chain variable domain of TCR clone 294441 (TRAV12-2, TRAJ52)
CAAHGTSYGKLTF

SEQ ID NO: 588882 - protein, 13 aa, Homo sapiens
  CDR3 for beta chain variable domain of TCR clone 294441 (TRBV4-2, TRBJ1-1)
CASSQAGNTEAFF

SEQ ID NO: 588883 - protein, 14 aa, Homo sapiens
  CDR3 for alpha chain variable domain of TCR clone 294442 (TRAV23/DV6, TRAJ17)
CAASIGAAGNKLTF

SEQ ID NO: 588884 - protein, 16 aa, Homo sapiens
  CDR3 for beta chain variable domain of TCR clone 294442 (TRBV2, TRBJ2-1)
CASSVGGSLSYNEQFF

SEQ ID NO: 588885 - protein, 15 aa, Homo sapiens
  CDR3 for alpha chain variable domain of TCR clone 294443 (TRAV8-3, TRAJ37)
CAVGGLSSNTGKLIF

SEQ ID NO: 588886 - protein, 16 aa, Homo sapiens
  CDR3 for beta chain variable domain of TCR clone 294443 (TRBV2, TRBJ2-1)
CASSVGGSLSYSEQFF

SEQ ID NO: 588887 - protein, 14 aa, Homo sapiens
  CDR3 for alpha chain variable domain of TCR clone 294444 (TRAV2, TRAJ39)
CAVEGDNAGNMLTF

SEQ ID NO: 588888 - protein, 13 aa, Homo sapiens
  CDR3 for beta chain variable domain of TCR clone 294444 (TRBV19, TRBJ1-2)
CASSVPGQDGYTF

SEQ ID NO: 588889 - protein, 14 aa, Homo sapiens
  CDR3 for alpha chain variable domain of TCR clone 294445 (TRAV8-1, TRAJ6)
CAVNASGGSYIPTF

SEQ ID NO: 588890 - protein, 15 aa, Homo sapiens
  CDR3 for beta chain variable domain of TCR clone 294445 (TRBV27, TRBJ2-1)
CASSNGGGSSNEQFF

SEQ ID NO: 588891 - protein, 13 aa, Homo sapiens
  CDR3 for alpha chain variable domain of TCR clone 294446 (TRAV35, TRAJ27)
CAGENTNAGKSTF

SEQ ID NO: 588892 - protein, 13 aa, Homo sapiens
  CDR3 for beta chain variable domain of TCR clone 294446 (TRBV12-5, TRBJ2-3)
CASGDRQSDTQYF

SEQ ID NO: 588893 - protein, 14 aa, Homo sapiens
  CDR3 for alpha chain variable domain of TCR clone 294447 (TRAV12-2, TRAJ40)
CAVKIPSGTYTYIF

SEQ ID NO: 588894 - protein, 16 aa, Homo sapiens
  CDR3 for beta chain variable domain of TCR clone 294447 (TRBV13, TRBJ2-3)
CQQPLQGSGGRNTQYF

SEQ ID NO: 588895 - protein, 14 aa, Homo sapiens
  CDR3 for alpha chain variable domain of TCR clone 294448 (TRAV1-2, TRAJ16)
CAVNRFSDGQKLLF

SEQ ID NO: 588896 - protein, 15 aa, Homo sapiens
  CDR3 for beta chain variable domain of TCR clone 294448 (TRBV9, TRBJ1-6)
CASSVAGTGDLPPHF

SEQ ID NO: 588897 - protein, 13 aa, Homo sapiens
  CDR3 for alpha chain variable domain of TCR clone 294449 (TRAV3, TRAJ21)
CAVREPDFNKFYF

SEQ ID NO: 588898 - protein, 15 aa, Homo sapiens
  CDR3 for beta chain variable domain of TCR clone 294449 (TRBV28, TRBJ2-3)
CASSPDRQGANTQYF

SEQ ID NO: 588899 - protein, 15 aa, Homo sapiens
  CDR3 for alpha chain variable domain of TCR clone 294450 (TRAV25, TRAJ10)
CAGPLLTGGGNKLTF

SEQ ID NO: 588900 - protein, 17 aa, Homo sapiens
  CDR3 for beta chain variable domain of TCR clone 294450 (TRBV28, TRBJ2-3)
CASSPTPAGGRVDTQYF

SEQ ID NO: 588901 - protein, 14 aa, Homo sapiens
  CDR3 for alpha chain variable domain of TCR clone 294451 (TRAV16, TRAJ17)
CAPRIKAAGNKLTF

SEQ ID NO: 588902 - protein, 15 aa, Homo sapiens
  CDR3 for beta chain variable domain of TCR clone 294451 (TRBV3-1, TRBJ2-7)
CASSQVRQGAYEQYF

SEQ ID NO: 588903 - protein, 12 aa, Homo sapiens
  CDR3 for alpha chain variable domain of TCR clone 294452 (TRAV12-3, TRAJ17)
CAMTLTGNKLTF

SEQ ID NO: 588904 - protein, 13 aa, Homo sapiens
  CDR3 for beta chain variable domain of TCR clone 294452 (TRBV28, TRBJ2-2)
CASIRESTGELFF

SEQ ID NO: 588905 - protein, 15 aa, Homo sapiens
  CDR3 for alpha chain variable domain of TCR clone 294453 (TRAV27, TRAJ38)
CAARRNAGNNRKLIW

SEQ ID NO: 588906 - protein, 14 aa, Homo sapiens
  CDR3 for beta chain variable domain of TCR clone 294453 (TRBV2, TRBJ2-5)
CASTWGRAQETQYF

SEQ ID NO: 588907 - protein, 18 aa, Homo sapiens
  CDR3 for alpha chain variable domain of TCR clone 294454 (TRAV3, TRAJ32)
CAVRDIRGYGGATNTLIF

SEQ ID NO: 588908 - protein, 15 aa, Homo sapiens
  CDR3 for beta chain variable domain of TCR clone 294454 (TRBV12-4, TRBJ2-2)
CASSLGVRHTGELFF

SEQ ID NO: 588909 - protein, 16 aa, Homo sapiens
  CDR3 for alpha chain variable domain of TCR clone 294455 (TRAV16, TRAJ52)
CALSAAGGTSYGKLTF

SEQ ID NO: 588910 - protein, 12 aa, Homo sapiens
  CDR3 for beta chain variable domain of TCR clone 294455 (TRBV12-4, TRBJ1-3)
CACSFSGNTIYF

SEQ ID NO: 588911 - protein, 14 aa, Homo sapiens
  CDR3 for alpha chain variable domain of TCR clone 294456 (TRAV26-1, TRAJ38)
CIADNAGNNRKPIW

SEQ ID NO: 588912 - protein, 14 aa, Homo sapiens
  CDR3 for beta chain variable domain of TCR clone 294456 (TRBV7-3, TRBJ1-1)
CASSLKGGNTEAFF

SEQ ID NO: 588913 - protein, 14 aa, Homo sapiens
  CDR3 for alpha chain variable domain of TCR clone 294457 (TRAV3, TRAJ9)
CAVRLNTGGFKTIF

SEQ ID NO: 588914 - protein, 15 aa, Homo sapiens
  CDR3 for beta chain variable domain of TCR clone 294457 (TRBV7-2, TRBJ2-1)
CDSSLASGRVNEQFF

SEQ ID NO: 588915 - protein, 15 aa, Homo sapiens
  CDR3 for alpha chain variable domain of TCR clone 294458 (TRAV27, TRAJ38)
CAARRYAGNNRKRIW

SEQ ID NO: 588916 - protein, 13 aa, Homo sapiens
  CDR3 for beta chain variable domain of TCR clone 294458 (TRBV12-5, TRBJ2-3)
CASGDRQSDTQYF

SEQ ID NO: 588917 - protein, 11 aa, Homo sapiens
  CDR3 for alpha chain variable domain of TCR clone 294459 (TRAV16, TRAJ33)
CAPHSNYQLIW

SEQ ID NO: 588918 - protein, 15 aa, Homo sapiens
  CDR3 for beta chain variable domain of TCR clone 294459 (TRBV4-1, TRBJ2-7)
CASSQKGQGFDEQYF

SEQ ID NO: 588919 - protein, 16 aa, Homo sapiens
  CDR3 for alpha chain variable domain of TCR clone 294460 (TRAV3, TRAJ3)
CAVRDRAKSSASEIIF

SEQ ID NO: 588920 - protein, 13 aa, Homo sapiens
  CDR3 for beta chain variable domain of TCR clone 294460 (TRBV12-4, TRBJ2-7)
CASSPTETYEQYF

SEQ ID NO: 588921 - protein, 17 aa, Homo sapiens
  CDR3 for alpha chain variable domain of TCR clone 294461 (TRAV26-1, TRAJ21)
CIAKGKFYFGSGTKLNV

SEQ ID NO: 588922 - protein, 11 aa, Homo sapiens
  CDR3 for beta chain variable domain of TCR clone 294461 (TRBV11-2, TRBJ2-2)
CASSLPGELFF

SEQ ID NO: 588923 - protein, 15 aa, Homo sapiens
  CDR3 for alpha chain variable domain of TCR clone 294462 (TRAV12-2, TRAJ50)
CAVNGLETSYDKVTF

SEQ ID NO: 588924 - protein, 14 aa, Homo sapiens
  CDR3 for beta chain variable domain of TCR clone 294462 (TRBV7-2, TRBJ1-1)
CASSFLTGTTEAFL

SEQ ID NO: 588925 - protein, 18 aa, Homo sapiens
  CDR3 for alpha chain variable domain of TCR clone 294463 (TRAV21, TRAJ52)
CAVRPSPAGVTSYGKLTF

SEQ ID NO: 588926 - protein, 17 aa, Homo sapiens
  CDR3 for beta chain variable domain of TCR clone 294463 (TRBV13, TRBJ2-3)
CVSSLSRVAGGRNTQYF

SEQ ID NO: 588927 - protein, 12 aa, Homo sapiens
  CDR3 for alpha chain variable domain of TCR clone 294464 (TRAV12-3, TRAJ43)
CAISSNNNDMRF

SEQ ID NO: 588928 - protein, 17 aa, Homo sapiens
  CDR3 for beta chain variable domain of TCR clone 294464 (TRBV20-1, TRBJ2-2)
CSASGSGQGGLTGELFF

SEQ ID NO: 588929 - protein, 13 aa, Homo sapiens
  CDR3 for alpha chain variable domain of TCR clone 294465 (TRAV20, TRAJ37)
CAGCSSNTGKLIF

SEQ ID NO: 588930 - protein, 13 aa, Homo sapiens
  CDR3 for beta chain variable domain of TCR clone 294465 (TRBV7-3, TRBJ1-5)
CASSLDSNQPQHF

SEQ ID NO: 588931 - protein, 16 aa, Homo sapiens
  CDR3 for alpha chain variable domain of TCR clone 294466 (TRAV3, TRAJ37)
CAVRGKGSGNTGKLIF

SEQ ID NO: 588932 - protein, 13 aa, Homo sapiens
  CDR3 for beta chain variable domain of TCR clone 294466 (TRBV7-3, TRBJ2-2)
CASSQENTGELFF

SEQ ID NO: 588933 - protein, 13 aa, Homo sapiens
  CDR3 for alpha chain variable domain of TCR clone 294467 (TRAV17, TRAJ5)
CALRGTGRRALTF

SEQ ID NO: 588934 - protein, 13 aa, Homo sapiens
  CDR3 for beta chain variable domain of TCR clone 294467 (TRBV7-8, TRBJ2-7)
CASSLTGGREQYF

SEQ ID NO: 588935 - protein, 16 aa, Homo sapiens
  CDR3 for alpha chain variable domain of TCR clone 294468 (TRAV3, TRAJ37)
CAVRPHGSGNTGKLIF

SEQ ID NO: 588936 - protein, 14 aa, Homo sapiens
  CDR3 for beta chain variable domain of TCR clone 294468 (TRBV20-1, TRBJ2-1)
CSARGGSSSHEQFF

SEQ ID NO: 588937 - protein, 15 aa, Homo sapiens
  CDR3 for alpha chain variable domain of TCR clone 294469 (TRAV17, TRAJ4)
CATRTWSGGYNKLIF

SEQ ID NO: 588938 - protein, 13 aa, Homo sapiens
  CDR3 for beta chain variable domain of TCR clone 294469 (TRBV6-6, TRBJ2-7)
CASSPKHLAEQYF

SEQ ID NO: 588939 - protein, 15 aa, Homo sapiens
  CDR3 for alpha chain variable domain of TCR clone 294470 (TRAV4, TRAJ39)
CLVGPHNNEGNMLTF

SEQ ID NO: 588940 - protein, 13 aa, Homo sapiens
  CDR3 for beta chain variable domain of TCR clone 294470 (TRBV11-2, TRBJ2-5)
CASSSTGEETQYF

SEQ ID NO: 588941 - protein, 15 aa, Homo sapiens
  CDR3 for alpha chain variable domain of TCR clone 294471 (TRAV34, TRAJ38)
CGADFTPGNHRKLIW

SEQ ID NO: 588942 - protein, 16 aa, Homo sapiens
  CDR3 for beta chain variable domain of TCR clone 294471 (TRBV12-5, TRBJ2-5)
CASGPRTSGNQETQYF

SEQ ID NO: 588943 - protein, 13 aa, Homo sapiens
  CDR3 for alpha chain variable domain of TCR clone 294472 (TRAV8-3, TRAJ28)
CAVGAVGSYLLTF

SEQ ID NO: 588944 - protein, 14 aa, Homo sapiens
  CDR3 for beta chain variable domain of TCR clone 294472 (TRBV7-2, TRBJ2-7)
CASRSQGAAYEQYF

SEQ ID NO: 588945 - protein, 13 aa, Homo sapiens
  CDR3 for alpha chain variable domain of TCR clone 294473 (TRAV21, TRAJ47)
CAVSGLYGNKLVF

SEQ ID NO: 588946 - protein, 17 aa, Homo sapiens
  CDR3 for beta chain variable domain of TCR clone 294473 (TRBV15, TRBJ2-3)
CATSGTTSEEGTDTQYC

SEQ ID NO: 588947 - protein, 12 aa, Homo sapiens
  CDR3 for alpha chain variable domain of TCR clone 294474 (TRAV1-2, TRAJ11)
CAVRGGYSTLTF

SEQ ID NO: 588948 - protein, 16 aa, Homo sapiens
  CDR3 for beta chain variable domain of TCR clone 294474 (TRBV7-9, TRBJ2-7)
CGSSSPSANTANEQYF

SEQ ID NO: 588949 - protein, 15 aa, Homo sapiens
  CDR3 for alpha chain variable domain of TCR clone 294475 (TRAV26-1, TRAJ22)
CIVRVSFWFCKATDL

SEQ ID NO: 588950 - protein, 17 aa, Homo sapiens
  CDR3 for beta chain variable domain of TCR clone 294475 (TRBV7-9, TRBJ2-6)
CASSFGAGYSGANVLTF

SEQ ID NO: 588951 - protein, 12 aa, Homo sapiens
  CDR3 for alpha chain variable domain of TCR clone 294476 (TRAV12-3, TRAJ17)
CAMTLTGNKLNF

SEQ ID NO: 588952 - protein, 16 aa, Homo sapiens
  CDR3 for beta chain variable domain of TCR clone 294476 (TRBV12-4, TRBJ2-5)
CASSFFVRGRQETQYF

SEQ ID NO: 588953 - protein, 21 aa, Homo sapiens
  CDR3 for alpha chain variable domain of TCR clone 294477 (TRAV1-1, TRAJ6)
CAVRREEATYLHLEEEPALLF

SEQ ID NO: 588954 - protein, 15 aa, Homo sapiens
  CDR3 for beta chain variable domain of TCR clone 294477 (TRBV6-6, TRBJ2-1)
CATRQGVRSYNEQFF

SEQ ID NO: 588955 - protein, 12 aa, Homo sapiens
  CDR3 for alpha chain variable domain of TCR clone 294478 (TRAV21, TRAJ11)
CAATSGYSTLTF

SEQ ID NO: 588956 - protein, 14 aa, Homo sapiens
  CDR3 for beta chain variable domain of TCR clone 294478 (TRBV15, TRBJ2-5)
CATSIGGLGETQYF

SEQ ID NO: 588957 - protein, 22 aa, Homo sapiens
  CDR3 for alpha chain variable domain of TCR clone 294479 (TRAV12-1, )
CVVLRGIPDIQNPDPAVYQLRD

SEQ ID NO: 588958 - protein, 15 aa, Homo sapiens
  CDR3 for beta chain variable domain of TCR clone 294479 (TRBV2, TRBJ2-1)
CASSPTGGGEVEQFF

SEQ ID NO: 588959 - protein, 15 aa, Homo sapiens
  CDR3 for alpha chain variable domain of TCR clone 294480 (TRAV12-2, TRAJ20)
CAVKGGFGAGTTVTV

SEQ ID NO: 588960 - protein, 13 aa, Homo sapiens
  CDR3 for beta chain variable domain of TCR clone 294480 (TRBV20-1, TRBJ1-1)
CSARGGGNTEAFF

SEQ ID NO: 588961 - protein, 14 aa, Homo sapiens
  CDR3 for alpha chain variable domain of TCR clone 294481 (TRAV8-2, TRAJ44)
CVVSLTGTASKLTL

SEQ ID NO: 588962 - protein, 15 aa, Homo sapiens
  CDR3 for beta chain variable domain of TCR clone 294481 (TRBV7-2, TRBJ2-1)
CASSFSGGIYNEQFF

SEQ ID NO: 588963 - protein, 13 aa, Homo sapiens
  CDR3 for alpha chain variable domain of TCR clone 294482 (TRAV13-1, TRAJ6)
CAASKGGSYIPTF

SEQ ID NO: 588964 - protein, 14 aa, Homo sapiens
  CDR3 for beta chain variable domain of TCR clone 294482 (TRBV18, TRBJ2-5)
CASSPGVSQETQYF

SEQ ID NO: 588965 - protein, 12 aa, Homo sapiens
  CDR3 for alpha chain variable domain of TCR clone 294483 (TRAV12-3, TRAJ17)
CAMTLTGNKLTF

SEQ ID NO: 588966 - protein, 14 aa, Homo sapiens
  CDR3 for beta chain variable domain of TCR clone 294483 (TRBV19, TRBJ2-1)
CASPTFVLRGEQFF

SEQ ID NO: 588967 - protein, 17 aa, Homo sapiens
  CDR3 for alpha chain variable domain of TCR clone 294484 (TRAV36/DV7, TRAJ52)
CAVAQRAGGTSYGKLTF

SEQ ID NO: 588968 - protein, 14 aa, Homo sapiens
  CDR3 for beta chain variable domain of TCR clone 294484 (TRBV28, TRBJ2-2)
CASTRRSGDGELFF

SEQ ID NO: 588969 - protein, 16 aa, Homo sapiens
  CDR3 for alpha chain variable domain of TCR clone 294485 (TRAV30, TRAJ24)
CGTEIVDSDSWGKFQF

SEQ ID NO: 588970 - protein, 12 aa, Homo sapiens
  CDR3 for beta chain variable domain of TCR clone 294485 (TRBV11-2, TRBJ2-2)
CASSLPTGELFF

SEQ ID NO: 588971 - protein, 16 aa, Homo sapiens
  CDR3 for alpha chain variable domain of TCR clone 294486 (TRAV3, TRAJ37)
CAVRPHGSGTTGKLIF

SEQ ID NO: 588972 - protein, 15 aa, Homo sapiens
  CDR3 for beta chain variable domain of TCR clone 294486 (TRBV20-1, TRBJ2-7)
CSARDRVSGMDEQYF

SEQ ID NO: 588973 - protein, 16 aa, Homo sapiens
  CDR3 for alpha chain variable domain of TCR clone 294487 (TRAV16, TRAJ4)
CALSRMLSGGYNKLIF

SEQ ID NO: 588974 - protein, 16 aa, Homo sapiens
  CDR3 for beta chain variable domain of TCR clone 294487 (TRBV12-4, TRBJ1-5)
CASSRPVGGSNQPQHF

SEQ ID NO: 588975 - protein, 13 aa, Homo sapiens
  CDR3 for alpha chain variable domain of TCR clone 294488 (TRAV21, TRAJ42)
CAVGGGSQGNLIF

SEQ ID NO: 588976 - protein, 13 aa, Homo sapiens
  CDR3 for beta chain variable domain of TCR clone 294488 (TRBV7-2, TRBJ2-5)
CASSPDGGETQYF

SEQ ID NO: 588977 - protein, 18 aa, Homo sapiens
  CDR3 for alpha chain variable domain of TCR clone 294489 (TRAV17, TRAJ45)
CATSLDLYSGGGADGLAF

SEQ ID NO: 588978 - protein, 15 aa, Homo sapiens
  CDR3 for beta chain variable domain of TCR clone 294489 (TRBV11-2, TRBJ2-1)
CASSKNRGLIYEQFF

SEQ ID NO: 588979 - protein, 13 aa, Homo sapiens
  CDR3 for alpha chain variable domain of TCR clone 294490 (TRAV16, TRAJ28)
CAVTGAGSYQLTF

SEQ ID NO: 588980 - protein, 16 aa, Homo sapiens
  CDR3 for beta chain variable domain of TCR clone 294490 (TRBV28, TRBJ1-5)
CASSLTGQGWNQPQHF

SEQ ID NO: 588981 - protein, 12 aa, Homo sapiens
  CDR3 for alpha chain variable domain of TCR clone 294491 (TRAV27, TRAJ35)
CAGADFGNVLHC

SEQ ID NO: 588982 - protein, 16 aa, Homo sapiens
  CDR3 for beta chain variable domain of TCR clone 294491 (TRBV6-1, TRBJ2-1)
CDSISRQGSSYNEQFF

SEQ ID NO: 588983 - protein, 17 aa, Homo sapiens
  CDR3 for alpha chain variable domain of TCR clone 294492 (TRAV9-2, TRAJ52)
CALTARAGGTSYGKLTF

SEQ ID NO: 588984 - protein, 14 aa, Homo sapiens
  CDR3 for beta chain variable domain of TCR clone 294492 (TRBV28, TRBJ2-5)
CASSWEGAQETQYF

SEQ ID NO: 588985 - protein, 14 aa, Homo sapiens
  CDR3 for alpha chain variable domain of TCR clone 294493 (TRAV17, TRAJ35)
CATDRPGFGNVLHC

SEQ ID NO: 588986 - protein, 15 aa, Homo sapiens
  CDR3 for beta chain variable domain of TCR clone 294493 (TRBV18, TRBJ2-7)
CASSPLQGRTYEQYF

SEQ ID NO: 588987 - protein, 13 aa, Homo sapiens
  CDR3 for alpha chain variable domain of TCR clone 294494 (TRAV21, TRAJ20)
CAVGLRVDYKLSF

SEQ ID NO: 588988 - protein, 16 aa, Homo sapiens
  CDR3 for beta chain variable domain of TCR clone 294494 (TRBV3-1, TRBJ2-5)
CASSPGQFNGFGTQYF

SEQ ID NO: 588989 - protein, 12 aa, Homo sapiens
  CDR3 for alpha chain variable domain of TCR clone 294495 (TRAV21, TRAJ31)
CAVWGNNARLMF

SEQ ID NO: 588990 - protein, 16 aa, Homo sapiens
  CDR3 for beta chain variable domain of TCR clone 294495 (TRBV27, TRBJ2-5)
CASSSGPGGQKETQYF

SEQ ID NO: 588991 - protein, 10 aa, Homo sapiens
  CDR3 for alpha chain variable domain of TCR clone 294496 (TRAV21, TRAJ31)
CAVDNARLMF

SEQ ID NO: 588992 - protein, 16 aa, Homo sapiens
  CDR3 for beta chain variable domain of TCR clone 294496 (TRBV11-2, TRBJ1-2)
CASSLDTGGADYGYTF

SEQ ID NO: 588993 - protein, 12 aa, Homo sapiens
  CDR3 for alpha chain variable domain of TCR clone 294497 (TRAV2, TRAJ24)
CAATDSWGKFQF

SEQ ID NO: 588994 - protein, 12 aa, Homo sapiens
  CDR3 for beta chain variable domain of TCR clone 294497 (TRBV18, TRBJ2-5)
CASSPNQETQYF

SEQ ID NO: 588995 - protein, 12 aa, Homo sapiens
  CDR3 for alpha chain variable domain of TCR clone 294498 (TRAV12-3, TRAJ17)
CAMMLTGNKPTF

SEQ ID NO: 588996 - protein, 15 aa, Homo sapiens
  CDR3 for beta chain variable domain of TCR clone 294498 (TRBV20-1, TRBJ2-7)
CSARDRVSGMDEQYF

SEQ ID NO: 588997 - protein, 13 aa, Homo sapiens
  CDR3 for alpha chain variable domain of TCR clone 294499 (TRAV12-1, TRAJ21)
CVVYNFNKFTLDL

SEQ ID NO: 588998 - protein, 14 aa, Homo sapiens
  CDR3 for beta chain variable domain of TCR clone 294499 (TRBV19, TRBJ2-7)
CASSMGQGAIEQYF

SEQ ID NO: 588999 - protein, 15 aa, Homo sapiens
  CDR3 for alpha chain variable domain of TCR clone 294500 (TRAV21, TRAJ53)
CATLNSGGSNYKLTF

SEQ ID NO: 589000 - protein, 14 aa, Homo sapiens
  CDR3 for beta chain variable domain of TCR clone 294500 (TRBV19, TRBJ2-1)
CASPTFVLSGEQLF

SEQ ID NO: 589001 - protein, 14 aa, Homo sapiens
  CDR3 for alpha chain variable domain of TCR clone 294501 (TRAV3, TRAJ33)
CAVRDMGSNYQIIW

SEQ ID NO: 589002 - protein, 17 aa, Homo sapiens
  CDR3 for beta chain variable domain of TCR clone 294501 (TRBV19, TRBJ2-1)
CASSIWSAQPTHNEQFF

SEQ ID NO: 589003 - protein, 15 aa, Homo sapiens
  CDR3 for alpha chain variable domain of TCR clone 294502 (TRAV12-2, TRAJ53)
CAVNGEGGSIYKLTF

SEQ ID NO: 589004 - protein, 15 aa, Homo sapiens
  CDR3 for beta chain variable domain of TCR clone 294502 (TRBV12-4, TRBJ2-5)
CASSPPTGLQETQYF

SEQ ID NO: 589005 - protein, 13 aa, Homo sapiens
  CDR3 for alpha chain variable domain of TCR clone 294503 (TRAV36/DV7, TRAJ34)
CAVGEVNTDKLIF

SEQ ID NO: 589006 - protein, 12 aa, Homo sapiens
  CDR3 for beta chain variable domain of TCR clone 294503 (TRBV20-1, TRBJ2-7)
CSAGLKMREQYF

SEQ ID NO: 589007 - protein, 13 aa, Homo sapiens
  CDR3 for alpha chain variable domain of TCR clone 294504 (TRAV23/DV6, TRAJ47)
CAASSPYGNKLVF

SEQ ID NO: 589008 - protein, 15 aa, Homo sapiens
  CDR3 for beta chain variable domain of TCR clone 294504 (TRBV7-3, TRBJ2-1)
CASSLDGNSYNEQFF

SEQ ID NO: 589009 - protein, 18 aa, Homo sapiens
  CDR3 for alpha chain variable domain of TCR clone 294505 (TRAV12-2, )
CAVEDIQNPDPAVYQLRD

SEQ ID NO: 589010 - protein, 12 aa, Homo sapiens
  CDR3 for beta chain variable domain of TCR clone 294505 (TRBV11-2, TRBJ2-4)
CASSSASGSEYF

SEQ ID NO: 589011 - protein, 17 aa, Homo sapiens
  CDR3 for alpha chain variable domain of TCR clone 294506 (TRAV3, TRAJ42)
CAVRGRDYGGSQGNLIF

SEQ ID NO: 589012 - protein, 14 aa, Homo sapiens
  CDR3 for beta chain variable domain of TCR clone 294506 (TRBV5-4, TRBJ1-1)
CASSLGSRRDEAFF

SEQ ID NO: 589013 - protein, 13 aa, Homo sapiens
  CDR3 for alpha chain variable domain of TCR clone 294507 (TRAV8-3, TRAJ43)
CAVVPFNNNDMRF

SEQ ID NO: 589014 - protein, 17 aa, Homo sapiens
  CDR3 for beta chain variable domain of TCR clone 294507 (TRBV7-7, TRBJ1-1)
CASIGDRPNLGVTEAFF

SEQ ID NO: 589015 - protein, 16 aa, Homo sapiens
  CDR3 for alpha chain variable domain of TCR clone 294508 (TRAV22, TRAJ45)
CVVERGKRGGADGLTF

SEQ ID NO: 589016 - protein, 13 aa, Homo sapiens
  CDR3 for beta chain variable domain of TCR clone 294508 (TRBV27, TRBJ1-1)
CAGSLSIGAEAFF

SEQ ID NO: 589017 - protein, 21 aa, Homo sapiens
  CDR3 for alpha chain variable domain of TCR clone 294509 (TRAV12-1, TRAJ32)
SSVIQPPTSMNYVGATNKLIF

SEQ ID NO: 589018 - protein, 18 aa, Homo sapiens
  CDR3 for beta chain variable domain of TCR clone 294509 (TRBV20-1, TRBJ2-3)
CSASGLAGGPGTTDTQYF

SEQ ID NO: 589019 - protein, 22 aa, Homo sapiens
  CDR3 for alpha chain variable domain of TCR clone 294510 (TRAV12-1, TRAJ43)
SSVIQPPTSVLNGRSNNNDMRF

SEQ ID NO: 589020 - protein, 13 aa, Homo sapiens
  CDR3 for beta chain variable domain of TCR clone 294510 (TRBV27, TRBJ1-1)
CASSLSIGAEAFF

SEQ ID NO: 589021 - protein, 15 aa, Homo sapiens
  CDR3 for alpha chain variable domain of TCR clone 294511 (TRAV13-1, TRAJ44)
SAASRGGGTASKLTF

SEQ ID NO: 589022 - protein, 14 aa, Homo sapiens
  CDR3 for beta chain variable domain of TCR clone 294511 (TRBV7-2, TRBJ2-5)
CASSPRGSSETQYF

SEQ ID NO: 589023 - protein, 18 aa, Homo sapiens
  CDR3 for alpha chain variable domain of TCR clone 294512 (TRAV26-2, TRAJ54)
CILRDVEVGIQGAQKLVF

SEQ ID NO: 589024 - protein, 16 aa, Homo sapiens
  CDR3 for beta chain variable domain of TCR clone 294512 (TRBV6-1, TRBJ2-5)
CASSETLDRVAETQYF

SEQ ID NO: 589025 - protein, 18 aa, Homo sapiens
  CDR3 for alpha chain variable domain of TCR clone 294513 (TRAV2, TRAJ8)
CCLLLCCRLNTGFQKLVF

SEQ ID NO: 589026 - protein, 18 aa, Homo sapiens
  CDR3 for beta chain variable domain of TCR clone 294513 (TRBV11-2, TRBJ2-3)
CASSLGGASRGAPNTQYF

SEQ ID NO: 589027 - protein, 13 aa, Homo sapiens
  CDR3 for alpha chain variable domain of TCR clone 294514 (TRAV1-2, TRAJ24)
CAVTGDSCGKLQF

SEQ ID NO: 589028 - protein, 15 aa, Homo sapiens
  CDR3 for beta chain variable domain of TCR clone 294514 (TRBV7-2, TRBJ2-7)
CASSLGGAKSGEQYF

SEQ ID NO: 589029 - protein, 14 aa, Homo sapiens
  CDR3 for alpha chain variable domain of TCR clone 294515 (TRAV26-1, TRAJ38)
CIADNAGNNRKLIW

SEQ ID NO: 589030 - protein, 14 aa, Homo sapiens
  CDR3 for beta chain variable domain of TCR clone 294515 (TRBV9, TRBJ2-4)
CASSSSGTSGFQYF

SEQ ID NO: 589031 - protein, 16 aa, Homo sapiens
  CDR3 for alpha chain variable domain of TCR clone 294516 (TRAV4, TRAJ29)
CLVGATLIQETHLLSL

SEQ ID NO: 589032 - protein, 14 aa, Homo sapiens
  CDR3 for beta chain variable domain of TCR clone 294516 (TRBV5-1, TRBJ2-3)
CASSFPGNTDTQYF

SEQ ID NO: 589033 - protein, 13 aa, Homo sapiens
  CDR3 for alpha chain variable domain of TCR clone 294517 (TRAV12-2, TRAJ18)
CAVRGSTLGRLYF

SEQ ID NO: 589034 - protein, 14 aa, Homo sapiens
  CDR3 for beta chain variable domain of TCR clone 294517 (TRBV19, TRBJ2-1)
CASPTFVLSGEQFF

SEQ ID NO: 589035 - protein, 11 aa, Homo sapiens
  CDR3 for alpha chain variable domain of TCR clone 294518 (TRAV12-1, TRAJ30)
CVVNGQDKIIF

SEQ ID NO: 589036 - protein, 12 aa, Homo sapiens
  CDR3 for beta chain variable domain of TCR clone 294518 (TRBV27, TRBJ2-2)
CASELVTGELFF

SEQ ID NO: 589037 - protein, 15 aa, Homo sapiens
  CDR3 for alpha chain variable domain of TCR clone 294519 (TRAV14/DV4, TRAJ26)
CAMREGQNYGQNFVF

SEQ ID NO: 589038 - protein, 15 aa, Homo sapiens
  CDR3 for beta chain variable domain of TCR clone 294519 (TRBV2, TRBJ2-1)
CASSELAGSYNEQFF

SEQ ID NO: 589039 - protein, 14 aa, Homo sapiens
  CDR3 for alpha chain variable domain of TCR clone 294520 (TRAV17, TRAJ57)
CATDPQGGSEKLVF

SEQ ID NO: 589040 - protein, 11 aa, Homo sapiens
  CDR3 for beta chain variable domain of TCR clone 294520 (TRBV10-3, TRBJ2-7)
CAISEGLEQYF

SEQ ID NO: 589041 - protein, 14 aa, Homo sapiens
  CDR3 for alpha chain variable domain of TCR clone 294521 (TRAV12-2, TRAJ40)
CAAKIPSGTYKYIF

SEQ ID NO: 589042 - protein, 20 aa, Homo sapiens
  CDR3 for beta chain variable domain of TCR clone 294521 (TRBV28, TRBJ2-1)
CTSAPIGRSPGLAGGNEQFF

SEQ ID NO: 589043 - protein, 14 aa, Homo sapiens
  CDR3 for alpha chain variable domain of TCR clone 294522 (TRAV13-1, TRAJ40)
CAARSTSGTYKYIF

SEQ ID NO: 589044 - protein, 15 aa, Homo sapiens
  CDR3 for beta chain variable domain of TCR clone 294522 (TRBV18, TRBJ1-5)
CASSETGGNNQPQHF

SEQ ID NO: 589045 - protein, 13 aa, Homo sapiens
  CDR3 for alpha chain variable domain of TCR clone 294523 (TRAV36/DV7, TRAJ54)
CAGLIQGAQKLVF

SEQ ID NO: 589046 - protein, 13 aa, Homo sapiens
  CDR3 for beta chain variable domain of TCR clone 294523 (TRBV29-1, TRBJ2-4)
CSVGEGTKNMQYF

SEQ ID NO: 589047 - protein, 14 aa, Homo sapiens
  CDR3 for alpha chain variable domain of TCR clone 294524 (TRAV12-2, TRAJ33)
CAVKRARSNYQLIW

SEQ ID NO: 589048 - protein, 13 aa, Homo sapiens
  CDR3 for beta chain variable domain of TCR clone 294524 (TRBV10-3, TRBJ2-7)
CASKLAVNYEQYF

SEQ ID NO: 589049 - protein, 14 aa, Homo sapiens
  CDR3 for alpha chain variable domain of TCR clone 294525 (TRAV1-2, TRAJ8)
CAVRGDTGFQKLVF

SEQ ID NO: 589050 - protein, 11 aa, Homo sapiens
  CDR3 for beta chain variable domain of TCR clone 294525 (TRBV28, TRBJ2-3)
CASTRTDTQYF

SEQ ID NO: 589051 - protein, 17 aa, Homo sapiens
  CDR3 for alpha chain variable domain of TCR clone 294526 (TRAV3, TRAJ6)
CAVRDGPRAGGSYIPTS

SEQ ID NO: 589052 - protein, 14 aa, Homo sapiens
  CDR3 for beta chain variable domain of TCR clone 294526 (TRBV11-2, TRBJ2-3)
CASSRLARTDTQYF

SEQ ID NO: 589053 - protein, 16 aa, Homo sapiens
  CDR3 for alpha chain variable domain of TCR clone 294527 (TRAV30, TRAJ24)
CGTEIVDADSCGKFQF

SEQ ID NO: 589054 - protein, 14 aa, Homo sapiens
  CDR3 for beta chain variable domain of TCR clone 294527 (TRBV12-5, TRBJ2-5)
CASGSRTHQETEYF

SEQ ID NO: 589055 - protein, 12 aa, Homo sapiens
  CDR3 for alpha chain variable domain of TCR clone 294528 (TRAV13-1, TRAJ42)
VNYGGSQGNLIF

SEQ ID NO: 589056 - protein, 15 aa, Homo sapiens
  CDR3 for beta chain variable domain of TCR clone 294528 (TRBV20-1, TRBJ2-1)
CSASSAGTSYNEQFV

SEQ ID NO: 589057 - protein, 18 aa, Homo sapiens
  CDR3 for alpha chain variable domain of TCR clone 294529 (TRAV13-1, TRAJ52)
CAASKRSAGGTSYGKLTF

SEQ ID NO: 589058 - protein, 14 aa, Homo sapiens
  CDR3 for beta chain variable domain of TCR clone 294529 (TRBV7-2, TRBJ2-7)
CASSPKTSFYEHYF

SEQ ID NO: 589059 - protein, 17 aa, Homo sapiens
  CDR3 for alpha chain variable domain of TCR clone 294530 (TRAV23/DV6, TRAJ57)
CAASSTLSQGGSAKLAF

SEQ ID NO: 589060 - protein, 14 aa, Homo sapiens
  CDR3 for beta chain variable domain of TCR clone 294530 (TRBV25-1, TRBJ1-1)
CASTHLGGNTEAFF

SEQ ID NO: 589061 - protein, 14 aa, Homo sapiens
  CDR3 for alpha chain variable domain of TCR clone 294531 (TRAV12-1, TRAJ3)
CGAARYSSASKIIF

SEQ ID NO: 589062 - protein, 16 aa, Homo sapiens
  CDR3 for beta chain variable domain of TCR clone 294531 (TRBV4-3, TRBJ2-2)
CASSHLQGPGTGELFF

SEQ ID NO: 589063 - protein, 14 aa, Homo sapiens
  CDR3 for alpha chain variable domain of TCR clone 294532 (TRAV17, TRAJ39)
CATDTVRAGNMLTF

SEQ ID NO: 589064 - protein, 15 aa, Homo sapiens
  CDR3 for beta chain variable domain of TCR clone 294532 (TRBV13, TRBJ1-5)
CASSFGQGGVQPQHF

SEQ ID NO: 589065 - protein, 18 aa, Homo sapiens
  CDR3 for alpha chain variable domain of TCR clone 294533 (TRAV12-3, TRAJ52)
CAMSVGGAGGTSYGKLTF

SEQ ID NO: 589066 - protein, 15 aa, Homo sapiens
  CDR3 for beta chain variable domain of TCR clone 294533 (TRBV27, TRBJ1-6)
CASSFDRGLWSPLHL

SEQ ID NO: 589067 - protein, 13 aa, Homo sapiens
  CDR3 for alpha chain variable domain of TCR clone 294534 (TRAV3, TRAJ21)
CAVREPDFKKFYF

SEQ ID NO: 589068 - protein, 13 aa, Homo sapiens
  CDR3 for beta chain variable domain of TCR clone 294534 (TRBV12-4, TRBJ1-2)
CASSYRVNYGYTF

SEQ ID NO: 589069 - protein, 14 aa, Homo sapiens
  CDR3 for alpha chain variable domain of TCR clone 294535 (TRAV1-2, TRAJ8)
CAVREETGFQKLVF

SEQ ID NO: 589070 - protein, 15 aa, Homo sapiens
  CDR3 for beta chain variable domain of TCR clone 294535 (TRBV7-9, TRBJ1-4)
CASSAWTGGNEKLFF

SEQ ID NO: 589071 - protein, 15 aa, Homo sapiens
  CDR3 for alpha chain variable domain of TCR clone 294536 (TRAV3, TRAJ29)
CAVRDPLSGNTPLVF

SEQ ID NO: 589072 - protein, 12 aa, Homo sapiens
  CDR3 for beta chain variable domain of TCR clone 294536 (TRBV12-5, TRBJ2-5)
CASGQGVETQYF

SEQ ID NO: 589073 - protein, 13 aa, Homo sapiens
  CDR3 for alpha chain variable domain of TCR clone 294537 (TRAV1-2, TRAJ9)
CAALNTGGFKTIF

SEQ ID NO: 589074 - protein, 16 aa, Homo sapiens
  CDR3 for beta chain variable domain of TCR clone 294537 (TRBV4-1, TRBJ2-3)
CASSQGNEGDGDTQYF

SEQ ID NO: 589075 - protein, 17 aa, Homo sapiens
  CDR3 for alpha chain variable domain of TCR clone 294538 (TRAV3, TRAJ38)
CAVRDCLNAGNNRKLIW

SEQ ID NO: 589076 - protein, 13 aa, Homo sapiens
  CDR3 for beta chain variable domain of TCR clone 294538 (TRBV23-1, TRBJ1-4)
CASRGKFNDKLFF

SEQ ID NO: 589077 - protein, 16 aa, Homo sapiens
  CDR3 for alpha chain variable domain of TCR clone 294539 (TRAV4, TRAJ9)
CLVGDPNRPGGFKTIF

SEQ ID NO: 589078 - protein, 16 aa, Homo sapiens
  CDR3 for beta chain variable domain of TCR clone 294539 (TRBV28, TRBJ1-4)
CASSPPYRGRSEKLIF

SEQ ID NO: 589079 - protein, 14 aa, Homo sapiens
  CDR3 for alpha chain variable domain of TCR clone 294540 (TRAV8-1, TRAJ34)
CAVNPSYNTEKLIF

SEQ ID NO: 589080 - protein, 16 aa, Homo sapiens
  CDR3 for beta chain variable domain of TCR clone 294540 (TRBV7-2, TRBJ2-6)
CASSLAGRSGANVLTF

SEQ ID NO: 589081 - protein, 15 aa, Homo sapiens
  CDR3 for alpha chain variable domain of TCR clone 294541 (TRAV29/DV5, TRAJ30)
CSVLLCSKREDKIIF

SEQ ID NO: 589082 - protein, 13 aa, Homo sapiens
  CDR3 for beta chain variable domain of TCR clone 294541 (TRBV5-4, TRBJ1-5)
CASSLGGDQPQHF

SEQ ID NO: 589083 - protein, 13 aa, Homo sapiens
  CDR3 for alpha chain variable domain of TCR clone 294542 (TRAV21, TRAJ27)
CAALPGNAGKSTF

SEQ ID NO: 589084 - protein, 13 aa, Homo sapiens
  CDR3 for beta chain variable domain of TCR clone 294542 (TRBV7-9, TRBJ1-2)
CASSLKQNYGYTF

SEQ ID NO: 589085 - protein, 14 aa, Homo sapiens
  CDR3 for alpha chain variable domain of TCR clone 294543 (TRAV23/DV6, TRAJ37)
CAAITSSNTCKLIF

SEQ ID NO: 589086 - protein, 15 aa, Homo sapiens
  CDR3 for beta chain variable domain of TCR clone 294543 (TRBV7-9, TRBJ2-7)
CASSPGGGLTYEQYF

SEQ ID NO: 589087 - protein, 14 aa, Homo sapiens
  CDR3 for alpha chain variable domain of TCR clone 294544 (TRAV12-2, TRAJ40)
CAVKIPSGTYKYTF

SEQ ID NO: 589088 - protein, 15 aa, Homo sapiens
  CDR3 for beta chain variable domain of TCR clone 294544 (TRBV11-3, TRBJ2-3)
CASLKDGREGDTQYF

SEQ ID NO: 589089 - protein, 12 aa, Homo sapiens
  CDR3 for alpha chain variable domain of TCR clone 294545 (TRAV21, TRAJ58)
CASETSGSRLTF

SEQ ID NO: 589090 - protein, 15 aa, Homo sapiens
  CDR3 for beta chain variable domain of TCR clone 294545 (TRBV20-1, TRBJ2-7)
CSARDPVKGEGEQYF

SEQ ID NO: 589091 - protein, 11 aa, Homo sapiens
  CDR3 for alpha chain variable domain of TCR clone 294546 (TRAV2, TRAJ33)
CAVESNYQLIW

SEQ ID NO: 589092 - protein, 15 aa, Homo sapiens
  CDR3 for beta chain variable domain of TCR clone 294546 (TRBV19, TRBJ1-1)
CASTSEQIQNTEASF

SEQ ID NO: 589093 - protein, 14 aa, Homo sapiens
  CDR3 for alpha chain variable domain of TCR clone 294547 (TRAV1-2, TRAJ16)
CAVNRFSDGQKLLF

SEQ ID NO: 589094 - protein, 15 aa, Homo sapiens
  CDR3 for beta chain variable domain of TCR clone 294547 (TRBV28, TRBJ1-2)
CASSFLFGQEVGYTF

SEQ ID NO: 589095 - protein, 18 aa, Homo sapiens
  CDR3 for alpha chain variable domain of TCR clone 294548 (TRAV29/DV5, TRAJ52)
CAAGFRGAGGTSYGKLTF

SEQ ID NO: 589096 - protein, 15 aa, Homo sapiens
  CDR3 for beta chain variable domain of TCR clone 294548 (TRBV2, TRBJ2-1)
CASSELAGSYNEQFF

SEQ ID NO: 589097 - protein, 13 aa, Homo sapiens
  CDR3 for alpha chain variable domain of TCR clone 294549 (TRAV8-3, TRAJ28)
CAVGAVGSYQLTF

SEQ ID NO: 589098 - protein, 15 aa, Homo sapiens
  CDR3 for beta chain variable domain of TCR clone 294549 (TRBV19, TRBJ2-1)
CASSTGNSSYNEQFF

SEQ ID NO: 589099 - protein, 13 aa, Homo sapiens
  CDR3 for alpha chain variable domain of TCR clone 294550 (TRAV2, TRAJ40)
CAVVTSETYKYIF

SEQ ID NO: 589100 - protein, 14 aa, Homo sapiens
  CDR3 for beta chain variable domain of TCR clone 294550 (TRBV19, TRBJ2-3)
CASSAPRGTDTQYF

SEQ ID NO: 589101 - protein, 12 aa, Homo sapiens
  CDR3 for alpha chain variable domain of TCR clone 294551 (TRAV2, TRAJ10)
CASTGGGNKLTF

SEQ ID NO: 589102 - protein, 12 aa, Homo sapiens
  CDR3 for beta chain variable domain of TCR clone 294551 (TRBV2, TRBJ2-1)
CAKREGYNEQFF

SEQ ID NO: 589103 - protein, 14 aa, Homo sapiens
  CDR3 for alpha chain variable domain of TCR clone 294552 (TRAV8-6, TRAJ34)
CAVSDQGNTDKLIF

SEQ ID NO: 589104 - protein, 15 aa, Homo sapiens
  CDR3 for beta chain variable domain of TCR clone 294552 (TRBV7-9, TRBJ1-6)
CASSSPGRGNSPLHF

SEQ ID NO: 589105 - protein, 16 aa, Homo sapiens
  CDR3 for alpha chain variable domain of TCR clone 294553 (TRAV12-3, TRAJ58)
CAMTDTEETSGSRLTF

SEQ ID NO: 589106 - protein, 15 aa, Homo sapiens
  CDR3 for beta chain variable domain of TCR clone 294553 (TRBV11-3, TRBJ2-3)
CASLKDGRGGDTQYF

SEQ ID NO: 589107 - protein, 14 aa, Homo sapiens
  CDR3 for alpha chain variable domain of TCR clone 294554 (TRAV12-2, TRAJ17)
CAVLFKAAGNKLTF

SEQ ID NO: 589108 - protein, 15 aa, Homo sapiens
  CDR3 for beta chain variable domain of TCR clone 294554 (TRBV6-6, TRBJ2-5)
CASSYGKIIQETQYF

SEQ ID NO: 589109 - protein, 14 aa, Homo sapiens
  CDR3 for alpha chain variable domain of TCR clone 294555 (TRAV20, TRAJ29)
CAGQAWVGNTPLVF

SEQ ID NO: 589110 - protein, 15 aa, Homo sapiens
  CDR3 for beta chain variable domain of TCR clone 294555 (TRBV29-1, TRBJ2-7)
CSVEFFDRGSYEQYF

SEQ ID NO: 589111 - protein, 14 aa, Homo sapiens
  CDR3 for alpha chain variable domain of TCR clone 294556 (TRAV3, TRAJ9)
CSVRDDTGGFKTIF

SEQ ID NO: 589112 - protein, 18 aa, Homo sapiens
  CDR3 for beta chain variable domain of TCR clone 294556 (TRBV20-1, TRBJ2-6)
CSAETTPTHGSGANVLTF

SEQ ID NO: 589113 - protein, 12 aa, Homo sapiens
  CDR3 for alpha chain variable domain of TCR clone 294557 (TRAV27, TRAJ35)
CAGADFGNVLHC

SEQ ID NO: 589114 - protein, 16 aa, Homo sapiens
  CDR3 for beta chain variable domain of TCR clone 294557 (TRBV6-1, TRBJ2-1)
CACISRQGSSYNEQFF

SEQ ID NO: 589115 - protein, 10 aa, Homo sapiens
  CDR3 for alpha chain variable domain of TCR clone 294558 (TRAV1-2, TRAJ31)
CAFFDARLMF

SEQ ID NO: 589116 - protein, 13 aa, Homo sapiens
  CDR3 for beta chain variable domain of TCR clone 294558 (TRBV7-9, TRBJ1-2)
CASSLKQNYGYIF

SEQ ID NO: 589117 - protein, 12 aa, Homo sapiens
  CDR3 for alpha chain variable domain of TCR clone 294559 (TRAV1-1, TRAJ8)
CAGVTGFQKLVF

SEQ ID NO: 589118 - protein, 13 aa, Homo sapiens
  CDR3 for beta chain variable domain of TCR clone 294559 (TRBV7-3, TRBJ1-1)
CASSQDWGAEAFF

SEQ ID NO: 589119 - protein, 14 aa, Homo sapiens
  CDR3 for alpha chain variable domain of TCR clone 294560 (TRAV29/DV5, TRAJ49)
CAASAQNTGNQFYF

SEQ ID NO: 589120 - protein, 19 aa, Homo sapiens
  CDR3 for beta chain variable domain of TCR clone 294560 (TRBV18, TRBJ1-3)
CASSPLSRTGMSSGNTIYF

SEQ ID NO: 589121 - protein, 22 aa, Homo sapiens
  CDR3 for alpha chain variable domain of TCR clone 294561 (TRAV3, TRAJ6)
CAVRDWGGATYLHLEEEPALLF

SEQ ID NO: 589122 - protein, 17 aa, Homo sapiens
  CDR3 for beta chain variable domain of TCR clone 294561 (TRBV6-5, TRBJ2-1)
CASRLSGRFESYNEQFF

SEQ ID NO: 589123 - protein, 15 aa, Homo sapiens
  CDR3 for alpha chain variable domain of TCR clone 294562 (TRAV26-1, TRAJ15)
CIVRMANQAGTALIF

SEQ ID NO: 589124 - protein, 15 aa, Homo sapiens
  CDR3 for beta chain variable domain of TCR clone 294562 (TRBV20-1, TRBJ1-1)
CSARKAETSNSEAFF

SEQ ID NO: 589125 - protein, 13 aa, Homo sapiens
  CDR3 for alpha chain variable domain of TCR clone 294563 (TRAV22, TRAJ29)
CAVGGSGNTPLVF

SEQ ID NO: 589126 - protein, 13 aa, Homo sapiens
  CDR3 for beta chain variable domain of TCR clone 294563 (TRBV4-2, TRBJ1-1)
CASSEAGNTEAVF

SEQ ID NO: 589127 - protein, 13 aa, Homo sapiens
  CDR3 for alpha chain variable domain of TCR clone 294564 (TRAV12-1, TRAJ6)
CVVFPGGSYIPTF

SEQ ID NO: 589128 - protein, 14 aa, Homo sapiens
  CDR3 for beta chain variable domain of TCR clone 294564 (TRBV20-1, TRBJ1-3)
CSDSPTGAGNTIYF

SEQ ID NO: 589129 - protein, 14 aa, Homo sapiens
  CDR3 for alpha chain variable domain of TCR clone 294565 (TRAV38-1, TRAJ40)
CALRPTSGTYKYIF

SEQ ID NO: 589130 - protein, 17 aa, Homo sapiens
  CDR3 for beta chain variable domain of TCR clone 294565 (TRBV4-1, TRBJ2-7)
CASSRDPLGVRGGEQYF

SEQ ID NO: 589131 - protein, 14 aa, Homo sapiens
  CDR3 for alpha chain variable domain of TCR clone 294566 (TRAV2, TRAJ37)
CAVGFTSNTGKLIF

SEQ ID NO: 589132 - protein, 15 aa, Homo sapiens
  CDR3 for beta chain variable domain of TCR clone 294566 (TRBV20-1, TRBJ1-1)
CGASRGVTGNTEAFF

SEQ ID NO: 589133 - protein, 16 aa, Homo sapiens
  CDR3 for alpha chain variable domain of TCR clone 294567 (TRAV12-2, TRAJ48)
CAVNPTTNFGNEKLTF

SEQ ID NO: 589134 - protein, 12 aa, Homo sapiens
  CDR3 for beta chain variable domain of TCR clone 294567 (TRBV9, TRBJ2-3)
CASSLRAGTQYF

SEQ ID NO: 589135 - protein, 15 aa, Homo sapiens
  CDR3 for alpha chain variable domain of TCR clone 294568 (TRAV17, TRAJ52)
CATEAGGTSYGKLTF

SEQ ID NO: 589136 - protein, 14 aa, Homo sapiens
  CDR3 for beta chain variable domain of TCR clone 294568 (TRBV28, TRBJ1-5)
CASSLWALVKPQHF

SEQ ID NO: 589137 - protein, 16 aa, Homo sapiens
  CDR3 for alpha chain variable domain of TCR clone 294569 (TRAV20, TRAJ53)
CAVQGNSGGSNYKLTF

SEQ ID NO: 589138 - protein, 17 aa, Homo sapiens
  CDR3 for beta chain variable domain of TCR clone 294569 (TRBV28, TRBJ2-3)
CASSSPPTGLSTDTQYF

SEQ ID NO: 589139 - protein, 16 aa, Homo sapiens
  CDR3 for alpha chain variable domain of TCR clone 294570 (TRAV5, TRAJ23)
CAGDRLIFGQGTELSV

SEQ ID NO: 589140 - protein, 15 aa, Homo sapiens
  CDR3 for beta chain variable domain of TCR clone 294570 (TRBV6-5, TRBJ2-1)
CASSYDAGAGNEQFF

SEQ ID NO: 589141 - protein, 11 aa, Homo sapiens
  CDR3 for alpha chain variable domain of TCR clone 294571 (TRAV2, TRAJ13)
CASGGYQKVTF

SEQ ID NO: 589142 - protein, 20 aa, Homo sapiens
  CDR3 for beta chain variable domain of TCR clone 294571 (TRBV6-1, TRBJ2-5)
CASSETLDRGGDPVLRARHA

SEQ ID NO: 589143 - protein, 21 aa, Homo sapiens
  CDR3 for alpha chain variable domain of TCR clone 294572 (TRAV8-4, TRAJ47)
HLTKPSAHMSDAAERGNKLVF

SEQ ID NO: 589144 - protein, 14 aa, Homo sapiens
  CDR3 for beta chain variable domain of TCR clone 294572 (TRBV20-1, TRBJ2-3)
CSASRGVSTDTQYF

SEQ ID NO: 589145 - protein, 15 aa, Homo sapiens
  CDR3 for alpha chain variable domain of TCR clone 294573 (TRAV17, TRAJ56)
CATDANTGANSKLTF

SEQ ID NO: 589146 - protein, 14 aa, Homo sapiens
  CDR3 for beta chain variable domain of TCR clone 294573 (TRBV18, TRBJ2-5)
CASSPGVSQETQYF

SEQ ID NO: 589147 - protein, 15 aa, Homo sapiens
  CDR3 for alpha chain variable domain of TCR clone 294574 (TRAV8-4, TRAJ37)
CAVTYGSSNTGKLIF

SEQ ID NO: 589148 - protein, 16 aa, Homo sapiens
  CDR3 for beta chain variable domain of TCR clone 294574 (TRBV15, TRBJ2-1)
CATSRERLAGAYEQFF

SEQ ID NO: 589149 - protein, 16 aa, Homo sapiens
  CDR3 for alpha chain variable domain of TCR clone 294575 (TRAV3, TRAJ21)
CAVRDIERGNFNKFYF

SEQ ID NO: 589150 - protein, 15 aa, Homo sapiens
  CDR3 for beta chain variable domain of TCR clone 294575 (TRBV4-1, TRBJ1-4)
CASSDTGGTNEKLFF

SEQ ID NO: 589151 - protein, 17 aa, Homo sapiens
  CDR3 for alpha chain variable domain of TCR clone 294576 (TRAV12-3, TRAJ52)
CNERGRGWCTSYGKLTF

SEQ ID NO: 589152 - protein, 14 aa, Homo sapiens
  CDR3 for beta chain variable domain of TCR clone 294576 (TRBV7-2, TRBJ2-7)
CASRSQGAAYEKYF

SEQ ID NO: 589153 - protein, 14 aa, Homo sapiens
  CDR3 for alpha chain variable domain of TCR clone 294577 (TRAV1-2, TRAJ16)
CAVNRFSDGQKLLY

SEQ ID NO: 589154 - protein, 15 aa, Homo sapiens
  CDR3 for beta chain variable domain of TCR clone 294577 (TRBV7-9, TRBJ2-2)
CASGPLDTFPGELFF

SEQ ID NO: 589155 - protein, 16 aa, Homo sapiens
  CDR3 for alpha chain variable domain of TCR clone 294578 (TRAV12-3, TRAJ53)
CAMSPGSGGCNYKLTF

SEQ ID NO: 589156 - protein, 20 aa, Homo sapiens
  CDR3 for beta chain variable domain of TCR clone 294578 (TRBV7-8, TRBJ2-2)
CASSHLFPGPTIHITGELFF

SEQ ID NO: 589157 - protein, 15 aa, Homo sapiens
  CDR3 for alpha chain variable domain of TCR clone 294579 (TRAV20, TRAJ50)
CAVRQMKTSYDKVIF

SEQ ID NO: 589158 - protein, 16 aa, Homo sapiens
  CDR3 for beta chain variable domain of TCR clone 294579 (TRBV11-2, TRBJ2-1)
CASSLERDGVDNEQFF

SEQ ID NO: 589159 - protein, 16 aa, Homo sapiens
  CDR3 for alpha chain variable domain of TCR clone 294580 (TRAV3, TRAJ18)
CAVRDGRGSTRGRLYF

SEQ ID NO: 589160 - protein, 14 aa, Homo sapiens
  CDR3 for beta chain variable domain of TCR clone 294580 (TRBV10-2, TRBJ1-5)
CASSSTGRNQPQHF

SEQ ID NO: 589161 - protein, 14 aa, Homo sapiens
  CDR3 for alpha chain variable domain of TCR clone 294581 (TRAV8-4, TRAJ54)
CAVSEVLGAQKLAF

SEQ ID NO: 589162 - protein, 13 aa, Homo sapiens
  CDR3 for beta chain variable domain of TCR clone 294581 (TRBV27, TRBJ2-7)
CASSFVPSYEQYF

SEQ ID NO: 589163 - protein, 13 aa, Homo sapiens
  CDR3 for alpha chain variable domain of TCR clone 294582 (TRAV12-3, TRAJ21)
CAPGPHNFNKFYF

SEQ ID NO: 589164 - protein, 15 aa, Homo sapiens
  CDR3 for beta chain variable domain of TCR clone 294582 (TRBV10-3, TRBJ2-3)
CDISLTSGGTDTQYF

SEQ ID NO: 589165 - protein, 11 aa, Homo sapiens
  CDR3 for alpha chain variable domain of TCR clone 294583 (TRAV1-1, TRAJ23)
CAVRQGGKLIF

SEQ ID NO: 589166 - protein, 12 aa, Homo sapiens
  CDR3 for beta chain variable domain of TCR clone 294583 (TRBV19, TRBJ1-5)
CSSSIAQQPQHF

SEQ ID NO: 589167 - protein, 11 aa, Homo sapiens
  CDR3 for alpha chain variable domain of TCR clone 294584 (TRAV13-2, TRAJ49)
CAVPTGNQFYF

SEQ ID NO: 589168 - protein, 13 aa, Homo sapiens
  CDR3 for beta chain variable domain of TCR clone 294584 (TRBV7-2, TRBJ2-2)
CASSLAVTGELFF

SEQ ID NO: 589169 - protein, 12 aa, Homo sapiens
  CDR3 for alpha chain variable domain of TCR clone 294585 (TRAV1-1, TRAJ30)
CAVRGRDDKIIV

SEQ ID NO: 589170 - protein, 11 aa, Homo sapiens
  CDR3 for beta chain variable domain of TCR clone 294585 (TRBV12-4, TRBJ2-3)
CASTATDTQYF

SEQ ID NO: 589171 - protein, 15 aa, Homo sapiens
  CDR3 for alpha chain variable domain of TCR clone 294586 (TRAV26-1, TRAJ29)
CIVRVEGSGNTPLVF

SEQ ID NO: 589172 - protein, 15 aa, Homo sapiens
  CDR3 for beta chain variable domain of TCR clone 294586 (TRBV7-9, TRBJ1-5)
CASSQGHQTNPAQHF

SEQ ID NO: 589173 - protein, 14 aa, Homo sapiens
  CDR3 for alpha chain variable domain of TCR clone 294587 (TRAV12-3, TRAJ5)
CAMTWDTGRRALTL

SEQ ID NO: 589174 - protein, 14 aa, Homo sapiens
  CDR3 for beta chain variable domain of TCR clone 294587 (TRBV10-2, TRBJ1-5)
CASSSTGRNQPQHF

SEQ ID NO: 589175 - protein, 13 aa, Homo sapiens
  CDR3 for alpha chain variable domain of TCR clone 294588 (TRAV26-1, TRAJ29)
WIVRRSGNTPLVF

SEQ ID NO: 589176 - protein, 16 aa, Homo sapiens
  CDR3 for beta chain variable domain of TCR clone 294588 (TRBV11-2, TRBJ2-7)
CASSLAPTGVNYEQYF

SEQ ID NO: 589177 - protein, 16 aa, Homo sapiens
  CDR3 for alpha chain variable domain of TCR clone 294589 (TRAV17, TRAJ4)
CATAAHSSGGHNKLIF

SEQ ID NO: 589178 - protein, 16 aa, Homo sapiens
  CDR3 for beta chain variable domain of TCR clone 294589 (TRBV27, TRBJ2-2)
CASSLSGFWVTGELFF

SEQ ID NO: 589179 - protein, 17 aa, Homo sapiens
  CDR3 for alpha chain variable domain of TCR clone 294590 (TRAV38-2/DV8, TRAJ45)
CAYRSRYSGGGADGLTF

SEQ ID NO: 589180 - protein, 15 aa, Homo sapiens
  CDR3 for beta chain variable domain of TCR clone 294590 (TRBV19, TRBJ2-1)
CASIKVRGPYNEQFF

SEQ ID NO: 589181 - protein, 17 aa, Homo sapiens
  CDR3 for alpha chain variable domain of TCR clone 294591 (TRAV8-6, TRAJ58)
CAVSSWVGETSGSRLTL

SEQ ID NO: 589182 - protein, 15 aa, Homo sapiens
  CDR3 for beta chain variable domain of TCR clone 294591 (TRBV20-1, TRBJ2-7)
CSARDRFSGMDEQYF

SEQ ID NO: 589183 - protein, 21 aa, Homo sapiens
  CDR3 for alpha chain variable domain of TCR clone 294592 (TRAV1-1, TRAJ6)
CLLLLRCERLERTGGSYRPTF

SEQ ID NO: 589184 - protein, 13 aa, Homo sapiens
  CDR3 for beta chain variable domain of TCR clone 294592 (TRBV10-2, TRBJ2-7)
CASGASGGYEQYF

SEQ ID NO: 589185 - protein, 13 aa, Homo sapiens
  CDR3 for alpha chain variable domain of TCR clone 294593 (TRAV13-1, TRAJ5)
CAASDTGRRALTF

SEQ ID NO: 589186 - protein, 15 aa, Homo sapiens
  CDR3 for beta chain variable domain of TCR clone 294593 (TRBV24-1, TRBJ2-5)
CATSETTGAVGAQYF

SEQ ID NO: 589187 - protein, 12 aa, Homo sapiens
  CDR3 for alpha chain variable domain of TCR clone 294594 (TRAV12-3, TRAJ3)
CAIDSSASKIIF

SEQ ID NO: 589188 - protein, 17 aa, Homo sapiens
  CDR3 for beta chain variable domain of TCR clone 294594 (TRBV7-9, TRBJ2-3)
CASSLEEAGAYPDTQNV

SEQ ID NO: 589189 - protein, 18 aa, Homo sapiens
  CDR3 for alpha chain variable domain of TCR clone 294595 (TRAV13-1, TRAJ52)
CAAKNPNAGGTSYGKLTF

SEQ ID NO: 589190 - protein, 16 aa, Homo sapiens
  CDR3 for beta chain variable domain of TCR clone 294595 (TRBV7-3, TRBJ2-3)
CASSLSGYRPEDTQYF

SEQ ID NO: 589191 - protein, 18 aa, Homo sapiens
  CDR3 for alpha chain variable domain of TCR clone 294596 (TRAV26-1, TRAJ23)
CIVRVGLEVRNQGGKLIF

SEQ ID NO: 589192 - protein, 16 aa, Homo sapiens
  CDR3 for beta chain variable domain of TCR clone 294596 (TRBV6-1, TRBJ1-2)
CASSGAWQGRSHGYTF

SEQ ID NO: 589193 - protein, 16 aa, Homo sapiens
  CDR3 for alpha chain variable domain of TCR clone 294597 (TRAV20, TRAJ52)
CAVLPDGGTSYGKLTF

SEQ ID NO: 589194 - protein, 13 aa, Homo sapiens
  CDR3 for beta chain variable domain of TCR clone 294597 (TRBV10-3, TRBJ2-7)
CASKLAVNYEQYF

SEQ ID NO: 589195 - protein, 16 aa, Homo sapiens
  CDR3 for alpha chain variable domain of TCR clone 294598 (TRAV12-3, TRAJ53)
CAMSPGSGGSNYKMTF

SEQ ID NO: 589196 - protein, 16 aa, Homo sapiens
  CDR3 for beta chain variable domain of TCR clone 294598 (TRBV5-1, TRBJ2-3)
CASSLEGGSFTDTQYF

SEQ ID NO: 589197 - protein, 14 aa, Homo sapiens
  CDR3 for alpha chain variable domain of TCR clone 294599 (TRAV12-2, TRAJ9)
CAVRGQTGGFKTIF

SEQ ID NO: 589198 - protein, 15 aa, Homo sapiens
  CDR3 for beta chain variable domain of TCR clone 294599 (TRBV7-2, TRBJ2-7)
CASSFTGQGAQEQCF

SEQ ID NO: 589199 - protein, 16 aa, Homo sapiens
  CDR3 for alpha chain variable domain of TCR clone 294600 (TRAV4, TRAJ22)
CLVGDLYSGPARQLTF

SEQ ID NO: 589200 - protein, 12 aa, Homo sapiens
  CDR3 for beta chain variable domain of TCR clone 294600 (TRBV12-4, TRBJ1-3)
CASSCSGNTIYF

SEQ ID NO: 589201 - protein, 18 aa, Homo sapiens
  CDR3 for alpha chain variable domain of TCR clone 294601 (TRAV29/DV5, TRAJ37)
CSVLLFSEGSGNTGKLIF

SEQ ID NO: 589202 - protein, 14 aa, Homo sapiens
  CDR3 for beta chain variable domain of TCR clone 294601 (TRBV5-1, TRBJ1-1)
CASSLAVGSGEAFF

SEQ ID NO: 589203 - protein, 17 aa, Homo sapiens
  CDR3 for alpha chain variable domain of TCR clone 294602 (TRAV4, TRAJ18)
CLVGERSVGSTLGRLYF

SEQ ID NO: 589204 - protein, 16 aa, Homo sapiens
  CDR3 for beta chain variable domain of TCR clone 294602 (TRBV15, TRBJ1-4)
CATSRDSPPGRETLFF

SEQ ID NO: 589205 - protein, 12 aa, Homo sapiens
  CDR3 for alpha chain variable domain of TCR clone 294603 (TRAV1-2, TRAJ24)
CAVGGSWGKFQF

SEQ ID NO: 589206 - protein, 12 aa, Homo sapiens
  CDR3 for beta chain variable domain of TCR clone 294603 (TRBV12-4, TRBJ2-7)
CASSLGGCEQYF

SEQ ID NO: 589207 - protein, 12 aa, Homo sapiens
  CDR3 for alpha chain variable domain of TCR clone 294604 (TRAV12-3, TRAJ40)
CAMSSGTYKYIF

SEQ ID NO: 589208 - protein, 15 aa, Homo sapiens
  CDR3 for beta chain variable domain of TCR clone 294604 (TRBV20-1, TRBJ2-7)
CSARDRVSGMDEQYF

SEQ ID NO: 589209 - protein, 13 aa, Homo sapiens
  CDR3 for alpha chain variable domain of TCR clone 294605 (TRAV12-1, TRAJ26)
CVVRRNYGQNFVF

SEQ ID NO: 589210 - protein, 19 aa, Homo sapiens
  CDR3 for beta chain variable domain of TCR clone 294605 (TRBV4-3, TRBJ2-7)
CASSQEFIGWQVTPYEQYF

SEQ ID NO: 589211 - protein, 16 aa, Homo sapiens
  CDR3 for alpha chain variable domain of TCR clone 294606 (TRAV26-1, TRAJ48)
CIVREPPNFGNEKLTF

SEQ ID NO: 589212 - protein, 12 aa, Homo sapiens
  CDR3 for beta chain variable domain of TCR clone 294606 (TRBV19, TRBJ2-1)
CASSRRGAEQFF

SEQ ID NO: 589213 - protein, 14 aa, Homo sapiens
  CDR3 for alpha chain variable domain of TCR clone 294607 (TRAV26-1, TRAJ38)
CIADNAGNNCKLIW

SEQ ID NO: 589214 - protein, 15 aa, Homo sapiens
  CDR3 for beta chain variable domain of TCR clone 294607 (TRBV20-1, TRBJ2-7)
CSARDRVSGMDEQYF

SEQ ID NO: 589215 - protein, 13 aa, Homo sapiens
  CDR3 for alpha chain variable domain of TCR clone 294608 (TRAV12-3, TRAJ40)
YAMSDSGTYKYIF

SEQ ID NO: 589216 - protein, 14 aa, Homo sapiens
  CDR3 for beta chain variable domain of TCR clone 294608 (TRBV7-2, TRBJ1-5)
CASSTQGAGQPQHF

SEQ ID NO: 589217 - protein, 12 aa, Homo sapiens
  CDR3 for alpha chain variable domain of TCR clone 294609 (TRAV12-3, TRAJ20)
CAMVRGDYKLSF

SEQ ID NO: 589218 - protein, 17 aa, Homo sapiens
  CDR3 for beta chain variable domain of TCR clone 294609 (TRBV20-1, TRBJ2-2)
CSASGSGQGGLTGELFF

SEQ ID NO: 589219 - protein, 13 aa, Homo sapiens
  CDR3 for alpha chain variable domain of TCR clone 294610 (TRAV13-1, TRAJ9)
CAASGTGGFQTIF

SEQ ID NO: 589220 - protein, 13 aa, Homo sapiens
  CDR3 for beta chain variable domain of TCR clone 294610 (TRBV12-4, TRBJ2-7)
CASSLERVREQYF

SEQ ID NO: 589221 - protein, 16 aa, Homo sapiens
  CDR3 for alpha chain variable domain of TCR clone 294611 (TRAV3, TRAJ10)
CAVRDMRAGGGNKLTF

SEQ ID NO: 589222 - protein, 17 aa, Homo sapiens
  CDR3 for beta chain variable domain of TCR clone 294611 (TRBV6-5, TRBJ2-4)
CASRPTPGHGSKNIQYF

SEQ ID NO: 589223 - protein, 15 aa, Homo sapiens
  CDR3 for alpha chain variable domain of TCR clone 294612 (TRAV3, TRAJ5)
SAVRDLDTGSRALTF

SEQ ID NO: 589224 - protein, 13 aa, Homo sapiens
  CDR3 for beta chain variable domain of TCR clone 294612 (TRBV12-4, TRBJ2-7)
CASSPTETYEQYF

SEQ ID NO: 589225 - protein, 12 aa, Homo sapiens
  CDR3 for alpha chain variable domain of TCR clone 294613 (TRAV16, TRAJ26)
CASKDGGQNFVF

SEQ ID NO: 589226 - protein, 16 aa, Homo sapiens
  CDR3 for beta chain variable domain of TCR clone 294613 (TRBV19, TRBJ1-5)
CASSIDRGGPRQPQHF

SEQ ID NO: 589227 - protein, 16 aa, Homo sapiens
  CDR3 for alpha chain variable domain of TCR clone 294614 (TRAV1-2, TRAJ16)
SVLDGLEEKDGQKLLF

SEQ ID NO: 589228 - protein, 15 aa, Homo sapiens
  CDR3 for beta chain variable domain of TCR clone 294614 (TRBV9, TRBJ1-6)
CASSVAGTGDSPLHF

SEQ ID NO: 589229 - protein, 14 aa, Homo sapiens
  CDR3 for alpha chain variable domain of TCR clone 294615 (TRAV13-2, TRAJ11)
CAETGTSGYSTLTF

SEQ ID NO: 589230 - protein, 11 aa, Homo sapiens
  CDR3 for beta chain variable domain of TCR clone 294615 (TRBV10-3, TRBJ2-7)
CAISEGLEQYF

SEQ ID NO: 589231 - protein, 18 aa, Homo sapiens
  CDR3 for alpha chain variable domain of TCR clone 294616 (TRAV26-1, TRAJ27)
CIVRPSFNYNANAGESTF

SEQ ID NO: 589232 - protein, 14 aa, Homo sapiens
  CDR3 for beta chain variable domain of TCR clone 294616 (TRBV10-3, TRBJ1-6)
CAISVDGDESPLYF

SEQ ID NO: 589233 - protein, 17 aa, Homo sapiens
  CDR3 for alpha chain variable domain of TCR clone 294617 (TRAV4, TRAJ13)
CIVGVQGSSGGYQKVTF

SEQ ID NO: 589234 - protein, 18 aa, Homo sapiens
  CDR3 for beta chain variable domain of TCR clone 294617 (TRBV15, TRBJ2-3)
CATSRDGARGWDTDTQYF

SEQ ID NO: 589235 - protein, 13 aa, Homo sapiens
  CDR3 for alpha chain variable domain of TCR clone 294618 (TRAV12-1, TRAJ29)
CVVNGPGNTPLVF

SEQ ID NO: 589236 - protein, 15 aa, Homo sapiens
  CDR3 for beta chain variable domain of TCR clone 294618 (TRBV7-9, TRBJ1-1)
CASSLLEQGGTEAFF

SEQ ID NO: 589237 - protein, 16 aa, Homo sapiens
  CDR3 for alpha chain variable domain of TCR clone 294619 (TRAV13-1, TRAJ22)
CAAKGGRTGSARQLTF

SEQ ID NO: 589238 - protein, 15 aa, Homo sapiens
  CDR3 for beta chain variable domain of TCR clone 294619 (TRBV9, TRBJ1-6)
CASSVAGTGDSPLHF

SEQ ID NO: 589239 - protein, 13 aa, Homo sapiens
  CDR3 for alpha chain variable domain of TCR clone 294620 (TRAV1-1, TRAJ9)
CAAKNTGGFKTIF

SEQ ID NO: 589240 - protein, 12 aa, Homo sapiens
  CDR3 for beta chain variable domain of TCR clone 294620 (TRBV19, TRBJ1-4)
CASKDWPGGLFF

SEQ ID NO: 589241 - protein, 15 aa, Homo sapiens
  CDR3 for alpha chain variable domain of TCR clone 294621 (TRAV27, TRAJ38)
CAARRNAGNNRKLIW

SEQ ID NO: 589242 - protein, 11 aa, Homo sapiens
  CDR3 for beta chain variable domain of TCR clone 294621 (TRBV12-4, TRBJ2-2)
CASRSAGELFF

SEQ ID NO: 589243 - protein, 14 aa, Homo sapiens
  CDR3 for alpha chain variable domain of TCR clone 294622 (TRAV12-3, TRAJ10)
SHLPLTGGGNKLTF

SEQ ID NO: 589244 - protein, 13 aa, Homo sapiens
  CDR3 for beta chain variable domain of TCR clone 294622 (TRBV27, TRBJ1-1)
CASSLSIGAEALF

SEQ ID NO: 589245 - protein, 18 aa, Homo sapiens
  CDR3 for alpha chain variable domain of TCR clone 294623 (TRAV21, TRAJ52)
CAVRPSPAGGTSYGKLTF

SEQ ID NO: 589246 - protein, 13 aa, Homo sapiens
  CDR3 for beta chain variable domain of TCR clone 294623 (TRBV29-1, TRBJ2-2)
CSVYGEDTGELFF

SEQ ID NO: 589247 - protein, 15 aa, Homo sapiens
  CDR3 for alpha chain variable domain of TCR clone 294624 (TRAV35, TRAJ50)
CAGQLRKTSYDKVIF

SEQ ID NO: 589248 - protein, 12 aa, Homo sapiens
  CDR3 for beta chain variable domain of TCR clone 294624 (TRBV5-1, TRBJ2-5)
CGSSLCLETQYF

SEQ ID NO: 589249 - protein, 13 aa, Homo sapiens
  CDR3 for alpha chain variable domain of TCR clone 294625 (TRAV35, TRAJ22)
CAGLSGSARQLTF

SEQ ID NO: 589250 - protein, 16 aa, Homo sapiens
  CDR3 for beta chain variable domain of TCR clone 294625 (TRBV7-9, TRBJ2-1)
CASSVVLTGQGNEQFF

SEQ ID NO: 589251 - protein, 14 aa, Homo sapiens
  CDR3 for alpha chain variable domain of TCR clone 294626 (TRAV1-2, TRAJ16)
CAVNRFSDGQKPPF

SEQ ID NO: 589252 - protein, 15 aa, Homo sapiens
  CDR3 for beta chain variable domain of TCR clone 294626 (TRBV29-1, TRBJ2-7)
CSVEFFDRGSYEQYF

SEQ ID NO: 589253 - protein, 16 aa, Homo sapiens
  CDR3 for alpha chain variable domain of TCR clone 294627 (TRAV38-2/DV8, TRAJ57)
CAYRSVGQGGSEKLVF

SEQ ID NO: 589254 - protein, 12 aa, Homo sapiens
  CDR3 for beta chain variable domain of TCR clone 294627 (TRBV7-8, TRBJ2-7)
CASSLGDREQYF

SEQ ID NO: 589255 - protein, 19 aa, Homo sapiens
  CDR3 for alpha chain variable domain of TCR clone 294628 (TRAV26-1, TRAJ52)
CIVRAHRNAGGTSYGKLTF

SEQ ID NO: 589256 - protein, 13 aa, Homo sapiens
  CDR3 for beta chain variable domain of TCR clone 294628 (TRBV12-4, TRBJ1-2)
CASSLRQGKGYTF

SEQ ID NO: 589257 - protein, 12 aa, Homo sapiens
  CDR3 for alpha chain variable domain of TCR clone 294629 (TRAV13-1, TRAJ21)
CAAKEGFTKFYF

SEQ ID NO: 589258 - protein, 14 aa, Homo sapiens
  CDR3 for beta chain variable domain of TCR clone 294629 (TRBV5-4, TRBJ1-1)
CASSLDSRRDEAFF

SEQ ID NO: 589259 - protein, 14 aa, Homo sapiens
  CDR3 for alpha chain variable domain of TCR clone 294630 (TRAV26-1, TRAJ39)
CIVRGSRAGNMLTF

SEQ ID NO: 589260 - protein, 14 aa, Homo sapiens
  CDR3 for beta chain variable domain of TCR clone 294630 (TRBV7-2, TRBJ1-1)
CASSFLTGTTEAFF

SEQ ID NO: 589261 - protein, 15 aa, Homo sapiens
  CDR3 for alpha chain variable domain of TCR clone 294631 (TRAV3, TRAJ4)
CAGRDGTGGYNKLIF

SEQ ID NO: 589262 - protein, 14 aa, Homo sapiens
  CDR3 for beta chain variable domain of TCR clone 294631 (TRBV20-1, TRBJ1-1)
CSAQTRIGGTEAFF

SEQ ID NO: 589263 - protein, 16 aa, Homo sapiens
  CDR3 for alpha chain variable domain of TCR clone 294632 (TRAV21, TRAJ37)
CAVRPSGSSITGKLIF

SEQ ID NO: 589264 - protein, 16 aa, Homo sapiens
  CDR3 for beta chain variable domain of TCR clone 294632 (TRBV2, TRBJ2-1)
CASSVGGSLSYNEQFF

SEQ ID NO: 589265 - protein, 11 aa, Homo sapiens
  CDR3 for alpha chain variable domain of TCR clone 294633 (TRAV2, TRAJ13)
CASGGYQKVTF

SEQ ID NO: 589266 - protein, 14 aa, Homo sapiens
  CDR3 for beta chain variable domain of TCR clone 294633 (TRBV19, TRBJ2-1)
CASKDPSSYNEQFF

SEQ ID NO: 589267 - protein, 17 aa, Homo sapiens
  CDR3 for alpha chain variable domain of TCR clone 294634 (TRAV3, TRAJ6)
CAVRDGPRAGGSYIPTF

SEQ ID NO: 589268 - protein, 14 aa, Homo sapiens
  CDR3 for beta chain variable domain of TCR clone 294634 (TRBV7-2, TRBJ2-7)
CVSSPKTSFCEQYF

SEQ ID NO: 589269 - protein, 14 aa, Homo sapiens
  CDR3 for alpha chain variable domain of TCR clone 294635 (TRAV16, TRAJ33)
CALSAMDSNYQLIW

SEQ ID NO: 589270 - protein, 15 aa, Homo sapiens
  CDR3 for beta chain variable domain of TCR clone 294635 (TRBV28, TRBJ1-2)
CASIPQGSDDYGYTF

SEQ ID NO: 589271 - protein, 15 aa, Homo sapiens
  CDR3 for alpha chain variable domain of TCR clone 294636 (TRAV3, TRAJ47)
CAVRDIGEYGNKLVF

SEQ ID NO: 589272 - protein, 15 aa, Homo sapiens
  CDR3 for beta chain variable domain of TCR clone 294636 (TRBV6-1, TRBJ2-3)
CASSERGGITDTQYF

SEQ ID NO: 589273 - protein, 16 aa, Homo sapiens
  CDR3 for alpha chain variable domain of TCR clone 294637 (TRAV3, TRAJ37)
CAVRPHGSGNTGKLIF

SEQ ID NO: 589274 - protein, 14 aa, Homo sapiens
  CDR3 for beta chain variable domain of TCR clone 294637 (TRBV2, TRBJ1-2)
CASSELQVNYGYTF

SEQ ID NO: 589275 - protein, 15 aa, Homo sapiens
  CDR3 for alpha chain variable domain of TCR clone 294638 (TRAV20, TRAJ43)
CAVQAGKSSNNDTRF

SEQ ID NO: 589276 - protein, 14 aa, Homo sapiens
  CDR3 for beta chain variable domain of TCR clone 294638 (TRBV27, TRBJ2-1)
CASRHLGGGKEQFF

SEQ ID NO: 589277 - protein, 14 aa, Homo sapiens
  CDR3 for alpha chain variable domain of TCR clone 294639 (TRAV2, TRAJ9)
CAVEDRSGGFKTIF

SEQ ID NO: 589278 - protein, 13 aa, Homo sapiens
  CDR3 for beta chain variable domain of TCR clone 294639 (TRBV12-4, TRBJ2-2)
CASSITGSGELFF

SEQ ID NO: 589279 - protein, 12 aa, Homo sapiens
  CDR3 for alpha chain variable domain of TCR clone 294640 (TRAV25, TRAJ29)
CAGHSGNTPLVF

SEQ ID NO: 589280 - protein, 13 aa, Homo sapiens
  CDR3 for beta chain variable domain of TCR clone 294640 (TRBV7-3, TRBJ2-1)
CASSPVAYNEQFF

SEQ ID NO: 589281 - protein, 17 aa, Homo sapiens
  CDR3 for alpha chain variable domain of TCR clone 294641 (TRAV3, TRAJ6)
CAVRDSPRAGGSYIPTF

SEQ ID NO: 589282 - protein, 16 aa, Homo sapiens
  CDR3 for beta chain variable domain of TCR clone 294641 (TRBV5-1, TRBJ1-3)
CASSPWAPSSGNTIYF

SEQ ID NO: 589283 - protein, 15 aa, Homo sapiens
  CDR3 for alpha chain variable domain of TCR clone 294642 (TRAV25, TRAJ53)
CPTSNSGGSNYKLTF

SEQ ID NO: 589284 - protein, 13 aa, Homo sapiens
  CDR3 for beta chain variable domain of TCR clone 294642 (TRBV19, TRBJ1-2)
CASSVPGQDGYTF

SEQ ID NO: 589285 - protein, 14 aa, Homo sapiens
  CDR3 for alpha chain variable domain of TCR clone 294643 (TRAV1-2, TRAJ16)
CAVNRFSDVQKLLF

SEQ ID NO: 589286 - protein, 13 aa, Homo sapiens
  CDR3 for beta chain variable domain of TCR clone 294643 (TRBV20-1, TRBJ1-1)
CSARLGQGTEAFF

SEQ ID NO: 589287 - protein, 15 aa, Homo sapiens
  CDR3 for alpha chain variable domain of TCR clone 294644 (TRAV16, TRAJ10)
CALRELTVGGNKLTF

SEQ ID NO: 589288 - protein, 14 aa, Homo sapiens
  CDR3 for beta chain variable domain of TCR clone 294644 (TRBV5-5, TRBJ2-7)
CASSLGQGTYEQYF

SEQ ID NO: 589289 - protein, 14 aa, Homo sapiens
  CDR3 for alpha chain variable domain of TCR clone 294645 (TRAV35, TRAJ33)
CAGSSQDSIYQLIW

SEQ ID NO: 589290 - protein, 16 aa, Homo sapiens
  CDR3 for beta chain variable domain of TCR clone 294645 (TRBV29-1, TRBJ2-7)
CSVEDAEDGTAYEQYF

SEQ ID NO: 589291 - protein, 14 aa, Homo sapiens
  CDR3 for alpha chain variable domain of TCR clone 294646 (TRAV29/DV5, TRAJ20)
CAATIRSNDYKLSF

SEQ ID NO: 589292 - protein, 13 aa, Homo sapiens
  CDR3 for beta chain variable domain of TCR clone 294646 (TRBV15, TRBJ1-6)
CATSGGLNSPLHF

SEQ ID NO: 589293 - protein, 14 aa, Homo sapiens
  CDR3 for alpha chain variable domain of TCR clone 294647 (TRAV24, TRAJ23)
CASPFYNQGGKLIF

SEQ ID NO: 589294 - protein, 14 aa, Homo sapiens
  CDR3 for beta chain variable domain of TCR clone 294647 (TRBV11-2, TRBJ2-3)
CASSRLARTDTQYF

SEQ ID NO: 589295 - protein, 19 aa, Homo sapiens
  CDR3 for alpha chain variable domain of TCR clone 294648 (TRAV8-4, TRAJ3)
CAVTGENLVQQCCQDNLCI

SEQ ID NO: 589296 - protein, 16 aa, Homo sapiens
  CDR3 for beta chain variable domain of TCR clone 294648 (TRBV4-2, TRBJ1-1)
CASSQAGFGMNTEAFF

SEQ ID NO: 589297 - protein, 12 aa, Homo sapiens
  CDR3 for alpha chain variable domain of TCR clone 294649 (TRAV2, TRAJ10)
CASTGGGNKLTF

SEQ ID NO: 589298 - protein, 14 aa, Homo sapiens
  CDR3 for beta chain variable domain of TCR clone 294649 (TRBV4-1, TRBJ2-2)
CASSQAVNTGELFF

SEQ ID NO: 589299 - protein, 12 aa, Homo sapiens
  CDR3 for alpha chain variable domain of TCR clone 294650 (TRAV21, TRAJ31)
CVLAGNNARLMF

SEQ ID NO: 589300 - protein, 16 aa, Homo sapiens
  CDR3 for beta chain variable domain of TCR clone 294650 (TRBV27, TRBJ2-5)
CASSFCPGGTKETQYF

SEQ ID NO: 589301 - protein, 18 aa, Homo sapiens
  CDR3 for alpha chain variable domain of TCR clone 294651 (TRAV12-3, TRAJ52)
CAMSRTNAGGTSYGKLAF

SEQ ID NO: 589302 - protein, 17 aa, Homo sapiens
  CDR3 for beta chain variable domain of TCR clone 294651 (TRBV7-3, TRBJ2-3)
CASSFMKRMRGADTQYF

SEQ ID NO: 589303 - protein, 16 aa, Homo sapiens
  CDR3 for alpha chain variable domain of TCR clone 294652 (TRAV3, TRAJ37)
CAVRVRGSGNTGKLIF

SEQ ID NO: 589304 - protein, 16 aa, Homo sapiens
  CDR3 for beta chain variable domain of TCR clone 294652 (TRBV11-2, TRBJ2-7)
CASSPTAGGVSYEQYF

SEQ ID NO: 589305 - protein, 12 aa, Homo sapiens
  CDR3 for alpha chain variable domain of TCR clone 294653 (TRAV20, TRAJ23)
CAVHNQGGKLIF

SEQ ID NO: 589306 - protein, 12 aa, Homo sapiens
  CDR3 for beta chain variable domain of TCR clone 294653 (TRBV7-8, TRBJ2-7)
RASSLGDREQYF

SEQ ID NO: 589307 - protein, 14 aa, Homo sapiens
  CDR3 for alpha chain variable domain of TCR clone 294654 (TRAV12-2, TRAJ38)
CAPQTAGNNRKLIW

SEQ ID NO: 589308 - protein, 18 aa, Homo sapiens
  CDR3 for beta chain variable domain of TCR clone 294654 (TRBV28, TRBJ1-3)
CASKTPVGQIGSGNTMYF

SEQ ID NO: 589309 - protein, 13 aa, Homo sapiens
  CDR3 for alpha chain variable domain of TCR clone 294655 (TRAV17, TRAJ9)
CATDYTGGFKTIF

SEQ ID NO: 589310 - protein, 14 aa, Homo sapiens
  CDR3 for beta chain variable domain of TCR clone 294655 (TRBV2, TRBJ1-6)
CALSPSDPRSPLHF

SEQ ID NO: 589311 - protein, 14 aa, Homo sapiens
  CDR3 for alpha chain variable domain of TCR clone 294656 (TRAV12-3, TRAJ42)
CAMNYGGSQGNLIF

SEQ ID NO: 589312 - protein, 16 aa, Homo sapiens
  CDR3 for beta chain variable domain of TCR clone 294656 (TRBV2, TRBJ2-3)
CASSTSVEGVTDTQYF

SEQ ID NO: 589313 - protein, 11 aa, Homo sapiens
  CDR3 for alpha chain variable domain of TCR clone 294657 (TRAV12-3, TRAJ16)
LTGGDCQKLLF

SEQ ID NO: 589314 - protein, 13 aa, Homo sapiens
  CDR3 for beta chain variable domain of TCR clone 294657 (TRBV12-4, TRBJ1-4)
CASAMGHNEKLFF

SEQ ID NO: 589315 - protein, 11 aa, Homo sapiens
  CDR3 for alpha chain variable domain of TCR clone 294658 (TRAV8-3, TRAJ15)
CAVGPGTALIF

SEQ ID NO: 589316 - protein, 18 aa, Homo sapiens
  CDR3 for beta chain variable domain of TCR clone 294658 (TRBV18, TRBJ2-3)
CASSVTSGAAGGTDTQYF

SEQ ID NO: 589317 - protein, 13 aa, Homo sapiens
  CDR3 for alpha chain variable domain of TCR clone 294659 (TRAV25, TRAJ30)
CAGRVDRDDKIIF

SEQ ID NO: 589318 - protein, 14 aa, Homo sapiens
  CDR3 for beta chain variable domain of TCR clone 294659 (TRBV4-1, TRBJ2-2)
CASSQAVNTGELFF

SEQ ID NO: 589319 - protein, 12 aa, Homo sapiens
  CDR3 for alpha chain variable domain of TCR clone 294660 (TRAV12-3, TRAJ17)
CAMTLTGNKLTF

SEQ ID NO: 589320 - protein, 20 aa, Homo sapiens
  CDR3 for beta chain variable domain of TCR clone 294660 (TRBV19, TRBJ2-1)
CASSISRTVTSTRLNNEQYF

SEQ ID NO: 589321 - protein, 14 aa, Homo sapiens
  CDR3 for alpha chain variable domain of TCR clone 294661 (TRAV12-3, TRAJ29)
CAMILLSRNTPLVF

SEQ ID NO: 589322 - protein, 16 aa, Homo sapiens
  CDR3 for beta chain variable domain of TCR clone 294661 (TRBV28, TRBJ2-7)
CASSSGTSGRGYEQYL

SEQ ID NO: 589323 - protein, 13 aa, Homo sapiens
  CDR3 for alpha chain variable domain of TCR clone 294662 (TRAV2, TRAJ40)
CAVVTSGTYKYIF

SEQ ID NO: 589324 - protein, 12 aa, Homo sapiens
  CDR3 for beta chain variable domain of TCR clone 294662 (TRBV14, TRBJ2-7)
CASSRLEGEQYF

SEQ ID NO: 589325 - protein, 14 aa, Homo sapiens
  CDR3 for alpha chain variable domain of TCR clone 294663 (TRAV16, TRAJ32)
CALKSGGATSKLIF

SEQ ID NO: 589326 - protein, 13 aa, Homo sapiens
  CDR3 for beta chain variable domain of TCR clone 294663 (TRBV6-6, TRBJ2-3)
CASSQGGRDTQYF

SEQ ID NO: 589327 - protein, 17 aa, Homo sapiens
  CDR3 for alpha chain variable domain of TCR clone 294664 (TRAV36/DV7, TRAJ52)
CAVAQRAGGTSYGKLTF

SEQ ID NO: 589328 - protein, 19 aa, Homo sapiens
  CDR3 for beta chain variable domain of TCR clone 294664 (TRBV28, TRBJ2-1)
CASSFSIRGSGRTRYEQFF

SEQ ID NO: 589329 - protein, 13 aa, Homo sapiens
  CDR3 for alpha chain variable domain of TCR clone 294665 (TRAV3, TRAJ21)
CSVREPDFNKFYF

SEQ ID NO: 589330 - protein, 14 aa, Homo sapiens
  CDR3 for beta chain variable domain of TCR clone 294665 (TRBV4-1, TRBJ2-2)
CASSQAVNTGELFF

SEQ ID NO: 589331 - protein, 14 aa, Homo sapiens
  CDR3 for alpha chain variable domain of TCR clone 294666 (TRAV17, TRAJ12)
CATDAKDRSYKLIF

SEQ ID NO: 589332 - protein, 16 aa, Homo sapiens
  CDR3 for beta chain variable domain of TCR clone 294666 (TRBV11-2, TRBJ2-1)
CASSPRLAGVYNEQFF

SEQ ID NO: 589333 - protein, 14 aa, Homo sapiens
  CDR3 for alpha chain variable domain of TCR clone 294667 (TRAV12-2, TRAJ17)
CAVNIKAAANKLTF

SEQ ID NO: 589334 - protein, 16 aa, Homo sapiens
  CDR3 for beta chain variable domain of TCR clone 294667 (TRBV20-1, TRBJ2-6)
CSASSQGYDGANVLTF

SEQ ID NO: 589335 - protein, 10 aa, Homo sapiens
  CDR3 for alpha chain variable domain of TCR clone 294668 (TRAV12-2, TRAJ52)
WSTSYGKLTF

SEQ ID NO: 589336 - protein, 17 aa, Homo sapiens
  CDR3 for beta chain variable domain of TCR clone 294668 (TRBV11-2, TRBJ2-1)
CASSLYPPGVEYNEQFF

SEQ ID NO: 589337 - protein, 15 aa, Homo sapiens
  CDR3 for alpha chain variable domain of TCR clone 294669 (TRAV21, TRAJ53)
CATLNSGGSNYKLTF

SEQ ID NO: 589338 - protein, 16 aa, Homo sapiens
  CDR3 for beta chain variable domain of TCR clone 294669 (TRBV20-1, TRBJ1-2)
CSASMGQGVDNYGYTF

SEQ ID NO: 589339 - protein, 14 aa, Homo sapiens
  CDR3 for alpha chain variable domain of TCR clone 294670 (TRAV8-2, TRAJ23)
CVVSDDNQGGKLIF

SEQ ID NO: 589340 - protein, 16 aa, Homo sapiens
  CDR3 for beta chain variable domain of TCR clone 294670 (TRBV4-2, TRBJ2-5)
CASSQELVGSQETQYC

SEQ ID NO: 589341 - protein, 14 aa, Homo sapiens
  CDR3 for alpha chain variable domain of TCR clone 294671 (TRAV1-2, TRAJ8)
CAVREDTGFQKLLF

SEQ ID NO: 589342 - protein, 15 aa, Homo sapiens
  CDR3 for beta chain variable domain of TCR clone 294671 (TRBV20-1, TRBJ2-7)
CSAREGRDSLYEQYF

SEQ ID NO: 589343 - protein, 11 aa, Homo sapiens
  CDR3 for alpha chain variable domain of TCR clone 294672 (TRAV8-2, TRAJ45)
CTGGGADGLTF

SEQ ID NO: 589344 - protein, 16 aa, Homo sapiens
  CDR3 for beta chain variable domain of TCR clone 294672 (TRBV19, TRBJ2-2)
CASSLQRGGDTGELFF

SEQ ID NO: 589345 - protein, 16 aa, Homo sapiens
  CDR3 for alpha chain variable domain of TCR clone 294673 (TRAV17, TRAJ53)
CATDALSGGSNYKLTF

SEQ ID NO: 589346 - protein, 15 aa, Homo sapiens
  CDR3 for beta chain variable domain of TCR clone 294673 (TRBV4-1, TRBJ2-7)
CASSQNTGRLYEQYF

SEQ ID NO: 589347 - protein, 12 aa, Homo sapiens
  CDR3 for alpha chain variable domain of TCR clone 294674 (TRAV38-1, TRAJ47)
CDFETYGNKLVF

SEQ ID NO: 589348 - protein, 14 aa, Homo sapiens
  CDR3 for beta chain variable domain of TCR clone 294674 (TRBV12-5, TRBJ2-5)
CASGSRTHQETQYF

SEQ ID NO: 589349 - protein, 14 aa, Homo sapiens
  CDR3 for alpha chain variable domain of TCR clone 294675 (TRAV8-3, TRAJ16)
CAVDRFSDGQKLLF

SEQ ID NO: 589350 - protein, 18 aa, Homo sapiens
  CDR3 for beta chain variable domain of TCR clone 294675 (TRBV20-1, TRBJ2-1)
CSARGDRGPLGIQNEQFF

SEQ ID NO: 589351 - protein, 12 aa, Homo sapiens
  CDR3 for alpha chain variable domain of TCR clone 294676 (TRAV1-1, TRAJ9)
CALNTGGFKTIF

SEQ ID NO: 589352 - protein, 14 aa, Homo sapiens
  CDR3 for beta chain variable domain of TCR clone 294676 (TRBV7-8, TRBJ2-3)
CASSLEAGIDTQYF

SEQ ID NO: 589353 - protein, 16 aa, Homo sapiens
  CDR3 for alpha chain variable domain of TCR clone 294677 (TRAV12-2, TRAJ10)
CAVNRVLTGGGNKLTF

SEQ ID NO: 589354 - protein, 12 aa, Homo sapiens
  CDR3 for beta chain variable domain of TCR clone 294677 (TRBV28, TRBJ2-7)
GASSFSSYEQYF

SEQ ID NO: 589355 - protein, 13 aa, Homo sapiens
  CDR3 for alpha chain variable domain of TCR clone 294678 (TRAV13-1, TRAJ43)
CAASLSNNNDMRF

SEQ ID NO: 589356 - protein, 15 aa, Homo sapiens
  CDR3 for beta chain variable domain of TCR clone 294678 (TRBV5-1, TRBJ2-1)
CASSQAGYWWNGQFF

SEQ ID NO: 589357 - protein, 15 aa, Homo sapiens
  CDR3 for alpha chain variable domain of TCR clone 294679 (TRAV27, TRAJ38)
FAARRNAGNNRKLSW

SEQ ID NO: 589358 - protein, 13 aa, Homo sapiens
  CDR3 for beta chain variable domain of TCR clone 294679 (TRBV12-5, TRBJ2-3)
CASGDRQSDTQYF

SEQ ID NO: 589359 - protein, 19 aa, Homo sapiens
  CDR3 for alpha chain variable domain of TCR clone 294680 (TRAV29/DV5, TRAJ49)
CSVLLCSKLTVDTGNQFYF

SEQ ID NO: 589360 - protein, 17 aa, Homo sapiens
  CDR3 for beta chain variable domain of TCR clone 294680 (TRBV13, TRBJ2-3)
CANSLSRVAGGRNTQYF

SEQ ID NO: 589361 - protein, 10 aa, Homo sapiens
  CDR3 for alpha chain variable domain of TCR clone 294681 (TRAV36/DV7, TRAJ48)
CAVGNEKLTF

SEQ ID NO: 589362 - protein, 13 aa, Homo sapiens
  CDR3 for beta chain variable domain of TCR clone 294681 (TRBV7-7, TRBJ2-5)
CATTGGAMETQYF

SEQ ID NO: 589363 - protein, 13 aa, Homo sapiens
  CDR3 for alpha chain variable domain of TCR clone 294682 (TRAV2, TRAJ40)
CAVVTSGTYKYIF

SEQ ID NO: 589364 - protein, 16 aa, Homo sapiens
  CDR3 for beta chain variable domain of TCR clone 294682 (TRBV13, TRBJ2-3)
GQRPRQGSGGGNTQYF

SEQ ID NO: 589365 - protein, 15 aa, Homo sapiens
  CDR3 for alpha chain variable domain of TCR clone 294683 (TRAV10, TRAJ42)
SLLHLWGGSQGNPIF

SEQ ID NO: 589366 - protein, 15 aa, Homo sapiens
  CDR3 for beta chain variable domain of TCR clone 294683 (TRBV28, TRBJ2-5)
CASSPPWSYQETQYF

SEQ ID NO: 589367 - protein, 16 aa, Homo sapiens
  CDR3 for alpha chain variable domain of TCR clone 294684 (TRAV3, TRAJ37)
CAVRGKVSGNTGKLIF

SEQ ID NO: 589368 - protein, 18 aa, Homo sapiens
  CDR3 for beta chain variable domain of TCR clone 294684 (TRBV20-1, TRBJ2-6)
CSAETTPTHGSGANVLTF

SEQ ID NO: 589369 - protein, 20 aa, Homo sapiens
  CDR3 for alpha chain variable domain of TCR clone 294685 (TRAV26-1, TRAJ42)
CCVLLHRQTYYGGSQGNLIF

SEQ ID NO: 589370 - protein, 16 aa, Homo sapiens
  CDR3 for beta chain variable domain of TCR clone 294685 (TRBV7-3, TRBJ2-2)
WASSLKRGTLSGELFF

SEQ ID NO: 589371 - protein, 15 aa, Homo sapiens
  CDR3 for alpha chain variable domain of TCR clone 294686 (TRAV29/DV5, TRAJ40)
CAASAQGSGTYKNIF

SEQ ID NO: 589372 - protein, 17 aa, Homo sapiens
  CDR3 for beta chain variable domain of TCR clone 294686 (TRBV5-7, TRBJ1-6)
CASSLAPGDTYNSPLHF

SEQ ID NO: 589373 - protein, 13 aa, Homo sapiens
  CDR3 for alpha chain variable domain of TCR clone 294687 (TRAV21, TRAJ15)
CAARNQAGTALIF

SEQ ID NO: 589374 - protein, 16 aa, Homo sapiens
  CDR3 for beta chain variable domain of TCR clone 294687 (TRBV20-1, TRBJ2-5)
CSPGGTSGGYMETQYF

SEQ ID NO: 589375 - protein, 12 aa, Homo sapiens
  CDR3 for alpha chain variable domain of TCR clone 294688 (TRAV1-1, TRAJ40)
CAVRGRDDKIIF

SEQ ID NO: 589376 - protein, 14 aa, Homo sapiens
  CDR3 for beta chain variable domain of TCR clone 294688 (TRBV19, TRBJ2-1)
CACKDPGLANEQFF

SEQ ID NO: 589377 - protein, 14 aa, Homo sapiens
  CDR3 for alpha chain variable domain of TCR clone 294689 (TRAV13-2, TRAJ17)
CAENSKAAGNKLTF

SEQ ID NO: 589378 - protein, 11 aa, Homo sapiens
  CDR3 for beta chain variable domain of TCR clone 294689 (TRBV19, TRBJ2-5)
CASSIKETQYF

SEQ ID NO: 589379 - protein, 13 aa, Homo sapiens
  CDR3 for alpha chain variable domain of TCR clone 294690 (TRAV8-1, TRAJ13)
CAVSKGGYQKVTI

SEQ ID NO: 589380 - protein, 18 aa, Homo sapiens
  CDR3 for beta chain variable domain of TCR clone 294690 (TRBV11-2, TRBJ2-7)
CASSWRTVQTGKSYEQYF

SEQ ID NO: 589381 - protein, 14 aa, Homo sapiens
  CDR3 for alpha chain variable domain of TCR clone 294691 (TRAV12-2, TRAJ33)
CAVKRARSNYQLIW

SEQ ID NO: 589382 - protein, 13 aa, Homo sapiens
  CDR3 for beta chain variable domain of TCR clone 294691 (TRBV13, TRBJ2-7)
CQQLKGASYEQYF

SEQ ID NO: 589383 - protein, 11 aa, Homo sapiens
  CDR3 for alpha chain variable domain of TCR clone 294692 (TRAV12-1, TRAJ30)
CVVNGQDKIIF

SEQ ID NO: 589384 - protein, 12 aa, Homo sapiens
  CDR3 for beta chain variable domain of TCR clone 294692 (TRBV13, TRBJ2-2)
CASKLFTGELFF

SEQ ID NO: 589385 - protein, 15 aa, Homo sapiens
  CDR3 for alpha chain variable domain of TCR clone 294693 (TRAV3, TRAJ3)
SAVRDGHSSASKRIF

SEQ ID NO: 589386 - protein, 14 aa, Homo sapiens
  CDR3 for beta chain variable domain of TCR clone 294693 (TRBV28, TRBJ1-4)
CASSFGTFDEKLFF

SEQ ID NO: 589387 - protein, 13 aa, Homo sapiens
  CDR3 for alpha chain variable domain of TCR clone 294694 (TRAV8-3, TRAJ48)
FAVVPFGNEKLTF

SEQ ID NO: 589388 - protein, 15 aa, Homo sapiens
  CDR3 for beta chain variable domain of TCR clone 294694 (TRBV11-2, TRBJ2-1)
CASSSPSTRYNEQFF

SEQ ID NO: 589389 - protein, 14 aa, Homo sapiens
  CDR3 for alpha chain variable domain of TCR clone 294695 (TRAV12-3, TRAJ10)
GHLPLTGGGNKLTF

SEQ ID NO: 589390 - protein, 15 aa, Homo sapiens
  CDR3 for beta chain variable domain of TCR clone 294695 (TRBV7-9, TRBJ1-4)
CASSRTGGFNDKLFF

SEQ ID NO: 589391 - protein, 18 aa, Homo sapiens
  CDR3 for alpha chain variable domain of TCR clone 294696 (TRAV38-2/DV8, TRAJ52)
CAYRSVGAGGTSYGKLTF

SEQ ID NO: 589392 - protein, 16 aa, Homo sapiens
  CDR3 for beta chain variable domain of TCR clone 294696 (TRBV4-1, TRBJ2-5)
CASSQTSGGPLETQYF

SEQ ID NO: 589393 - protein, 12 aa, Homo sapiens
  CDR3 for alpha chain variable domain of TCR clone 294697 (TRAV27, TRAJ34)
CAGAKNTDKLIF

SEQ ID NO: 589394 - protein, 13 aa, Homo sapiens
  CDR3 for beta chain variable domain of TCR clone 294697 (TRBV4-1, TRBJ2-1)
CASSQEVKYKQFF

SEQ ID NO: 589395 - protein, 13 aa, Homo sapiens
  CDR3 for alpha chain variable domain of TCR clone 294698 (TRAV13-1, TRAJ33)
CAASRAGNYQLLW

SEQ ID NO: 589396 - protein, 12 aa, Homo sapiens
  CDR3 for beta chain variable domain of TCR clone 294698 (TRBV11-2, TRBJ1-2)
CASSREGDGYTL

SEQ ID NO: 589397 - protein, 14 aa, Homo sapiens
  CDR3 for alpha chain variable domain of TCR clone 294699 (TRAV17, TRAJ8)
CATDLNTGFQKLVF

SEQ ID NO: 589398 - protein, 15 aa, Homo sapiens
  CDR3 for beta chain variable domain of TCR clone 294699 (TRBV5-1, TRBJ2-1)
CASSPPRAPYNEQFF

SEQ ID NO: 589399 - protein, 12 aa, Homo sapiens
  CDR3 for alpha chain variable domain of TCR clone 294700 (TRAV19, TRAJ43)
CALTGNNNDMRF

SEQ ID NO: 589400 - protein, 16 aa, Homo sapiens
  CDR3 for beta chain variable domain of TCR clone 294700 (TRBV13, TRBJ2-2)
CASSPRTGEHTGELFF

SEQ ID NO: 589401 - protein, 11 aa, Homo sapiens
  CDR3 for alpha chain variable domain of TCR clone 294701 (TRAV8-4, TRAJ26)
CAGGEGQNFVF

SEQ ID NO: 589402 - protein, 17 aa, Homo sapiens
  CDR3 for beta chain variable domain of TCR clone 294701 (TRBV7-9, TRBJ2-3)
CVSSPTVAGDLTDTQYF

SEQ ID NO: 589403 - protein, 12 aa, Homo sapiens
  CDR3 for alpha chain variable domain of TCR clone 294702 (TRAV16, TRAJ10)
CSRTGGGNKLTF

SEQ ID NO: 589404 - protein, 15 aa, Homo sapiens
  CDR3 for beta chain variable domain of TCR clone 294702 (TRBV7-3, TRBJ2-1)
CASSQRGGALIEHFF

SEQ ID NO: 589405 - protein, 14 aa, Homo sapiens
  CDR3 for alpha chain variable domain of TCR clone 294703 (TRAV13-1, TRAJ44)
CAAKTTGTASKLTF

SEQ ID NO: 589406 - protein, 14 aa, Homo sapiens
  CDR3 for beta chain variable domain of TCR clone 294703 (TRBV19, TRBJ2-2)
CASSTLHRSGELFF

SEQ ID NO: 589407 - protein, 15 aa, Homo sapiens
  CDR3 for alpha chain variable domain of TCR clone 294704 (TRAV3, TRAJ9)
CAVRGLNTGGFKTIF

SEQ ID NO: 589408 - protein, 14 aa, Homo sapiens
  CDR3 for beta chain variable domain of TCR clone 294704 (TRBV4-1, TRBJ2-5)
CASSQYRDQETQYF

SEQ ID NO: 589409 - protein, 14 aa, Homo sapiens
  CDR3 for alpha chain variable domain of TCR clone 294705 (TRAV26-1, TRAJ39)
CNVRGSRAGNMLTF

SEQ ID NO: 589410 - protein, 14 aa, Homo sapiens
  CDR3 for beta chain variable domain of TCR clone 294705 (TRBV25-1, TRBJ1-1)
CASTHLGGNTEAFF

SEQ ID NO: 589411 - protein, 13 aa, Homo sapiens
  CDR3 for alpha chain variable domain of TCR clone 294706 (TRAV13-2, TRAJ40)
CAELISGTYKYTF

SEQ ID NO: 589412 - protein, 12 aa, Homo sapiens
  CDR3 for beta chain variable domain of TCR clone 294706 (TRBV14, TRBJ2-7)
CASSSLKGEQYF

SEQ ID NO: 589413 - protein, 13 aa, Homo sapiens
  CDR3 for alpha chain variable domain of TCR clone 294707 (TRAV8-6, TRAJ49)
CAVSGQTGNQFYF

SEQ ID NO: 589414 - protein, 17 aa, Homo sapiens
  CDR3 for beta chain variable domain of TCR clone 294707 (TRBV7-8, TRBJ2-6)
CASSAGTGGAGANVLTF

SEQ ID NO: 589415 - protein, 13 aa, Homo sapiens
  CDR3 for alpha chain variable domain of TCR clone 294708 (TRAV2, TRAJ24)
CAVTTDSWGKLQF

SEQ ID NO: 589416 - protein, 14 aa, Homo sapiens
  CDR3 for beta chain variable domain of TCR clone 294708 (TRBV13, TRBJ2-5)
CARSLGRGQETQYF

SEQ ID NO: 589417 - protein, 14 aa, Homo sapiens
  CDR3 for alpha chain variable domain of TCR clone 294709 (TRAV12-1, TRAJ17)
CVSNYKAAGNKLTF

SEQ ID NO: 589418 - protein, 18 aa, Homo sapiens
  CDR3 for beta chain variable domain of TCR clone 294709 (TRBV20-1, TRBJ2-6)
CSAEATPTHGSGANVLTF

SEQ ID NO: 589419 - protein, 14 aa, Homo sapiens
  CDR3 for alpha chain variable domain of TCR clone 294710 (TRAV1-1, TRAJ28)
CAAPAGAGSYQLTF

SEQ ID NO: 589420 - protein, 15 aa, Homo sapiens
  CDR3 for beta chain variable domain of TCR clone 294710 (TRBV7-2, TRBJ1-2)
CASSLVSGGDYGYTF

SEQ ID NO: 589421 - protein, 13 aa, Homo sapiens
  CDR3 for alpha chain variable domain of TCR clone 294711 (TRAV13-1, TRAJ6)
CAASKGGSYIPTF

SEQ ID NO: 589422 - protein, 13 aa, Homo sapiens
  CDR3 for beta chain variable domain of TCR clone 294711 (TRBV10-3, TRBJ1-2)
CAISERDSYGYTF

SEQ ID NO: 589423 - protein, 13 aa, Homo sapiens
  CDR3 for alpha chain variable domain of TCR clone 294712 (TRAV3, TRAJ20)
CAVRDEPGYKLSF

SEQ ID NO: 589424 - protein, 15 aa, Homo sapiens
  CDR3 for beta chain variable domain of TCR clone 294712 (TRBV6-1, TRBJ2-3)
CASSERGGITDTQYF

SEQ ID NO: 589425 - protein, 14 aa, Homo sapiens
  CDR3 for alpha chain variable domain of TCR clone 294713 (TRAV21, TRAJ38)
FAVANAGNNRKLIW

SEQ ID NO: 589426 - protein, 16 aa, Homo sapiens
  CDR3 for beta chain variable domain of TCR clone 294713 (TRBV5-4, TRBJ2-1)
CASSLALAGAYNEQFF

SEQ ID NO: 589427 - protein, 13 aa, Homo sapiens
  CDR3 for alpha chain variable domain of TCR clone 294714 (TRAV21, TRAJ27)
CAARPGNAGKSTV

SEQ ID NO: 589428 - protein, 14 aa, Homo sapiens
  CDR3 for beta chain variable domain of TCR clone 294714 (TRBV11-2, TRBJ2-7)
CASSFGAGAYEQYF

SEQ ID NO: 589429 - protein, 15 aa, Homo sapiens
  CDR3 for alpha chain variable domain of TCR clone 294715 (TRAV8-3, TRAJ45)
GASSYSGGGADGLTF

SEQ ID NO: 589430 - protein, 13 aa, Homo sapiens
  CDR3 for beta chain variable domain of TCR clone 294715 (TRBV10-3, TRBJ2-7)
CASKLAVNYEQYF

SEQ ID NO: 589431 - protein, 12 aa, Homo sapiens
  CDR3 for alpha chain variable domain of TCR clone 294716 (TRAV12-3, TRAJ17)
CAMTLSGNKLTF

SEQ ID NO: 589432 - protein, 15 aa, Homo sapiens
  CDR3 for beta chain variable domain of TCR clone 294716 (TRBV20-1, TRBJ2-7)
CSARDWVSGMDEQYF

SEQ ID NO: 589433 - protein, 13 aa, Homo sapiens
  CDR3 for alpha chain variable domain of TCR clone 294717 (TRAV8-3, TRAJ36)
CAVGATGANNLFF

SEQ ID NO: 589434 - protein, 13 aa, Homo sapiens
  CDR3 for beta chain variable domain of TCR clone 294717 (TRBV7-2, TRBJ1-6)
CASSLKFDSPLHF

SEQ ID NO: 589435 - protein, 16 aa, Homo sapiens
  CDR3 for alpha chain variable domain of TCR clone 294718 (TRAV26-1, TRAJ53)
CIVRVAMGGSNYKLTF

SEQ ID NO: 589436 - protein, 16 aa, Homo sapiens
  CDR3 for beta chain variable domain of TCR clone 294718 (TRBV4-1, TRBJ2-7)
CASSQSDRDNSYEQYF

SEQ ID NO: 589437 - protein, 17 aa, Homo sapiens
  CDR3 for alpha chain variable domain of TCR clone 294719 (TRAV8-6, TRAJ58)
CAVSSWVGETRGSRLTF

SEQ ID NO: 589438 - protein, 14 aa, Homo sapiens
  CDR3 for beta chain variable domain of TCR clone 294719 (TRBV4-2, TRBJ2-1)
CATGLDRAYNEQFF

SEQ ID NO: 589439 - protein, 17 aa, Homo sapiens
  CDR3 for alpha chain variable domain of TCR clone 294720 (TRAV21, TRAJ52)
CCRPSPAGGISYGKLTF

SEQ ID NO: 589440 - protein, 14 aa, Homo sapiens
  CDR3 for beta chain variable domain of TCR clone 294720 (TRBV4-1, TRBJ2-2)
CASSQAVNTGELFF

SEQ ID NO: 589441 - protein, 17 aa, Homo sapiens
  CDR3 for alpha chain variable domain of TCR clone 294721 (TRAV3, TRAJ6)
CAVRDGPRAGGSYIPTF

SEQ ID NO: 589442 - protein, 12 aa, Homo sapiens
  CDR3 for beta chain variable domain of TCR clone 294721 (TRBV11-2, TRBJ2-2)
CASSLGGGQLFF

SEQ ID NO: 589443 - protein, 13 aa, Homo sapiens
  CDR3 for alpha chain variable domain of TCR clone 294722 (TRAV21, TRAJ20)
CAVGLRVDYKLSF

SEQ ID NO: 589444 - protein, 16 aa, Homo sapiens
  CDR3 for beta chain variable domain of TCR clone 294722 (TRBV27, TRBJ2-2)
CASSSSGVSNTGELFF

SEQ ID NO: 589445 - protein, 17 aa, Homo sapiens
  CDR3 for alpha chain variable domain of TCR clone 294723 (TRAV13-1, TRAJ52)
CAAGRNAGGTSYGKLTF

SEQ ID NO: 589446 - protein, 12 aa, Homo sapiens
  CDR3 for beta chain variable domain of TCR clone 294723 (TRBV29-1, TRBJ1-3)
CSTRDSGNTVYF

SEQ ID NO: 589447 - protein, 14 aa, Homo sapiens
  CDR3 for alpha chain variable domain of TCR clone 294724 (TRAV12-1, TRAJ9)
CVVNRRTGGFKTIF

SEQ ID NO: 589448 - protein, 16 aa, Homo sapiens
  CDR3 for beta chain variable domain of TCR clone 294724 (TRBV4-1, TRBJ2-3)
CPSSQSTSGAEDTQYF

SEQ ID NO: 589449 - protein, 16 aa, Homo sapiens
  CDR3 for alpha chain variable domain of TCR clone 294725 (TRAV38-1, TRAJ32)
CAFMKGGGGATNKLIF

SEQ ID NO: 589450 - protein, 13 aa, Homo sapiens
  CDR3 for beta chain variable domain of TCR clone 294725 (TRBV20-1, TRBJ2-5)
CSAREAFKETQYF

SEQ ID NO: 589451 - protein, 12 aa, Homo sapiens
  CDR3 for alpha chain variable domain of TCR clone 294726 (TRAV12-2, TRAJ15)
CAVNQAGTALIF

SEQ ID NO: 589452 - protein, 16 aa, Homo sapiens
  CDR3 for beta chain variable domain of TCR clone 294726 (TRBV19, TRBJ1-1)
CASSPTRFWPGTEAFF

SEQ ID NO: 589453 - protein, 15 aa, Homo sapiens
  CDR3 for alpha chain variable domain of TCR clone 294727 (TRAV23/DV6, TRAJ4)
CAASPLRGGYNKLIF

SEQ ID NO: 589454 - protein, 15 aa, Homo sapiens
  CDR3 for beta chain variable domain of TCR clone 294727 (TRBV19, TRBJ1-1)
CASTSGQIQNTEAFF

SEQ ID NO: 589455 - protein, 12 aa, Homo sapiens
  CDR3 for alpha chain variable domain of TCR clone 294728 (TRAV12-3, TRAJ20)
CAMVRGDYKLSF

SEQ ID NO: 589456 - protein, 16 aa, Homo sapiens
  CDR3 for beta chain variable domain of TCR clone 294728 (TRBV29-1, TRBJ2-7)
CSVEDAEDGTAYEQYF

SEQ ID NO: 589457 - protein, 12 aa, Homo sapiens
  CDR3 for alpha chain variable domain of TCR clone 294729 (TRAV3, TRAJ26)
CAVRDYGQNFVF

SEQ ID NO: 589458 - protein, 16 aa, Homo sapiens
  CDR3 for beta chain variable domain of TCR clone 294729 (TRBV11-2, TRBJ1-2)
RAGSPSGREANYGYTF

SEQ ID NO: 589459 - protein, 16 aa, Homo sapiens
  CDR3 for alpha chain variable domain of TCR clone 294730 (TRAV20, TRAJ22)
CAVQASSSGSARQLTF

SEQ ID NO: 589460 - protein, 15 aa, Homo sapiens
  CDR3 for beta chain variable domain of TCR clone 294730 (TRBV10-3, TRBJ2-1)
CAITFGGGTDNEQFF

SEQ ID NO: 589461 - protein, 13 aa, Homo sapiens
  CDR3 for alpha chain variable domain of TCR clone 294731 (TRAV36/DV7, TRAJ37)
CAVFSSNTGKLIF

SEQ ID NO: 589462 - protein, 15 aa, Homo sapiens
  CDR3 for beta chain variable domain of TCR clone 294731 (TRBV12-4, TRBJ2-5)
CQQFCVRGRQETQYF

SEQ ID NO: 589463 - protein, 13 aa, Homo sapiens
  CDR3 for alpha chain variable domain of TCR clone 294732 (TRAV4, TRAJ34)
CLVGDYNTDKLLF

SEQ ID NO: 589464 - protein, 23 aa, Homo sapiens
  CDR3 for beta chain variable domain of TCR clone 294732 (TRBV4-2, TRBJ2-3)
CASSQDPPRASSISGGRGDTQYF

SEQ ID NO: 589465 - protein, 12 aa, Homo sapiens
  CDR3 for alpha chain variable domain of TCR clone 294733 (TRAV16, TRAJ10)
CSRTGGGNKLTF

SEQ ID NO: 589466 - protein, 16 aa, Homo sapiens
  CDR3 for beta chain variable domain of TCR clone 294733 (TRBV7-2, TRBJ2-5)
CASSYKTGISLETQYF

SEQ ID NO: 589467 - protein, 15 aa, Homo sapiens
  CDR3 for alpha chain variable domain of TCR clone 294734 (TRAV8-6, TRAJ10)
CAVSDQAGGGNKLTF

SEQ ID NO: 589468 - protein, 16 aa, Homo sapiens
  CDR3 for beta chain variable domain of TCR clone 294734 (TRBV11-3, TRBJ2-5)
CASSSVVAGSTETQYF

SEQ ID NO: 589469 - protein, 13 aa, Homo sapiens
  CDR3 for alpha chain variable domain of TCR clone 294735 (TRAV21, TRAJ37)
CAVSSGNAGKLIF

SEQ ID NO: 589470 - protein, 13 aa, Homo sapiens
  CDR3 for beta chain variable domain of TCR clone 294735 (TRBV7-6, TRBJ2-3)
CASSLRSDNTQYF

SEQ ID NO: 589471 - protein, 14 aa, Homo sapiens
  CDR3 for alpha chain variable domain of TCR clone 294736 (TRAV21, TRAJ37)
CAVKGSSNTGKLIF

SEQ ID NO: 589472 - protein, 14 aa, Homo sapiens
  CDR3 for beta chain variable domain of TCR clone 294736 (TRBV7-3, TRBJ2-1)
CASSSTGGANEQFF

SEQ ID NO: 589473 - protein, 10 aa, Homo sapiens
  CDR3 for alpha chain variable domain of TCR clone 294737 (TRAV27, TRAJ37)
CAGGVGKLIF

SEQ ID NO: 589474 - protein, 13 aa, Homo sapiens
  CDR3 for beta chain variable domain of TCR clone 294737 (TRBV27, TRBJ1-2)
CASSRGLVYGYSF

SEQ ID NO: 589475 - protein, 16 aa, Homo sapiens
  CDR3 for alpha chain variable domain of TCR clone 294738 (TRAV17, TRAJ53)
CATDALSGGSNYKLTF

SEQ ID NO: 589476 - protein, 15 aa, Homo sapiens
  CDR3 for beta chain variable domain of TCR clone 294738 (TRBV4-1, TRBJ2-7)
CASSQKTGRLYEQFF

SEQ ID NO: 589477 - protein, 17 aa, Homo sapiens
  CDR3 for alpha chain variable domain of TCR clone 294739 (TRAV38-2/DV8, TRAJ22)
CAYRSGYSSGSARQLTF

SEQ ID NO: 589478 - protein, 13 aa, Homo sapiens
  CDR3 for beta chain variable domain of TCR clone 294739 (TRBV3-1, TRBJ2-7)
CASSLRDGYEQYF

SEQ ID NO: 589479 - protein, 16 aa, Homo sapiens
  CDR3 for alpha chain variable domain of TCR clone 294740 (TRAV3, TRAJ37)
CAVRPHGSGNTGKLIF

SEQ ID NO: 589480 - protein, 15 aa, Homo sapiens
  CDR3 for beta chain variable domain of TCR clone 294740 (TRBV5-1, TRBJ1-1)
CASSSTTGTNTEAFF

SEQ ID NO: 589481 - protein, 14 aa, Homo sapiens
  CDR3 for alpha chain variable domain of TCR clone 294741 (TRAV12-3, TRAJ10)
SHLPLPGGGNKLTF

SEQ ID NO: 589482 - protein, 16 aa, Homo sapiens
  CDR3 for beta chain variable domain of TCR clone 294741 (TRBV27, TRBJ2-2)
CASSSSGVSNTGELFF

SEQ ID NO: 589483 - protein, 15 aa, Homo sapiens
  CDR3 for alpha chain variable domain of TCR clone 294742 (TRAV17, TRAJ22)
CATVAPSGSARQLTF

SEQ ID NO: 589484 - protein, 17 aa, Homo sapiens
  CDR3 for beta chain variable domain of TCR clone 294742 (TRBV20-1, TRBJ2-2)
CSASGSGQGGLTGELFF

SEQ ID NO: 589485 - protein, 15 aa, Homo sapiens
  CDR3 for alpha chain variable domain of TCR clone 294743 (TRAV29/DV5, TRAJ24)
CAASGSTDSWGKFQF

SEQ ID NO: 589486 - protein, 20 aa, Homo sapiens
  CDR3 for beta chain variable domain of TCR clone 294743 (TRBV11-2, TRBJ2-2)
LRTRPCISVPAASLPGSCFF

SEQ ID NO: 589487 - protein, 15 aa, Homo sapiens
  CDR3 for alpha chain variable domain of TCR clone 294744 (TRAV12-3, TRAJ27)
CAMRAYNTNGGKSTF

SEQ ID NO: 589488 - protein, 13 aa, Homo sapiens
  CDR3 for beta chain variable domain of TCR clone 294744 (TRBV11-2, TRBJ2-5)
CASSRGPSETQYF

SEQ ID NO: 589489 - protein, 13 aa, Homo sapiens
  CDR3 for alpha chain variable domain of TCR clone 294745 (TRAV35, TRAJ33)
CAGLMDSNYQVIW

SEQ ID NO: 589490 - protein, 13 aa, Homo sapiens
  CDR3 for beta chain variable domain of TCR clone 294745 (TRBV10-3, TRBJ2-1)
CAISEFSGREQFF

SEQ ID NO: 589491 - protein, 17 aa, Homo sapiens
  CDR3 for alpha chain variable domain of TCR clone 294746 (TRAV23/DV6, TRAJ57)
CAASSTLSRGGSEKRVF

SEQ ID NO: 589492 - protein, 14 aa, Homo sapiens
  CDR3 for beta chain variable domain of TCR clone 294746 (TRBV25-1, TRBJ1-1)
CASTHLGGNTEAFF

SEQ ID NO: 589493 - protein, 14 aa, Homo sapiens
  CDR3 for alpha chain variable domain of TCR clone 294747 (TRAV12-3, TRAJ53)
SATGGGGSNYKLTF

SEQ ID NO: 589494 - protein, 17 aa, Homo sapiens
  CDR3 for beta chain variable domain of TCR clone 294747 (TRBV4-3, TRBJ2-5)
CASSQVLAGGNQETQYF

SEQ ID NO: 589495 - protein, 19 aa, Homo sapiens
  CDR3 for alpha chain variable domain of TCR clone 294748 (TRAV26-1, TRAJ52)
CIVRAHRNAGGTSYGKLTF

SEQ ID NO: 589496 - protein, 15 aa, Homo sapiens
  CDR3 for beta chain variable domain of TCR clone 294748 (TRBV29-1, TRBJ2-1)
SSGRDRKSSYNEQFF

SEQ ID NO: 589497 - protein, 15 aa, Homo sapiens
  CDR3 for alpha chain variable domain of TCR clone 294749 (TRAV29/DV5, TRAJ53)
CAASASGGSNYKLTF

SEQ ID NO: 589498 - protein, 16 aa, Homo sapiens
  CDR3 for beta chain variable domain of TCR clone 294749 (TRBV2, TRBJ2-3)
CASSTSVEGVTDTQYF

SEQ ID NO: 589499 - protein, 12 aa, Homo sapiens
  CDR3 for alpha chain variable domain of TCR clone 294750 (TRAV8-4, TRAJ43)
CSVSVNNNDMRF

SEQ ID NO: 589500 - protein, 13 aa, Homo sapiens
  CDR3 for beta chain variable domain of TCR clone 294750 (TRBV7-9, TRBJ1-2)
CASSLKQNYGYTF

SEQ ID NO: 589501 - protein, 14 aa, Homo sapiens
  CDR3 for alpha chain variable domain of TCR clone 294751 (TRAV9-2, TRAJ39)
CALYIYNEGNMLTF

SEQ ID NO: 589502 - protein, 15 aa, Homo sapiens
  CDR3 for beta chain variable domain of TCR clone 294751 (TRBV27, TRBJ1-5)
CASSLGTGFDQPQHF

SEQ ID NO: 589503 - protein, 14 aa, Homo sapiens
  CDR3 for alpha chain variable domain of TCR clone 294752 (TRAV1-2, TRAJ16)
CAVNRFSDGQKLLF

SEQ ID NO: 589504 - protein, 13 aa, Homo sapiens
  CDR3 for beta chain variable domain of TCR clone 294752 (TRBV19, TRBJ1-2)
CASSVPGQDGYTY

SEQ ID NO: 589505 - protein, 16 aa, Homo sapiens
  CDR3 for alpha chain variable domain of TCR clone 294753 (TRAV12-1, TRAJ22)
CVVNTISSGSARQLTF

SEQ ID NO: 589506 - protein, 13 aa, Homo sapiens
  CDR3 for beta chain variable domain of TCR clone 294753 (TRBV19, TRBJ2-1)
CASNGGVFSEQFI

SEQ ID NO: 589507 - protein, 15 aa, Homo sapiens
  CDR3 for alpha chain variable domain of TCR clone 294754 (TRAV26-1, TRAJ29)
CIVRVEVSGNKPLVF

SEQ ID NO: 589508 - protein, 14 aa, Homo sapiens
  CDR3 for beta chain variable domain of TCR clone 294754 (TRBV18, TRBJ2-5)
CASSPGVSQETQYF

SEQ ID NO: 589509 - protein, 12 aa, Homo sapiens
  CDR3 for alpha chain variable domain of TCR clone 294755 (TRAV13-1, TRAJ15)
CAASQARTALIF

SEQ ID NO: 589510 - protein, 18 aa, Homo sapiens
  CDR3 for beta chain variable domain of TCR clone 294755 (TRBV7-9, TRBJ2-3)
CASSLPISGQISTDTQYF

SEQ ID NO: 589511 - protein, 14 aa, Homo sapiens
  CDR3 for alpha chain variable domain of TCR clone 294756 (TRAV1-2, TRAJ16)
CAVNRFSYGQKLLF

SEQ ID NO: 589512 - protein, 15 aa, Homo sapiens
  CDR3 for beta chain variable domain of TCR clone 294756 (TRBV20-1, TRBJ2-7)
CSARDRVSGMDEQYF

SEQ ID NO: 589513 - protein, 13 aa, Homo sapiens
  CDR3 for alpha chain variable domain of TCR clone 294757 (TRAV8-6, TRAJ49)
CAVITNTGNQFYF

SEQ ID NO: 589514 - protein, 14 aa, Homo sapiens
  CDR3 for beta chain variable domain of TCR clone 294757 (TRBV5-1, TRBJ2-7)
CASSRGESLYEQNF

SEQ ID NO: 589515 - protein, 12 aa, Homo sapiens
  CDR3 for alpha chain variable domain of TCR clone 294758 (TRAV8-3, TRAJ26)
CAGDNYGQNFVF

SEQ ID NO: 589516 - protein, 15 aa, Homo sapiens
  CDR3 for beta chain variable domain of TCR clone 294758 (TRBV20-1, TRBJ2-3)
CSARRGDAITDTQYF

SEQ ID NO: 589517 - protein, 15 aa, Homo sapiens
  CDR3 for alpha chain variable domain of TCR clone 294759 (TRAV20, TRAJ50)
CAVRQMKTSYDKVIF

SEQ ID NO: 589518 - protein, 14 aa, Homo sapiens
  CDR3 for beta chain variable domain of TCR clone 294759 (TRBV7-2, TRBJ2-7)
YASSPKTSFYEQYF

SEQ ID NO: 589519 - protein, 16 aa, Homo sapiens
  CDR3 for alpha chain variable domain of TCR clone 294760 (TRAV8-6, TRAJ28)
CAVTSKPGAGSYQLTF

SEQ ID NO: 589520 - protein, 16 aa, Homo sapiens
  CDR3 for beta chain variable domain of TCR clone 294760 (TRBV12-4, TRBJ2-5)
CASSWRPSGDLETQYF

SEQ ID NO: 589521 - protein, 17 aa, Homo sapiens
  CDR3 for alpha chain variable domain of TCR clone 294761 (TRAV3, TRAJ42)
WAVRDRDYGGSQGNLIF

SEQ ID NO: 589522 - protein, 12 aa, Homo sapiens
  CDR3 for beta chain variable domain of TCR clone 294761 (TRBV11-2, TRBJ2-1)
CASSPGNNEQFF

SEQ ID NO: 589523 - protein, 14 aa, Homo sapiens
  CDR3 for alpha chain variable domain of TCR clone 294762 (TRAV8-3, TRAJ39)
CAVGANNAGNMLTF

SEQ ID NO: 589524 - protein, 13 aa, Homo sapiens
  CDR3 for beta chain variable domain of TCR clone 294762 (TRBV4-1, TRBJ2-1)
CASSQAGGDEQFF

SEQ ID NO: 589525 - protein, 12 aa, Homo sapiens
  CDR3 for alpha chain variable domain of TCR clone 294763 (TRAV17, TRAJ39)
CATGAAGNMLTF

SEQ ID NO: 589526 - protein, 14 aa, Homo sapiens
  CDR3 for beta chain variable domain of TCR clone 294763 (TRBV7-9, TRBJ1-2)
CTSSRQGANYGYTF

SEQ ID NO: 589527 - protein, 14 aa, Homo sapiens
  CDR3 for alpha chain variable domain of TCR clone 294764 (TRAV1-2, TRAJ16)
CAVNRFSDGQKMLF

SEQ ID NO: 589528 - protein, 16 aa, Homo sapiens
  CDR3 for beta chain variable domain of TCR clone 294764 (TRBV13, TRBJ2-2)
CASSPRTGEHTGELFF

SEQ ID NO: 589529 - protein, 12 aa, Homo sapiens
  CDR3 for alpha chain variable domain of TCR clone 294765 (TRAV8-4, TRAJ43)
CAVSVNNNDMRF

SEQ ID NO: 589530 - protein, 12 aa, Homo sapiens
  CDR3 for beta chain variable domain of TCR clone 294765 (TRBV20-1, TRBJ2-7)
CSAITPTKEQYF

SEQ ID NO: 589531 - protein, 19 aa, Homo sapiens
  CDR3 for alpha chain variable domain of TCR clone 294766 (TRAV1-2, TRAJ26)
CLLPLCCERPDNYGQNFVF

SEQ ID NO: 589532 - protein, 11 aa, Homo sapiens
  CDR3 for beta chain variable domain of TCR clone 294766 (TRBV12-4, TRBJ2-3)
WASTATDTQYF

SEQ ID NO: 589533 - protein, 12 aa, Homo sapiens
  CDR3 for alpha chain variable domain of TCR clone 294767 (TRAV13-1, TRAJ26)
STSFSKGQNFVF

SEQ ID NO: 589534 - protein, 14 aa, Homo sapiens
  CDR3 for beta chain variable domain of TCR clone 294767 (TRBV7-3, TRBJ2-1)
CASSLAGGTNEQFF

SEQ ID NO: 589535 - protein, 14 aa, Homo sapiens
  CDR3 for alpha chain variable domain of TCR clone 294768 (TRAV8-3, TRAJ4)
CAVGAAGGYNKLIF

SEQ ID NO: 589536 - protein, 15 aa, Homo sapiens
  CDR3 for beta chain variable domain of TCR clone 294768 (TRBV11-2, TRBJ2-1)
CASSKNRGLIYEQFF

SEQ ID NO: 589537 - protein, 12 aa, Homo sapiens
  CDR3 for alpha chain variable domain of TCR clone 294769 (TRAV21, TRAJ3)
CCFYSSASKIIF

SEQ ID NO: 589538 - protein, 16 aa, Homo sapiens
  CDR3 for beta chain variable domain of TCR clone 294769 (TRBV19, TRBJ2-1)
CASTKAGPSSYNEQFF

SEQ ID NO: 589539 - protein, 17 aa, Homo sapiens
  CDR3 for alpha chain variable domain of TCR clone 294770 (TRAV20, TRAJ28)
CAVQGGYSGAGSYQLTF

SEQ ID NO: 589540 - protein, 16 aa, Homo sapiens
  CDR3 for beta chain variable domain of TCR clone 294770 (TRBV4-3, TRBJ2-1)
CASSPALDRGVNEQFF

SEQ ID NO: 589541 - protein, 16 aa, Homo sapiens
  CDR3 for alpha chain variable domain of TCR clone 294771 (TRAV30, TRAJ24)
CGTEIVDADSWGKFPF

SEQ ID NO: 589542 - protein, 14 aa, Homo sapiens
  CDR3 for beta chain variable domain of TCR clone 294771 (TRBV12-5, TRBJ2-5)
CASGSRTHQDTQYF

SEQ ID NO: 589543 - protein, 14 aa, Homo sapiens
  CDR3 for alpha chain variable domain of TCR clone 294772 (TRAV1-2, TRAJ8)
CAVREDTGFQKLVF

SEQ ID NO: 589544 - protein, 12 aa, Homo sapiens
  CDR3 for beta chain variable domain of TCR clone 294772 (TRBV7-9, TRBJ1-1)
CASSPSSTEAFF

SEQ ID NO: 589545 - protein, 14 aa, Homo sapiens
  CDR3 for alpha chain variable domain of TCR clone 294773 (TRAV12-3, TRAJ10)
SDLPLTGGGNKLTF

SEQ ID NO: 589546 - protein, 15 aa, Homo sapiens
  CDR3 for beta chain variable domain of TCR clone 294773 (TRBV7-3, TRBJ2-2)
CASSETGQGTGELFF

SEQ ID NO: 589547 - protein, 12 aa, Homo sapiens
  CDR3 for alpha chain variable domain of TCR clone 294774 (TRAV13-1, TRAJ21)
CEAKEGFNKFYF

SEQ ID NO: 589548 - protein, 18 aa, Homo sapiens
  CDR3 for beta chain variable domain of TCR clone 294774 (TRBV20-1, TRBJ2-6)
CSAETTPTHGSGANVLTF

SEQ ID NO: 589549 - protein, 14 aa, Homo sapiens
  CDR3 for alpha chain variable domain of TCR clone 294775 (TRAV36/DV7, TRAJ53)
CAVVDGGSIYKLTF

SEQ ID NO: 589550 - protein, 16 aa, Homo sapiens
  CDR3 for beta chain variable domain of TCR clone 294775 (TRBV15, TRBJ2-7)
CATSARQARSSYEQYF

SEQ ID NO: 589551 - protein, 15 aa, Homo sapiens
  CDR3 for alpha chain variable domain of TCR clone 294776 (TRAV8-3, TRAJ45)
CASSYSGGGADGLPF

SEQ ID NO: 589552 - protein, 12 aa, Homo sapiens
  CDR3 for beta chain variable domain of TCR clone 294776 (TRBV11-2, TRBJ2-3)
CASRPGTDTQYF

SEQ ID NO: 589553 - protein, 14 aa, Homo sapiens
  CDR3 for alpha chain variable domain of TCR clone 294777 (TRAV38-1, TRAJ45)
CASHSGGGADGLTF

SEQ ID NO: 589554 - protein, 16 aa, Homo sapiens
  CDR3 for beta chain variable domain of TCR clone 294777 (TRBV27, TRBJ2-2)
CASGFRGLVRTGELFF

SEQ ID NO: 589555 - protein, 12 aa, Homo sapiens
  CDR3 for alpha chain variable domain of TCR clone 294778 (TRAV8-3, TRAJ26)
CAGDNYGQNFVF

SEQ ID NO: 589556 - protein, 13 aa, Homo sapiens
  CDR3 for beta chain variable domain of TCR clone 294778 (TRBV7-2, TRBJ2-1)
CASSPGTSNEQFF

SEQ ID NO: 589557 - protein, 15 aa, Homo sapiens
  CDR3 for alpha chain variable domain of TCR clone 294779 (TRAV2, TRAJ11)
CAVGGRNSGYSTLTF

SEQ ID NO: 589558 - protein, 12 aa, Homo sapiens
  CDR3 for beta chain variable domain of TCR clone 294779 (TRBV5-4, TRBJ2-7)
CASSLEAYEQYI

SEQ ID NO: 589559 - protein, 14 aa, Homo sapiens
  CDR3 for alpha chain variable domain of TCR clone 294780 (TRAV12-2, TRAJ17)
CAVNIKASGNKLTF

SEQ ID NO: 589560 - protein, 16 aa, Homo sapiens
  CDR3 for beta chain variable domain of TCR clone 294780 (TRBV20-1, TRBJ2-6)
CSASSQGYDGANVLTF

SEQ ID NO: 589561 - protein, 14 aa, Homo sapiens
  CDR3 for alpha chain variable domain of TCR clone 294781 (TRAV17, TRAJ22)
CATSPSGSARQLTF

SEQ ID NO: 589562 - protein, 12 aa, Homo sapiens
  CDR3 for beta chain variable domain of TCR clone 294781 (TRBV19, TRBJ1-2)
CASSPDVYGYTF

SEQ ID NO: 589563 - protein, 16 aa, Homo sapiens
  CDR3 for alpha chain variable domain of TCR clone 294782 (TRAV12-2, TRAJ43)
CAGDDMRFGAGTRLTV

SEQ ID NO: 589564 - protein, 14 aa, Homo sapiens
  CDR3 for beta chain variable domain of TCR clone 294782 (TRBV5-7, TRBJ1-5)
CASSRTGGGQPQHF

SEQ ID NO: 589565 - protein, 13 aa, Homo sapiens
  CDR3 for alpha chain variable domain of TCR clone 294783 (TRAV12-1, TRAJ7)
CVVNMRGNNRLAF

SEQ ID NO: 589566 - protein, 13 aa, Homo sapiens
  CDR3 for beta chain variable domain of TCR clone 294783 (TRBV19, TRBJ1-2)
CASSVPGQDGYTF

SEQ ID NO: 589567 - protein, 14 aa, Homo sapiens
  CDR3 for alpha chain variable domain of TCR clone 294784 (TRAV16, TRAJ15)
CALRPNQAGTALIF

SEQ ID NO: 589568 - protein, 14 aa, Homo sapiens
  CDR3 for beta chain variable domain of TCR clone 294784 (TRBV10-3, TRBJ1-6)
CAISVDGDESPLHF

SEQ ID NO: 589569 - protein, 15 aa, Homo sapiens
  CDR3 for alpha chain variable domain of TCR clone 294785 (TRAV14/DV4, TRAJ46)
CAMREKKSSGDKLPF

SEQ ID NO: 589570 - protein, 13 aa, Homo sapiens
  CDR3 for beta chain variable domain of TCR clone 294785 (TRBV20-1, TRBJ2-5)
CSAREAFQETQYF

SEQ ID NO: 589571 - protein, 14 aa, Homo sapiens
  CDR3 for alpha chain variable domain of TCR clone 294786 (TRAV20, TRAJ10)
CAVRVEGGGNKLTF

SEQ ID NO: 589572 - protein, 13 aa, Homo sapiens
  CDR3 for beta chain variable domain of TCR clone 294786 (TRBV13, TRBJ2-2)
CASSPGITGELFF

SEQ ID NO: 589573 - protein, 12 aa, Homo sapiens
  CDR3 for alpha chain variable domain of TCR clone 294787 (TRAV23/DV6, TRAJ58)
CAARLLRGETSG

SEQ ID NO: 589574 - protein, 13 aa, Homo sapiens
  CDR3 for beta chain variable domain of TCR clone 294787 (TRBV6-6, TRBJ2-3)
CASSQGGRDTQYF

SEQ ID NO: 589575 - protein, 16 aa, Homo sapiens
  CDR3 for alpha chain variable domain of TCR clone 294788 (TRAV30, TRAJ24)
CGTEIVDADSWGKFQF

SEQ ID NO: 589576 - protein, 17 aa, Homo sapiens
  CDR3 for beta chain variable domain of TCR clone 294788 (TRBV28, TRBJ1-4)
CASSLVARGITNDKLFF

SEQ ID NO: 589577 - protein, 17 aa, Homo sapiens
  CDR3 for alpha chain variable domain of TCR clone 294789 (TRAV17, TRAJ28)
CATDPRRGGAGSYQLTF

SEQ ID NO: 589578 - protein, 11 aa, Homo sapiens
  CDR3 for beta chain variable domain of TCR clone 294789 (TRBV7-2, TRBJ2-3)
CASSSSDTQYF

SEQ ID NO: 589579 - protein, 14 aa, Homo sapiens
  CDR3 for alpha chain variable domain of TCR clone 294790 (TRAV9-2, TRAJ36)
RALPWSTGANNLFF

SEQ ID NO: 589580 - protein, 14 aa, Homo sapiens
  CDR3 for beta chain variable domain of TCR clone 294790 (TRBV2, TRBJ1-2)
CASSELQVNYGYTF

SEQ ID NO: 589581 - protein, 12 aa, Homo sapiens
  CDR3 for alpha chain variable domain of TCR clone 294791 (TRAV23/DV6, TRAJ8)
CAANTGFQKLVF

SEQ ID NO: 589582 - protein, 16 aa, Homo sapiens
  CDR3 for beta chain variable domain of TCR clone 294791 (TRBV19, TRBJ2-2)
CASRSPGTGATGELFF

SEQ ID NO: 589583 - protein, 13 aa, Homo sapiens
  CDR3 for alpha chain variable domain of TCR clone 294792 (TRAV38-2/DV8, TRAJ34)
CAYRTWNTDKLIF

SEQ ID NO: 589584 - protein, 11 aa, Homo sapiens
  CDR3 for beta chain variable domain of TCR clone 294792 (TRBV2, TRBJ1-1)
CASREGTEAFF

SEQ ID NO: 589585 - protein, 14 aa, Homo sapiens
  CDR3 for alpha chain variable domain of TCR clone 294793 (TRAV13-1, TRAJ39)
LGSKYSNAGNMLTF

SEQ ID NO: 589586 - protein, 16 aa, Homo sapiens
  CDR3 for beta chain variable domain of TCR clone 294793 (TRBV20-1, TRBJ1-4)
CSAPGQDLLTNEKLFF

SEQ ID NO: 589587 - protein, 14 aa, Homo sapiens
  CDR3 for alpha chain variable domain of TCR clone 294794 (TRAV16, TRAJ26)
CALSSANYGQNFVF

SEQ ID NO: 589588 - protein, 16 aa, Homo sapiens
  CDR3 for beta chain variable domain of TCR clone 294794 (TRBV20-1, TRBJ1-4)
CSAPGQGVLTNEKLFF

SEQ ID NO: 589589 - protein, 12 aa, Homo sapiens
  CDR3 for alpha chain variable domain of TCR clone 294795 (TRAV1-2, TRAJ33)
CAALDSNYQLIW

SEQ ID NO: 589590 - protein, 16 aa, Homo sapiens
  CDR3 for beta chain variable domain of TCR clone 294795 (TRBV6-4, TRBJ1-2)
RASSEAVGDPNYGYTF

SEQ ID NO: 589591 - protein, 16 aa, Homo sapiens
  CDR3 for alpha chain variable domain of TCR clone 294796 (TRAV3, TRAJ10)
CAVRDMRAGGGNKLTF

SEQ ID NO: 589592 - protein, 16 aa, Homo sapiens
  CDR3 for beta chain variable domain of TCR clone 294796 (TRBV5-4, TRBJ2-1)
CASSLVGSGQDNEQFF

SEQ ID NO: 589593 - protein, 14 aa, Homo sapiens
  CDR3 for alpha chain variable domain of TCR clone 294797 (TRAV2, TRAJ9)
CAVGDRSGGFKTIF

SEQ ID NO: 589594 - protein, 14 aa, Homo sapiens
  CDR3 for beta chain variable domain of TCR clone 294797 (TRBV7-2, TRBJ2-7)
CASSPKTSFYEQYF

SEQ ID NO: 589595 - protein, 13 aa, Homo sapiens
  CDR3 for alpha chain variable domain of TCR clone 294798 (TRAV21, TRAJ20)
CAVGLRVDYKLSF

SEQ ID NO: 589596 - protein, 13 aa, Homo sapiens
  CDR3 for beta chain variable domain of TCR clone 294798 (TRBV7-3, TRBJ2-5)
CASSFRGVETQYF

SEQ ID NO: 589597 - protein, 14 aa, Homo sapiens
  CDR3 for alpha chain variable domain of TCR clone 294799 (TRAV8-2, TRAJ4)
CVVSPSGGYNKLIF

SEQ ID NO: 589598 - protein, 15 aa, Homo sapiens
  CDR3 for beta chain variable domain of TCR clone 294799 (TRBV28, TRBJ2-1)
CASSGLAEVDNEQFF

SEQ ID NO: 589599 - protein, 12 aa, Homo sapiens
  CDR3 for alpha chain variable domain of TCR clone 294800 (TRAV12-2, TRAJ42)
CAVGGSQGNLIF

SEQ ID NO: 589600 - protein, 14 aa, Homo sapiens
  CDR3 for beta chain variable domain of TCR clone 294800 (TRBV6-5, TRBJ1-5)
CASSFRQFNQPQHF

SEQ ID NO: 589601 - protein, 12 aa, Homo sapiens
  CDR3 for alpha chain variable domain of TCR clone 294801 (TRAV20, TRAJ39)
FAVGNAGNMLTF

SEQ ID NO: 589602 - protein, 15 aa, Homo sapiens
  CDR3 for beta chain variable domain of TCR clone 294801 (TRBV27, TRBJ2-1)
CASSNGGGSSNEQFF

SEQ ID NO: 589603 - protein, 15 aa, Homo sapiens
  CDR3 for alpha chain variable domain of TCR clone 294802 (TRAV26-1, TRAJ37)
CIVKTGSSNTGTLIF

SEQ ID NO: 589604 - protein, 12 aa, Homo sapiens
  CDR3 for beta chain variable domain of TCR clone 294802 (TRBV7-8, TRBJ2-7)
CASSLGDREQYF

SEQ ID NO: 589605 - protein, 12 aa, Homo sapiens
  CDR3 for alpha chain variable domain of TCR clone 294803 (TRAV17, TRAJ39)
FATGAAGNMLTF

SEQ ID NO: 589606 - protein, 14 aa, Homo sapiens
  CDR3 for beta chain variable domain of TCR clone 294803 (TRBV7-9, TRBJ1-2)
CGSSRQGANYGDTF

SEQ ID NO: 589607 - protein, 13 aa, Homo sapiens
  CDR3 for alpha chain variable domain of TCR clone 294804 (TRAV20, TRAJ37)
CAGCSSNTGKLIF

SEQ ID NO: 589608 - protein, 11 aa, Homo sapiens
  CDR3 for beta chain variable domain of TCR clone 294804 (TRBV12-4, TRBJ2-3)
CASTATDTLYF

SEQ ID NO: 589609 - protein, 15 aa, Homo sapiens
  CDR3 for alpha chain variable domain of TCR clone 294805 (TRAV29/DV5, TRAJ42)
CAAETDGGSQGNLIF

SEQ ID NO: 589610 - protein, 15 aa, Homo sapiens
  CDR3 for beta chain variable domain of TCR clone 294805 (TRBV5-1, TRBJ2-2)
CASSSQGGNTGELFF

SEQ ID NO: 589611 - protein, 11 aa, Homo sapiens
  CDR3 for alpha chain variable domain of TCR clone 294806 (TRAV2, TRAJ23)
CAVETGGKLIF

SEQ ID NO: 589612 - protein, 14 aa, Homo sapiens
  CDR3 for beta chain variable domain of TCR clone 294806 (TRBV2, TRBJ2-3)
CASSEGQNTDTQYF

SEQ ID NO: 589613 - protein, 14 aa, Homo sapiens
  CDR3 for alpha chain variable domain of TCR clone 294807 (TRAV8-4, TRAJ29)
CAVSAVEGNTPRVF

SEQ ID NO: 589614 - protein, 13 aa, Homo sapiens
  CDR3 for beta chain variable domain of TCR clone 294807 (TRBV12-4, TRBJ2-7)
CASSFQGRYEQYF

SEQ ID NO: 589615 - protein, 15 aa, Homo sapiens
  CDR3 for alpha chain variable domain of TCR clone 294808 (TRAV20, TRAJ4)
CAVQVFSGGYNKLIF

SEQ ID NO: 589616 - protein, 12 aa, Homo sapiens
  CDR3 for beta chain variable domain of TCR clone 294808 (TRBV11-2, TRBJ2-2)
CASSLGGGELFF

SEQ ID NO: 589617 - protein, 11 aa, Homo sapiens
  CDR3 for alpha chain variable domain of TCR clone 294809 (TRAV2, TRAJ33)
CAVDSNYQLIW

SEQ ID NO: 589618 - protein, 14 aa, Homo sapiens
  CDR3 for beta chain variable domain of TCR clone 294809 (TRBV19, TRBJ2-7)
CASSIGGAVAEQYF

SEQ ID NO: 589619 - protein, 14 aa, Homo sapiens
  CDR3 for alpha chain variable domain of TCR clone 294810 (TRAV13-1, TRAJ35)
CAASKGGFGNVLHC

SEQ ID NO: 589620 - protein, 15 aa, Homo sapiens
  CDR3 for beta chain variable domain of TCR clone 294810 (TRBV20-1, TRBJ2-7)
CSAGDRVSGMDEQYF

SEQ ID NO: 589621 - protein, 13 aa, Homo sapiens
  CDR3 for alpha chain variable domain of TCR clone 294811 (TRAV13-2, TRAJ13)
RAERPGGYQKVTF

SEQ ID NO: 589622 - protein, 16 aa, Homo sapiens
  CDR3 for beta chain variable domain of TCR clone 294811 (TRBV18, TRBJ2-5)
CASSPPSSGGAKTQYF

SEQ ID NO: 589623 - protein, 12 aa, Homo sapiens
  CDR3 for alpha chain variable domain of TCR clone 294812 (TRAV23/DV6, TRAJ30)
CAASKGDDKIIF

SEQ ID NO: 589624 - protein, 16 aa, Homo sapiens
  CDR3 for beta chain variable domain of TCR clone 294812 (TRBV7-2, TRBJ2-3)
CASSLVGDASTDTRYF

SEQ ID NO: 589625 - protein, 18 aa, Homo sapiens
  CDR3 for alpha chain variable domain of TCR clone 294813 (TRAV13-1, TRAJ52)
CAAKNPNAGGTSYGKLTF

SEQ ID NO: 589626 - protein, 17 aa, Homo sapiens
  CDR3 for beta chain variable domain of TCR clone 294813 (TRBV5-1, TRBJ2-3)
CASSKIGLADRTDTQYF

SEQ ID NO: 589627 - protein, 16 aa, Homo sapiens
  CDR3 for alpha chain variable domain of TCR clone 294814 (TRAV17, TRAJ53)
CATDARSGGSNYKLTF

SEQ ID NO: 589628 - protein, 15 aa, Homo sapiens
  CDR3 for beta chain variable domain of TCR clone 294814 (TRBV20-1, TRBJ2-7)
CSARDRVSGMDEQYF

SEQ ID NO: 589629 - protein, 15 aa, Homo sapiens
  CDR3 for alpha chain variable domain of TCR clone 294815 (TRAV25, TRAJ53)
CPTSNSGGSNYKLTF

SEQ ID NO: 589630 - protein, 16 aa, Homo sapiens
  CDR3 for beta chain variable domain of TCR clone 294815 (TRBV7-3, TRBJ2-2)
CASSLKRGTLSGELFF

SEQ ID NO: 589631 - protein, 11 aa, Homo sapiens
  CDR3 for alpha chain variable domain of TCR clone 294816 (TRAV12-3, TRAJ27)
CAMANAGISTF

SEQ ID NO: 589632 - protein, 13 aa, Homo sapiens
  CDR3 for beta chain variable domain of TCR clone 294816 (TRBV20-1, TRBJ1-1)
CSARVGGNTEAFF

SEQ ID NO: 589633 - protein, 10 aa, Homo sapiens
  CDR3 for alpha chain variable domain of TCR clone 294817 (TRAV1-2, TRAJ20)
CACNDYKLSF

SEQ ID NO: 589634 - protein, 17 aa, Homo sapiens
  CDR3 for beta chain variable domain of TCR clone 294817 (TRBV11-2, TRBJ2-6)
CASSQRDIFSGANVLTF

SEQ ID NO: 589635 - protein, 14 aa, Homo sapiens
  CDR3 for alpha chain variable domain of TCR clone 294818 (TRAV8-3, TRAJ5)
CAVGPGAGEHLLLG

SEQ ID NO: 589636 - protein, 16 aa, Homo sapiens
  CDR3 for beta chain variable domain of TCR clone 294818 (TRBV11-3, TRBJ2-3)
CASSPGGLLGTDTQYF

SEQ ID NO: 589637 - protein, 12 aa, Homo sapiens
  CDR3 for alpha chain variable domain of TCR clone 294819 (TRAV12-2, TRAJ31)
CAVNTPDARLMF

SEQ ID NO: 589638 - protein, 11 aa, Homo sapiens
  CDR3 for beta chain variable domain of TCR clone 294819 (TRBV29-1, TRBJ2-5)
CSEDRTGTQYL

SEQ ID NO: 589639 - protein, 12 aa, Homo sapiens
  CDR3 for alpha chain variable domain of TCR clone 294820 (TRAV20, TRAJ33)
CAVRGSNYQLIW

SEQ ID NO: 589640 - protein, 11 aa, Homo sapiens
  CDR3 for beta chain variable domain of TCR clone 294820 (TRBV11-2, TRBJ2-2)
CASSLPGELFF

SEQ ID NO: 589641 - protein, 14 aa, Homo sapiens
  CDR3 for alpha chain variable domain of TCR clone 294821 (TRAV29/DV5, TRAJ45)
CAARFSGGADGLTF

SEQ ID NO: 589642 - protein, 11 aa, Homo sapiens
  CDR3 for beta chain variable domain of TCR clone 294821 (TRBV11-2, TRBJ2-2)
CASSLPGELFF

SEQ ID NO: 589643 - protein, 14 aa, Homo sapiens
  CDR3 for alpha chain variable domain of TCR clone 294822 (TRAV8-3, TRAJ4)
CAVGAAGGYNKLIF

SEQ ID NO: 589644 - protein, 15 aa, Homo sapiens
  CDR3 for beta chain variable domain of TCR clone 294822 (TRBV11-2, TRBJ2-1)
CASSSSTISYNEQFF

SEQ ID NO: 589645 - protein, 14 aa, Homo sapiens
  CDR3 for alpha chain variable domain of TCR clone 294823 (TRAV1-1, TRAJ27)
CAVIYNTNAGKSTF

SEQ ID NO: 589646 - protein, 12 aa, Homo sapiens
  CDR3 for beta chain variable domain of TCR clone 294823 (TRBV11-2, TRBJ2-1)
CASSPGNNEQSF

SEQ ID NO: 589647 - protein, 18 aa, Homo sapiens
  CDR3 for alpha chain variable domain of TCR clone 294824 (TRAV17, TRAJ45)
CATSLDLYSGGGADGLTF

SEQ ID NO: 589648 - protein, 15 aa, Homo sapiens
  CDR3 for beta chain variable domain of TCR clone 294824 (TRBV19, TRBJ2-1)
CASIKGRGPYNEQFF

SEQ ID NO: 589649 - protein, 14 aa, Homo sapiens
  CDR3 for alpha chain variable domain of TCR clone 294825 (TRAV8-6, TRAJ49)
CAVSDPGTGNQFSF

SEQ ID NO: 589650 - protein, 13 aa, Homo sapiens
  CDR3 for beta chain variable domain of TCR clone 294825 (TRBV7-9, TRBJ1-2)
CASSLKQNYGYTF

SEQ ID NO: 589651 - protein, 16 aa, Homo sapiens
  CDR3 for alpha chain variable domain of TCR clone 294826 (TRAV30, TRAJ24)
CGTEIVDADSWGKSQF

SEQ ID NO: 589652 - protein, 14 aa, Homo sapiens
  CDR3 for beta chain variable domain of TCR clone 294826 (TRBV7-2, TRBJ2-7)
CASRSQGAAYEQYF

SEQ ID NO: 589653 - protein, 12 aa, Homo sapiens
  CDR3 for alpha chain variable domain of TCR clone 294827 (TRAV21, TRAJ33)
CAKMDSNYQLIW

SEQ ID NO: 589654 - protein, 22 aa, Homo sapiens
  CDR3 for beta chain variable domain of TCR clone 294827 (TRBV9, TRBJ1-6)
CASSVAGTGDSPLHWERDQAHC

SEQ ID NO: 589655 - protein, 14 aa, Homo sapiens
  CDR3 for alpha chain variable domain of TCR clone 294828 (TRAV8-3, TRAJ39)
CAVGGWGAGNMLTF

SEQ ID NO: 589656 - protein, 16 aa, Homo sapiens
  CDR3 for beta chain variable domain of TCR clone 294828 (TRBV7-2, TRBJ1-3)
CASSSGRVLSGNTIYF

SEQ ID NO: 589657 - protein, 16 aa, Homo sapiens
  CDR3 for alpha chain variable domain of TCR clone 294829 (TRAV22, TRAJ45)
CAVERGKRGGADGLTF

SEQ ID NO: 589658 - protein, 14 aa, Homo sapiens
  CDR3 for beta chain variable domain of TCR clone 294829 (TRBV15, TRBJ2-7)
CATSRVARGYEQYF

SEQ ID NO: 589659 - protein, 13 aa, Homo sapiens
  CDR3 for alpha chain variable domain of TCR clone 294830 (TRAV21, TRAJ27)
CAALNTNAGKSTF

SEQ ID NO: 589660 - protein, 11 aa, Homo sapiens
  CDR3 for beta chain variable domain of TCR clone 294830 (TRBV27, TRBJ1-1)
CAGSLLSGLSS

SEQ ID NO: 589661 - protein, 13 aa, Homo sapiens
  CDR3 for alpha chain variable domain of TCR clone 294831 (TRAV1-2, TRAJ9)
CAVLNTGGFKTIF

SEQ ID NO: 589662 - protein, 14 aa, Homo sapiens
  CDR3 for beta chain variable domain of TCR clone 294831 (TRBV7-3, TRBJ2-3)
CASSSTGVADTQYF

SEQ ID NO: 589663 - protein, 13 aa, Homo sapiens
  CDR3 for alpha chain variable domain of TCR clone 294832 (TRAV25, TRAJ44)
CAGGTGTASKLTF

SEQ ID NO: 589664 - protein, 16 aa, Homo sapiens
  CDR3 for beta chain variable domain of TCR clone 294832 (TRBV6-5, TRBJ2-6)
CASSQQGGAGANGLTF

SEQ ID NO: 589665 - protein, 15 aa, Homo sapiens
  CDR3 for alpha chain variable domain of TCR clone 294833 (TRAV29/DV5, TRAJ29)
CAASERSSGNTPPVF

SEQ ID NO: 589666 - protein, 17 aa, Homo sapiens
  CDR3 for beta chain variable domain of TCR clone 294833 (TRBV4-1, TRBJ1-4)
CASSQEGPRGVEEKLFF

SEQ ID NO: 589667 - protein, 15 aa, Homo sapiens
  CDR3 for alpha chain variable domain of TCR clone 294834 (TRAV12-3, TRAJ49)
CAMAVTPNTGNQFYF

SEQ ID NO: 589668 - protein, 14 aa, Homo sapiens
  CDR3 for beta chain variable domain of TCR clone 294834 (TRBV7-8, TRBJ2-3)
CASSSEAGTDTQYF

SEQ ID NO: 589669 - protein, 14 aa, Homo sapiens
  CDR3 for alpha chain variable domain of TCR clone 294835 (TRAV12-2, TRAJ3)
RAVSLYSSASKIIF

SEQ ID NO: 589670 - protein, 14 aa, Homo sapiens
  CDR3 for beta chain variable domain of TCR clone 294835 (TRBV27, TRBJ2-1)
CAGSIAETYNEQFF

SEQ ID NO: 589671 - protein, 13 aa, Homo sapiens
  CDR3 for alpha chain variable domain of TCR clone 294836 (TRAV30, TRAJ6)
CGFIEGGSYIPTF

SEQ ID NO: 589672 - protein, 13 aa, Homo sapiens
  CDR3 for beta chain variable domain of TCR clone 294836 (TRBV5-4, TRBJ2-5)
CASSPVSQETQCF

SEQ ID NO: 589673 - protein, 12 aa, Homo sapiens
  CDR3 for alpha chain variable domain of TCR clone 294837 (TRAV12-2, TRAJ10)
WGVTGGGNTLTF

SEQ ID NO: 589674 - protein, 14 aa, Homo sapiens
  CDR3 for beta chain variable domain of TCR clone 294837 (TRBV20-1, TRBJ2-1)
CSAQIGGSANEQFF

SEQ ID NO: 589675 - protein, 13 aa, Homo sapiens
  CDR3 for alpha chain variable domain of TCR clone 294838 (TRAV12-2, TRAJ18)
CAVRGSTLGRLHF

SEQ ID NO: 589676 - protein, 20 aa, Homo sapiens
  CDR3 for beta chain variable domain of TCR clone 294838 (TRBV7-8, TRBJ2-2)
CASSHLFPGPTIHITGELFF

SEQ ID NO: 589677 - protein, 11 aa, Homo sapiens
  CDR3 for alpha chain variable domain of TCR clone 294839 (TRAV2, TRAJ20)
CAVADDYKLSF

SEQ ID NO: 589678 - protein, 12 aa, Homo sapiens
  CDR3 for beta chain variable domain of TCR clone 294839 (TRBV12-4, TRBJ2-1)
CASTYVLNEQFF

SEQ ID NO: 589679 - protein, 14 aa, Homo sapiens
  CDR3 for alpha chain variable domain of TCR clone 294840 (TRAV12-2, TRAJ40)
CAVKIPSGTYKYIF

SEQ ID NO: 589680 - protein, 15 aa, Homo sapiens
  CDR3 for beta chain variable domain of TCR clone 294840 (TRBV19, TRBJ2-1)
CASSLETSGYNEQFF

SEQ ID NO: 589681 - protein, 14 aa, Homo sapiens
  CDR3 for alpha chain variable domain of TCR clone 294841 (TRAV13-1, TRAJ44)
CAAKATGTASKITF

SEQ ID NO: 589682 - protein, 15 aa, Homo sapiens
  CDR3 for beta chain variable domain of TCR clone 294841 (TRBV10-3, TRBJ2-1)
CAISDVQDRAYEQFF

SEQ ID NO: 589683 - protein, 15 aa, Homo sapiens
  CDR3 for alpha chain variable domain of TCR clone 294842 (TRAV34, TRAJ38)
CGADFTPGNNRKLIW

SEQ ID NO: 589684 - protein, 15 aa, Homo sapiens
  CDR3 for beta chain variable domain of TCR clone 294842 (TRBV20-1, TRBJ2-7)
CSARDRVSGMDEQCC

SEQ ID NO: 589685 - protein, 15 aa, Homo sapiens
  CDR3 for alpha chain variable domain of TCR clone 294843 (TRAV17, TRAJ57)
CATGPSQGGSEQLVF

SEQ ID NO: 589686 - protein, 16 aa, Homo sapiens
  CDR3 for beta chain variable domain of TCR clone 294843 (TRBV12-4, TRBJ1-5)
CASSRPVGGSNQHQHF

SEQ ID NO: 589687 - protein, 13 aa, Homo sapiens
  CDR3 for alpha chain variable domain of TCR clone 294844 (TRAV8-4, TRAJ48)
CAVGLFGNEKLTF

SEQ ID NO: 589688 - protein, 15 aa, Homo sapiens
  CDR3 for beta chain variable domain of TCR clone 294844 (TRBV20-1, TRBJ2-7)
CSARKGLAESYEQYF

SEQ ID NO: 589689 - protein, 13 aa, Homo sapiens
  CDR3 for alpha chain variable domain of TCR clone 294845 (TRAV12-1, TRAJ13)
CVVTSGGYQKVTF

SEQ ID NO: 589690 - protein, 14 aa, Homo sapiens
  CDR3 for beta chain variable domain of TCR clone 294845 (TRBV27, TRBJ2-7)
CASNLAGLSYEQYF

SEQ ID NO: 589691 - protein, 12 aa, Homo sapiens
  CDR3 for alpha chain variable domain of TCR clone 294846 (TRAV3, TRAJ20)
FAVRDGDYKLSF

SEQ ID NO: 589692 - protein, 13 aa, Homo sapiens
  CDR3 for beta chain variable domain of TCR clone 294846 (TRBV9, TRBJ2-1)
CASSVGQGGEQFF

SEQ ID NO: 589693 - protein, 14 aa, Homo sapiens
  CDR3 for alpha chain variable domain of TCR clone 294847 (TRAV12-3, TRAJ10)
SHLPLTGGGNKLTF

SEQ ID NO: 589694 - protein, 15 aa, Homo sapiens
  CDR3 for beta chain variable domain of TCR clone 294847 (TRBV18, TRBJ1-1)
CASSPSSQLNTEAFF

SEQ ID NO: 589695 - protein, 17 aa, Homo sapiens
  CDR3 for alpha chain variable domain of TCR clone 294848 (TRAV13-1, )
CAANIQNPDPAVYQLRD

SEQ ID NO: 589696 - protein, 14 aa, Homo sapiens
  CDR3 for beta chain variable domain of TCR clone 294848 (TRBV4-1, TRBJ2-2)
CASSPAVNTGELFF

SEQ ID NO: 589697 - protein, 12 aa, Homo sapiens
  CDR3 for alpha chain variable domain of TCR clone 294849 (TRAV21, TRAJ23)
CAVGPQGGKLIF

SEQ ID NO: 589698 - protein, 17 aa, Homo sapiens
  CDR3 for beta chain variable domain of TCR clone 294849 (TRBV4-2, TRBJ1-1)
CASTQFGGGSGNTEAFF

SEQ ID NO: 589699 - protein, 12 aa, Homo sapiens
  CDR3 for alpha chain variable domain of TCR clone 294850 (TRAV12-3, TRAJ17)
CAMTLIGNKITF

SEQ ID NO: 589700 - protein, 15 aa, Homo sapiens
  CDR3 for beta chain variable domain of TCR clone 294850 (TRBV20-1, TRBJ2-7)
CSARDRVSGMDEQYF

SEQ ID NO: 589701 - protein, 12 aa, Homo sapiens
  CDR3 for alpha chain variable domain of TCR clone 294851 (TRAV35, TRAJ30)
CAGLNRDDKLIF

SEQ ID NO: 589702 - protein, 15 aa, Homo sapiens
  CDR3 for beta chain variable domain of TCR clone 294851 (TRBV9, TRBJ1-6)
CASSVAGTGDSPLHF

SEQ ID NO: 589703 - protein, 13 aa, Homo sapiens
  CDR3 for alpha chain variable domain of TCR clone 294852 (TRAV29/DV5, TRAJ31)
CAASRNNNARLMF

SEQ ID NO: 589704 - protein, 18 aa, Homo sapiens
  CDR3 for beta chain variable domain of TCR clone 294852 (TRBV7-9, TRBJ2-7)
CASSLTTSGSRTWYEQYS

SEQ ID NO: 589705 - protein, 15 aa, Homo sapiens
  CDR3 for alpha chain variable domain of TCR clone 294853 (TRAV12-1, TRAJ44)
CVVFVNTGTASKLTF

SEQ ID NO: 589706 - protein, 17 aa, Homo sapiens
  CDR3 for beta chain variable domain of TCR clone 294853 (TRBV7-8, TRBJ2-6)
CASSAGSGGAGANVLTF

SEQ ID NO: 589707 - protein, 16 aa, Homo sapiens
  CDR3 for alpha chain variable domain of TCR clone 294854 (TRAV13-1, TRAJ48)
CSKYRESNFGNEKLTF

SEQ ID NO: 589708 - protein, 17 aa, Homo sapiens
  CDR3 for beta chain variable domain of TCR clone 294854 (TRBV28, TRBJ2-1)
CASSAARQALTYNEQFF

SEQ ID NO: 589709 - protein, 16 aa, Homo sapiens
  CDR3 for alpha chain variable domain of TCR clone 294855 (TRAV8-3, TRAJ8)
CAVPRDGNTGFQKLVF

SEQ ID NO: 589710 - protein, 14 aa, Homo sapiens
  CDR3 for beta chain variable domain of TCR clone 294855 (TRBV4-1, TRBJ2-2)
CASSQAVNPGELFF

SEQ ID NO: 589711 - protein, 14 aa, Homo sapiens
  CDR3 for alpha chain variable domain of TCR clone 294856 (TRAV13-1, TRAJ45)
VSVPEGGGADGLTF

SEQ ID NO: 589712 - protein, 14 aa, Homo sapiens
  CDR3 for beta chain variable domain of TCR clone 294856 (TRBV27, TRBJ1-1)
CASSPQGKRADAFF

SEQ ID NO: 589713 - protein, 14 aa, Homo sapiens
  CDR3 for alpha chain variable domain of TCR clone 294857 (TRAV3, TRAJ22)
CAVRDYGSARQLTF

SEQ ID NO: 589714 - protein, 13 aa, Homo sapiens
  CDR3 for beta chain variable domain of TCR clone 294857 (TRBV11-2, TRBJ2-5)
CANGHGAKETQYF

SEQ ID NO: 589715 - protein, 15 aa, Homo sapiens
  CDR3 for alpha chain variable domain of TCR clone 294858 (TRAV3, TRAJ5)
CVVRDRQTGRRALTF

SEQ ID NO: 589716 - protein, 15 aa, Homo sapiens
  CDR3 for beta chain variable domain of TCR clone 294858 (TRBV7-8, TRBJ2-1)
CASSLADSLYNEQFF

SEQ ID NO: 589717 - protein, 14 aa, Homo sapiens
  CDR3 for alpha chain variable domain of TCR clone 294859 (TRAV12-2, TRAJ44)
CAVNPAGTASKLTF

SEQ ID NO: 589718 - protein, 15 aa, Homo sapiens
  CDR3 for beta chain variable domain of TCR clone 294859 (TRBV27, TRBJ2-7)
CASSPIVTGAYEQYF

SEQ ID NO: 589719 - protein, 19 aa, Homo sapiens
  CDR3 for alpha chain variable domain of TCR clone 294860 (TRAV12-3, TRAJ26)
CAMRGVGGITMVRILSLVP

SEQ ID NO: 589720 - protein, 12 aa, Homo sapiens
  CDR3 for beta chain variable domain of TCR clone 294860 (TRBV19, TRBJ1-1)
CASSTTGIEAFF

SEQ ID NO: 589721 - protein, 13 aa, Homo sapiens
  CDR3 for alpha chain variable domain of TCR clone 294861 (TRAV8-6, TRAJ21)
CAVSPSSLNKFYF

SEQ ID NO: 589722 - protein, 12 aa, Homo sapiens
  CDR3 for beta chain variable domain of TCR clone 294861 (TRBV7-8, TRBJ2-7)
CASSLGDREQYF

SEQ ID NO: 589723 - protein, 16 aa, Homo sapiens
  CDR3 for alpha chain variable domain of TCR clone 294862 (TRAV12-2, TRAJ32)
CAVNLGQGGATNQLIF

SEQ ID NO: 589724 - protein, 15 aa, Homo sapiens
  CDR3 for beta chain variable domain of TCR clone 294862 (TRBV20-1, TRBJ2-7)
CSARGPLAGGREQYF

SEQ ID NO: 589725 - protein, 15 aa, Homo sapiens
  CDR3 for alpha chain variable domain of TCR clone 294863 (TRAV26-1, TRAJ39)
CIVRVARNAGNMLPF

SEQ ID NO: 589726 - protein, 16 aa, Homo sapiens
  CDR3 for beta chain variable domain of TCR clone 294863 (TRBV5-1, TRBJ2-1)
CASSLTLAGGRNEQFL

SEQ ID NO: 589727 - protein, 12 aa, Homo sapiens
  CDR3 for alpha chain variable domain of TCR clone 294864 (TRAV21, TRAJ29)
CAVTSGNTPLVF

SEQ ID NO: 589728 - protein, 13 aa, Homo sapiens
  CDR3 for beta chain variable domain of TCR clone 294864 (TRBV27, TRBJ1-4)
CASSLMGDEKLFF

SEQ ID NO: 589729 - protein, 13 aa, Homo sapiens
  CDR3 for alpha chain variable domain of TCR clone 294865 (TRAV12-2, TRAJ20)
CAVYPSNDYKLSF

SEQ ID NO: 589730 - protein, 15 aa, Homo sapiens
  CDR3 for beta chain variable domain of TCR clone 294865 (TRBV5-1, TRBJ2-2)
CASTIQGGDTGELFF

SEQ ID NO: 589731 - protein, 14 aa, Homo sapiens
  CDR3 for alpha chain variable domain of TCR clone 294866 (TRAV2, TRAJ9)
CAVDDRSGGFKTIF

SEQ ID NO: 589732 - protein, 15 aa, Homo sapiens
  CDR3 for beta chain variable domain of TCR clone 294866 (TRBV20-1, TRBJ2-7)
CSARDRVSGMDEQYF

SEQ ID NO: 589733 - protein, 13 aa, Homo sapiens
  CDR3 for alpha chain variable domain of TCR clone 294867 (TRAV8-6, TRAJ21)
CAVSPSSLNKFYF

SEQ ID NO: 589734 - protein, 15 aa, Homo sapiens
  CDR3 for beta chain variable domain of TCR clone 294867 (TRBV7-3, TRBJ2-1)
CASSQRGGALIEQFF

SEQ ID NO: 589735 - protein, 14 aa, Homo sapiens
  CDR3 for alpha chain variable domain of TCR clone 294868 (TRAV19, TRAJ15)
CALSEDQAGTVLIF

SEQ ID NO: 589736 - protein, 16 aa, Homo sapiens
  CDR3 for beta chain variable domain of TCR clone 294868 (TRBV7-9, TRBJ2-3)
CASSPWREVGTDTQYF

SEQ ID NO: 589737 - protein, 12 aa, Homo sapiens
  CDR3 for alpha chain variable domain of TCR clone 294869 (TRAV3, TRAJ7)
CADLLWEQQTRF

SEQ ID NO: 589738 - protein, 16 aa, Homo sapiens
  CDR3 for beta chain variable domain of TCR clone 294869 (TRBV7-2, TRBJ2-5)
CASSSKWLSGQETQYF

SEQ ID NO: 589739 - protein, 14 aa, Homo sapiens
  CDR3 for alpha chain variable domain of TCR clone 294870 (TRAV12-2, TRAJ40)
CSVKIPSGPYKYIF

SEQ ID NO: 589740 - protein, 14 aa, Homo sapiens
  CDR3 for beta chain variable domain of TCR clone 294870 (TRBV20-1, TRBJ1-1)
CSAQTRIGGTEAFF

SEQ ID NO: 589741 - protein, 13 aa, Homo sapiens
  CDR3 for alpha chain variable domain of TCR clone 294871 (TRAV1-2, TRAJ31)
CAVRGYNNARLMF

SEQ ID NO: 589742 - protein, 11 aa, Homo sapiens
  CDR3 for beta chain variable domain of TCR clone 294871 (TRBV19, TRBJ2-7)
CASGNSYEQYF

SEQ ID NO: 589743 - protein, 11 aa, Homo sapiens
  CDR3 for alpha chain variable domain of TCR clone 294872 (TRAV12-1, TRAJ34)
CVVNKGRELIF

SEQ ID NO: 589744 - protein, 13 aa, Homo sapiens
  CDR3 for beta chain variable domain of TCR clone 294872 (TRBV4-1, TRBJ2-7)
CASSQGQAYEQYF

SEQ ID NO: 589745 - protein, 11 aa, Homo sapiens
  CDR3 for alpha chain variable domain of TCR clone 294873 (TRAV13-1, TRAJ6)
CATLGSYIPTF

SEQ ID NO: 589746 - protein, 12 aa, Homo sapiens
  CDR3 for beta chain variable domain of TCR clone 294873 (TRBV11-2, TRBJ2-1)
CASSPGNNEQVF

SEQ ID NO: 589747 - protein, 14 aa, Homo sapiens
  CDR3 for alpha chain variable domain of TCR clone 294874 (TRAV26-1, TRAJ22)
CIVRVYGSARQLTF

SEQ ID NO: 589748 - protein, 17 aa, Homo sapiens
  CDR3 for beta chain variable domain of TCR clone 294874 (TRBV7-3, TRBJ2-3)
CASSPGGLACFGDTQYF

SEQ ID NO: 589749 - protein, 12 aa, Homo sapiens
  CDR3 for alpha chain variable domain of TCR clone 294875 (TRAV3, TRAJ20)
CAVRDLDYKLSF

SEQ ID NO: 589750 - protein, 14 aa, Homo sapiens
  CDR3 for beta chain variable domain of TCR clone 294875 (TRBV4-2, TRBJ2-1)
CASGLDRAYNEQFF

SEQ ID NO: 589751 - protein, 17 aa, Homo sapiens
  CDR3 for alpha chain variable domain of TCR clone 294876 (TRAV3, TRAJ6)
CAVGRRTDTGGSYIPTF

SEQ ID NO: 589752 - protein, 18 aa, Homo sapiens
  CDR3 for beta chain variable domain of TCR clone 294876 (TRBV7-2, TRBJ2-3)
CASSLETSRGRKADTQYF

SEQ ID NO: 589753 - protein, 12 aa, Homo sapiens
  CDR3 for alpha chain variable domain of TCR clone 294877 (TRAV23/DV6, TRAJ8)
CAANTGFQKLVF

SEQ ID NO: 589754 - protein, 15 aa, Homo sapiens
  CDR3 for beta chain variable domain of TCR clone 294877 (TRBV7-2, TRBJ2-1)
CASGSGLAGGNEQFF

SEQ ID NO: 589755 - protein, 13 aa, Homo sapiens
  CDR3 for alpha chain variable domain of TCR clone 294878 (TRAV9-2, TRAJ49)
CALRHFTGNQFYF

SEQ ID NO: 589756 - protein, 15 aa, Homo sapiens
  CDR3 for beta chain variable domain of TCR clone 294878 (TRBV6-3, TRBJ2-7)
CASSSPGTVFYEQYF

SEQ ID NO: 589757 - protein, 13 aa, Homo sapiens
  CDR3 for alpha chain variable domain of TCR clone 294879 (TRAV13-1, TRAJ21)
CAASIYNFNKFYF

SEQ ID NO: 589758 - protein, 16 aa, Homo sapiens
  CDR3 for beta chain variable domain of TCR clone 294879 (TRBV20-1, TRBJ1-4)
CSAPGQGLLTNEKLFF

SEQ ID NO: 589759 - protein, 14 aa, Homo sapiens
  CDR3 for alpha chain variable domain of TCR clone 294880 (TRAV1-2, TRAJ8)
CAVREDTGFQKLVF

SEQ ID NO: 589760 - protein, 15 aa, Homo sapiens
  CDR3 for beta chain variable domain of TCR clone 294880 (TRBV5-7, TRBJ2-3)
GASSPGLATTDTQYF

SEQ ID NO: 589761 - protein, 15 aa, Homo sapiens
  CDR3 for alpha chain variable domain of TCR clone 294881 (TRAV13-1, TRAJ15)
CAASIERQAGTALIF

SEQ ID NO: 589762 - protein, 12 aa, Homo sapiens
  CDR3 for beta chain variable domain of TCR clone 294881 (TRBV12-4, TRBJ2-7)
CASSLGGYEQYF

SEQ ID NO: 589763 - protein, 13 aa, Homo sapiens
  CDR3 for alpha chain variable domain of TCR clone 294882 (TRAV2, TRAJ15)
CAMASQAGTALIF

SEQ ID NO: 589764 - protein, 14 aa, Homo sapiens
  CDR3 for beta chain variable domain of TCR clone 294882 (TRBV20-1, TRBJ1-1)
CSAQTRIGGTEAFF

SEQ ID NO: 589765 - protein, 13 aa, Homo sapiens
  CDR3 for alpha chain variable domain of TCR clone 294883 (TRAV35, TRAJ57)
CAGSQGGSEKLVF

SEQ ID NO: 589766 - protein, 12 aa, Homo sapiens
  CDR3 for beta chain variable domain of TCR clone 294883 (TRBV5-1, TRBJ1-1)
CASSLTGAEAFF

SEQ ID NO: 589767 - protein, 14 aa, Homo sapiens
  CDR3 for alpha chain variable domain of TCR clone 294884 (TRAV26-1, TRAJ29)
CIVRGTSGNTPLVF

SEQ ID NO: 589768 - protein, 15 aa, Homo sapiens
  CDR3 for beta chain variable domain of TCR clone 294884 (TRBV7-3, TRBJ2-2)
CASSETGQGTGELFF

SEQ ID NO: 589769 - protein, 13 aa, Homo sapiens
  CDR3 for alpha chain variable domain of TCR clone 294885 (TRAV21, TRAJ57)
CAVTQGGSEKLVF

SEQ ID NO: 589770 - protein, 13 aa, Homo sapiens
  CDR3 for beta chain variable domain of TCR clone 294885 (TRBV18, TRBJ2-3)
CASSTGRTDTQYF

SEQ ID NO: 589771 - protein, 14 aa, Homo sapiens
  CDR3 for alpha chain variable domain of TCR clone 294886 (TRAV12-2, TRAJ36)
CSVNPPTGANNLFF

SEQ ID NO: 589772 - protein, 13 aa, Homo sapiens
  CDR3 for beta chain variable domain of TCR clone 294886 (TRBV20-1, TRBJ1-6)
CSAPTGLGSPLHF

SEQ ID NO: 589773 - protein, 14 aa, Homo sapiens
  CDR3 for alpha chain variable domain of TCR clone 294887 (TRAV26-1, TRAJ38)
CIADNAGNNRKLIW

SEQ ID NO: 589774 - protein, 15 aa, Homo sapiens
  CDR3 for beta chain variable domain of TCR clone 294887 (TRBV20-1, TRBJ1-1)
CSARGGGTLKLSLDE

SEQ ID NO: 589775 - protein, 13 aa, Homo sapiens
  CDR3 for alpha chain variable domain of TCR clone 294888 (TRAV38-1, TRAJ42)
CARWGGSQGNLIF

SEQ ID NO: 589776 - protein, 14 aa, Homo sapiens
  CDR3 for beta chain variable domain of TCR clone 294888 (TRBV19, TRBJ2-7)
CASSRGRWTYEQYF

SEQ ID NO: 589777 - protein, 12 aa, Homo sapiens
  CDR3 for alpha chain variable domain of TCR clone 294889 (TRAV8-6, TRAJ4)
CAVSDHANKLLF

SEQ ID NO: 589778 - protein, 14 aa, Homo sapiens
  CDR3 for beta chain variable domain of TCR clone 294889 (TRBV6-6, TRBJ1-5)
CASVGSGFNQPQHF

SEQ ID NO: 589779 - protein, 15 aa, Homo sapiens
  CDR3 for alpha chain variable domain of TCR clone 294890 (TRAV17, TRAJ57)
CATGPSQGGSEKLAF

SEQ ID NO: 589780 - protein, 18 aa, Homo sapiens
  CDR3 for beta chain variable domain of TCR clone 294890 (TRBV20-1, TRBJ2-6)
CSARTLAGGPSGANVLTF

SEQ ID NO: 589781 - protein, 10 aa, Homo sapiens
  CDR3 for alpha chain variable domain of TCR clone 294891 (TRAV2, TRAJ34)
CAVVNDKLIF

SEQ ID NO: 589782 - protein, 13 aa, Homo sapiens
  CDR3 for beta chain variable domain of TCR clone 294891 (TRBV4-2, TRBJ1-1)
CASSQAGNTEAFF

SEQ ID NO: 589783 - protein, 13 aa, Homo sapiens
  CDR3 for alpha chain variable domain of TCR clone 294892 (TRAV21, TRAJ27)
CAARPGNAGKSTF

SEQ ID NO: 589784 - protein, 14 aa, Homo sapiens
  CDR3 for beta chain variable domain of TCR clone 294892 (TRBV11-2, TRBJ2-7)
CASSLGAGAHEQYF

SEQ ID NO: 589785 - protein, 14 aa, Homo sapiens
  CDR3 for alpha chain variable domain of TCR clone 294893 (TRAV1-2, TRAJ8)
CAVREDTGFQKLVF

SEQ ID NO: 589786 - protein, 14 aa, Homo sapiens
  CDR3 for beta chain variable domain of TCR clone 294893 (TRBV9, TRBJ2-4)
CASSPSGTSGFQYF

SEQ ID NO: 589787 - protein, 13 aa, Homo sapiens
  CDR3 for alpha chain variable domain of TCR clone 294894 (TRAV13-1, TRAJ5)
CAASDTGRRALTF

SEQ ID NO: 589788 - protein, 12 aa, Homo sapiens
  CDR3 for beta chain variable domain of TCR clone 294894 (TRBV28, TRBJ2-3)
YASSLYRDTQYF

SEQ ID NO: 589789 - protein, 15 aa, Homo sapiens
  CDR3 for alpha chain variable domain of TCR clone 294895 (TRAV12-1, TRAJ9)
GVVSFGDTGGFKTIF

SEQ ID NO: 589790 - protein, 13 aa, Homo sapiens
  CDR3 for beta chain variable domain of TCR clone 294895 (TRBV2, TRBJ1-4)
CAGSERAGEKLFF

SEQ ID NO: 589791 - protein, 14 aa, Homo sapiens
  CDR3 for alpha chain variable domain of TCR clone 294896 (TRAV1-2, TRAJ16)
CAVNRFSDGQKLLF

SEQ ID NO: 589792 - protein, 15 aa, Homo sapiens
  CDR3 for beta chain variable domain of TCR clone 294896 (TRBV27, TRBJ2-1)
CASSGGGPSYNEQFF

SEQ ID NO: 589793 - protein, 18 aa, Homo sapiens
  CDR3 for alpha chain variable domain of TCR clone 294897 (TRAV12-3, TRAJ52)
CAMSVGGAGGTSYGKRTF

SEQ ID NO: 589794 - protein, 15 aa, Homo sapiens
  CDR3 for beta chain variable domain of TCR clone 294897 (TRBV4-1, TRBJ1-4)
CASSDTGGTNEKLFF

SEQ ID NO: 589795 - protein, 14 aa, Homo sapiens
  CDR3 for alpha chain variable domain of TCR clone 294898 (TRAV9-2, TRAJ39)
CALYVYNAGNMLTF

SEQ ID NO: 589796 - protein, 14 aa, Homo sapiens
  CDR3 for beta chain variable domain of TCR clone 294898 (TRBV28, TRBJ1-2)
CASRIQGANYGYTF

SEQ ID NO: 589797 - protein, 14 aa, Homo sapiens
  CDR3 for alpha chain variable domain of TCR clone 294899 (TRAV12-3, TRAJ29)
CAMILLSGNTPLVL

SEQ ID NO: 589798 - protein, 16 aa, Homo sapiens
  CDR3 for beta chain variable domain of TCR clone 294899 (TRBV28, TRBJ2-7)
CASSSGTSGGGYEQYF

SEQ ID NO: 589799 - protein, 14 aa, Homo sapiens
  CDR3 for alpha chain variable domain of TCR clone 294900 (TRAV29/DV5, TRAJ32)
CAAAYGGATTKLIF

SEQ ID NO: 589800 - protein, 14 aa, Homo sapiens
  CDR3 for beta chain variable domain of TCR clone 294900 (TRBV20-1, TRBJ1-1)
CSAQTRIGGTEAFF

SEQ ID NO: 589801 - protein, 18 aa, Homo sapiens
  CDR3 for alpha chain variable domain of TCR clone 294901 (TRAV12-1, TRAJ52)
CAMSVGGAGGTSYGKLTF

SEQ ID NO: 589802 - protein, 15 aa, Homo sapiens
  CDR3 for beta chain variable domain of TCR clone 294901 (TRBV27, TRBJ1-6)
CASSFDRGLGSPLHF

SEQ ID NO: 589803 - protein, 13 aa, Homo sapiens
  CDR3 for alpha chain variable domain of TCR clone 294902 (TRAV12-1, TRAJ26)
CVVRRNYGQNFVF

SEQ ID NO: 589804 - protein, 14 aa, Homo sapiens
  CDR3 for beta chain variable domain of TCR clone 294902 (TRBV4-2, TRBJ2-1)
CASGLDRDYNEQFF

SEQ ID NO: 589805 - protein, 11 aa, Homo sapiens
  CDR3 for alpha chain variable domain of TCR clone 294903 (TRAV1-1, TRAJ23)
CAVRQGGKLIF

SEQ ID NO: 589806 - protein, 15 aa, Homo sapiens
  CDR3 for beta chain variable domain of TCR clone 294903 (TRBV7-3, TRBJ2-1)
CASSLGQGPFGEQFF

SEQ ID NO: 589807 - protein, 13 aa, Homo sapiens
  CDR3 for alpha chain variable domain of TCR clone 294904 (TRAV3, TRAJ30)
CAVRDIPDDKIIF

SEQ ID NO: 589808 - protein, 14 aa, Homo sapiens
  CDR3 for beta chain variable domain of TCR clone 294904 (TRBV28, TRBJ2-5)
CASSLYRGTETQYF

SEQ ID NO: 589809 - protein, 13 aa, Homo sapiens
  CDR3 for alpha chain variable domain of TCR clone 294905 (TRAV1-1, TRAJ30)
CAVRSDRDDKIIF

SEQ ID NO: 589810 - protein, 13 aa, Homo sapiens
  CDR3 for beta chain variable domain of TCR clone 294905 (TRBV6-5, TRBJ2-6)
CASSTSGPLRLDF

SEQ ID NO: 589811 - protein, 18 aa, Homo sapiens
  CDR3 for alpha chain variable domain of TCR clone 294906 (TRAV26-2, TRAJ45)
CILRVDEYSGGGADGLTF

SEQ ID NO: 589812 - protein, 16 aa, Homo sapiens
  CDR3 for beta chain variable domain of TCR clone 294906 (TRBV2, TRBJ1-4)
CASNLLQGATNEKLFF

SEQ ID NO: 589813 - protein, 18 aa, Homo sapiens
  CDR3 for alpha chain variable domain of TCR clone 294907 (TRAV9-2, TRAJ52)
CALSRHNAGGTSYGKLTF

SEQ ID NO: 589814 - protein, 22 aa, Homo sapiens
  CDR3 for beta chain variable domain of TCR clone 294907 (TRBV11-2, TRBJ1-4)
CASSLDITRRGIPRKDNEKLFF

SEQ ID NO: 589815 - protein, 13 aa, Homo sapiens
  CDR3 for alpha chain variable domain of TCR clone 294908 (TRAV1-1, TRAJ13)
CAVNSGGYQKVTF

SEQ ID NO: 589816 - protein, 11 aa, Homo sapiens
  CDR3 for beta chain variable domain of TCR clone 294908 (TRBV28, TRBJ2-1)
CQQCPDNEQFF

SEQ ID NO: 589817 - protein, 14 aa, Homo sapiens
  CDR3 for alpha chain variable domain of TCR clone 294909 (TRAV26-1, TRAJ38)
CIADNAGNNRKLIW

SEQ ID NO: 589818 - protein, 13 aa, Homo sapiens
  CDR3 for beta chain variable domain of TCR clone 294909 (TRBV2, TRBJ1-5)
FATAGPGNQPQHF

SEQ ID NO: 589819 - protein, 12 aa, Homo sapiens
  CDR3 for alpha chain variable domain of TCR clone 294910 (TRAV1-1, TRAJ8)
CAGGTGFQKLVF

SEQ ID NO: 589820 - protein, 16 aa, Homo sapiens
  CDR3 for beta chain variable domain of TCR clone 294910 (TRBV12-5, TRBJ2-5)
CASGPRTGGYQETQYF

SEQ ID NO: 589821 - protein, 14 aa, Homo sapiens
  CDR3 for alpha chain variable domain of TCR clone 294911 (TRAV12-1, TRAJ9)
CLVNRRTGGFKTIF

SEQ ID NO: 589822 - protein, 14 aa, Homo sapiens
  CDR3 for beta chain variable domain of TCR clone 294911 (TRBV7-3, TRBJ1-1)
CASSLKGGNTEVFF

SEQ ID NO: 589823 - protein, 14 aa, Homo sapiens
  CDR3 for alpha chain variable domain of TCR clone 294912 (TRAV3, TRAJ9)
CAVRLNTGGFKTIF

SEQ ID NO: 589824 - protein, 15 aa, Homo sapiens
  CDR3 for beta chain variable domain of TCR clone 294912 (TRBV4-3, TRBJ1-6)
CASSQDSQGGSPLHF

SEQ ID NO: 589825 - protein, 15 aa, Homo sapiens
  CDR3 for alpha chain variable domain of TCR clone 294913 (TRAV21, TRAJ52)
CAVRGGGTIYGKLTF

SEQ ID NO: 589826 - protein, 15 aa, Homo sapiens
  CDR3 for beta chain variable domain of TCR clone 294913 (TRBV18, TRBJ1-5)
CASSPSDRSNQPQHF

SEQ ID NO: 589827 - protein, 16 aa, Homo sapiens
  CDR3 for alpha chain variable domain of TCR clone 294914 (TRAV38-1, TRAJ37)
CAFKGDGSSNTGKLIC

SEQ ID NO: 589828 - protein, 13 aa, Homo sapiens
  CDR3 for beta chain variable domain of TCR clone 294914 (TRBV12-4, TRBJ2-5)
CASSLFRRETQYF

SEQ ID NO: 589829 - protein, 16 aa, Homo sapiens
  CDR3 for alpha chain variable domain of TCR clone 294915 (TRAV3, TRAJ10)
YAVRDMRAGGGNKLTF

SEQ ID NO: 589830 - protein, 16 aa, Homo sapiens
  CDR3 for beta chain variable domain of TCR clone 294915 (TRBV12-4, TRBJ1-5)
CASSRPVGGSNQPQHF

SEQ ID NO: 589831 - protein, 15 aa, Homo sapiens
  CDR3 for alpha chain variable domain of TCR clone 294916 (TRAV29/DV5, TRAJ24)
CAASGATDSWGKFQF

SEQ ID NO: 589832 - protein, 14 aa, Homo sapiens
  CDR3 for beta chain variable domain of TCR clone 294916 (TRBV5-1, TRBJ2-7)
CASSRGESLYEQYF

SEQ ID NO: 589833 - protein, 13 aa, Homo sapiens
  CDR3 for alpha chain variable domain of TCR clone 294917 (TRAV12-1, TRAJ13)
CVVNIGGYQKVTF

SEQ ID NO: 589834 - protein, 14 aa, Homo sapiens
  CDR3 for beta chain variable domain of TCR clone 294917 (TRBV6-5, TRBJ1-1)
CASSFGQGLTEAFF

SEQ ID NO: 589835 - protein, 20 aa, Homo sapiens
  CDR3 for alpha chain variable domain of TCR clone 294918 (TRAV21, TRAJ30)
CAVRRRMTRSSLEKGHDFIF

SEQ ID NO: 589836 - protein, 15 aa, Homo sapiens
  CDR3 for beta chain variable domain of TCR clone 294918 (TRBV6-6, TRBJ2-7)
CASSYSYGGSYEKYF

SEQ ID NO: 589837 - protein, 19 aa, Homo sapiens
  CDR3 for alpha chain variable domain of TCR clone 294919 (TRAV13-1, TRAJ52)
CAASPYQNAGGASYGKLTF

SEQ ID NO: 589838 - protein, 15 aa, Homo sapiens
  CDR3 for beta chain variable domain of TCR clone 294919 (TRBV7-2, TRBJ2-1)
CASTHGTGIYNEQFF

SEQ ID NO: 589839 - protein, 13 aa, Homo sapiens
  CDR3 for alpha chain variable domain of TCR clone 294920 (TRAV17, TRAJ9)
CATDGTGGFKTIF

SEQ ID NO: 589840 - protein, 17 aa, Homo sapiens
  CDR3 for beta chain variable domain of TCR clone 294920 (TRBV6-5, TRBJ2-7)
CAISYSFWGQGSYEQYF

SEQ ID NO: 589841 - protein, 18 aa, Homo sapiens
  CDR3 for alpha chain variable domain of TCR clone 294921 (TRAV26-2, TRAJ45)
CILRVDKYSGGGADGLTF

SEQ ID NO: 589842 - protein, 13 aa, Homo sapiens
  CDR3 for beta chain variable domain of TCR clone 294921 (TRBV25-1, TRBJ2-1)
AYGQGRGVYEQFF

SEQ ID NO: 589843 - protein, 11 aa, Homo sapiens
  CDR3 for alpha chain variable domain of TCR clone 294922 (TRAV21, TRAJ34)
CAVTNTDKLIF

SEQ ID NO: 589844 - protein, 16 aa, Homo sapiens
  CDR3 for beta chain variable domain of TCR clone 294922 (TRBV20-1, TRBJ2-7)
CSARAPGLALSYEQYF

SEQ ID NO: 589845 - protein, 13 aa, Homo sapiens
  CDR3 for alpha chain variable domain of TCR clone 294923 (TRAV13-1, TRAJ5)
CAASDTGRGALTF

SEQ ID NO: 589846 - protein, 12 aa, Homo sapiens
  CDR3 for beta chain variable domain of TCR clone 294923 (TRBV2, TRBJ2-1)
GRGLPSYNEQFF

SEQ ID NO: 589847 - protein, 14 aa, Homo sapiens
  CDR3 for alpha chain variable domain of TCR clone 294924 (TRAV12-2, TRAJ40)
CAVKIPSGTYKYIF

SEQ ID NO: 589848 - protein, 14 aa, Homo sapiens
  CDR3 for beta chain variable domain of TCR clone 294924 (TRBV28, TRBJ1-1)
CANSFPRKNTEAFF

SEQ ID NO: 589849 - protein, 13 aa, Homo sapiens
  CDR3 for alpha chain variable domain of TCR clone 294925 (TRAV12-3, TRAJ48)
CAMSHVGNEKLTF

SEQ ID NO: 589850 - protein, 11 aa, Homo sapiens
  CDR3 for beta chain variable domain of TCR clone 294925 (TRBV7-2, TRBJ2-7)
CASSSGLWQYF

SEQ ID NO: 589851 - protein, 12 aa, Homo sapiens
  CDR3 for alpha chain variable domain of TCR clone 294926 (TRAV27, TRAJ42)
CAGGGSQGNLIF

SEQ ID NO: 589852 - protein, 13 aa, Homo sapiens
  CDR3 for beta chain variable domain of TCR clone 294926 (TRBV19, TRBJ2-7)
CASSIRGSYEQYF

SEQ ID NO: 589853 - protein, 15 aa, Homo sapiens
  CDR3 for alpha chain variable domain of TCR clone 294927 (TRAV21, TRAJ22)
CAVRLFFWFCKATDL

SEQ ID NO: 589854 - protein, 14 aa, Homo sapiens
  CDR3 for beta chain variable domain of TCR clone 294927 (TRBV19, TRBJ1-5)
CASRAPDSFLTQHF

SEQ ID NO: 589855 - protein, 14 aa, Homo sapiens
  CDR3 for alpha chain variable domain of TCR clone 294928 (TRAV26-1, TRAJ21)
CIVRVVYNFNKFYF

SEQ ID NO: 589856 - protein, 14 aa, Homo sapiens
  CDR3 for beta chain variable domain of TCR clone 294928 (TRBV25-1, TRBJ1-1)
CASTHLGGNTEAVF

SEQ ID NO: 589857 - protein, 13 aa, Homo sapiens
  CDR3 for alpha chain variable domain of TCR clone 294929 (TRAV8-3, TRAJ15)
CAVGIQTGTALIF

SEQ ID NO: 589858 - protein, 12 aa, Homo sapiens
  CDR3 for beta chain variable domain of TCR clone 294929 (TRBV5-1, TRBJ2-5)
CASSLGLETQYF

SEQ ID NO: 589859 - protein, 16 aa, Homo sapiens
  CDR3 for alpha chain variable domain of TCR clone 294930 (TRAV24, TRAJ53)
CAFNMGGGGSNYKLTF

SEQ ID NO: 589860 - protein, 14 aa, Homo sapiens
  CDR3 for beta chain variable domain of TCR clone 294930 (TRBV28, TRBJ1-2)
CASRIQGANYGYTF

SEQ ID NO: 589861 - protein, 15 aa, Homo sapiens
  CDR3 for alpha chain variable domain of TCR clone 294931 (TRAV2, TRAJ18)
CAVEDRGSTLGRLYF

SEQ ID NO: 589862 - protein, 14 aa, Homo sapiens
  CDR3 for beta chain variable domain of TCR clone 294931 (TRBV7-3, TRBJ2-1)
CASSLAGGTNEQFF

SEQ ID NO: 589863 - protein, 10 aa, Homo sapiens
  CDR3 for alpha chain variable domain of TCR clone 294932 (TRAV13-1, TRAJ27)
CAPVARQINL

SEQ ID NO: 589864 - protein, 13 aa, Homo sapiens
  CDR3 for beta chain variable domain of TCR clone 294932 (TRBV7-3, TRBJ1-1)
CASSQDWGAEAFF

SEQ ID NO: 589865 - protein, 14 aa, Homo sapiens
  CDR3 for alpha chain variable domain of TCR clone 294933 (TRAV17, TRAJ57)
CATDPQGGSEKLVF

SEQ ID NO: 589866 - protein, 15 aa, Homo sapiens
  CDR3 for beta chain variable domain of TCR clone 294933 (TRBV7-2, TRBJ1-2)
CASSPRAGWNYGYTF

SEQ ID NO: 589867 - protein, 11 aa, Homo sapiens
  CDR3 for alpha chain variable domain of TCR clone 294934 (TRAV1-1, TRAJ23)
CAVRQGGKLIF

SEQ ID NO: 589868 - protein, 20 aa, Homo sapiens
  CDR3 for beta chain variable domain of TCR clone 294934 (TRBV7-8, TRBJ2-2)
CASSHLSPGRTIHITGELFF

SEQ ID NO: 589869 - protein, 14 aa, Homo sapiens
  CDR3 for alpha chain variable domain of TCR clone 294935 (TRAV1-2, TRAJ16)
CAVNRFSDGQKLLF

SEQ ID NO: 589870 - protein, 14 aa, Homo sapiens
  CDR3 for beta chain variable domain of TCR clone 294935 (TRBV6-3, TRBJ1-1)
CASSYGGQHTEAFF

SEQ ID NO: 589871 - protein, 16 aa, Homo sapiens
  CDR3 for alpha chain variable domain of TCR clone 294936 (TRAV3, TRAJ18)
CAVRDGRGSTMGRLYF

SEQ ID NO: 589872 - protein, 15 aa, Homo sapiens
  CDR3 for beta chain variable domain of TCR clone 294936 (TRBV7-9, TRBJ1-6)
CASSSPGRGNSPLHF

SEQ ID NO: 589873 - protein, 16 aa, Homo sapiens
  CDR3 for alpha chain variable domain of TCR clone 294937 (TRAV1-1, TRAJ28)
CAVRDDSGAGSYQLTF

SEQ ID NO: 589874 - protein, 14 aa, Homo sapiens
  CDR3 for beta chain variable domain of TCR clone 294937 (TRBV7-8, TRBJ2-3)
CASSLEAGTDTQYF

SEQ ID NO: 589875 - protein, 12 aa, Homo sapiens
  CDR3 for alpha chain variable domain of TCR clone 294938 (TRAV20, TRAJ31)
CAVTDNNARLMF

SEQ ID NO: 589876 - protein, 16 aa, Homo sapiens
  CDR3 for beta chain variable domain of TCR clone 294938 (TRBV13, TRBJ2-2)
CASSPRTGEHTGELFF

SEQ ID NO: 589877 - protein, 13 aa, Homo sapiens
  CDR3 for alpha chain variable domain of TCR clone 294939 (TRAV26-2, TRAJ43)
CTLRAVNNNDMRF

SEQ ID NO: 589878 - protein, 13 aa, Homo sapiens
  CDR3 for beta chain variable domain of TCR clone 294939 (TRBV7-3, TRBJ1-1)
CASSQDWGAEAFF

SEQ ID NO: 589879 - protein, 14 aa, Homo sapiens
  CDR3 for alpha chain variable domain of TCR clone 294940 (TRAV36/DV7, TRAJ57)
CAVGFPGGSEKLVF

SEQ ID NO: 589880 - protein, 12 aa, Homo sapiens
  CDR3 for beta chain variable domain of TCR clone 294940 (TRBV19, TRBJ2-7)
CASISGTYEQYF

SEQ ID NO: 589881 - protein, 14 aa, Homo sapiens
  CDR3 for alpha chain variable domain of TCR clone 294941 (TRAV12-1, TRAJ42)
CVVIYGGSQGNLIF

SEQ ID NO: 589882 - protein, 13 aa, Homo sapiens
  CDR3 for beta chain variable domain of TCR clone 294941 (TRBV7-3, TRBJ1-2)
CASSLKRGYGYTF

SEQ ID NO: 589883 - protein, 14 aa, Homo sapiens
  CDR3 for alpha chain variable domain of TCR clone 294942 (TRAV1-2, TRAJ8)
CAVREDTGFQQLVF

SEQ ID NO: 589884 - protein, 16 aa, Homo sapiens
  CDR3 for beta chain variable domain of TCR clone 294942 (TRBV19, TRBJ2-1)
CASSKAGPGSYNEQFF

SEQ ID NO: 589885 - protein, 13 aa, Homo sapiens
  CDR3 for alpha chain variable domain of TCR clone 294943 (TRAV12-3, TRAJ33)
CAMSVNSNYQLIW

SEQ ID NO: 589886 - protein, 12 aa, Homo sapiens
  CDR3 for beta chain variable domain of TCR clone 294943 (TRBV19, TRBJ1-1)
CASSTTGIEAFF

SEQ ID NO: 589887 - protein, 10 aa, Homo sapiens
  CDR3 for alpha chain variable domain of TCR clone 294944 (TRAV23/DV6, TRAJ43)
CAAAVAALEQ

SEQ ID NO: 589888 - protein, 13 aa, Homo sapiens
  CDR3 for beta chain variable domain of TCR clone 294944 (TRBV12-4, TRBJ1-2)
CAGSLRQGKGYTF

SEQ ID NO: 589889 - protein, 13 aa, Homo sapiens
  CDR3 for alpha chain variable domain of TCR clone 294945 (TRAV26-1, TRAJ31)
CIVRVDGNARHMF

SEQ ID NO: 589890 - protein, 17 aa, Homo sapiens
  CDR3 for beta chain variable domain of TCR clone 294945 (TRBV11-2, TRBJ2-1)
CASSLYPPGVEYNEQFF

SEQ ID NO: 589891 - protein, 14 aa, Homo sapiens
  CDR3 for alpha chain variable domain of TCR clone 294946 (TRAV26-1, TRAJ38)
CIADNAGNNRKLIW

SEQ ID NO: 589892 - protein, 16 aa, Homo sapiens
  CDR3 for beta chain variable domain of TCR clone 294946 (TRBV4-2, TRBJ2-1)
CASSQDGTGGYNEQFF

SEQ ID NO: 589893 - protein, 15 aa, Homo sapiens
  CDR3 for alpha chain variable domain of TCR clone 294947 (TRAV17, TRAJ56)
CATDANTGANSTLTF

SEQ ID NO: 589894 - protein, 12 aa, Homo sapiens
  CDR3 for beta chain variable domain of TCR clone 294947 (TRBV7-8, TRBJ2-7)
CASSLGDREQYF

SEQ ID NO: 589895 - protein, 14 aa, Homo sapiens
  CDR3 for alpha chain variable domain of TCR clone 294948 (TRAV8-4, TRAJ23)
CAVSAPGSGGKLIF

SEQ ID NO: 589896 - protein, 17 aa, Homo sapiens
  CDR3 for beta chain variable domain of TCR clone 294948 (TRBV4-3, TRBJ2-3)
CASSQGPLAGAVDTQYF

SEQ ID NO: 589897 - protein, 11 aa, Homo sapiens
  CDR3 for alpha chain variable domain of TCR clone 294949 (TRAV21, TRAJ34)
CAVTNTDKLIF

SEQ ID NO: 589898 - protein, 14 aa, Homo sapiens
  CDR3 for beta chain variable domain of TCR clone 294949 (TRBV4-2, TRBJ2-1)
CASGLDRAYNEQFF

SEQ ID NO: 589899 - protein, 13 aa, Homo sapiens
  CDR3 for alpha chain variable domain of TCR clone 294950 (TRAV1-2, TRAJ9)
CAVLNTGGFKTIF

SEQ ID NO: 589900 - protein, 17 aa, Homo sapiens
  CDR3 for beta chain variable domain of TCR clone 294950 (TRBV7-8, TRBJ2-6)
CASSAETGGAGANVLTF

SEQ ID NO: 589901 - protein, 18 aa, Homo sapiens
  CDR3 for alpha chain variable domain of TCR clone 294951 (TRAV21, TRAJ52)
CAVRPSPAGGTSYGKLTF

SEQ ID NO: 589902 - protein, 13 aa, Homo sapiens
  CDR3 for beta chain variable domain of TCR clone 294951 (TRBV7-9, TRBJ1-2)
CASSPSNFWGYTF

SEQ ID NO: 589903 - protein, 15 aa, Homo sapiens
  CDR3 for alpha chain variable domain of TCR clone 294952 (TRAV21, TRAJ53)
CATLNSGGSNYKLTF

SEQ ID NO: 589904 - protein, 13 aa, Homo sapiens
  CDR3 for beta chain variable domain of TCR clone 294952 (TRBV27, TRBJ1-4)
CASSLMGDEKLFF

SEQ ID NO: 589905 - protein, 14 aa, Homo sapiens
  CDR3 for alpha chain variable domain of TCR clone 294953 (TRAV8-4, TRAJ13)
CAVTLSAGYQKVTF

SEQ ID NO: 589906 - protein, 14 aa, Homo sapiens
  CDR3 for beta chain variable domain of TCR clone 294953 (TRBV7-2, TRBJ1-2)
CASSQTGSTYGYAF

SEQ ID NO: 589907 - protein, 14 aa, Homo sapiens
  CDR3 for alpha chain variable domain of TCR clone 294954 (TRAV8-4, TRAJ15)
CAVILNQAGTALIF

SEQ ID NO: 589908 - protein, 13 aa, Homo sapiens
  CDR3 for beta chain variable domain of TCR clone 294954 (TRBV2, TRBJ2-7)
CASSVGGSGEQYF

SEQ ID NO: 589909 - protein, 14 aa, Homo sapiens
  CDR3 for alpha chain variable domain of TCR clone 294955 (TRAV4, TRAJ26)
CLVGPHNYGQNFVF

SEQ ID NO: 589910 - protein, 14 aa, Homo sapiens
  CDR3 for beta chain variable domain of TCR clone 294955 (TRBV7-8, TRBJ2-3)
CASSLEAETDTQYF

SEQ ID NO: 589911 - protein, 17 aa, Homo sapiens
  CDR3 for alpha chain variable domain of TCR clone 294956 (TRAV3, TRAJ42)
CAVRDRDYGGRQGNLIF

SEQ ID NO: 589912 - protein, 12 aa, Homo sapiens
  CDR3 for beta chain variable domain of TCR clone 294956 (TRBV29-1, TRBJ2-2)
CSVDKYTGELFF

SEQ ID NO: 589913 - protein, 14 aa, Homo sapiens
  CDR3 for alpha chain variable domain of TCR clone 294957 (TRAV17, TRAJ57)
CATDPQGGSETLVF

SEQ ID NO: 589914 - protein, 16 aa, Homo sapiens
  CDR3 for beta chain variable domain of TCR clone 294957 (TRBV13, TRBJ2-2)
CASSPRTGEHTGELFF

SEQ ID NO: 589915 - protein, 15 aa, Homo sapiens
  CDR3 for alpha chain variable domain of TCR clone 294958 (TRAV16, TRAJ12)
CSKWPLRDSSYKLIF

SEQ ID NO: 589916 - protein, 15 aa, Homo sapiens
  CDR3 for beta chain variable domain of TCR clone 294958 (TRBV11-3, TRBJ2-3)
CASLKDGREGDTQYF

SEQ ID NO: 589917 - protein, 13 aa, Homo sapiens
  CDR3 for alpha chain variable domain of TCR clone 294959 (TRAV8-4, TRAJ20)
CAVSFSNDYKLSF

SEQ ID NO: 589918 - protein, 13 aa, Homo sapiens
  CDR3 for beta chain variable domain of TCR clone 294959 (TRBV10-3, TRBJ2-7)
CASKLAVNYEQYF

SEQ ID NO: 589919 - protein, 17 aa, Homo sapiens
  CDR3 for alpha chain variable domain of TCR clone 294960 (TRAV4, )
CLVDIQNPDPAVYQLRD

SEQ ID NO: 589920 - protein, 15 aa, Homo sapiens
  CDR3 for beta chain variable domain of TCR clone 294960 (TRBV20-1, TRBJ1-5)
FSARVGRVVSQPQHF

SEQ ID NO: 589921 - protein, 16 aa, Homo sapiens
  CDR3 for alpha chain variable domain of TCR clone 294961 (TRAV27, TRAJ13)
CAGAKSDSGGYHKVTF

SEQ ID NO: 589922 - protein, 15 aa, Homo sapiens
  CDR3 for beta chain variable domain of TCR clone 294961 (TRBV29-1, TRBJ2-1)
CSVGRHVLFYNEQFF

SEQ ID NO: 589923 - protein, 13 aa, Homo sapiens
  CDR3 for alpha chain variable domain of TCR clone 294962 (TRAV1-2, TRAJ24)
CAVTTDSWGKLQF

SEQ ID NO: 589924 - protein, 14 aa, Homo sapiens
  CDR3 for beta chain variable domain of TCR clone 294962 (TRBV19, TRBJ2-1)
CASPTFVLSGEQFF

SEQ ID NO: 589925 - protein, 14 aa, Homo sapiens
  CDR3 for alpha chain variable domain of TCR clone 294963 (TRAV12-2, TRAJ15)
CAPPTGQAGTALIF

SEQ ID NO: 589926 - protein, 14 aa, Homo sapiens
  CDR3 for beta chain variable domain of TCR clone 294963 (TRBV7-2, TRBJ2-7)
CASSPKTSFYEQYF

SEQ ID NO: 589927 - protein, 14 aa, Homo sapiens
  CDR3 for alpha chain variable domain of TCR clone 294964 (TRAV2, TRAJ45)
CAVEDLFQEEVLTD

SEQ ID NO: 589928 - protein, 15 aa, Homo sapiens
  CDR3 for beta chain variable domain of TCR clone 294964 (TRBV28, TRBJ2-1)
CASSLGTRLYNEQFF

SEQ ID NO: 589929 - protein, 13 aa, Homo sapiens
  CDR3 for alpha chain variable domain of TCR clone 294965 (TRAV23/DV6, TRAJ58)
FAARLIRGSRLTF

SEQ ID NO: 589930 - protein, 13 aa, Homo sapiens
  CDR3 for beta chain variable domain of TCR clone 294965 (TRBV2, TRBJ1-6)
CTDSGSYNSPLHF

SEQ ID NO: 589931 - protein, 11 aa, Homo sapiens
  CDR3 for alpha chain variable domain of TCR clone 294966 (TRAV17, TRAJ21)
CATGNFNKFYF

SEQ ID NO: 589932 - protein, 16 aa, Homo sapiens
  CDR3 for beta chain variable domain of TCR clone 294966 (TRBV2, TRBJ2-1)
YASSANPRDWQAEQFF

SEQ ID NO: 589933 - protein, 13 aa, Homo sapiens
  CDR3 for alpha chain variable domain of TCR clone 294967 (TRAV2, TRAJ12)
CAVGADSSYKLIF

SEQ ID NO: 589934 - protein, 13 aa, Homo sapiens
  CDR3 for beta chain variable domain of TCR clone 294967 (TRBV20-1, TRBJ2-1)
CSARSSPTDEQFF

SEQ ID NO: 589935 - protein, 15 aa, Homo sapiens
  CDR3 for alpha chain variable domain of TCR clone 294968 (TRAV12-3, TRAJ6)
CAMSATTGGSYIHTS

SEQ ID NO: 589936 - protein, 16 aa, Homo sapiens
  CDR3 for beta chain variable domain of TCR clone 294968 (TRBV20-1, TRBJ1-2)
CSASMGQGVANYGYTF

SEQ ID NO: 589937 - protein, 17 aa, Homo sapiens
  CDR3 for alpha chain variable domain of TCR clone 294969 (TRAV2, TRAJ22)
ILQVREADAAEQRQLTF

SEQ ID NO: 589938 - protein, 16 aa, Homo sapiens
  CDR3 for beta chain variable domain of TCR clone 294969 (TRBV2, TRBJ2-5)
CASSETQGVREETQYF

SEQ ID NO: 589939 - protein, 14 aa, Homo sapiens
  CDR3 for alpha chain variable domain of TCR clone 294970 (TRAV1-2, TRAJ10)
CAVRVTVGRNKLTF

SEQ ID NO: 589940 - protein, 12 aa, Homo sapiens
  CDR3 for beta chain variable domain of TCR clone 294970 (TRBV5-4, TRBJ1-1)
CASSFGQTEAFF

SEQ ID NO: 589941 - protein, 16 aa, Homo sapiens
  CDR3 for alpha chain variable domain of TCR clone 294971 (TRAV4, TRAJ5)
CLVGPDHGHGQESTYF

SEQ ID NO: 589942 - protein, 16 aa, Homo sapiens
  CDR3 for beta chain variable domain of TCR clone 294971 (TRBV2, TRBJ1-5)
CASSELHKSGFQPQHF

SEQ ID NO: 589943 - protein, 15 aa, Homo sapiens
  CDR3 for alpha chain variable domain of TCR clone 294972 (TRAV27, TRAJ38)
CAARRNAGNNRKLVW

SEQ ID NO: 589944 - protein, 15 aa, Homo sapiens
  CDR3 for beta chain variable domain of TCR clone 294972 (TRBV5-1, TRBJ2-1)
CASSPPRAPYNEQFF

SEQ ID NO: 589945 - protein, 16 aa, Homo sapiens
  CDR3 for alpha chain variable domain of TCR clone 294973 (TRAV12-1, TRAJ13)
CVVNLEVSGGYQKVTF

SEQ ID NO: 589946 - protein, 16 aa, Homo sapiens
  CDR3 for beta chain variable domain of TCR clone 294973 (TRBV24-1, TRBJ2-6)
CATSDRRAPGANVLSF

SEQ ID NO: 589947 - protein, 14 aa, Homo sapiens
  CDR3 for alpha chain variable domain of TCR clone 294974 (TRAV14/DV4, TRAJ4)
CAMREQGGYNKLIF

SEQ ID NO: 589948 - protein, 13 aa, Homo sapiens
  CDR3 for beta chain variable domain of TCR clone 294974 (TRBV7-2, TRBJ1-1)
CASSSQGVTEAFF

SEQ ID NO: 589949 - protein, 13 aa, Homo sapiens
  CDR3 for alpha chain variable domain of TCR clone 294975 (TRAV27, TRAJ39)
LAGVNNAGNMLTF

SEQ ID NO: 589950 - protein, 19 aa, Homo sapiens
  CDR3 for beta chain variable domain of TCR clone 294975 (TRBV5-1, TRBJ2-3)
CASSLWLAGGITTTDTQYF

SEQ ID NO: 589951 - protein, 12 aa, Homo sapiens
  CDR3 for alpha chain variable domain of TCR clone 294976 (TRAV17, TRAJ12)
CATLRSSYKFIF

SEQ ID NO: 589952 - protein, 16 aa, Homo sapiens
  CDR3 for beta chain variable domain of TCR clone 294976 (TRBV28, TRBJ2-7)
CASSLFFETGGPEQYV

SEQ ID NO: 589953 - protein, 17 aa, Homo sapiens
  CDR3 for alpha chain variable domain of TCR clone 294977 (TRAV12-2, TRAJ48)
CASNEKLTFGTGTRLTI

SEQ ID NO: 589954 - protein, 14 aa, Homo sapiens
  CDR3 for beta chain variable domain of TCR clone 294977 (TRBV7-2, TRBJ1-5)
CASSTQGAGQPQHF

SEQ ID NO: 589955 - protein, 11 aa, Homo sapiens
  CDR3 for alpha chain variable domain of TCR clone 294978 (TRAV1-2, TRAJ20)
CAVSNDYKISF

SEQ ID NO: 589956 - protein, 16 aa, Homo sapiens
  CDR3 for beta chain variable domain of TCR clone 294978 (TRBV29-1, TRBJ2-6)
CSVEDITYSGANVLTF

SEQ ID NO: 589957 - protein, 13 aa, Homo sapiens
  CDR3 for alpha chain variable domain of TCR clone 294979 (TRAV8-2, TRAJ15)
CVVSGPGRNCSDL

SEQ ID NO: 589958 - protein, 15 aa, Homo sapiens
  CDR3 for beta chain variable domain of TCR clone 294979 (TRBV27, TRBJ2-1)
CASSNGGGSSNEQFF

SEQ ID NO: 589959 - protein, 13 aa, Homo sapiens
  CDR3 for alpha chain variable domain of TCR clone 294980 (TRAV17, TRAJ5)
CALRGTGRRALTF

SEQ ID NO: 589960 - protein, 14 aa, Homo sapiens
  CDR3 for beta chain variable domain of TCR clone 294980 (TRBV5-8, TRBJ1-1)
CASSPRTGFSEAFF

SEQ ID NO: 589961 - protein, 15 aa, Homo sapiens
  CDR3 for alpha chain variable domain of TCR clone 294981 (TRAV21, TRAJ53)
CATLNGGGSNYKLTF

SEQ ID NO: 589962 - protein, 16 aa, Homo sapiens
  CDR3 for beta chain variable domain of TCR clone 294981 (TRBV9, TRBJ2-1)
CAGSVGGGGNYNEQFF

SEQ ID NO: 589963 - protein, 12 aa, Homo sapiens
  CDR3 for alpha chain variable domain of TCR clone 294982 (TRAV13-2, TRAJ16)
CAASPDGQELLF

SEQ ID NO: 589964 - protein, 13 aa, Homo sapiens
  CDR3 for beta chain variable domain of TCR clone 294982 (TRBV20-1, TRBJ1-1)
CSAPLGGGTEAFF

SEQ ID NO: 589965 - protein, 14 aa, Homo sapiens
  CDR3 for alpha chain variable domain of TCR clone 294983 (TRAV17, TRAJ12)
CATDEKDSSYKLIF

SEQ ID NO: 589966 - protein, 16 aa, Homo sapiens
  CDR3 for beta chain variable domain of TCR clone 294983 (TRBV11-2, TRBJ2-1)
CASSPLLAGVYNEQFF

SEQ ID NO: 589967 - protein, 12 aa, Homo sapiens
  CDR3 for alpha chain variable domain of TCR clone 294984 (TRAV29/DV5, TRAJ49)
CAASAIGNQFYC

SEQ ID NO: 589968 - protein, 17 aa, Homo sapiens
  CDR3 for beta chain variable domain of TCR clone 294984 (TRBV5-1, TRBJ2-2)
CASSRTSGRFSTGELFF

SEQ ID NO: 589969 - protein, 16 aa, Homo sapiens
  CDR3 for alpha chain variable domain of TCR clone 294985 (TRAV17, TRAJ28)
CATALASGAGSYQLTF

SEQ ID NO: 589970 - protein, 15 aa, Homo sapiens
  CDR3 for beta chain variable domain of TCR clone 294985 (TRBV12-4, TRBJ1-2)
CASSFEAGLGYGYTF

SEQ ID NO: 589971 - protein, 18 aa, Homo sapiens
  CDR3 for alpha chain variable domain of TCR clone 294986 (TRAV26-1, TRAJ34)
CCVLFIVIVAYNTDKLIF

SEQ ID NO: 589972 - protein, 15 aa, Homo sapiens
  CDR3 for beta chain variable domain of TCR clone 294986 (TRBV20-1, TRBJ2-7)
CSARVPAAYFYKQYF

SEQ ID NO: 589973 - protein, 12 aa, Homo sapiens
  CDR3 for alpha chain variable domain of TCR clone 294987 (TRAV8-6, TRAJ36)
CAVSDWLGQTTA

SEQ ID NO: 589974 - protein, 15 aa, Homo sapiens
  CDR3 for beta chain variable domain of TCR clone 294987 (TRBV9, TRBJ1-6)
CASSVAGTGDSPLHF

SEQ ID NO: 589975 - protein, 16 aa, Homo sapiens
  CDR3 for alpha chain variable domain of TCR clone 294988 (TRAV12-3, TRAJ53)
CAMSPGSGGSNYKLTF

SEQ ID NO: 589976 - protein, 16 aa, Homo sapiens
  CDR3 for beta chain variable domain of TCR clone 294988 (TRBV13, TRBJ2-2)
CTSSPRTGEHTGELFF

SEQ ID NO: 589977 - protein, 11 aa, Homo sapiens
  CDR3 for alpha chain variable domain of TCR clone 294989 (TRAV21, TRAJ31)
CAVRNNARLMF

SEQ ID NO: 589978 - protein, 17 aa, Homo sapiens
  CDR3 for beta chain variable domain of TCR clone 294989 (TRBV20-1, TRBJ2-2)
CSASGSGQGGLTGELFF

SEQ ID NO: 589979 - protein, 13 aa, Homo sapiens
  CDR3 for alpha chain variable domain of TCR clone 294990 (TRAV12-3, TRAJ35)
CAMAIGFGNVLHC

SEQ ID NO: 589980 - protein, 15 aa, Homo sapiens
  CDR3 for beta chain variable domain of TCR clone 294990 (TRBV20-1, TRBJ2-1)
CSARGSGTCYNEQFF

SEQ ID NO: 589981 - protein, 19 aa, Homo sapiens
  CDR3 for alpha chain variable domain of TCR clone 294991 (TRAV3, TRAJ6)
CVVRDRNPSRSGGSYIPTF

SEQ ID NO: 589982 - protein, 15 aa, Homo sapiens
  CDR3 for beta chain variable domain of TCR clone 294991 (TRBV18, TRBJ2-7)
CASSPTFMDSYEQYF

SEQ ID NO: 589983 - protein, 17 aa, Homo sapiens
  CDR3 for alpha chain variable domain of TCR clone 294992 (TRAV3, TRAJ6)
CAVRDGPRAGGSYIPTF

SEQ ID NO: 589984 - protein, 14 aa, Homo sapiens
  CDR3 for beta chain variable domain of TCR clone 294992 (TRBV7-3, TRBJ2-1)
CQQPDGGGEVEQFF

SEQ ID NO: 589985 - protein, 12 aa, Homo sapiens
  CDR3 for alpha chain variable domain of TCR clone 294993 (TRAV8-3, TRAJ41)
CAVALSWYALNF

SEQ ID NO: 589986 - protein, 16 aa, Homo sapiens
  CDR3 for beta chain variable domain of TCR clone 294993 (TRBV27, TRBJ2-7)
CASSSERRDSAYEQYF

SEQ ID NO: 589987 - protein, 15 aa, Homo sapiens
  CDR3 for alpha chain variable domain of TCR clone 294994 (TRAV6, TRAJ13)
CALGGDSGGYQKVTF

SEQ ID NO: 589988 - protein, 12 aa, Homo sapiens
  CDR3 for beta chain variable domain of TCR clone 294994 (TRBV5-6, TRBJ1-2)
CASSDRIHGYTF

SEQ ID NO: 589989 - protein, 15 aa, Homo sapiens
  CDR3 for alpha chain variable domain of TCR clone 294995 (TRAV12-1, TRAJ41)
CVVNSRTGFGYALNF

SEQ ID NO: 589990 - protein, 11 aa, Homo sapiens
  CDR3 for beta chain variable domain of TCR clone 294995 (TRBV6-4, TRBJ2-1)
CASSDSYAQFF

SEQ ID NO: 589991 - protein, 16 aa, Homo sapiens
  CDR3 for alpha chain variable domain of TCR clone 294996 (TRAV26-1, TRAJ38)
CIVRAYNAGNNRKMIW

SEQ ID NO: 589992 - protein, 13 aa, Homo sapiens
  CDR3 for beta chain variable domain of TCR clone 294996 (TRBV4-2, TRBJ2-7)
CASSRDPHDEQYF

SEQ ID NO: 589993 - protein, 10 aa, Homo sapiens
  CDR3 for alpha chain variable domain of TCR clone 294997 (TRAV23/DV6, TRAJ57)
CAASSTLSQG

SEQ ID NO: 589994 - protein, 14 aa, Homo sapiens
  CDR3 for beta chain variable domain of TCR clone 294997 (TRBV19, TRBJ2-1)
CASSKDRGQDEQLV

SEQ ID NO: 589995 - protein, 12 aa, Homo sapiens
  CDR3 for alpha chain variable domain of TCR clone 294998 (TRAV16, TRAJ10)
CSRTAGGNKLTF

SEQ ID NO: 589996 - protein, 15 aa, Homo sapiens
  CDR3 for beta chain variable domain of TCR clone 294998 (TRBV6-3, TRBJ2-7)
CASSSPGTVFYEQYF

SEQ ID NO: 589997 - protein, 18 aa, Homo sapiens
  CDR3 for alpha chain variable domain of TCR clone 294999 (TRAV26-2, TRAJ54)
CILRDVEVGIQGAQKLLF

SEQ ID NO: 589998 - protein, 15 aa, Homo sapiens
  CDR3 for beta chain variable domain of TCR clone 294999 (TRBV29-1, TRBJ2-1)
CSVPTGLALYNEQFF

SEQ ID NO: 589999 - protein, 12 aa, Homo sapiens
  CDR3 for alpha chain variable domain of TCR clone 295000 (TRAV1-1, TRAJ30)
CAVRGRDDKIIF

SEQ ID NO: 590000 - protein, 18 aa, Homo sapiens
  CDR3 for beta chain variable domain of TCR clone 295000 (TRBV11-2, TRBJ2-3)
CASSLGGASRGAPNTQYF

SEQ ID NO: 590001 - protein, 15 aa, Homo sapiens
  CDR3 for alpha chain variable domain of TCR clone 295001 (TRAV4, TRAJ39)
CLVGPHNNACNMLTF

SEQ ID NO: 590002 - protein, 13 aa, Homo sapiens
  CDR3 for beta chain variable domain of TCR clone 295001 (TRBV11-2, TRBJ2-5)
CASSSTGEETQYF

SEQ ID NO: 590003 - protein, 11 aa, Homo sapiens
  CDR3 for alpha chain variable domain of TCR clone 295002 (TRAV2, TRAJ33)
CAVDSNYQLIW

SEQ ID NO: 590004 - protein, 17 aa, Homo sapiens
  CDR3 for beta chain variable domain of TCR clone 295002 (TRBV20-1, TRBJ2-3)
CSARDGWNAKERETQYF

SEQ ID NO: 590005 - protein, 11 aa, Homo sapiens
  CDR3 for alpha chain variable domain of TCR clone 295003 (TRAV13-1, TRAJ49)
CACVGGNQFYC

SEQ ID NO: 590006 - protein, 16 aa, Homo sapiens
  CDR3 for beta chain variable domain of TCR clone 295003 (TRBV11-2, TRBJ2-2)
CASSLRTGNLIGELFF

SEQ ID NO: 590007 - protein, 15 aa, Homo sapiens
  CDR3 for alpha chain variable domain of TCR clone 295004 (TRAV12-2, TRAJ43)
CAFDMRFGAGTRLTV

SEQ ID NO: 590008 - protein, 14 aa, Homo sapiens
  CDR3 for beta chain variable domain of TCR clone 295004 (TRBV18, TRBJ2-5)
CASSPGVSQETQYF

SEQ ID NO: 590009 - protein, 17 aa, Homo sapiens
  CDR3 for alpha chain variable domain of TCR clone 295005 (TRAV17, TRAJ40)
CFLLLCWGTGGTYKYIF

SEQ ID NO: 590010 - protein, 16 aa, Homo sapiens
  CDR3 for beta chain variable domain of TCR clone 295005 (TRBV7-2, TRBJ1-4)
CDSSLAPGRRDEKLFF

SEQ ID NO: 590011 - protein, 18 aa, Homo sapiens
  CDR3 for alpha chain variable domain of TCR clone 295006 (TRAV12-3, TRAJ52)
CAMSRTNAGGTSYGKLTF

SEQ ID NO: 590012 - protein, 17 aa, Homo sapiens
  CDR3 for beta chain variable domain of TCR clone 295006 (TRBV20-1, TRBJ2-2)
CSASGSGQGGLTGELFF

SEQ ID NO: 590013 - protein, 12 aa, Homo sapiens
  CDR3 for alpha chain variable domain of TCR clone 295007 (TRAV12-3, TRAJ5)
CAMDTGRRALTF

SEQ ID NO: 590014 - protein, 15 aa, Homo sapiens
  CDR3 for beta chain variable domain of TCR clone 295007 (TRBV27, TRBJ2-1)
CASSNGGGSSNEQFF

SEQ ID NO: 590015 - protein, 13 aa, Homo sapiens
  CDR3 for alpha chain variable domain of TCR clone 295008 (TRAV2, TRAJ40)
CAVVTSGTYKYIL

SEQ ID NO: 590016 - protein, 13 aa, Homo sapiens
  CDR3 for beta chain variable domain of TCR clone 295008 (TRBV10-3, TRBJ2-7)
CASKLAVNYEQYF

SEQ ID NO: 590017 - protein, 14 aa, Homo sapiens
  CDR3 for alpha chain variable domain of TCR clone 295009 (TRAV35, TRAJ33)
CAGSSQDSNYQLIW

SEQ ID NO: 590018 - protein, 20 aa, Homo sapiens
  CDR3 for beta chain variable domain of TCR clone 295009 (TRBV4-3, TRBJ2-4)
CASSQGRWTGGLRSLNIQYF

SEQ ID NO: 590019 - protein, 15 aa, Homo sapiens
  CDR3 for alpha chain variable domain of TCR clone 295010 (TRAV9-2, TRAJ49)
CALSPPYHTGNQFYF

SEQ ID NO: 590020 - protein, 14 aa, Homo sapiens
  CDR3 for beta chain variable domain of TCR clone 295010 (TRBV12-4, TRBJ1-1)
CASSLGTGGTEAFF

SEQ ID NO: 590021 - protein, 19 aa, Homo sapiens
  CDR3 for alpha chain variable domain of TCR clone 295011 (TRAV13-1, TRAJ52)
CAASPYQNAGGTSYGKLTF

SEQ ID NO: 590022 - protein, 19 aa, Homo sapiens
  CDR3 for beta chain variable domain of TCR clone 295011 (TRBV2, TRBJ2-7)
CASSDDETSGRANDYEQYF

SEQ ID NO: 590023 - protein, 12 aa, Homo sapiens
  CDR3 for alpha chain variable domain of TCR clone 295012 (TRAV13-2, TRAJ23)
CAARHRGGKLIF

SEQ ID NO: 590024 - protein, 15 aa, Homo sapiens
  CDR3 for beta chain variable domain of TCR clone 295012 (TRBV12-4, TRBJ2-5)
CASSPPTGLQETQYF

SEQ ID NO: 590025 - protein, 14 aa, Homo sapiens
  CDR3 for alpha chain variable domain of TCR clone 295013 (TRAV34, TRAJ44)
CGADGTGTASKLTF

SEQ ID NO: 590026 - protein, 13 aa, Homo sapiens
  CDR3 for beta chain variable domain of TCR clone 295013 (TRBV4-1, TRBJ2-2)
CASSQENTGELFF

SEQ ID NO: 590027 - protein, 18 aa, Homo sapiens
  CDR3 for alpha chain variable domain of TCR clone 295014 (TRAV13-1, TRAJ52)
CAAKNPNAGGTSYGKLTL

SEQ ID NO: 590028 - protein, 14 aa, Homo sapiens
  CDR3 for beta chain variable domain of TCR clone 295014 (TRBV7-8, TRBJ2-3)
CASSLEAGTDTQYF

SEQ ID NO: 590029 - protein, 16 aa, Homo sapiens
  CDR3 for alpha chain variable domain of TCR clone 295015 (TRAV1-2, TRAJ10)
CAVRGVLTGGGNKLTF

SEQ ID NO: 590030 - protein, 13 aa, Homo sapiens
  CDR3 for beta chain variable domain of TCR clone 295015 (TRBV4-1, TRBJ2-1)
CASSQVNEYEHFF

SEQ ID NO: 590031 - protein, 20 aa, Homo sapiens
  CDR3 for alpha chain variable domain of TCR clone 295016 (TRAV25, TRAJ21)
TATQTTDVGTYPLSFNKFYF

SEQ ID NO: 590032 - protein, 15 aa, Homo sapiens
  CDR3 for beta chain variable domain of TCR clone 295016 (TRBV5-1, TRBJ2-7)
CASSLYPDGGYEQYF

SEQ ID NO: 590033 - protein, 15 aa, Homo sapiens
  CDR3 for alpha chain variable domain of TCR clone 295017 (TRAV27, TRAJ38)
CAARRNAGNNRKLIW

SEQ ID NO: 590034 - protein, 12 aa, Homo sapiens
  CDR3 for beta chain variable domain of TCR clone 295017 (TRBV4-3, TRBJ2-1)
CASSLSGYEQFF

SEQ ID NO: 590035 - protein, 11 aa, Homo sapiens
  CDR3 for alpha chain variable domain of TCR clone 295018 (TRAV21, TRAJ20)
CAVRDDYKLSF

SEQ ID NO: 590036 - protein, 16 aa, Homo sapiens
  CDR3 for beta chain variable domain of TCR clone 295018 (TRBV4-2, TRBJ2-3)
CASSQELAGDTDTQYF

SEQ ID NO: 590037 - protein, 17 aa, Homo sapiens
  CDR3 for alpha chain variable domain of TCR clone 295019 (TRAV12-3, TRAJ6)
CAMSARGGGGGSYIPTV

SEQ ID NO: 590038 - protein, 12 aa, Homo sapiens
  CDR3 for beta chain variable domain of TCR clone 295019 (TRBV12-4, TRBJ2-3)
CASSTLPDTQYF

SEQ ID NO: 590039 - protein, 13 aa, Homo sapiens
  CDR3 for alpha chain variable domain of TCR clone 295020 (TRAV13-1, TRAJ4)
CAASIGGYNKLIF

SEQ ID NO: 590040 - protein, 16 aa, Homo sapiens
  CDR3 for beta chain variable domain of TCR clone 295020 (TRBV20-1, TRBJ2-1)
CSAPGLAGSYRDEQFF

SEQ ID NO: 590041 - protein, 17 aa, Homo sapiens
  CDR3 for alpha chain variable domain of TCR clone 295021 (TRAV3, TRAJ6)
CAVRDGPRAGGSYITTF

SEQ ID NO: 590042 - protein, 14 aa, Homo sapiens
  CDR3 for beta chain variable domain of TCR clone 295021 (TRBV7-2, TRBJ2-7)
CASSPETSFYEQYF

SEQ ID NO: 590043 - protein, 14 aa, Homo sapiens
  CDR3 for alpha chain variable domain of TCR clone 295022 (TRAV3, TRAJ8)
CAVSLNTGFQKLVF

SEQ ID NO: 590044 - protein, 14 aa, Homo sapiens
  CDR3 for beta chain variable domain of TCR clone 295022 (TRBV2, TRBJ2-7)
CASSLTSGGYEQYF

SEQ ID NO: 590045 - protein, 11 aa, Homo sapiens
  CDR3 for alpha chain variable domain of TCR clone 295023 (TRAV21, TRAJ34)
CAGTNTDKLIF

SEQ ID NO: 590046 - protein, 12 aa, Homo sapiens
  CDR3 for beta chain variable domain of TCR clone 295023 (TRBV7-9, TRBJ1-1)
CASSLVRGEAFF

SEQ ID NO: 590047 - protein, 13 aa, Homo sapiens
  CDR3 for alpha chain variable domain of TCR clone 295024 (TRAV8-1, TRAJ30)
CAVIMNRDDEIIF

SEQ ID NO: 590048 - protein, 13 aa, Homo sapiens
  CDR3 for beta chain variable domain of TCR clone 295024 (TRBV4-2, TRBJ1-1)
CASSQAGNTEAFF

SEQ ID NO: 590049 - protein, 12 aa, Homo sapiens
  CDR3 for alpha chain variable domain of TCR clone 295025 (TRAV21, TRAJ49)
CAVNDGGNQFYF

SEQ ID NO: 590050 - protein, 14 aa, Homo sapiens
  CDR3 for beta chain variable domain of TCR clone 295025 (TRBV12-5, TRBJ2-5)
CASGSRTHQETQYL

SEQ ID NO: 590051 - protein, 14 aa, Homo sapiens
  CDR3 for alpha chain variable domain of TCR clone 295026 (TRAV12-2, TRAJ17)
CAVLFKAAGNKLTF

SEQ ID NO: 590052 - protein, 14 aa, Homo sapiens
  CDR3 for beta chain variable domain of TCR clone 295026 (TRBV20-1, TRBJ1-3)
CSASPTGAGNTIYF

SEQ ID NO: 590053 - protein, 15 aa, Homo sapiens
  CDR3 for alpha chain variable domain of TCR clone 295027 (TRAV26-1, TRAJ3)
CIVRLGYSSASKIIF

SEQ ID NO: 590054 - protein, 14 aa, Homo sapiens
  CDR3 for beta chain variable domain of TCR clone 295027 (TRBV13, TRBJ2-5)
CASYRRLAEETQYF

SEQ ID NO: 590055 - protein, 12 aa, Homo sapiens
  CDR3 for alpha chain variable domain of TCR clone 295028 (TRAV20, TRAJ33)
CAVRGSNYQLIW

SEQ ID NO: 590056 - protein, 13 aa, Homo sapiens
  CDR3 for beta chain variable domain of TCR clone 295028 (TRBV4-3, TRBJ1-1)
WASSPTGNTEAFF

SEQ ID NO: 590057 - protein, 15 aa, Homo sapiens
  CDR3 for alpha chain variable domain of TCR clone 295029 (TRAV8-4, TRAJ10)
CAVSDGPGGGNKLTL

SEQ ID NO: 590058 - protein, 13 aa, Homo sapiens
  CDR3 for beta chain variable domain of TCR clone 295029 (TRBV28, TRBJ1-3)
CASSFLGSGTIYF

SEQ ID NO: 590059 - protein, 17 aa, Homo sapiens
  CDR3 for alpha chain variable domain of TCR clone 295030 (TRAV17, TRAJ7)
CATLGRLAFGKGNQVVG

SEQ ID NO: 590060 - protein, 13 aa, Homo sapiens
  CDR3 for beta chain variable domain of TCR clone 295030 (TRBV12-4, TRBJ2-7)
CASSLGRVREQYF

SEQ ID NO: 590061 - protein, 17 aa, Homo sapiens
  CDR3 for alpha chain variable domain of TCR clone 295031 (TRAV38-1, TRAJ45)
CAFMKHYMGGGADGLTF

SEQ ID NO: 590062 - protein, 19 aa, Homo sapiens
  CDR3 for beta chain variable domain of TCR clone 295031 (TRBV6-1, TRBJ2-5)
GASSEQGLAGGLYQETQYF

SEQ ID NO: 590063 - protein, 12 aa, Homo sapiens
  CDR3 for alpha chain variable domain of TCR clone 295032 (TRAV13-1, TRAJ17)
CAARTAVNKLTF

SEQ ID NO: 590064 - protein, 15 aa, Homo sapiens
  CDR3 for beta chain variable domain of TCR clone 295032 (TRBV7-6, TRBJ1-1)
CASSPQGGANTEAFF

SEQ ID NO: 590065 - protein, 16 aa, Homo sapiens
  CDR3 for alpha chain variable domain of TCR clone 295033 (TRAV16, TRAJ4)
CALSRMFSGGYNKLIF

SEQ ID NO: 590066 - protein, 16 aa, Homo sapiens
  CDR3 for beta chain variable domain of TCR clone 295033 (TRBV24-1, TRBJ2-3)
CATSGPGTGATDTQYI

SEQ ID NO: 590067 - protein, 14 aa, Homo sapiens
  CDR3 for alpha chain variable domain of TCR clone 295034 (TRAV1-2, TRAJ16)
CAVNRFSGGQKLLF

SEQ ID NO: 590068 - protein, 11 aa, Homo sapiens
  CDR3 for beta chain variable domain of TCR clone 295034 (TRBV29-1, TRBJ2-5)
CREDRTGTQYF

SEQ ID NO: 590069 - protein, 15 aa, Homo sapiens
  CDR3 for alpha chain variable domain of TCR clone 295035 (TRAV27, TRAJ38)
CAGRFNAGNNRKLIW

SEQ ID NO: 590070 - protein, 13 aa, Homo sapiens
  CDR3 for beta chain variable domain of TCR clone 295035 (TRBV10-1, TRBJ1-1)
CASQGQTNTEAFF

SEQ ID NO: 590071 - protein, 18 aa, Homo sapiens
  CDR3 for alpha chain variable domain of TCR clone 295036 (TRAV3, TRAJ17)
CAVRARRGGRSCRQQANF

SEQ ID NO: 590072 - protein, 14 aa, Homo sapiens
  CDR3 for beta chain variable domain of TCR clone 295036 (TRBV4-1, TRBJ2-7)
CASSPVAGGDEQYF

SEQ ID NO: 590073 - protein, 20 aa, Homo sapiens
  CDR3 for alpha chain variable domain of TCR clone 295037 (TRAV26-1, TRAJ42)
CCVLLHRQTYYGGSQGNLIF

SEQ ID NO: 590074 - protein, 17 aa, Homo sapiens
  CDR3 for beta chain variable domain of TCR clone 295037 (TRBV18, TRBJ2-1)
CASSKGLSGGADNEQFF

SEQ ID NO: 590075 - protein, 16 aa, Homo sapiens
  CDR3 for alpha chain variable domain of TCR clone 295038 (TRAV13-1, TRAJ10)
CAASSHFTGGGTKLTF

SEQ ID NO: 590076 - protein, 15 aa, Homo sapiens
  CDR3 for beta chain variable domain of TCR clone 295038 (TRBV7-9, TRBJ1-6)
CASSSPGRGNSPLHF

SEQ ID NO: 590077 - protein, 12 aa, Homo sapiens
  CDR3 for alpha chain variable domain of TCR clone 295039 (TRAV3, TRAJ43)
CAVRGHNNDMRF

SEQ ID NO: 590078 - protein, 15 aa, Homo sapiens
  CDR3 for beta chain variable domain of TCR clone 295039 (TRBV27, TRBJ1-5)
CASSLGTGFDQPQHF

SEQ ID NO: 590079 - protein, 11 aa, Homo sapiens
  CDR3 for alpha chain variable domain of TCR clone 295040 (TRAV2, TRAJ33)
CAVEGSYQLIW

SEQ ID NO: 590080 - protein, 12 aa, Homo sapiens
  CDR3 for beta chain variable domain of TCR clone 295040 (TRBV11-2, TRBJ2-2)
CASSLGGGELFF

SEQ ID NO: 590081 - protein, 14 aa, Homo sapiens
  CDR3 for alpha chain variable domain of TCR clone 295041 (TRAV1-2, TRAJ16)
CAVNRFSDGQKLLF

SEQ ID NO: 590082 - protein, 13 aa, Homo sapiens
  CDR3 for beta chain variable domain of TCR clone 295041 (TRBV2, TRBJ2-2)
CASRAWRTGELFF

SEQ ID NO: 590083 - protein, 15 aa, Homo sapiens
  CDR3 for alpha chain variable domain of TCR clone 295042 (TRAV3, TRAJ17)
RAVSPKEAAGNTLTF

SEQ ID NO: 590084 - protein, 12 aa, Homo sapiens
  CDR3 for beta chain variable domain of TCR clone 295042 (TRBV7-9, TRBJ1-6)
CASSLMTSPLHF

SEQ ID NO: 590085 - protein, 11 aa, Homo sapiens
  CDR3 for alpha chain variable domain of TCR clone 295043 (TRAV21, TRAJ4)
HVSGGYNKLIF

SEQ ID NO: 590086 - protein, 13 aa, Homo sapiens
  CDR3 for beta chain variable domain of TCR clone 295043 (TRBV7-3, TRBJ2-5)
CASSLSAGETQYF

SEQ ID NO: 590087 - protein, 12 aa, Homo sapiens
  CDR3 for alpha chain variable domain of TCR clone 295044 (TRAV1-1, TRAJ39)
CAVPVVGNMLTF

SEQ ID NO: 590088 - protein, 16 aa, Homo sapiens
  CDR3 for beta chain variable domain of TCR clone 295044 (TRBV28, TRBJ2-7)
CVSSPWVATGDLSQYF

SEQ ID NO: 590089 - protein, 14 aa, Homo sapiens
  CDR3 for alpha chain variable domain of TCR clone 295045 (TRAV17, TRAJ39)
CATDPVRAGNMLTF

SEQ ID NO: 590090 - protein, 12 aa, Homo sapiens
  CDR3 for beta chain variable domain of TCR clone 295045 (TRBV6-3, TRBJ2-7)
CASSLTPYEQYF

SEQ ID NO: 590091 - protein, 14 aa, Homo sapiens
  CDR3 for alpha chain variable domain of TCR clone 295046 (TRAV1-2, TRAJ16)
CAVNRFSDCQKLLF

SEQ ID NO: 590092 - protein, 16 aa, Homo sapiens
  CDR3 for beta chain variable domain of TCR clone 295046 (TRBV19, TRBJ2-3)
CASSPEWDRGTDTQYF

SEQ ID NO: 590093 - protein, 14 aa, Homo sapiens
  CDR3 for alpha chain variable domain of TCR clone 295047 (TRAV26-1, TRAJ38)
CIADNAGNNRKLIW

SEQ ID NO: 590094 - protein, 16 aa, Homo sapiens
  CDR3 for beta chain variable domain of TCR clone 295047 (TRBV20-1, TRBJ2-7)
CSDSTSGRLSSYEQYF

SEQ ID NO: 590095 - protein, 14 aa, Homo sapiens
  CDR3 for alpha chain variable domain of TCR clone 295048 (TRAV20, TRAJ29)
CAVQESFRKHTSCL

SEQ ID NO: 590096 - protein, 16 aa, Homo sapiens
  CDR3 for beta chain variable domain of TCR clone 295048 (TRBV5-4, TRBJ2-1)
CASSLVGSGQDNEQFF

SEQ ID NO: 590097 - protein, 16 aa, Homo sapiens
  CDR3 for alpha chain variable domain of TCR clone 295049 (TRAV8-1, TRAJ39)
CAVNVPSYNAGNRLTF

SEQ ID NO: 590098 - protein, 15 aa, Homo sapiens
  CDR3 for beta chain variable domain of TCR clone 295049 (TRBV4-1, TRBJ2-3)
CASRSTRAGTDTQYF

SEQ ID NO: 590099 - protein, 12 aa, Homo sapiens
  CDR3 for alpha chain variable domain of TCR clone 295050 (TRAV17, TRAJ20)
CATDSNDYKLSF

SEQ ID NO: 590100 - protein, 17 aa, Homo sapiens
  CDR3 for beta chain variable domain of TCR clone 295050 (TRBV5-1, TRBJ2-2)
CASSLARLSGGTGELFF

SEQ ID NO: 590101 - protein, 14 aa, Homo sapiens
  CDR3 for alpha chain variable domain of TCR clone 295051 (TRAV17, TRAJ11)
CATDTSRGYSTLLF

SEQ ID NO: 590102 - protein, 13 aa, Homo sapiens
  CDR3 for beta chain variable domain of TCR clone 295051 (TRBV19, TRBJ2-5)
CASRDSRRETQYF

SEQ ID NO: 590103 - protein, 13 aa, Homo sapiens
  CDR3 for alpha chain variable domain of TCR clone 295052 (TRAV39, TRAJ48)
CAAVNFGNEQLTF

SEQ ID NO: 590104 - protein, 12 aa, Homo sapiens
  CDR3 for beta chain variable domain of TCR clone 295052 (TRBV5-5, TRBJ2-5)
CASSYFGETQYF

SEQ ID NO: 590105 - protein, 15 aa, Homo sapiens
  CDR3 for alpha chain variable domain of TCR clone 295053 (TRAV38-1, TRAJ57)
CAFMDSQGGSEKLVF

SEQ ID NO: 590106 - protein, 16 aa, Homo sapiens
  CDR3 for beta chain variable domain of TCR clone 295053 (TRBV10-3, TRBJ2-1)
CAIRGGGRGDYNEQFL

SEQ ID NO: 590107 - protein, 12 aa, Homo sapiens
  CDR3 for alpha chain variable domain of TCR clone 295054 (TRAV1-2, TRAJ42)
CVAGGSQGTLIF

SEQ ID NO: 590108 - protein, 14 aa, Homo sapiens
  CDR3 for beta chain variable domain of TCR clone 295054 (TRBV5-4, TRBJ2-5)
CASSLVRGQETQYF

SEQ ID NO: 590109 - protein, 13 aa, Homo sapiens
  CDR3 for alpha chain variable domain of TCR clone 295055 (TRAV12-1, TRAJ16)
CVVNGPDGQKLLF

SEQ ID NO: 590110 - protein, 13 aa, Homo sapiens
  CDR3 for beta chain variable domain of TCR clone 295055 (TRBV7-8, TRBJ2-7)
CASSLTGGREQYF

SEQ ID NO: 590111 - protein, 16 aa, Homo sapiens
  CDR3 for alpha chain variable domain of TCR clone 295056 (TRAV3, TRAJ37)
CAVRPHGSGNTGKLIV

SEQ ID NO: 590112 - protein, 17 aa, Homo sapiens
  CDR3 for beta chain variable domain of TCR clone 295056 (TRBV7-2, TRBJ2-7)
CASGFETSGSTSSTSGR

SEQ ID NO: 590113 - protein, 15 aa, Homo sapiens
  CDR3 for alpha chain variable domain of TCR clone 295057 (TRAV13-2, TRAJ50)
CAEEPLKTSYDKVIF

SEQ ID NO: 590114 - protein, 15 aa, Homo sapiens
  CDR3 for beta chain variable domain of TCR clone 295057 (TRBV20-1, TRBJ1-5)
CSARGSVDSNQPQHS

SEQ ID NO: 590115 - protein, 13 aa, Homo sapiens
  CDR3 for alpha chain variable domain of TCR clone 295058 (TRAV27, TRAJ18)
CAGRGSTLGRLYF

SEQ ID NO: 590116 - protein, 14 aa, Homo sapiens
  CDR3 for beta chain variable domain of TCR clone 295058 (TRBV5-1, TRBJ2-3)
CASSASGGKDTQYF

SEQ ID NO: 590117 - protein, 16 aa, Homo sapiens
  CDR3 for alpha chain variable domain of TCR clone 295059 (TRAV1-2, TRAJ27)
CAVREPQTPMQANQHL

SEQ ID NO: 590118 - protein, 13 aa, Homo sapiens
  CDR3 for beta chain variable domain of TCR clone 295059 (TRBV6-1, TRBJ1-2)
CASSAREGYGYTF

SEQ ID NO: 590119 - protein, 11 aa, Homo sapiens
  CDR3 for alpha chain variable domain of TCR clone 295060 (TRAV26-1, TRAJ37)
CIVRVGRKLIF

SEQ ID NO: 590120 - protein, 13 aa, Homo sapiens
  CDR3 for beta chain variable domain of TCR clone 295060 (TRBV14, TRBJ1-2)
CASSDDRRYGYTF

SEQ ID NO: 590121 - protein, 13 aa, Homo sapiens
  CDR3 for alpha chain variable domain of TCR clone 295061 (TRAV21, TRAJ15)
CAVRNQAGTALIF

SEQ ID NO: 590122 - protein, 13 aa, Homo sapiens
  CDR3 for beta chain variable domain of TCR clone 295061 (TRBV7-9, TRBJ1-2)
CASSLKQNYGYTF

SEQ ID NO: 590123 - protein, 11 aa, Homo sapiens
  CDR3 for alpha chain variable domain of TCR clone 295062 (TRAV12-3, TRAJ43)
CAMSVSNGMRF

SEQ ID NO: 590124 - protein, 15 aa, Homo sapiens
  CDR3 for beta chain variable domain of TCR clone 295062 (TRBV5-1, TRBJ2-1)
CASSPPRAPYSEQFF

SEQ ID NO: 590125 - protein, 14 aa, Homo sapiens
  CDR3 for alpha chain variable domain of TCR clone 295063 (TRAV12-2, TRAJ11)
CAVEGGSGYSTLTF

SEQ ID NO: 590126 - protein, 17 aa, Homo sapiens
  CDR3 for beta chain variable domain of TCR clone 295063 (TRBV7-8, TRBJ2-6)
CASSAGTGGAGANVLTF

SEQ ID NO: 590127 - protein, 13 aa, Homo sapiens
  CDR3 for alpha chain variable domain of TCR clone 295064 (TRAV2, TRAJ40)
CAVVTSGTNKYIF

SEQ ID NO: 590128 - protein, 14 aa, Homo sapiens
  CDR3 for beta chain variable domain of TCR clone 295064 (TRBV19, TRBJ2-1)
RASPTFVLSGEQFF

SEQ ID NO: 590129 - protein, 17 aa, Homo sapiens
  CDR3 for alpha chain variable domain of TCR clone 295065 (TRAV3, TRAJ6)
CAVIDGPRAGGSYITTF

SEQ ID NO: 590130 - protein, 14 aa, Homo sapiens
  CDR3 for beta chain variable domain of TCR clone 295065 (TRBV7-2, TRBJ2-7)
CASSPKTSFYEQYF

SEQ ID NO: 590131 - protein, 15 aa, Homo sapiens
  CDR3 for alpha chain variable domain of TCR clone 295066 (TRAV13-1, TRAJ45)
CAAPYSGGGADGLTF

SEQ ID NO: 590132 - protein, 13 aa, Homo sapiens
  CDR3 for beta chain variable domain of TCR clone 295066 (TRBV28, TRBJ2-7)
CASSFGQIYEQCF

SEQ ID NO: 590133 - protein, 14 aa, Homo sapiens
  CDR3 for alpha chain variable domain of TCR clone 295067 (TRAV20, TRAJ29)
CAVQAWVGNTPLVL

SEQ ID NO: 590134 - protein, 15 aa, Homo sapiens
  CDR3 for beta chain variable domain of TCR clone 295067 (TRBV29-1, TRBJ2-7)
CSVEFCDRGSYEQYF

SEQ ID NO: 590135 - protein, 14 aa, Homo sapiens
  CDR3 for alpha chain variable domain of TCR clone 295068 (TRAV35, TRAJ22)
CAGLRPGSARQLTF

SEQ ID NO: 590136 - protein, 15 aa, Homo sapiens
  CDR3 for beta chain variable domain of TCR clone 295068 (TRBV7-9, TRBJ1-5)
CASSQGHQPNQPQHF

SEQ ID NO: 590137 - protein, 15 aa, Homo sapiens
  CDR3 for alpha chain variable domain of TCR clone 295069 (TRAV26-1, TRAJ17)
CIVRVGKAAGNKLTF

SEQ ID NO: 590138 - protein, 16 aa, Homo sapiens
  CDR3 for beta chain variable domain of TCR clone 295069 (TRBV7-9, TRBJ2-1)
YASSLVSGPAYNEQFF

SEQ ID NO: 590139 - protein, 12 aa, Homo sapiens
  CDR3 for alpha chain variable domain of TCR clone 295070 (TRAV8-4, TRAJ43)
CSVGVNNNDMRF

SEQ ID NO: 590140 - protein, 16 aa, Homo sapiens
  CDR3 for beta chain variable domain of TCR clone 295070 (TRBV7-2, TRBJ2-6)
CASSLAGRSGANVLTF

SEQ ID NO: 590141 - protein, 15 aa, Homo sapiens
  CDR3 for alpha chain variable domain of TCR clone 295071 (TRAV36/DV7, TRAJ53)
CAVAGSGGSNYKLTF

SEQ ID NO: 590142 - protein, 12 aa, Homo sapiens
  CDR3 for beta chain variable domain of TCR clone 295071 (TRBV7-8, TRBJ2-1)
CASSLGHNEQFF

SEQ ID NO: 590143 - protein, 10 aa, Homo sapiens
  CDR3 for alpha chain variable domain of TCR clone 295072 (TRAV21, TRAJ11)
CCERIQHLTF

SEQ ID NO: 590144 - protein, 11 aa, Homo sapiens
  CDR3 for beta chain variable domain of TCR clone 295072 (TRBV19, TRBJ1-1)
CASSIGSEAFF

SEQ ID NO: 590145 - protein, 12 aa, Homo sapiens
  CDR3 for alpha chain variable domain of TCR clone 295073 (TRAV3, TRAJ43)
CAVRDPNNDMRF

SEQ ID NO: 590146 - protein, 15 aa, Homo sapiens
  CDR3 for beta chain variable domain of TCR clone 295073 (TRBV6-5, TRBJ2-1)
CASSDDAGAGNEQFF

SEQ ID NO: 590147 - protein, 14 aa, Homo sapiens
  CDR3 for alpha chain variable domain of TCR clone 295074 (TRAV29/DV5, TRAJ36)
CAARRKTGANNLFF

SEQ ID NO: 590148 - protein, 16 aa, Homo sapiens
  CDR3 for beta chain variable domain of TCR clone 295074 (TRBV12-5, TRBJ2-5)
CASGTRTSGNQETQYF

SEQ ID NO: 590149 - protein, 10 aa, Homo sapiens
  CDR3 for alpha chain variable domain of TCR clone 295075 (TRAV8-6, TRAJ26)
CGGDGQNFVF

SEQ ID NO: 590150 - protein, 14 aa, Homo sapiens
  CDR3 for beta chain variable domain of TCR clone 295075 (TRBV20-1, TRBJ2-4)
CSAVAGGPGNSQYF

SEQ ID NO: 590151 - protein, 14 aa, Homo sapiens
  CDR3 for alpha chain variable domain of TCR clone 295076 (TRAV1-1, TRAJ27)
CAVIYNTNAGKSTF

SEQ ID NO: 590152 - protein, 13 aa, Homo sapiens
  CDR3 for beta chain variable domain of TCR clone 295076 (TRBV12-5, TRBJ1-2)
CANGVRTGNGYTF

SEQ ID NO: 590153 - protein, 14 aa, Homo sapiens
  CDR3 for alpha chain variable domain of TCR clone 295077 (TRAV13-1, TRAJ35)
CAASKGGFGNVLHC

SEQ ID NO: 590154 - protein, 15 aa, Homo sapiens
  CDR3 for beta chain variable domain of TCR clone 295077 (TRBV6-5, TRBJ1-2)
CASSYSQAFNYGYTF

SEQ ID NO: 590155 - protein, 12 aa, Homo sapiens
  CDR3 for alpha chain variable domain of TCR clone 295078 (TRAV27, TRAJ20)
CAGASNDYKLSF

SEQ ID NO: 590156 - protein, 14 aa, Homo sapiens
  CDR3 for beta chain variable domain of TCR clone 295078 (TRBV15, TRBJ2-5)
CATSGDRGQETQYF

SEQ ID NO: 590157 - protein, 12 aa, Homo sapiens
  CDR3 for alpha chain variable domain of TCR clone 295079 (TRAV35, TRAJ31)
CAAASNNARLMF
